United States Patent Application Publication US 2019/0348154 A1 - sequence listing, part 33

SEQ ID NO: 122595 - DNA, 1956 bp, Enterobacter cloacae
atgcgtgagcggttttctcccgtgctgcgtaacgatgccagtgcgttgctctattccgcgagaagttttgcagcggcgatgctcgcttactacattgcgctgtcgataggcctcgaacgtccatcgtgggccattattaccgtctatatcgtttcgcagacgtcggtaggggcctcgctgagcagaagtctctatcgtctggccggcaccgttgtgggggcctgcgccaccgttgcgatcgtacctgtcttcgtcaatatgccgatcctctgcagcgtgatgctgtcgggctggatcacgttctgcctctatttatctctgctggagcgcaccccgcgggcgtatgcctttgtgctggccgggtacactgcgagcctgattggttttcctgcggtatccgaccccggcgggatttttaatatcgctattatccgtgtgcaggagattgtcattgggatcttctgcgtggcgctgatacatcgctatgtgttacccgcgcgtatctccggcctgttcaacagtaagttatcgcaaaccctgcacgccgcgcgtgagcgggtggctgacaccctcgcaggcaaacccgtcgcggtttcagacccgctgcatctggcgctggcgctgcagtttctgcagggtataagccaccatattccgtatgattttgccctgtctgctccggtgcggcagggcagaaaggctatccatgaccgactggcgcggctggtcatcgtcaactgtgaattacgcgatcgcttaccggcgacggtgcctgccgggttgcaggtattgctcgacgacgttcaggcctggctgggggataaagatgctgcacgccacagcacggcagatgcgttaatagcacgcagtgaacagctcgcagagcgctacgctgaacaggcccggacgatgaacgacgcgctgctggccagttttgtccgttatctgacgcaggccattacgctgttgcagcagtgcgaacgtctttctgatgccatccaccatgcgaagcccgcccacggactgacggcgggcagggcagttaaagggtatgtttttcaccgcgatcctcttactgccgcccgcacctcgctgggcgcgttcgccatcatcctgagcggctgcctggtctggatcttctccgcctggcccgatggcagcacggcggtctctatccttggggtctgctgcacgctgtttggcagtttcgacaccccggctccgcacattgtgaaatacattattggctcgttctggggcgtattgattagcctgctgtacagctttgcgctgcttccgcaggtgagcgatttccccgtgctggtggccgtgctggcgccggtatatttgctggccgggtcgcttcaggcacgtcctcccaccacgtttatggcaatggggatcaccctgacgctgccggtattgtgcgagctgggtgcccactacagcggagattttgccacggcggccaataccgccattgcgctgtttgccgcaaccggctttgctgttatcagcatgagcctgctgcaaaccgtgcaggccgacgcggccattgcacgtctgcacacgctgtgccagcgcgatattcgtcgcagcgtgaagggcaagcttctgctggatgagacgcactggaccaatctgatgattgaccgcgctgccctgttactgccgcgcctgcagcgcagcgggcgtgcctcagagcaggtgcttaacccgctgctgcgcgcgctgcgcatcggcctttcggtgatgcatttacgccgctgcggtatgcccgcgagcagagagattagcgcgcgcctgtatcacctgaacgacaccgacgccttgcgtgaacacatcggcgaccacatccgcctctgtttgcctgccgcagatgcacaaacgcgccagtttgtcggccatctggtggatttgcattgcgcattacggagggcagacgatggtcaatga

SEQ ID NO: 122596 - DNA, 216 bp, Enterobacter cloacae
atggtcaatgatctgaatatcgggggcgtttttatcccgggactgcttgtcaccgcgctcgcggcgctggcctgcacgctggcactcatcgcgcttttatcgctcagcaggctctaccgtcgtttgccttttcgcccgctgctggacgtttcaacttatctggtcacctttttcctgctgatgcagggcctgaccgcgctggggttatttagatga

SEQ ID NO: 122597 - DNA, 867 bp, Enterobacter cloacae
atgaaatcactactttctctggtcggtcgctatgcgctgacgttatgtgccgtcgtggcggccacgcttctggcttttatgatgtggaaacattatgcgcaaacgccctggacccgcgacggccgggtacgggcggatgtggtacagattgcgccggacgtatccgggccggtaatccgcgtggccgtccgggataaccagtgggttaaccggggcgatgtgctctacgctatcgacccgcactggctcacgctggcggtggccagcgcgcaggcggaggtggaatccagacggcatgagatggtgatgcgacaggatgccgccagacgacgcgcacagattaaagccgcgatatccagcgaggatttacagcaaacgggcagcgccgcgaacgtcgcggtggcgaattatcacggtgcgcaggccgcgctggagctggccgagcttaatttgtcccatgccaccgtacgggctcccgtctcgggttatatcacccatctgcggcttcgtccgggggactatgctaccgcgggggagactaaggtcgccatcgtcgatgcgcacagtttctgggtggtagggtatttcgaggagaccaaacttcgctatattcgcgttggggacacggcgcatatcgtgttgatgggctatgaaccggtgattgccgggcatgtcgagagcatcggccatgggatcggtgataacaacgatgagacgggcgggcttgggcttcccgacgtcgagccgacgtttagctgggtgcggctggcgcagcgcgtcccggtgcgcatacatattgatgcattgccgaagggggttgagctggtagccgggttgtcggcgagcgtggaggtggtgccggaataa

SEQ ID NO: 122598 - DNA, 693 bp, Enterobacter cloacae
atgaacgtaacgccacgtgttttattcgcctctgtgatttcactgtgcgcttccggcccggtactggctgccgaaaacgttaaagaaggttattacggcgccctgaacctgattgacacccatcagaaggccaagagcatgaacctgagcgaacgcccggggatcggttcatttgtggccggggacgaaaaagagcacaagctgaacggttccgtggccgctggctatcagttcggcaataactggcgtaccgaagcggaatatgtgtttaaagaaaaaacagaattcaccagcggctcttccacgtttgcgaccagtttcaaccacatgaaagttgattctgaacgtgcaatgctcaacgtttatcgtgactttatgatcaccgacaaattcgccctgtacgcaacggcgggtgctggtgtggcgaaagtgaaagtgggtggctggcagggtaatgacacccgcgagtttgctggcaacacgcaaaccaactttacctactccgtgggtgcaggtgcgtcttatgaagttatcgacgatctgaccctgtacgccacttatcgttatgtcgatatgggcaatatcgaaagcggccgtaacacctttgtcaacgcccgcagtctgcaggatgaaaacctgcgtggacgcctggtgaacaatgaatttgtattcggcgtgcgctacgtcctgtaa

SEQ ID NO: 122599 - DNA, 474 bp, Enterobacter cloacae
gtgaaaaaaacatttcttattctgcctgtgctcacggcattaaccatgactgcgcacgctaaatcattgacgcagtccaccctgtctctggaacaggcatctgtactcgccagcgaagccgttaaatcgtgcagcgctaaaggctataacgtcagcgtaacggttgtcgatgctgcaggtctcacccgcgcggtacagcgtatggataacgccgggccacacaccctgacagccagctatcagaaagcgtttacctctgcgtccagcggagcggcgaccagccagcttctggaaaactcaaataagtacccggcggcgaaaaacctcggcgatatcccgggtttcttattactggctggcggcgtaccggttaaagaaaataacgccaccatcggtgccattggtattggcggcgcgccgagtggtgatattgatgaagcctgcgcactcgacgctattaaaaagctgaaataa

SEQ ID NO: 122600 - DNA, 774 bp, Enterobacter cloacae
gtgacggaatccccttcggcggcacgcccgctacgcatactgactgtagacgatcacccggcaagccggctcctgctcaggcagcaattgatccgcctggggtatgaggttgtcgaggcagaaaacggcgaacaagcccttgtgcgctggagcgaacagcaggttgatatggtcatcaccgattgtaatatgccggtgatggacgggctaaccctcacccggctgttacgggaacggcagcaaaaaccgttaattatccttggtctcactgcgaatgctcagcccgaagagcgtagccgctgtattgccgcaggtatggacgactgccttttcaaaccgctcaatctgaagcaactggaggcgggtctacagcgggtatccccaaaagaggcgactacaaaacttgctgacccgaaaggcctcggccagtttatccgtgtggacaatcttcggtcgttaaccggcgatgacaataccttattgttcaccctgctgaatgccactcgggatgaaaaccaacgcgacatgcaaccctgccttacgctggcccgtcagggcgactgggcagtgctggcgtatcacgtacatcgcctggccggtgccgccgatatcattggcgcaactgcgatagcgcagcagtgtcgcagtcttgaaaaggcatgcgaagggacaacgctgcccgtcgagtctgacattgtgccccgcctccagaccctgctcagggacgtcgcggcgctgaatcaggcgattacagccttcaccacaccacgctaa

SEQ ID NO: 122601 - DNA, 627 bp, Enterobacter cloacae
atgaatagcgtattaatcgtggatgaccacccggttgcccgtctggcggtgagaatgttgctggaaaaagacgggatgacggtgatcggcgagactgatgatggccttaaggcattacaacaggcacgtcagttacttccggatttggttattgtcgatatcgatattcctacaattaatgggattaacgttgttcagcgactccgtgcgaatgattttaaaggcgggatcctggttctgacgggtaaagatgacgatcattatattaagcgttgtgccggtgcgggcgccgatgggtttattagcaagcgcaataatctgacggaacttcatgacgctatccatgcaatcaaaagtggctatggttttttcccgattaaccgcgcccgccagattgccgcagaggatattccactggatgacaaagggaatattgccagtctgtcggataaggaactgcaggttctgcattttctggcaaaaggaagccggattgtcgatatcgccggggaaatgatgatcagtgataaaacggtcagcacctataaaagccgcctgatgaaaaagctcgatcttaaaagcccgaaagacatttatgattttgccctgcgcaacaaaatagaatga

SEQ ID NO: 122602 - DNA, 729 bp, Enterobacter cloacae
atgaaaacgattttccgtaccgcactgttggtgagcatgatgagcgcattttccagccaggccaccgcacaggagacaaatcaggtgaatacaaaaacaattcgcgcgatgtcaggcgctgttgctacgacgtctttatccgcagctgaaaccgcgttaatcgtggtggatattcagaatgaatattacgcgggtcaggacttccgcggccggatggttatcccggatggcgcggatgtgctgttgaaaaacaaaaagctggtcgagtatgcacaccaaaaagggatgccggtctactttgtgcgccacataacaaaaaatagcccgcagcaaaacggtacgccgctgttcgctgagaattccgtatttgcccagttccataaggatctgcagccgactgcgcaggacaccattattaccaaggagaccccgagcgctttcgtgggcaccgatctggatgcccgcttaaagaaacagggaattaaaaaggtcatcgtggcgggcctgatgacgcatatgtgtatctcatcgactgcacgtgatgctgtaccgctgggttatagcgtgattattccggaagatgcgacagccacgcgcgatctggatgacgggaaggggggcgtggtggatcacgacacgctgcagcgtgcagcgctggcaggcgtcgcggatgtctttgctgaaatcatgaccacggatcaggtgatggcgctggcggtggaaaaataa

SEQ ID NO: 122603 - DNA, 954 bp, Enterobacter cloacae
atgacattgaaaattggtatcgtagtctttgaaggcattattccttttcacctttcggtgccttatgccgtgtttgagaaagcactgacgccgcagggtgacgccctgtgtcagctcgtggtttgtgccactacacccggtgcgcttaaaaccaatgccggtttttccatcgtggtcgaccgaggtctggatgcgttagccgggatggatatggtgattgtgccgggctgggatgtgcccgagcatgcaccggagcctgaactgttaacggcgttacaaaacgcgcatgcagccgggtcccgcattgttgggttgtgtatgggcacgttcgtggtggccgccgcaggcctgctggaaaaccgtccggcaacgacacactggcgatgggcggcggactttcagcgtctttatccttcagtgcagatggataaagatgtgctttacattgatgatggcgatgttgtgacgtcagcaggaacggcagccagtatcgactgctgtttgcacctggtccgacaggcgtggggcgcggatgtcgccaaccgcgtggcgcgcttgctggtggtgccgcctcatcgtcagggcgggcagcggcagtttgtggagctgccggtgcagaatacgcgtcgtggagataacttcaccgacgcgctggcctgggcaacagagaatttacagctggccatcacgctggactgcgtggcagagaaagcctgcatgagccgccggagctttacccgccgctttcagcaaacgacgggggaatgtttttcaaactggcttttgaaccagcgcattctcgttgcccagcgctttcttgaaaaaaccgatcggccagtggaagatattgccgaacgcgtcggcttcccttccacgacctctttacggcgccactttcaaaagcagcttaatacctcaccttcccgctatcgtcgcgagtttcgtggtcgttag

SEQ ID NO: 122604 - DNA, 624 bp, Enterobacter cloacae
atgtcaggcaaaaaagtcattgtcatggacgccagcccactgcttcgcgctggactccagggcttattatcagaacatggtcatcagattgttgcgcagtttggcacaatggaagaattgctggataaacattcgttgttcaacgccgacttgataataatggagcatctgcaacaacagccagacgtgttttcttctctggctcagttaataaaaaatatccctgatacacaggtaatgattttatcctcatcatccagtgattttcacattcagcttagcaggaaggcgggggctgccggctatcttaataaaagcagtacgctggacaacctcgtccggactgtcaataaagtcgcatccggccagttctgttatggcaatgaactgaggctgcaccggacaaaatacccgcgagacgcctcgttgttgttatcgctatcccatactgacatctgtatcttgcgctacatttctgccggctacagcaatcaggtcattgccggcataatgaatataaataataaacgcgtcagcgcttataaaaagcgcatcatgctgaaatttaaaatatccaaattgactgaactggtggatctggcaaaacgtaattatctctattga

SEQ ID NO: 122605 - DNA, 5253 bp, Enterobacter cloacae
atgaatctcaagccagtaaatattgcagtcgttgataaaaatacgattgtcaaagccgacgttctgcgcagtgaaaaaataggcagtgccgtcaaaattaaagccatcccgaatgcaaaatacattcttgctgaaggggaaaacggcgttgcgccagaaaacattacccagaaacgtgtcggtaaagacctgttcatcatgctggaaggcactgatgaagatcagccgcagctgattatcgaagactactttgataatccgggtgaactggtcggtaaaggggaagatggtcagtggcatgaatacatcgccaccgacggtgatgatgaccacgaagctgctttcctgctggacggtgaatcctctgcgcaagcgctgggcgcaggcgcgattgccagccttgacggtctggcggttgcgggtaccgcgttttcccctgccttgctggcactgggtgcattagcggcgattggtgcggcgattggcatcggctccattatccgccataaccgtggcggcaatgacggtagtgataacggcgacgttattccccctccaccgacaggtcctggcaaaccaacgatcggcgaagttgaggatgacgttggcccgatcactggccctatccacaacggcgatgccactgacgacgcccagcctgttttccgtggcggtggtgcgaaccctggcgataccgttgagctgattgtcgacgatgaagtcgtgggcaccgcgatcgtgggtgaagacggcaactgggaagtgacgccagaaaaaccgctgccggaaggcgaacatgaagcggtggtggtcatcaccgatcctgagggtaacgccagcgaaccgtccgaccctattgatttcgtggtcgatctcaccccgccggaaaaaccggtgattggtgaggtggaagatgatgtcggtccggtggttggcccaatcaatgacggtgacaccactgatgacgccctgcctgtattccgcggtgaaaacggcacgccgggcgacaccgttgagctgatcatcgacgataaagtcgtgggtaccgcggtagtgggggcagacggtaaatgggcagtgacgccggaaaacccactggctgaaggccagcacgaggcggtggtggtcatcaccgatccggcaggcaacgccagcgagccgtccgatccgattggctttatcgttgacctgactgcaccagcgaaaccggtgatcggtgacgtggaagatgacgtcggcccaatcactggcccgattaacaatggcgatattaccgatgatacccagccggtattcagcggcggcggtgccgtacctggcgaaaccgttgagctgattatcgacgatgaagtcgtgggcaccgcgattgtgggtgaagacggcaactgggaagtgacgccagaaaaaccgctgccggaaggcgaacatgaagcggtggtggtcattaccgatccggcaggcaacgccagcgaaccgtccgatcctattgatttcgtggtcgatctcaccccgccggaaaaaccggtgattggtgaggtggaagatgacgtcggtccggtggttggcccaatcaatgacggtgacaccactgacgacacgctgcctgtatttcgtggtgaaaacggcacgccgggcgacaccgttgagctgatcatcgacgataaagtcgtgggtaccgcagtggtaggtgcagacggtaaatgggcagtgacgccggaaaacccactggctgaaggccagcacaacgcggtggtggtgatcaccgatccggcaggcaacgccagcgaaccgtccgatccgatcggctttattgtcgacctgactgcgccggaaaaaccggtgatcggtgacgtggaagatgacgtcggccctatcactggcccgattaacgatggcgatgtcaccgatgatactcagccggtattcagcggcggtggtgccgtgcctggcgaaaccgttgaactgattatcgacgatgaagtggtgggcactgcgattgtgggtgaagacggcaactgggaagtgacgccagaaatcccgctgccggatggcgaacatgaagcggtggtggtcattaccgatccggcaggcaatgccagcgaacagtcggatccgatcggctttatcgttgacaccacgccaccggcacaaccgaccatcgataccgttttcgataacgttggcgacagaaccggcaacctggcggcaggtgaaaccaccgatgacaacacgccaaccttcagcggtacggctgaagaaaatagcctcgtttacatcatcgtcaacgagaaagtggtggattccgtgcgcgcaaccgaaaccggctcctggacctgggaaccgtctccggggttggctaacggtccgtataacgtccgcgttgttgcggaggatcaggctgggctgcgctctgagtcgtctgaggactttaactttaacgtgcaggtgggcggtgtccctacagcgccggcaattaccgatgtgattgacgatgttgagtctcacaccggcaccgtacagcaaaacggtaccaccaacgacgaccgcccaaccctcgtggggaccggtcaggacggtaccaccgtttacctgtacgacggcgcgaacccggacccgatcggcagtgccgtggtcacgggcggacgctggaccattgaatttgatgccccgctggcgcagggcgagcaccgcttccgtgcggtagcggaagacggtaccggcaaccgcagcccggaaacgggcgagtgggtcatcaacattgattccgtcgcaccgggcgaggcgacagacgttgaactgtgggacgacttcggcacgccggggattatcgccgacaacggtacgaccgatgacaacactccgacctaccggggtaagggtgaagcgggcggtacggcgattatcgacctgggcgatggcaccaccgtgcgtgtaccggttgatgccagcggcaactggagctacaccccggcgcctgcactggcggacggcgactacacctggcaagtctcgattgaagacaaggcgggcaacgtcggacctgcatccgaccctatccacttcatcgtggataccagtggaaacgggatttcgattagccacgttgtggatgatgagggtggcattcagggcaacctggccagcggcagccacactgatgacacgacgccaaccgttgtgggccgcgctacgcctggtgccattgtgaaagtctacgttgacggaaacctggttgacagcgtggtggccgatccgaccacgggtcaatggcagtacaccatcagcccggcgctgtcggccgacggcacatatcagatcaccgccagtgaaaacaccggcaccggtgacggtccacaaaccgcaccgtttgaactgacgctcgatacccgcattccgaccggcaccctggacggtatagcggatgatgtcggcctggttcagggcgatctggcgaacccgtctgtgaccgacgataccaccccgaccctgcgcggtaccggtgtggcgggcgaccgggtgtttatttacgacggtacgaccctgatcgactccgtcatcgtcgggcctgacggcagctggaactacacgttaccgccgcagaataacgggacagagctggatatgaacgtggtgttcgagagtccgacgggcgtcagaagcgcaccgagcgattcctggaaaatcaccattgataccgaagcgccaacggccagtgcggtggctgacggcctgagcaaagactccggcgtgagcgatgcggacttcattaccaataacagcggccctggcagtctggtcaccggccatctctcggctgcgctggacgcgggcgacaaagtccttgtctccgttgatggcggcacgacctggcaggaagcgctggtcgacggcgataagtgggcctatgtggacatgcagggacacagcgctgactggaccattttgacccgtgttgttgatgcggcaggtaactacaccgagtcgtcgcagaacgtggtggtggatcaggttgcaccggacgccccgaccgacgtggtgcggagcggtaacgatgtcaccgtcacgctgccgggcagcaacgtgacggcgggtgattcggttctggtgaaggtcggagatgtctctgtcacgcatacgctgacggcggcggatatcgcgaacggtaatgtgacgctgagcctgccaccgggcggttataccgatattccggtcggggcagccattgtggacgcggcgggtaacagctcggactaccgtaccagcgactttaccagcaccaacaactttgaatcagctgatgagtttacggcgatcaatgcgggccagtgggtgcacggaatgcgtttctcgcacacgacggataccagtacggctgactacgaattcaacagacagactatcggggcgggaagcacaaacagcctgtacctgtttagttcgtcaacagatggcgggatggaagccagcatgtttgtcgacttccagtatggcgccaaaaccgtcgatttcgatttcaacccgagatttgcggggccgtctacggtggtgacgttctatgacatcaacggcaatgtaattgattctcagcctgtgaacgcgccgatcagcaaccgtaacgtccatgtgtcgttaaacaatccggaggagacgccggtttaccggatggaaatccaccatcaggagctgtcaggcagcaccgggtttggtttcagtatcgataacctggtggtgagcggcacggcgaaaaccgtcacgccgggtgaattcctggcggataaccagggcgatgtctggtatggcgacgcggcggacaacctctatcaggtgagtgatgtggccagcctgaccgacgcggtgatccaggggggagaagggacggacacgctgaagctgttgggtgcggatcagcatctcgatatgagcgcgctgaccaacaaaatccagtcaatggaagtgttcgatattacgggaacaggtaacaacacactgacgctgagcgcgggcgatgtgctggaaaacgcctctcagaacctgttccacgataacgatttcaaccagttgatggtgaagggcgataaaggcgatcgggtcaatctcagcgacctgttgccaaacgatatagacccgggcaactggacagacggtggcacggttaacgttggcggagtggagtatcagtccttccagatggaaagcctgaataccgaaatcctcgttcagatgggagtgacggtcacgctgcaaaaccactaa

SEQ ID NO: 122606 - DNA, 5337 bp, Enterobacter cloacae
atgaaaaagaccatcgcttctaacaacaatactgagccaaacatcgctgctgtggcgacactgccgccgctgccgaccgacgttttactgtggaacgattaccagttcccgcgtgaaattaacaataacgatatcagcgaagataacaccccgaccattagcggtaagggtgagccgggcatgacggctgtgatcgacctcggtgacgggcagagcgttcgcgtacccgtcaatgcagaaggtaactggagctggacgcctgcccctgcgctggcggacggaacctatacctggtctgtggcgctggaagatgctgcgggtaaccgtggtgaagccaccgcgccagtgacctttatcgtcgataccgtgggtaatgcggtatccatcagccacgcggaagataataccggcacgttgaccaacccgctggccagcggcagcagcacggatgaccttaaaccggttatcgtggggacggcaacgcctggctctctggtgacgctgtatgttgacggggaagcggtgggtacgatgactgccgacccaacgaccggtgcgtgggccattgagatcaaccctgcgctggagtcgggtaaaacctatgaaattacggcaggggaattcagcggtcctggtgaaattccacctccgacacgtccattcctgctgaccatcgataccgttgttccgaccgggacgttcgatcgcgtatcggatgacgttggtcgctatcagggtgacctgccgaatccggcggtgacggatgacaccacgccaaccctgcacggtacgggccgcccaggtgacatcgttttcgtacgtaatggcagcgacattattagctccgtaaccgtgggcgctgatggccgctgggaatataccctgcctgaacaaacgaacggtgcggcgctggatgtgagtgtggtatttcgtggcccaacgggcgttgaaagcgcgccaaccgatccctggaagctggtgattgacaccgaagcaccagtgaaaccgatcattggtgatgttgaagacgatcagggcccggttatcggcccaattaataacggcgatgtgaccgatgatacccagccggtattcagcggcgaaggcgctgtgccgggtgaaaccgtagaactgatcatcgacgatgaagtggtgggtaccgcgatcgtgggtgaagacggtaaatgggaagtcacaccagaaaatccactggcagaaggcgagcatgaagccgtggtggtcatcactgatcccgcgggtaacaccagcgaaccgtccgatccgatcggctttatcgttgacaccacgccaccggtgaaaccgactatcgacaccgtctttgacgacgcgggtcagcaaacaggttatctgcaaaacggcgatatcactgacgacagcaccccgacctttgcgggttctgccgaagagaacagcctggtgtacattatcgtcaatggccgtgaagttgcttccgttcgcgccaccgatgaaggtacctggacgtggacaccgccgctggggctggcgaacggtcattatgacgtgaaagtggtcgccgaagacaaagcgggtctgcgttcggatccttctgatgcgttctcctttgacctgctggcgggcggtattccaacggctccggcaatcaccgatgtgattgacgatgtcgaatcacacgttggcacggtacagaacggtggcatcacgaatgacgatcgtccggttattaccggtactgcgcaggatggcaccaccgtctatctgtacgacggcgcgaacccgaacccaatcggcagcgcggtggtcaccggtggacgctggaccattgagtttgattcggcgctggcgcagggcgagcaccgcttccgcgcggtcgcagaagatgtgaccggcaaccgcagcccggagaccggcgagtgggtcattattgtggactccgtcgcaccaggcgaagcggctgacgtggaactgtgggacgacttcggtacgccaggtctgattggtaacaacgacaccaccgatgacaacaccccaacctaccgtggtaaaggtgaagcgggcggtaccgctattatcgatctcggtaatggcactaccgtgcgcgttcctgtcgatggcagcggtaactggagctacaccccggcacctgcgctggcggacggtgactacacctggaaagtctcgattgaagacaaagcgggtaacgtcggccctgcgtccgacccgatccacttcatcgtggacaccagcggtaacggcgtatccatcagccacgtcgtggatgatgaaggtgccattaccggcaatctgggcagcggcagtcacaccgatgacacgaccccaacggttgtgggccgcgcgacgccgggcgcactggtgaaggtgtacgttgacggcaattatatcgatagcgtgcgtgctgatgcggtaaccggtagctggcagctgaccatcacccctgcgctgagcgcggatgggacatatcagatcaccgcgacggaagatccggggacgggtgacagtgcgcctaccgcaccgtttgagctgacgctggataccagcattccgacagggacgctggatcgcatcgccgacgatgtaggcctggtgcagggcgacctggcgaacccggcggtgaccgatgacaccacgccaacgctgcacggtactggccgtgcgggcgacaccgtgttcatttacgacggcaccacgcttgttaattctgtgaccgtaggcaatgacggcacctggaactacacgctgccaccgcagaacaacggcaccgagctgtctctgagtgcggtcttccagagcccgaccggtgtgaaaagcgcaccaaccgcgccgtgggatctgacgattgataccgatgcgccaacggcgccgaccattaccggcatgtatgacgatgcgggtacgctgatcgtcgatggcggccgttcacgcgacaccacgccagaactgcgcggtacggctgagaaaaacagcctggtgaatatctatggcccggacagcaaaacgccaatcgcttcggtgtatgccgatgcggacggtaactggacgtggacatcgcctgcgctggcagatgcgaaacatgacttctacgtgacgtcacaggatgcggcgggcaacgtctctggcgaatccaaccactacggtctggaagtggatacccgcgctgcagctccgatcattctgggggcgtacgatgacgtgcaaggtggcatctataacggcctggtgccagacggtgggctgagcaacgacggcaatatgcagctgcgcggaaccgctgagccaaacagcgtcgtgtatatctacaacgcgtataacaacgcggtgctggatacggtgaaaactgatgcgaaaggtaactggacctgggagcatgcggttgctgacacggctgccggtcgtccgcatatgttctacaccattgcgaaagacgatctgggtaacgtgtcgggtaaatctgagacctattcgatcaacgtggatacggtgaacaacgcaccggttatcctcggctctttcgacgatgttcagggcggtgtctataacggcctggtgggtaacggcggcgtaacgaatgatcgtacgctggatttacgcgggacagcggaagcgggcagcgtggtgtacatcgttattgataactatggcacggtcgcaggttctgtcacggcgggggctgatggtaaatggtcgttccctacaaccgcgaactataaccagacgtacaatttccatgcttattccattgataaggctggaaaccgttctgaagattcgtcgcaattcgcaatcaccgtggatacggtgaataacgcgccagttatcactggctcttacgatgatgttcagggcggcgtgtataacggcctggtgggcaacggtggcgtaaccaacgaccgtggcctggatttacgcgggacagcggaagcgggcagcgtggtgtatatcatcgacccggcaaccggtgggacttatggctcggcggttgcggctgcgaatggcgcatgggcatacccagtgacgaccaactacaacaagctgtatgaattccaggcttattcaatcgacagggccggaaaccgttcggctacctcgtcgaaatttgggattactgtagataccgtcaacgccgcgccggtgatcaccagcgtcacggataacgtcggtccggtaacgggcaacgtggccaacgcgggttcaacggatgacaacacgccgacgctgaacggtaccgctgaagcaggtagcacagtgtacatcgcggtgaacggttctacgtacagtgtcaccgccgccgctaacggcagctggagcttaacgccgtctgcactgccgttggggaaccacacgtttagcgtgttctctatcgataaagcagggaaccagagtgcgggtgtttcacgcagcctgacagtggtttctccgaaatcgagcgggttcgaagattttaacactgtaccgttccagaactttggaaagggtctggtcacactgccaagtggtctgaaatttacgttaaacgataaatattaccctggttatggtgcggcgatttatcagtggggcgtttcatccagcagtcgtgtattagcaatgaccggcgacatcaccatgcattttgacggggtaaatgctgtcagcatgaaactttctggtgcgaacgattccgtccagtctagcgttgtgaagtcaacatacaccgtttacgacacggcagggaaagtgatctcttcaggatatctgccagttggtgagtcaaccttctctgttaatgccccgtcgggacgtgagattggtaatatcgtcttcagtatggggcgtggtgcaagcagtggtttgtcgggtggcggtaacaccatcaataccgatcagtactggattgatgatgtccgctggacagtgaacacaccgcgctcagcatccagaagcatgatgatgaacgccgaagagcagcatgacgataacgccagtgttgttagcaccctgaacgatcgtgagattaacctggataatctccagcacaagacgattgatattaccaacagcaagcaggacaagctgaatatcagtctgcacgacgtgctgacccacgctgaaaaagacctgtttatcacagatggtaataaacagctgatggtgcagggtaataaaggcgacgtggtaaacctgagcgatcttctgcctgacaacagcgatccgggcaactggaccaacgccggtaatgtgaaggtatcgggtgttgagtatcaggtgttccacatggaaagccaggatgtcgagctgctggtacaagctggcgtaaccgtcaacgtgaataatcactaa

SEQ ID NO: 122607 - DNA, 909 bp, Enterobacter cloacae
atgacttttttcaagacctctttatttgcggcgctgtttacctcctccgcatttttcattcacaccgccaccgctgcggagaattttggcaaggtgtatcagcctgttgcacccgtcgctcagactcaggcgcaaattgtttactaccgtgacgccagtaacaccaccggcggggcggcacatatttatgtggataatgaattccacgatgcgctgctgcctggcggttataccgtgttctgtctggcgccgggtaagcataatctcggcgcataccagaacgatgcaccgcagtatcgtggtaaagaacagggttacaacgtcgaaatgaacggcgggcaaacctatttcgtgcgcgtcaaccacacgatgaatgccgtgccggaagcccgtacgcgcgagcaggcggagaaggatttatcggggctacgtgagcagacccatgtgctttctcgcgcatccagcgtggaagcctgtaagactctggccgcacctcagtacaaagattacaccctgtctggcgatattatgttccgctttggacagtccggtgaaaagggcgtttccgctcagggccgccaggcggtgaaagacctggtggcgacaataaaacgtgaaaacgtcgagctgaaacaaattcaggtgattggccatacggatgctatcggcagcgatcgtagcaactacgcgctggggctgaagcgtgcgcagacggtacgtacgatgctggcagaaaatggccttccggcgcgtttgatggtggcgtccagcgtcggcagtaacgagccggttgttaatgactgtgccgcgtccggcaagcgtgagttggtttcctgctatgcgccaaaccgccgcgttgttgtgcgtgtaagcggcgatcagaacgtgactgcacctgagcaaaaataa

SEQ ID NO: 122608 - DNA, 2283 bp, Enterobacter cloacae
atggaatcctcaactgcaaattttcaggaggaacagctgcttgccgccgctcgcgataaccgacaaagtgatgattctctgctcagaagtattgcctgggtgtgtgagcattatggtctcggtaaaagcgatgatgttttgctggcgggtctgcctgtcgaacaactcctcactccctctttagcgcttgatgcgctcaaaaatgccggtgtgaccggagggctcatcaagcgtaatagcgcagaactgccggagcagatcttcccgatgattttgctgcgtaagggcgctggcgggatggtgctgctgggacgcgagcgtcgtaaaaatgccgaagacaaatgggatctgttctattccctggtcatgccggatgtctctgacgagccggttgaactgaatcatgaagcgcttaacgagctgtatgttggctacgcgatcgcggctaaaccgactgcgcgtattgacagtcgggttagcgatatcgcgccgccgcagccgaaaggccactggctgttcagtacgctgtggcgctaccgtcgttactatcgtagcgccgcgctggcgtcggtgctggtgaacgtgctcgcgctggccaccgtgttctttaccatgaacgtttatgaccgcgtgatccctaaccaggcgtttaccacgctctggtcgctggcgattggcgtgctggtggcaatgatttttgaagccgtaacccgtagcgtgcgtgctcacctgctggataccgcaggaaaaaaagcggatctgattgtcggcagcgtgctgtttcgtcaggcgctggcggtaaaaatggagcataagcccgcctcctcaggctcttttgccaaccagctgcgcgaattcgaatccgtgcgtgatttcgtctcatccgcgacgcttgcaaccattgccgacctgccgttcgttctgctgtttattggcattatcttcgccatcggcggcccgctggcgattgtcccgttgctgatgctgccaatgatcctgctggtcagtatggtcattcagtggccgctggccaaagtgatgaaagccagcctgcaggaagcatcgctgaagcagggcgtcctgattgaatccatcgaagggatggaaacgctgaaatccgtggggggcgagtcctggatgcagagccgctggcaaaagttcagcgccatgcaatcttccagctcggcggcgtctaagcactactctacgctggcgatgaattcggtgagtttccttcaacagctgcagacggtcatgctgattgtcaccggcgtgtacctgattgatgccggcaccctgacgcagggcgcgttaatcggtacggtcatgctggccggtcgtgtgaccgcgccgttaagccaggtcgtcggtttagccgtgcgttatcagcaggccaaagctgcgctgacttcgctgaacaagctgatggagaacccaaccgatcgcagcagtgagattgactacatcaaacagcctgagttgaacggtgatatcgagcttaaaggcattaccttctcttatccggcaccgcccatgcagccgaacccggatatcctcaaaggcgtgaatctgacgataaaaccgggcgaacgtgtagcgatcgtcgggaaaatcggcagcggtaaatccacgctgctgcgcatcattgcccgcctttacacgccggtgaaagggcagattttcagtagcggtctggacgtgaatcaaattgagccgtctgactggcgaaacaacgtagggtttgtggggcaggatgcgcgtctgttttacggcacattgcgcgaaaacatcatgattggccgtcagaatgcgtcgtctgatgagtttcttaaggtactgcgtttaaccgggctggaccacattgccgcgcgccacccgcgtggcattcatatgcccgttggcgagcagggcaacagtttgtccggcggccagcgtcagctggtttccctggcgcgaacgctgttggcgcgtcctaacctgctgctgctggatgaaccgaccagcgcgatggatgcgcagaccgaagccctgttcctgcaacacctgaaaatcgcgactgccggacacacgctggttgttgtcacccatcgcccgtcgctgctggcgctggtggacagaatggtgattattgaggacggaaaaatcgtcgcggatggtccaaaacagcagattctggctgcgctcaacggcacgccggcagcgcaacctgagcagacgcccgctaacgacagtacgccagcgcaagctgtgccagtaaaagagcaggcggaggccagcgcatga

SEQ ID NO: 122609 - DNA, 1236 bp, Enterobacter cloacae
atgaaatttctaaaacagaagaaaaataaaccgctctcagcgcgtgatgccgcctggatgagcgatatccaggaggcgctgttctcccagaccacgccaaaatcgcgactggtgttatggctcatcctggcggtgttcatcggcttcttaacctgggcgcatttcgccaaagtggaagagatcaccaagggtgatgcgaagatcgtctcaaaaagtcgcgaacagattatccagagcctcgagggcgggatactcgaagagttgaacgtccgagagggcgatatcgttgaaccggggcaggtgctgctgaaaatcgacccgacgcgtgcgcaatcgagttatcaggagacgctgcgcaaggtagtggcactggaagcgaccgttaaccgcctgcgtgcggaagcgtatggtctgccgctgacctttagcgaccgcgtgaaaaagtatccttctgaggtcgagctggaaacccgcgcttacaacagccgtaagcaagcgctggaagagggtgtggcttcgcttgagaagagctatcgtctggcgcaaaacgaaattgccatgtctgagccgctggcggcgcgcggcctgctttccgaagtagagctgctgcgcatgcgccgtcaggcaaacgacctgcaatcgcagattgttgagcgccgcaaccgctatcaggcggatgccaacgccgacctgatccgtcaggagctggatctggtgcaggctgaagagagtctgaccggtcgcgaagatattgtgaaccgcacaaccattaccgcactggtaaaaggcacggtcaaaaatgtgcgggttaccactattggcggggttattcagcctggtgaacacatcatggagatcgtgccgctggaagatcagctgctggtggaagggaagatcaaaccgtctgacgtggccttcctgcatgccggtttgcctgccatggtgaaaatcaccgcttacgattttgcaatctatggcggcctgaaggggcaagtgtctctcgtcagtccggatacgttaaaagatgacgctaaagctgcggcgggccgtcctgatgatacgtattaccgggtgatggtcttaaccgacagcagcaccctcaaagcaggggataaagccctgccgattattcccggcatgattgcgaccgtggaaattcgtacgggcgaaaaaaccattctcgattacctgctgaaacctattttcaaagcgaaagaagccttccgggagcgttaa

SEQ ID NO: 122610 - DNA, 1500 bp, Enterobacter cloacae
atgaaaaagtattctccagtacagcgtcgcctggcggcgacgctgacggtcctctcttgcctgatttcagggaaaagtgtcgccagtagcgagggcttattagcctttcaacctgtcgctccgcaggcaaaatccggcatggtgatggcctccaccccgcctgcacctctcgcgccacgggtggcgcagaaaagcgcggtggataaccatgctactagcacaacccacaccgcgtttgcgaaaagcaacgcgacaaacgttgatcgacagaccgcccgtgcgcctggcgagaatgaaatccgtctgctctttaataatgcggttaatactgcactgggtatgagccctgaggttcgtggcgcacagttcaataccgaggcggcacaggccaacgttgatgaagcgaaagggcaacgctggccgcaggtggatgtcgggacgcgttcaaaaagcgtccagttcggtggcggagaacggggctacagcgacagtcgtccggcggtgaccgtgaatgtcgcaaccacattgctcgattttggtcgtaccagcaacaccattaaaagccgtgaagcgctgcatctggccgcgaaagagaatacgggcgcacaggcggaaaacattgcctggcaggtcagtagtgcactcattgagttgagtaagcagcgccagatcattgttctcagccaaaagtacgtggcgcgtatgaatgaactggtcgaaatgctggacggcattgtgaaggttgaccaggggcgtcgcagtgaactgacgcaggccagagggcgttttttacaggcgcaatcttctttagatacggccatatcgcgcgcgcgtgatacggaaatcatcctcaaccgcctgctgggggatacgcccgttcctctgccaacagcaccggtgtggaacctgaagccaggggagctgaacaagcagttatccgccattgaaagccatcccaccattcgacaggcgcaggcagagaccgcatcagcactggcggatgcggaagcggcgcgttctgccgcctacccaacggtgacgtggaacgttggcaaaagtaccgggcgcgatgaactggggcgtgaacaggcgtgggaaaccaatgtaaacttaagctggccgattttccggggcggttcacagcgggccgctgagctttctgccgcacgccgtgcagatgccagcagagaggccattgaacagcaatcccgcgatctggataaccgggtacgtgctgccgatcaggatgcccatagcatgctggagcgcgcggagttgtatcataacttatcgattgaatccgatcgtattcgtcatgatttcttcgatcagtggtatcacctcggtcgacgtactctgttagatgtgttgagtgcagaaagtgatttttacggcaaccaggtcgcggaagtgactaaccgttttgatggctattccgctatttttcgtagctatgccagttccggtactttattgttatggttacggaataataattaa

SEQ ID NO: 122611 - DNA, 699 bp, Enterobacter cloacae
atgaacccgttttcaggtaaaaaaatatacgtcgctttactcgacgatcacccgattgtccgtaaggggatggaaattatatttagccaggagcctgatttcgaactaaaaggcagctttgccactcgtatcgaactcatgaattttttacgcaacaaccgtgttgatgtgttggttcttgactatttgcttggtgatgaagagatcgacggtttaccgatgatcaaacagctcatgagcaacttcccgtggctgaaaattcttctttcctccacgctggaaaacacggcgattgtgcgcatggcgttaaaaatcggcgtgcgtgggcatgtcggtaaaagccgtgatttatcggaagtggtgaatgcggcgcgccaggtcgcggcggggcgtatctccctctcagaaagcatggagaaagagttctacctgatttcagagccttgtgcagacccgacatcgggttcagagggtgacaacgcgccgcaggtgatcgagggcattggccgcctggatcagctgtctcccaaggagcttgaggtgctgcgactctttaccggtggaatgtctgtcctgcagatttcagagaaattcaatcgtagtcgtaagacggtcagcggacagaagaaatcggccatgaaaaagctgggcgtgaaaacggactctgaactgtttctttggcacgaccaactgctttaa

SEQ ID NO: 122612 - DNA, 2946 bp, Enterobacter cloacae
atgcgtcactattttcgcctttttgtgctgctggttttactctcgctttcaatgccttcagcgataggcgatgaatataagatcctgatgagaacaccggtccagggattacagcgtttatctcttaccgccgatcaagccgcgtttattaaacaacaacgacaactgaacgtgggcgtgacccattatgatgccccaccgtttggcatgcgtaacattcgcaatgagtatgaaggtttgagcgcggattatacgggactggtcgcctggcaacttaacctcccggttaagataaaagtgtttagctcctctgaagaggcgtggcaggcgctggcacgtggcgatattgacctgatcccgtccgtggccgccttcccggaaaacgatacctttgccttttccttaccttatgccagcgataaaccggtgctggggctcaacgataacgataccgcccctctggcagaggatctgcgtgataccgacgtcgcaatgccgagggactatttgcccctgtcacaggctcaggccgcctaccctaacgcccgttttcgcctgttcgacagttatcaggaagcgttgagcgcggtggcatttggtcagtcgcgggtttacctgggcaacagttactcgctcagccgcaactacctgaacaatattcatgttgagcgattctcacgcctgaccagccgtgaagtggggtttgccgttagccaaaaaaaaccacaactgctcacactgattaatgccgcaatcaaggccgtgccagaagatgaaaagcaggagctttatcgtctctggcagcccgatcggattgatctcgcacaggggtcgaaatcccttctctttaccgagcaagagaaagcgtggatcaagaaacatcccatcgttaacgttctgatctacagccaggacaatgcagccccggtctcatttattgataataaaggtgtgctgcgcggtattgccgccgatctgttttccgttgtgtcgctcagaaccggtttacagtttcgttttgaaacgggcagcaccaccgaggaactgattcaacaggtgaacgagtcaagcgcggatatgctcgcctcaatcacccccagtgaagcgcgtaaaaataaaattcttttcacccgcccctatctgcgaagcgccttttccctggcaacagcgacaaatcgtaacgacattcatatgctggcagatctgcgtggaaaacggctggcgatggtaaaaaacattggtgtggaaagtatggtgcgccagcgttacccggaaattgaaattgttcacgtgggcaatgaatcacagctgctttccaccgtacttgaggggaaagcggatgccgcggtgggtattctgatcatgagtgactatcaaatcttcaccaactttcaggacaaacttaaagtggtgtcgattgtgggggacgcccccgtctggatctctttcggggtcgggctgtccaatccggaacttcaggggattttagataaaatattgctgagcattccccctgttgagctggaaaatctggccaaccgctggcggcccaacgaactggtggttgttgacagcttctggtatcgctatcgggaagtgttgattgccaccgccgtctttagcgccgtcttaattattctggccctgggttgggcactctacctgcgtcggcagatcgcgcgtaaagcggcacttcgtcgtcagatgaacacccagcttgtgcaattacgcgaggtcatcaccgagcgtgaagcgctgctggttgaacttaaggaagccaaagacagggccgaggattctaaccgcgcaaaatccgtcttcctgtcgaccatgagtcatgaaatccgcacgccgatgaatgccattattggcatgctggatatcgtgctaaaaaaaggacgccgtggtgagcaagatattcaggcgctcgaggtggcgtatgaatcggcagaaggactggtgggattaattggcgatattctggatatttcccgtattgagggggggcatctcgatttcaatcctgaagccacgaacctcggtacgctgattaacaatatgatgcgggttttccagggcgtggccattgagaaaaatatcgagctcactcgcgcgttcccgacggaaccgataatcgatgtctgtgccgaccccttacgcatcaagcaggttctgtcgaacctgttaagtaatgccattaagtttaccgacgtcggcggcgtatcactgacgctgcagcaggctgaagacccggtaaatgacagcgttcactacatcattgacgtcaaggacagcggcgtggggatcgatgccagccagcaggcagccttgttcaggccctttagtcaggcagacaaccgccgcgcaggaacggggctgggcctctatatcagccggaccatctgcgaaagcatgggcggcacgcttatgctgaccagtgagaaaaacgtgggcaccacggtgagagcaacctttacactgccgaaagtaaaaacggcggcggccgtggatgtccagcagcacgaagacgaagacaaaattccggccctgaagatcctggtcgtggacgataaccctgccaaccggatcctgctggctaaacagttggcctggttaggacagcatgcgtatcttgcgtcagagggaaatgaagcactggctatctgggaaaaaacagatttcgacgtgatcattaccgactgcaacatgcccggcatgaatggttatcagctgactgacataatccgcacgcgcgagcaggaacagcacagggccgcggcctggattatcggctttaccgccaatgccatgcatgagatcacggcgcgttgtttacaggctggtatgaatgattgcctgttcaagccctgctcaatcaatcatctcgcggctgcactgcgaaatattcatcccattgagcacaaagcatcggacgataccgtctga

SEQ ID NO: 122613 - DNA, 1275 bp, Enterobacter cloacae
atgcgcccggtacctcaacgtcgacctgttaaccacgccgcaataagccagcagttacattcactggcagagatttatcgccagtctatggctgacggggattacgccagcgcctcgcgctgctgtgaaaaagccctggccgtattgcccaaaaatatgtcagtgcaaagtgactatgcgctaagcctgatgcgtcagggaaagtacgatcaggcgtataaagtgtatcgtaaaatataccagtcgccgcagcgtcatgaagcctctgaaacctggctggatggttttgctgaactgtgtgggcacatgggcaaaacccaggagatgcgcacctatggccttgagtcgctgacgctgtcggatcaacgctttggtcacggcacatgctggccgcttccctcaacgccgccgcgtccttttgatgccacgcagcgcgaaaaaaatattatcgccttcagcctgttcggcgatcggccgcgctattgcgaaacgctgattaaaaacattgaagccgcaaactcgctgtttcctggctggtgctgccgtgtgtatctggataattctgtgccgcagcacgtctggcaacgtctgcaggcgggcgctgctcaactggtcgatatgagccacgaaaaaaccatctatcccacgttatggcgttttctggtgatggacgacccgacggttgagcggtttttagttcgtgatgccgactcgttgctctccgaacgcgagcaggtttgtgtcgaggcgtggctacgttcgccctggtactttcaccatatgcgtgactatttcacgcataccgagttgttactcgccgggatgtgggctggatgtggcggcatcttcccaaacgttgcaagaatgatgcgtgagtttgtcgtgcagtaccggggcaatgcgcgcttcactgaccagtatttcctgaaggcggtgctgtggtccaccgtgcggcaaagtctgcttagccatgatgatatttttggttttcatcatgctgaaccctggccggcgcatcctcctgttcgctggaaggcagaacacttccacgtcgggagcaatgccgggtttacgatcatggccgggccaagccataaacaagacggggaaaagcaggctgtgctgctgaaaatggacggtaatgcctggcggtatacggcacccgtgcagcaggggcagtggaaactgccgatgcctttttttcttgccgaggggtttcgtcagggagacgttaaggtcgagatagtgaacgacgacgatcgtcaggggagctga

SEQ ID NO: 122614 - DNA, 351 bp, Enterobacter cloacae
atgaacaacaatattgataatcgcgatatcgcgccagaggccctcacggatggggaccgcgatacgccatttccggtggtgctggaaataacgctcgacgacgttttaattcagaatgaagggcgtctttttgccgacgacaccagccagcaactgatgataaaaggtgatgcaggggatgaaattaacctctcggaccttcttcccgaaggtgcggaaatgggtgaatggacgaaagcccggggctcagtaactgtcgatggcgtgcaatatgccgtatatcagcattcaggtatggaaacggaactgctggttcaggtcggtatgcaggtcgccctcaataatatgtaa

SEQ ID NO: 122615 - DNA, 3549 bp, Enterobacter cloacae
atgcgttttttatcagcccggctattgagcctgcttcttaccgtgtgttgtgtatggcaactgcacgcccagccactggaactgcagcgtcgcgttcaggttaacgcgccgcatgtccagttcagtgaggcggcgcaacgctggctggacagccattccacgctgcatgtgggggtttgggggcaggagcaaccgccgttaagcgaagggatgggccatggcgtctttggcggcattgccgctgattacctggcaatgctggaagacagccttaaggtaaaaattaagctgcattactacgaaaacagcagtgaagcgttactcgcgctgaagcgccaggaaatacagatggtggctatctggaatccggaactgtggccaagcccggacctgcaagcctcaccgccctggctgctggataaagcggttctgatgaccccaaaatcacagggtgaaacgcctgtcgatctgcgaaataaagtgattggcgtcgtctcaggaagccaggccagtgaagcgcttcgccgccagtatccggacagcaccctgcgctttcagtcgtggtataacaccgccgtcagcgcgctggcctttaagcaaatcgatgcgctgtggattaaccgggccagtgcggaatatcttacgcaataccatcaggtcagagacctgagctggacgttcagcccgacgatacctaatctgaacatgagttttggtatcgaccgacagctaccgctgctggcggaatccatcgataccgtatttaaacatatctcgttagccagccgtttacgcattgcgaccagctggggtctgaaccggagctttgttatcaccgccaatccactggggttagatcccgacgaggaaagctggctacgcgagcacgggcaaattcaggtcattattgaccgccgtcaaaggcctgtcacgtttgtcagcgaaggtgaacctcaggggctggtggtcgatctgcttaaccagtttaacgaccagtacggcattcgcttttccttcctcagcgttgaaagtgatgctgaacttctggcaatgaagcgcgctcaccctgacgcactgtttgttgaacaggttatcgatacgccgcagcagaccaaaagcggtgcagcgaaaacgcctccgttgcttaccacgcccgccgtggtggtgatggatcagggcatcaagcgccccagtgatttctcacagttgaaaggcgagaaaattgccattcaggcgaatgacccgctgttgccctggctggacacctggtatcccaccattaagctggtgaaagttccgcatatggacgacgcccttgaacgcttaaaacgtggagaagtccgtggggtgattgcaccgcagtttattgccagttatctcgtgactctccaccatccaacccgttttcatctggcggtgacccttcctgtgacacccgtcgatctggtgttgtcggcgcaaacggacagcagcaagccgatcaatatcctgaacaaagcgctggccgatatgcagccacgggcactgatgcaaatggcgggtgactggcgtcaggcggcgatagaaaacagtgaaacctggaataaaagcacgttcgtgaactcgctgctgtggggcatattgctctttctggtcgtggtgggctgctggctgtggatccagtatttgcgccgtgcattacgccgcggcaacgtctggcagcagaagctggctgagcagctgaaatttacccaatcactgatagacgcctctcctgttgcgctctatgtccgcgatcgtcaggggaatttactgcgttataaccaggcctggagcgatactattggcctgtcagggcaggatctgaaaggtctgccgatcaccgccatcaatacggttgagccttcagagctggcggcgatcgaagcccgctatcgccaggcattgcaggatggtcaaccgcagaaatggtccgccaggtttcaggtgggtgagcagccacgatacttgcaggggtgggtcgtgccgtggcatgacgggcagggcgagattggcgggttaattggcggctggctggatatcaccgaaaaagagctgttgattgctcaactctctgaaacaaaaagtaatcttgagcaggcgattgccagtaaaaatgcctttatgctgagcatggggcatgaggttcgcacaccgcttaacgtgattacgggtctgctggaactggaacttcaggcgctggacgagcgccatgaacgcaacgagaatctgaacctcatctgggagtcctcccttaatctgctttcgttaattggcgacatgttcgatgttttccgcgccgataacccgcaactgctcggcttaacgcgcagcacgaacctgccgcagctgattgacagcacggtcgccctctatcgtcagcaggcagaagcgaaaggtatgagcctgaacgtgctgatcgagctttcagcgcaacgctacgataccgatccgctgttaattatccgcattctgtcgagtctcctgcgcaatgccatcaagcatgctgacggcgatgccattgatatcgaggtgtatgagggaacccgcgacccacaggttgaaagcgtccggctggtgattgaggtgtgcgatggggggccggggatttcccaaggaacccaggcgcaaatcatcgaacgcgcgaacaacgtgacgcttaaatcggagtggaccgataccggctttagtttgcccgcctgtctgcatatggcgcgcgctgccggggcggaggtgcgcattgagagcgagccgcacgaaggatgtgtggtgagtttcctctttaatgcgacaccctcagcgaaaatagccctgcatcatccggcaccggacagcgtagccagcctgcacatcctggtagtggatgattatcctcccgcgcgtcagaccttacagcagcgactcgaatcatggggacaccgcgtctctttggccacgcaaggagaagaggcgctggcaatgtggaaagcgcagccagcgcgttatgccgccattattactgactgcactatgccggtgatggatggttacgaactgacccggcagatccgtgagcatgaacgacgggaagggcgtgaggcgatccccatttttggcctgacggccatgagcggcacagaagcggccgcaagctgtattgatgcggggatggatgaatatctggaaaaaccgctaacgccgcaaaaattgcaggagatgctggagcggtatttcgccagtgccggaaagacggacgccaccgttgacgataaaacacgccagcttcagctcgaaatgatcgccgtgaatcatgacgacgccgaacaccttaaacagcgacttgaacagcgagagcgcgacaaggttggccgcatggcgcaccggattaacggcggtgcgcggttgatgaattttacctcgctgaaagaggcctgtgaggcgctggaactcgcctgcaacaacgaacaaggctgggaatccatcgaaccgttggtcagccgtgtgctggaagagatggaacggtttaacgcgtggctggaacgccagacgtga

SEQ ID NO: 122616 - DNA, 450 bp, Enterobacter cloacae
atgggattattaagttttgtgaaagaagcgggcgagaaaatctgggatgctgtatccggcggtagcaaggaagatcaggctgacaagctgaaaaaacatattgatagtcttaacctgcctggtgccgaaaaggtcaacattaatgtcgcggacgacggtacggcgacggtgaccggcgacgtgggctcccaggaagataaagaaaaaattctggtggcggtaggtaacgtcaccgggattggccaggtcaatgatagcgtgaccgtcacccaaagcggggtggaaagccgctattacacggtgaaatccggcgataccctgagcgccatctcaaaagcgatgtatggctctgccaatgagtatcagcgtatttttgaagccaataaaccgatgctgacgcatcccgacaaaatctacccgggtcaggtactgattatcccggctaagtaa

SEQ ID NO: 122617 - DNA, 396 bp, Enterobacter cloacae
atgggattattagatcaaatcggcagcctggccggcgggcagggcggtaagacggagcaactccaggcgatcatgacctggattgagcagcagggcggcattcaggggatcctcgaaaaattccgcaatggcggcttgggcggcgttgtcgagtcgtggcttagccagcagagtaatcagtcggtgaacagcgaacagatcacatcggtgtttggatcgcctgcgctgcaggatctcggcgcaaaactgggcgtggattctcaaaccgcgtcgacgctgattgctgaatacctgcctaaaatcgtcgacggcctttcaccgcagggcgaagccccggcccagggcgacctgatgtctgcgggacttaacctgctcaaaggtaagttcctgagttag

SEQ ID NO: 122618 - DNA, 921 bp, Enterobacter cloacae
atgtccggtatgattaccttagtaaaagcactggcggtgcaggaggggtacaacctgacggcgttgcctgatgtgcgaattttgcgtgccgaccgcccgcttgcgcgaacgcccgtgctttacgatccggggattgtgattgtctgccagggcagcaaacgcggctttttcggtcagcagacctatctgtatgatgaacagcactatctggccgtgtcggttccggtgccgtttgtgatggaaaccgacgcgtcggcagaacaccccttgctggcgatatatctgcatctggattttcagcttgccgctgaactgatgttgcagattgagcagcatcacgccccacatcctcccgctgcgccacaaagcatgatgtcgagcccgatggacgacgcggtaaaaacggccgtgctgcgcctgcttgaagtactgaacaatccgcttgaggcggcgatcctcggcccggcgcgggtgcgagagctctatttccgcgtactgacgggcgcccagggcaaggccatgcgcgccgcgctggccttacaggggcagttcggcaaaattggcaaagtactgcagcacatccatgccgcctacgctgagccgttaacgcttaatcaactggcgatggaggccggaatgagtgtgccgacgtttcacacccatttcaaagcgataaccggtatgccgccgatgcagtatgtgaaatcggtgcgcctgcaccaggcaaggatgttgatggtgcgtcagcatattaccgccgccgctgcgagctacgccgtcggttatgaaagtccgtcgcagtttaatcgagaattcaaacggctatttggtttgccacccgcagaggaaataaaacgcatgcagcgtaatttcgccgttccacctgtgcagcaggcgtcgatatttgtctcttcccattaa

SEQ ID NO: 122619 - DNA, 705 bp, Enterobacter cloacae
atggcatctgcaaaaacaatcttaatcaccggcgttagcagcggctttggtcgtgctctggcggaggaagccctcgccgcaggccatcgggtcgtggggaccgtgcgcacccccgaagcaaagcaggcattcgaggcactcgatacgcagcgggcattcggctgcctgctggatgtcacggactatgcgcacattgatgaagtggttacgcagagtgtgtctaccgtcggcccgattgatgtccttgtgaacaatgccggttacggtcacgaaggcatactggaagagtcctcgctcgcagacatgtgccgccagtttgaggtgaatgtgtttggcgccgtcgcgatgatcaaagccgtgctgccgggcatgcgccagcgtcgtcacggccatattcttaatatcacctcgatgggcggtttcatcactctgcccggcatcagctattactgtggcagtaaatttgcgctcgaaggcatatcagatacgctgagcaaagagcttgctccgttcaacatacatgtcactgcggtggcaccgggctcgtttcgcaccgactgggcaggacgttcgatggtacgcagcgcgcgcagcatcccggactatggcgttattcgatcctgtccgccaggctcgtcaggaaaaaagtggtcagcaactcggcgaccccgtaaaagcggcgcgcgccatgctggctatcattga

SEQ ID NO: 122620 - DNA, 1380 bp, Enterobacter cloacae
atgcgcgaacgttctccttggcaaccccatcttgcagaaggcaattcatcccctaccgatcggctggtccaggcgttgtcagacgatattctttcaggcctgctgaggctcggcgcgcgccttccggcacatcgtgaactggcagatacgctcggtatcgcggtgggtactgtaacgaaagcctatgggatcctggagagacggggtctggttcgaagcgttaagggcagcggaatgtttgtcgcgctggccaattccagaagccgaaccttcatcgacctgtcgcaaaacaccccgccggcagcactgacctcccggtcactgagtaagacactcaccaccctcgcccggcgtcctgacatggatatgtttaacacttacgccccggcaacgggccatgatgaacaccggcggcttcttgcgcagtggttcagtcgtctgggtgtcccggcagattaccagcgtctcatcttaacgaacggtgctcagcatgcgctctctgtagcgttgtctacggtctgtgaaccttttggccgactgtacgttgaggctcaaacctattcagggctgattcagctgtcgcatttactgaagctcaccttagtggggatcccgatggatgacgaaggcatggatgtctctgttctggaaaagatcctcgatgaaaatgcggaaaaaggcggtgctgtctatgtcacgccgctcttacaaagtccgtccacacgcattatgagcctggcccgccgtcaggaactggttcgggtttgtcgggaaaggggcataaagattattgaggatgatgtttatcggctgatgagcacgacagaattgccacagattgccaaaatagcccccgatatcaccttatatgtgaatagcttatctaagatccttaatccagcattgcggattggcgggctactggtaccggaggcgctgtattcacgagcagaatccatgctgagggcaacggcgatgatggtctctccgctaagcagctccatcatggagcaatggctgattgatggcacagcagaaaccgtcaccctcgcaattgaacacgaaacccggcgtcgttaccaactcgctatcgacattttaggagagcacgtttatcgctcggggctgcccagctttcatctctggttaccgttttcacgcgatgatgcgcactctttctacaatgcagcgctggcgacaggcatcaaagtgacagcaccggcctcgactgaagtgggtcaacagtcggatcagtacggcgtcaggttatgtattggcggaacggagttcagccagttaaagcaagcactcttgaaactcaacgagattgccgggcaactcaaacagaaaccagacccgttcccgctttttaatgtatga

SEQ ID NO: 122621 - DNA, 756 bp, Enterobacter cloacae
atgagtgaacaacgtgtggatgtcagttctgccagaccattactggataagagtgaaacgaagaaaaaagaaatccttcgtggcctgaaagatgggttacccgtattactgggtgtgatcccgtttgcgctggtgttgggtgcgcaggcaagccataaggggctcacgcctctcgacgttcccttgatgacaggattaaattttgccggcgggtctgaatttgccgccatacaaatctggacgtcgccgccaccttttttacttattatggccgtaacattactggtaaacagtcgtcatattttaatgggggcgacgctggttcccttactttctcgttttccaaaacgaaaagtcttacctgcgcttttttttatgacggatgagagttgggcactcagttataatgacgcgcattccagaaataacaaaacggcgccgctgttcagcatgccatattatatggcggtctctttatctttctatacgatgtgggttttctgtaccgcactcggcgcgttaattggcccggtgctgggcgatgttcaccagtatggttttgatatggcctttccggcggtctttcttgtgctggtcaggggaatgtggaatggcattcgtaaagccgtgccctggataatcagtctggtcgtctccgtggcggtatgtcattttattgccggcctgtggtacgtcattgctggccctttagcaggattagccgttgccgcatttttagggggagaggatgcctga

SEQ ID NO: 122622 - DNA, 300 bp, Enterobacter cloacae
atgcctgattatcagaccttcatcgccatcgtattaatggcactcaccacgtatgcaacgcgtgtgaccgcttatcttatattacgaaaccgggtgcttacgcccagggcgatgacggtacttaaatcctctcccggttgtgtcatgctggctttcattgcgcctttttttgcctccggaaatcctgcagatctgatcgcgttagggttaacgttggttgttgcaatgcgcttttcaatgccggtgacggtgatctccggcgtgatgtttgcctttatacttcgctattatttagggtaa

SEQ ID NO: 122623 - DNA, 483 bp, Enterobacter cloacae
atgaccacgttttatcaactgacagccacccgtctggatggagagcctgtcgctatgctcgacttcgctggcaaggtggtgctggtcgtgaataccgccagccaatgtggcttcacgccacaatacgccggccttgaggcgctttataagaaatacgccgctcaggggctggtggtgcttgggttcccctgcaaccagttcggtaaacaggaacccggcgatgccgacgacatcgccaggacctgtcacattcattacggtgtgagcttcccgatatttgagaaaatcgaggtcaacggagccgcagcgcatccggtgtttcgctatctgaaaaacgaattgcccggcgtgctggggggacgaatcaagtggaacttcaccaagttcctgatcggacgcgacggtaaaccgctcaagcgttttgcgccgatcaccacccccgagaaaatggaagccgcaatccttgctgcgcttgaacgctaa

SEQ ID NO: 122624 - DNA, 744 bp, Enterobacter cloacae
atgctgagaggcaaaagagcggttattacgggtgggggcaggggatttggtcaggcgctgtgcgtatggctggcgcgggaaggcgttgaggtagatttttgcgcgcggcgggctgatgatattcaacaaacctgcagtcttatcactgctgaaggcggtatggcaaaagggtatatctgtgatttaacccgggctgaatccctttctgcgtattcttcacagctattaacttcagacaagcccatagatattttaattctcaatgctgcccaatggttgtcaggaacgttagacgaccagcctgataccgacattattaataccgtcagttccggcctgacagcgtcgattcttctgacgcaggctctgctgcctggattaagacgttcagacagtgctgatatcgtctcaattatctcttcctgcgggatcccgaattttacggattcaattgcgcaccccgcttttttcgccagcaaacatgggctcagcggatttacaacgaaactcgcccagcaattgtccaaagaaaatattcgggttaccggactgtaccctcctgatttcgaacttacagggttagattcgagtgtcgatagccaatgcagaatgggagagcggctcttgaacgggcgatcggtctgggaagcgattcgttttgtgttggttcaaccgcgtagttgccatataactagcctctactttcaaggtccaacccgcgaagacctgagtgatagggtctaa

SEQ ID NO: 122625 - DNA, 312 bp, Enterobacter cloacae
atgattgtaaggacctggcatggatgtgttccgcttgaacatgcggaaggttttgcaaaacaccttgaaaaaacaggggtagagcattccaggagtatatcggggaacaaaggcgcgttcgttcgcagagaaacgcaggggagttgggagcatttctttctggcaacttactggcaggatctgcagtcagtgaaggcatttgctggagaaaactatcatgtggcggtcacttacccggatgatgatgaatttaagctactttctgacccttacgttttccagcatgttgttgaggcaatttcaccgctttaa

SEQ ID NO: 122626 - DNA, 678 bp, Enterobacter cloacae
atgaaatccaagagtgcgttagttttagaagaactcagatccaaattacgtactgcatctgtggcacaagtcggtggtttccgccctacagcagacccaattacatcctggtttttaaaaggagtcgctcttccaggtgaagggttgccagtttggaaggggcagccgatgtttccgcttctccagattcgcgtagatgaacttcccgtgattcctgaacaactgaaggggatcgcgctcttagtgctttatcataatatggaaagccatccatttgataaacctcatggcgaggggtggctaatacgagaatacgccacccttgataggcttgagttattgcctgcaattaacactccatatcgagcatttccggttcggtgggtgagtgtcaatgatgatgctccgggatgggaggatgcttgggatattattgacttgtctgacgtaaacgatgatgaggatgcaagtgatagattctatgatggttttaaccggtacaggggaaccaaggttggaggatatccaatggagatacaacatggtgtggggattcaagattttgtctttcaagtggggtcagaagaaaaagtaaactggatgtgggcggacaatggtatcggctattttcacaaatccccagagggactctggacgttttcatgtcagttttactag

SEQ ID NO: 122627 - DNA, 507 bp, Enterobacter cloacae
atggatatcgcttcagtaacaacgtcagaaaaacccactttgcacttgttatgtgggaaaattgcatcaggcaaatccacattgtcagcaaagttaggtgcattacccggcaccataattgtcagtgaagattattggctggctgccctctttgccaatgaaatgcaatccatagctgattatgtgcagtattcctcaagactcagaaacgctatgaagcctcacctggtgtcgctactcaaagcgggtttatccgtagttctggattttccggcaaacacacaaaccaatcgtgaatggatgatgagcatcattaaggagtcagatgccagtaacaggctgcattatttgaaagttactgatgaagtatgtaaatcccgcttgcgcgcccgtaatgcagaagcaatgcatgaatttacagcctcagatcaacaatttgaaaccataacgcgctttttcgctgagccaacggctgatgaagggtttgatattattgaatacagctga

SEQ ID NO: 122628 - DNA, 876 bp, Enterobacter cloacae
atgatgaatcttttacactggcgcctgctggtggccgtcgcggatgccggcaacatctcgcgcgccgcagaagagataggaatgactcagtcaggtgccagccaggccatcgcccagctcgaagcttcgcttggattcccggtatttacgcgtgagcgacggtatatcggtattaccgcgctgggtgagcaggttattgaaaatgcacgaaacatgctttcgcagctgaatgccatccgcatactggctgataagagccgagacttacaccgagggcgcattcgcctggccagtttcccctcagtgacgtccacattgttgccagggcttcttcgcgacgttaagcgcatgcatccgggtattgaaatcgttgtcctggaaggttcggacgaggaagtcgaggagtggcttgccgccgataccatagaacttggggtggtcatgaatcccggccccgggcgtgcacaggttatattaggacaggatgcatgggtcgcggtaataccagcgaaacatcagctggcacatcatgccagggcttatggcataacgctaaaggcgctggcagaccagccctttattctggcgacaggcggatgtgtcgttaatggaaaaagcctgatggaaatggctggattgcaactttctgatatacgcgtgacagtacgcgactggattagcgcctgtaagctggtcggggaagagatgggcgtcgcccttgtacctgaatcagccctgccggagacgctgcgcaacctgtgcgtggtgcctttgacgcctgctatacaccgggaatttgggctggtttgttcgtcatctggagcgtcttccgatgcaacgcagacgctacttaatgcgctacgtaagcgaagatga

SEQ ID NO: 122629 - DNA, 606 bp, Enterobacter cloacae
atgaaactctattacgccccggatacctgttcgttatcaccgcacattgtgctgcgcgaactggaaattgaatttgaactggtgaaggttaacaacaaaagcaagctcactgctgatggtcgcgacttccgcaccattaaccctaaaggttatgtcgctgcacttgaattggataatgggcagatactcactgaggggccagccattgtgcagtacctcgccgatcttaaaccagaatatggcctggcaccgcgcgcagacagttgggctcgggtgcgtctgcaggaatggctaaactttatcactagtgaaatacacgctggctcggcaccgctgttcaaccccgcactgcccgaggacatcaaagcgatttttcaggataagctcttccgaaagttcgatttactccaggcgaggctcaacgaaaacacttatctgactggctcatccttcagcgtagcggatgcctacctttttactgtgctgggttggtgtaaattcttctcaatccgactggaacgctggccagcgctaccggcgtacatggaaaaaataaatgcccgacctgctgtacaggctgcattactggctgaagcgtctcagtag

SEQ ID NO: 122630 - DNA, 780 bp, Enterobacter cloacae
atgctgatggatcttgatttacagggcagacgtgttctggttaccgcaggtaccaaagggatcggcaaagcagttgtccgccttttaaaacagcaaggggcaacggtgctaaccaccgcgcgtcacgagcccgcagaatctaccgcagacgctttcgtggcggcggatctgaccaccatccagggatgtaatttagtcgtggacgccgttcagaaacacctgggcggcgtcgatatcatcatccacgtagcaggcggttctaccgctcccggcggtgggtttgcagcccttggggaagaggaatggcaacaggagctcaatcttaatctgttgcctgcggtacgcttagatcgcgcgttgttgcctgggatgctggcgcaacaggatggggtgatcatccacgtcacctctattcagcgtgaactgccgttaccggaatcgaccaccggatatgcggcggccaaagcggcactgtcggcgtacagcaaaagcctgtcgaaagaggtgtcccctaagggaattcgggtggtgcgtgtggcgcctggctgggtagaaaccgaagcatcggtagcgatggcggaacgacttgctcagcaggctggaacggactacgagggcggtaagcagatcatcatgaatgcactcggtggaattccgctgggccgtccctcaaagcccatcgaagtggcgaacctcatcgtcttccttgcgtcatcctgtgctgccactattaccggtacggaatatgtgatcgatggcggtactgtcccgacggtataa

SEQ ID NO: 122631 - DNA, 327 bp, Enterobacter cloacae
atgtcattatctctaccgcaagctatttcaacctattttgcgatcggcaatggtgccgatattgccagcgttaagcgctgttttaccctcaatgccatcgtgttcgacgaaggtaaaacccatcgggggcacgcggcaatcgaagcgtggcaacgcgcggcgcgtgatgcgttcgactatagcgttcaccccattgaagttctcacgcaaggcgatcgggtaatagtcacctcgaacgttgtcggtaattttcccggcagccccgtgatgcttacacatactttcggcctcgctggcgacaagattgcgactctggagataatctga

SEQ ID NO: 122632 - DNA, 327 bp, Enterobacter cloacae
atgagtaagttatatagccctgaaaccgccgcaagcggcgtggaacaagttctgcgaatgctggaaggccgctggaaactcattattctgtttcatcttttcgacggaaaggtgcaacgctattctgattttgaaaaactgatccccgaaatttcgcagaagatgctggcacaacagctgcggcagctggaggccgacggcattgtgtcacgtagggtatatccccaggttccaccgaaagtcgaatatcggctcactgagtgggggcaggcgctgtgtccggctcttgatgcaatgctgaaatgggcggaaaaacgcgaggtttag

SEQ ID NO: 122633 - DNA, 1581 bp, Enterobacter cloacae
atgttattaactcttaaaaaaatttgttatgataattttagatttgttttaagtggggcgttttttataatttcagtatccattgttgttattgttaattttattggtgcgcgttataatttggtcattaatcgcaccttggtttttgcttttatgttattaacacttctttgtatcaatagcaaaatattaaaaaaccttattggttttatagtcttaacattaatcgctgctgatttgtctcttcagatgtatgcctggaatcacttcaatgctaaatttgactatggttttgcattaagtgtaataaatactacaggtagcgaagcattttcaatgttaggcgtttattggagaagttgtgcaatttttatggggttgctgtgtttatttgttttaactatcaactgtagcacaagtaccctgccgttaaagtataggcgataccctgcaatattattcgtgcttttgctaactggctatactgtacagggtatactgcatcaattacgaaaaagcaatgttgatagccttgctcaacgtgttgtaaattcaactccgctgagcacggctacagtctttatgcaagccatctctgatatgagtattgcctccagtattaataataatacacctgactattcaatatcactatcagataccggaattgataattatgtaattattattggagagtctgagcgcagtgcaaatatgagcatatatggatatgagcgaagcacgactcctgaactggaagcagaaaggaaaaatcttctgttgttccagcatgccattagccccgcgccagtgaccattatggctgtgccacttgcgctcactgctgattcagtacaggaagcagatcccgctaagtacagtgacaatattattagtatagcgaacaaagccgggtacgatacgtactggtatagccaccagggaaaagggggcgcatataataatgtgattacaggtatcgctatgaaaaccaaacaccatcagtggattgatcaggggttcgatgactctttgctcccagaacttgaatcaactctgaaaacatctggtaagaaattaattgtgctacatctatatggtagccacgaacctgcctgcgcgcgcttcccaaaagatgcttccgtttttaaagatggaaataaagatgatgattgctatgataactctgtgcgcttcacggattatgttatggggaaagtttttagccaactttcaaatacacgctcttctgtattttacttttctgaccatgccttaatacgcgatccttcacgttcagtggtatattaccatgcaggggctaatcccccccgggaagcgttatctgtcccaacttttatttggtatagccctaaagttgaaagaaagaataagttgaacggagactacgatacgccatggtctaccgatgatgcgaataccctatccgaattatggctcggaatacatcgggttgaaaatgatatcgttagcttgcaaaagtggctacaggactatcaaaaaccgattgtaattaaggatacaacgggtaagaaatttaattggacggatataaagtag

SEQ ID NO: 122634 - DNA, 897 bp, Enterobacter cloacae
gtgagaagacgttatgtgattgcagatgtgtttactgataaaccgttttgcggtaacccggtagctgtcgttctggatgccgagggattgaccactgagcaaatgcagctgctcgcgttagaatttggctacagtgaaacgacgtttgttttacctcctgaagaaccatcacatacggcttgggtacggatttttaccccgacgcgtgaaatccctttcgctggtcatcccaatattgggactgcttttgtcctggcgtatcaggctgaactgaatggcgaatcgctacctgaaacgctgatattcgaagaagccgccgggcgggtacctgtcaggattatcagagaaaatgcaaaggtcacgggtgcagaacttcttgttccgcaagctttatcctgccattcagaagtcagtccggaaaacgtggcggcctgcctctctcttgaagccagtgacatacgcactgaaatgcatatgcctgtcgtcgcctctgttggcctgccttttttgattgtcgaactcgcgacccgaaatgcgcttcgctgttgcgtacccaatttgcaggggttccgggctattttgcccctcgacggtgcggtgtccatttacgcctatacgctggaaacggatcctgaagacccgtgtgatttgcaggcccggatgtttacgccacgcatgaccgaagatccggcaacaggcagcgcgactggcgcagtaacagccctgctggctcagcttcgcaataaaaaagagctctctcttcgcgtaagccagggcgttgatatggggcgcgccagcatattattttcaggctatgacggcactgcagaaagcccgtcagttcgggtaggaggaaaaagcgttattgtcatggaaggctcattttcattgccctga

SEQ ID NO: 122635 - DNA, 537 bp, Enterobacter cloacae
ttgcgaattgaaacaactcgattgtgccttcgcccggtaatggcatcagacgtagcggatctcttcagaatttatggtgatccggcgacgaacacgtttaaccccgcaggcccctacccggatattgatcatgcaaaaacggttctcaatcgctggctcgcccactggcaaactcacagctttggtagcttcgccatatcgattctcgaatcccctgaaaaaatcatcggatttggtggtctgagcatccgtagctatggcgattgtgtgattaacaatcttggatatcggttatcgacagatgcctggggaaaaggcctggcgacagaatttgctacacgcgcggtaaggtatggttttgatgataggaaactcaccgagatctcagccgttgtcagagctaaccatctggcgtcacagaacgttcttgagaaaacgggactgagatatgtcagagagatacatgatattaaagacgcaccgccgagccttttgtattcactcaccttaacggagtggatgaacaaaaccaggtaa

SEQ ID NO: 122636 - DNA, 318 bp, Enterobacter cloacae
atggctgttgaaacaaaatatgttgtcgtacgaaaaggtgaagagaaaatgacatttgccagtaaaaaagaggctgacgctcacgacaaactgctcgacatggcagaagcgttcaccgactggctgttgcaaagcggcatgcagatggatgaaacgcaggctgaaaatcttgggctgtatctcgccgagcagaaagaggccgtgcagcatattctgcgtaccagcaagcttcccgatctcaatgccgccactgccacagataaccccgagccagatgcggctggcagtaaaaaaatcagagccgttaaagctgcctga

SEQ ID NO: 122637 - DNA, 837 bp, Enterobacter cloacae
atgagaaacatcgcactgcgtcataagtttcctcctttgctcccgcctcgcagcctgaaaaaaatagtgccgggagtcgttctggcgtttctgaccaccccgacactggcggcagaacagaaccagggtaacgtgttgaccctggggggaggtgtggatattacgcctcgctattctggttcggataaaaaccgcgccactacagcattagtgcttgattactccatggcaaatggcgtctttatcagcaccacgcggggtatcggttacggtaacagtgtcggtaaactggagtacaacgctgcgctgagctaccgcgctggtcgcaaggatcgtgacgtgaacagcgattcaataagctccggcagtgacgacttgcggggtatgggtgatgtcaaaggatcggccatcattgtgcccggactggggtataaggtgaccgactggctgagtgtgctattgcaggctgaagtgccggtttctgaaagaaacaacggtgaggccctgcatttcgggattatcagcccgctttatacatcaccgaaaaattcgctgacgctggcgctgaccaccagttggggatccagcaaatacatgcagacatactacggggtgaatgccgcacagtcagcagcatcggggttttcccgacatgatgctggatccggtatttatgcttactcgctgaatgtggactggacccacaagctcaccccagactggagcgtagctgtcgcaacaggcgttacgcagttgacgggagatgcaggcaatagccccattgttcaacgaaaaacgtcgcccacgggaagtttgaaagtgacgtacagcttctga

SEQ ID NO: 122638 - DNA, 678 bp, Enterobacter cloacae
gtgaaaattctactaatcgaagacgacctggatctgggcaatggcgtgcggatcgcccttgcagatcaaggatttgatgtcatatgggttcgccgcaaagaggatgcgctgcatcagcttgatgcctgcgtgccagaattgatattgctcgacctgggactgcccgatggcgatggcatgggcctgatgacctgcttgcggcaacagttcaaggggatccctgtcatcatcctgactgcgcgaggcacgctacaggatcgcctgtgtgggctggatgccggtgcagacgattaccttgttaaaccttttattctcgccgagttgttggccagggtaagagcgcttgcgcgacgcagttacggttttcagaatgaggcaatagaaatcagagggttatctctgcatgtgccaacgcgtcgcgtgacggtgagtgcccgtcacgtggagttgacggcaagtgaatacgcgctgcttgaaacgttaatgttgcgcgctgaccgcgtgcttacacgacgttttctggaagaaagaatcttcggcaccaaagaaaatctgagtaatgctctcgacgtgcatatggggaatttgcgtcgaaaaatcggggacggttatgtgcgaacggtgagaggggtagggtatgtcattgatactgtaccgatctacaaaggcggtgattga

SEQ ID NO: 122639 - DNA, 1395 bp, Enterobacter cloacae
atgcgaaatatctggcgcaccctgagactccccacgctcgtacggcgaatcatcatcgcccagatgctactgctgaccttgctgtggtgtctttttttgacttttgttttgtgggaggacttgcgtagccccccgatattaacgggcagtaagacctacgaaaccctttttacgctggtggacagtatggacgatcgcccgcaggaacgcaccgatgtgctgaacacgttcagtaaggcgttgcgggagggatatggcggaggtgaagatcccgaactgtcaatcagcctcattattcgcaaacataacgagataatttattcatctgatggcgcaccaacaggggtcgtaaacacccaatttggggaattacagcgcattgagagtgaggggcgcacctggaccagccgtacgctaaaatccgggaactccgatgtggaggtgacacttgtgacgcctgcaggaggctggaacttctttatctacctgaactcgcgtggctattacatattgccgttactggtgtgcattccttttcttttatttcccgcgtggctgtcaattcgtattgcaatgcgaccctggagcaaggtcgtaaatgaaatatccttgcgaacgccagacgatctctctccattaaaagccatgccaaaacacagggagcttcgtcaaatggtggacgcgataaacgtgtttcttgccagggtgcgcgaaagcgcggaaagggaacggattttcattgctgatgccgctcacgagctgcgtactcctctggctgcaatgcgaatcaacgtggaggcgctgcagtcgtatgtaagcaatgagactcaacaggaattactggcggggattgttcgcagcaacagccgggccgcccgactcgtcaatcaattgttgctgatgatgcacagtgaagcacgtattgatgccgttatgcagccagtgccgctgacgacgctcattcaggagcgaatggctgcactggaaccgctggctacggagcgcaggatagagcttgaattcgtctctgatgatgaagtctggatcacaggcatcagggagcgcctgatgtcgctgattgacaatttgattgagaacgcagtcaagtacagccctgagggtggacgggttgaagtagagatacgatcgcgggataaagccacgcagcttcgtgtctcagatgccgggcccggtattcggcctgaattgagggagcgtgtgttcgaccgattttttcgcgaccccaaccagatgcaaagcgggagtggactggggctagcaatcgtcaacgcggttgcgcagcaacacaacagcagcgtaggcctgtgtacgtctgcagaaggcgggctcctggtcactgtcgatttcccaactccgatagccgaaaatgcgtag

SEQ ID NO: 122640 - DNA, 699 bp, Enterobacter cloacae
atgaatgcagagaaccttcctgtggtacttatcccgggatttatgcttgatgaaacactgtgggacgattttatcaccgcatttcccgagcgcaggctctttatacctgcgagcctgggccagggaaccacaatccaggatattgccgctaatatagtccagaaactaccggagcgttttgtgctggccggcttttcgctaggtggttatgttgccagagctatttatgaggcttttccggaacggacagcggcgatgatcctcattgccacgtctctcagagaggattcggcagaagagataaatacccgtgttgctgcagcgaatatcaattcctcaagagaatttagtgggctgagcacaacggccattagaaaatcacttcatgctgatctcgccagtaatacggccagtattgagaaaatccgtaatatgggaaaaaggctgggagccgatgtattcagagttcagtcagggctaaaccgcgggcgaataacgttaagacccattttatgcccgacctacgttattgcagcgaaacatgatcggctgcgttcaacggaggaggcagaagaactcgccaggctaaccggaacctgtgtggattatgttggcggttgtggacatcttattcctctggaaaaaccggatgaactggcccagcgtgtgtccagatggctcgataaaacaggcctttaa

SEQ ID NO: 122641 - DNA, 384 bp, Enterobacter cloacae
atgaaaagatcgatagtccctgaagaattccaacactatttcgatgactggcacttctcgcctgtcatcgaagcagatggcacggtgtatctctctggtgttaccgcggcacggaaggacaaaccgataagtcagcatccggaagaacaattccatgatgcgttttataagcttggtgtttatttgaaagccgcaggcttagggtatgaaaatattcttgagatgaccacttttcatattgatcttaaaaaacatatagacgttttttctaaggtgaaagatgaatatgttaaggcaccctacccggcgtggactgccataggcgtatcagcgttcattccagaaaatgcgctggtggaaatgcggattgtggctaaaaaatag

SEQ ID NO: 122642 - DNA, 1458 bp, Enterobacter cloacae
atgtcgacccctatcctcccgcaagccgagccgcgtcgctgggcaatgtttgtcatcctgctggttggcgcatttttgcccccactcgatttttttatcgtcaatgttgcgctgcctgctattcaggacgagctgagcgcctcttcctctgctgaacagctggtcatttcgtcctatgcagccgtgtatgccgtaaccttaattaccggcggtcgtctgggtgatatttatggtcgtgggaagatgttttttatagggcttatcggttttgcggcggcatcgctgctgtgcggtttagcctggtcaccatgggtactgattagtggacgcgtgttacagggtgctacggccgcgattatggcacctcaggcactggcttccgtacaggccatttttccggaagcggaaaagccgttcgcgttgagtatctatggcgctgtatttggcctggcctcggttatcgggcaggtaatgggcggtatcctgatctcagcggatctgtttcacctgggatggcgggctatttttctcgttaacttgccggtggcgctgctggtcattctcttcgggctgccactgctgaaagagacgcgtgcgccatccgcacaacgactggacccggtcggcatgttactggcgaccgccacgttgagtgcgctgattgtgccgttaattgaaggccgtgaagcgggatggccctggtggacatggctgtcatttctggctgtccctctgctggcgtcgctgttatggcgttatgagcgtcgccttagccagaacggcggttcgcctctgcttgatccggtcgtattacgcgcgccggggctgggccaggggctggcgatcgttttgctgttttattctatcggggccttctttcttttgttctccgtttatctacaagatgcgttgcagttaaacgccctgactgcgggcctgctttttctgccttttggcgtaggttttctgatcggtccgttgctaacaccttatctgaggcgttttgtcggcaattacctgagcgcaatcgggatgggatgcgagacgttggggttagcaggcctggcagggttgattgcccataccatgatgggtagcgcaccggccatgctgccgctcgctgtattgctttttatcaccggcctcggccagggactggcgatgccgacgctggtccggatggtgacaggccgcgttgcaccggcgttttcaggcatgattgccggggtaaccagctcgacactccaaatcagcactgcgctgagcgtcgccgtcatcggtggcattttttacagcatgctggacaccggcagaagcggtgcaaatattacgcatgcctttatcgtcgcccttctggcgatggcgatatgcctggccacgggtgccgcgctaagcattcggcttatccggcaggcctccggtttattttctgctgcgagcagcgcgtctatcaagtaa

SEQ ID NO: 122643 - DNA, 747 bp, Enterobacter cloacae
atgtacaaattaaaagacaaagtggcgattgtaaccggtggttccaaaggcatcggagctgggattgcccgtcaactggcgtctgacggcgcgaaggtcattgtcaattacgcgtcaggcaaaagtagtgctgataacgtcgttgccgatatacaggctgccggcgggcaggcggtagcggtcgcggcggatgtcacccgccaggctgaggttgaggcgctggttaacgcggccatcgacattttcgggcggctggacattgtggtgaacaacgccggcatttatgagttcgcccgcattgaagagagcacagaggcactctaccgcagacaattcgacatcaatgttctgggcccgctgttaatgtccggcgctgctgcgccgcatctgaataaaggcagcagcatcattaacatcagttcgttcgtcacccgcgtctttatcgccgagagtgccatctacagcggcaccaaaggggcgatcgatgctattaccggggtactgtcacgagaactcggcccccggggaattcgcgtcaacgcggtcaaccctggccttatcgaaacggaaggcagtcatagtgcaggcgcgatgaactcggacttccagacatggaatgaaaagcagaccccactcggccgcatcggtcaggtgcaggatgttgcgccgatcgtctcatttctcgcatcagacgatgcgggatggatcaccggtgaggtgattcttgcctctggtggcatgcgctaa

SEQ ID NO: 122644 - DNA, 870 bp, Enterobacter cloacae
atggaatggggcgacgtccgggtatttcttgcagttatgcgtaagggctctttcggcgaggcggcacgaagcctgggtgtgagccatccgacgattggtcgccggataaaggcgcttgaggaagaggcgcagcaagcgctatttcgccggacacaggagggtctggttctgaccgacgccggcgacagggtgctgaagctggcagaagcgatggaaaactccgcgctggcgatggagcggcgtctcgccggtaatcacgaacgtcttgaagggatattgcggatctcttcagcagagtggtttgccaactatgttctcgcaccggtcctggaggaactgacgcgccgccatccggcgattgtgccggagcttatcgcaagctaccgcttacttaacctgtcgcggcgtgatgccgacattgcgtttcgcatcgttccctttaccgaaccggatattgtccagcgccgcctgatgcgcatcccctatgcgctatatggaacgccggaaatcgccgatatcgcccgacacgatccggccgcagtggggcttattctgatgaacacggcacaatcccacttctctgacgtcgcctggctgctcgacaggttcccccagtcacgacgtgtgttcaccagtaccagccgggccgtacaggcacagatgtgccagcgtggaatgggcatcgccgtgttaccgcgcccgcttggtgatgccatcaccggcttagcggctatcagcatgccggagccaccgccgtccaaagatatatgggtagggtatcactctgacctccggcatatggatcgcctgcgggttatgctggatatcgccgatgcgatgcttgccgatcccgcggcgccgtcaacgtga

SEQ ID NO: 122645 - DNA, 909 bp, Enterobacter cloacae
atggataaatttgataccatgctgctcttcacccgcattgtagagcttcaaagcttcagtcaggccgcggaccagctagggatccccagagcgacggccagcaatgcaataaaaagcctggagaaaaacctggagtgtcgtctgctggagcggacgaccagacacgtgcggacctcgctggatggcgaggcattttatgaacgctgcgtgcatattctttctgaactggacgatgcggagtcttccctgcgtcattccggcgtaagaccacaggggattttgcgcgtgaatcttcacggggcccatgcgacccgcattgtactgccccgtattgacgagtttcacgcccgctatcccgccatcaggctggttatcagcagtggggatcgtctggtcgatctgattcgggaaggcgttgactgcgccgtacgcgcgggcaagctctttgattcatcattaattgcccggcctttagcccagatgcctcaggttatctgcgccagtccggactatcttcgtaagcacggccgaccgatgacccctgacgatctgctttctcaccagagcgtcaatttcttttccatcagccggggtaagaactatcctctggaactcattgttaacggtaaagagaaaagctatccgaccaaaggctggatgacagtgaatgacgcagaaaattacgttatttgcgcgttgcgtggatgcgggctggttcagcttccacgttatcatgtggacgatgcccttcgggatggcctgctacaggaagtgttaagcgactggaaaagcccgtccatgcaactttcggctatctatccacagcaccgacagctgtctccccgtgtccggatttttgtagactggctggtttctctctatcgggaacgctttgaggtgaacgcttaa

SEQ ID NO: 122646 - DNA, 738 bp, Enterobacter cloacae
atggacaaagtcaataaaactgcccttgttacgggtggttcccgtggtatcggccgcgccattgctgagcgtctcgcgcgggacggttttaccactatcgtgaattacgcaggtaatgccgaggcggcagagcaaaccgtgcagagcatcgtcgctaaaggtggccgtgcgacggcgattcaggctgatgttgccagcgaagcggatgtcagccacttgttccagcaagcgaaagcggttaccggcagactggatgtggtggtgcacagcgcggggatcatgccaatggcgaagattacccctgccggtcttcacgattttgatcgtgtcattcataccaacctgcgtggcgcatttctggtgctggcaaatgctgctgaaaccgtgagtgaaggcggcagaatcattgccctttcgacgagcgtgatcgccaaatccttcccggcttatggtccctatatcgcctctaaagcaggcgtggaagggcttgtacacgtgctggcaaacgaactgcggggcagaaatatcaccgttaatgccgttgccccgggccccaccgggactgagctcttctttaacggtaagagcgaagagcaggttgcggccgttgcaaaactggccccgctcgagcgcatcggtaccccagaagagatcgccagcgcagtagcgatgatcgccggtccggacgggagctggatcaactcgcaggttattcgtgtaaacggtggcttcgcctaa

SEQ ID NO: 122647 - DNA, 915 bp, Enterobacter cloacae
atgaagaaaatgacctcccagaacttttcctgggatgatttgaaaaccgttatggctgtaggtgagcacggtaatctgtcacgcgccgcagatgctctgggcatcaatcattccaccttgtttcgtcggttgggggccattgagacgtcgctggcattagccctctttctgcgtcgccgcacccactacgttccgacaaaagccggaaccgcgctgatcgccctgggacaccgcattgaagaggatatccactatgttctacagaacattgaagaggatgaatgcggtttttcgggggagataagggtcaccacgtcggatgcccttttgcaggattaccttaacccgctgatcgcgtcatttagccgggtaaatccccacattacctttcaggtctcgacaggaaatgaatccgtcaatttgttcgatggcggggcggatatcgcgtttcgagccaccagagacattccggagcatctttccggccgcaaggtgggatcggcgttctgggcagtgtatggtttacgtgagcaatgggaaaaaaagcaagtcaatgctatggcgctcacggagcatcgctgggtctccttccattacgcaatgtctaagttaaacgcctttctgtggattgaaaaaaatattcccgagaaaaatatcacctttcgcggtgactccgttctcagtgttgcgtcggcaatctcaagcgggattgggatcggtttgttaccctgcatgcatggcaatcagatagataaactggctcagattagccccatcgtggagggactgggtgaagacatttggctgctcgcgcatcctgatgtgaggaaatcagcaaaaataagggaatttatgaatcactgttcccactatttagcagagaacagaaagagaatattcggacaaacatgttaa

SEQ ID NO: 122648 - DNA, 648 bp, Enterobacter cloacae
atgacgattaaagcaacacctgcagcggccagaaatctgttaagcccggaaaaccatgcgctgatcctgctggatcaccagagccagatggcgttcaatgtgaaaaatattgatatcggcctgctgagacaaaataccgcagtcctcgcggaaacaggcaaggggtttaatattccgacccttgtttcaacgatttcacgccatgattttgcgggcccggtatttcctgaagtttcagcggtattcccggatgacgcgtcgtacgttaaccgatccacctcaaacgcatgggaagatggtaattttgttgatgccgtcaacaaactggagcgcgaccgcctggtgtttgcaggtctgtggacctcggtctgtctgaatggtccggttcagtctgccattgagcaaggttttgacgtctatatcgtcacagacgccagcggtgacatgagtgcagaagctcatgaacgcgctgtgcaacgcatgattcaggctggcgcaaagccgattactgccctgacttacctgcttgaactgcaacgtgactgggcacgtcatgaaacctacgaactgaccacttcgatcagccagaaacatggcggagcgttcggtattggcatccagtattgtgcagatatggttcacgcctaa

SEQ ID NO: 122649 - DNA, 564 bp, Enterobacter cloacae
atggagaaaaagcatgagttagcggcagggccatccattcagggagatggcattgcggaaacaacgacagcgaccgaggttttttccggccccggcatgagtatcaacctgcgtttttgcctgatgaaagaggttgcggcgtataaggcgcagcagggtcaggcaattgccgaccctgaacaggaacgggacgtgcttgaaagagcctttgctgtcgcccacgcgtcagggctggaaagagagagcgtcaggtctttcattcaactgcagatggacattgccaaggctatccagcatttccattgtgccgactggctcatggaagaagacacaccgaggacaccgatgccgctctctgtggtgagagcaaaaattgcccatgccgatgaatcaacgcttcgcagtatcgcccggaaattaaaaacggagggcggcttttccggggccgataaagcggcattcatgcgagaaattcagcatgaaaaaatacgtgacagagataaagagcggctctgggctacagttaaaaaaatcctgcttcattcatcctgtggcgcgtcttaa

SEQ ID NO: 122650 - DNA, 1056 bp, Enterobacter cloacae
atgacgaacacttcactttccaccggccaaaaaatagtccgcctgtgcctggtcgcgattattccccttgtcttgatagtgctgtttctctggtcaggcggctggctgacgccgaatcgtctgacgtctgacaaactggtttcggtattgcagaaatcgggtggggaacatcccggttttcgccgcaatcacgcgaagggcgtgtgcgtggtgggggattttatctctaatggccaggtcagttcgttatcgcgagcagcgctgtttgcccctggcgaaacgccggttacgggccgtttcgccatcgcagggggtaacccaaaagcgccggattatgccgttcccgtgcgcagcatggcgctgcaattcaggcagagcaacggcgagcagtggcgaacaggcatgaacgcgatgccacgctttccggtctctaccgttgaagacttctatgcgctgcaaaacctgactctgcccgatccggcaaccggtaaacccaaccccgataagcttaaggcgtttgtgatcgcgcatcctcagatgcaaccctacctcgcctgggcaaagcagtatgtaccttcatccagttgggcaagcgatcgctttaatagcctgaatgcatttcgctttattgataaaacgggtaaagagcatctggtccgctggagtatggtgccgcatattggctctcagccgatgagcgaggcggataaaaatgataaagattttctgcaacacgatcttgaagagcgcctgaagcaagggccgctgaaatgggatctgatgattaccgtcgctaaaccgggcgatccgggcaacgatgcaagccaggtttggcctgaagatcggcaaaccatcaatgccggcatgctcgtgctgacgcgtgcaacaccgcagcaaaacggtccgtgcaatgacatcaactacgatccgctgattttgcccgatggcattgccccttcggacgatcctttactgaatgcgcgctcggcggcctatgccaaatcctacaatgcgcgtacccgtgaacagtcccaacagtcaggagctggcttatga

SEQ ID NO: 122651 - DNA, 546 bp, Enterobacter cloacae
atgaaacaggttgcttatttccatccggcgttgcgcattctgcactggttcatggcagcggctatcgtggcaatgctgtttatcggcattgcgatggtttcaaccatttcgtcgaagcatgccctgctggtggcgatccacaaaccgctggggctgatgattctggttctggtggtggtcaggctatggctgaggttttatacctccgtcccttcgctaccggcttccataccggcctggcagcgccagatagcgcatctctcacactgggcgttatacctcatgatgttccttcagcccctgattggctgggcgatgcagtcagcggcggggtaccccatcaccctcgggggcggggttgttttgccacccattgttccggtgaataacgactggtttgccattctgcgccctttgcattctctggttgcgctgatgctatttgctaccgtgatgctgcatttggcggccgcgctttttcatgcgttagtgctgcgagatggcgtatttgacagtatggcggggaccggcagacggcggcactaa

SEQ ID NO: 122652 - DNA, 588 bp, Enterobacter cloacae
atgtccaccgaacgttcacagaaagcaaacgacattatatttttcacccgacaattgcttaccaccggtggctaccgaagcttcagttttgccgacctttctgaaaaggtgaatattcgcaaggcgagtattcaccaccatttttcaagcaaggcggagctggtaagggtcgtcgtgagcgagtatcgccaggaggcccgcgccggaatgcaggcattaagccatcaactaaataatccggttgccgaacttcaggcctatgccgattattgggccaaatgcatccaggacggttctgcgccattttgtatctgcgcgatgcttgccgccgaactgccgacgttgccgcccgaagtcgcttcggaagtgacgggacatttcgccgatctctctggctggctgacggagttgctccagagaggagaaagggaaaaatgctttactgtccggtcaacccacgccagcgaggcggggcagttaatggcaatggtacatggtgccatgttagccgcacgcgcgtttaacgacgcgaaagtatttcagcaaatcgtccagccggtgatcgacaatattcttgtgtcggattga

SEQ ID NO: 122653 - DNA, 495 bp, Enterobacter cloacae
atgagaatggcaatcaccctacttttcttgattatttcgacctgttcctgggggaaggaactccctaagcttgaagggaaacccgtgttaaccatctccgggaaaatcgagaacagtaatcaaaatggcgctgcagtctttgatatcgctggcctggaaaaaatcggcctcgttaccatgcgtacccgtaacccatggtataatgaccagacaagctttgagggtattcccatgaaaaaactcatggaactggtcggcgccaaaggcactgttctgagtgtaaccgcgctcaatgattatacgactgaaattcccattgaagacttcacaaaatataacgtgatccttgcaataaaaatgaacggccaatatatgcgcgttcgcgacaagggccctctgtttattgtctatccttatgaaagtaacaaagagttggataaccaggtctattactcgagatcagcatggcagattagcaaaatggtcgtagagtaa

SEQ ID NO: 122654 - DNA, 1944 bp, Enterobacter cloacae
atgaacaggatcctggtaggcattatatttttcctattcattacaaccggatatatttcatttcttttgcatgagcggcaggaggatctgcaaaaactcaaccattataaggactcctggtctgtctctcagatggtttcagaatactacaggctggagtcgtggatcagccgttattctgacaataatcctgatatcaccatggacgatctccgcatgcggctggagatcatgcttagccagcgtgagttactgaaagaaggcgatttagggaaatatgtaaagtcgaataaaaaccataatgcactggcaaaaaacctgcatgaaacgcttgattaccttgatcatcatctggaagggatgagtcgcgctcaacttgctgattatattgagaaaatgtatgcacttgattccgcccttagccagttttcatccagtgcactctccaatgatgttaactccatcaacgagacaaaccagaatatacaaaacctgtatcgtatctattcaggcctttcggttctgctgattattttaagtgcgatattgggtgttttaaacgtctaccagaacaggaagatacttaaaactcaccgacaggttaccagcctggcaaatgaacttcagaaatcgaaggaaatactccagcaacagaataaaaaactggcgtatgacgtttaccatgactcgttgacggggcttaaaaacaggctttatttctgggatgatcttattaataacatctcgatagcgagccgcatacacaggccagtcacggtcatgttgtttgatctcgatcgctttaaagaagtcaatgacagctttggtcacgatgccggcgatctgttattgcgtgaggttgcgcaccggttatcctccatgagcaacgaaacaaatacattctatcgcctcgggggcgacgagtttgcattattgtctcatgagctgacggaagaaagtgccgttaatctggccatggaaatctgtgagtgcattaaaaagccttacataataggtaactctaacgtcaccattggtacctgcgtcggtattgttgtttcagagttagaacgacgttcagattacctttataagtttgccgatctggctctgtatgaagctaaacgtgcaggcttaaacatgatcaaagtgtttcgccgcattatgctgcaaaagctcgaggaaagcagaaccctggagcgtgatttatcagtggcagtcgcaaataaagagttggtcgtttactatcagccgattgttgattcgtacaccactgaaatatatggctatgaagcccttctgcgctggaatcatcccgttaagggcatcattgcgccggatgattttatttcggtagcagagaaaacgggattcatccatgagataggcaaagccgcgcttgaaatcgcctgcaaggaagcgacgacatggaaggtgccggcaaggatctctgtcaacgtgtctccggtgcagttaagcagtatgaattttgtcgatacagtacgcgcagtgctggccgaaacggggttgcccgcgacccgactcgaactggaagtgacggaatcttcgctgtttaccgacagtgaaacccccatcgaaatccttatggcgctcagaatgctgggcataaaaatctctattgatgattttggtacgggctattcctccctttcaagattgattcagttaggctttgataaaataaaaatcgataaatcttttgtgcgaacaatatccacggatgaagaaactcagaccatcgcaaaattaatggtcggcatggcgaaatgccttgatatgataattattgctgaaggcgttgaaaccaatgatcaactgttgtgccttcaacgtttagggtgtgatttggcacaaggatatctctttggaaagcccgcgccctttatcagtcaatcaatcaaagcgggtgaaacacttgtttaa

SEQ ID NO: 122655 - DNA, 387 bp, Enterobacter cloacae
atgcatgcgcaacggctgatgggggaggggtatgaaccgtacgttgagcaacagggtgacagactgacctactctttgccggtcgattccggatttgtcagttttaacttcacgtttgatcttcgccagaccgatctggatgtcctgctgtcgagcgattacaggcgagccgtcctcgagatcacggcccacaccttgctccagcattcgacactgaaggggaatgaccgtttcactcagaaagacttcgacaatctggtcgcagtcacactccacgcatcgctggcgcttttgcacatattcatttcgcgcgtgagccgtgagcacaatattgccattgaccattatgtcgaagaaatactccaccgacgaacgcgccgcgactga

SEQ ID NO: 122656 - DNA, 477 bp, Enterobacter cloacae
atgagtatcagccttcgccaggcccgcccggaagatgcctccgctatttacgatatgatttatgagctggcggtttacgaaaaagccccgcaagaagtggtcaccacaccggatgagattcgcgaaacactctttggcgacggcagccataccgaagcattaatctgcgagattgaagggaaaatcgccgggtacgccgtgttcttcaccagctactccacatggcttggacgtaacggtatttatatggaagatttgtatatttcccccgattatcgcggcaagggcgcgggaaaagcgatgctgaagaaaattgcgcaatatgccgtggaacggcgctgcggacgccttgaatggagcgtactggactggaaccagcccgcaattgatttttacctcagcattggcgcattacctcaaaacgaatgggtacggtatcgcctggagggtaacgcgctgttgaactttgccgaataa

SEQ ID NO: 122657 - DNA, 960 bp, Enterobacter cloacae
atgatgaatattatgcatccagcgctacgacgtcttgatttaaacctgctgctcatttttgacgccatttatcggcactgttccgttcgcctcgccgcggatgaactggcgatgagcacctctgcgttgagccacgcactgtcccgactgcgtattgcgctcaatgacccgctattttaccgggaaggccaccggatgtgcccaagcgtgtatgctacccagctcgcgccgtctattgcatcagcactgaaatttctcaatcaggagctgactgttcaaccggcgttcgtggcttgcgaaagcacggagcggatccagattgcgattacggactttaccgcgttgtgcattttcccgacgttgatgcagagactgcagcaggaagcgcctggcttgcgctttgatttacgctatttgccacacagcccggcgctgaacgagctgttggcaggagaagtggatctggcgctgggattcagtacacccgacgatatccgccacaatgaactggacgagataaactggtttgaggatgagtatgttgtcatcagcaatacccgccgaacacagctgacgctggaagattatcttgccgcacggcatctggtgataaccccctggaacgaaaaacagggtgtactggatttacggcttgagcagttggggtatacgcggcagatagcgcttaagacgccatccatgctgagtgccccgtttatcgttgcggaaagcgacctgctaatggccattccccgttttgctgctgagaagctgaaacatgctgccagtattcagattttttcattgccattcaccataagcccgtttgaagtaaagatttactcgcataaacgcagtggccagagaggggcaaccaaatggctgaagacgacacttcacatgctggcggacgagttgctgcaaaacatttatggccatgaaactgacagtcgaatttga

SEQ ID NO: 122658 - DNA, 357 bp, Enterobacter cloacae
atgcttctggaacagttgaaaacgctggaacgcacgcttcatggcagcaggcgcaacgatcgtgaatggcttgaacagatacttcacgaccagttcagggaaatgacacgatcaggtatgttgatcgatcgttcgcagacaatagaggcactttctgccgaaacagttatcccgaccattctcagcagcgactttcagctcatccaaataagagaggatgtcgcgatattacactacaggacattcaatgcggatggcactcgcccgactttgcgttcttcttgttgggagcgggccgggagcgggcaatggaaactggtattccatcaggggacacctgatgcggggagcggataa

SEQ ID NO: 122659 - DNA, 1023 bp, Enterobacter cloacae
atggggacatggggtacaacaagcgcatcattcaagtcgttctttagcgatagagtcggctataaatccgggcttgcgcttgacaatgatgaaataattcaactcttagataaaaatgatccgctacttgatattttcaccaatcataaagaggaactgtgtcgaatcagaacaaaccacattgaagacactttccagaaagttttgtatcgcctaggcgtcacgccaaatgatttcattggtcatgccccaacattactcgatatagaatttaggaatgaaccgagtaagcacaagctattcaaacaggtattaagctatcttggagagtcgcactttgataaaggaaaacactcaatattcatagatttcgatgaggaccaatactataaaaatattcaagtgcaatttggaagtgaagcactgaatattgcacgacggctcgttgagttgacgaaagacagtgaagaggctagtccctgggactggctttcagcaagagtttttgattgggaatcaccacttgagcttagagacttatttgagagtgaatcattagacgcgatgtacggaacctttatagatcaaagatacttgaactatttatcaattaatactgacaagctcgacttaatgcattggcggcaattcgaagctctaactgccgagtactttgaacgaaaaggatacagagttgatataggaagtggaagaaatgatgggggcattgacgtccgagtttggcaccctaatgcaaataccttcgactctcctgttcagattattcaatgcaaacgaacaaagtcaaaaattgacaaagttttggtgaaatctctctgggcagatgtaattgatgaaaacgctaaaggtggaatcattgtaacaacatcatcgttttctcctggtgccgtagccgtctgtaaagctagaaaatatcccgttcgagaggcaaatagagaaacagtcattcaatggctaaatgaattacgcaaaattggtagaggtgtattcatgggagattag

SEQ ID NO: 122660 - DNA, 1059 bp, Enterobacter cloacae
ttgaatctgagcaaagatggctatccacagggtccgttgttacgtgcagtatgggagtgttgttatgagctctatgagaaactaggtcgagctccctcccgacaggaattttataacgaaattggcaaacgcgaaccacatcgcataggtattagtacacattcacgccaatggggagagtggatgcgccatcataatttctcaacatatgtagctagtgtgccgggtattatccctgaagaaatgcactctccacaatatctccgtgtatggtatgccataacacaactcggttcagcctctgccgctgatattgtcaagtggatccataatagcaacgcccctttgaaagaaaccgagattcgcattcagctggatgcattaactgttaatagcaattcccgacatcgatatcttggtagtcgtactaacgctcgtagtgacttgggtaacccatgcgacttgttatttcgtacgggaaacctacgaaatacacgatatgaactatatacccaggaactgcacggtacatgggacattggcgaagatggtagaacaccgattcagatagctgttccaagaccatgtgatcgactagtggttgaggcaagagatgaactattcactgaattacctgtggatgaaggtgactttcgtctgaaggctctacgtgaagttattgttcgggaagggcaacccgtatttagacgaaagctcattgaagcttatgagggcaaatgtgcggttacaggttgttcgatccaggtgttgcttgaggctgcccatatcactccctatgcaggtgcctggcatacccgagctcagcatggactgttactcaaaacagacattcatactctttttgaccgtggtttgctctggattgataccgactttaaaataaggatatcagaacggctagccgggacagaatatgcagagttgaatggtcgatgcctaatgttaccaaaagataaaaaaaactggccattaacaactcatttgataaatcatcggcaatattggaatgaaaaacataatgacgatgaacgcacatag

SEQ ID NO: 122661 - DNA, 903 bp, Enterobacter cloacae
atgatattcgatcgccttcccccattgcagactctgcgcgcttttgaagccacagcccgcctctcaagcatgacgctggcggcagcggagttgcacgttacgcatggcgcgataagccggcaaatccgaaaactcgaagagcatctgggttttaagctatttttcaggctgacacggcagataattctgacggagcaagggggtgaatttcaccatgtggttacccgtcttttgagtgatttaatgaaggagtctgaacgtctgcgtggaagaaacctgataaagagtttacgtataagtacaacggtgtcatttgccagtaagtggttagcaccgcgtctcagccggttcaggcagagatatccagaatttgatattcaactggatgttactgacattaatgtggatcttaatgatggtcaggtagatgctgcaattcgttacgggcttggcaattatcaaaatgtttcgtctgagcgtatgtttgatgaaacagtcacccctgtctgtagtccaggttttcttgaaaaacataatggtctgaccgagattaaggaacttttaaactgcgttcttcttcatgagtacagaatgcaggcgaactggcaggcatggtttgcgatggccggagtaaaaaatttcagttgccatcaggggcccttatggactcttggcagcatggcgactgaggctgctatacgtggcgaaggtgttgctctcggacgcagtcttctgattgcagatgatgtagctgctggaaggcttgttgttccgtttccacggtacaagcttaaggctgaacgggggtacgatttagtctaccgtccagataatcaggattcttttaaaataagcatcctaagacaatggctatctgaagaaatgagcttgctaaaagattga

SEQ ID NO: 122662 - DNA, 327 bp, Enterobacter cloacae
atggaaagtttgtttgtttacgggactctcggtcctggccggcctaacgctcatattcttgaaaatattgggggaacatggcaggagggccacgtgggaggatctcttctcgccaaaggttggggagcagaaatgggttatccgggaattgtgctggatgattcaggaaatcgtgtgcagggctttcttttcacgtcagagaatttacttaatcactggcacatactcgatgagttcgaaggttatgagtatgaacgtgttccggtagaggtaaccatatctaccggtcaggcagtgcaatcatgtatctatatgctcaaagcataa

SEQ ID NO: 122663 - DNA, 933 bp, Enterobacter cloacae
gtgacagtacaacgaaaacagattgacacatatgccacactggccatgacgtcactgtgtatagtttggggaattcagcaggtcgcaattaaaggagtagccgatgaaatatctccagttctacaggtagcaatcagaagtggagctgctgcgggctttataggtttattgattatttttaaaaaaacgcctctaagaaactttgctaattgcttagttcccgggggagcagtgggcatactttttggtttgcaattcctgtttgttgctgaaggcctgcgatatacatcggcatcgcacatgtcagtattcctttatacagcacctatttttgctgccatgggactacagttttttaggcccgatgaacgactgtgtgcgccacaatggttagggatagcaattacatttacaggcatttgtgtcgcgtttctgtcaggtaaggatccagttggtagctccagtcaggttctggcaggagacataatggggttacttgcaggactatcatggggggccactaccataattgtcagatgctcttctcttagtgagtctccagcctcacatacactcttctgtcaacttgcaggaggttttttacttttatcagcatattcatactcttccggtcagaatcactttgaccctggtaccgtcgggattattagtttaatcttccaaagcgcaatagttgcctttgcaagttatttagcctggttcagtttaatgcgcaaatacatggtatcgcagctcggtgttctctcattcatgacgcctgtatttggggtcattacggcagtatttattttgagagaacaactacggtcaggttttattttagggacgatgctaatcctgagtggcataagtattgttagtggctggtcctggttcaagtcgagatttttaactgtatccgttaacaaataa

SEQ ID NO: 122664 - DNA, 576 bp, Enterobacter cloacae
atggaaaataaatacaaacatgaccttcacgaaattctttgtttgaaaacgtttggtgaatctttcgaggcttatcgcgtcgatgattatgactcaatgatcattgagtgggcagaaagcgagctactctgcggcaatagctctgaatcattgttaattttagcctccctcaatttagataaacgtcctgattcaggtgaaattgagcgctacctttatgcatatatgcttgaacaaaacatcgttatgcccagcattaacgctagcgcaatgacgtggctaaggatcaaagcttggtttctgatgcatgccgagacttccaaagaattagagttacggctgcatcaaatccctgcgtttcacccatctccgggttctcgtatcctcagcaacatcggctggcagttttaccgcatatacaatgatctctatgatgattgggggcctggctacccctctaaggcctcagcgatgagcgaagcagatattcttgattttgtgaaatgccgcgtgaaacctttctatcgtgttctctgtagctccgattgggcctgggttatggcccgagcagtataa

SEQ ID NO: 122665 - DNA, 3558 bp, Enterobacter cloacae
atgtctaagtttagcagttatgaatattcaccctatgagacacgaaagatattacgtactaggtttacatctaatctgactgtaacaaatacacatccacgagaaatcaacgaagagaatctggtagatgatattctggcagtggattatctgtctaaaacggacataaaagataatgcatatttaatcacttcgaagtcagactacgaaaacactaaacagccacaacatattgatatttcgtttgacgaattgattagtcaaggctgggtcaagttagtatggggcaagttacggaacatcggaaatatcagaaaaaatatctatagcgttaaggatgataaatattcagccataaaatcactgctcctcagtcttggcaaaaaaacgtataccatcgtcgcggatgcagatggagaaaacgaaaagactcaagtatttgatcatgacaactttagctgcctttctcccgcgtgggttgccgcaagattatgggagattacgcttaaccagtctcagaacaatgctgatgcattgaaaaaatggctttcactttggagtttattagataaccctccggttgtatccagcattgcttggcgtaaacaagatgctcagacactcatccagactatccttgcagaacttaagcaagaaaaagggtttacacgatgggataactgcatagaagttctggaacgtgaatatacaatacttaaagaactcacgtcgcaccctgtttattaccatgttaaaacacctccctcgacgctggtcggaaaagctatctggtcagagtccagagaagtggaaggttacttttgggaatcgtttgatacttatggagaaatgcataatttaatgcatctgttattacttcagataaacaatgatatccactgcaaagtccctcattatttaattgaacctctaatagacatgtctgccgagtactgtgaaatgctgttttcaatgttgcttcagacgaaaaacatgcccgccctattggttgatattttgttctacccgccgagctcagctttagcttatttgctcatcgcaaaatggccaatacacactggagcatgggatcgcaaactcgttgagactgatttgcagcacgctcgtgaagcgtgtattgatgatgcattaagcattctgacaagacacgtatcactcggcagtactccaccctcagagatggctgacctttacaactggttgataggtaacaacagtgaaaaatatattgataacctgaaaacagtagacttaaccataataaattttagaaaagcattaagtcagttagacaggaatatcatatttgctatgatttcgcatcttttggaacatcatgaaatagcaggtatttattctccggaattcgccacgctgctggatttatgctccacggggcagcttgaagaaaaaatagatgcgggaaaaattctcaaactttactcggattcattgctgaaagatacaatcggaagatctgttcacaggatagggagcgacgaagctaacgctcttcataaaatattaaagtcaagcgaagacacatatgaagcttttctgtatccatttgatgtcactgctcttataaaaaaaataagcgaagacgacaatatgtactctgaagtagataaaattgcacattcactcagaactcatattcgtattttatgcagagcgctttcgaaatctgatgctcagtctaaaacacaaatagttaactcattgataaaatatgtaaaatctggagctttattacataaagaaaaaggacgaatagatgcattttccccgcgttttgatcgttatatatcttcaccctcatatataactatggcttttgatctttcgattgcgttacacctgattaacgctgagcagcagaattatctgcttaacgcaatatgtgaaactgatgaacctagtatgttagcaacattacttccaattgttcctttttccttgcggagtaagataaccgaaagaatcaatgaattaacacctgaagatgcaggtgagatttattccctgacagatatgcagtcgaggatagatgaactgcttacagtcggtgctgttacagccgcagaagcttatattaaatctgaacgaaatttaaaaacactggggaaagtaagaggcagagaaatacttcgtttgcagtacgatctccgattgatgtttttaaagaaagaatgggagaaaataattaaccacccgatacccgcagacatcaccccgcatgaaaaagatgaggcaagcgacgttttggctcactttcgcgcgctcgcattcctatcttgtgatacacccaatccgatattttctcgcaatgaattcgaaaggttgtttaataaacagccctcgattgcacgggtgacaaactggcttgcagcagaactgcaaatattaattcaaggcgacacattcgagctacttacaggagaagcttacagcgcaggagtggccgcagtttctaagctggaagcaatgttatccaaagtaacggaagataataacaatgagacattaaagtgtaacacagccctgctatacctagtactcggtgagacagagaaagcacttaatattctatctggctttcaattcattatgctgcaggatactgcttcagcatataaggcagtatcctattacagacttggcagactcctagaagcaaacgcagcgcttgatacggcagaacatatttttggtatcactggcgtattggcggctgccagaaattatatagccaagggctctgtagcgctttctttgcctcaagtcattcttacggaagatattattaaagtggtttcttctgcaattttgaaatttaaagatatgaatcctgataacaaagcggagatcttaaagcagaagaagaactcctttgctgaggttttagttgatcacgtaagagcagcttctggctcgcttatagcattagttccaacaatgaagcaaataacagtagatggttgtgaggatgatttatccgctttattcaggcattttttatccggccggcttgagtttttaggctggaccgttacagaacaatcacgtggcggatacagtggtaatctcaaccccggagaacgggatttgactattagctggggaagcaccgagctgtccgtcattgaagctgttatttgtagtaaacctttgacccaagatactcaaaaagctgatttgcttagccattttcagaaattactgggatacacgcatagcagggttatgttccatataacctacgcttacattgaagataaaactgatattttggaatttctgaaaaccagcgccaaagaacattctcctgatggttttaattttatgggtctcgaagatataccctatactgattctcgcccacctgggtttattgcgtcctacaggggagattttgaaatctttcaggtagtgtttttgatactgaatatgggacagcaaaggcaaaagcgtgcagcaaaaactgctgccgcaacaaaaagaagaaaagcgccaaaaaaaattgaggccaaataa

SEQ ID NO: 122666 - DNA, 789 bp, Enterobacter cloacae
atgtctgcggagaatttatcccaaatgggtgcggcaaaagtgcagcgtttggtggatcaatatggtcagcaagtcatagaaaaatgccctgttagtcctgtggaatacgctttctacgagcgtgcagcggaagagctcaacagcagggggatcaaaacgccgacgctgttgtctgccgatccacatccacgccggttaaggctggaatatatccctggaaaagtgtctcaggatgaggtgtcgggggatgacatattgaaatgcctttctcatcttcatcgcactccaccagacccaacctgggtgtatcaacctcattcctggtctgagaaagcgcttgaaaaatcactggcgcttttgaaattaccggaccgcgcggcccaccagatgcgctgttttcaacaagcgggcagcgttttgtttcggcagaaatgtttaatctcaggggataccaatgccggtaactgggggaggagagaaaacggagagtgggttctctttgactgggaaaggtttggcacgggcagtccggctatcgacctcgccccgctgataaaggggatgggctccaggcaaagcattttacagcttgcggagcgttacagcgtgcattatccgcatatgcctgcccgacagttagcgatggaaataacccttgctaaagcatggattgtgtcagaggtggtgtccctgctctatgaccgaaataaaacagattttgagctgtacctgaactggtacagagaaacgcttcccggctggctggacgaggctatctcagtactttaa

SEQ ID NO: 122667 - DNA, 489 bp, Enterobacter cloacae
atggtctggagtttttttaaaatggaaaatcacatgacaactgtcccttccctgtcttacgcgctctctgaagaaagcgctatacaccatctgattcatctacaactgcctgaatctgcagatctcttcgaactggccgatgcctgcaccgcgtatgtaagcgtgctggtagaaaccgacgatgcggtcacccatgcaacactgtgcacgcgtttgctggcagtccttaaacgccttcgcgcgcgttgtgattctgccctcccgccttatctggtcgaacagctgattgcaggagagaagattgtctcctgcgttccggactgctggcaggatacgtcgctccaggtggactatgcgctggcgttaacgcaggcggtaatgggcggaacattgcctgcaaacgtggcaaaagagctgaccggtctgctacatgatatggtctggctgctggcggagttcgtcaaggagccgtatatcacggcgcactaa

SEQ ID NO: 122668 - DNA, 687 bp, Enterobacter cloacae
atgcgtaccacccactccacatttcgtcttgccggaaccacggtccaccaaattaccttcgatcccaccacctttaccgacgccgacctcctctggcttcctcaccacaacgcgcttgctcacgctgtccccaaacgtaaagctgaacacctggccggacgcctcgccgccgcccacgccctgcaggaatatggctttacggccataccggctatcggcagcagcggcgaaccgctgtggcctgacggcatgacgggcagcatcagccatacggccagtcgtgcgctggccgttgtaacgccgcacgggctaacgggtatcgacggggaaattatcctcgctgatgacgaagcggtggagatcaaagacgggattattggccccgcagaggacacgctgctgcgccacaccggcctgccatttgcgcaggcgctgacgctgacgtttagcgccaaagagagcctctttaaggcgctgttttcacaggttaacgcgatgatgggctttgattgtgcccgcgtcacggcgctcgacgagaacaccctgacgctggcgctgacccgcccgctggcggggttttcgcaagatgatgccttcacgctgttttggctgcgtgacggcaacacgcagatcatactgcttccgccttttcccgccgcttcgcgcaagtcatcatcacggcgttga

SEQ ID NO: 122669 - DNA, 1389 bp, Enterobacter cloacae
atggtgtcacccgcagtttgcgtaagcagccccgtcctcgagcgcacacaacgcgtggcatggttgttttatgagcgcgcttcccacagcgcggccactacgctattgcaaatgcaaatagttatcaataatattatcaataaaatttgtcctgaaacaaaaaagactgataaacatgaggttatacgggtgacggggttaaaaacgggaagtgaagcctggtggcagtcgaaaaacggacccgaatggacccgcgagatggggcactatcgcgtcactttctggtggcgtgacacggcaggaacgcaaaaaacctcgccgctaaaacgcgtctggctctacatcaccggcgtgaccgatcaccatcaaaatgcccgtccgcaatcccttgagcgcattcctgatactgacgtctggcagtggcagggcgcgttcaccccgcaatggcgcggcagctactgttttatcccctcagtgaacgaagatgattttgccgacgcggtcttccacggcgagcaacccgatcgtttggcgctgcgtgaaggctggcgaaagttgctccccgcggcgatggccgatccgttaaatccgcaaagctggcgtggcggacgcgggcatcccgtctcggcgctcgaaatgcccgaggccccggttcagcccggctggaacacgcccgcaacgcccggcaacgcgcccgtctgctttgaatgggaaagcgtgcgtctgaataaccgccgccgggtgtgggttttcaccaccggtgaagacagcccggagcggccgcttgccgtactgctcgacggccagttctgggccgaaagcatgcccgtgtggtctccgctaaccgcgctgacaaacgcgggcaaactgccgcctgccgtctacgtcttaatcgatgtgatcgacatggcgcaccgcaatcacgagttgccctgcaaccctgatttctggcaggcggtgcaggaggaacttctcccgcgggtgaacagccgcactccgttcagcgaccgcgccgaccgaacggtagtcgcgggtcaaagctttggcggcctctcttcactttatgccgggcttaactggcccgagcgctttggctgcgtattaagccagtccggctcctactggtggccgcaccgtggcggtcagcaggacgggttgctcatcgaacaacttaaagcgggcgacctcaccgcgcgcgggctgcgtatcgttcttgaagccgggcgcaatgagccgctcatcttccgcgcgaatcaggcgatctacgccgaactgcacccgcagcaaccggttatctggcgtcaggttgacggcggacacgacgcgctttgctggcgcggtgggctgacgcaggggctgatgaccctctggcagccgcttattcactaa

SEQ ID NO: 122670 - DNA, 213 bp, Enterobacter cloacae
atggaattcagcaaccctttcgataatccgcagggtcagtttgcgattttgcgtaacgaccagggacagtacagtctgtggccgcagcagtgccagctgccggcgggctggcgcgtggtctgtgaagcgcagtctcaggaagcctgtcagcagtggctcgccgaccactggcaaaccctgcaaccgtcttattttgcgggagagaaagcatga

SEQ ID NO: 122671 - DNA, 1239 bp, Enterobacter cloacae
atgaaagcactcacgtatcacggcccacatcatgttcgcgtcgagaatgtccccgatcccatcattgaacagccagacgatattattctgcgggtcacggctacggcgatttgcgggtccgatctgcatctctatcgcggcaaaatcccgaaggtgcaacacggcgatatttttggtcatgaatttatgggggaaatcgttgagtgcggcagggaggtgaagaatttacagaagggcgatcgcgtggttatcccgtttgtgattgcctgcggtgactgtttcttctgccgtctgcagcaatacgcggcctgcgagacgaccaacgccgggcagggcgccgcgctgaacaaaaagcaaattcccgcgccggccgcgctgtttggctatagccatctctacggcggcgtgccgggaggccaggcggaatatgttcgcgtaccgaaggggaacgttgggccgttcaaggtgccgccgctgttgtccgatgacaaagcgctgttcctgtcagatattttacccaccgcctggcaggcggcaaaaaatgcgcagatcgaaaaaggatcgagcgtggccgttttcggtgccgggccggtggggttgctgaccattgcctgcgcgcggctgctcggggcggaacagatcttcgtcatcgaccatcacccgtatcgcctgcgattcgctcagtcgcgctacggcgcaatcccggtcaactttgatgatgataacgatgccgccgaaaaaatcattgagcaaactgccggccagcgtggtgtcgatgcggtgattgatgccgtcgggttcgaagccaaaggcagcaccacggaaacaatcctcagcaaccttaaaattgaaggcagcagcggcaaagcgttgcgtcagtgtatcgcggctgtccggcgcggcggcgttgtcagcgtccctggcgtttacgccgggtttattcacggcttcctgtttggcgatgccttcgataaagggctgagtttcaggatggggcagacacacgtccacgcctggctgggcgagttgctgccgcttatcgaaaaagggctgcttacgccggaggagattgtgacccactatctgccgctggcggatgcggaacgcgcctacaagattttcgaaaaacgggaggaggagtgccgcaaggtcattctggtgccgggggcggaaacgcctgacgcggcagcacagcaggtgaaaggcctggtcaatgctttcccgggtggggtggtgtga

SEQ ID NO: 122672 - DNA, 831 bp, Enterobacter cloacae
atgagcgattacgacaaaattacgttgaaagacggcagttatttatattttaaagactggggaagcgggcaacccgtggtgtttagccacggctggccgctgacggcggatgcctttgaagaccaaatgttatacctggggtcaaaaggatttcgcgtaattgcacatgaccgccgcggacatggccgctcagcgcagccgtgggatgggcacaatatggatcagtacgccgacgacctggctgagctgacggcgcgtctgaatctgaaagacgctgttcacgtggggcattcaaccggcggtggcgaagtggcgcgctatattggtcgccacggtacggatcgcgtggcgaaagcggtacttattggtgccgtgacaccgattatgatcaaaaccgatttcaacccgaacggtgtgccgaaagaggtgtttgatggtattcgggaaggcgtgattaacgatcgcgcggctttcttctatgcgctgaccgaggcgttttatggctataaccgcccgggggcgaaagagtccaaagcggtgcgggagagctttgttgagcaggggcttcaggggtcgatcaaggcgctgtatgactgcgtcaaagcgttctctgaaaccgatctgcgtgaagatctgaaaaagatgactatcccgacgctggtgatccacggcgacgacgaccagatagtcccgatcgagacctgtggtcgggtggctgcagagatcctgccgaacgctgaactgaaggtctatgccgggggttctcacggcatatgcaccacgcataagcaccagatcaatgacgatttgctgaaatttattcagtcttaa

SEQ ID NO: 122673 - DNA, 789 bp, Enterobacter cloacae
atgtatgttgcggtaggacagtttgcggttacgcctgactggcaagagaatgcagatagatgtgtctctctgatgaggcaggcccgcctgaaagaagcatccttgctggtgctgccggaggcgctgctggcaagagatgacaacgacccggacctgtcggtgaagtctgcccagcctctggacggcggatttttacagcacctgctggcggaaagcgcgggcaatggtttgaccaccctctttacggtgcatgtcccctcgacgacgggacgggcggtaaatacgctcgtggccatccgtgacggcgcgatcgttgcgcgctatgccaaactccatctttatgatgccttcagcattcaggaatcacggcgggtggatccgggagacagtatcccaccgctgcttgatgtcgatggctttaagattgggttgatgacctgctacgacctgcgttttcctgagctggcacttacgctcgcgttaaagggggctgacgtgctggttgtgcctgccgcgtgggtcaagggaccgcttaaagagcatcactgggcaacgctccttgcagcgcgtgcgctggatacaacctgttatgttgtggcctcgggggagtgcggcaataagaacattgggcagagcagggtggtggatccgctgggagttacgatagccgctgcggcggaggccccggttttgctgatgacagagttacagcgggagaggattacgcttgcacggcagcaattaccggttcttcgcaaccgtcggtttgcgccaccgcaattattgtga

SEQ ID NO: 122674 - DNA, 1113 bp, Enterobacter cloacae
atgcgtaagcagtggctggggatctgcattgcggcaagtttacttgcggcctgcacaagtgatgatggtcagcaacaggcaaccgtcgcgccgccgcagcctgcggtttgtaatggcccgatcgttgaaatcagcggtgccgatcccgtttatgaaccgctcaatgccagcgcgaatcaggattacgagcgcgatggcaaaagctacaaaattgttcaggatccctcccgctttagccaggctggctttgccgccatttatgatgccgagccaggcagcaacctgacggcgaccggcgaagcgttcgatccgatgcaactgacggcggctcacccgaccctgcctgtcccgagctacgcccgtatcaccaacctggcgaatggtcgtatgatcgtggtacgcattaacgatcgtggtccctacggtaacgaccgggtgatctccctgtcacgcgcggctgcagaccgcctgaacacttcgaacaataccaaagtccgtattgacccgattatcgtggcgcaggatggcaccctctccgggccaggtactgcgtgtacgacggtggcgaaacagacttacgcccttcctgaccgcccgaacctggacggcggcatgggaagcgtctcttctccggcagagccttctcagccagcaggagaagtgcgcccaatcagcaatgatacgctgcagagcgaagacacgacgggtgcgccggtaaagagtagcggcttccttggcgcgccgaccacgttagccaccggcgtgctggaaggcagcgaacctacgccagcaccggctcctgttgccgctcctgccacagagcctgcgcccgtaacggctccggcgacggcgcaaaacacaccggttgcggctccagccgcggccagtggcggctttgtggttcaggttggggcggtaagcgatcaggcccgtgcgcagcagtatcaacagcgtctgagccagacgtttggtgttccgggacgcgttgcgcaaaacggcgcagtatggcgtattcagatggggccgtttgccagcaaatcgcaggcagcgtctctgcagcagcgcctgcaaaatgaagcccaactacaatcatttatcgctgttgcgaaataa

SEQ ID NO: 122675 - DNA, 570 bp, Enterobacter cloacae
gtgcgacaactggcaacaatactcttatctctggcggtgcttgtcaccgctggttgtggctggcatctgcgcaataccacggcagtgcctgctgaaatgaaaacgatgattttcgactcatcggatccgaatggtccactcagccgggcaattcgaaaccagctgcggcttaacgatgttgagttgattgagaaagggacgttacgtcaggatgttccatccctgcgcgttctgggctcaaccttagccaaagacacggcgtccattttccaggacggccgtaccgcagagtatcagatggtcctgtcggttaatgccgccgttctgatcccgggtaaagacatctacccaatcagcacgaaagtgtaccgttcgttcttcgataacccgcagacggctctggcaaaagacgccgagcagcagattatcattaacgaaatgtacgataaggccgcagagcagctgatccgtaagctgccgggcgttgccgcatcaacgaaacagggttctgacatcatcgaaaaaccggatgccaccacgcctcctgtttctgcctccatgggtaactga

SEQ ID NO: 122676 - DNA, 1413 bp, Enterobacter cloacae
atgcccacccatctggtttggtttcgcgcggacctgcgcgtacatgacaatctcgcccttgcggctgcctgccgctccccggaagcccgcgtgctggcagtgtttatcgccacccccgggcagtggcagcagcatgctatggcaccacgccaggcggcttacctcagctcacatctgaatggcttgcagtgttcgcttgccgaaaaagggatcccgctcatttataaagaggtcagtgacttctccgcgcaatgccaggctgtgaaggcaatctgtgagcagtacgatgtcacccaccttttttacaactatcagtacgaattcaatgaacgtcagcgggatcgtcagctggagaaaatcctgcaggatgtagagtgtcagggttttgatgacagcgtcatgctgccgccgggcagtgtcatgaccggcaaccacgagatgtataaagtctttacgccgtttaaaaatgccttcattaaaagactgaaggaggcgctgccggaatgcgtggctgcacccaccgtgaggggagaggccataacggagatacccgagcgggagtttgactatccgcaacaggcgtttgatgagactctgttcccggctaccgaaaaaaacgctatcgcgaagctgcgccagttttgtaaagcgggcgcaggcgattacgacgcgcatagggattttcccgcgactgagggcaccagccgtttatcggcctgtctggcgctgggcgtgctctctccgcgccagtgtctgcatcgtcttctggcggaacaaccgcaggcactggacgggggccccggctccgtctggcttaacgaacttatctggcgcgaattttatcgccatttgatgacgtatcaccctgatttatgtaagcatcgaccgtttataccctggactgataacgtaaaatggcaacacaacgagagccacttacaggcctggcagaaaggcgaaacgggcttcccgattgttgatgccgcgatgcgccagctcaatgaaaccggatggatgcacaaccggctgcgaatgattaccgccagcttcctggtgaaggatctgcttatcgactggcgtgtcggggagcggtattttatttctcagctgatcgatggcgatctggcggcgaataacggcggctggcagtgggcggcgtccaccggaaccgacgccgcgccctatttccgtatttttaatcctgccacgcagggacaaaaatttgatgcagacggcgagtttatccgccgctggttgcccgcgctgagcagtgtccctgcaaaagcgatccacgacccgtgggcatgggcggataaacagggcgtgaagctcgattatccccgtccgattgttgaccataaacaggcgcgtgtcgccacgctggcggcgtacgaggccgcccgcaaagcttaa

SEQ ID NO: 122677 - DNA, 738 bp, Enterobacter cloacae
atggcaaagattgatttaaacgccgatctgggtgagggcggaagtgctgatgctgaactgatgacgctggtctcttcggtcaatattgcctgcgggtttcacgcgggtgacgcgcaaaccatgctggtcagcgtgcgtaatgcgattaagcacggtgtggcgataggggcacatcccagttttcctgacagggataattttggccgcacggcaatggatctccctcctgagacggtgtatgcccagacgctctatcaaacgggcgcgctggaggcgattgtgcgttcccagcagggcgtgctgcgccatgtgaaaccccacggcatgctctacaatcaggcggccaaagatccggctctcgcggatgccattgcccgcgcggtgcgggactgcaacccgcagctcatcctggtggggctggcggggagcgagcttattcgtgcgggacagcggctggggttaaccacccgtcaggaagtttttgctgacagagggtaccagccggatggcagcctggttccccgttcactgcccggtgcgcttattaccgatgaatcacacgcgctggcgcaaacgctggcgatggtatgtgaggggtcggtaaaggcaattgatggttcaacggccagagtccaggcggatacggtgtgtttacacggcgatggtgagcatgcgctgcagtttgcacgccgcttacgggcggcctttgcggagcagggtattctcgtgagtgcatga

SEQ ID NO: 122678 - DNA, 1821 bp, Enterobacter cloacae
atgacgatgcaggaattgttgctggaagcggtagaacagcgactactgcgccacctggacgtacagttcgccatgatggtgtccggtgatgagcctgccgtgatgctcgccgctgccatcctgagtaaagacgcaggggaagggcacgtttgcctgccgctttcgcgtctggtgatggatgagaaaatgcccgcggccctgcagtcctgttttgcactgctgggagaatccgtggactggccgacggtgttgcaccgttcgcctgccgtcagcgcagccgatagccagacacccatgatcctgacgggcgatcgtttgtatctcaaccgactgtggcgtaatgaactggcggtcgcgcgttttttcagcgagaccaatgcgcctcttccctgcgatgaagcccaactgcggcaaacgctggataccttgtttacctctgttgaggcgacagactggcagaaagtggcggcagccgtggccttaacacggcggatctccgtcatctctggcggcccgggaaccggtaaaaccaccaccgtggccaaactgcttgccgccctgattcagttatcgggtgagcaaaagtgccgtattcgtctggcggcccctaccggcaaagcggcggcgcgcctgaccgagtcgttaggtggtgcgctgcagaagttgccactcaccggggagcagcttgcccttttcccaaacgaagccagcacgctgcaccggctgctgggcgctcagccgggaagtcagcgtctgcgctatcacgccggtaatccgttgcatctggatgtgctggtggtggatgaggcgtcaatgatcgacctgacgatgatggcgcggttgattgatgctctgccagcgcacgcccgcgtcattttcctgggcgatcgcgaccagcttgcctcggtggaagccggggcggtgctgggagatatctgcacttatgcaagcctgggatataccgctgaacgcgctgaggagctgtcccgtctgaccggctgttcgctcgccagtgaaaaccattccctggcgggggcgctgcgcgacagcctgtgcctgctgcaaaaaagctaccgtttcggcagcgactcgggcatcggtcagctggcttcggctgtgaacagaggcgaccggcagacgacctgtgcggtatttgacggtcaattcaccgatatcgagaaaaaatcgctgcaaaccggggaagagtatcaggcgatgcttgatgacgccctgcaggggtatcagcatttcctgacgggtgtacaacagcaatgcacgccggcacaggcgctcgccgcctttggcgagtatcagctactgtgcgcactgagggaagggccatttggcgtaagcggtctgaacgacaggttcgaacagctcctgggccagaaacgcaaaatccaccgcaccccgcactcgcgctggtatgagggacgcccggtgatgatcgcccgcaacgatagcgcgctggggctgtttaacggggatatcgggattgccctcgatcgtggactggggctgcgcgtctggttccagatgccggatggaagcgtgaaatccgttcagcccagccgtctgcctgaacatgaaacggcctgggcaatgacggtgcataagtctcagggctccgagttcaaccatgcggcgctgatcctgccgacacagctttcgcccgtcattacccgcgaactgatttataccgccattacgcgcgcgcgtcagcgcctgtcgctgtatgccgatgaacgtgtgctgctacaggcgattgccacccgcacggaacgtcgaagcggcctgagcgcgatatttgaatccctttaa

SEQ ID NO: 122679 - DNA, 3375 bp, Enterobacter cloacae
atgttaagggtctaccactcaaatcgtctggatgtgctggaagcgctgatggaatttatcgttgagcgcgagcggcttgacgatccttttgagccagaaatggtgctggtgcagagcaccggtatggcacagtggctgcagatgtcgctttcgcgtaaattcggcattgccgcaaatatcgatttcccgctgcccgcgagttttatctgggagatgtttgtccgcgtgttgccggacatcccggaacagagtgccttcaacaagcaaagcatgagctggaagctgatggcattgttgccggacatgctgcagcatgatgaattcgtcatgctacgccactacctcaatgacgacaccgataaacgcaagctgttccagctggcatcacgcaccgccgatctctatgaccagtatctggtgtatcgcccggaatggctgactcgctgggaagcgggcgagcgggtcgacgggttaccggaggcgcaagtctggcaggcaccgctctggaaagcgctggtggaacacactgagaaactcggccagccgaagtggcaccgtgcaaacctctaccagcggtttatctccatactggaaaacagcgctgagcgaccagcccggctgccctctcgcgtgtttatctgcggcatctcggcgctgccaccggtgtatttgcaggcgctgagtgcgctgggtaaacacatcgacatacatatcctctttaccaatccgtgtcgccagtactggggcgacattcaggatgaacgctggctttcgcggctggtgtctcgtcagagacgacgcctgtttgaagagcgtaccgtgccactgtttaaagacagcgcgtctgccgcacagctatttgatgagcacggcattcaaaatctgccgaacccgctgcttgcctcttggggaaagctgggccgtgactacattcacatgctctcagacatcacgtcgtcaggcgaaggggatgtggatgccttcgtcgagatcgctccggatagcctgctgcataatatccagctcgacattctggatctcgaaaaccgcgccgtcatgggcgtaacggcgaaagaatttgagcgcagcgacagtaagcgcaagctggacggcgacgatcgcagcgtcacgatccacgtttgccacagcccgcagcgcgaggttgaagtccttcacgatcaactgctggcgatgctgcaggacgatcctgagctgacgccacgtgacattgtggtgatggtggcggatatcgacagttacagtccctttattcaggctgtttttgggagtgcgacaggtgaacgctacctgccgtacgccatttctgaccgacgggcccgccagtctcatccggccttgcaggcctttattactttgctttcattaccggatagccggtttatctccgaagatgtcctggcattactggatgtcccagtcctggccgcacgtttcaatattaatgaagaggggctgcgttaccttcgtcagtgggttaacgagtccggcgtacgctggggcattgatgatgacaacgttcaggcgttcgagcttcctcctaccggccagcacacctggcggtttggcctgacacgtatgctgctgggctatgcgatggaaagcagccagggcgagtggaatgaagtcctgccctacgatgagtccagcgggttgatcgctgaactggtcggtcatttagcttccctgctgatgcaacttaaccgctggcggcttgagttgatgcagccgcgtccactggatgcgtggctcccggtatgcagggcgttactcaatgatttcttcctgccggacagtgataccgaagccgctatggcgctcattgaaacgcagtggcaggcaatcgtcgaagagggcgtgagttcccactataacgaggctattccgttgtcattgctgcgcgatgagctgacgcaacggctcgatcaggagcgaattagccagcgtttcctggcaggcccaatcaatatttgcaccctgatgccaatgcgttctatcccgttcaaagtggtgtgcctgctcggaatgaatgacggtatatacccacgcgccctggcgccgctgggttttgatctgatgagtgcgaatccaaagcggggcgatcgtagccgtcgtgacgatgaccgttatctcttccttgaggcgctcatttcggctcaacgtcagctgtatatcagctatatcggccgctctatccaggacaacagcgagcgctttccttctgttctggtgcaggaactggcggattatatcgggcagagccactatctggcgggggatgaagcccgtaactgtgatgaaagcgcgcagcgggtgaaggcgcatatcacccgcttccatagccgcatgccgtttgacccggtgaactacgtggtcagcgatcatcagagctatgcccacgaatggctgcctgcggcgaaaaaagaggggagagcgcataccgatttcattcaggagcttgatcctcgtccgatagacaccctgacctttgaacagcttcagcggttttgggggcatccggtacgcgctttcttccagcaacggttgcaggtcaatttccgttctgaagagagtgaaattcctgatgcagagccgtttacgctggaagggctggagcgttatcagttaaacctgcagctgctgaacgcgctggttgaagaggaagatgccgacaagctttaccgccgctaccgtgctgcggggcagttaccctacggggcgttcggagaaattgtctgggaggcgcagcgccaggagatggaagctctggcagaacgcgtgagggaatgccggcaacccggaaccagtattgaaatcgatctcaactgccagggtgtgcagctcacgggctggctaactcaggtacagccggatgggctcctgcgctggcgtccttccatgcttagcgtttcacaaggtttgcaactctggctcgaacatcttgtctacagtgctggcggccataaaggcgaaagccgtatttttgtccgcaaagagggcgaatggcgctttccgccgatggacgcagagcaggcattacgttatttatccttgtacgttgaaggctatctgcggggaatgaataaaccgctcctgctactgcccgagagcggtggcgcctggataaaagcttgttatgacgcacagaatgatgccatgttaacggatgacgcttcactgcagaaagcacggagtaaattcatgcaggcgtatgaaggtaacatgatggtgcgcggcgaaggtgaggatgtctggtatcaacgtttatggcgaacgcttgagcctgaatacttcgaggctatcacggaagaagcacaacgctacctgttaccgttgttcaaatttaatcagtcctga

SEQ ID NO: 122680 - DNA, 324 bp, Enterobacter cloacae
atgccagctgccgtgagcagagaaaaaggctttagcatggttgaggtattactggcgatgatgctgctggtgatgatcgtcacggcactgtcgggttatcagcgagcactggcgacgcggttctctatgtttaatcagtatcgtcagctctggcaccatgcctggaatcagtctcagctttcaacaattgctctcccggcaggctggcaggtcagtcgggggcagacaacactctctggatgtgtcagcatcacggttacacttatttctcctctggggcggcgcggcgagatgacgcgtctgcattgcccggttagccagtag

SEQ ID NO: 122681 - DNA, 402 bp, Enterobacter cloacae
gtgaaccggcagcgcgggatgtcctcgctggcgctggtattacttttactggtgttgggcacgctgatcctcaccggcctcaatcagcagctgaccacgtttagcgcactggtgggcggtgagagccgctcggttcaacagcaggcatccgtgcagtcagcgcttgaatggggacgcgttcagagctggttatctgagcctgagatccagtgcaaaaaggtatcggcgtggcgagtttgcctgcgactactgaatgaagcgcgtgtgctgcttatcgccgggagtgatgacctgctgctatggcgcagaggcgaaatcatcgacggtaagatctatttctcgccacacggctggagtgatttttgtccgcttaaggagaatgcgttatgccagctgccgtga

SEQ ID NO: 122682 - DNA, 561 bp, Enterobacter cloacae
atgtccctaaaccagcagggtttctcactgatggaagttttgattgccacggcgatcagcagtcttttactgataagcgcctcgcgctttttaccgggcttgcagcgggctgttttacagcaatccggtcagcgggagcttgaggaggaggtgtggcaacgccttttttcccttggcaaacagcttcagcgtgcggggtattgcgccggaaactgtgcggggcagggactgacgatcggcaggcaaggtcgctgtgtcattgtacggtgggatgcaaacagtaacggtaactgggatagctcgtcttcggaaaacgacagcacaggttttcgtctggaatcaggtgcactggagatcctgcatggggcgacctcgtgtgagggtaaaggatgggagaaactcactgaccccaacaggcttctcatccagcactttgtggtgagtcaagttgagcatgcggggtttgccccccagttgaatattgaaatgaccgcccttcgtcagggcgagcagggggccccctgtcaggctttttatggcgtcacggggtacaacctgtga

SEQ ID NO: 122683 - DNA, 465 bp, Enterobacter cloacae
atgaaaaaagagaacggttttacgcttatcgaaaccctggtggctatctcgctggtggtcattctcagcgcctccgggctatacggctgggacaactggcaacggcagcaacggctctggcaaaccgccgggcagatgcgcgattacctggcatttctgcgcaatgacgcaaaccggcacaaccgtgaccaccaggtcacactgcggcgcgacaggggcgtcacctgtctgatgagcgcattcgtgcagggctgtgataagggcagtccgtttgtatttattcccctgtggccggaggtcacggtaagtgaaataacgccgttatttggcttctatggactcagggatacggcatgggcagggcgaatacgcctgcaaagtcgtgcaggagaatggctcgtcattgtctcgaatggagggcgaatcaggatgtgcaatgtcacaggagaaggttcatgtccctaa

SEQ ID NO: 122684 - DNA, 477 bp, Enterobacter cloacae
gtgactattctgcctctctatgccgcgcctcagtatgcggaacaggtaactgactggatctggcaggcgttcggtgacgggcttacgcgggcgtttttccagagcatcgttgaacatagccagacgccgggcgcgttaccgttgacctttattgctctggagggcgaacagcttctgggtacggttgggatctggcgctgcgatttaatcacccgacaggatctttgtccgtggctggctgcgctgtacgttgatgaagcggcgcgtggtaacggactggcgggaaaactgcagcagcatgttatcgcctatgccgcacaggccgggtatcacgaactgcatctgtggtctgcctgccgcgacttctacgaacgttacggctggcagtacattggcgatgcgctcgaatacccgaacaaaacggtacatctgtatcgctattcctctcccgcttctgctggcgaacctacagagtga

SEQ ID NO: 122685 - DNA, 1155 bp, Enterobacter cloacae
atggtctgcaccctcaaaagaagaatggctatgtcagcaatggatttcaaaaaaaatacggatctcgacttcccccattacgcggccccggcagtcagttccaaagaaattgaccttctgggactgttagaagttcttctggcggcaaaaaaacgtatcgtcgtgattgccttcgcattcgcactggttggactggccatcgcgttcttactgccacaaaaatggaccagtaaagcggtgatcacaccggcggaacagacgcagtggaacccgctgcgccagatgatggtcgccctgcaggtgctcgacgtggacgtgaaaattacccgtccggacgtgtttaaccagtttattaaaaagttccagtcgcagtcgttgcttgaggagtacatgaaatcctcaccttacgtgatggcacagctggaaggcactgatgtggatccgcttgagctgcatcgtgcggtggtcaatatctccgaaaagatgaaagcggtagataacactctggcaaaagacgcggataaagcgccgtacgtctcgtggacattgagcttcaccgcgccgacggcgggggatgcgcaaacggttcttaaaggttacgtggattacatctcgcagattgttgagcaggaaaccatggagaatatccgtaaccagatcaccctgaaaaccaaagtggtggagcaacagctggagctggatcgggtacgtctgacgaatgttcacaacaccaatctgcagcgtcttaactattctctggaagtggccaacgcggcgggtatcaaaaagccggtctacagcaacggtcaggcggttaaagacgatccggattactccgtcgcgctcggtgccgacggtatcgcgcaaaaactgcagattgaaaaaaatctcaaggacatcgctgagctgaacgcggacttccagaaccgggaatactacctggcgcagctgaaaaagctgtctgtcgaagacgtcaaacttgaaccgttcaagtatcagctctctccatccatgccggtgaaaaaagacggtccgggcaaagccctgattgtgatcctggcgggactgctgggcgggctgtttgcctgtggcagcgtattactgcgcgaggccatgctcagccgcaatcctctggtcgagcctgtaacggaataa

SEQ ID NO: 122686 - DNA, 867 bp, Enterobacter cloacae
atgcgttattcacctgaagcccttaccgcattcgttgagaccgtcgcggcgggctctttttctgccgccgcgcgtcggttacgtaaaagccagtcgaccgtgagcacatccatcgccaatcttgaagccgatctgggcttcgatctgtttgaccgttcggcccgtcagccggtgttaaccgcgcagggcgaacaggtactgggttatgtgcaggcgatcctcgcggccagcacgcggcttgacgagttggcggtgtcgttaacggcacaaacggaggcgcgcctgacgtttgttctttccgataccctcaacccggacgtgctggaagacctgatgaaccagttcgaccagcgctttccccataccgaatttgaatgcctgattggcgaggaagaggacgttatcgatctgttgcagaagtcgcgtgcgcaggttggtctcacggaagcgcgtgacagttatccgaccgatattgggtttacccggttgccgatacagacccggatggcaatctatgtcgcgaccaaccatcctctggccgggcagcaagaaatccaggccgatgagctgcacggctggcgggaattgcggctcagcacctatctggagcgggaggcaacgctcgcacgtggacccgtctggtcggcacccaactacctgttactgctgagtatggcggtgcagggatttggctggtgcgtgctgccgtgcgcgctggtggatgaatttgccgccgcgaaatcgctggtgcagctgaatgtccccggctggccacgggcgatcggtatcgatctgctctggaataaacgatccccgcccggcgttgccggaagctggctgcggcagtatctgcaggatgcgcgctaa

SEQ ID NO: 122687 - DNA, 462 bp, Enterobacter cloacae
atgcaacatcaggatgcactccaacgtaaactgccggagcggatctttcatgccgtctgtttcgaagggattgccacggcgatcctcgccccgacggcggcgtggcttatgcaacgttccgtggtggagatgggtgggttgaccattatcctggcaaccacggccatgctctggaacattatctataacgtcggcttcgaccgtttctggccggttcatcgcatcacacgcacggcaaaaatccgcgcactgcatgcgctgggattcgagtgcgggtttattgtgatcggcgtgtcgatagtcgccgcggtgctgggcgtcacgctgctgcaggcattcacactggaaattggtttcttcctgttcttcctgccgtacaccatgttctataactgggcttacgatacgctgcgcgagaaattccttaaacgtcgccagcagcgacgcgccctcgcaggctaa

SEQ ID NO: 122688 - DNA, 1230 bp, Enterobacter cloacae
atgtcgaaaatttggtcaaaagatgagactctctggagtttcgctctctatggcacggccgtgggcgcaggaacgctgttcttgcccatacagctgggctccgcaggcgctatcgtcctgtttatcactgcccttgtggcctacccattaacctactggccgcaccgcgcgctggcacaattcatcctgtcgtcgaaaacaaaaggcaatgaagggatcaccggcgccgtctcccattattacggcaggaagataggcaacctgatcaccacgctctatttcatcgccttcttcgtggtggtgcagatttatgcagtggccatcaccaactcgttaactgagcagctggcaaaacacatgacggtggataccgccgttcgcgtgctggtcagttttggcgtggtgctggtgttaaatctgatcttcctgatgggacggcatatcaccataaaagtgatgggcttcctggtgtttccgctgatcgcctactttctgtttgtctcgctctatctgaccggaagctggcaacccgcgctgctcacaagccagatggcatttgaccgccatacgctgcatcaggtctggatttcgatcccggtgatggtattcgctttcagccatacgccgattatctcgacgtttgccgttgaccgccgtgagaagtttggcgacgccgccatggacaagtgcaagaaaatcatgaaggtggcgtacctgattatctgcctgagcgtgctgttcttcgtgttcagctgcctgctctctattccaccatcctatatcgtttcggcaaaacaggaaggggtaaccattctgtcggcgctgtcgatgatgccctcttctccggcatggctggggatttccgggattattgtggcgattatcgccatgtcgaaatcgttcctcggcacctattttggggtgatcgaaggggcgacggagattgtgaagtcatcgctgaaccaggtgggcgtgaaaaagagccgcgcctttaaccgcgcgatctccatcatgggggtgtcgttaatcacctttgcggtgtgctgcattaacccgaatgccatttcgatgatttatgccatcagcggtccgcttatcgccatgatcctgtttatcatgccgacgctgtcgacgtacctgatcccgtccctgaaaccgtaccgatctgtcggcaacctgctgacgctgatcgttggcgtactgtgcgtgtcggtgatgtttgtaggctaa

SEQ ID NO: 122689 - DNA, 516 bp, Enterobacter cloacae
atgttatgctcaaaagacggtgaaattgacaaaatcttccacatggacagcatcgatcgaaaaattcttgcgcagttgcaggcggatggccgtttatctcttacggagctggctgaacgggtgaacctgagcctctcgccgtgtcaccggcgcgtgcgggcactggagcagagcggggccattacgggataccgggccagtctcgatcccgccaaaatggggtttaactttctggcgatcgtgtttgcgacgctaaaagagggcgacagaaaggcggtgagcgcctttgaggaggcggtggaagagatcccgcaaattgtgctggcgcagcgtttgtttggcgatcctgattatctgatgcacgtcgtgacccgcgacctgccggcttttcagaaactctatgatgagaagctctctgcgatgcccggcgttcagcatcttcgctcaacgctggtcatgaaaacggtcgtgcaggacaggccgtttccgctcgacatctcagggcgtgacgaataa

SEQ ID NO: 122690 - DNA, 612 bp, Enterobacter cloacae
atggaaatgagtattgtggctgggttttgggtggtgtctttcctgctcatcatgacgccgggcgccgactgggcttacgccattagcgccggcatccacgggcggcgcgtggtacccgcagtgatgggcctcatgtccgggcatctgctggcgacactgattgtggtcgcgggcgtgggcgtcatgatggcgcaacatccgctggcattatccgggctgacgatagcgggagcactttacttgctgtggcttggtatctcactgttacgcgctcctggcgcaccggaaagcgccacaacctcggcggcaaactggaaacagtgggcggtgaagggattatgtatcagcggccttaacccgaaagtttttttgctgttcctggccctgcttccacaatttactgacccgaagggaagctggtcggttgcgatgcagatgtccgcgctgggcttgctacacctcatcacctgtacgctggtctatctgctggtgggatacggttcaaaagccatcctggccacccgcccgcaggccgcgcgtctggtgagcagagcatcagggggaatgatggtagtgattgcggtggtgctgctgtttgaacagatcagatga

SEQ ID NO: 122691 - DNA, 1638 bp, Enterobacter cloacae
atgaaacgcagactctcttttcaggtaaaactttttttagcgctggtgtgcttctcctgcctgctgttagttctgctgggaaccatcctgtttcattttattgaccggcaattacatcacgatctcggccagcgcgcccgggttcaggccagcgaaatcgcgttgatgccgggtctggcggaaaacgtcgcggccagaaatatccccgccatcgcccgtttaattcagcctatacgggccgaaagtgatgccagttatattgtcattggcgatacccgggaacagcatctctatcattcagaatcaccggagcgcatcaatttaccgatgatcggcggggataatgcggaggtattacaaggcaaaacaattatttcggtgcgtaagggtgggattggggtttcactgcgcagcaaagcgcccatctttaatgcgcagcatcaggtgattgggattgtctcggtcggttatttgacgtcgtacattgcgaatatcaatgcgcgtattctctggcagtccgggttatacggtatgggtctgttgctgttactgtttattttttcctggttgtttacccgcaatcttaaaaagcaaatgttccgccttgagccaaaagatattgcgcaactggtcttacagcaacgcgcgctgctggaagcaatgtatgaaggggtatttgccgtcaatgaagaaaagcagctgattttaattaaccgtgccgccagagagatgctggatattcatcaaagtgagaaagcgcttatcggcaaaccgctggaagacgttctgcaaacgtcccccggttttttatcgcagcgctacgcctcggttagccgcggcagccacgaccagattgcggtgcttaaccagcgcgaggtgattgtgaaccgcgtggcgattgaggttgaacctggtgttgaaagcggttgggtttatagctttcgcgacaagaatgatatcaacactctcagcagccagctaagccagattaaacgctatgcggataacctgcgcattatgcgtcatgaacagctgaactggaccgccacgctggtggggttgctgcagatgaaacactatgacgaggcgatccgttacatccaggcacagtcagaaggggcgcagcgcgtgctggacttcgtctcagcccattttgtctcgccggccctgtgcggattgctgctagggaaatatgtcagcgcccgggaaaagggcgttgaactgcaatttgatcccgcctgccagctcacccgcatgcctgccagcatcacggaaacggagctggtatcggtgattggcaacctgctggataacgccgttgacgccaccctgaaagccccggttcccgcagctgtagagctttacatttccgatcgcaaccaggagttgctgatagaggtggccgatcggggttgcggggtggatgaggcgatgaaaccgcatctctttcgccagggattcagcagtaagccggaaagcgagaacgacattgtgggcacagagcacggtattggcctgtttctggtggcaggctatatcaacaaggcgggcggcagcattgagataacggataacgctcctcaaggcacgatattctctgtgtttattcccaatccactccccgttcgacagggctaa

SEQ ID NO: 122692 - DNA, 702 bp, Enterobacter cloacae
atgaccacgacccgagcacttgatgttgtgattgttgaggatgagccgcacctggcggaactgcatcgcgagtatatcgagcaaaatttccatttgcgcgtggtgggcattgccgcgtcgattgagcaggcgtgtaacctgatacgccagcatcagccgaggctgatactgctggacaattatctcccggacggtaaaggcgtggcgttaatcgataacccgctcctgaaaagctatgaatgctcggtgatctttatcaccgcagccagcgatatgcagacctgtagccatgccatgcgcagcggcgcgtttgactacctgattaagcccgtttttttccagcgtctgcacgcctcgctggagcgttttatgcgtttcatccacaccgtgcagcaggtgaaggttgttgaccagcatgcgctggatcgcctgtttaacctccccgccgcggacacctcgcagaccccgtccacaaagggtattgagccccacaccctggaccgtattaagcgtttatttgcggaacaccccgaaaaaacaatgtcggtggaagaggtggtggaatacgtcgggatcagcaaaaccacgggccgccgttatctggaatactgcgtggaaagtgggttaatcagcatcgaaatgctgtatggcaatatcggtcatcccagaaggctttaccgcaaagcggcagagaaaacgtaa

SEQ ID NO: 122693 - DNA, 1089 bp, Enterobacter cloacae
atgtcgaacattttccgaatttctctgattaccgctaccgtactgtgttctgcttccgcactgtctgctttgccgcagggctaccctgctgactatcaaaaaatggtcgatgctgcgaccaaagagggcaaagtggtgatctactccaccaccgacaccaaagctgccgggccgctgattgagggcttcgaaaaaacctatccgggcatcaaagttgaatataacgacatgaacagcaccgagctgtacaaccgttttatcagcgaacaggcttcgggtggcggtagcggcgatgtggtctggagctcctccatggacaccgggctgaagctcgctaccgactacgccatggagtacaaatcaccggagcaaagccagctgccgaaatgggcggtctggaaagataaagcctacggcaccacctatgagcccgtcgtgtttatctacaacaaacggctgatcccggcgggcgacgtgcctgattcccatgcggcgctggctaagcttattgccagccagacggataaattcaagagcaaagtcaccacctacgacatcgaaaaatcgggtctgggctttatgctctcggtgcaggatcacaaggccgatcctaactacttcaaaaccctggccgatatcgccaaagggggcttagccgttcagtcttcaaccggcaccatgatggagagggtgtcatcaggggaaaacctgatcggttttaatatcctcggatcctacgcggaagcgcgcgcgaagaacgatccgtcgctggggatcgcctatccaaaagattacaccctggtgttatcacgcgtgtcgttcatcagccagcaggcgcaaaacagcaatgccgcgaaactgtggctggactacgtcctgtctgaaaaagggcaaagtattctggcaagccaggcggatatcccgtccattcgtaacgatatcgacggcaaaaatgatatcgacggcctgacgaaagtgctcggcaatgcgctgaaacctatcccggttgatgaaagcctgctggagtatctgcagccgaaaaaacgcctggagtacatcaaacagtggcgtaccgccgccgccaaataa

SEQ ID NO: 122694 - DNA, 1770 bp, Enterobacter cloacae
atgaatacatttcgcagaaagtggcaaagcctgccgcgcggtattgtcgtgttgataaccgccctggttatctacacgccgctgtcgtttatcgtgatacagagcttcttgtccgccccgttcttttcaccggcaaaagagtggagccttgaatcatttggttttatcttcaccgaccctgatttctataaggcgctgaaaagcggttttattctcgctttcgggctggtcatcatcgccattccgttagggggcgtgctggcctttctgatggtgcgtaccgacctgcccggccgccgcctgattgaaccgctgatcctcgtgccggttttcgtgtcgccaatggtgctgggattcggctacgtggtggccgccggtccggtgggctttttatccctctgggcgcaggcgctgattggtttcgtaccgtggaatatctacgacatgtcgagcatcgtggtcattgctggcctgacgcatgttccgcatgcctatctctatatttcgtccgcgctgcgaagcgtcggttccgatgtggaagaggccgcacgtaccgcgggtgcgtcgccgttacaggtgatgacctcggtcagcctgccgatggtgcgaccgtccattttgtacgccatcgttctgctgttcttcctcggtcttgaagtgtttggtctgatgctggtcctcggcgatccggaaggcaacatggtgctggcaacctacctgtaccagctgaccaacaagcttggtaccccttcctaccacctgatggcggcggttgcggtggtgcttatctgtatcaccattccgctggtcatgctgcagcgtcgcctgatgcgcaccgccaaccgtttcgtgaccatgaaaggcaaagcgtcccaggcccgggccttacctctgggtaaatggcgctgggtggcgggcgcggtggtcgccttctggctcaccgtcacgatcggcgttcccctgctcggcgtggtattgcgcgcgtttatctcaaactggggcgtgggcgtttcgctgtgggacgagctttccctcagtacttttcgcacgatatgggcgcagccgaacctgctacgtgccatcgtcaactccatgtccattggggtcattggcggcgcgctggccgtggcgtgctacctgtttgtcggtatcgccatgcaccgcaaaccggacaataccacgcgtttcctggattacagcgtcctggtgccgcgcgccgtgcctggcctgctcgcgggtctggcctttctctgggtgttcctgttcctgccaatgtggctggataactcgctgaaatcgggctggctttccgggttcgcctggagcgactggatgcgtgaaaacctgattgtctggctacgttcgctgcgcagcaccattttcagcgtctggctggcctatacggtggtctggatggcgtacgggctgagactcatctcgtccaccctgctgcaggtcgcgccggagcttgaagaggccgcccgcagtacgggggctacacgtggccagatcacccgccatgtcacgatcccactctcccgctacggccttatcggttcgtggctgctgatgttcctgatttttgaacgcgaatattcaacgggtgtgtacctgctttcacccggcacggaaaccatcggctcgatgctggtatccctctgggccgcgggagccattgatattgtggcggcgctctcttttattaacatcctgctggtggtggtaggtctgggcattgcccttcgtttcggagtcaaaatacatgattga

SEQ ID NO: 122695 - DNA, 1071 bp, Enterobacter cloacae
atgattgaattagcggttaacgatctgcacctgacctacggtgacaatcctgttttaaaaggggtctccatgaacctcaaccgcggcgaagtggtctccctgctggggccatccggcagcgggaaaaccaccctgctgcgtgcggtggcgggcctggaaaaaccgactcagggctcgattatcattggcaaaaacaaagtctatgacggcacgccgcgcagtgagatcccggcggaagagcgtaacctgggcctggtgtttcagtcgtatgcgctgtggccgcacaaaaccgtttttgaaaacgtggcctatccgctcaagctgcgcaaggttccggccaaagagatccagcagcgcgtacaggacgtgctggaccagctcgggctgggccatctgggcaaacgccacccgcaccagctctccggtggacaacagcagcgcgtggcaattggccgggcgctggtctacaacccgccggtcatcttactggatgaaccgctctctaacctcgacgccaagctgcgcgaagaggctcgcgtattcctgcgtgagctgattatcaagctgggcttatccgcgctgatggtaacgcacgaccagaatgaggcgatgtcgatttccgaccgtatcctgctgcttaacaacggtaaaatcgagcaacagggcacaccgcaggagatgtacggctcgccgaaaacgctgtttaccgctgagtttatgggcagcaataatcgcctgcacggcaaggtaacggaagtacgcgacggcaaagcgcgtatcgaaggcaaaggctgggtgctgtggggccaggccggtgaaggggtacgaagcggtgaagacgccaccgcggtgatccgcgtcgagcgcgtggcggtggtcgaggggccgggggaaaaccagctggcgctcccgttactgaccagcatgtatctcggtgaccgttgggaatacctgttccgcacgccgggggatgattttgtcattcgcgcctatggtcacgaggcccgggacccgctgcactgccacctttcgctgcctgaaaagcacgtgtggatcttcccgaaaaactaa

SEQ ID NO: 122696 - DNA, 1167 bp, Enterobacter cloacae
atgagtcagcctttttaccggatgcgtaacggcatcaaaaattacgcctggggcagtcgcgtagcgcttaatcatctttttggcctgctcaaccctgacgatcaaccccaggccgaggtctggatgggaagccaccccgcaggctgctcggagattgaaaccgatacagggttacgctctttacaggaccttatttcacagaggccggcagagatgttgggcgcgtgcgcgggagaaactgcggggcagttgccctacctgctgaagttgctgtcagcggagcgcgcactgtcgctgcaggtacatcccaataagcttcaggcagaagacgggttcgcccgtcagggcaacctgcccggagaggattacaccgatgcgaaccataagcccgagctggtttttgccctgacgccttttatggccatgaacggcttccggccgtatcaggagattgctaatcactttttgcgcctggatgccccggccctgacgtccgcgctgtcgctgtttcgcaacaacctgcatgctgaagggcttaaggccttttttacgcgtctgatggcgcttgagccgacggaaaaagagggcgtgctgacgtgtctggaagcgcgacttgcatgcggggtgtttgctccggtagcgccctttatcgaacggctactgcgagactacccgggggacatcggggctctggccccgctgtatctgcactgcattacgcttgcgccgggtgaggcgatgttcctgcgcgccggtacgctacatgcttatgtgaatggtacggcagttgaggtcatggccagttctgacaacgtgctgcgggcgggcttaacccccaagaacatcaatgtggcagaattggtgcgctgtacggtgtttgacgaaaccccagccgaccgcctcaggatgcatccgcagcgggaagaggggatgcagcaatacccgatcccggtaacggattttcgctttagcgtcattgaacattgcgagcagcaaaacatccggacagaccgtgcgcaaattctgctggtgctgaaggggagtgccacgctcagccacgccgagggtgccaccatgacgctgaacgccggtcagtccgcgttcatcccggcggtcacaaccttatggacgttgactcagcgcgggcagtcttgcctggtaagctga

SEQ ID NO: 122697 - DNA, 1419 bp, Enterobacter cloacae
atgaaccggtatcaattcccggaaggttttttttggggcgcagcggcatcaggtccgcagacggaaggcatagccaataagccgcaccgttctgtctgggacagctggtttgccgaacaaccggagcgtttttttcagcagattggtccgcagcacgtttgtgaaacctacagtaaatataaagaagacgtagccctgatgaagcaaacggggtttaactcgtttcgaacctctattcagtggtcgcgtctgatcgatgatttcaaaaccggacagccaaaccgcgacgccgtccgcttctataacgattacttcgatgaaatgattgccaacggcatcgagcccatcatcaatctttaccattttgatatgcccgaggcgctgcaaaaagcatatggcggatttgagtcatcctacgtaaccgagctttttgcccgcttcgcccgcaccgcgttcgagctgtttggccataaggtgaaatactggataacctttaatgagccgatcgtgccggtggaaggcggttatttatatgacttccattatccgtgtaaaaaagatggcaaactggcggctcaggtcgcctttaatattatgctggcgcacgccagggcggtgaatgtctaccgtgaaatgggcttgccgggtgagattggtgtcgtgctcaacctcacgccttcttatacccgcagcgacagcgaggccgataaaaaagcggcctggtatgccgacctgctgtttaaccgcagcttcctcgacccgctggttaaacatgaattccccaaagaactgtgcgaaatcttaaccgcaaacggctgcttaccagagatttcacggcaggatgtggagacgatcctgcagtcgagaattgattttctgggggtgaattattatgtgccgagaagggtgaaagcgcgggaaagcgtttacgcgctcgattacttcacgccggaagtctatttcgagaattacgtcgatcctcagggacggtttaacccttatcgcgacaataacgagatccacccggaagctatctatgacattgcctgcaatattcgcgataactacggcaacatcaaatggtatctggcggagattggcatcgcgatggatctgcagtccgaagggccggtgcaggccgatggcgtgatagatgacaccttccgtatcgctctgatggaggaacatctggctcagctgcatcgtggtatcgctgacggcgccaactgttttggtgttcatcagtggaccttcattgataactggtcctggatcaacagcttcaagcggcgatatggcttctggcgcctggatttagccaccggggagcgacaaatcaaacgtaacgcattgtggtttgcgcagctggcggctgaaaatggcttcacccctggcgaatgtgaaaaggatacgcaatga

SEQ ID NO: 122698 - DNA, 2196 bp, Enterobacter cloacae
atggctttcccgattcgaaaactgcttctcgtctccttactctccgcgctgggaagcgcgggggctctggcggctgagcaatcccattttgaacactttattactcgcgatggcgcagcgttaaaagatggcgatcgcgtttttcgcttcgccgggatccacgccccggagttgcatcgtatagaagatgacgcgcgcggaacctgtaaggccgatccgcgcggctgggggcaatactttagatggccgactgctgaagagcaggagaactggatcaaagcgctggtgcaaaccggtgctaaagcacagcgcgtatatgtgctttccgtgcagcaggaaaatgatgctgcctgcggacgtgagacacatattctggcaccggcaacgccggacggcatgccgcggctgaatgaaacggccatgaaagtgtatgacaacatgattgccgaggcggataagcaggggctgcgcctgattctgccgtttattgaccactggtggtggtgggggggacgcgaacagctggccgcgttttatcatgaaaagccggaagatttttatcgaaccgacagtaaaacctaccgtgcttatcaggatgtgatccgtcaggtgattacccgtaccaacactattacgggacgccattactacgatgaaaaggcgatcatggcctgggaaacgggtaatgagctggaaaacaccaatgctgatttcctgcagaaaacgtcggcctggatccgcaagtgggcgcctcatcagcttgtcgtcgatggtacctataaaaaggtgaatgatttcgcgctcaacgatccgaacgtcgacatcatcagtaaccactattacaccaacgccgagaacaaccaccccgagcaggttcgtaaagatctggaggcgattggcggcaaaaaggtctatctggttggcgaatttggtctgctcgatcaaaaagaccttaacactatcatgcaggccattgtgcataccgaggtcaatggcgcgcaggcggcggggggctttatctggggcttccgtggtcatcgccatgatggtggtttttactggcacaaagagtttaccgggcactacagctaccacctgcctggcttcccggtcgagggtaaagcaaaccaggagatggaggtcgtcaatctggtgcgaaccgcctcggcgcaaatggcggggctgagccaggcgccggctctgccggtcccggaagcgcctaagctgcgcgagagcaactcaccgtttgccattaactggatgggatcccccgtcgggcgttattacgatgtggagagagcgactcagccacacggcccgtggactcgcgttggtcaggatatctctgacggcaaaaatgagtgggatccggcaaaaatggatctcttccgtgatgactatcgcagcctgacgctgggccagacttactactaccgggtgatcgcaaagaacgaaagcggtcagtctgcgccttcaaacgtgattcgccttgagcatacgcagaaaaacctgccgccggtcatcactctgcaggaggcgctctctaccaccgtggataaaggcgttcagctcaccgcggcctggcaggatgacaatctgccggagccgaaggtcagcctggcatggcatcacgaaggcaaggataacgtccacttttgtgacagcaccaaagcggaaacccgtgcctggttctcggctcccggtgactatgcgttgacctttaccgctgacgatggactgctgaaaagcagcaagacggtaaacgttagcgtgaaggccgcggcgggacccgtgccggcggactactgtcattttggcggcggaacgctggacgtcagcaaggggaaactgaacatcaccaagagcgataaagatacgttagcgattggtgaagacggtttccttggtccttttgccaatgacggagacagcgtgacctggcaggttaacgccccctgggacggtaagtttgccctgcacgtgaaatttaacggcaaatgggggagtaagaaaaactcgttcattgtgaacggcggaacgccggtgagcattgaattcccgcaaacggatgagaatggccagacgatgatcgtaccggtcacgctcagggcaggggacaacaccattagctttggcaagttctctggcgactggggatatatgttcatcaaatcaattgaagtcactgcagagtag

SEQ ID NO: 122699 - DNA, 1338 bp, Enterobacter cloacae
atgcaaacgttaatgaaatcaatacctctgtccttgattgctcttactgtcatcagcggttatgccagcgccgatgagaaatatgatttcgccctccacggctatttacgctcgggtattcttgccaatagcgatggcaaccgggtcgattcggtggggctgatgcctgacgggaaatggcgtctgggtaacgaagaagataccaaaattgagctgatcccgacggtaacgctgaagtcggattcaggcgcagtcgcacgtattcaggccaacctgacgcaccagaccaaatgtaccgccgactggaactgtactgacgatgatggcaaagagacccagttccgcgaagggtttgctgaattaacgaatctcgattttgccccggacatgaccttctgggccggtaaacgctacagcagctccaacctttccagccaccagttcgactgggagtacattcagtacaacggaaccgggggcgggttcgataacctggacttaggctttgcgcgctttgatgcgggtgtgtatgccttctcgaccaccgacgaagccaaagcttatccggtagatctgggggatcagggctatccggacgactattcgcttaacctgtggtttaaaaagattggcggcaccgggctcgacgtcgaacttatcggccaccacatgaaccgcaatgaaaaccatcctacctcggctgagaagggatacggcgtgacggcgctgtacaactttgacagcttctacggcctgactaacgggtactcccgcatcgctttccagtatggcaaaggcctggccgccgcagattcgctgggtaaaaacggctggggctgggcaaaccttgaggatacgcaatcctggcgcgtcgtgctggacagcatggccaacctgggtgacgtggaagtatcgacctttgcgttttatcagaaagacaaaaactaccgctggtggaccaacgacgatgacggctggggacggtccatgtgggtagcgggtatccgtccgtatcatcagataaccaaaaacttcgccatgcaatatgaggtgggctacgaatatctggatgataaaaactacatgggcgtaaacggtaaagggaaaggtggcctgaccaaggtgaccattgcgccgaccctgacctttgattcaggtttctggagccgtccgcagctgcgcttctttgccacctacgcaaaatgggataaaggcgtctcggatgcgatggacagaaattacgactggagcactggcaccctgagtccggggggatattcacgtagcggcgataccgatacgctgaattttggtgtgcaggctgaagtctggttctga

SEQ ID NO: 122700 - DNA, 1272 bp, Enterobacter cloacae
atgaacattcatttgatgaatgttgctgtggatttgattgagcaacgtctcacaccagcagccaatataatcaccataaatcaacatattaccgcgatgcgggacggcttttccctcgccatgccttttgtgattgtgggaagcctgatggtgccactgctgtttccaccgttcgccatttcaagtgcatcgcgcctcgggcacgtctatctgctgctgcgtccgatgctgttgccaacctttgagctgacgctcggactggtggcgctgattgtcgcgttcggtgccagcgccagtctggccaagcagtatcaactgccggaacggctgtgtggactcaccggctgcctctcctttttgctgttcattgactttcgggataacggtgcaacgaatatttttctgggcgggatggggctttttactgcgctcatttcaagcgcttactctattgaaataataaggtttttctacaaaagagggtggtgcattcgtctgccggaggaggtaccggtgatgacgcgaaatggtttccagctgctgatgccgctgctggtgatcatgctctccattagcgtaatgaatgccgtgatgctgcagacgaccggacaaattttgccacagctgattggcgaggcgttacgcccgcttatcgtggcatctgatacccttacggcggtgcttatctccttgtttctgtgtaatcttttatggttcgtcggtattcatggcgccctgatcattacgggcatcatgaacccgttctggctcacctatctgtttgaaaaccagcgggccctggccgccggggaagccgtgctgccccatatttatctgcagggattctgggatttttatctgctgattggcggtatcggctctacgctgccgctggtctttatggcgatgcgaagccgatcccggcagttgaagagcgtcgggaaaattggccttctgccgtcgctgttcaacattaacgagccgatattgtttggttttcccgtcatcatgaacccggtttttttactgccctttgtgtttgtaccactgataaatgcctgtatagcttggtatttaacccagcttggcgtgctcgacagagccgtcgccatgctgccctggtctatgccttcaccgctgggcgcagcctggtcggcgaacggcagctggaaaaatatgtgcatgtgcctgttcgccttttttaatgcatggatgctctatcgccccttcttcaaggttcatgaacgccagttgatgcagctggaaaaataa

SEQ ID NO: 122701 - DNA, 312 bp, Enterobacter cloacae
atgaaaaaaatcatgttgtgttgttctgccgggatgtccaccagcctgctggtgaaaaaaatggtcgacgaagcgcaaaagcgtggcctggaagcggagatcaaagcgtttggcgtggccgaattcgccgagcaggtcggtcactatcaggtggtgctgcttggaccgcaggtgaagtacatgcaaagcgatcttcagaaacaagctggtaaatacgggatccgtgttgagcctatcaacatgatggattacggcatgcaaaaagggggcgccgttctcgatttcgccctctccctgatagataacaaataa

SEQ ID NO: 122702 - DNA, 1323 bp, Enterobacter cloacae
atgagctctctgtacgcgaaacttatccaggtcattgaacagaaaattaccccgatggcaggcgccgtcgggcagcagaagtatgtgacctcgattcgtgacggctttatcaccgccctgccgttcatgatcgtcggttcctttatgctggtgtttattttcccgcccttctcacccgacacgtcctggggtttcgcccgggcatggctgcaattctcgttggatcaccgtgaagccctgatgctgccgttcaacttcagcatggggatcatgacgatcttcatttcagtcgggatcgccgcgagcctggccaaacatcacgatctggatgcccttaccgccggcatgctgtcgctgatggcatttctgctggtggctgcgccgttaaaagacgggcagatctctaccgcctatttctccgggcaagggatcttcacggccattctggtggctatctactctaccgagctgtatgccttcctgaagcgtcacaatattactatccgcctgccgccagaagtgcctacgggcgttgcgcgttcgttcgaaattctgatcccggtgctggcaattgttgtcactctgcacccgctcaacctcttcattgaggctcagctcggcatgattattccggaagcgattatgtcgctggtgaaaccgctggttgccgcctccgatacgctgcctgccattctgctctcggtgctggtgtgccaggttctgtggtttgcgggcatccacggcgcgctgattgttaccggaattatgaacccgttctggatggcgaacttgtcggttaaccaggcagcaatggctgccggtcaggcgatcccgcacatttacgttcagggattctgggatcactacctgctgattggcggggtcggctccacgctgccgctggcgttactgctgctgcgcagcaaagcggtgcatctgcgtaccattgggcgtatgggcgtggtgccggggatgtttaatatcaacgaaccgattttattcggtgcccctatcatcatgaatccgctctttttcctgccgttcgtgttggttccgatggtcaatgccaccctcgcctactttgcccttgatttcgacctggtcagtcgcgtggtctcgatgacaccgtggacaacgcctgcccctatcggcgcatcctgggcggccaactggagctttagcccggtgatcctctgcctgctgtgcatggttacctcagcggccatgtacttcccgttcctcaaagcgtacgagaagcagctgctggaacaagagcatgaaaatgcggttgaacaatctgaagaagcggcacagtccgcctga

SEQ ID NO: 122703 - DNA, 309 bp, Enterobacter cloacae
atggaattagaagaacaggtcatgggcattattatcaatgccggtcagtcacgcagtctctgctacgaagcgcttggcttcgcaaaaaaaggtgactttgcctcagccgatgcgcgaatgaaagaggcggcgcacttcgcccgtgaagcgcatctggtgcaaacccaactaatcgaagctgacgaaggggaaggcaaaaccaaaatgacgctggtgatggtgcacgctcaggatcatttgatgacctcgattctggcgaaagaactggtgacggagctgatcgaactgtaccgcactcgtcaggcataa

SEQ ID NO: 122704 - DNA, 906 bp, Enterobacter cloacae
atgcactatcttggactcgatattggcggcacaaaaatggaagccgtcctgctttcgcctcagggcgaatgcctttggcgtgagcgtcgtccgacgcaaaaagagagttatgacgcctttatgcaccatctgctggcgtttatcggcgaagcgcgcgcggtaagtgaagtgccattcagtatcggtattggcctgccgggggccatcgacccacaaagcgggctaattaaaaactgcaactgcctggtgctcaacggtcacgacctgaagcatgatttagcaaagcagctcaatcagcccgtgtggatagccaatgacgcggactgcttcacgctgtctgaagcggttgatggcgcaggcgcagaagcagataccgtctttggcgtaattgtcggtaccggatgcggcggtggcgtggcggtacataagcgtctgcttcaggggccaaacgccatcgctggcgaatggggacataacccgttgcctggctatgcccccgagacggatggtccggcgcagtcctgctattgcgggaaacataactgtatcgaaacctttatctctggcaccggctttgcccgccgttatcccagcgaactgagcgcgcaggccatcattgaagcggcggcccagggagacctgaccgcgcgggcccactggcgacactttatcgacgcctttgcccgcagtctggcctcggtgatcaatattcttgatccgcaggttattgtgttgggcggtgggttatcaaatgtcagccaactgtacgacgaacttccggccgccatcaggccctacatcttctcggaaagctgccgtacccttatcgtcccggcccgttacggcgacgccagtggcgtgcgtggcgcggcgtggctaccgggtttgcacgccgcgcagacgtga

SEQ ID NO: 122705 - DNA, 1041 bp, Enterobacter cloacae
gtgaaaccgcctgtggggggcgctaagattcttaaggtgggttatgttaagataaccaaaacccaccacgcagaaaatgctatgccaacgattgacgatgtatcacgattagccaatgtctcacgagcaaccgtctcacgcgtgttgacggggacgcgcggcgtgcgcgaagagagccgtgaagccgtgctgcgcgccgtagaagagcttaattatcgcccaagctttgccgcgcaaaacctggcaagtcagtcatcaagctacgttggtctggttctctctgcgaaggatgaaagcagcggagcacgtttgctgcctgcgctctcccgcgccatgaaagcgttgaataaaacgctcatcgtagagtacgtaaatgatcctgttgagcaggctgtcaccgttgatgatcttcagcgccagtgcgttgctgtcgtagtctttgggccggttgcggccggtagcgcagagaatgtcatctccttcgatcgtcccgtggtggatgcgaaacctcagggatatgactttgcctttgcgacggaaagcgcctgtcgttacatgacgggcaagggtcatcgcaatatcgcactggtgattgacagcgaacacgatgacaacagtaaaaagatggtggaaggctatcgcaacgtcctgcaaaactactctttgccgtttaatcgccagctggtgttaacggcgaatgaagatgttgaacaggcgctgctgacgcttatcaacagcctgagcaagttttccgccattgtggttaaacgtgatgcctatgccgctgaagcgatgcgtctgttccgggaatttggcatttccgttccgcaggaagtgtcgctgctgagtctggaagattcgcctctggcaacccagctctatccacagctgacctgtatctcgtggccaatggatcagttgctcactcagtgcgttgagcgcattaaaagcctggtggatggccgacctgttcgcacgtcagagctctcccccgtgattggtaaactcacacctcgccagtcggtgatggaaaaaagctag

SEQ ID NO: 122706 - DNA, 210 bp, Enterobacter cloacae
atgaaaacctttctgttcataagtgccctcacccttttcccggcgctctcctgctatgccatcgcccaggaaacgcccctgccgctgaaagagcaaattcataccgatgaaggtacgttatgcgtgtatggcgatgcttcgcgcagtgaaaaagttgtgatgcagggcggcaacgattgcccacagagtaaagcggcaaaacagtcctga

SEQ ID NO: 122707 - DNA, 564 bp, Enterobacter cloacae
atgagtgaaattgaagagtcattaaaaaaatttgttgctatttgcaataaattttcactgtccgggagtttcaatatcgttaatgacattgacaacgtattcccctccaacttacctcgctcggcagagttggattatttatatggaaaaaataatcctgagaagttaaaaatagaaacaggttttacgccaattaaattttattcagtcagtgaacttgcaaaagctcaaagtggttatgaatacttaccagataattatcttgtaattggcgatgatttaggtggaggtaagcctataattgctgttgtagatgaaggtaatacctctatttatgcgtcttatgacgtagttgaaccgtttaaaatagctgacaatctctctggctttttactttctctaacagagctcattgatttggtatatggttattacgatatttttgatatagcagatgataatgatgaagtaaaaaaagattttatggatgagttaaaggtaagggttgttccatttatcggagatgaaaatttcaatgcattttatgattatttttatggatga

SEQ ID NO: 122708 - DNA, 4263 bp, Enterobacter cloacae
atgtttgaagctgcgcgcgttgatgatgatatcgggcactccggtgcactggctgggatgattgccggaacgattgtcggcggcctgattgcggcagccgggggaattctggcaggcgcgatgtttatagctggccttggtgcgtcttgtcttggcgtgggcatcctgcttgttggtgccagccttgctgtcggatattacaccggggagttggcgaccgccgccagggatagtattgcggatgcaggtgcatcgagtatgacgaaaaaaggcgtcataacctccggctcgcacaatgtttttatcaacggtaaagccgccggcattgccactgacagcaccgtcgattgttctgacgacggttcgcagcagatggctgaaggatcctcgcgcgtctctatcaataacatgcctgcggcgcgcatcggagatcggaccacctgcgatgcgaaggtgatgaccggttcaaacaatgtcattatcggaggtgacccgcagcaaactctgcccattcagtctgaggtccccgagtggctgtataaagtctcggatcttaccctgctgttcgccggactgctcggcggctggggcggtgcggccggtaaagttggggcactgtcgaagctgctgggtaaaatccccggcatcaataaactggcccgtatcgcctgccgtgccggcacgcttatgaccggtgttgccgcggcggggatcattgcccgcccagtggatatcgtcagtggacagaagtttctcagcggggatgatgagctggatttcgtcctgccttcgcgtctgcccgtgcgatggcagcgctactggcgtagcggcaaccccagtgacagcgttcttggtcgcggctggagcctgttctgggaaagccgtttggagcattatcaggacggcctggtatggcgcgcaccgtctggcgattacattacctttccgagggtgcctaaagggctgcgaacctactgcgaaagtgaaaaaaactggcttgaacatcaccaggacgacagctggtcggtgtatggcgtcagcggtgagcgctggcactatgcaccgctgcaggatggtgccccgtcactgctgcagcgcatctccgaaccctgcggtagcgctatccttttcgagtggaatgcggatagtaccttacatgcactaaccgacagcgcaggccagcgtgtggtctgccgctacgacggtgacaggctcgccagcacctggctagatgacgagatatgcctggtcagttacgcttatgatgaacagcgccaactggtctccgtgatcggccggggcggcagcgtgcgccgatgcttccgctggcaggacgggctgatgagcgcccatgaagatcccaacggactgctgagcgaataccgctggcgggagattgacggtctgccgcgcgtggtcggcttccgccatagcggcggcgaacaactgacgttcgaatatgattttgagagtgggattcgtcgggccatccgtgatgacggcgcgcaggcgcactggctcattgatgacgatgataacgtcgcacgcttcacggattacgacggccgccagacgacgtttgtctaccgcgacggcgaactttgcgacgtcattctgcccggcggtgcgatgcgccgcagcacgtgggataaatacggacgcatgaccagcgagacggacccggctggccgccgcacggaatatcactggcatcgtctgagtgaccgtatcacccggacggtgtacccggacggtacatccttgcaggccatgtatgacttccgaggtcgcctgctgtcggaaacggatccggccggtaacgccaccgcgtatcgctatcccgatgatgaagaaaggctgccggagagcatcatcgatgccattggtggcgtggtgcatcttgtctggaaccatcaggggctgctgatgcaacgcaccgactgttccggcagcgtgaccagcttcacatatgaccgtttcggacagttgataaccagtgaggatgcggaagggaatattacacgtcgggaatggagccgtgccgggctgctgagtgccgtgatccacccggacggaagtcgcgagtcgctgatgtggaacgaacgcggccagctcacgggctggcgtgacccactggaaagcgaggtaagctgggcatataacgcgctcggcctccccataagcctcaccgaccgaattggccgcgtgcgccgctgggactacgacccgcgcggtaacctgctacgactcgataacggcaacggcgcggaataccgcttcacttatgacgccgtgggacgcccactcagcgaaaggcgccccgacgagatcgtgctccatatggaatgggacgcgcggggtttcctctgcgcgctcgaagaaaacggacagcctgccgccgatggtggcatcgcccgtcgcgtccagcagttcagatatgacgatagtgggctgctgcttgggcgcactcaccgccacgcggagtatagcttcttccgcgacctgagtggccaaatcacccgcatcagccgcacgcctacggccgaaggcgttgctttgggtatcgaaagcgatgagatcgcttaccgccacgatgccggcgggcgcgtgctgagcgaatccggcatcaacggcgaggtgggctacgaatgggatgcgctgagcaatctgaccaccctgaagctgtccggcgaacaaaagatgtcctggctgcactacggctccggccacgtcagcgccatccgcttcgggcagcaactagtgaccgagtttacccgcgaccacctgcaccgagaagttcgccgcactcagggcgcgcgcgagcagttccgccggtatgacagcctcggcaggcgaaccatgcagcgcagcgaattgagtacgaacgtcaccctgccggagcagtcgctcctcgagcgcctgtatcgttacaccgcgcgtggtgagctttcgggtgtcagcgacaccttgcggggcgaagtaaattatggttacgacgcagaagggcgtctgcagaagcactacgaagcccgcctggggcataaaagcgcgcatttcagctatgatgctgcggataacctcgcagctagcgatgaagatgcgccggtaaccgataaccgcttgcagcactggcaggcgctgtttatgaaatacgaccactggggtaacctggtgagtcgtcgcaatgggctgtatgaacagcattatgcttgggatgccgagaaccggctggtgtccgcgcggggaaccggaccggaaggacggtttgaggctcgctatcattatgacgcgctgggccgccgtacgcgcaaaatcgtcaccacggcgcatggcatcaccgagacgcgcttcctgtggcagggctaccgcctgctgcaggagcagcaggaaaccgggatgtgcagcacttatgtttatgacccgaatgaagcctggagcccgctggcacgggtggaccatcttcgtagccagagcagcggtgagatttactggtttagtactgacctgaacggcgcgccgctggaggtgactgacgaacgtggcgcggtgcgctggagcggccagtatggcagttttggagaagtccgctatcagactgtaggggctacaaagtttgttcagcgcacggcgatggcgatgccgcatcagccgcttcgttatgctgggcagtatgctgacggtgaaacggggctacactttaacctgttccgctactacgacccacaggttgggcggtttattgtccaggatcctattgggctgaatggtgggtggaacctttatcagtatgcgcctaatccgtatgggtggattgatccgtggggactttctgcgcaagatttggttcgttacaaaccagatcccactcttagcgcgcagccgggcgccagggcgacagcaataagccgagcatggggagaagaaagagaactggttgcagctggaggaggaagccgggactggacggccgctgaacgcgaagtaatactaagtacaaaaaataatcgccaattatcgtcggttatgtccgaaatgggctatacaggccatcatatcaatagtgtgaaagggaacggtgttttaggaggaaaatggcaaggcgatccaaggaatattgtatttctccagaatgctaatcatccaagcggctatgatgaacatttacatggtttgcaaggtcaccgaggaagttatgacactccaggtaaaggtcgattgatagaccgtaacctgacccgtaagaatttaaagagctgtcaataa

SEQ ID NO: 122709 - DNA, 438 bp, Enterobacter cloacae
atgtcagaacattctccgcaatgtctttttaatgaaggactcataaattttcctgatggttatcaggatcgtaccgtcaatgttttcgttccgccagttgctgaagctccggcattcaatatctcccgcgataccctcaatcccggcgaagcgcttgcagcctatatcgatcgccagttagccctgatggaaaaacacctcaagggctggaaacagagcgcgcgcaacgctgtaacactgggcgataaccttttacagggtgaaatcgtccatgccagctacctgcgcgacggtaaacgcatctggcagcagcaggccgtatttaatgccaacactgataaggtgttggtttttaccatgacctgttctcgcacactgagtgatgctgacagcacactgctaggtggtcttctcaggagctttcgcttccacaattaa

SEQ ID NO: 122710 - DNA, 222 bp, Enterobacter cloacae
atgcagcaaaagtccaacaaaaatctggcacagtttaagaaccactcctataacgcattcagttcagtaatatcaaactcagccgcccactcttcaactcaaaagtctctccacgccagcacatttcaagccagcatctgcatgttcgtacagttcctcaaagttacactccagcacttgcatcctatctcatacgcatttggcgtacatgcagtagcttga

SEQ ID NO: 122711 - DNA, 1434 bp, Enterobacter cloacae
atgaaaaaacttaccctaccaaaagactttttatggggcggcgcagtggccgctcaccaggttgaaggcggctggaacaaaggcggtaaagggccgagcatctgcgatgtcttaacgggcggtgcgcacggcgtgccgcgcgaaatcacgcaggaagtcgtgccggggaaatactatccgaaccacgaagctatcgacttccatggccattacaaagaagacatcaagctgtttgctgagatgggcttcaaatgtttccgcacctctatcgcctggacgcgtatcttcccgaaaggggatgaaacacagccgaatgaagaaggcctgaagttctacgacgacatgttcgatgagctgctgaaatacaatattgaaccggtcatcaccctctcccacttcgaaatgccgctgcacctggtgcaggagtacggcggctggaccaaccgtaacgtggtggatttctttgtgcgcttcgcggaagtggtgtttgagcgctacaaaaataaggtcaaatactggatgacctttaacgagatcaacaaccagcgtaactggcgtgcgccgctgtttggctactgctgctcaggcgtggtttataccgagcatgacaatccggaagagaccatgtaccaggtgctgcaccaccagttcgttgccagcgcgctggcggtgaaagcggcgcgtcgcattaacccggaaatgaaagtcggctgtatgctggcaatggtggcgctctatccgttctcctgtaaaccagaggacgtgatgtttgcacaggaatccatgcgtgaacgctatgtctttaccgatgtccagctgcgcggttactacccatcctatgtgcttaatgaatgggaacgccgtggcttcaccatccatatggaagcgggtgacgagcagatcctgcgtgaaggcacctgtgactatctgggcttcagctattacatgaccaacgccgtgaaagcggaaggcggtactggcgatgctatctcaggctttgaaggcagcgtaccgaacccgcatgtgaaagcctctgactggggctggcagattgacccggtgggtctgcgctattccctgtgcgaactgtacgaacgttatcagaaaccgctgtttatcgtggaaaacggctttggcgcctacgacaaagtagaagaagacggcagcatcaatgatgactaccgcatcgactacctgcgtgcgcacgtggaagagatgatgaaagccgtcacgtatgatggtgtggatctgatgggttataccccgtggggctgcatcgactgcgtgtcgttcactaccggccagtacagcaagcgctacggctttatttatgtgaacaagcacgacgacggtaccggcgatatgtcacgctcgcgaaaaaagagctttaactggtacaaagacgtgattgccagcaacggcgagacgctttaa

SEQ ID NO: 122712 - DNA, 744 bp, Enterobacter cloacae
atggcaattgcactggtcaccggcgccagccgcggtattggtaaagctaccgcgctgcagctggcgcgcgaaggctacaccgtggcggtgaactatcaccacaacattaaagccgcgacggatgtgatcacgatgattaccgacgcggggggtaacgcgtttgccgtgcgtgcagatatcagtgatgaagctcaggtgctggcaatgttcgacagtatcgatcgtgaagccggaccgcttaccgcactggtgaacaacgccgggatcctgtttgaacaatccacgattgaacacctctctgctgaacggatcaaccgcgtgttagccacgaacgtgaccggttatttcctctgctgccgcgaagcggtaaaacgcatgtcgttcagacatggtggcaaaggcggcgcgatcgtgaacgtgtcatccgcggcatcgcgcctcggtgctccgggtgaatatgtggattacgccgcgtccaaaggtgctgtcgattcgttgacgacgggattatcgctggaagtggcagcgcaagggatccgcgtaaactgcgtgcgtcccgggctgatttacaccgagattcatgcatctggcggtgagccgggccgggtggatagggtcaaatccatgctgcctatgcagcgtggcggtcagccggaagaggtggtgcaggcgattgtctggctgctgagcgagaaagcctcgtatgtgacgggaagttttattgaactggcgggtgggaaataa

SEQ ID NO: 122713 - DNA, 1179 bp, Enterobacter cloacae
atgagcgtgattatcgttggcggcgggatgaccggagccacgctggcactggccatctcgcattttacgcagggaaaactgccggtgcatctggtggaggccgttgcgccagaggcctctgatcaccccggttttgatgcccgcgccattgcactggcgcagggtacctgtcagcaactctcacgcattggcatctggcaggcgatagccgactgcgcgacggcgattaaaaccgttcacgtcagcgatcgcggtcatgccggtttcgttaccctggatgcgcatgattaccgtatagatgcgctgggccgggttgtggagctgcacgacgtcgggttacgcctgttccgcctgcttaaggatgcgccaggcgtgaccctgcattgcccggcgcgtgtggccagctttagccgcagtgaagcgtcggtcaacgtggtgctggaaaacggtaccgtccttgaaggccagcttctggtagcggcaaacggttcgcgctcttcgctcggcacgcagtgcggcgtggagtggcgacaacagccctacgggcaggtggccgtcattgctaacgtttcgacagcgggcgctcacaacggccgcgcttttgagcgtttcacccagcatggcccgctggcgatgctgcccatgtcccacgatcgcagttcgctggtatggtgccatccgcaggacaacgcggctgagatacagacctggtctgacgaacgtttttgtaccgagctgcaaaaagcctttggctggcggctgggacgtattacccacgcgggaaagcggagcgtatacccgttgtcgctgaccaccgcctcgcagtctatctcccatcgcatggcgctggtcggcaatgccgcgcagacattgcatcccatcgccgggcaggggtttaacctcgggcttcgcgacgtgatgagcctggcagaaacgctttcacaggcgtggagcgagcaaaaagactgtggtgcctggtcggtgctcagccattaccagaagcgacgccgggcagataaagaggcgacgattggtgtgacggatggtctggtgcacctgtttgccaatcgctgggcacccctggttgcaggccgcaatcttgggctgatggcgatggaattattcattccggcacgtgacgtgctggcgcagcggactcttggttgggtcgcgcgttaa

SEQ ID NO: 122714 - DNA, 363 bp, Enterobacter cloacae
atggatattactcgtacttatgcaaaacagctcaaacgggagctgacaaaagaagaaagacggctttggtatctactgcgcagccgccgcttcgaaaattataaatttcgtcgacaacatcctgtagatcactacattctggatttcgcctgctgtgcggctcatctggctattgaactggatggcgggcaacatgatgaaaagcaggaatacgatcgtcaaagaacgtgctggcttaacgagaaaggctggtatgtcattcgattttggaacaacgaactctggaataacgaagaagcggtgttagaaaagatccttgaaacactgcaaatgctgcaaccctcaccccggccctctccctga

SEQ ID NO: 122715 - DNA, 810 bp, Enterobacter cloacae
atgactggtttgctcgcgactaacccgcagccatgcgatgtgccagggctcgccgaagaggcgttatggcaggagctggcgttgacgcccaagccgggtctggtggataagctcaacaacggtgcacaccgcgatatggaccatgcgctgtttgcccgcagtattgcggccatcaccccgtggtttgcgcgctttgcagagctgggtcatacccatgcggataaacccgcggcggaacaaatacggatcattcgcccgatgggcattgcctgtgaacaggcaatgtacgctgcaacatgcggggtgaacacgcataaaggcggcatttttgccctcggtttgctgtgctttgccgccggacgtgtgaaacacgccacggctgagagcctctgtagtgaggtgagtcacctctgtcgcgggctggtggcgcgtgagctggcggcgcgcagtggacaggcgacggcaggggagcggcagtttcagcagtatggtttaaccggcgcgcggggcgaagcggaaagcggttttgctacggtgcgtgcagcgctggcgcaatggaacgggcacgcgctgcatgacctgctgctgcgcctgatgacgatgaatcaggacagtaacctggtgtcgcgcggcggtatggaagggctgcgttatgtgcaggggtatgcgcgggcattactgacgcgtggctgggatcgtgatgcattaatacagatggacaatgcgctcattgaacggaatttaagcccggggggcagtgcggatttattgtcggtaggatgggtgctggcgaaattacccctctcctga

SEQ ID NO: 122716 - DNA, 579 bp, Enterobacter cloacae
gtggcaacttcaatagtgttagtgacacaggatcgctaccttgtcagggggatgaggatattttttccggatataatcctgctggactccattgacagaaagatatttgataacggcgcagatgaatattctgtattgattgatagccgtgcaccgctgcgtttatatgattacctgatacgccatccggccagaacgaaaaaaacaatctgctgcgttatgctcgatatgcggcatcgcgaggagaacctgctcagcatgaagttgtttatgaacacgtcgctcacggcacccgatatggcgtcgttattcaacctggtgctcaacatgaagggcaaacgtctgacaacaaagtggctgctgaacttacggctgagcacgcatgaaggcattatgctgcggttgctcagggctggcatggcgatggaagaggtggcacaggaactgaatacgtcgattaaaagcctctaccgtaaacggaccgcgctttcagaacggctgggggcagagaacttcaacgaggcttgtttgtttatctttaaaaataaactgctggattcggatgggaacgatccctag

SEQ ID NO: 122717 - DNA, 2481 bp, Enterobacter cloacae
gtgttatgcaatggatttatgataaacaaatggcaaatagatatggaaagatcacttcgcttcaatacgttattcttttaccgcactcccgctttattgtttctgttattacttttcccctttctggttcaggcagcagaatcagtatatgaacaacagattcagcaggcgcgtaacggtaattacgctccttttctgcaatatcttcagcgttatcagcagcaacatgccctgacgcctgagcaggttgcggactggttgcaggtggcgtcctgggcgggtcgtgatgacgacgttattcaggtctggctgcgttacaaggtctatatggctcttcctgcccgtggcgtggctgctgctgctcaggcaaggcgaaaccaaaaggcgtggcaacctgcgttaatgctctggaaggaggcgtgtaaccttgcaccggataacgacgattatcgcatcggctacatcaaaaccctcgccgacgcccgcatggatacactggctctgcaggaagcccggcaacgggtggcggaaaagccctctctggctcacctccagacgctctcttatgtctattcacgtcaggggaaaaaccaggagcggcttttggcagacatccgtgcgttgaatagtgcgccagcggatgacgcccttcgtactgagttgattgatgcgttaacagacaaccgggccgacacgcctgccctgcggctttcacaaacggtgacgctgccccccgcgcaacgccgccgtctggcactcaacgccgccgctgaaatggtacgccttgccgatgtgcctgcccgtactgaaacagagcgtttgcagctcgcgcaagcggcgctgaaccgctatgacgaactgctgtcccgctggcaaaacgaacctcaggcagcggaggacgttatccgggcccgtgtcgatcggcttggcgcgcttcacgcccacggtgattatccacaggtcatcagggaatatcaggcgttaacgtcggctcagcatcccgtgccgacctgggcaattggctgggttatctccgcgtatctggaggagaaaaatgccgatgccgccctctcgcttctcaaacgttatccagactatgcgccggatccgcaggacgacgatcatgcgcttttctacgcctggctggataccgggcagtatcaggccgctcgccagtatgttgagaagataacccgtaacacgccctggacccgctacgatttcggttcgccaaccccgcaacccaacgatcaatggctcatcgggcagtcgctcacctttaactatttgctgatgaccaatgcccttccgcaagccgaaaagctggcgcaacgtctggctgcgtcagcgccgggaaatcagggattacagattgattacgccaccttacttcaggcgcggggtctgccgcgggcggcggagcaaaagctcaaaatggccgagacgctggagccatccaatatcgagctggaacggcagcaggcctacgtcgcaatggatctgcaagagtggcgacagatggatttactggccgatgacgttatcgcccgcgcgcctgtcgacgggagcgcccgacgtctggacaggctcagagacgtccatcatctgtccgaactgcgtctgaacgcgggcaaaggactgcactctgataaccccgtcagcggcacacacgatctgagctgggatgcaacgctctacggtccgcccgtcgcggataactggcggctgtttggtggaacccgatttgcgcagggcaatttcgacgaaggcaaaggcagcagccgccacctgtttgccggcatcgaatggcggcctcgcgaccttctggtcgaagcagaactctccggtaaccattatcacggtgcaaacaagcccggtgctcgcctctcggcagcgtacagcctgaacgatagctggcaggtgggcggaaaccttgaacgtctttcacgcacgacgcctttacgggcactgcgtaatggcgtcagcgcaaaccggggagaaggctgggttcgctggtatcaaaacgaacgccgtgagtaccagtttaacgcctctgccagccacttttccgaccataaccgccgccaggagttcgcccttacgggtaaagagcggctgtggcagacacccaccctgacgctggatctcgaaccgggtatatcagcgagtaccaacaccctgcgggacacgctctattacaacccggagcgggatctgtccgtaacggcggccctgtccgtcgatcatcagatgtaccgccattacgacacgctctggagccagcaggtcgttctcggcggcggggaatactggcagaaaaatcagcccgctggcgccatcgccctgctgggttacgggcaacgcattcaatggaacaacgtcattgatagcggcgtgatgctgaactgggacaagcgccctttcgacggtaaacgagaaagcaatctctccgtcacgtttgatgcgaatttacgcttttaa

SEQ ID NO: 122718 - DNA, 873 bp, Enterobacter cloacae
atgctgaacaaacgtttttctgtgagcctgataattatcggctggttatgcctcagcgcgagcgtctgcgctcaggccctctcgtttatgtccccccaggaacggccacagcctgaggcaagtaaaccctggccaaaaaaccattttctggttctggcctaccatgacgttgaagatgatgcagccgatcagcgctacctgtccgttcgtaccagcgccctaaacgagcagatcggctggcttgtgcatcacggttatcacgccattagcgtgcaggatattctggatgcgcatgagggcaaaaaaacgctgccgcccagagcctatttactcagttttgatgatggctacagcagtttctacacccgcgtctggccacttcttcaggcctggaacgtccctgcgctgtgggcaccggtgggcagttgggtagatacgccagcgaatcagcaggtcaatttcggcggactgatgacgccccgcgagcgctttgcaacctgggatatggtgcgggagctaagccagtctccgctggttgagattggctcgcatacctgggcttcgcattacggcataccggctaacccacagggaagccgtgaacccgccatcgccaaccgcttttacgataaagcgacggggcgttatgaaaccgatcggcagttcaaccagcggatcgctgatgacgtgcgcaaagttaccgacaaaattacccgggtgacaggaaagcgccccgcgcctgggtctggccctatggcgccgcgaacggcacatcgctcgccatcgccagaaagcagggttatcaactggcctttacccttgaggatgggctggcggatgtgcgcgatctcggcaatattccgcgtcttttga

SEQ ID NO: 122719 - DNA, 432 bp, Enterobacter cloacae
atgaacgaaaatacgctaattctgactgaacatcggctattgccccgtctttttgatgcggtgctgacgctgctggcatggggaggttttctgtttttcctctatgccaatctgtggatgcaggtaaccgaggagagcaactaccgctggggcattattattgcctcgtttaatacggtgctgatctatttgctgatcgccgcgcttaacggctggttgctcattctgtggtatcagtacaatcgccgtcgcgctcaggtaaggcggcggcgtcccgatacctggcgtcacgatgagctggcgagaagctttaacgtccccccgcaaatcatttcagagatgagtcagtacaatttgctgacggtctatcatgaccagatcggccgcatcattgacctgaagataagtcagcagcacgacgagcatccctga

SEQ ID NO: 122720 - DNA, 333 bp, Enterobacter cloacae
atgaaattgatgaaaacagcgctgattatcagcaccctgatcttttccacttctggtatggcgatagataaaaccgccgccggtgcagtggccggtgcagcaattggcgcagccacgggcaaagatttgaaatccacggtaggcggtgcggtcgttggcgcgggtaccggtgcgatgttcaaaaacggcgacaaaggtaaagctgcgcgtaaaggcggcgcggtgggtgccgtggtgggtgcaggtgctgcggcggtaacaggcaacagcgtactgaaaggggccgccgtcggtgccggctctggcgcgctgattggtgaagccactcactga

SEQ ID NO: 122721 - DNA, 1548 bp, Enterobacter cloacae
atgaatatgttgcgtaatttcacgatccgtttcgtcatgctgacgattctcgggatcttttgtttaatgtgggcgggcgtggggctttacagcacctggtctctgtcacgggtatcagagggcaatgaggtggatcgccagctggtcaaacagatgaccatactcagtcagggtaacgatcagtattttcgctttgtgacccggttgagtcgcgcgatggaagtgaaagccgcgggcggcacaccggacctggcccctgcccagcaggcgctggacaatatggggaagaaactggctgagatgaaggcaatctcaccaggaccgatggatgagcaagtttcagctcaggtgatcggtagctggcaggctttgcttgagcagggcgtaacgccgcaaatgcagcaggcgaagcagtcctctctggagggctaccgtcagcaggcgaataacatcacccctccgctgagtcgtgcgtttggtgctgctgcggagaactttaacaacgcggccgcccgggcactcgacagcacccgagtggtcgtggacagcctgaccagcatgacccgcacggtgattatcaccgccacgattattggcctgttaatcctgctcttcaccgaccgttacctggtggcgatgctggtaaaaccgctggctcgcattcgccagcagttccgccagattgcccagggcgatctcagtcagccgattgaaccgttcggtcgcaactgcgtggggcaactggttcccctgctgagcgcgatgcaggatagcctgcgagaagcggtgagctctattcgctccggcagcgagaatatctggcgcggcgcgacggagatctccagcggtaataacgatctctcgtcccgtaccgaagagcaggccgccgcactggaagagacggcggccagcatggaacagctgaccgccaccgtgaagctgaatgcggaaagcgcgcgtcaggccagccaactggcggatgtggcgtcaacaacggccagccgcggcggctcgctggtggaagaggtggtgaccaccatgagcggtatttctgagagctcgaagaagattgctgaaatcaccaatgtgatcaacagcattgccttccagaccaatatcctggcgctcaacgctgccgtggaagcggcgcgcgcgggcgagcagggacgtgggtttgccgtcgtggccggcgaggtgcgtaacctggcaagccgcagcgccaacgcggcaaaagaaattgagggattgattaccgattccgtttcccgcgttgagcagggcgcaaagctggtgggcgacacgggcaccaccatggatgccattttgcgtgatgtgacggaagtgacgaccatcatgaagcaaatcgcgtctgcgtctgaggagcaaagtaaggggatttcgcaggtgggtattgctatcacgcaaatggatggcgtgacacagcaaaacgcctcgcttgtggaagaggtctcggcagcggcctccgcgcttgaacgtcagaccgaagagctccagcggtcggtgcaaaaattccgcctctcagcataa

SEQ ID NO: 122722 - DNA, 1041 bp, Enterobacter cloacae
atgtcctggcacccttaccccgcccgctacgaaaatatgcagtaccgctactgcggaaaaagcggcctgcgcctgccggcactgtcgcttggtctgtggcatagtttcggccacgtacagcctctcgactctcagcgggcgctgttgcataaagccttcgacctcggcattacccatttcgatcttgccaacaactacggcccaccggcgggaagcgcggaagaaaacatgggtcgtctgctgcgggaagattttgctgcgtatcgcgatgaactgatcatctcaaccaaagcaggctatgacatgtggccggggccgtatgggtcgggcgggtcgcgcaaatacctgctcgccagcctcgatcagagcctcaagcgcatggggctggagtatgtggatattttctattctcaccgcgtggatgaaaatacgccgatggaagagaccgccgctgcgctggcccaggctgtgcagagcggtaaagcgctgtatgtcggtatctcctcctactccacggagcgcacccagaaaatggcggacctgttacgtgagtggaagatcccgctgcttatccaccagccatcttacaacctgctcaaccgctgggtcgatcacaccggcctgctggatacgcttgagaaaaacggggcgggttgcattgcgtttacgccgctggcgcagggtctgctgaccggaaaatacctgaacggtattcctgaagattctcgtatgcagcgtgaaggcaagaaggtgcgcggtctgacggaaaacatgctgactgaagccaacctgaacagcctgcgtttactgaatgagatggcacaggcccgtggtcagacgatggcgcaaatggcgctgagctggctgctgaaggatgaacgcgtgacatccgtactgattggtgcgagccgtccggagcagatcgaagagaacgtgcaggccctgaataacctgcactttagcgacgatgagctgaaaaggattgaccagcatgttgcggatggggaattgaatttgtggcaggcatcgtcggataaatag

SEQ ID NO: 122723 - DNA, 405 bp, Enterobacter cloacae
atgctgcccgactacctcgtcccggctaagtaccacattgcgcctgtggaacagcaaacgacggaagcagaaaaagaggctaatttcactcaggggaaaagaaagctctctgattacgagtctgacatattaataggcgtttctcgcaccggtaaatcccgtaatatgttactggaagagcacgaccgtcatataaaggaccggttatttcgcgccgttaaaatagaagcctttgtccacctgctgaatgacctgcaggccgaaggtgaaatagatgcccagaaattaagtcaaataatcgcggaaaaaaccaaagaaataaacgaagccggcaatgaaatttggcttaatctaattacgcgtgaaaccaataaccctattttttataacctgggggaagagtaa

SEQ ID NO: 122724 - DNA, 447 bp, Enterobacter cloacae
gtgaaagaaattaaagataacgacgtttatttggctttagataacaaaaaaagtgatgaatttatcttaaagcaaaatctcgatgctctgcgaaacacaaaaaatgccgagatgacgcgaataactcaggacctggtatcgatcccggcgacgctggtacgcctgaaatggcataatcgccgcgagatttatcctctgcaggtgaaggaagagatatacggcgcggtgatgaataccctcatcgaacagcggcctgagctgaaagagaagcttctcgggcgtctggaggccaattatcagtatctgctcgccagagaagtggccaccctgcgtctgacgcgcaaactgtccgacggcgagtaccgcacgtcaaacgtcacctgcgttgcgcttgatgaagacgcgctggcgtcccacgcgcctgcgcccactgagacaaaaaactga

SEQ ID NO: 122725 - DNA, 1476 bp, Enterobacter cloacae
gtgaagttcaacgattcgttacatgtgtcccagctgcgggttgtgcttcacctctgcggttttctgattcttctgtacagcctgtccatgctgccgccgatggttatcgccctgctgaataaagagcgaacctactttgcttttttaaccacctttttgacctttttcacccttggcggactcacctggcgggcaacacgtcattccggtatacagctgcgcacccgtgacggtttcgtgattatcgttctgttctggctgctgttttcattgattagcgccatgccgttatggatggatgacggtctgcaactctccttttccgatgcgctctttgaaggggtctcagggatcaccaccaccggggcgacggtgattggagacgtcagtgccctgccgaagtcgtacctttattaccgcgctcagctcaatttcattggcggattaggggtcatcgtactggccgtcgcggtcctgccgctgctcggtatcggtggcatgaagctgtatcagtcggaaatgccagggccgtttaaggaggagcgcctgacgccccgactcgccgataccgcgcgtacgctgtgggtaacctatctggcgctgggactggtctgcacgctggcgtactggctggcgggcatgcccttttttgacgccgtctgtcacgggctttccaccgtctcattgggtgggttttcaacccgaagtgagagcatcgggttttacgacagccacgcgattgagcttgtcgccggggctttttcactgctttccgcgtttaactttaccctctggtatgtcgtcatcgcgcgccgcacgctgaaaccgattcggcgcagcccggaggtgaaattctttctcggtgccgccaccgtcattatcgccatcaccgcctggcaggtgtggcacgcggggatgtacaacggtaccgacagcctggtacatgccttctttctggccagctccatgatgaccgacaatggtctttcgacggccgattacgctcactggcctccccacaccattttcctgctgttgagcgccagcttttttggcggctgcgtcggctctacctgcggcgggatcaaagcgctgcgttttctcatcatgtttaagcagtgtattcaggagatgaatcaactcgcgcatccgcgcgcgctgctgagtattaaggtcggcaaaagcgtcgtgaatgaacgcgttctgcgctcggtgtggagcttcttttttctctacgtgatgataacgggctttttcgtctgggcgctgaacctgctgggatacgatctgttcacgtcatttgccaccgttgcggcctgcattaacaatatggggctggggttcggcgaaacggcatcgaccttcgggacgttaaaagacgaggccaagctgttgatgtgtgcggcgatgattatgggacgtctggaaatttatccggtgctgatcctgtgctcacgctttttctggcgggcataa

SEQ ID NO: 122726 - DNA, 402 bp, Enterobacter cloacae
atgaaaaaattcgctgcgattgccgccatcatgatgatgaccactgcccctgtttttgctgcacagggcggatttaacggcccctctgccgcacaaacccaggcccagacgcaggcgggcggttttgtcgataatgacgcgaacctcaccaccgcggtgaaagtgaaggacatgaaggacgacagctgggtgaagctgcgcgggaacatcactcagcgcctgtctgatgaccgctacaccttccgcgatgagaccggtacggttaacgtggagattgaccacaagcgctggaacggcgtgaccgtaaccccgcaggataaggtggaaatccagggtaaagtcgataaagagtggaacgattttgaaatcgacgtgaagcaggttatcaaactgaacaaataa

SEQ ID NO: 122727 - DNA, 660 bp, Enterobacter cloacae
atgcgcattttactggttgaagacgacaagctgatcggcgatggcatcaaggcgggtttaagcaaaatgggctttagcgtggactggttcaccgacggaaaaaccggccagaccgcgcttcattccgctccgtatgatgccgtagtgctggatctgacgctgccggaaatcgacggactggagattctgcgcgcctggcgcgaaagcggacgccgcgagccggtattgattctgacggcgcgggatgcgttgaaccagcgtgtcgaagggctgcgtctgggggcggatgattacctgtgcaagccctttgcactgatcgaagtggctgcccgccttgaggcgctggtgcgccgaagccacggccagacccgcagcgagttgcaccacggaaaggtcacgctcgatcccaccagtctcgtggccacgctggacggcgaaacgctgacgctcaagccgaaagagttcgccctgctggagctgctgatgcgtaacgcgggccgcgtgctgccgcgcaagctgatcgaggaaaagctctacacctgggacgacgacgtctccagcaacgccgttgaagtccacgtccaccatcttcgtcgtaaactgggcagcgaatttatccgcaccgtgcacggtatcggctataccctgggtgacgcatga

SEQ ID NO: 122728 - DNA, 1350 bp, Enterobacter cloacae
atgaaactgacccaacgcctgagcctgaagctgcgcctgacgctcctctttttagtgctgtcgctgacggcgtggtttgccgcaagcctggtcgcctggcagcagaccacccacacgctggataagctgttcgatacgcagcagatgctgtttgccaaacggctgttgaccatggatctggatgagatccgggcccccgaacggatgcgtgagatccccaaaaaagcgaagcatggtcgtctggatgacgacgcgctggccttcgccatctacgccaccgacggcaagatgatgttaaatgacggcgaaaacgggcgggacattccgtaccactatcgccgtgacgggtttgataatggacggctacagggcgacaacgacgagtggcgttttctatggctcacctcacccgacgggaagtaccgcgtggtggtcggccaggagtgggagtatcgccaggagatggcggtagatgtggtcagctcccagttgaccccgtggctggtggcgctgcccctgatgctgttgttgctgatcgttctgctgagccgggaactgaaaccgttaaaaaaactggcgcagaccctgcgctcccgctcaccggatgccaccgacgcgctcccgactcagggggttcccactgaggtgcgcccgctgctcgactcgctgaaccatctgttcacgcgaacccaggagatgatgacccgcgagcgtcgttttacctcagatgccgcgcacgagctacgcagccctctcgcggccctgaaggtgcaaaccgacgtggcgcaactgtatcaggacgatccgcaggcgcagcaaaaagcgctggcgcagctgcatgcgggtatcgatcgcgcatcccggctggtggatcagctccttacgctgtcgcgtctggactcgctggataacctcgacgatatcgaaccgatcgtgatggccgatctcctgcagtcggcggtgctggatatctggcatccggcacagcaggccgggattgatattcgtctgaacattcatgccccacaggtcacacgtcagggccagccgctgctgctgagcctgctggtgcgtaacctgctggacaacgccgtgcgttatagcccgcatggcagcgtggtggacgtcacgctggacacccggcgttttaccgtgcgtgacaccggccccggcgtttccaccgatgcgctggcgcgtattggtgagcgtttttatcgcccaccgggacaggatgcaacgggtagcggcctggggttatctatcgtcaggcgcattgccgccctgcatggtatgcgcgtcgcgctgggcaatgcggcagaaggcggcttcgaagtgaaggtcagctggtaa

SEQ ID NO: 122729 - DNA, 1815 bp, Enterobacter cloacae
atgtgggcggcaaataaagaaaaatcaaatccgttgtcttcacgccaggatatcgtggcgtcactgaatactctgttgagtgcgctggataaagcgtttgcgccgggcagttcacgattttcgctgggtgaaacctgtgcgcattacagcacggatatcgcgcagatggagggactctcacgtgcgctatgggggctgtttccgctgctggcatccggtgatgccagccccttttgcgaaaaataccttaccgcgatcaaactcggcaccgatccgcacagtgacggttattggggcgaaaccggcccctacgatcagcgtctggtcgaaatggcggcctacggtctggggcttgccctgctgggggataaactcaccgcgcacttcaccgggcgcgaggtcatgaacctgcacgcatggctcaaccagatcgcccatgcgcaaatgccggacagcaactggaactactttgccattatggtgcagctcggttttaagcgcgccgggctgccgtatgaccagacggcgattgaccgacggtttgcgatgatggaggcctattatctgggcgatggctggtattccgacgggccggggcggccgaaagattattacatctcgatggcattccatttctacggcctgatttacgccaccctgagcggtgacgaggagagggcgcaggtgctgcgagcgcgttcgcgcctgttcgccgaagactttatctactggtcagccgccgacggtgcctcggtaccgtttggtcgcagtctgacctatcgctttgcaatggtcgccttctggagtgcggtcgccttttccggtctggaggtgttcacgccggggattgtgaagggcatcgtgctgcgccatctgcgctggtggcagcaacagcccatcaccgatcgggacggcattctgaccctcggttttgcttatccgaacctggcgatgtgtgaggactataacgcccccggctcgccatactgggcgctgaaaacctacctgattctggcgatgccggaggaccatccgttctggcaggctgaagagcagccgctgcccgcgcttgcggaaaaacgcgtcatcccgcatgcacagcagatcctgatgcatgccggtcagtcgcagcacgtcactatgcttaccgccgggcagcttgagctgaataactacgtgaatacggaagccaaatacaccaaatttgcctactccagccgctttggtttcacgattgagcgcggacggtttggcctgaaacatgccgcctgcgactccatgctgctgctggcagacggggataactattttcgcggtcgccgcgaatgtgaagcggtgcgggtcactgaagattatctctactcacgctggtctccgtggcatgacgtccatatcgaaacctggcaagtgccgtttggtgagtggcacctgcgcctgcaccgcatcaatagcgcccgtcgactgaatacggcggagggcggatttgcggtgatgaacaccgaaccgcagatccgtgagaacggatgctggcttgtcgccggtaacggtaccagcgtgctggtcgatctctctccggtggttaaccgtgaaccggacagcatcgtcacaccgccgaacagcagcattatgttcccggaatgcgctgccattccgctgttgaaaaccacgcttgcgcagggggagagctggctctgttgtgccgccgtcgccggcgaaagccagccggttatggcagtcccacaactgaatattagcgagaaccgggttgttatccgcgagcccggcagtgagcgacagctgtcgttctcattataa

SEQ ID NO: 122730 - DNA, 840 bp, Enterobacter cloacae
atgcgcgacacgccaacatccgatcatctggagctgattaccttaaatgacaccgtggtgtcgtttagccgcctgttcgccaatacggtgcgctatcaccactggcatcagtgtctggaaattctctatgtggaagaaggctttggcgtggcgattgtcgataaccgtcactacaccatgcgccccgggcggctgtttttcttcccaccgtttaccctgcataaggtgatggtggacgagaaggcagaggccctttacaggcgcaccattattcatctcgaccagcatgccgtactgaaaaccctgcgtgattttccgcaggctcagcagcgtctgcagaagctgtctcgtcgtggcggcgaggcctgggtcgctgacctggtgcattgccagaagaatatcgattatcttcttggctgttatcagccgccgctgaacagcgaaaacattgccgggctgttgattagcctgtttgccatgctgccggatgataacgacggtgccccggggagcagtcagggcgtggcaagccaggtgatgttctggctggatgagcactatcgggagaaatttcgcctggatgcgctggcggctgagctggggaaatcacgcagctatgtatcgcgaaaattccatgcggaaacaggcgagaagatccacgactatctgaatacgctacggctgcgaaaagcctgcgagtacttgctgcacagcgatgccagcgtgcgtgagattgccgcacgggtgggattttccgacgtgacgtggtttatcagcgcctttaaaaaaggaattggtgagacgccgctgcagtaccggaaaaatcatggcgcggcgtga

SEQ ID NO: 122731 - DNA, 789 bp, Enterobacter cloacae
atgacttcttcccgtatgccagcactgtttttaggccacggtagcccaatgaacgttctggaagacaacgtctatacccgagtatggcgtcatctgggcgagacgctaccgcgtccgaaagcgattgtggtggtgtctgcgcactggtttacccggggcacgggcgtgaccgcaatggaaacgccaaaaaccattcatgatttcggtggcttcccgcaggcgttgtacgacacgcactatccggcacccggctcgccagcgctggcccgacagctggtggaattactcgcgcctgtgcctgtggcgctggataacgaagcctggggctttgaccatggctcgtggggcgtactgataaagatgtatcccgaggcggacatcccaatggtgcagttgagtatcgacagcactaaaccggcggcctggcacctggagatggggcgaaaactggcgaccttacgcgacgagggcatcatgctgatcgcaagcggcaacgtggtacacaacctgcgtacagcgcgctggcacggtgagaacacgccatacccgtgggcgacatcttttaacgattacgtgaaagcaaatctgacctggcaagggccggttgaggagcatccgctggtgaactatctggatcacgaaggcggttcactctctaacccgacgccggaacacttcctgccgttgctgtatgtactgggcgcgtgggatggtcaggagccgatcagcataccggtcgatggcattgagatgggaagcttaagtatgttgtcggtgcagattggataa

SEQ ID NO: 122732 - DNA, 297 bp, Enterobacter cloacae
atgaaaaattttctatcgaaaatgagtaatgtatttgctattgagttctttttgggtattataaattcacaaattgtgaattacgtggaggggtacatgtttcattgtcctaagtgcaagcattccgcgcatgcgcgtaccagtcgctatttaagtgaaaataccaaagagcgctatcaccagtgcaccaatgtggactgcagctgtacgttcgtgacgatggagtccgtggagcgtctgattgcgacacctggcgccgctgagcgtgtccgaacggcttcgcagacccacggttag

SEQ ID NO: 122733 - DNA, 1155 bp, Enterobacter cloacae
atgatcaccgaaatgaatatccgggcgggtgggaaaatcgcccctgattttatgcttaagcttgacgagcgcgatatcacgcaaaatttcagccatcgtcttatcagtttgaccatgaccgacaaacgtgggctggaagccgatcagctggatattctactggatgattccgacgggttgttagacctgcctgcccggggggcaagactgtccttatggctgggatgggaaggaacaccgctccagccgaaaggggactttacgatagatgcgattgaattccggggcacgccggacacgctgaccatccgaggatgcagcgccgattttcgtgggaagctcaacgtgcggcgcgaacagtcgtggcatgacacgacgatcggcgcgatagtcaacaccattgctcagcgtaaccggtttaccgccagcgtcggggcgggacttgcatccatcgccatttctcatatcgatcagtctcaggagactgacgcggcgtttctctcccgcctggccgaacgtaatggtgcatttgtttcaatcaaagccgggaaggttatttttatgaaagcgggccatgccgtgacggccagtggcacaccgcttcccttaatgatgattgagcgtggagatggcgatcggcaccttttttccgtcgctgaccgtgaaaattattccggcgtgacggccaaatggctgcaaacgcgtgacccaaaacaacaaaatactcaattgagtattaatcgtcagcccggggggcagccgacagaaggactacagcacccggatgccgctacaccggtagcgggagcaggaggcaaggcagagaagccgcaagagaggctggtgggatcggcggaaaacgtttttgagctcaccacggtttatgcctctgaagagcaggcgctcagggctgcagaggcgaagtggcgcgcgcttcagcggggtaccgtgaatttttctatccagctggcgctgggacgcgccgatctgtatcccgaaacgccggtgctggtcaacggctttaaacgggtcattgacgagcaggcgtggattatcaacgaggtggttcatactctcagcgagagtggatttaccacgcaacttaagcttgagctgaacgtcgccgatgaaaaattttctatcgaaaatgagtaa

SEQ ID NO: 122734 - DNA, 465 bp, Enterobacter cloacae
atgttaatggtgctgggtctgtttgtctttgaacgacgaaccttaccgtatcagtcaatggtatttacaaaagactaccgctgggcatccaacgaacgcatcgggaaacccaaagcctggcagtaccttggcgaaggtgagacatcctttaacctttccggattactttacccggaactcacgggagggcggctttctctcaaggcggttgagctgatggcgaatgaagggcgggcatggccgttgatagacggtaccggcatcattcacggcatgtttatcattgagaaagtcacgcatacgcattcggatttttacagcgatggcactgcccggaaaattgattttaccctggtactgaaacgcgtggacgaatcgctgatgacgacgtttggcgacctgagaacgcaagcctcagagctggtggaaagcgcacgtaatagcattggagggctggtgggatga

SEQ ID NO: 122735 - DNA, 573 bp, Enterobacter cloacae
gtgattgaggggctttctgcggccttcgcgccgctgggcgagctgttctctccgctgttacaggcctttggtttcatttcagaaaaactgggcgggatctggcagtggttcatcgatctgattgcgccgattaaggcgacgcaggaaacgctcgacagctgcaaaaatgtcggcgtggcgttcggtcaggcgctgggagatgcgctaatggcgccgctaaatctctttaacagcctgcgcggcaaggccagctggctgctggagaaactcggcgtcataaaaaaagagtcgggcaatatcgactcggctgtaccgaaagaaggcacctcctctgctgacgccggcagtgcctgggacccggcgtcacctgtttacagcggcttcatgggataccagccgatggcagcagcgggagggcgttcttacatcgatcagagtaaaagtgaatacaacttcacgctgcagggaagcgcagcctccggaacggatctgactcgtcaaattcgggaggctatagagagcagtgagcaggaaaaagcgagacggcagcaatccagctttatgtatggttaa

SEQ ID NO: 122736 - DNA, 1884 bp, Enterobacter cloacae
atgagtaataatgtcagacttcaggagttgcttaaggcagtcgaccgggcaagccgaccgcttaacgctatccagaacgccagtctctctctcgcggccagtatccgcgattctgaggaggcgttgcgcgcgcttgatgaacaggcgggccgcattaacggcttcagaaaagccaacgaacagctcgccgtgacggggcagtctcttgcccgggcgaaacagcagaccgcggagctggcgctccagctcaaaaacacccagaacccaacccgtgaccaggcggatgcgctggcggcagcccgccaatctgccgctgcgcttaagcttgagtacaacaatttacgccagtcggtgcagcgccagcgcggtgagctggcgcaggcagggattaatacgcgcacgctgtcgtcagatgagcgtcgtttaagacagggtatcagcgaaaaaacgctacaactaaatcgacataaagaggcgcttgccagggtcaatcagcaacaggagcggcttaataccgtccagaaccgctacgagtctggcaaacgtgttgccgcgggtgtgcagcagtttgctaatgcgagcgcaggaatggcaaaggcgggctttaatcagacgtcccgctttattgccccaggcatccgttttgaaaagcagatgtctgccatacaggcaagcctgggtctgcagaagggggataccaggctggaggccattcgccagcaggcacgggatgtcagcgtcagtacaggaacctctacagatgttgttacccgggcgcagggcgagctggcccggtcaggctatgacgccgacggggtggtggccgccactgtgccgacggtcaacctcagcctcgctgggaatattgatgccgccaaagcggtcgacatcatccgcagcacgcaggcctcgtttaacctggcgaatacggatgttgaacgcgttgcagatgtccttacccgcggtttcactgcgtccaataccagtctcaccgaactgagtaccgccgttgcatccgccgcacctgccgccggagaagccggcgccagccttgaggagaccaccgcgctgcttggtattctgatggaaaaggggatgaaaggtgccgatgccggcgcagaggttagcgccatgttgagccgcctgcagacgccggatgggcagcgttctgcagcgctgaatgaactgaaggtgcaaacccgggatggtgagggtaatccactgccgacagagaatatcctcaaggcgatctctgcctcattcgaaaacagcaaaatcggtgcggctcaacaaacggaatacctgaaggccattttcggtgcggatgcgatgcaaggcgcaggcgtactggtttcagcggctgggaatggaacactggataacaagcgccagacactccagggcgcgagggggagcaccgcgctgacagcctcggttcagggcgataacctcgagggtgatatcagcaagttccaggctgcattaaacggcctgaagattgatgtctttgataaggccgatggtgccctgcgcacgctgatctcaaccgcgaccggatggcttagtacgctctctctctggatcaacgctaaccctgcactgacgcaagccctggtcagcgtggttatgggcgcacaagcctttgctggtgtcctgggcacgctaggtatggtggtcgcccccattgtgtcaggcctgaatctggtgataaccgctgccgggatgctgggcacggtattcagcgtagtgggagggagcatcatgacggtgctgggcgccctgagctggcccgttattgctctcggagcggcaattgccgctggcgctttactgattcttaaatactgggagcccattagcgccttctttggcgggggtgattga

SEQ ID NO: 122737 - DNA, 309 bp, Enterobacter cloacae
atggaaaatatcaacgagaccgtcattaacgaaagcgaaaacccgaacaccattacgctcgacacccccgttctgcgcggcgagcaaaaaatcgaaaaggtgaccgtcgcaaaacccaacgcggggaccctgcgtggggtatcgctggcgtcgctggcacaatctgacgtcgatgcgctgattaaagtgctgccgcgaatgacctcgccggccctgaccgagcatgagattgcgcgtctggatgcttccgatctgctctcttttgcgggcaaggtgatcggttttttgtcaccggcttcggctcgctaa

SEQ ID NO: 122738 - DNA, 519 bp, Enterobacter cloacae
atggcgttaccacgcaaacttaaatatctgaacatgttcaacgatggcctgagctatatgggcgttgttgagtctgtcaccttaccgaagctcacccgcaaactggagaagtatcgcggcggcggtatgccgggctcggtctctgtcgacctcggcctggacgatgatgccctggcgcttgagtggaccattggcggtctgccggacgtcgcgctgtgggcacagtatgcctctccgggcgcggacagcgtgcctctgcgctttaccggctccttccagcgtgacgacacgggcgaaatctccgctgtcgaaatcgtcatgcgaggccgtcataaagagtttgatggtggtgaaaacaagcagggcgagagcggcaccaccaagatgtccaccgagtgcgcttactaccagctgaccatcgatggcaaagagatcatcgaaattgacatcatcaacatggtgctgaaagtcgacggcgtcgatcgtctggcggaacaccgtaaggcgattggcctgtaa

SEQ ID NO: 122739 - DNA, 1188 bp, Enterobacter cloacae
atgggcgactatcatcacggcgtggaagtcatcgaaatcaacgatggcacccgcaccatttccaccgtctcgacggcaatcatcggcatggtctgtacggccagcgatgcggacgacaagacatttcctttaaacgagcctgtgctcattaccaacgtgcaaaccgcgattgcgaaagccgggaaaatggggacgttgtccgcttccctgcaggcgattgccgatcagtgtaaaccggttgttgttgtcgtacgtgtcgctgaaggcaccgctgataccgctgaggaagcacagaaagagactatctctaatatcatcggtacaaccgatgaaaacggtaaatataccggtctgaaagcgctccttaccgcgaaaacggtcactggcgttaagccacgtattctcggtgttccggggctggattctcaggaagtggcgaccgcgctggccgccatgtgccagagcctgcgcgcgtttggctatgtcagtgcatggggttgtaaaaccatttcagccgctatcgattaccgcaaaaacttcagtcagcgcgagttgatggtgattcaccctgattttctggcgtgggataccaccaccaacacgacgacccacgcctgggccactgcacgagctctcggcctgcgcgccaaaatcgaccagacgattggctggcacaaaaccctgtccaacatcggcgttaacggtgtcacaggtgtaagcgcctccgtgtcctgggatctgcaggaacaagcgaccgatgcgaacctgcttaaccaggccggcgtcaccacgcttattcgtaacgacggcttcaaattctggggcaaccgtacctgttcagacgatccgctcttcgtctttgaaaactacacccgtaccgcacaggtgttggccgataccatggccgaagcacacgcatgggcaatggataaacccattacgccaacgctcatccgcgacatcgtttccggtatcaatgccaaattccgtgagctgaaaaccaacggctatatcgttgatggcgcttgctggtatgacccggaatcaaatgatgcatcgaccctgaaagcggggaaattgtacatcgattacgactacacccctgtcccgccgctggagaacctgaccctgcgccagcgcatcaccgatacctatctggcagacctgtccgattcggttaacagctaa

SEQ ID NO: 122740 - DNA, 522 bp, Enterobacter cloacae
atgattacacttaaaaatttcgttcaatatgaaccagaatataaagaatttttgtttaatgctatatttattcaatcagaggaggggctggactggtattaccatatgtcacgttttcagcctgatacactgaagatttgctttgacaaaaataatattattcgctctttcagtcatcaggttgatcgcctctttcctctggggatgtctgtttcggaagtcgaaccaacagaagtgccagaagggctgaatatacacggtgactgggtgtggaatggcactaaaattattccacgtcagttgacaagggaggaattaattcaacaggcggaaaccagaagaagtgaattgcttgccgaagcttcggatactatcgccccccttcaggacgcttcagaactcggcattgcaacagacgaggaagctgccacgctgttgctctggaagcactatcgggtgatgctaaaccggctggatctcagcacttcaccagaaattgaatggccagaacgccctgcctga

SEQ ID NO: 122741 - DNA, 1782 bp, Enterobacter cloacae
atgacagtgaagtataaaacggttatcaccaaagccggcgccgaaaaactggctgccgcaaccgtcccgaacgggaagaaagtgaattttacggcgatggcggtgggtgatggcggcggcacgttgccgatgccggatgccagtcagaccaggcttgtgaatgaagtctggcgtcatgccttgaataaaatcagtcaggacaacaaaaagcggaactatgtgatcgcagaactcctcattcctcccgaaacaggcggtttctggatgcgagaaatggggctttatgatgacaccgggacgctaattgctgtcgggaacatggctgaaagttacaagccattgttggatgaaggctcaggtcgcgcgcagactgtgaggatggtgatcatggtcagcgatatcgcctcggtcgagctctcaatagatacttctatggtcatggcgacgcaggagtatgtagacgagaagcttgaagagcatgaacaatcccgccgtcatccggatgccacgaccaaggataaaggctttacacaactcagcagttcgaccgacagtacgtctgaggcactcgccgcaacaccgaaagcggtcaaggccgcctatgatcttgcagccgggaaatacacggctcaggacgccactacaggacaaaagggtattgttcaactcagtagcacaattgatagtgtatccgagtctcttgcagcaacacctaaggctgtgaaaatagttggcgatgacctctcaaaactaaaaagcagcctgggtacggcagcaaccaaaaacatacaggaagctccagacgatattactccaggtcgggtgctggtaaatggtggtgcagttgctatcagaggagtgtctgcgagagccagcacgggactttcaaatgccgatgctctgccatccaattcagttagcttttgttattcgaatgcaacaaattcaccaggttatgaggcaactatcctcgatattggtgggcttagcggttatcgggtgcagtatgctgcatcttatggtgatggtggtaaacagcttaaattccgctcccttaatggcgataacaatgtctgggggggctggacaaaggtcatcactaatcatggcggaagtgtttcgtacttgtcagatgcaacttattaccagacgaatcccacaggttggtacggctctggcgcttttgctgatcagtatcaaaacaatgctgcaccatttttgatgccaaaaggatatcaatctcctaacggtacttctatttatctaccgataattaagggcttttcggaaactgtcggtcatggttatggaacagcgataagttttggcgtttatcgcactggcaccaacgcttttggagcggcgattatcaatttaactggcgatgccaggaatagtgttaattttctgtttgatattaacggtaattttgatgccccagggcaagttactagcggtggcaatattgttgccgggcagggtttatttgaatcaggcggagcggtacgagtttactcgtcaaataacccacctccacaacaggatttaagtccttatgcaaggcaagactggacgttgcaatactttgttcgagatgtagcaatgggggcagaagggtcattcataattatgcaaaacggttggcaacgggttccggctggatgcgcaatgactggatggaatgcagaaggtcaaaaccccggcggggatactattttttatcgtccgattcaaaaatacatgtctaatattggatggattacggtaggtcatacagcatga

SEQ ID NO: 122742 - DNA, 531 bp, Enterobacter cloacae
atgagtaatacccgattgttaccggtggggtcgtcgccgcttgaggtcgcggcggcgcgcgcctgtgccgacattgagaatacccccgtcccgcttcgtcacctctggaatgccgacacctgcccggcaaatctgttgccctggctggcgtgggcgttttcggttgaccgctgggatgaaaactggccggaagccaccaagcgcgatgttatccgcaatgcatggtttatccatgcacacaaaggaacgatcggcgcagtacgccgcgtggtggagccacttggctatctgatcaacgtgacggagtggtggcaaaccaacgacccggcaggcacgtttcgcctggacattggcgtgctggaaaccggcatcaccgaagaaatgtattacgaaatggagcggcttattgctgatgcaaagcctgccagccgacatcttatcggcctcaatatcattcaggacgttccgggctatctctataccggtgccctgagctatgacggcgacatcatcacggtttaccccggataa

SEQ ID NO: 122743 - DNA, 909 bp, Enterobacter cloacae
atggctattgttgatctgagccagctcgccgcgccggacgtcgtggaggaggtggattacgaaacgctgctggcagaacgaaaggccacttttgtctcgctctatcccgaagaagagcaggaggcaattgcacgaacgctgacgcttgagtcagagccgattgtgaaactgctgcaggaaaatgcgtatcgggaagttatctggcgccagcgcgttaacgaggccgcgcgtgcggtcatgctggcctacgccaccggtagcgatctcgaccagcttggtgctaacgctaaccttgcgcgtctggtgataacgcctgccgacgacacgacgtttccgcccacgccggctgtgatggagtctgacaccgactttcgtttgcgcatccagcaagccccggaagggctgagcgtggcgggatcgacgggggcttatcagttccatggccgcagcgcggatggccgggtagcggacatctctgtcatcagtcctcagcctgcgaacgttaccgtctccgtgctgtcccgggagaataacggcgtggcgtctgaagagctgctggccattgtgcgcaacgcgctgaacgatgaggacgtcaggcccgttgccgatcgtgtgaccgttcagtccgccagcattatcgactaccgcattgcggcttctctttttctcttccctggtcccgaaagcgagccagtgctcaacgcggcaagggcccggctgcaggcctatataacggcacagcaccggctcgggcgggatattcgtaagtccgccatttacgctgcactgcatgttgagggtgtacaacgcgtcgaactgaccgcgcctgcggccgatattgtgcttgatgaaacccaggcctcatggtgcagccagtacagcgtaaccgttgggggaaacgatgagtaa

SEQ ID NO: 122744 - DNA, 351 bp, Enterobacter cloacae
atgacggtgcgctacaggggaatgaacagtcagaccgggctcagcatttcagaggctgaacatatcagacaaagcgtgcgggacattctggtcacgccgattggctcgcgggtgatgcgccgcgagtacggttcactgctggcggcaatgatcgacaggccgcagagtccggcgctgcgcctgcaaatcatggccgcatgttactccgctatccagaaatgggagccgcggatcagcctgacggccatcactttcgaacgttcggagaatgacgggacgctgtatgtcgatctcactggcacccgccagacctccggacattccttttcaatcactatttcattgagttaa

SEQ ID NO: 122745 - DNA, 642 bp, Enterobacter cloacae
atgaatacactcacttccatgcacggtatcgctcgcgcgatccgtaacctgattcgtatcggtgttgtcaccgatgttgacctcaacagagggctctgccgcgtccagtccggagggatgaaaaccacctggctgaactggctgacctgtcgcgccggccgttcgcgcgtgtggtgggcgccgtccgagggagaacaagtgctgctgctggccatcggcggtgagcttgataccgccttcgtgctgccaggtatcttttccgatgaccacccggcgccgtcaggttcccctgacgcactccacgtctcgttccctgatggggcggttatcgagtacgagcccgggagcggagcactcatggccgcaggcattaaaacggctgacatcacagcctctgaatcactcaccgccaccgtaccggtggtcctggtgaagtctgagacgcgcatcaccctggatacacctgaggtggtgtgtaccaacaagctaattaccgcctctcttgaagtgcagaagggcggggtaatggccggcaatattgagcattccggcggtaaattcacctccaatggggtgcaggtggacaaccatgctcacggcagtgtgcaaagcggcggaagctggactaaggggacgcaatga

SEQ ID NO: 122746 - DNA, 468 bp, Enterobacter cloacae
atgcacaaactcaacagcctgcgtcaggcattaattgacgccgttccccaactgaacgatcaccctgatcatctgcagatgtcggtggggagcggaaatattgacgcccgcctcgcgtcctcgctctcctttgaaaaaaagtatgaactgaaagcgaatatcagtagcttcgccggcgacagcgagggggtcttcgtcccggtactggcctggctgcgtgaaaaccagccagatatttttaccctcgatgacgggcgaaaaaacgggtttctctttggcgtcactttcaacgacgatggtacggtgaatatcagctttagcctgcagctcaccgagcgcattcttgtttcgcaggagcagggaacgttgcatgccacctattccccggagccgccgttgccagagcccgtcacacgtccgctggagctgtacatcaacggtgaactggtcagccagtggaaagcgtaa

SEQ ID NO: 122747 - DNA, 159 bp, Enterobacter cloacae
atgccgggaagtgagcccatcaccaacggcgatctcagtgctgatattcgtcggcttgagcatgcccttatcgcctgcgcgctgcaggtcgaaaccataaaagactgtcaggataaactcgatgcacaaactcaacagcctgcgtcaggcattaattga

SEQ ID NO: 122748 - DNA, 432 bp, Enterobacter cloacae
gtgcctgaaggggaagccatgaaacctcttctgctggtactggccgttctgctggccatcacgctgtggtttcgtcatgacaacgtgaacctgtcccgctctcttgctaaagccaaccagatcgcccgcgatcaaaaaaacactatcaacacgctgcttcagcagttatccgaagcacagcggattgccaggtcgaacgaggatgcgcaggtcaggctccgcgaggaccttgctgccgtcggcgaggagatggcacgacgcgaagcggctatcgggaaatgggtaaatgaaaatgaagagttacgccgctggtataacgctcagctgcctgatgctgtgcgcaggttgcacacccgcgccgcctgcgcctccgcagcacattgtttacaacgcctgcccgaaggtgagcgcctgtccgatgccgggaagtga

SEQ ID NO: 122749 - DNA, 510 bp, Enterobacter cloacae
gtgaactcaatcattaagcgttgcagcgccgcgggtgtactggccctggcggtgctgatgcctgacttccggttactgaacacctcaccggaggggttggcgctcattgctgatctcgaagggtgtcgcctgtcgccttatcgttgcagtgcgggcgtatggacatcaggcattggccatacgtcaggcgtcgtgccgggacgggaaattacagagcgtgaggcggcagcgaaccttgttgccgacgtgatgaacgttgaaagacggctggcggtatgcgcaccggtggagatgccgccccgtgtctatgatgcgctggtgagttttgcctttaacgttggaacaggggctgcctgccgttccacgctggtgtcattcattaagcgtaaacagtggccgcaggcgtgcaatcagcttacccgctgggtgtacgtcaatggggtcaaaaatgccggactggaaaaccgtcgagctcgtgagaaggcctggtgcctgaaggggaagccatga

SEQ ID NO: 122750 - DNA, 222 bp, Enterobacter cloacae
atgggactgagtcttgagaaaatcaccacgtttatcgcctactggctggccgtagcgctggcctggttcggggcgatgtctcctgaaaaagtcgcgctatacgtgggaagcctctgcgccatttttaccgcgctgacgaattactggtttaagcggaaaacctatcgctatctgacctctcttggactcgataagaagagtattcgtgaactcaatcattaa

SEQ ID NO: 122751 - DNA, 204 bp, Enterobacter cloacae
atgaaaatctatgcaatgcagggggacacgcttgatgccatctgtgcccgttattatgggcgcacggcaggggtggttgaaaccgttctgaacgccaattctggcctcgcggagttgggggtcatcttacctcatggcacgccgatagacatgccagaggttgatagcgcaccgactaaagaatcagtgaacctatgggactga

SEQ ID NO: 122752 - DNA, 441 bp, Enterobacter cloacae
gtggacagagagttgaacgagcaagtcatgattgaacgcgtcgagatgattgcgcggctgacgacagaaggaacgtgtcaggaaagagatcgtgaaattgccctgaatttgatcgctgagattgcgagaggaaatttaatcaggaacaacgcgtttaccgtggttttctcggcatcacccgttccggacagaatcaaaaaagaggccagcgtgcgggtgaacattaccctggataaggatcagcttattggtccgtccgtcgtggaggcgtttcaggacgaattaacccgcaggataagatccgtgtttccgtcaacgctggttaccgtcaaaaaaggatccatgaccggcgtggagttgcaggggattgaaagagaggccgatcgcgaagcgctggacaatatcctccgggaagtctgggaagacgagagctggcgctag

SEQ ID NO: 122753 - DNA, 2196 bp, Enterobacter cloacae
atgtcatttgcttatccgtggaatgaaccccgatcggctattgccagcccctacctgactcacccccaattacagcgtcgcgaccgtctgttcgcggcgctgcagcaagccagaaaagcgctcgctctgcagcctgactgcgtgcgttttgacgtctggcgcacggttgatgctcttgaactccatcagggcagcctgcgagccaatgcctttttgattcggttctgcaacagggtattaccacgtctgcagcaggtctctgcacggtatgcctgttcaggtgttgaccgtaacgtctccaccgccgtttttggtggacacttcgacacgccgctttcgcaatatcttgcatcgcggatggttacgctgattgcccgcttcaaccgtctcccggatatgtcccgcgccgatattgatttgctggccgctgacatcgcgggctttattcgttccgagctggcgaatatcaatgacgctggcctcggcgaatttcaaacccttcatgtctggtatcagcgcgctggattaatcacccgccagttcaatgtactgcctcctcactgggagcgcgtgtcgaagatactctttaacaaagaggacattgcgccagcggtgatccgcatgttttccgaagactggtggcgtggacgactgcgtcgcatggcggccgcctggcgtgagcatgtgcagattgcacttggaaacgtcagcaaaaagaagtctgcctatgcgagtaaacgctgcatcactgactggcgtgaacagaagcggcgcacgcgtgaatttcttaaaggtctggaactggaggatgaagagggcaaccgaataagtctgattgccaggcacgatggctcggtggccaatcccgcgatacgtcgctgcgaactgatgacccgcatccgcgggtttgaaaatatctgccatgagcttggctacgtgggcgagttctataccttaaccgcgccgtcgaaatatcacgccaccctgaacaccggctatcgtaacggcaaatggaacggggcgagccctgcggatacacaaagctacctgacaaaactgtgggcgcggatccgggcaaaactccaccggcaggcgattcgtctgtttggcatccgcgttgctgaaccccaccatgacggtacgcctcactggcacatgctgatgttcatgctgcccgaaaacgttgagcgcgttcgccgcattatggaggaatacacacaggaggaagacgcttttgaactgcaaagcgataacgtcagaaaagctcgctttcacgctgaagctatagacccgcaaaagggcagcgccaccggttatatcgctaaatacatctccaagaatatcgacggctatgcccttgatcgcgagacagataacgaaagcggcgagttgcttaaagtgactgcatctgctgtttcggcctgggcggcgcgctggcatatccgtcagtttcagtttatcggcggtgcaccggtgaccgtctaccgtgagctgcgccgtttgactgatacgcaggccgcacacggtctgagcgtagaatttgcggcagcgcatgacgccgcggacgccggagactgggcaggatacgtcaatgcacagggaggaccgtttgttcgtcgggatgcgttgcaggtgcgcacgctgtatgagccccgtgccgaatacaatcagtacggcgaagaacgagtctgtattcgcggcgtttacgacaccgcactcggcccgggctcgccgattttgacccgcctcacgcagtggaaaattgtgccgaagcgtgccgttgatttggccgttgaccttaacggcaccgctgcgcgttcttggagttctgtcaataactgtacggtgagcgacgtctctcaacccctcagccggcgtgcgagacgcgcgttagccgcccgcataaccctccccagaccggttgcaaagactccctttgtctatgacaaggatccgcagaacggagtggcagagagagtgattgatgagatacggctcgctaccggaataacgatcagccggggggaagccctgcatcttatggcggggggcattagccgttttaacgacaaatggtgccggggatctgcagacggatcgctatttcctgcggcaccgtcttatcagcaaaaggcccggaaaatccttgaacgtataaggtatttaacgcatctgataagcaaagggattcgctaa

SEQ ID NO: 122754 - DNA, 222 bp, Enterobacter cloacae
atggccgattttatcgatctggcgcaggagcgtgagcttgaagatcgcgaacgtcatattaatagcgcccgccagcgatgcgcatcgccctcgcgttttacctgcgaggagtgcgacatccccatccccgaggcgcggcgaaaggcgttacctggagtggccttatgcgtcacttgccaggagataacggagctgaaaaacaaacatttccggggaggataa

SEQ ID NO: 122755 - DNA, 228 bp, Enterobacter cloacae
atgcgaaatagcgaaaaccgcacttttcttaacgggcgcgaggaactccagcgcctgctggtgcaggcgaagatggaggagcgcagggtgcgcgcactcgccgtctccctgcgtctggaggcattagccagtcacatctataaaaccggaatgtgtggcgaagacgcagcggaactgctgtgtcacgaggctgcccgttacgaacgcgaatcccaggagctgcactga

SEQ ID NO: 122756 - DNA, 339 bp, Enterobacter cloacae
atggcaatagaagcgacacgtgcaacggtcccactcaaggtgggggcacgtctttccgggcttaatcacgtggccgaactgcgtgccaggtactggggcgataacgagaaagcgctggcgcggtttttggccgagatgcgtgataagcgcgatcccagttttgaggagaataacagggcgctggcggccatctttttcctggctaaattacccgccgcccgtcacgaatgcggtatcaatgagctgacgactgaggagaaaagagcgcttatcggagccatgaatcatttccgtgcagtcgtgagtttatttcctgaacggctgaccatgccgctttaa

SEQ ID NO: 122757 - DNA, 576 bp, Enterobacter cloacae
ttgattttagattctcaagtgaataatgaagagttactcgatagaatctgtcaggtatatggttttacccaaaaaatccagctggcccggcacttcaatattgccgccagttcccttcagaaccgctacgcgcgcggcaccatctcctacgacttcgcggtacaatgtgcactggacacaggggccagcctgcgctggttgatgaccggagagggtgcccagtttgtaggtaaccctgcgcctggcgatcccgttgctgttgtcacattcactctcagtgatggtcagctggaagaaaattccactttgagtatcgattcacatctctttagcaaaccgctcactcgcggtatcgcagtccggtctgaggcaaagctccactttgttgaaaaaggggcgtcattaaccgacgggctatggctggttgagattgaaggcactatcagtcttcgtgatttaaccctgctgccggggaaaaaactccacgtcgcgggcggcaaagtcccctttgaatgcggtatcgatgagataaaaacactgggccgtgtggtgggcatctacagcgaggtgaactga

SEQ ID NO: 122758 - DNA, 765 bp, Enterobacter cloacae
atgacatccacccgttacccacaacgtgttcgtaatgatctccgttttcgcaagctggacgtgcttcgcgttgagcgtgtcagcgcaggtttccagcgcattgttttaggcggcgaggcgctggagggctttagctctcgcggtttcgacgaccacacaaaagtgtttttcccggctccgggggcgacctttgtaccaccggttgttaccgatgaaggtatcgactggggcgacggtgtgcgtccgcaggcgcgagactatacgcccctgtacgatgccgaacggcatgagctggtgctcgatttcttcatacacgatagcggcgttgccagccactgggcgacagaggcaaaagtgggtgacacgctcacgattggcggcccgcgcggttcgctggttgtgccggaagattatgcctggcaactgtacgtgtgcgatgaatccggcatgcccgcgctgcgccgtcgcctggaaagcatcgcaacactgccggttcgcccggacattcatgcggtggtgacggtcggtgatgcgtcgtatcaggactatctggcccatctgagcgcgttcaacatcacctgggttgtcggccacagcgaacaggcggtggccgagcgtctggcggcgttgacggtgcctgcggaagattattttatctggctgaccggggaagggaaggtagtgaaaaacctgagccgtcagtttgaaaccgacgcaatcgaccagcaactggtgcgtgccagtgcatactggcacgctaaataa

SEQ ID NO: 122759 - DNA, 687 bp, Enterobacter cloacae
atgtctctcgttacgccgtcaatagacccgcgtcttaccgggattgcccccggctttcgggcgctgagcattctggttgaagccgccccgataacccagccggacgtggcctctgccgcgctggcacaggcctgccagcaggtcctctctgatgatgtcgcctgggcggaagcgcacctcagcacctgggatgacgtattcagggcatttggtgcgaaaccgaaacgcacgccctgctcggcatcggccctgcgtaagcgagtgctgaaagagggcgcactgcccccgctcgatccagtggtcgatatttacaatgccatcagcattcgttacgccattcccgtcgggggtgagaaccttgccgcttatgcaggcgcaccgcgtctgacgcttgccgaaggtaatgaaccgtttgataccctgaaagagggccagccggttatcgaatacccggatgcgggcgaagttatctggcgcgatgatattggcgtcacctgccgtcgctggaactggcgccagggcgtgcgtacacgtctcgatagccaggcgcaacacatgtggtttattctcgaaagtctgccgtcgatgccgttatcggcgttgcagaaggctggcgatgagttagtcagcaacctgcagcggctgatgccgggctccactgctcaccttcaactgattgaactctaa

SEQ ID NO: 122760 - DNA, 849 bp, Enterobacter cloacae
atgtttcacgggttaagcgcattccctctgacgccattgcgagaggggaaatttgatgagcaggcgtttgtgcagttgctgcgcccgctggtggatgctggtgtcgattcgctggggatcctcggttcgacgggcagttacgcgtatctgacgcctgaagagcgcacgcatatcacccgctgtgccgtggcgcatgccgacaacatcccggtgagcgtaagtattggcgcgcttcgcctcgacgatattctccgtctggcggatgaggcgcaaagcgctggcgcccgcggggtgttactggcccccgtgtcgtaccagcgcctgacggcagaggaagtgtttaccctgtatgagacggtgacccaccggatctctgttccgctgtgcatttacgacaacccggccaccaccgggttcgagtttaacgacgatttgctgtatgccgtggcggcgctaccgaacgtcaaatccgtcaagctcgggcgcataccggacgatatcgcccacatgcgcgcccgtcttcctgaaaacgtcaccctgggcatcagcggcgactggcgggcggcgtcagccctgcaggccgggttcgatgtctggtattcggttattgcagggctgtatccgcagacggcactggcgattgcacgagccaaagacaccgcagcctctgaccggctggcaccgctgtgggcgctgttccgccagtacggcagtttgcgggtgatggccgcagcagcagaaatgtcagggaaagtggccgcgcctgcactgccgttcccgcttgcgtcgctgagcgggaaaccgcgcgaaacgctggcggcgatcctggcggaactggccctcgcctga

SEQ ID NO: 122761 - DNA, 384 bp, Enterobacter cloacae
atggttatctcaccgcttgccgtgcgccgttttgccgtggccatgattgccctgggcttgctcagcctcatgttcctggcctggacgacgctttcgcatcaggaatcgacgctggccattcgcccggtgagtcagggtgtcagcgtgcctgacggtttttcggtgtggcatcatcttgatgccaacggcatccgctttaagagcatcaccccgcaggacgatgttttactgattaagtttgattcccgtgcgcagagtgccgccgcgaaagtggtgctcgaccgtacgctgccgcacggttatatcattgcccagcaggaagatgacaaccagcctgcagcctggctgtcactgattcgcgattcgtcgcatagatttggataa

SEQ ID NO: 122762 - DNA, 393 bp, Enterobacter cloacae
atgaaaaaattagaagatgttggtgttctggtagcgcgtattctgatgccggttctgtttatcaccgcaggctggggcaaaatcaccggttatgcgggcacgcagcaatacatggaagccatgggtgttccagggttcctgctgccactgactattctccttgagttcggcggcggcctggcggtactgttcggcttcctgacccgcaccacggcactgtttaccgcaggcttcaccctgctgacggcgttcatcttccacagcaactttgcggaaggcgtgaactctctgatgttcatgaaaaacctgaccatcgcgggtggcttcctgctgctggccatcactggcccaggcgcatacagcatcgaccgcgttctgaataagaagtggtaa

SEQ ID NO: 122763 - DNA, 411 bp, Enterobacter cloacae
atgatgaaaatgacccgtatcaccctggttgctgcctcgctggtggcgtgcagttttgccgcacaggccgctgacgttgaagctgccccctctccggcgcaggatccgctggtgcaacacctcaagctgagcaacgatcagattaagaagatcgacgcgctgcaccagacgctggaacaaaatgtcagcaagatcccgatgaccggcgtgaaagacggggcgctgatcgagatgttccagaccgggaaatgggatgaaagcacggtgaaaaaccagcttgccgcgttcagtaaaattgaagagcagacccgctattaccgcgtcaaatactactttgatgtcagccaggttctgacagcggagcagcgtaaacaggtgaaaaccgatatggcgaacgcgctggctaactga

SEQ ID NO: 122764 - DNA, 1209 bp, Enterobacter cloacae
atgattgagtttccggttgtattggttattaactgcggatcgtcctctgttaagttttcagtactcgatgccagcagctgtgatgccctgatgacgggcattgcagacgggattaacactgaaaaagcctttatttccgtgaacgggggtgagccagccagactggctcaccatgactacgaaggggcgctggcagccatcgccctggagctggagaagcgtgacctgatgagcagcgtggtcctgattggccatcgtattgcgcacggcggcgacctcttcagcgagtcgacccttatcacggaacaggttattgagcagatccgtcaggtttcctcgctggcaccgctgcataactacgccaacttaagcggcgtcgaggcagccgaacgcctgtttccgggcatacagcaggtggcggtgtttgacaccagcttccaccagacgctggccccgcaggcctatctgtacgggctgccgtaccgctattttgaagagcttggcgtgcggcgctatggcttccacggtacgtcccaccgctacgttgccgggcaggcgcatgccttgctcgggatttcgcctgaggacagcgggctggtgattgcccatctcggcaacggggcatccatctgcgcggtacgcaatggtgagagcgtggatacctccatgggcatgacgccgctggaagggctgatcatggggacccgctgtggcgacgttgatttcggcgccatggcctggatagcccaacagaccggacagtcatttgaggatctggaacgcgtcgtcaataaagagtccggcctgctggggatctcgggaatatcctccgatctgcgagccctcgaaaaggcctggcatgagggacatcagcgggcacagctggcgatccagacctttgttcaccgtatcgcacggcatattgccgggcacgcggcgtcgttacaccgcctggacggtgtggtgttcaccggcgggattggtgagaactccagactgatccgcacgctggtggcggaacatctggccgtctttggcatcaccctcgatgaagccaaaaacgccctgccgggtagcgcaggtgagcgcgtgatcaccaccgattcgtcccgcgtggcctgcgcggtgatcccaaccaacgaagaaaaaatgatcgcgctggatgccctccgtcttgggaaggtcactccggctgcggcttatgcctga

SEQ ID NO: 122765 - DNA, 990 bp, Enterobacter cloacae
atgcatattacctacgatctcccggtgaccattgaagatattcaggacgccagaaaacgactggcaggcaaaatatataaaaccggcatgccgcgctcaaattatctcagcgaacgctgtaaaggtgagatattcctgaagtttgaaaatatgcagcgtactggctccttcaagatccgcggtgcgtttaataaattaagttcgctgaccgaagctgaaaaacgtaaaggcgtggtcgcctgttctgcaggcaaccacgcgcagggcgtgtcgctctcctgtgcaatgctcggtatcgacggcaaagtggtcatgccgatgggcgcgccgaaatctaaagtcgccgccacccgtgactactcggctgaagtggtgctgcacggcgaaaacttcaacgacaccatcgccaaagtcagcgaaatcgtggagctggaaggacgcatttttatcccaccgtatgacgatccgaaagtgattgccggccagggcaccattggtctggaaattctcgaagatttgtatgatgtggataacgtgattgtacccatcggcggtggcggtttaattgccgggattgcaacggccattaaatccattaacccgaccattaatattatcggcgtgcagtctgaaaacgtacatggaatggccgcatcgtatcaggcaggggaaatcattaaccaccgcgttatcggtacattagccgacggatgtgatgtgtctcgcccgggtaaattaaccttcgagattgttcgtgaattagtcgatgacattgtgctggtcagcgaagacgatattcgtaacagcatgattgccctcattcagcgaaataaagtggttacagaaggtgctggcgcactggcctgtgcggcgttattaagcggcaagcttgatcactatattcagggtcgtaaaaccgtctgcattatttccggcggcaatatcgatctctcccgcgtatcccaaattaccggcttcgttgacgcataa

SEQ ID NO: 122766 - DNA, 1146 bp, Enterobacter cloacae
atgaaaatcgtaatcgcgccagattcctggaaagaaagcctttctgcctccggggttgctcaggcgattgaaaaaggatttcgggaaattttccccgatgcactttatgtttcggtgccggttgctgacggcggggaaggtacggttgacgcgatgatcgccgccacccagggcacagaacagtatgccagggtcacgggcccgttgggtgaacaggttaacgcccgctggggtatgtccggcgatggtagcacggcatttattgagatggccgccgccagcggtctggcactggtcccggccacccaacgtaacccgctcgtcaccacgtcccggggtaccggggagcttattctcagcgcgctggataaaggtgcccgacatatcattatcggcattggcggcagtgccaccaacgacggcggcgccggaatgatgcaggcgctgggggccacgctctgcgacgccaacggcactgaaatgggttatggcggcggcagcctgatggcgctcaacagcgtcgatctctccggcctcgacgccaggctaaaagattgcacaatccacgtcgcgtgcgacgtcacgaatccgctggttggcgagagaggcgcttcccgtatctttggcccgcaaaaaggggcgacagaggagatgatcctcactctcgacgctaacctcagccactatgccgatgtgataaaaaaatctctgcgaattgacgtgaaacaggttcccggtgcgggtgccgcggggggcatgggggcggccctgatggccttcctcggcgcggaactgaagagcggtattgagattgtcacccaggcacttaacctcgaagaacatattcacgactgcacgctggtactgacgggcgaagggcgcattgacagccagagcattcagggcaaagtgcccgtcggtatcgcccgtatcgccaaaaaataccataagccggtgatcggcattgccggcagtctgacccgggatgtgggggtcgtgcatcagtatggcatcgacgcggtattcagcgtgctgagccgcgtcgagtcgctggaagaggcttaccgtggggcgtttgacaatatttaccgcgcctcgcgcaatatcgccgccactttgcagatagggatgcacacccaaaggtga

SEQ ID NO: 122767 - DNA, 1134 bp, Enterobacter cloacae
atgagtcaggtgctgcgcgcgcgtcgtctgctgaccgagcagggctggctggaggatcaccagctacgcatggagagcggaattatcaccgccatcgagccgatcccagctggcgtgcatgcccgggatgccgaccagctttgcccggcgtatatcgatacccacgttcacggtggcgcgggtgtggacgtgatggatgatgccccagaggtgctggacacgctggcgatgcataaagcgcgtgaaggcacaggggcctttttaccgacgaccgtcaccgcaccgctggagactgtccaccgggcgctcgcacgcatcgcccggcgctgcatgtccggggggcctggcgcgcagatactgggcagctatcttgaaggtccctactttacgccacagaacaaaggggcacatccgccggcgctgtttcgtgagctggatgtcagcgaactggactcgctgattgaagtatcgcaacacaccctcagggttgtcgctctggcaccggagaaacccggtgcgttgcaggccattcgccaccttaagcagcgtgggatacgggtcatgctgggtcacagcgccgcgacgtacgatcaaacgcttgacgcttttgaggcgggcgctgatgggttagtgcactgttataacggcatgaccgggctccatcatcgtgaacccggtatggtcggtgcaggcttgacggacccgcgggcatggctggaactgattgccgacgggcatcacgttcacccgggtgctttgcggctgtgcgcctgctgtgccaaagagcggatcgttctgattaccgatgccatgcaggccgcagggatgcccgacggacgttacaggctatgtggcgacgaggtcaacatgcacggtggggtggtacgcaccgcttccggtgggcttgcaggcagcacgctgtctctcgatgccgccgtgcgcaatatggtggcgcaggcgggaataacgccagcggatgcgatccatatggcctcgctgcaccctgcccgcttgctgggtattgatcgccagctcggttcattaaaaccgggcaagcgtgccaatatgattgcgctggatgaaggtttccaccttcagcagatctggatccagggtttggttctccccctttag

SEQ ID NO: 122768 - DNA, 1176 bp, Enterobacter cloacae
gtggtgtttaattttgacgaaatcattgagcgtaaaagcgaccggtgtcgaaaatgggatcacgcctttgtccgctcgcgctttggtgatgtgcctgaaggttttatcccgctgtggattgccgatatggatttcacctccccacctgccgtgacagaaggtttccagcgcatcgtggagcatggcaccttcggctacacctggtgctttgacgaattttacgatgcggttatcgccttccagcgcgaacgacatcatgttgacgtcgatgaatcgtggatcacgctgacgtacggtactgtctccacgctgcattatacggttcaggcgttttgtaaacctggcgacacggtgatgatgaacacaccggtgtacgatccgtttgccatggccgcccagcgtcagggggtagcaatactggcaaacccactgtgcgtgagggaaaatcgctaccagcttgattttaatctggtggaagaacagctcagaacataccgtccaaaactgtggttcttctgctcgccgcataacccttccggcaggatctggcacgccgatgagatacgccaggtgtcagacctctgtcaacgctacggcacccttctgatggttgatgaggtccacgccgaacatattctggacggtcatttcgtcagctgtctggcatccggctgcgcggcgcaggacaatctgatcctgctgacctccccgaataaagcgttcaaccttggcgggctgaaaacctcctacgccatcattccggatgccaccctgcgccagcgctttcgccaccagcttgagaagaatgccatcacctcacccaatatattcgggatatggggaattattcttgcctaccagcatggtttgccgtggctcgacgcgctgaacggctatctgcgccgtaacgctggctatctggcagaggccatccagacccacttcccggcctggaaaatgataaacccggaatcatcgtatctggcctgggttgacgtcagcgcagatgaacgtagcgccactgaattgacccgacatttcgcccatcaggctggcgtcgtcctcgaagatggcagccactatgtccaaaacggcgaacactacctgcgcattaatttcggcacccagcgctactggctggagcagtccatcacccgaatgctgaagcattactaa

SEQ ID NO: 122769 - DNA, 294 bp, Enterobacter cloacae
atgtcggatcaactgagctggtcgcgtgagggtgagacgttgaagctgacgggtgaactcgaccaggatctgctgaacccgctctgggacaaacgttttgaagcgatgcagggcgtgacggttatcgatctgagcggcatttcacgggtggacacggcaggcgtcgcgctgctggcccatcttgttgccgtggggaaaaagcaggggacaagcgttacgctgcacgcggcgagcgataatgtggtcaccctggcccagctctataatctccctcaggacgtactgcctcgttaa

SEQ ID NO: 122770 - DNA, 657 bp, Enterobacter cloacae
atgatgaaaaagattggtgtcgtactgagcggatgtggcgtttacgatggttctgagatacacgaagccgtcatcacattgctggccctggcaagagagggggctgaagtcatttgcttcgcgccagacaaaaatcaggctgatgtcattaatcatctgaccggggagccgatggcggaaacccgtaacgtcctgattgaagccgcgcgtattgcgcgtggcgaaattcatcctctgattcaggcagacgccgcagagcttgatgcgttaattgtgccgggcgggtttggggcggctaaaaacctcagcacgtttgccacgcaaggcgccgggtgtcaggttgatccgcatttaaaagcgttatcacaggccatgcatgcggcgggtaaaccgcagggctttatctgcatcgctccggccatgcttccgacaatttttgatttcccgctgcgcctgaccatcgggaccgatattgatacagcggaaatcatcgaggagatggggggcgagcatatcccttgtccggtggatgacattgtggtggatgaagacaataaaatcgtcaccacacccgcgtatatgctggcgcagactatcgcggaagccgcttcaggcattgaaaagctggtggccagagtgctggtgctgactgaatga

SEQ ID NO: 122771 - DNA, 561 bp, Enterobacter cloacae
atgaacagtcgacacttatcgggcttagtggccttgctgatgctcggtgtgacaggaataacccatgctgaagagtgccagctcagtctctcacagccggtggtggattatcatgagatgcgccgggatacgatcgaaacgacgcagcaggactggcataaaatggccgatcgtgacatcacggtaaatgttttttgccctcagtctcagcagatggcggtgatactgcgcggtacagcgggagataaggggcggtttctttttgggcagtccggcggtgtcgcagtcaaaattgacaacatgaccgtcgatggcaaaagttacaccgtgggtaaaacggtcgatcagctgaattttacgccggaaaacggtacaccgacgccgttctatctgcgtaataacgaggcggtgattgcgcttgagaataaccaggtcccttccggccagcagatgagtttcaacgtaacgctctcaccggttctcaacgaaagcgcgttcagccatctgacagatcaaactacgctggaaagtgatttgacctggagcttattgacgaagtaa

SEQ ID NO: 122772 - DNA, 2415 bp, Enterobacter cloacae
gtgagtaaacaaagccgccttgcactttgtgtccgcgccattctttgcggcacattacctctggtgttacttgattcaacatccgttctggcgagggaggtcaccttcgacacggggataatgcaaacgctggggttgaataaagatctcaaccattacttcgcagaagcaccacgctttttacccggaacccactccgtttcggtgaaggtcaacgggaaagagcggggaatggctgcagttcgtttcaataaagatggcatgctttgctttgataacgatctcatggagtttgctgggctgatgcctgtgtcaataaagcccggtgaggagtgtcatgatattcgggataactatcctaaagccgtcatcaacgccttgcctaaccaggaggccgttgaactctatctgccagctgaagcggtgaacagtctgtcatcggatatcaaaaacttccagcatggaggaacggcggcgctgctgaactattcattgttcagcacccataacgactatggtgacaatgacagcagccgctactctcaggccagcctggaagccggattcaacacgatggactgggcgctgcgcagccgttatatcctgacggatgacgacggtagccggaatgccgaaagcatttacacctatgcagagcatgtctttaccgcgcaaaaaatgacgatgcaggtgggtgaaatcaacgccatgtccaacgtgttgagtggggtgccgattaccggcgttcagtttatgccgaccagcggtctggcgagagcaaactctggcgtgagcgtgtccggtattgcccagtcttcccaggcacgtgtcgaaatccgccagaacggtcaactggtcttcagtacccttgtgccagccggccccttcacgctggatgacgtgcccgtagttcgcaacaatgtggatctggacgtctcggtggtggaatccgacggcgcaactaaccgtttcatcgtcccggcgtctcaggtaagggcgcgcaacctttcacgcccgcaggggctaaccctttctgtaggtcaggtgcgcagcatcgacagcgactataacgatccgctggtgatgaacatctctgacggctggcgtgtctctccgtggatgaatctcctggcttcaggtgccgctgcggaaaactatcaggcggcaggcggcaggacagagttcctgataagcaatgactggaccctttcaacgggcgcggcagtcagcaatgcgagctttggtgacagcagcagcggggtaaaaaccgagctgcaaagtgattacatcctgaacgagtacgtcggtctttcaggcagtgcgacgcattacagcggagagtatcgcgaactggctgatgcgatggacgacgattatcagggatatgacaacacctattccggcaacgttcgtttctcctcccctctggcgggggtgtttagcgcagggttcaactacaaccagaccagcggtgacggtgaagattcacgttacctcttgctgtcatggggcaagacctttacgtacgcgtcagtatccatgaactggcaaagtgcggtcggtaatgtcgatgacgatcaggacaatgagatgttctacgtcaacgtgagcatcccgctcggcggcagtcagtccatcagtacctatatgcgtaaacagggtgatagcacctcctatggcgcgtctaacagcggctcgctgggagacaatacgaactattacatctcagccgatcgcgatcaggattcgaaagacaacagcttcaacggcaacatcaacactaacctgcgctatacgcaactgagcgtggggggcggaaccagtggggataatcagcggaactacaatgcgacattgtcgggtggcgtggccatgcataaagagggtgtgactttctcgccatatacgattcaggacaccttcgcgattgccagactgagcgagaagaagagcggcgttgaaatctccactccgcaaggtaccgtctggaccgatccatggggccaggccgtggtaccttcactcaacgaatggcataactcccgcatagaaattgatgctaataagctgccgcagagtatgacgctggctaacggcacgaaatatattgccgcaggccatgcctcggtcagcgagattgatttcaaagtactcaacagccgccgcgtcatgctaagtgttaagcaggctgacggtcagcccctgagtaaagggatctcgattgttgatgagaaaggtaactatatcgtgaccacggttgatgatggccacgtctttattaacgatgccgatcagctgagcgcgctctacgcgctagacggtgacaataaccgactgtgtaagattgattacaccctggctgataagcgtgacgaaaatgccttctatgaagaagtgaacggagtctgccgatga

SEQ ID NO: 122773 - DNA, 705 bp, Enterobacter cloacae
atgcattttttaaaatccactttatttaacacgctgattactgccgcgttattatctgccagtgttgctgtacatgcagaaggcatggtgcctgaaaccagtctgttaatcattgatgaagcgacgcacagtggaaccattaacgtcaagaataccgattcgcatccttcacttttatatacaaatgtcgttgacctgccggacgataccggtcttaagcttattgcaacgcagccggtggtacgtcttgagccaggtcagacgcagcagcttcgcttcattcttcagaacaaacagccattggatgtagagcattataaacgcgtcacattcgacggtattccgcctaaaaacgatgataaaaaaataaagattggcattaacattcgccaggatatccccgtgcttattcgtccggcatccctgggagtggtcactgatgcctggaagttcctgaagtggtcctcaaacggcacgtccgtcaccgtgaacaatcccagcaaatatgtggtccgtcttgggcagaacgtgatgctgctgccttcaggggtgagtgcctctctgtccaaaacctacattcttcctggcgaaacgctaacggctgatatgagtaagaaagtcagcggtgacagcaacgttaagtttttcccggccagccgctatggcgttgaggtaccgagctttacgtcggaattaaataaataa

SEQ ID NO: 122774 - DNA, 684 bp, Enterobacter cloacae
gtgaaaaaggttttactcgctactgcgctctctctgtgtgtgacatccgcttttgcggctaacccgactgccgttctgaaagtcaaaggtacgctgactaattcagcctgtacgcctcagttaagcaacggcggaacggttgactacggcacagttagtttgggtggtttaagctcaacggcagttaaccagctgggccagaaagacatcgatctgactattacctgcaccgcagcaacaaaagtgtcctggaatatgattgacgatcgcgctgattctaacgcgaaactcaccgttgagaatggcatgtttggtggtggttctaattcgtctgaaagccagacttacggtgtaggtaaaacaacaggtacaacaccagtgaacatcggaacatactcgctgttcgttaaaactgacagcgtaatggctgacggcgctaaagttgacccaatttaccagcagaatgctacgggtaactggtcaaagagcaccaacggtacaactcagggcgataactatcgtgatttcaccgttgcgactgttggcaccctggctccactggcgttccagaccgcaaccttcccactggtgacctctctggcgatccaggataccaccacgctggcgatcactgatgacacccagcttgatggtcaggtgactatcagcctgcgttatctgtaa

SEQ ID NO: 122775 - DNA, 498 bp, Enterobacter cloacae
atgactgtggaaatgtcacaacttaccccacgccgtccgtatctgctgcgcgccttctatgaatggctgctggataaccagctcacgccgcacctggttgtggatgtgacgttgccgggcgtgcaggttcctatggaatatgcacgtgacgggcagatcgtactgaacatcgcgccgcgcgcggtgggtaaccttgaactggccaacgacgaagtgcgctttaacgcgcgtttcggcggtgtgccgcgtcaggtttctgtaccgctggctgcggtgctggcgatttatgcgcgtgaaaacggtgcaggcaccatgtttgagccggaagcggcttatgacgaggatgttgtcggcctgaatgacgaaaacggcgcttcggaaaacgaaagcgaaacgctgatgtcggtcattgagggtgacaagcccgatcacaatgacgatcctgatgacgatccgccgccgcgcggaggccgtccggcactgcgcgttgtgaagtag

SEQ ID NO: 122776 - DNA, 267 bp, Enterobacter cloacae
atgaaaaccaaattcatcatcgcaaccctcggtctggcatccgttctctctttcggcgcaagtgcagccgtacagcaagtgaacgctgaccaggcgcagaatctgcagtctatggggagtgtgtctgtgacgtccgttaccggctctccaatggatatccgtcaggcactggccgctaaagctgaaaaagcaggcgccagcagctatcgcgtcaccgagctgaaccagggtgaccactggcatgcaacggctcaactgtataaataa

SEQ ID NO: 122777 - DNA, 273 bp, Enterobacter cloacae
atgaaaacctatacctttgattttgacgagatcgacagtcaggatgacttctatcgtgaatttatccgggtgtttgatcttgaacgggaaagcgtcaccaatctggacacgctgtgggacgtggtgaccggcagcctgctgccgttaccgctggaaattgagtttatccatctgcctgaaaagttgcgcagacggtttggcgcactcattttgctgtttgatgaagcggaagaagagctggaagggcagctacgtttcaacgcgcgccattga

SEQ ID NO: 122778 - DNA, 741 bp, Enterobacter cloacae
atgacccactttactggcaaggcagcgctctttgcgctgagcattatctcggcttcagcctgcgcatcacactggagctacgaaggcgaaggcgcaccggaacactggggcgaactggacgaggcttacaaaacctgtcaaagcgggatgaaccagtcccccatcaacattgaatccaccgcgaacgcgcacctctccccgctgcaaacgcattacattgatggccctgtgacgctgacgaacaacggccacaccattcaggcaagtgaaaagccggaaacccgcgatacccttaccctcgataagcaaacctggaccctgcaacagttccatttccacgccccgagcgaaaacaccgtacatggcaagaaatttgcgatggaaatgcatctggtgcacaaaaacgcggccggagagctggcggtggtggcggtcatgttcgataaaggggccgcgaacccggagctggataagctgtggagcgtcatgcctgagcaggccgaacagaacgtctcgattaagcaagatctcaatctgaacaagctgattccaaaagataaaacgtactggcgctttagcggctcgctgaccacaccgccgtgctcagagggggtaacctggattgtactgaagcacccgctgaccgtctctgcagagcagcttgagaaattctcccatacgatgcaccacgaaaataaccgcccggtacaaccccttcatggtcgcgtagtcgtcgaataa

SEQ ID NO: 122779 - DNA, 1026 bp, Enterobacter cloacae
atgaaaaagacgatgatagccagcctggccgccgcgggcatgttgtttgctgtagccggtcaggcccatgcgggtacgacactggatgccgttaaaaagaaagggtttgttcaatgtgggatcagtgacggtttacctggcttctcttatgccgatgcaaacggcaaatttaccggtattgatgttgatgtctgccgcggtgtcgccgccgccgttttcggtgacaacagtaaagtaaaatataccccgctgacggcgaaagaacgttttactgcattacagtctggcgaagttgacatgctttcccgtaataccacctggacctcctcccgtgatgcaggcatgggaatggcatttactggcgtgacctattatgacggtatcggtttcctgacccacaataaagcgggcctgaaaagcgccaaagagctggatggcgcgaccgtttgtatccaggccggtaccgataccgagctgaacgtcgcggattatttcaaagcaaataacatgaaatatacccctgtgacattcgatcgctccgatgaatcggccaaagcgctggaatccggtcgttgcgacacgctggcttctgaccagtcacagctgtacgccttgcgtattaagctgagcaacccggcggagtggattgtcctgcctgaagtgatctccaaggagcctcttggaccggttgtgcgtcgtggcgatgaagactggttctccattgttcgctggacgctgtttgccatgctgaatgccgaagagatgggcatcaactcgaaaaacgtcgacgagaaagccgctaaaccgtccacgccggatatggctcatctgctgggaacagagggcgatttcgggaaggatctgaagctggataacaagtgggcttacaacatcatcaaacaggtgggtaactacgctgagatctttgagcgcaacgtgggatcggaaagccctctgaagatcaaacgcggccagaacaatctctggaacaacggcggtattcagtacgcgccaccagtacgttaa

SEQ ID NO: 122780 - DNA, 1182 bp, Enterobacter cloacae
atgtcccatcgccgctcagccgtaaaaggatcgctatccttttctcatcccgcggtccgcgcctggctattccaggttattgcgattattgcggttgttcttatcgccgtgtatctcatccataacactataaccaacctgaataatcgcggtattacctccggctttgcttttctggatcgcagcgcggggtttggcattgttcaacaccttattgattatcaggaaggcgacacgtatggacgcgtgttcgtggtcggtttactgaatacgctgctggtctctgcactttgtattgtctttgcctccatactgggcttctttattggtctggcacgtctgtccgaaaactggctgctgcgcaaactgtctactttttatattgagacgttccgtaatatcccgccgctgctgcagatctttttctggtattttgccgtgctgcgcaacctgccggggccacgtcaggctattgacgctcttgatctgtttttcctgagtaatcgcgggttgtatattccttctccgcagccgggtgaagggttgtatgccttcattgccgcccttgtaatagcgcttgctctctcagccgccatgttccgctataaccgcaagcatcagttcaaaaccgggcagcttcgtaaaacctggccaaccgccgccatccttatcattggtctgccacttctgacacactggctgtttggggccgcccttcactgggatattccgcagctgcgtggctttaacttccagggcggaatggttttaattcctgagctggcagccctgacgctggcgctttcgatttatacctctgcatttatcgccgagattattcgtgcggggatccaggccgttccttacgggcaacacgaggcggcgcgctcgctgggattaccccatacggtgacgcttcgtcaggtcattattccgcaagcgttacgggtcatcattccgccgctgaccagtcaatacctcaatattgtcaaaaactcatcgctggcggccgccattggctaccccgatatggtgtcgctgtttgccggaaccgtgcttaaccagactggacaagccattgaaactattgccatcacaatgtctgtctatctgatcatcagcctggtgatttcgttgctgatgaacctctataaccgtcgtatagcactggtcgagcgctaa

SEQ ID NO: 122781 - DNA, 1104 bp, Enterobacter cloacae
atgacaaaagcgatactgtcgcactcctcgcgccctgccggttcgacaggcggacgttttattctctgggcgcgtaagaatctgttctccagctggagtaacagcctgctgacaattgtatgtttgtggcttatgtgggaattaattccaccgctgctgaactgggcttttttacaggctaactggtcgggatccactcgcgcagactgcacaaaagcaggggcctgctgggtgtttatccatgagcgttttggccagttcatgtatggattgtatccgcatgaacagcgctggcggattaatctggcactggccatcgggctgctctccatcgccgtaatgttctggaaaaaactgcctcatctgggccgttatattgcctgttgggcagtggtgtatcccattattgtttgggtgctgttgtatggcggcttcctggggctggaacgtgttgaaacacgtcagtggggtgggttaacgctgacgctgattatcgcgtccgttgggatagccggcgcactgccatggggtattttgctcgcgcttgggcggcgctcaaaaatgcctgtcgtacgtgtgctttccgttattttcattgaattctggcgtggcgtaccgcttatcaccgttctgtttatgtcttcggtcatgttgccgctgtttatggcagaagggacaacgatagacaaactgatccgtgccctggtcggggtcatccttttccagtccgcttacgttgcggaagtggtgcgtgggggcctgcaggctctgcctaaaggtcagtatgaagcggcggaatcactggcacttggctactggaaaacgcagggactggtgatattgccacaagcactcaagctggttatcccgggcctggtcaataccatcattgccctcttcaaagataccagcctggtgatcatcatcgggctgttcgatctctttagcagcgtgcaacaggcgaccgttgaccctgcctggctgggtatgtccaccgagggatatgtcttcgctgctctgatctactggatcttttgttttagcatgtcgcgctatagccagcatctggaaaagcgctttaacaccgggcgtacaccgcactga

SEQ ID NO: 122782 - DNA, 759 bp, Enterobacter cloacae
atgagccagattactatgacacctgccgacgcgatgattacgctggaaaacgtgaataaatggtacgggcagtttcatgttttgaaagacattaacctcaaggttaagcagggagaacggatcgttctttgtggcccttccgggtccggaaaatccacgaccattcgctgtattaaccaccttgaagaacatcagcaggggcgcattgttgttgatggcatcgagctgaatgaagatattcgtaacatcgaacgggtgcgccaggaagtgggaatggtgtttcagcactttaacttgtttccccatctgaccgttctgcagaactgtacgcttgcgccaatttgggtacgaaagatgcctaaaaaggaggctgaagcactggcgatgcactacctggaacgggtacgaatcgcagagcacgccaataaatttcccggccagatatcaggcggtcagcagcagcgcgtggctatcgcccgttcgctctgtatgaaaccgaaaattatgctttttgatgaaccgacatccgccctggatccggaaatggtgaaagaggtactggataccatgattggactggcgcagtccgggatgaccatgctgtgtgtgacgcacgaaatggggtttgccagaaccgtggccgatcgggtgatctttatggatcgtggggaaatcgttgagcaggcaccgccggatgagttcttcgcacatcctaaatctgaacgtacgcgggctttcctgtcacaagtgatccattaa

SEQ ID NO: 122783 - DNA, 1005 bp, Enterobacter cloacae
gtggaaccagaaaatctccggggaatcaacgccatcgacacgcgccagcggatcgtaactgtcctgatcgctgtaaacgtaggtcagcggcacgtccccgtgcacttcctgcagcaggcggaacccttcccagacaaaccgggtggtaaccggcttgccggttggctgtcctcccaacatctggcggcgcgttttgctgatgcggcgaccgagcggatcgtagcggaagctgacctgcgtatgcggcttattgcggtcccgcggctggctgatgacctccgtcaggcgatgttcaccgtcgtagcggtagtgccagcgggtctggccgttatctttctccacggtgcggccgtggatgtcatagcgccagcgaatgccgttcagctgcgtcaggcggttgtgcgtgaccttctcagcagaaccttccagcgggttaccggcagcgtcccagcgccactgctcctggccgggcagcgtgccgtcctgaacaagcaaacgcccggcgctgtcgtactgccagcggtaccagctgaacgggttatcgtctcgctcttcccgcaccaggttattgcggtagtcgtaatcccagcggcgatacccgcatcgcggtgccggacgctgcgcattgccggtaaagacgtcccggcgatgcagtcgcccgaggcggtcgtactcgctgcgggtggtcagcagcccctgggtgcggctggtctcacggtggagttcgtcacgggtaaaatcagagaccgacagcttatcgagggcaatgctgagcagatgcccgctgccgtagtagaactgtttcagctcgcggccatcgggcagcgtgacggaggtgcggttgccgagagcatcatactcccatgccagctcaccgtgctcgcccacttcacgcgtgacacgccccagggcgtcatactcaaaggcaagttcctgttctgcctctgcactccaggcgtcaacggaaagtgccggatgaagtccaatacgactcaacaaacctga

SEQ ID NO: 122784 - DNA, 1194 bp, Enterobacter cloacae
gtggtcgaatttttgccagcggtattcgctctccagcccgcctggcaggcggtgccagaccatcaggccgtggtcgttatagcggtattcacgcgttactacgccagaggcatccgtcacactcgccagctggccacgcgcatcgtaaccccactgcatcagcggccaggtacggttgccgtcaaaatggctggcagaggtggcgcgctgtgggaaacgctcatcttcatagcgcagggtgacatcaatcgcccgtggctcatcgtgaagattgaccagcctgccgtgttcatcccactccgtcagcagcgcgttaccgtattcgtcgctgagggaggccagacgcaggagggtgggattcgcccgggtcggtttatacagacgccataccgcgccgtcatcgtcggcaatcgccacgtcgccgctctcattgcggcggatgatgatgccttcgctgatgctgtaaaacgcgcgatcgacgggcggcagctcaaaggtcagctcacggccggtttcgtcgaaccaggtcgcgttgttctcttcgagcgtcagatagctgtcaaaggttgtcgcccaacccagaccaaacagcccttcacgggtggtcaggctgttgtagctgcgctgccagcgcagcgggaagcgccccggcagcgagaaatcgagttcatcgtcatcattcagcaccttcacaccggttgcagcatgtaccgggtgcgaggagccaaacacagcattaacggccatatcggccagcatgccaccgccggctgccgccagcgcacagggcatatttttcaggattttacccggacgcccgcgcagcagggagagcgcgatcatccccagcgccagacccggcgttttaccgcttttgatatcgcggaccgtgagcgtgtccccgccgatgatcacattcggggagacatcgtcggaaacggtgccttcgcaggtggtgcgatcttttgcacgtaccgcgggctgcccgttaatgaagacgctcttagagccctccgccagatactgcggtccggagtgcttttcgcacgccactttatcctcttcaaggggcgacgtgcctgcggcggcggacgccacgctcggctgccacatctcgctgccaaactgtccggcggcggaaagcagcatacccgcgtaatcggcaaagctgcccggagactgtggctcaggtga

SEQ ID NO: 122785 - DNA, 1080 bp, Enterobacter cloacae
atgaaaaggaaatatctggcagccgtattgctcaccgctttcttggcagatgcaattgaaactgcaactgcgctagagttatcacaatacaataagctcaatacggtcagtcgcatcgttaacgatagcgaagtgacagacctcctcagaaaggccctgggaagcgattaccagacgtttatcaacaattttgatgtatttggtgaaccgcattccacggctgacggaggattgttaattgaaggctggctaaaagatctttatctggaaaacgcctctgctttggttatcgaaccagatggcaaaatctacgctgcctgggtcatacccgagtctgacgttattcattatcagtcttctgaacatcgccaggatattaacggcgatattaaaaaatgggctgcaagatttggcacactgcattttgaaacgataagccaatctggtcccgcatttggcggagtatggtcaggcgagtacgcgaacgactcgacgttaactctgcggttagctgaatcaggtggccgtatctccggatcttattgctatatttctcaaagaggaaaccgcattgattgcccggaagatgatgagcgtaatcttagcggtacgatcgcgggcaatcgtgccaatgttgagttcaactcatcgtttggcggtataggcggacgggttgttctggaaattaaggggagtaaaatggaatggcgtttagttactcctcctcaaaaaggaaattattatgctccgcagcgttatacgttacagaaagctgcttcggctcagacagttgaaacccgaaaactcaatactcaaaagttcgctatttctctggtcaataagtgcgggcgttttactagtgaatgtgaccagatgtattatctcggcgtgcgcaaaagtgataatagtacgatctcccttaaggggaaaacgttgcacgatcctgcaggtaaaataattggctctacctataagaatggcgagatcgcttacaccgtgacttactcacccgtgaaattggtcgtgagcaaaggcaaccatgttttagtcgaacaatcaggtcaatggcttaaagaataa

SEQ ID NO: 122786 - DNA, 567 bp, Enterobacter cloacae
atgacgattaacgtgaaaaaacagactccgacatatctttgttttgttctgatgcttacctgtctgtgcagcagttcggtattggctcaagttataccgcccgttctgacaaatcacgatttttctgtgcagataaaaagccagcctgtcgaattgggtgacagatggactcctgacgttgcgcgcagaattgacgtgccagtggaaggcagttttaccggtgaggttccttttgacggagctaattataaattcttccagcatcaaaagtctgggttagacattttcagttccaatctctggtgggataaagcggaacgaagcgttgatgattatatcgtgtcgcagatcacgctgactgctacagatgtcgcaacgccgcgtggtgtccatgttggttcaacgagaacggacttgaacacagcatacggtgacggtcaggtcgcaaaggatgccggagaacaatggattacctatgagttgggtaaaaaggtcctctcttttgagatcaaagacagtaaaattgtgaagataacaatgaattacgacaatggaaatccagagtaa

SEQ ID NO: 122787 - DNA, 528 bp, Enterobacter cloacae
atgcggcggtgcaggagaaatttacgactaaaggtgagtaaggtcgtagcagtgcttattgcattattaacgacgggaatggctgagggagattcagagaaaaaagatctctgggcgttcatttcacaaatgagcgccttactcaaaacgttatccgttacgagtctaaatgacatgccgttgcactttaactacatgaaaaataatgcatatatgaacttctaccatgctgatgatttcaagcttttggagggtacgagcattactaccattgatttacgagtaagcaaaaaaaatgatggcatggctcccttactgaatttttcaccatcaggccagtgcatcacacttcaaaccgttaaaaagcattacccacaactgacgttaactgattatccccgaggccgctcggagaatgaagtgaccagttatacagcaccaaaagatatgaatggacaaaaagtgagtttcagtttcaccgtaaaaaaacctgactgtctgagctctgttgttattagcgctgactaa

SEQ ID NO: 122788 - DNA, 447 bp, Enterobacter cloacae
atgaagtttctcgggtttattattttttcattggtcgctcttacctatatctggaatggcaaagataattttaacaaaaaagaatgggtggtttttttcgtaaaattatcttttatattagtcggcacttttattctggttttcgtgttgatcggattgcgggaaattttcccctcgatgacaaaagaagatggtgagttggtactaatcgttattccgccttcgtttgtcacactattattggctaagtttttcgtcattatgctttgcacaatatttgaaactataatgcgttttcatcagcgatataacacggagcaaaattattcgattttgtcatcgctggcaaacagatatggccctggattgattttgctggcgaaatgcctggcatcatttggatgcattcttatattctatggtatctggttagcctccgcggcctaa

SEQ ID NO: 122789 - DNA, 450 bp, Enterobacter cloacae
atgggaaatattgtaatacattggtttttctttattttctttatgatttggacactagcgcttatctggaatggaaaagatttttttaacaagaaaaagtggctcctggcggggatgatgttggttctggtgttagtagccacagttgtcattggctttacgtttaaatggctttctcagtcgatgtcattgttttccatcgcaacggccaaacaatattcgatcattttttctatgtcttttctgtgcgtatggggtttaaaggtcacagttgtgctgctctgtactgttttctcggggattctgagggggcacaaaagctacaatgtggaaaattatgaaaaaatatcgtctatatcacgcatcgtcgcgcctggcttacttatcgttgctaaaagcttaatttccctcggaagcttccttatgttttcgggtctttggttaaagtaa

SEQ ID NO: 122790 - DNA, 348 bp, Enterobacter cloacae
atgaataaagaaaattataacgagctgaattatatcaatgatgccattgatataatcaataaacgattggaaacaaaacctgatttttcactgtatgttatggtgaagtgccagttggattatattaaatctgttttggttggcgctgaaaaagataaaagtaaattacattcattgaatcttggagtacttgcatctaaagaatttgatacaacagatgccgaacttgctgagcatttatctaatgctaattatatagcttcgcagatggggaaaggattgaagatcattcttcctcatgaacaagatgtggaatatttgaaaagacaaaaaagatatcgtaagtga

SEQ ID NO: 122791 - DNA, 1071 bp, Enterobacter cloacae
atgatcgaccttcatactgaagactctgtaatcaatcattatgccgatcgctatcgtacatacatgccaattaatgtccgtaaggcaataaaaaataacggtattgatggtttgagttcttcacaagcctgggatgaaacattacctttaattacgactgaagatatttcacgtgataaagcacttggggcgctggtcggtttggctgttggggacgcagtcggcactactcttgagtttaagaaaagagacagtgaacatgtagcggatatgattggtggcggaccttttcatttaaaacccggtgaatggacggatgatacgtccatggcattatgtctggcggaaacttatctttcagaaaacagaatgcataccgatatacttagaaaatatctcgttaaatggtatcttaacggtgataatagcagtaatggtcggtgtttcgatattggcaatacgacgcgatttgcgcttgaacagtatctgcgtatcgggccttcatggtatggtaataccgagaaacacactgctggtaatgctgcggttattcgtcaagctccggtgtctatctttcgtcgaaaatcgctgcgcgcgatttacttcgaatcccaggctcagagtcgcgcaactcatggcgcggtagagtcaattaatgcatgccaatttctcggattggtattacactatttaattaacggttataaaaaagaagaagctttttcccctcatgttttcccactatgcgcgcgtgtaatgatcataaatgcgggtgagtataagcaaaaaactcgcgatcagattcgttcaagtggttatgtaatagatacgcttgaggccgcgatgtggtccgtatggaatactgacaatttccatgatgcaattctactggctgccaatcttgccgatgatgctgacagcgttgcggcgacggcaggacaaatagcgggagcattatatggttattctggtattccgtgggagtggaaaaacaaacttgtacaacacgagcgtatcgccaaaatggcaggtgaactgttcgatagagctcctgaggataattttttataa

SEQ ID NO: 122792 - DNA, 471 bp, Enterobacter cloacae
atggccgaatatatccttcaggaagcaacactcgccttgcccgatgtatttaaagacagaaccatgaatttattcaccatgagtgataacggagctagcgagtttacttttgttgtttcttgtgcgacggcaaaaaacgaagataaagtccatgatgcggctacccgactgacgcgtgaactggaaattacggtgcccgactttcgtcttgaatcctctcagatgacttctgttaatggtcatccggcggtagagcttttttatcagtttaaaaatgataactcggtcatttttcagaagcagacggtgattttactcgctgaccatcctggcgggcaaaagatggagttgatgttttttccggccggaaaattgacttcctttcagaattcaatgcaacagagactgaagtgctatttaagcctaatacatcgtttgaggttatcagcaggtcagatgaacttgggataa

SEQ ID NO: 122793 - DNA, 1929 bp, Enterobacter cloacae
atgctcaaccgaattaccgttcagctcccggtggaggggcttctgttctggaaactgacgggtcgcgaggcgatgtccgagtcgttcgcccagacgctgaccctgcttggcacggatgcgcgcattgaccgcagcaaactgctgggtcagccggtcacggtgaccatcccgacgcagagcctgctgacgccccgctatatcaatggaaaaatcacccgcgtggcggtgagtgccgtcgagctgacgggcacccgttatgcggtgtatcagctgacggtggagccggacctgtggccgatgaagcgcgaccgtaacctgcgtatcttccagggccagacggtgccgcagattgtgaaaaccctgctggctgaacatcaggtcaacgtggaggataagctcaccgggagctaccgggtgtgggactactgcgtgcagtatcaggagtcgagcctggacttcatcagccgtctgatggagctggaggggattgcataccacttcagccacgaggcggacaagcacaccctggtgctcaccgacgccgcgacgcagcatcagccattcagcggctacgaagtcattccttaccaccagacgccgtcaggcggcagtacggatgaagagggtatcagccagtgggcgctggaggacagcgtcaccccggggatttacagcctcgatgactacgacttccgcaagccgaacgcgtggctgttccaggcgcagcagaacccggcgtcaccgaaaccgggcagtatcgacgtgtacgactggccgggacggtttgttgagaccgggcatgcggagttctacgcccgtatccgtcaggagcgctggcaggtggagcaccagcagattcaggcgacggccacggccgcgggtattgcaccgggacacaccttcaccctgactaacgccccgttcttcagtgataacggtgactatctggtcacggcggcgggttaccatttcgaggagaaccgctacgcgagcggcgagggggaaacccttcaccgcactgatttcgcggtcatcccggcgtcagtgtcataccgtccggcgcagagcacggcgtggccgcgcacctacggcccgcagacggcaaaggttgtgggaccaaatggggagagtatctggacggacaaatatggccgcgtgaaggtgaaattccactgggaccgtctggcgaagggggatgacaccagttcctgctgggtgcgcgtgtcgagcgcctgggcgggtcaggggtatggcggggtgcaaattccgcgggtcggcgatgaggtggtggtggactttatcaacggtgacccggaccgtccgattattaccgggcgggtgtataacgaagcaagcatgccgccgtgggcgctgccggctgcggccacgcagatgggctttatgagccgcacgaaggatggctccgtggataatgccaatgccctgcgctttgaggacaaggcgggcgcagagcaggtgtggatccaggctgagcggaatctggatattaacgtcaaaaatgacgagtctcactctaccgaaaaaaatcgtacccagtttgttggtgaagatgaaaccttacgggtagcgaaaaaccagaaatcagggattaaaggcgatgtggtatgcctgacggggaacagtcgaaacgataaggtcgttaataattttatactttccgcaggtaatacgctgagactggaatgtggtgaaagcgccatcgagctatcaaaagacggtagcgttcatatcattggtaataactttaactttactgcaaaacagaatgctcaaattaatacgctttccggggagttgcacttaaaccctgatgacggacgtaatgtcatcgacccaccaggtgcatcccatcagggtgaaatccagcaggaagtggatggtttttttgtttttaatgccaataaataa

SEQ ID NO: 122794 - DNA, 447 bp, Enterobacter cloacae
atgaccgcgaaaaataaaattttctatttctggggtgttatggatgtcatcgggattgtgttttattcgattggtccataccatttacttgagtcatggtgggtttccaccggaggaaatccgggtgtaattatctttatgctgatagcaggtggcgtaaacggaatagtgacaggtgctttttaccttgtttatctcctcatgccagtttccttgcttttttctgcctggttttttttcacaaaacatcgatatgcggtcggttttgctcttatacaagaagtgctgcgcgttatcatcttcagttgctcagtgacacttttccctatggcgatcgctggtttaggattgagcgttatttccattaatattgctttatttatattatcggaaatattaaagattggctctctcatatatataatcaaaacagttcgcgctaaataa

SEQ ID NO: 122795 - DNA, 762 bp, Enterobacter cloacae
gtgaaatcactaatttttggctgggtagcgctttgtttaatgtttatggttcaggggtgcaagcaaaatatggatttacaaccagataattactttaatggtgaccagctcacattagcgcgcgcaattgagaatggtgacggcgatgaggtgaaaaagttagcttcgaaaactgatttaaacaaacccggtaaagaggacatgaccctgttgttttgggcggtgatgaattcacttaacgataaaaaaacgcctgaacatttaaaaattatcactactctgattaaggctggcgcagatccgctgcagccgaggccgcagggaaaaagttcgcctgcagaattagtattaaaagcggacagcgacgtgtggataaaggcgatgctggacggcggattatctccagatgcaaaagacaaaacgtttggtgagcctataatattcgaaagtatcgaagcgaaaaataccgagacactcaaggcgatgcttgacggcggagcggatattaatattaccgactcactgggtagtacattgttagtagccgcgctggattaccacgcttacgatcacgtgctccttttgctgaaacgcggtactgaccctgaaattaggactatcaatggctggacgatgggtaatcaacttcaacgttatctgaacagaacagaagaaggcagtgaagaatataaaaaactaattgaaatcaaagagacgcttattcaacatggtggtaaatggccgccagcaccagtcaagtaa

SEQ ID NO: 122796 - DNA, 1872 bp, Enterobacter cloacae
atggaaagtaaactgctcgaatattacaaccgtgaactggcctatctgcgtgaaatgggcgctgaatttgccgagcgctaccccaaagttgcgggtcgactgggcatgcgcggcatcgaagtggcggacccgtatacagaacgcctgatggaggggttcgcgttcctgacctcccgcgtgcaaatgaaaatggatgcggagttcccgcgcttctcccagcgtttgctggaaatgattgcgccaaactatctcgcgccaaccccctcaatggcgattgctgaaatccagcccgacagcacgcgtggcgatctgagcaacggttttaaggtgccgcgcggcaccatgatggacagcctggcgctgaaaaagaccggagtcacctgcagctacaccacggcgcatgaagttaatctgctgccgctgaaaatcgataaggtcgagctgggcggtgtgcctgccgatctgccgctggcgcagctgggcctgagccagcgggggatcaacagcgcgttacggatccgcattgcctgtgatggcccgcagcatcttgggcatctggattttgaccgtctggagtttttccttagcggcccggatattgaagcgctcaagctgcttgagctggtcatggagcaccacgccgggattgtctgccagaccgtcagcaagcacccgcagcgacagctgctctctgcggatgccttacgacaggaagggtttgagccggaccaggcgctgcttccggacgacctgcgcaactttgacggctatcgtctgctgcaggaatactttgcgtttccggcacggttccgctttatcagcctcagcggtctgggcaagcttatccagcactgtgaaaatgaaaaagcgttcgatattttcatcctgctggataaaagcgatgagcagctggagcgggtggttgatgccagccatcttgcgatgcattgcacgccggtgatcaaccttttcccgaaagtggcggcgcggcagaagctgagcgagagccagcatgaatatcatctggtggtggataacatccgtcccctggattatgaaatttatgcggtaaacaaaatcttcggcagtgccgacggccagcgtgatgaccagacatttcgacctttctggagcacctggagcggtgatgcgggcaactacggcgcctatttttccctgcgccgtgagcagcgagtgctctctgaacatgccctgcgctacggcacccgaaccggttatatcggctccgaagtctttgtttcgctggtggatgaacagcatgcaccctggcaggaaaatctgcgctatatctccgcggaagtattgtgcaccagccgcgacctgccgctgatgcttcagcaggagctcggacagttcatcatggccgattccatgccggtgaaatccctgaccctgcgaaaaggcccaacgccgccgcgtccggctctggccgaagggtttagcacctggcgattgatcagccagctgcagatgaactatctcagcctgatggacagcgaaaacgaagagggtgccgccgccctgcgtcagctgttagggctgtatgctaacctggcggagacgccggttgcgcgtcaggttgagggcgttcgccactgcgtgctggagccggttcaccgtcgcgtcccggagccgggtccggtggtctttgcgcgcgggatcggcattactctgacggtggatgagcgtgcgttttccggcgccagcccctggcttttcggcagcgtgctggaacgcctgtttgcccgtctggtgtccatcaacagctttactgaattcacgctgaagagtcagcagcgcggtgagattggctattgggcaccgcgcatggggaaaagggcactactatga

SEQ ID NO: 122797 - DNA, 813 bp, Enterobacter cloacae
atgaatacgctctatcaacacctggcgggtgaatcgctgagtgacgcgctggtgcgtcttgaagctgagatcaaagctcgtccggccgatgccgatctccgtgccgcgtttgtgcagtttttgaccctcagtggtaactggacgcgtgccctgactcagctgaaaagctggctggcacttaagccccaggctaaaccaaccgttaccctgctggagcagtccatccagggcgagctgcagcgcgcgcaggtgatggcggggcaggctcgtcctgccatgcctgaaacgcagtggccatggcttaccacgcttgccgccgcgcttaatgacgcgggagagcgtgctcaggcgctgcgtctggaagcccttgagcaggcgcaggcaacggcgggtcaaatcacacttgagaatgacgagacgcaggcattcgcatggctgatggacggcgatgctcgtctggggcccgtgtgtgaaaccatcgtcaacggccgttatttctggctgccgtttaacgccatcgccgagatccgtttccaggcccctgccagcgtgactgacctggtgtggcgtcatgcgctggtgcgcctgacggacggtaccgaacaggtttgccagatcccggcacgctatcctttcgcagcggatgcgtctgacgcggttaagctcgcgcgcaccaccgaatggctgccgctcgacaatgacggcacgctgtatgaaggcatggggcagaaagcctggcttagcgagcaaagcgaaagcccattgctgtcgttgaacctggtgacgtttgctgcggatggagcccatgagtaa

SEQ ID NO: 122798 - DNA, 987 bp, Enterobacter cloacae
atgaaactttggctatcgggtttagcacttctggcggtggcgtccaccgcgcaggctgagaatttccgcatcgtgcagtctcctgcgcagaagctggatatctggattgataacatcaaagacaacaccccacagagctggtgtaagtctgagattgcgctgcgtatcgtggcgaacggcaacaaagacgtctcggttctggagaactttgtcccgcgtctgggctcgctgctggaacaccagtgcagcaaagtcagtaaactgagctggacgctgaacgatccgtccgggacgacgctggcgcaggggacagcaggcaaagcgcaggactgggcgctggtggtaaaacagcagcagactgcgccagtgagtactccggccagcggtgcgttgctgccgccggaccagaacgcggaaacccacacggttgctgccgatcgcacgccgtggcaggaatttacccttcaggacggctgccatctgcgtaccttctgggaagggggctcatctgctccggcgctctttattccggattcagacaccacccgctgcggaaacgggagctggctgagtggtcacacggttatctcccagtcccgtaatggtggacaaaaagagataccggtgacctacattcacggcttcccggtcatgggactgaatcaaagtgccgacccggaaaacgcgctgatcacctccgtcaacaaagagcgcatggttttcagcacttccaacagcgaccagagctggatgatcctgccttacgacagcagcctcaacggctggaaaagcaacggcacggtggccgtggagatttcacgtgagaccgccagcgacgatgcaaaactgcaggcgcgtatcgccgcggtgaaaaaaatctggggcgcctgggttacccctggcacaacgctcaatatcgtcctgattgacaccctgcgccctcagctgcgcgatccggcagtcggcgcctggcgcgcggcaaactaa

SEQ ID NO: 122799 - DNA, 393 bp, Enterobacter cloacae
atgtctgaattaatgcgcttaatcttgctctcatcagtattcttagggttgtttatttctttggtgttgtatatttatttttatcgaaagtactcgcaagaacttacaaaagcatttcaccttctaagtagtaaacagtacttagatataaatgattatcttttttataaccagcttggtttacctggctttgctcatcgtgtttttttaatgagaagaataattgcgtgcaagccgattaagccagatgataaaaagcaaatcaccccagaagccggaacatgtatattatcaatatttcgattcccctggattgaaacgtttcacaaattaacgatttttgtggtgattttaatgttattgttatttgtgctggttgctactgggcaatag

SEQ ID NO: 122800 - DNA, 354 bp, Enterobacter cloacae
atgaaacgtttattactgctcgcattagcattaaatgccaccgttgtttatgcccaaacattgcctgatgtcagtgcttttactcaacaacaaatttttgaaaactgggtgcaaaatcgttgtatcagtaagattgcggacagtaagagtttaaaagatgatgcagaggccagcgctgccgcatggctcgaagcaagcaatctacctgcagagaattttgaaaaagcggacaacattattgtttccttacttaaagagaaggtaggcggtagcgaaccgggccattatcaggtgttgaagtgcagcttaatcaccaacagcgacgcaattcgaaagctaaacacccaaaaatag

SEQ ID NO: 122801 - DNA, 3621 bp, Enterobacter cloacae
atgctgactactcttctttccattttgaccaatcgcattctgtggagcttcctgggcgtcactgcgcttgcggcggttatctggatgattggcccattgttgtccatcgtggacacccgaccgctcgaatctgaacagaaccgcatcatcagtattgcggtggtttatctgctctgggcgcagggccacattctgccgcggctgtacaatgcctggctgaaccgcaagctgatggacaaactcaatgagaacaccaccagcccggaagcagcggatccgcagaagcgactgaacaacgaggagcagatcctcgccagccgttttgacgaagccgcacagatgctgaaaaaagcgcacttcagcaaagcgggacagggtgcccagtggacgcagcgctttagcacacagtatctgtatcaactgccgtggtacgtcatcatcggcgcgccgggcagcggtaaaaccacggcgctggtcaactccgggctgcaattcccgctggccgaccgcttcggtaagaccgcgctgcgcgggatcggcggcacgcgtaactgcgactggtggttcaccaacgaggccgtactgctggacaccgcgggtcgctataccacccaggagagcgaacaggttcaggacgccggtgaatggcttgagtttatggggttactgcgtaagtatcgccgtcgccagccgatcaacggtgtgattattaccatcagcatttctgacctgctgacgctctcgcctgaagcgtcacgccagcaggcggtcaacctgcgccagcgtctctctgagctgcatgagcagctgggtattcgcttcccggtgtatgtcatggtgaccaaagctgacctgcttaaaggcttccgtgcctggtttgccgattacgacaaagcgcagcgcgaccagatctggggcttcacgctgccgtgggagcaaaccaaacacgctgattacgacctgatgggtaacttccagcaggaattttccctcttacagcagcgcctggatgccggactgccggaaaccctgctgcaggagcatgatgcaaaagcgcgcgcggaagcgtatctcttcccgcaggagtttgccgcactgcgtccgctgctggctgactacctgagcacggtctttgcccgctctaactttgaaaccgaattctccccgcgcgggatctatttcgccagtggtacccaggaaggtatgccgtttgaccgggtgatgggcgaacttaaccgtgcgctctccttgccggaaggtgaagagggaaatcgctgggactccgtcagcaaagaggctccgattccgggggcgaaagggcagagcttcttcatcaagaacctgctgcaaaacgtcattttccaggaagctggcatcgccggggaaaaccgctggtgggaactgcgtaaccgcgccgtcatttggtccggctatgcggcgctgctggccctgctggtgatcctcggtggactgtggctgaccagctatgccaggaacaaggcttatctggaagaggtggacgcaaaagtgccgctgctggatcagcagagcaaggcgctgcagaatcagcctcagcgcgatctatttgaccttctgcccttgctgaatggcctggtcgatctgccgaaaagtgacgcgtttgatgttaacgatccgcctgtctcacgccgtatggggctctatcgtggggatgacgtcagcgatgcatcgcagtctctgtaccagaaagcgctggaccagatgctgctccctgccgtggcgatgcatatcaccacctggctgcgcaacgataacggcagcgatgtggaatacagctatgaagcgctgaaggcctaccagatgctctatcagccgaagcactatgacggcaaattcctgcactcctgggtaatgctcaatctgcagcgcaacctgccgcagaacgtgactcaggcgcagcttcagcagcttgagtggcacctgacacagctgcttgagccgaaaattcaggcctcgccgtacgcgcaggatgaatccctggtcgcgcgtgaaagggcgctaatcaaccagcagccgctttccacccgggtgtatggtcgtctgaagcgtctgctggagcatgatgaaaacctgaaaccggtatcgctctccgacctgggcggtccgcagagcgagctggtgttttcacgcaaaagcggcaagccggtgagtgaaggcgtaccgggtctttatactccggacggttactggaaaagcttcaacggccagattgacagcgtcaccactgctctgcatgaagacgatgcgtgggtgctgggggcgacctcagcccaggaagataaacagcagatcgataacgccgtgcgccagctctacatgcgcgactttatcgccaactgggatcgcttcctcgccgacattcagcttaataacagcgccgatctctcccagcgcatcaataccgcgcgtctgctctccggggcaaactcgccgctgcgccgtctggtgctgaacctgagccaggtcctgacgctttcacgtaatgcgccagccccggatgatgccggtaaagcgcaagcgcaaagcaaccgtgccacccgcacgctcgaagcgttattcagtaataatgacaatgccccgacgcaagccgcggtggtcactcaggcacctgaacagctggtaaccgatcactatgctccaatgattgagctggcgcagccgctggagaaaggcgggaagaccatcgtctttgatgattttctcaagcaggttgatgaactttaccgctacctgactgccgttcaggacgcggccaacagcggcatgcctgctccgggaggcgaggcgattagccgtctgcaggccagtgccggtcgtctgccgggcggtctgcaaaccatgttcagcaatatggcggtgggggccagcagtgatacccagcgtcgcgacctcgaaaacgtgcgtaagcggattaacgtcgaagtcggtggtttctgccgtcaggcaatcgctggccgttacccgctggtgcgcagcgccagtacggaggtcacgccggacgatctcgcgcgcatgtttgcgccaggcaccgggctgatggacaccttctttcgtgacaacctgaccaataaagtcgataccacgcaggcgaactggcgctttatgccgggcattgatggaaaaacgctgccgggaagtgaaggtctcctgagaccgttccagcaggcccagtccattcgcgatgctttctttgctaacggtgccaccacgccatcttacaaagtgacggtgcgcaccgtcagaatggataacacgatccttaacctgacgctggatgttgacggtcaactgctgcgctacagccacggtccacaggctgtgcagatcatgaactggccggggccgggcgggactaaccaggtgcgtatgcagctgggtctggctaacggcagcacggctacgctggtgacgaacggttcctgggcgctgaaccgctttttcgataaagcgcgtaccagcccgggggcgggaagtctgagtcgccaggcgaccttcaacgtagacggacatcaggttacgctggaatttgcgccaaacagtattcgtaacccgttccagcttccccgtttctcatgcccataa

SEQ ID NO: 122802 - DNA, 2289 bp, Enterobacter cloacae
atgaataagaaaagacgctcagttcccggtatcaggcactatgacggcccagccggtggctggggggcgttaaaggcgacggccattgcggtacgtacccaaatggatacgctggatgcccccacaactctgctgcgcacaaaccagcctgacggttttgactgccctggctgtgcgtggcccgataaagaacacaaatccacgttccagttctgtgagaacggggcgaaagccgtcacctgggaagccaccaataaacgcgtcaccacggattttctcgccaaaaacagcgtgtcctcgctgctggctaaatctgactttgagctggaaggttacggtcgtctcacccatcctctgcgctatgaccgggcaagtgataccttccagccagtggaatgggacgacgctttccagcgtatcggtgaggtgctgcgcgggcttgagcctgaccaggtcgaattttatacctccggcagagcctcgaacgaagcagcgtatctgttccagctgttcgcccgcgagtacggtaccaataacttccccgactgctcgaatatgtgccatgaagccaccagcgtcggtttaccccgttccattggtatcgggaaagggaccgtctcacttgatgacttcgataaaacggagctggttatctccattggtcataaccctggtaccaaccatccgcggatgatgggcacgctgcatgagctggctcgccgcaacgtaccgattatcgtctttaatcccctgcgcgagcgcgcgctggaacgtttcgcggatccgcaaagcgttattgagatggcaacctacagctctaccgatatcgcctccacctatttccaggtgaaagccgggggcgatgccgctgcgttaaaagggatcgcaaaacacctgctggagatggagaacgaacgcggaaacgtgctcgatcgcgcctttattgctgaacacaccctgggcgttgaggcgtttactgcggatattgcgcaaaccgactgggaggccattgagcgtgaatccgggttgagccgggcagcgctcaaatccgtggccgaggcctacgcaaaatcgaatgccaccatcatcacctacgggatgggcatcacccagcataataaaggcaccgcgaatgtccgcctgatcgctgatctgttgctgctgcgcggtaacattggcaaacccggcgcggggatatgcccactgcgcggccactcgaacgttcagggtaaccgcaccgtgggcataagcgagaaaccgacaccggcatttctcaaccgcctgaaggaggtattcggttttgagccccctgctcaccacggccatgatgcggtgcaggcaacgcaggccatgatcgacggacgtgcaaaagcgctgatctgtctggggggaaattttgcggtagcgatgcccgatcacgagaacggttttccggcaatgaatacgctggatctgagcgtgcacatcggtaccaagctcaaccgcacccatttgctggtgggtaaagagacctttattttgccgtgcctcggtcgtaccgagctggatgtccaggccaccggacgccagtctattaccgtggaagactcgatgtcgatggtgcatgcctcttctggcaagctgaaacccgcctctccgcgcctgcgcgctgagccggccattgtcgccggaatggcgcaagccaccctgcgggagacccgcgtggactggatgacgctggttgaggattatgaccgtatccgccacctgattgagcagaccattccgggcttcgagaattacaatgaacggatccgcattcctggtggttttcgcatgccgctgccgcccacagaacgtatctggccaacggcgacgggcaaagcgatgttttcggttttcgacggcgtcaatgagaacgccagtggtgaaggcgataatgtgctgcgcctgatcacgctgcgcagccacgaccagtacaacaccaccatttacgcccttgatgaccgctaccgcggcgtctttggccgtcgcgatgtgctgtttatgaatgaagacgatatggcgcagtcaggcctggagcatggcgatcgcgtggatatcgaaaccgccctgccggggagcgttcagcgtctggaagacattaccgttgtggcctacagcattgcgccgggttccgtcggagcttactacccggaggccaacgtactggttccgcttgattatctggataaggacagcggtacgccgtcttataaatcggttccggtccgcctcatcctgcgttcgaaagagatccgcgtgctgtaa

SEQ ID NO: 122803 - DNA, 906 bp, Enterobacter cloacae
atggatataaaacagttaaagtacttaatcgcactcgatcagacccggcattttggtaaagcagcctcgcagtgcaacatcacccagccgaccctctccatgcgtattcgcagcctggaagaggagctgggcctggtgctgattactcgcgggcaacgttttgaaggctttacgcccgaaggcgaacgcattctggcatgggcgcgcgcggtgctggccgctcacgacggcctgcaggccgaagcctcgctgtgcaaagggcaagtggtgggtgaattgcgtctgggaatggtgccgctggccagcgtggatccgatgatctttatccgccagctgacgcaaaaatacccggagctgacctacagcctctactcaatgtcctcgcaacaaattgccgacggcgtcagccggaatcagcttgaactggggatttgctacctgaacagcatcgacacccgtccgtttgatattatccagctgccaaaaaccgaaatgggattgctgcacgatatccgccatttccagctggatcaggagacgctgacctggcaggaactgatggcatttccgctggggtttctgaccaaggggatgcattatcgcgagcatatggaggtgagctttaaatctgccggcattaatcccgagtctgtctttgaaagcgattccacgttccagatcattcaggcggtacaaagcggcgtctgctgtgccgtgatgccgctgaacaacgggcttgagacgctgaacagccatttcaggattgtccccatcgccgacgcgaatattgaggcgcccattggcctgataatgcgcaagcagaaacccctctcctcactcgcgctgcgctgttttaccgatgcgcaggcgatttatagccctgttcatgaaggcaattgttgctaa

SEQ ID NO: 122804 - DNA, 2544 bp, Enterobacter cloacae
atgtttaatcaagatccttattggttgatccctgtgacgacattgtcttcagatcgccttttttatcaccatttgatgaatcatgcaaatcaacattcaacttatacaaatggtcaacaaaatgagaacactatacttgcttcagccgcacgtgattatcaacattatcatggagggcggcttcgaaacgaagacattgtcaacaatattaaccattggtgctataaagagtcacatatcaatgtgttagatattcttacagaattggccaaccattttttactgtggcagggagattgttttgaagttaagggagaacgactcgaatcatggttgatgatctgttctttactggatccagcctggataatatccaccgcgtatactcaattagtaaaacagaaagttctatcagaggatgatctgatatcactactgacgggaagacaatgtccttttgcttttccaggagaaaggaacgatactgtttatgccgataatcacgttcattttaatgggcatggatatacctcattatcaatgctcagtttcatagatggtgatttcaaacttaataaaaaaattaaatggccgagaagagaagagtatactctttttgaaagtggacttttaaataaacaaaaaatcccagattatttgtctggttatgtatcctgcattattaagtttttatctcattctgataagaataaagctatagaatatagagtgctagaagatgctttacatggttcttctaataatgaagatgtgtggaatatacagcaagttaaacaatttctgccttttgtgactatgcagcaaaggttgttacatgcatctgttaacgagcgttttcgtgggcatcaccgctggttactattttgtattgccgttctgactgatactcacaatacagactatcggaattgtttaatgaatttcgttcgctgcagcaatgtcttgcgaaattatatggttgtatcttctgttggattagggcaatttgtagagtattttacctcaggtgtcagacgagcagataaaaaatattttgaaagcgaagggatgaagtatgattttcttgaaggggtttgtcgagaatatcgtgtatcccctgattacgttcttggtaaaaataagcctaatatttaccataataaaatcatggacttctatgctaggcatgaaaaagaaaacattctcgaaaaatcgcatttagttgttcattttactcgtggttaccccgataaaaaacgaccaaacgacaaaagattagaaagttatagggctaatcttttgagccaagtgcgtggtcttgaaatgtttaattcttctgtgactttgcaggaagaggcatacaaaagtaatattggcgatatgccccaaacagtagatgtcaggcgcttagtccggggatatgatgtagcgggaaatgaaaatgaattaccaatagaggtattttccccaatacttagagtgcttagggcaggaaaacatccaaaaggactttcattatcaacacgactccagcgtccctttattacagtacatgccggtgaggattatagtcacttgctaagcggacttagggctttggatgaagccgtcgaatattgtttactaagcgtaggtgatcggttagggcatggccttgcgcttggtgttaaaccagcgagttgggcaaaacgtcaacggcgagcttatttgacagcgggacaacacctcgataatttagtatgggcttatcatcaagctgttcagctttcacaacttacggttgagcatattcctgtgatgcatgagttacgtgataaaattcactactggtcgcatcgactttacaacgccgtttcgacacctggcttgttatatcaggcgtggctattaagacgaaactggcccgatttcaagacgatgcaacctgaacttgctaatttttatgagtgggtgcccgatgcagatttgttaatgaatgatgatgatcataaagatttgagtccgaaaacgctttggcaacggtatcttgatagtggtctcgaagagaataatccttttaatcatataatatcagtaaattgtcagccagatggtggtgataaattcgctggtggacgttccgacactgatgtcatttcttgtggagaattacgattatatgaggctattcaggatttcttgatggaaaaatattcaagaaaagggttggtgattgaagcttgcccgacatccaacatatatattgggcggttcgaaaaatatcaggagcatcctttatttcgctggaatccacccaacccggattggctaaaacccggtgagcaatgcaatcgttttgggttaagaagcggtccattagcggtgtgcataaatactgacgatagtgcgctcatgccaaccacaatcgcaaatgagcatcgcttaatgagagagacagccatccaaagttttggtattggatcatggatggctgacatgtggatagatgctattcgaaggaaaggaattgatatatttaacaaaaaccatatgaatcaatattga

SEQ ID NO: 122805 - DNA, 2538 bp, Enterobacter cloacae
atgccaagcagtattatacttaatcttgatgcacctgaatataaagatgactttcactcagcagatgagaacaatgagcaaagtgaactatggcaacaagatgctaacattcgattgatttctttattagataaaatgggtagagaggctagaaaatataaaaaagagcatgaatcgagatgtacgcaatatcccagtaaactgcatagctatcatcatgcaattttcgttagtggagccagaggaaccggtaaaactgtatttttacgtaatgcacaagcaatctggtctaaaaaggggaaaagtcaaaatgatacccctaaccttcactttatagatgttatcgatcctactctgttaaacattggtgacagattttctgaggtcattatcgcttcggtctatgcttctgtagaaaaagtattaaggaggcctgaaagtaatcaattacataaagataatttctttgaagctttaaaaaaactctctggttcacttggggaatcagcagagctaaatgaattaagaggaatagataggattcagaaataccgctctggaatacatattgaacgctattttcatgagtttttaattgcaagcgtaaatttattaaattgtgatgcattggtattgccggtcgacgacgttgatatgaaaattgataacgcattcggtgttcttgatgatatcagatgcttattgtcttgcccattaatacttcctctggtgagtggtgatgatgaattatatagacatattaccacaatgcaatttgaaaatgccttagcagcaggaagaatgtcaacgagagttaaaaatgccgcagagcaactttcttcagcctatctgaccaaagtttttccattccacgatcgcttgccattgctgccggttcagcaactcctgccaaatttagtgataaaatatggaatgcagcagataagctatccgggttatgaaaaactgatcaaaagtgtattttatccactttgcaacggtaacgaacgtagtaccatttggccgcagcccgatagcgcacgtaccgtttcgcaacttgtcagattactccctcctgaagaactttattcgagtaaggaaaaatcagaatctctgtggagtaacttctttgtctgggctgaagatcgtcgagatggcattgcaatcactaatgctgaatcgtatctgaaaattatggaaatgtcctcagccagtcagctagattttcacaatttatcggcgtttaatccattattacaaaaagaacgatatacctgggccgataaggatttttattctcagcagtatgccaaaataaaagagctacgggcccatgatacaaactttgaaattttagaaacagttttccctcaggcaatggtaggtgcttcttcagaggaaactaatatcctgaggagtatgccagagttagagtttataatggaaccaatgtttattagtaaaacgacggctgaaaataaacatggtaataaggaattactcgcaatttatacgcatagggattactatagtcagcaacaaaatcgaaggtatcatatattttttagtcgtgcttttgaattattatcatggtccatgttagctattacaaataacttacctgacgtttttcttgaagaagggaaattcaaggagagttttatgtcaattttttcaaaagcgcctttttattcaatttttgctgttaatccaacaaaagttattactgaagatagcagtgaaagtggaacggatgataatttggttgagtatgatgaaactgtttctaaatttgccagtgaattatatgaatggtttaatgataatcggttgccttcacttcagggtcttaatttaataccactaatcagtatggtgttcaataaggtattctcacagcttaatgtgctaaagttaaacttgttggataagaaaaagattaaggatgaacatctttctgatttggctcgtagattccagtatatttatattaatgcactaacaaccttcctaaaagaaggtttaatcattaatgctaacgtcgcgacgggtgcccgttctgatgttgtgagaaaattctcggaattttctaaagctgatcgaacgttgttcagaaacatatctggagtagtttcagctagtgggaatacagcccttactatcaaactattaactgattctgattatgcaaaattaatacaagcgatgtggtgcaacccgatatttttttcttcggatgttaatgaataccctatcggtgatactatttttgagggggatgcgagtcatagtttaaagaatgattttttatctgcgacatcttttgaagaaattagaattctgtatggaatggattcagggaatgaaagtattataactgctgaagtggttgagtgggccagggataaaatagatattgccaatgtaatcttagataaaataatgagcagttcaaaaatgaaatcaaagattcaaggtaataattttattgccagaatgtacaatggtcttacatttgcaattgaacattaccgttag

SEQ ID NO: 122806 - DNA, 792 bp, Enterobacter cloacae
atgaataacctgctggcgtttcccatgtatgccgtggatcgcgccgacactcgcgcgctctggctggcggtgcaacaacttctggtcgaccggggcgtgtacgtcgagcgtgtccccggctggccggaatcggacctgctgatccactggcagcagccagagcttattctcagccagacctgcggctacccgctggtcacgcagctcccggaggtgcaggtggtgggctgttttcactacacggcagcgggatgcgaagggagtcactaccgcagttttctggtgacgcgtgcggaggagcggcatcttacgctggcggatttccgcggacgtcgggctgtgtgtaattctcctgactcgcagtccggctatcacgcgctgcgaaaaaaagtggcaccgtgggtgaccagcgcctctttcttttcgcaaacgtcattcagtggcagccaccgtcagtcgctgattgacgtcaaacgcgggaaggggcatatcgccgctatcgactgtgtcacctgggcactgctgcagcgtcatgagccggaaacgttggcgggtctgacgttgattgaccaaactccgctgacgccgggcctgcccctgatctccgcaggcgctacttcacccacgacgctcaatgccatccgcgatgcactgacgacgctggtcagcgcagcggaataccgtgccgtttgcgaggcggtactcattaacggtttcagcgtggttgagaggcagggctattctcagttgctgaacaacgtcgttcccgaagcgttcctacattacatatag

SEQ ID NO: 122807 - DNA, 972 bp, Enterobacter cloacae
atgggtaaacgaagctccctctatttacatccgcaacaacgcgatcaaattcaccacctcgcctcggggtttttgtggcgaagcgaactgcccacgtggatcgtcatcatcaccctttacagtggctggtttgccacgctggcgtactggaaaacgctgggattgctgcccgccacgctgctgctcatcggatttaccacctggtatatgtcactccagcatgaactgatccacggccatcccacgcggtttgcctggcttaacgcgctgtttggcacgcttccgctggcggtgtggtatccgtatggtctgtaccgggactctcatcttgcccatcatcgccacgatagcctgacgatcccggtggatgacccggagtcgtactattttaccgaggagagctgggcacgtttttcgccctggcacaagcgcgtgatccatgcacggaataccttctgcggccggctgttgctggcaccgctgctggatatcctgcagacgctggccagcgccgtaacggcgtttcgccatcttcacctgcgcgcaatggcaatgtggctcgtccacgcggcgctgctggcagcgctgtttgcctggatgatgcacaacggtttctcacccgtctggtttgtgctggcggtaagttatccggcgctggcgctgaccaaagtgcgctccttttatgaacatcgcgcggcggatgatccgctggcgcgttctgtcatcaacgaagcagggctgttctggcgggtgctgtttttaaatcttaactaccattcagtccatcacgatttaccgggtgttccgtggtatgggctaaaaagcgtctatctgcaaaaccgggcggcgtaccagaagcgtaaccatggctttgtggtcaggggctacggcgaatggctacgccagttcttgacccggccagtggcggtcaccgctcatcccggaaaacaacaagaggaaggatatgaataa

SEQ ID NO: 122808 - DNA, 1188 bp, Enterobacter cloacae
atgaattcatgtgtcgtggcgagagaggcggtcacgcctgcaaaacccgcctggcgagccgtctactcactggggcttggcgtattcggcctgatcacagcagaattcctgcccgccagtttgctgacgccgatggccgcgagcctgggggtgtccgaggggatggccggacaagcggtgacggccacggcgctggtggcgctggtcaccgggttgctcatcacgccggccaccaaaaatatcgaccgtcgctgggtattgatgttcttctcggtgctgcagatcatctccagcctgctggtggcttttgcgcccacgctgcacgtcctgctgatgggccggctgttgttgggtgtggcgatcgggggattctgggcgatgtcgaccgccacggcgatgcgcctggtgcccgccgataaagtgccgaaagcgctggcggtgatcttctccagcgtctcgattgcgacggtggtggcggcgccgctgggaagctatctgggtagcctgattggctggcgtaacgtctttattctctgcattctgccgagcatgctggcgctgctatggcagctctgggtactgccgtccatgaagccggaaagcagcggcagcctgagtacgctgttccgcgtgctgcgtcgtccggggatgattggcggcatgctggcgaccattcttatcttcagcggccactttgccttctttacctacctgcgtccgttccttgaaacggtggggcaggcgagcgtggagagcatctcgctgatcctgctgggctttgggattgccaacttcatcggcacctccgtcgccgggcatctgctggcgcgtaatctgcgcctgacgctggcactggtaccgttcgcgatgggcgtgcttgctctcaccatggtggcgtttggtcatctggcgatgctggacgggttactggtcgcgctgtggggctttgcgtttggtctggtaccggtgggctggtcaacgtggcttgccaccaccgtgccggatgaagccgaaagtgcgggtggtttgctggtggcctctatccagctggcgataagcgccggtgcggcagtgggtggtgcggtattcgacctcaacggtgccagcggcatcttcgcgggcagcggtttcctgctggtgacagccatggtaattgtgtttatgggcgtgaaagtcaaagcagagtga

SEQ ID NO: 122809 - DNA, 957 bp, Enterobacter cloacae
atgaccgctcagtcacccgatttgatcagcgaacttttgcgcggcatgcgcctgtcgggcgtgaaataccgtcgaattgaggccagcgcgccgtttggcgtggcgtttcaccaggcgcccggcaaagcccagttccattttgtcagccacggcagcgcccttttgcgtatggagagtggcgccaccttcacgctgaatggcggcgacgccctttttatcccgaacggcaacgcccatgccctgctctctgacgagcacgccagcattaccccggtcagtgcgttccccagcgagcctatctgcggttcggtctgtgcgatcacctgtgagccgtgtccggaaagcgagaacaccatcatcttcagtggatgcatggattttgaactgggcgggatgcagccgctgatcaaggcgatgccggaagtgatgatggtgagccgactgatgtccacatggccggaaattcatccgctgctggcagcgatggagcgggaatcaatgacccgccaggccggattcgccgggatcctcgcgcgacttgccgacgtggtggccgcgttgatcgtgcgtggctgggttgaaggaggctgcggcaaagctaccggctgggtgcaggtattgcgcgacccgcgtttgagccgggccatttacgccatgcatcagcagccaggcctgaactggagcgtggcggatctggcgaaagaagcgggcacttcccgctccgtgtttgctgaacgttttctggcagccacgggaaccacaccggcaaaatatctcagcgaactgaggatgcggctggccattcaatacatccgccacgaaaatcagcccattgaaaccgtcgcgttgcgtctggggtacggttcactggccgcgttcagtcgggcatttaagcgcattattgggcatgcaccgggcacgttgcgcgagaccagccagaccccggaagaggtctga

SEQ ID NO: 122810 - DNA, 255 bp, Enterobacter cloacae
atgggtattatcgcctggattatctttggtctaattgctggcgctatcgctaaacttatcatgccgggaaatgatggcggcggcttcatactgacgtgtgtgctcggtgtcgtgggggcggttgtaggcggctggctggcgacgatgtttggctttggtggcagcattagcggttttgacctgcacagtttcctggtggctgtcgtgggtgccattgtggtgctgggcattttcaggttactgcgacgggcataa

SEQ ID NO: 122811 - DNA, 1356 bp, Enterobacter cloacae
atgccacacatgaacccgttaccccctacagtcatttcattaccctggcgttcagacgccgcggaattctggtttgcccgcctcagccatcttccttttgcgatgttgctgcactccggttatgcggatcatccctatagccgctttgatattctggttgccgaccctctgcagaccctgataacacaagggaatgtgactacgacgggcgaaacgcagtcaacggacgatccgctgtcattacttcagcaggcgctggacgcgctgagcttaaccgttccgcaaaatcccgaccttcccttccagggaggtgcgctgggcttgttcggctatgatttaggtcgccgcttcgaaaccttgccggagactgcgcaggacgacattccgctgccggatatggcggtggggctttacgactgggcaataatcgtcgatcaccacaagcaggcggtctctctgctcagccatcaggatgtgtccgcccggcttgcctggcttgaggcacaggtccccgtcgcaacagcggatttccacctgacctctgcctggcgcgccaacatgaccgcgcgggagtacgccgcgaagtttgagcgggttcagggctatctgcagagcggtgattgctatcaggtcaaccttgcccagcgttttcaggcaacctgtgaaggcgatgagtggcaggcatttacccgcctcaacgccagtaaccgggcaccgttcagtgcatttctgcgcctggaacagggcgctatcctgagcctctcgcccgagcgttttattcatcttgccgatggcactattcagacgcgaccgattaaaggcacgcttccccgcctggccgatcctgttgccgaccgccagcaggcggaaaaactggcggcctcgttaaaagatcgcgctgaaaacctgatgattgtcgacctcatgcgtaacgacattggccgggtcgctgtaccgggaagcgtgcgtgtccctgaactgtttgtcgtcgagccgttccccgcggtgcatcacctggtcagcaccattaccgcacaactgcccgcctcgcgcacggcctgcgatctgcttcgcgccgcgttcccggggggctcaataaccggcgcgcctaaagtgcgggcaatgcaaataatcgatgagctggaaccgcatcgtcgaaacgcctggtgcggcagcattggctatatcagtctctgcggtacgctggataccagcatcaccattcgaacgctgaccgcctgtaacgggaatctgtactgttctgcagggggcggaattgttgcggatagccaggtcgatgcggaatatcaggaaacctttgataaagttaaccgtatcctgaaacaactggagtaa

SEQ ID NO: 122812 - DNA, 1599 bp, Enterobacter cloacae
atgcaaacagcacagaggatcataaaaaagtatcgccgaaaacgcgtcatcgtctgcgtgatggttgcgcttcttacgctcatcattacgctgggtatacgctttatttcacagcgtaacgtaaatcagcaaaacaccctgaactttgcggcgcactccgtcaacgtgctggataacgtcttattgccgctggaaaaagggcgcaacccgctgctggcactggtcggagcgccctgctctcaggcgcatttagtgttacgaaaacaggcggcctcactgcaaacggtgcgctcaattgcactggtcaaagacggtatcctttactgttcaagtatttttggcaatcgcgacgtcccgttgcgagagattcagcctgccctgccctccgccgaaacaaaactggtgctctccaccgacaaatccttgcttaagggaagcccgatcctgatccagtggtatccggtttctgatagcggagaagatggggtgatgcagattgtgaatatcgatctcatcactcgcctgatgctggagccacagcgcccgcttatcaccgacgtggccctgaccgtaggggataaatacctgcgctacggtgaaaatgtctccgactcgctgacaataaacgatgatgagagggttctgcgccagcaatccagccatttcccgttcactattaccgtcagtggcccgggagccagcgagctggcgttgatatatttgccctctcagctgccgctggcgctgatgctcagtctcctgatgggttacgtcgcctggcttgcgaccgcgaaccgcatgagctttacctgggaaattaaccttggcctggccgcgcgtgaatttgagctgttttgccagccgctgctgaatgcccgcacgcagaaatgcgtgggggtggagatcctgctgcgctggaacaacccccgtcagggatggatctccccggacgtttttattccgctcgccgaagagcacaacctgattatccctctcacacgttacgtcattaacgagacggtgagtcagattggctattttccggcaacgcccggcttccacattggcattaacgccgccgccagccatttccggcatggaacgctcattcaggacctgaaccgctactggttcagcgcgcatcccacccagcagctgattgtggagctgacggagcgtgacgcgctgcaggacgtggattatcgcattgtaagagagttacaccgtcagggcgtgaagctggccattgatgattttggcaccggcaatagctctctctcgtggctggaaaagctgcatccggacgtgctgaaaattgataagtcttttaccagcgctatcggcactgatgccgtgaactccacggtgacggacatcatcattgcgctcggacaacggcttagcattgagctggtggctgaaggggtagaaacgcccgagcaggcgcggtatttgcgtcatcacggggtagaggtactgcagggatttttgtttgcgcagcctatgccgctgagggaatttccgcaatggctggcggagagttcgtctccgccagcaccgcgtaacgggcatatcgttccgctgatgccgttacgctag

SEQ ID NO: 122813 - DNA, 816 bp, Enterobacter cloacae
atgtccttcagttgtcccctttgccacgcgcgtctgacgcgatcagaaaaaagttatgcctgtccgcagggacatcagtttgatatggcaaaagaaggctacgtgaatcttctgccggtgcagcataagcgctcgcgcgatccgggtgacagtgctgagatgatgcaggcacgccgggcatttctcgacgccgggcactatcagccactcagagaggccgtcgcgcaattgctggaagataatctgactgacagtgcagcaggcgtgctggatattggctgcggggaagggtattacaccgcgcggtttgctgaggttgcacaagagaagggtgcgcagacatttggtctggatgtttccaaagtggctatccgcgcggcggcaaaacgctactccggcgtgacgtactgcgtggcatcgagccaccgactgccgtttgacgatgccagcatggatgcggttatccgcatctatgcgccctgtaaggcgcaggagctggcacgcgttatcaaaccgggcggatgggtcattaccgtcacgccaggtccccgacatctgatggagcttaaagggcttatctatgatgaggttcggctgcatgcgccacattctgagcaactggcgggctttacgctgaagcaggagcagacactggcctacgagatgaacctggcaggggaagaagctgtagcgttgttgcagatgacgccatttgcatggcgggcaaaaccggacgtgtgggaaaccttagcggagcaaacaacgtttcgctgccagacggatttcagtatccactgctggcagcgcgaagattaa

SEQ ID NO: 122814 - DNA, 1707 bp, Enterobacter cloacae
atgaaaacgaccgccggcaatttcacaccggcgcgttttgcgctgctctgtttagccattttttgcagtctggcgtttttgctgggccgcgttgcctggctgcaaattattaaacctgacaacctggtcaagcaggaggatatgcgatcgctacgcgaactgccgattgatgctccccgcggaatgatcatggatcgtgagggccggccgctggcggtcagtgtcccggtcagggccgtgtgggccgacccaaaaacggtgctggcaaaagggggcgtgggctttgacgatcgctggcaggcgctggcgaatgcgttacatctctccctgaacaccctgtcatcacggattaacgcgaatccacaggggagattcatctaccttgcccggcaggtggatcctgcgcaggcaaaatggatcgataagctgaatttgccgggtatcaatttacgcgatgaatcacgccgtttctatcctgccgggcatgtggcggcaaacctgattggtttcaccaatattgacggtcagggcattgagggggtggagaaaagtttcaacacccagctaacaggcaagccgggcgtccggcaggtcagggaagaccgttacggtcgcgtggtggagaatctgacggaagtcgcgccggtgcctgcgcacaatattcagctcagtattgatgagcgcctgcaaaccatcaccgaagatgcgcttgataacgcagtggcctggaacaaggcggagtcgggggcatcagtgctcattaatatccccaccggtgaaatcctcgcgatggcgagctatccggatttcaaccccaataaccgccaaggcgcgacaatagacgattttcgtaaccgtgccatcagcgatacgttcgagccaggttcaaccgtgaagccgcttgtgctgatgacggcattgcaacaggggctggtgcagcctgacagcgtcattgacacccatccgtatatgcttgacgggcaccgtattcgggacgtgggttactaccctgaactctcgatgaccgggatcctgcaaaaatcgagcgacaccggcgtatcgcgcctctcgctggcgatgcctgttcagcatctgattgatacctaccggaactttggttttggtacaaacaccgggcttggcttaaccggcgagagcgccggtctgttaccccagcgtaaatactggagccagctcgacagagcgaccttcgcctttggctatggcctgatggttacccccctccagctggcgcacgtctatgccaccatcggcggcttcgggctggaacggcccctctcaattacccgtatcgatccgcccgttatcgggcacagagtcatgccggaagagattgctcatcaggtcgagcatatgatggagagcgttgcgctgccgggcgggggcggcgttaaggctgcggtacgtgattaccgtgtggcggtgaaaaccggtacggcgaagaaaatcgatgatagcggcaaatatgtcgataaatacgttgcctataccgcgggcgtcgcgcctgccagcgatccgcgttttgcgctggtggtcgtgattaacgatcctcaaaacggggcgtactatggcggcgccgtctccgcaccggtattcagcgagattatgggtaacgtattgcgtcttgagaacgtcaaacccgatggtctggcgcctgattcctcgcacctaatcgtcatgcgttaa

SEQ ID NO: 122815 - DNA, 990 bp, Enterobacter cloacae
gtggtctggaaaaatccctggtatgacccctccctgaaacatcacacgccgaacggttttcgtaatactgaccccgtcgggcatcagcccggtgacgttgatcgctggcgaaaagcgcgcaaagaagctggcttaccccgccccccggcaaacggatatgaggactttatccgccagtggtggcagccggcaacgcttaagcagccgcaggaaaatggggtatggtggctcggacacgcaagcctgttgttgcacattgatggcaacactctgctgaccgaccctgttttttctcgtcgcgcctctcccttacctttcctcggaccacaacgtagaacgcctcccgctctgtctgtcgaacagctccagcagctcgatgcagtggttatttcccataatcattacgatcatctggatgacgcgaccattcgccggatccttaaacgcttccccgacgtcactctgtttgttcccctaggtctggcagtctggtttcgccgccggggggcaagacgcattgttgagctcgactggtggcagagtttcacctggcaggggataacgctgtccgccgtaccggcgcagcactggagtatgcgcacgctctggaaccgcaatcgttccctgtggtgtggctgggtgtttgaagggcggcatcatcgtttctggtttagcggcgacacgggctattcacctgaactgctgcgaataccggaaaggctgggtaaaattgacgccgcggcgttgcccgttggcgcttatgcaccacggtggttcatggccgtacatcatatggatccgcaatctgccgttgcgttgtggcaacagttgggatgcccactggcgtttcccattcactggggcgtgtttgaactggctgatgaatcgcttgatgaccccgtgcgagagttaactgcagtcctcgataatttagcaccggttaataattccttcaggatactgaaaattggtgaatatttatccttataa

SEQ ID NO: 122816 - DNA, 291 bp, Enterobacter cloacae
atgggtgagttactgaattcagggctgctaaatatggcatccctgatgatctcgttggttgttctgctggtggggcttgtcatttggtttttcgtaaaccgtgccagttcccgtacaaacgagcagatcgaactgctggaagcgctgcttgaccaacaaaaacgtcagaatgcgctgttacgtcgtctgtgcgaggctaacgaaccagaagagaaagcgtcggcgaaagacgcggttgctgaagacaacactgagcaggatgactttatccgcctggtggctgagcgttaa

SEQ ID NO: 122817 - DNA, 240 bp, Enterobacter cloacae
atgcatttaatcattcgtacaattattgcactggccgtagtatgggttggccttctgttaaccggctatggcgtgcttgtgggaagcaccgaaaacgccgctggattaggtattcaatgcaaatacatgaccgcgcagggcatgagcacggcacaatatattcattcagacagcgggatcattggtttaaccaactgcccggttctgcgtaaaacatccgtcgtcattgataacggctaa

SEQ ID NO: 122818 - DNA, 645 bp, Enterobacter cloacae
atgtatcagcgaatcgatggtgggaagtggcggcatgtctgggttgtcagcgacatacatggttgttatcagtggctcatggatgaactgaaacgccggcattttaatccttatgaggatttgcttatttccgtaggggatgtaattgaccgtggccctgacagtattaaatgtttacagctcatgaatgaaaaatggtttcgtgcagtacggggcaaccatgaacaaatggctatcgacagccttgataataatgatttcgcactctggacaatgaatggcggaatttggtttacccgccttgagcacacacagcagcagcaggcgctgacgttacttaatgcgtgtcgggaactgccgcacattatcgagataacctgtgcaaacggtttgaatgtgattgctcacgctgactatcccgctgcggaataccgctggcaaaaacccgtaagcgcccagcacgtactatgggatcgcgaccggctgatggggtttatggtcgggaaagggcaggggatcggcggtgcggaccatttctggttcggacatacgccacttgaccggcggtatgattttaataacctgcactacattgataccggcgccgttttcgatggttactttacgctggcgcagcttcagtaa

SEQ ID NO: 122819 - DNA, 942 bp, Enterobacter cloacae
gtgtctaatatgcacctgcacaacgatgtgttctatccgcatcgcacaaatatcatttccgagctggtgaaaggaaaacgcgttccgggtccaatctggcagaagcgcgagtatcgtctgaagttcctgctgcgctcgctcctgttctggtcttccacccatcgcgtgctggaaacgctctcaggacgtgatgattttgaccgtctgctggcctctcaaattaccttaccgagtaaaacccataggcagtatctgatgcgtggcctgacggccggcgatcgggctgacgctatcatcagccattatcactgggtcgatagcctgaaaaatatcaccctcgccaacgcgctgaccagcccgcaagagcagacgatagtgcaatttcaggcaaaaaacgacgcgacctataccgtgagtgcctcctctgccggcaaagccgagcgggaaggtgaaagcacgctgtggctgcgcgacagcgagaataccgtgctcgcaagcctgacgtttagcgtcgcccgcagtaacgggcagcgagtgctggtgattggtgggcttcaggggccacgtcgcaacgtctcgcatgacgccattaaactggcgacccgcgcctgccatggcctgtttccaaaacgcgtgctgatggaagtggttttccagctggccgcacattcatccgtccgggcaatttttgctgttggtgatgagggacacgttttccgcgcactgcgttaccgcctgagcaaaggccgtcatttccatgccagctatgacgaattctgggcaagtctggacggtaaaaaaatatcctctttctgctggcaactgccgttacagatggagcgtaaatccctggaagatatcgccagtaaaaaacgggcggaatatcgccgtcgctttgaactgcttgactgcattgaggctgaggtgaaatcacgcttttaa

SEQ ID NO: 122820 - DNA, 867 bp, Enterobacter cloacae
atgatttatgattgttttttatattatgatgaagatatgttgttagacatccgtctacacacactctcggatgtcgttgacaaattcgttattgttgaatcaacatatacttttaccgggaaaccaaagaaactcaatttcgacatcgagaagttcacgtgtttcgccgataaaatcatttatgttgtaaacgatacggacccaacaaaaattccgggtgcaaaatataccactgataatgaagttgatccctgggctgtagaatcgcaccaccgcaatagcattatgcaagggcttgtaaacgcacagcctgacgatatcattcttgtttctgatgtagacgaaatttttgatcccgcagtgatcgacaggattaacccacgccatctgtgcacgactatccatcaaaatttttataattatcagtttaatatgcaagtatttaatactaatggtactccccgaaaatgcacgttaccgagagcaacaacatataaaaatttattaaattattttgatggtgaacctgaatctttcagaaatataaagcatgcccgtaaaaataaaaattggtcgtggtttaaatggaacttctttaaattaaagaataaaactatcgataatggtggctggcatttctcctgggtaatgtcccctgaacgcatttctgagaagatggcgactatttctcatcaggaatacaatactcctgatttcaataatccagaacacattatgaaagtactcaaaaatgcagaagatatttggggaagagacaggaagctaatcaggcaggcgctagaaaaacccgtattcccagcctatctcgttgacaataaagataagtttaaagactttatcctttaa

SEQ ID NO: 122821 - DNA, 339 bp, Enterobacter cloacae
atgaaaaagacactactttctctcatcttgctggcctgcacggggagtgccctggccgcaccacaggtcattaccgtcagccgttttgaagtgggtaaggacaaatgggcgtttaatcgtgaagaggtgatgctgacctgccgtccggggcacgccttgtatgcgattaacccaagcacgctggtgcaataccctttaaatgatgtcgcagagcagcaggtcgccagcggaaaaagcagtggacagccaatcagcgttattcagattgatgatcccgcgcatccggggcagaagatgagcctggcaccgtttatcgagcgtgcagacacgctttgttaa

SEQ ID NO: 122822 - DNA, 870 bp, Enterobacter cloacae
atgctggcgatgtgctacgtagggctgcgctttctccatttcggcgcgttaatgcttatttttggcaatgcgctgtatagcgtctggtttgctccttcctctctgcaacggctcatgtcccggcgttttcagtcgcagcagagaatggcggcgttaatcagcctggtgacagcgctcctgatgtttacgcttcagggtgggttaatggggaatggctggggcgatgtcgtcaaccccgacatctggcgtagcgtgctggggacgcagtttggaagcgtctggctgtggcaaatcattctcgcggcccttactgccggtacagcatggctggctccgcataaaggctcacgactgttactgctcgccatgggacagttcgtcctgctggcgggagtagggcatgcgacaatgaacgaaggcgcggtgggcgcattacagcgtcttaatcatgctcttcatgtgttatgtgctgcaacctggcttggcggattactgccgctgctgttttgcatgcgtctggcgaaagggcagtggcagcctgccgcaatctacaccatgatgcgcttctcacgcatggggcattacgccgtagcaggcgtggtgcttaccggcgttttcaatgcgctgtttattctgggtatcgatattccctggcaggcccgttacgtgcaatttttgttgttcaaatgtgcgctggtggctttgatggtggtaattgcgctggcaaatcggtattttctggtgccacggtttcgtgcgcaaagcgggcgagaacaacaaatatttatcagaatgacacaagcagaagtggtgctgggtgcgctggtgctggctacagtcagtctgttcgcgacctgggaacccttctga

SEQ ID NO: 122823 - DNA, 372 bp, Enterobacter cloacae
atgggtttatcctcttcccgcgcggcaggcgcactggtctttttggcctcttgcgtgatgtcaccctccgtgctggcgcacgctcaccttaaacaacagactccggcagcagatagcctcgtgacggcaccgcgcacgctgacgctgacgttttcagaaggtattgagcccggttttagcggtgtggtggtgacggatgcacaaaagcagaccatcaggaccggtgccgttaaacgcgacgagaaagacaagacgcagctgaatgtgtcgctggatcgcgagttgacgcccggaacctaccaggttgactggcatgtggtgtcggtagacggccacaagacaaaaggcagttatcactttagcgtgaaatag

SEQ ID NO: 122824 - DNA, 651 bp, Enterobacter cloacae
atgtcacaatggaatattgctgcggcccagtatgccgggctgcaccacaatgtagatgaacatgtcgcgcaccatctccgtttcattgccgaagcggcacgccagcagtgcgatttgctggtattcccggagctctcattaactggcccagggacaacgacgctccctgcccctcccgatgataaacagctggccccgttgctaaacgccgcgaaattataccggatcactattattgccgggcttccgctcgacgtgaatggccgtcgtcagaaaggccttgccctgtttaccccttctcgccatagcatcctgcgctaccctcagggtcgtggtgcaagcctgatcccgggtgataaacagctgacgatcatcgatgcacatgctgattcgccaaatctcgacccacaggcgacgctgtttaccagctgccagtcagtgggagatagccgctggcggcaatccatcagtaccctgcagcgattcgcacacaaatatgccattgcggtgttaatggcgaacgcgcgcggcggcagcgcgttatgggatgaaaaaggtcagctgatcgtccgcgcggacaaaggtgaactgctattgaccggatctcttggcagacagggttggcaaggcgatatcattcctttaggctag

SEQ ID NO: 122825 - DNA, 126 bp, Enterobacter cloacae
atgctcggaagccccatcagggagcagaacctgggtgtcagtaaccccatctgcaatcgcggaagcaatgaaaccgagcggtttaagcgaagcgacaacagcagcgttaacatcttgtgctgttga

SEQ ID NO: 122826 - DNA, 393 bp, Enterobacter cloacae
atgcgtaagtggttatggatcttactttttccgctggtggcccaggccgccggggaagggacctggcaggccagcagcattggcgtgaccctcagcaaccgcggtgtcgccatgtcttcgcgaccgctatcaccgactgagccggtgtccggtctgatgaccctggtggtctggaactacacgcttattggcccaacgcctgcagggcttcgggtacggctgtgctcccagacacgctgtacggaaattgacggagagaatggcaccactcaggccttcaacggcgtgcctgctgtcgaacctttgcgctttatctgggaagtgccgggcggcggacgcctgatccctgcgctgaaagttcagcgtaattccgttatcgtcaactaccgctaa

SEQ ID NO: 122827 - DNA, 963 bp, Enterobacter cloacae
gtgaagcgcttactgctgttgatgctgctgctgttttccggcggcggctgggcggcgtgtaccgtcagtacggtaaatgcgtcatttggtagcgtcacctcgttcgcgctcagcggaaccggggaggtcgaaaccaccggcaggctgatcgtggcatgcgacgctgtgctcaatcttctgaccaacgactcggtgacgctgaactacaccgcagcgtcggtttcaggcaacagccgtgccaccatgaaacgcaccgacaatgcggccatcacggatgtgatccccacccggttgtgcgggttaacggggtgttcgagcaacagcgaagtgcaaatcagcaaagcttatacctggagcggcaacaccctgctgggattactggggtcaaaacagtacagcattccgctttatttccgcaccgttgccggacaaaacgtcacagccgggccctatcaggtgctgctcaccttcagcatcaactacagcgtctgttccgtgggcgtgctgggcctttgcaccgttccccagacaggcacggcgaccaccagtattcttctcaacatgaccgttaccaacgactgcagcgccatgaccacgcctgacatcaacttcaacagtgcgccgctggtgcaaagtttccccactgtctcgcaggcgattgccgtcacctgtaccaaaggaagcacttacactatcggaattaataatggagccaatgcgctgaataatgttcgccgcatggtgagcggcagtaactacatgagttacgacatttataaagaagccacgaccaaccgctggggtggcagcggtaccgagcgctggaccagcgcaacctcctcgcaggtcagtaccgacggtttattgcgaacctacaactacactgccaaagtccttaccagccagtctacgccgcctgccggcacctacaccgatacgctgatcgttgacgttgcgttttaa

SEQ ID NO: 122828 - DNA, 762 bp, Enterobacter cloacae
atgaagccatttttcagacacctttgtctggtgagtttgttggggggaatggctgcggcgacaggccaggcgcaggcggcggcaaccattctgttgtggcccatcgatccgtggctgtcagcggatgccaaagccactgaattatggatccagaatcaggggaacagcgcaacgacaatgcaggtccgcattgtgcgctggaagcaggagggcggttatgaacgctactccgcacagcaggacgtggtggccagcccgcccatcgtcaccattggcaaaggcagtaagcagcttattcgtctgattaagcagggtacggtgccgctcggcgtcgaacaggcctaccgcattattgtggatgaaatcccccagccggatgccaaagccgagccggccattggcctgaaattgcaaatgcgctactccattcctttgttcgtttatggacagggaatcccgaccctcaaagagggggcacatcatgcgctggtggagaccaaaaatctgagctggcgggtgacgcaggagaagggacatcctgccctggaggtccgtaatcagggggatgtgcacgtcaaactcagccaggtggcgctggagcagggcgggcagaagcggacggttgcagacggattactcgggtatgttcttgcgggcagcacccgcacctggtcaatcccggccggaataggtcagccagaccggctgagcgcgcagattaatgccagggatacgcaatggcagtcgacgcccgtcaactga

SEQ ID NO: 122829 - DNA, 549 bp, Enterobacter cloacae
atgaaggcatccattttgcgtctgcgcaacagcgcggaggggatcgtgcaccctttgtacgcgctgatcgtctgcctgatgctggtgcctgcggcgggtgctgtgacgtcccagtcatttaaggtcagcgcgaccattgtgcccgggtgcgcggtatccacgggcagcggaggagttttcggtacgctcgatttcggtacccacaacggggtggaaagtgccccggtgagcaccagttttgtgcctaacggggccttgtccatcgcctgcacgcccggcgtggcgctgagtatgagcattaacggcggacagaattactcctccgttcggcgtatgaagcgctcagggggaacggaagtggtgggatatcgcctttacagcagcagttcgctggcggcgaacagcgaaattggcgtcaatcaggcaataccggtgacctataccaacagtaataacattgcgctgccgctttttggcgtggcgctgctgaccgggtttagcccggcaggaacgtattctgatcagctcaccgtgaccttgtcatggtga

SEQ ID NO: 122830 - DNA, 2034 bp, Enterobacter cloacae
gtgagcatggatattagcgatttttaccagacattctttgatgaagccgacgaattgttggccgatatggagcaacacttgctggatttggtgcctgaagcaccggactccgagcagctcaatgccatcttccgtgcagcgcactcgattaaaggcggagccggaacgtttggatttaccatcctgcaggaaacgacccatttaatggaaaacctgctggatgaagcacgacgcggtgagatgcagctcaataccgacattatcaacctgtttttggaaaccaaagatattatgcaggaacagctcgacgcctataaaagctcggcagagcctgatgccgccagctttgaatacatctgcaatgcgctgcgccagctcgcgctggaagccaaaggtgacgcagccgcagctgttgttccggcagccaaactgagcgttgtcgatgccgttaccgcacaagaggcggccccggccgccgctgcgagtaaagtgcgcgtggtgctgtctcgcctcaaagagaacgaagttgaccttcttgaagaagagctgagtaacctggcgaaattaagcaacgtggtgaaaggcaaagacagcctgagtgcgacgctggaagaggggatcagccaggacgatatcgtggcggtcctgtgctttgttatcgaagccgaccagatcgcgtttgaaaccgaaacggcggcggttgacgtgccagcggcagtggaagaggtggcggttgttcctcaggcggccgcgcctgccgttgcgcctgcggcgccggtattgaaagcggtgccaaaagatgttgccgcgccaggccgtggtgaaaaaccggccgcgcgctccagtgaatccaccagcatccgcgtcgccgtcgagaaagttgaccagctgattaacctggtgggtgaactggtgattacccagtcgatgctggcacagcggtctaacgaactggacccggtgacccacggcgatctgatcaccagcatggggcagttgcaacgtaatgcccgcgacctgcaggaatcggtgatgtccatccgtatgatgccgatggaatatgtcttcagccgcttcccgcgtctggtgcgtgacctggccagcaaactgaataaacagattgaactgacgctgatgggcagctccaccgagctggataaaagcctgatcgaacgcattatcgacccgttaacgcacctggtgcgtaacagcctcgaccacggtatcgaactgccggaaaaccgcattgccgccggaaaatccccggtcgggaatctgatcctctccgccgaacaccagggcgggaacatctgcatcgaagtgaccgatgacggtgcgggcctgaaccgtgagcgcattctggcgaaagccatttcgcagggaatggcggtcaacgaaaacatgactgacgaagaagtgggcatgctgatcttcgcgccaggcttctcgaccgcagagcaggtgacggacgtttccggccgcggcgtgggaatggacgtggtgaagcgtaacattcaggagatgggcggccacgttgagatcaagtctaagcaaggttccggcaccaccattcgtatcctgctgccgctgacgctggcaatcctcgacggcatgtcggtgaaagtggcggacgaagtctttattctgccgctgaacgcagtgatggaatcgctgcagccgcgtgaagaagatctgcatccgctggcgggtggcgagcgcgttcttgaagtgcgcggtgagtacctgccgctggtcgaattgtggaaagtgttcgaagtggatggcgcgaaaaccgaggccacgcaggggatcgtggtgatcctgcaaagtgcgggtcgccgctacgcgctgctggttgatcagctgattggccagcaccaggtggtcgtgaagaacctcgaaagcaactaccgcaaagtgccaggtatttctgccgccactattctgggtgacggtagcgtggcgctgatcgttgatgtgtcggcgcttcagggattaaatcgtgaacaacgtgtggcgtacacagccgcctga

SEQ ID NO: 122831 - DNA, 429 bp, Enterobacter cloacae
atgagttactcccatcttcttgtttctgttgcggtttcgcccgaaagccatgaactcatcgcccgggcggtttccattgccagaccgcataatgcccgtatcagcctgatcaccctcgcggccgagcctgagatgtataatcaactggctgcccccatgctggaagatattcgtgaggttttacaggaagaaacgcagcaatttatgcgcgagctggtagaaaaggcgcaatatcctatatatgacaccattattgcgaccggggagcttaatgcgcatattctcagcatatgcagtaagcagaatattgatttagtaatatgcgggaatcataaccacagctttttttctcgcgcagcctgtgcggcgaaatcgattgtggcgtcaagccaggtggatgtgttgttagtgcctcttgggggtcgttaa

SEQ ID NO: 122832 - DNA, 804 bp, Enterobacter cloacae
gtggctgacttgttaactgcaccgcctgtactgcccggacactatgctttcttttttgatctcgacggtacgctcgccgagataaagccgcatcctgacctggtggcgatccccgccacggttcttcagaagttgcatcagctctcgcagatgactgagggagcagtggcattgatatcagggcgctcgatggccgaactggaccagcttgccaggccttatcgctttccgctggccggtgtacacggagcggagcgccgcgacatccatgatcaaacgcatatcgtttcactccccgacgcattaatccaggcgctacaggtacaactctcgtctgcgctggcagaactgcccggtacggagcttgaagccaaagggatggcctttgccctgcattatcgccaggcgccgcagcacgaagcggctgtgcttgcgcttgcgaccgctatagcaaatgcacatccggagctggcgctgcagccgggtaaatgcgtggtggagcttaaacctaaagggatcaataaaggcgcggcgattgcggcgtttatggcgacaccgccttttaacggcaggacgcccgtttttattggggatgacctgaccgatgaggcagggtttcgtgtggtgaatcaggccggagggatcgccatcaaggtcgggcctggtgagactgtcgccgaatggcgtctggcggatgtcgccagcgtctggcagtggatatctgacatcgctaaccagcaacaacaacaaatagcgcaaaacaaagggggaaaccattatgggtcgcttagtcgtcgtctctaa

SEQ ID NO: 122833 - DNA, 558 bp, Enterobacter cloacae
atggcaaaggttgcggtgctgttggcacccggttttgaggaagcagaggcgattatcaccattgatattttgcgccggctgaacatcgacgtggaaactctggcctgcgcgcagtcgcgtgcagtggtcagttaccataacattcccatggtggcagacagcaccttatcagaacgccgtgattcgctttacgatgcgattgttctacccgggggaccgcagggcagcgcaaatctggccgcggatccgcaggttatccgttttatttctgcacatgacgcgcgcggaaagctgatttgccctatttgttcagcagcggcgcgcgtgctggggggaaatgggctgcttcgggggcgtcgctacgtctgctccggggatttatgggagacggtaaaagacggtgaatatgtggatgcaccggtcgtccaggataaaaacctgctcagcggcaaaggtcttggtcatgcttttgactttgcgctggccctggctgctcgactgttgggtgacgaaacgcccgttcgcgatcacgctgaccacatctattacgcctggtaa

SEQ ID NO: 122834 - DNA, 504 bp, Enterobacter cloacae
atgactacccaaacgatgatgcaaaaactcaatgcccagttgaacctcgagttctatgcctcgaatctgcacctgcatatcagctcgtggtgttccgaaaacagtctcaatggctctgccactttttttcgcagccaggcgcaaagcaacgtcacccatatgatgcgtgtttttaacttcatgaaagccgcaggggcgaacccaaccgtaaaagcgcttgatacgatcgacgataactactcttctctggaagaattgtttgagaaaacgctggaacagtacgaacagcgttgcagcacgcttaacaagctggccgatgaagccagagcacaacacgacaccaaaacccttaaattcttacgcgatatggataaagcgcaacagcaggacggcatgctgctcaaaacgctggcggacgaaatccataacgcgcagcaggcgggtttatgtccggaacaaaccgaccgtcatctgcttgaccttgtgacggtacagcaccactga

SEQ ID NO: 122835 - DNA, 2136 bp, Enterobacter cloacae
atgcttcgctccctctttctactcgcgttgaagggtctgttgcttgtttgcccccctgcccgggcagaagagcctgtaccggtctggatctttgatgctaacaacttcgaattctggcgcacaccgcaaggagagtggcagggtttttatcctgaactgattaaggccatcaataaacaggcgggtacgcagctgcagctgcggccgctctccggagccgatattagccagcgttttgcacaaaatgagtatggcgtgtatgccggggtattgcgcacggagaagcgagccagaaccaaaattctctcagcacgtttgtttgataacgacgtggtggccgccagtccatcgatgacggtgacaaccgccggacagctcagccatgcccgggtgctgttccgtaaagacgacgcgacgctcgacagcgtgcaacaacgttatcccgaccttaaatttcgttctctgcgcctcgtcgccaccagcgacgaggcttttcgcttactgagcgacaaccaggctgatttctatattaatgacgctccggagatggaaaatacccagcgctattatctggtctcccggccctttcctgagctacgcattcctgtcgtcctcgccttcagccctgacctgcttcccctgcgggataaaatcaatgcgctgattggcacctggtatcgcaacggcgaaatcaacacgatgctggaggagagcaagcgcaattacctgctaagccgtatcaccctgtcagaggaggagcgaacctggatcgcgcataatcgcctgcagatcaacctgcccaaaaacgagaattttgccccgcttatctggcgggacagcaagggctaccacggcacagccattgatatgattaacgacatgcgcgatttactgggcatgaaggttgaggtcaattttatcgatcactattcgagtcttccgcgacagcagtgggcggttcgattgattgatatcgttgatcgaagcgacagtgcgcatgcacagggtcgtatcggccccgacatcgcctggcacaacgcctattacaatcgcagcagtcagcccttcttgtggaacgaagagagtattcgcagccagcgcgtcggcgtaatcgacggttcgtttgccgcagcctatttacgccagcgttttggcagcgatgtgatcatcgtgacccggccaaccattgacggtcttatcgacgcgattgagaacgatgagattgactatattctgggcgacctcagttcgctggagtccacgcttcgcggcaacgaactgtttcgcggggtgctgaaagtcgcgggggtcacccgctctgaatttattattggcccctgggtggatccgcagcatccgctctttcatctgctgactcaggttcatcgcctgtcagaataccgcacgcaaatagaacgtcaggatgagcagagttacttacccgatttttctaaaaacacgctgaagattatcagcgtgattttgctgatcgtggccctgttcagcatcggtatgctgatcatgatgcgtcgccatttacgccagaaccggatggttaaccgcaatatggtgcaggcgctggagaaggtaaaccgcgcgcacgatgacgagaccggcagccatattcagcgcgtcgcccgatattgcggcttaatggcgcgtgagcttgggctttcgcgcaaaatgacccgtgagatagaacattttgcctcacttcacgatgtcggaaaaattgccgtgccggagcgtattctgcgtaagcaaggcccgctgacccaggacgagtttgccgagatgaaacttcataccgtgaaagggtggcggattattcagggcttagagctgggcgcagttgcggagaatattatccatttccatcatgaaaaatgggatggcagcggatatccgcaggggctacggggagaacagatcccgctggaagcccgcattctggcgctggccgatgtgtatgatgccctgaggcaaaagcgggtctataagccgggattcacacacgagcaagcctgcaaaatcattctggagggtgacggccgccattttgacccgcagcttattgcgctgtttcgcctgcatcatcttaagtttaaaaccatttttgacagcctggccgactaa

SEQ ID NO: 122836 - DNA, 339 bp, Enterobacter cloacae
atgaaaagagtcttcgtcgccggtacgatcctgctgctggcgggctgtaacattaatcgccaggctgaggtcagcaccctggacgcgccaaacggcatcgtccgcctcgactacgggcaagcaatgctgcaaaacgcctattccgatgagtatgttaataacggcaccgcagctaaagcgtgtcagagcatggggtatgccaccgcctctgcctatggccagcccattaaaacctgcaccctgaccagcggctctctgtgtctcaatgagagcgtgacgatccagtataaatgcatgggctttgccgtaaaccctaaggcaaataacccgtggtattaa

SEQ ID NO: 122837 - DNA, 342 bp, Enterobacter cloacae
atggcgggaaataatccctttaccgcggcgtggagccggggcggtaatttactgtgccatggtcactggataatcagctggcagaaccaggccctgcagcttcctgaatcgcgtcgtgaaaaggatatgggcacctgggccatttattcgatcatcgatcctgaggacgacacctttgcgcaggggctaaaagaagatgagtggatcatcgaaaacgtagactggctgacagatgttttttttgacgccggtattccgctggagacggctaactaccggtatttttaccaggcggtcaatacgcaggactggcggtgtacaagctgtgcggggtgtatgtaa

SEQ ID NO: 122838 - DNA, 219 bp, Enterobacter cloacae
atgtcttcaagaattataggtttggttaagtggtttaacgaagataaaggtttcggttttatctctcctgtcgatggtagcaaagatgtgtttgtgcacttttctgctctgcagggtgatgattttaaaactctctttgaaggccagaaggtcgaatttgctatccagagtggcgaaaaaggccctgctgctgcaagcgtaatactttgcgatagataa

SEQ ID NO: 122839 - DNA, 228 bp, Enterobacter cloacae
atgaagaaagtcatcgtctttttcaatggtaaaccgagcaatgttgtcaccgtgcttaagggtattacatccatacggcaggaatatccaaatggtgaagcgataaacctgcagataatgtccgcaggttttccttctctgaccggcgatcatgaagtggtttatgtggcgtcggacagggagctgacttctcaggaaattctggatgcggctaagaaatatttataa

SEQ ID NO: 122840 - DNA, 669 bp, Enterobacter cloacae
atggacgttttatccacccagcttaacgtcagtaaagagaccattcgccgcgatctcagcgaactgcaggcgcagggaaaagtgctgcgcaaccacggtcgggcgaaatatattcaccgggaaaaccaggacagcggtgatccttttcatattcgccttaagagccacttcacgcataaagcggatatcgccagagaagcgctggagtggattgaagccgggatggtcattgccctggatgccagctcaacctgctggtatcttgcgcgtcaactgcttgacatcgatattcaggtctttactaacagtcaccccatctgcctggaactgggcaaacgtgaacagattcaacttattagctccggcggtaaactcgagcgtaagtatggctgctacgttaacccctcgttgatttcacaactcaaactgctggacatcgacctgtttatcttctcctgcgaagggatagacagtcatggagggttgtgggattccaacagggtcaacgctggcttcaaatcgctgctactcaagcgcgcttctcagtctttattattgatagataagagtaagtttaatcgttcaggggaggccagaattgggcacctggatgaggtaacgcatattgtgtctgacacacaactgaatgaatcagggctgagacaataa

SEQ ID NO: 122841 - DNA, 234 bp, Enterobacter cloacae
atgggcgtgaaagtggaagggctgagccttgcagacgcgcgcaatgctgccgtggatgccgtcttcaggcttaatcacgatgtgggcatcccgctccatctgcgtgaggctggagtacaaaaggaagatatcccgatgctggcccaggcggcatatgatgatgtctgtactgccggcaacccacgggaagcgagcctggcagaaattagcgagctgtaccatatcgcctggtag

SEQ ID NO: 122842 - DNA, 1128 bp, Enterobacter cloacae
atgacattactggaacagttacagggttacgataacgccttttttgagagcatcaactcaatgcaagccaatgggctcccgattgtgctttatggggcaggttgtctggggcagatgacggcagaatttatgttccgggaaaacatgccgctccataaagtcgcacttaacagaaaatatattacagaagggatgagcttccacggtctcccggttgtggcaatcgaagatctccttgaacaacccggtgaattcaactgtatcgtggcgttgcagtatgttagtgacgcgatgcgggcagaacttcggcaggggggcgccaatgtgcttgtatttgatcctgcttttatcggcgtcagcacaactctctggtataccccgtcattttgtgatgaacataaggaccttcttgaacatctgtacgcgagcctggaagacgatcgttcgcgggaaacgctggtcgcatttcttaaacagcgtttaactgctacccgtggctattaccaggcggtatacgaaccggtacattatttcccgtcagatattgtccgcctgcaggataacgaagtgtttattgattgcggggcctacaatggcgatagcattggggcgtttatgcaagaagtggcccgtcagcaggtcgcgcagccagaaagcgttatcggctttgagcctgatgccagtaattatgctcaactttgtgaaaatacgcgccagtggccattttgtcagccagtgcaaaagggcgtatgggatgaaaacaccgttctctcttttcagtcgggaaatgcactttcttcacgcctgatggaacaaagcaccaacacggtgaccattgaactggatagcatcgataatatcctgcaggggcgcaaagccacctttattaaaatggatgtcgaaggcgctgaactaaaagccttgcagggcgctgcaagcacgattcaggactggaaacctttactggcaataagtctttaccataagccggaagatctcctgacaattcctcaatatattgcctctctcagtgctgattatgtgttttatctgcgcggacatcaccctgaactggccttcgaactggttttatatgctgtgcctaagtcacggtatataaagaaatag

SEQ ID NO: 122843 - DNA, 1116 bp, Enterobacter cloacae
atgaacaggcctctatctcttgggtttattggcggagggatcaattcagcaattggtctgacgcacaaaattgccagtcaaatggacggccatttcgagttggtgacgggatgttttagccgcgataaaacgcttagcaaacagacggggctggcatggggactaaaggatgaagccatttatacgaatgcggcgaccctgctggaagagcagcacgcacaaatggatgccgttgtcatcctgacgccgaccccggcccatcgtgaaattattctggcctgtcttgaatacggtcttccggttatcagtgaaaaagccatggtcgccagtgtgacggatgcgcgcgatatcgcccagcgcgtggcagacatcaatggacaactctacgtcacctataactataccggctatccgatggtacgcgaattgcgtgaacggttacgtcgcggtgaactggggagcattcagcatgtcatggtggaaatgcctcaggaaggatttattcgcagccgggaagatggcagtgtggctcagcctcaggaatggcgtcgcgttgatggtgacatcccgaccgtttccctcgaccttggggtccatgtgcatcaactggtggagtttctgacggataaacgtgccgaggatgtctatgcgattaacagcacgtttgcgcgcgtcccgaatgttgtcgatacggtgaatctggtttcccgttacgacgacgatatggtgtgtaattactggtacggcaaagcggcgctgggttaccgaaatggtttgcggatacgaatttatggttctgaaggcagcgcagaatggttgcaaatggagcctgagtatctccatcttgctgatgtacatgggaatattcgcttgatcgaccgaacagccggagacaatacggtggccaaccagccccgctattgccgcttcaaagcagggcaccctgccggattcattgaggcatttgcaaactattacgccgatattgccgccagtttacgtggtgaacctacgggatacagcctcagttgcgatacggccgtccgtgggctggaatttctcgaaaaagcgcagcagagcgcactgacgtctgccaaagtcgaattattacgttaa

SEQ ID NO: 122844 - DNA, 1167 bp, Enterobacter cloacae
atgagcatgatgcctacagcgatgatccttgatgcagggtttgcctcgttgccattacagcaggccataaaagccgcagggtttcgaacgcttgcctgtagcggtaaagcccaggatgcagggatgaaatatgccgatgcgacctgggcgcaaaattacgctgacagcgaggcggtactggccattgcccgccaggaaaaaatcacggctctgtcgcctggtgtgacggacgtttcgtatctttctggctgccgcgtggcgcaggcgctgggccttcccggctatgactctcccgaggtaagcgatctccttttcctcaaggaccgcttcaggaaatgggccagcgagaagggatatcctattccaaaagctgccagtaacgtgcaggaggcgcgtacgatgcctttcccgctactggtaaaacctgtcgacgcatacagtggaaaagggatctcattgattcatcagccagatgagcttgatgaggcggtcaacgtcgcgcgtgctgcgtcagcgggcggacattgtgtcattgaaacgttctgccagggggcgctgtatagtcactcggcgtttattcgtgggggggaaatcacttgcgaattttttgtcgatgaatattgcacagtctatccgtggcaagtgaacagcagctgtctaagtgtcaatctgcccgagtcgatgcgtgatcaaatcagtgaatgtatgcaggccattgtcagcgacttaggccttgtcgatggactcttacatactcaacttattgctgacgaacggcaattttggctgattgaagtgacacgccgctgtccgggcgatctctattcgaaattgattgagctttccacgggcgtcgattattgccgtgaatttgttgcgcctttcatcggacagacaagtcacctggcgcaccggcgtcccgcacgtcggcgcaatattgcccgtcatacggtctcttcaactcatcgaagccttttcttcgggtttaactgtgcgcctctgccagccaacatccttcaggcgataccgcttaaacaacccggcgatgaaatcggccctgcgccaggggatcgggcagggttaatttttgctgagtttaccgatcttgacgccatggcaagccacacgcctcagcttaaaaactatttttctttttcttctttgtaa

SEQ ID NO: 122845 - DNA, 1161 bp, Enterobacter cloacae
atgagtaaaatttacgtaaccagtccattcttgccccctctggaagagtttatcccttatctggagcaaatctggcaaaataaaactctgacaaacggcggaccatttcatcagcagctggaacaggctctggcggaatatctgggtgtaaagcacctttcgctttttgcaaacggaacgctggcgctgctgacggcatttcaggcgttgcgtctgactggcgaggtgatcaccacgccgtattcctttgttgcgacctcgcatagtttattgtggaacggattaacgccggtcttcgctgatatcgatccccaaacctataatattaatccggatcgcattgaagaattaattacgcctaacaccaccgcaattttgcctgttcattgttatgggattccctgtgacatcgataaaattcagaaaattgcagatgtgtacggtttgcgggttatttatgacgcagcacatgcatttaatgtccgcaaaaacgatataagcattttaaatcacggtgatttgtccgtactcagcttccatgccaccaaagtctttaacacctttgagggcggggccattataagtcacgatctcaaaaccaaacagcgcatcgattaccttaagaattttggctttgctggtgaaacccgcatcgtggctcctggcattaacgccaaaatgaatgaggtggaagctgcattcggtcttctgcagcttaaacatattgataaagcactggacgaaagaaaggcgatttatcaacgctactgtgaaatgttagccgggctggaaggattaacgtttgtcgacgtacccgacgatgtgagctggaaccacgcctatttcccggtgctcatcgaaccgcatttcgggatgagtcgtgatggggtatatgagttatttaaagcggatgccattctgacgcgtcgctatttctacccgctcatcagttcatttgccatgtacagaggtttccctacttcggcggaagaacatctgcccgttgcgaatgatatcgccggaaaggtgctgtgcttgccgatttatccaggaatgacgctggaagaacaggatcgggtcgtgaatgctctgaagcgtgcttccctggtaggacaggcgcagggtaacgaaccgacaccagtcacggagattgcggtatga

SEQ ID NO: 122846 - DNA, 3351 bp, Enterobacter cloacae
gtgacgacacagtacccctattatcgggtcagccccgagaccattcatgccgctgcggtgcttaatcatctgaccacgccactgcctgcgtttgcccgtgtcatggagattggctgtggttcagcaacgcgtctgattatgcacgcatgggcgcatcctgagagtatcgctctgggtatcgatattgacgaagaggcgatcgtgaaggggcagaagtttgctgccgaactgggatgtcataacgttgaactgtttgctgcaggattaggggatttgctcgctgcggatccgggtgagttagattacatcattattcatcagacctttggttttcttggaaaaagcgaacgggaagcgttgctgacatggtgccaggcgcatttatctgccaacggcgttatcgccattaagtggtcagtactgcctggcagcatagcgcgcataacgttgggtgaagcgttgcggttccatcttgaacgcgcagaagagggctgcgacctgctggcgtcagcccgcgccatgctgagctttatgttgctcacgctggaagagggttcgctgaaaaatgaagtccttctcgctgaagaaatggacgataacgcgctaattctggcctatttaagcccgagtgacggggcatgcaccctcggggattttaacgcacaggctgaactcgccggtctgcagttcctgggcgatttgctgccacagtcggaactgggaagcttctacagtccgagaatcgaacagttactgggtgccgtcagcgacggggcaagcagaaccttgtcgcagcaatatcttgattacgccgttcaacgcgaagaacgcttttccttgctgtgccacctaaatcgcctctcgccgccggttcacccggatctgaacctcctgagaaacctgcactgggccggaagctttatgccgatcgaactggattctgcaaaagcgccccgcgtgttcagaaataataatggacggatcatgcgtaccgacaatgccattattatcaggatcatggagttgttgggcaatgcctggcctatgtccttaagtttcgaacagcttgtgctcaattgccgggctcctgaaacgcatgaggattatcaggagacggtgtgggaagcattaaaaacgctgtttatgacctgtgctgacggatttttctggagtgccagccctggggcatacaacgctgcgcaaaatgatgacctggcaccggtagggttgctaccaccagcgtgtcctgcgaacaatgtaagcatcatgaacctgtggggagagtgggtttcattgacccccgctgagtggaattatctgcgcttcgaaatggggcatgccgggcagacgaactgggaactctactcttcattgaaaattaaagggttgctaaccggctcgcctgaggcctggaaaaagcaactgcagtgttttctgcgtgcaggcatgctcgacgtactgaaatcgcaactttctctgttgttgttgcttagtgtcgatcaacagcagggcggaatgcttatcaagagcaatgccgaacccgtattagccgacccggacgtggacgctatctacgagcgcgcaaacagccttatccaaaaaggccgttctaaagaagcccgcgagtatgctcgtgagttaatggaaaaaaatccagacaatattcacgtccttcgctgctattcaaaaacatgcgtgctgacttccgcctgggatgacgcgctggcgtcgctttgtaaactgatgggctattatttctcgagccttgatatctattatgatcttgccacggtgttgcagcgtaagcgtgaattctacggttcacggcaaattgtccgcaccttgcttcgtctgaataataaaaatattgattactggctaagtctggcatcgctgcatcatgcctatggcgatatggcattagcggaaaaatgctgcagggagattatgcgcttccagcacccggggcccagttcacttgggctcaccgggattgtattgagtgacaaccataaaatggcagaagcgcgctattttatggaaaaggccgtagagcttagcaattataatttcggctacttcagtaacttactgtttgtaatgagccacgacgctagcgtaacggccgagacgttgttggaaaggcaccttgaatacggccgccgcgcagcaacctgggcaacagagagcggggtaaaactggttctcaataattccagagaacctcagcgtaagcttcgacttggctttgtttcaggcgatttgcgtaagcatccggtggcgaattttcttctgccttattgggatgccatcaatcgtgaacagtatgatttggtggcctatagcaccctgttccttgaagaagatgacacgtattgccaccttcgccagagcgcaacgctatggcgtcaggttgatgctatcagcgatattgaactggcgaaactgatagctgaagacgggattgatattctgttcgatttatcgggtcatacagcctacaaccgattgcctgttttcgcgttgcgtccggctccgattcagatcacatggataggttatccgggcacgacgggtctgaaagagatggactatatacttctttcggcgagcctggcgcagtctcaggagcttgaaaaacagctggtagaaaacgcgatgttcgttgcgacacgcaagagtttcgaacctcatcctctcagtccggacatcaatccattacctgcgctgcgtaacggttatattacctttgccagttttaaccgctctaaaaaaattaacgatcaggtgctgaatgcatgggcatctattttgacgggttaccctgaagccaggctgttaatcggtaacatgactgatgccgaaatgatttcggccatgacaaaacgcctgcaacagcgcggaatttctcgcgacagattgctcttccggggactcgtggaaatggatgagtacctcacgatgcaccatgagattgatattttacttgatgcattcccttatagcggtggaacgacgacgcatcatggcgcctggatgggcgtcccgacaatcaccatgaatggcccgaccataccgtgtcagcagggcgtcgatattatgcgttcttatagactggagcagtttattgcgattgatgaggaagattatatttccagagcaatcgcctgggggcaacgtattccagaacttgctgaaatccgactggggatgcgagacaggatccccgtagaccacgggccagattttaatattgcagaaaactttgaacgggcgctgcgtgaagcgtggggaatttattgtcggggagaagagccgcatgcgtttctcatcactgaacagcattcctga

SEQ ID NO: 122847 - DNA, 1410 bp, Enterobacter cloacae
atgagtgaattcgcacgtagccgggctatgcgtcagttttatcggaatgtgtttacccgattcattgatctgccagaagcagatgttatgcccgccaacatcacggccgaaattttcagttttaaaagcactaatttcactgcgctcgaacccatgattcgtgtggccgaaacgggactggatgctgaaaaggatacggctttaaaagacatgctatgtgccatcgtgctggcaaacaccgcactggatgagtccgtcattggcgaaaaacagactctttctgccgagatgagtacccaactgacagaatatattgtgtcggcgttaaaagccgatgacaacattcactatcttgtcgccgccattcagcttctgttccgcgtcaatgaaatcagctcagcgttatttttaattaacaacaacctttcgctggtcagcaattcggcacctgtgctgaaaatcctgctgttgatctgtttaatggaaaatgatttcaaccaggcgatggttgttatccaggctctgacggcagacgctgcattaatcggcgaagatcctatggccctgttgatgattacctgcggcatctacaggctggggggcatacccgattcgtacatcgattttcgatcgcttcatgtgagcgagcatgcggtggaaaatcaatcctacgattactggatcgcaaaaagcacagctgccaaaacaacggtgctagtcacgtgcgacagcgaggattatttcgagcacgctgtgccgatgctctattcactctatgagaccaatcgcgacgtccttgatgtgcacgtgcatctaattaacggcaatgatgatgttaaacatagcctgatgacccttcgcgaacagctacctgagctcaacctctctgcaagccatgagcaaataacccgtaatgaggacatgtcggtagtccgtgctgcacgtcgcatcgttttcctgcaccacgcactgcaggcgtttaacactcccattattgccattaaccctaatgtgctggtgcgtaagccgtggtgtgatccagaaacggcgctgttgctcctgcaaaccgaatcctcacctttctgggaagaggtttttgccggttttatttacgcaaaacccggcggcgtagcgcaacgatatttcgaccgcgttgtgccgttcatccataccaacctcgccagcggcaatcatgcgcctggtctggagcaagtcgcactcttttcctgtctggacatgctttcgccagaagaccgtctggcgatcgcgcgtgccgagcgtagcggaatactcgatagccagtcgggtgaggaggcgttctgttgggtggcaaggaacacagcaggcccataccaggaatataaatcgtcgcttattcgcacgtatcaagctgaagcatttgccctgtga

SEQ ID NO: 122848 - DNA, 837 bp, Enterobacter cloacae
atgtcagttatcaatactaacctgttgtccctgaccactcagaacaacctgaacaaatctcagtcttctctgggcaccgctattgagcgtctgtcttctggtctgcgtatcaacagctctaaagatgatgctgcgggtcaggcgattgcaaaccgtatgaactctcagattaaagggatgactcaggctgctcgtaacgccaacgacggtatctctctggttcagaccgctgaaggtaacctgaacgagatcaactccaacttacagcgtatccgtgagctggctgttcaggctgcgaacgatactaacggtaccactgactacacctcaatcagcactgaaattactcagcgtctgggtgaaatcgaccgtatcgctggcgctgctaacttcaacggcaaaaaactgctggacggtagccagactgcttctctgaacatccaggttggcgcaggtactggtgcaactgatagcatcgctatcaccactggcgcactgattgatgctaaagctaccagcctcgacactggcctgaccggtactatcaccgataacagcactgctaaagctttcatcactgcagctgacaacgctatctctaaaattgataccgctcgttctaacatgggtgcgattcagaaccgtttcgaatctaccattaacaacctgaacaactctatcactaacctgtctgctgctcagtctcgtatccaggatgctgactacgcaactgaagtatctaacatgtcccgcgcgcagatcctgcagcaggctggtacttccgtgctgtctcaggcaaaccaggttccacaggcgatgctgtccctgctgcgttaa

SEQ ID NO: 122849 - DNA, 1419 bp, Enterobacter cloacae
atggcgactatcagtaatctcggggtgggcatgcccggcctgtcagatctgtacgataagctgcaggcagcagaagaaacaaaattgacggctattgccaagcaaaaaaccacctacgacgcgcagattaccggttacggcaaattacaaagcgccctgacgaatctgcaaaccgcagctgctaagctcgcaaaaacagatacgtggaactcaacctccattagcagcaccaatactgcattttcggctatcagcacctccggcgctaacgttggtgatgtgacagtcaacgtcagcaagattgctaaaggccaggtgctgacgaccacgccaggcactatcgacagcaatactaagcagttaggtggcaccacgggcaccaacagccgaaccattaccattacccaggcaggcgctgacagtaaaccactgacggtaaccctggccgatggcgatacctccctgaacgggatcgctaaagccattaacgctgccaacggcggtgtctcggcaagtgtggtgaaagcggatgatggcgactatcgtctgatgctgacctccaaaaccaccggtaccgattctgatatgacggtaacagtgaccggcgacgatacgctgaaaggcatcattggcagtggcgcacttaccgaacaggtgaaatcacaaaatgccgtcgttaacgtcaacggtatccagattgtccgccagaccaataccatcactgacgccattccaggggtaacattaaccctgaaagcacagagcacggccgatgaaaccctgaccgtaacccgctctacagacgataacaaaaaagccattacagaatgggtaactgcctataactctctgcagtccaccattgcctcattgacgaaatatgagccacctgcggtgggtgcaaccgcccagtcttcgaataacggcgtactgatgggtgacagtactatccgcggagtacaatccgatctgcgtgctttattgaccaatgtgcagagcggttcctatgccattatggcccaacttggcatcacacaggacccggtcaaaggcgcggacggcgcggttggcaacctgaaaattgatgataagaaattaaccaagatcctcacggatgacccggctggcgctcaggcctattttgtcggggatggtaaaaccaccggtttcgccacccagatgaacaatacgctgactgacatgctgagcacctctgtaggtaaagaaggcgtcattcagaatgcgaaggacggtattaacgccacgctcaaatccatcggtaaacgttatgacgcgatggagttgacgattgaagccacgatggcgcgctataaaaagcaatttaacgatttagataagttggtcacaaaattcaatggtacggccacttatttgacccaacagttcagcagtaagtaa

SEQ ID NO: 122850 - DNA, 405 bp, Enterobacter cloacae
atgtatagcaaatctggtgtacaagcctatcagcaggtaggtcttgaatctgctgtcttgagtgccagcccgcaccagttggttgtcatgttgttcgacggtatccatagcgcgcttatccgggcgcgccttttccttgagcagggggacatcccggcaaaaggagaggccctgtctaaggccattaatattatcgaaaatggccttaaggctgggttaaatatggatgtgggaggagaactcccccgcaacctttctgcgctttacgactatatggtacgccgtttgttacatgccaatctgcgcaatgacatcgaagctattaccgaagtcgaggctctgctgctcaatatttccgacgcctggaagcaaatcggcccgggttatactcccaagcaggattaa

SEQ ID NO: 122851 - DNA, 363 bp, Enterobacter cloacae
atgaacgactccagcttatcccttaaaaagtggcatgctctttatgcgcttagcaatacaatgctgagccttgctcaatccgggaaatgggatgagctcatcgaacaggaggttgcatacgtttcgctggttgaagagatcagcacgactccttttccgcccgacagcaaacacatccaggatcaggcgatggtgatactgaatcaggtgctgcagaatgagctcctcctcaaggatttgttgcaggaaagaatgagtgagttgagcggtcttattgcccaaaccaacaagcaaaaaaacgttaacgttacctacgggaagttgtcaggcaacatattatttcccggagagatgaatcattaa

SEQ ID NO: 122852 - DNA, 414 bp, Enterobacter cloacae
atgaaaaaaatagcaattgctggcgcgctgctggcactgaccgggtgcgttcaggtggataactatcaggaagtgatcaaacaccccgtcccggcgcatctggcagggtactggcagtcaaaagggccgcagagcaaaatggtgagcccagaggcgattgccacgctggtggtgacggaggagggcgatacgctggactgccgtcagtggcagcgcgtgatcgctgtaccgggtaaaatcatgctgcgttcagacagttattataacgtcacccgcaagctggatatttatccgctggagcgcgatggctctgttcttgagtatgatggtatggagctacagaaggtcgatcgcccgacggtagagtgcgcagattatctgagcaaaaatccgctggagagtaaacttccgtag

SEQ ID NO: 122853 - DNA, 672 bp, Enterobacter cloacae
atgtgtggacgatttgcacaagcccaaacccgtgaagaatatctggcttacctggccgacgaaggcgatcgcgacatcgcatatgacccggaaccgattggacgttacaacgtggcacccggtaccaaagtcctgctgttgagcgaacgcgacgagcagctgcatctcgatcctgttttctggggctacgcgcccgggtggtgggataaaccgccactgattaacgcacgcgtcgaaacggcagccaccagcagaatgtttaaacctctctggcagcatggccgggcgatctgcttcgctgatggatggttcgaatggaagaaggaaggcgacaagaaacagccatacttcattcaccgcgccgacggccagccgatttttatggcggcgatcggcagcacaccattcgaacgcggtgacgaagcggaaggcttcctgatagtgacgtctgcagctcataaaggcctggtcgacattcacgaccgtcggcctctggttctgtcgccagaagcggcccgggaatggatgcgtcaggacgttggcggtaaagaagcggaagagattatcgccgatggctctgtgcctgccgacaagtttatctggcacgccgtgacgcgtgctgtgggcaatgtgaaaaatcagggaccggagttaatcgagcccgtcacctga

SEQ ID NO: 122854 - DNA, 1266 bp, Enterobacter cloacae
atgtttgcacttgttgatgtgaactcgttttatgcgagctgcgagacggtattcaggcctgacctgtggggtaagccagttgtcgtactctcgaataatgacggctgcgtaatcgcccgttcggcggaggcaaaaaaactcggcattagaatgggtgacccgtacttcaagtgtaaggactacttcaggcaacatggcgtggtttgcttcagctccaattacgagctttacgccgatatgagcaaccgggtgatgaccacactggaggagatgagtcctcgagtagaaatatactcaatcgacgaggccttctgtgacctaactggagtgcgaaactgccgggtgctggaagagttcggccatgagctgaaagatgccgtgcgcaggaataccggtctggccgtaggtgtcggaatcgctcagacaaagactctggcgaagctcgctaatcacgcggcaaaaacatggaaagctactggcggcgtggtggacctgtctaacgtcgatcgtcagcgaaagcttatggctttactgccggttgatgaggtttggggcgttggccgccgcatcagcaagaagctggaagcgatgggcatcaaaaccgtgctcgacctggcggacacgcatatcggcgttatccgcaaacacttcaacgtcgtgctggaaagaacggttcgcgagcttcgcggcgaaccatgcctggaactggaagagttcgcgccagttaagcaggagatcgtctgcagccggtcattcggcgagcgagttaccgaatacgaacagatgcgccaggctatctgcagctatgccgccctaggcgccgaaaagctacgcggggagcatcagtattgccggtacatatctgcattcgtgaagacgtctccgtttgcgctgaacgagcggtattacggcaacagcgcatctgtgaagctgctgactccgacgcaggatagccgagacattatcaacgcttccacacgttgcctggacgcaatctggaaggaaggacaccgttaccagaaagccggaattatgctcggtgacttcttcagccagggtgttgctcaacttaacctgtttgatgaaaacgccccgcgcagcgacagcgcaccactgatgaacattctggatcacctcaatgccaagggtggaaaaggcacgctctattttgcaggccagggcgtgcagcagcagtggcagatgaagcgagaaatgctttcgcctcggtatacgacgaggtactcagatctgcttgtggtcaggtga

SEQ ID NO: 122855 - DNA, 426 bp, Enterobacter cloacae
atgcatgattttaaccatctaacccgtttttttgagtttatcaccttatctggacttgatcgatatagacgatcggcgatactgtatataaatacagtactcattgggggggtgactatgccacgcacagcagacatgtatgccgcttttgttgcggtttcagagccattaattcctccttctgcgaaaatcgttgaaacgccggaaggctatgatgtcattgagaacaggacgatatttgagcgcggaaatacattgctcatctggttttgcggccgccagcagcatgcgtattgggctggtgacgccctcattaccgatgatggtgaggctatagaaggcgaggctcttgatgatgttcgccttgttgggatagtcactcataccattagccaggtatgggtagacgacaacccggtgatgtga

SEQ ID NO: 122856 - DNA, 981 bp, Enterobacter cloacae
atgaatctattcaaaccgtacactttccatatgcctttgttcttcctgataggcggtttaaccctaaattacaataaaccattaaagttatttacaaaaactgtttttaaatcgttaataatatatgcagtaataacatatataattactgggatagcatcagaaataatatcttttgaatataatttaccagtatttgccaatgcatttatatctgacccaataacaactattaatacagcatttaaatataactttgccaacaataggctttttgtagttgcatggtttttgttagcttacgctttagcctcaatattttgcacattaatttgcaaggcggtgaagaaactgaacctggaaggtggtggcgctgtgatcttttgcgcaggaatactgataggttttgtggctatagatgtttttagtaaaggagacatatatcaagcaaagaatgttatgacccaaactatggtggcgctgatgttctttatgattggatgtgctctacgcgaatatatgcaacttttcagtagcccattcctggcgctgtctgcttgcataatagtctatctattgcgtaattatggaatgacaagtgattttataatgtcattatcctcttacccttatggtgcagttgttacaatcacgcaatcactttgcggaatctacttagtaatgtttatttcaaatttattatcaggcgaaaattaccaatggatactgtttgtaggcagaagaacaaagacgattatgtcttatcatatccttgtttttgtcttacttgacatagtgttttataaggctggcgtgtacagcatttctaaaacagatgctttcgtacactttaaatcatggtactctgtaccattatatgtatcactatccatcgcgataccagccttatgcaattcaatttatgttaatgttaaaagtttcgtgatatctcaatccaggtcgtatcggatgagtacataa

SEQ ID NO: 122857 - DNA, 1989 bp, Enterobacter cloacae
atggctactacaccaacaaacctgccagttccaagcgaatcaccgattgacctgaaatacaacgccggcaaaattgacgagttcgtaacgtctttggcgctgcaatacatcgatcgctttggtaatgcacattacaccattgaaggcctgcgctggctcgcgcagcaggctatttcccaatatggatggatcctcattgattccttccaggacggagcagatatcactctcccaaaccaggcgctgcgtgacgaagttacgggagaatactaccgttgggatggggcattacctaagcatgttgatgccgggtcaacgccatcttcttctggtggcgttggtactggtgcgtgggttggtatcggtgatgctgcattgcgttccatgctatcgcagcaggacggggtgaacatcgttaatggggcggtcaagaacgttccatacttttccagccttaaaaacggccatcatggattgtgcgaagtcattatgactgttgaacaccacgccggagggcttgggggagcaagttatcgccgtagcggcactaccggaacgccgtcatccggtaacgaggcgttggtatatgacgcagatggtaatggctggaagatggttaaacagcctgtgcaaagcgctcgtgctttcggggttttgggtaatggtgtagatgacagggctgctttaagacgcgcagtagactttgttggccaggctggtggtggggtggtttacatcgaggctctttctggatttgatgacgtgaagatttctgacacgcttaccattgtgtacagcgggttagaaataagacttgaccctacggtccatattcacacagaagcagcaacgacagatggcggagccattcatttttcagggccattgaacaacgaaaccacccgattaaagcgagttggatttgttggtggcaaggtgtcagccaacggctcagggatcctcgataatgccattggtttcagcggctgcgaagatttttacgtgttcgacactaatgtccctcacgcagacaggaaagcgctgacggctcaggttaacgttgttaacggccatttcaggaactgtcagatcgggaccactggatattctgccattacgttcgaaggtgacacgcttggtgctgggattattagtcgtggcatggtaattgaagactgcactattgattctgccggtctttatggggtaagcagcgaggggggtgttaaccatgagaggaatgatagggtaatagttaagaatgtcagggttggtcagtcagtaaaaagtgcattcagattcctggacaccaacaatatctacacggacaaaatgtgtcgtgctgttgccgccggtatttacggctttgagtacagttcttgcaccggaataaacggttatgcttattcacttaactcacaacaggctggagtagtttataacgcctgcagcaacgtagatcatgacgtaacaatcagtggcgccggtctaagcggtgctggcgtctatgatgcaatttatactcaaaacccaacatcaccacatgtgatcagggcttacgtatcagggacgactcaccgttggacggtaaataactcaggaacacctttgcaacatttgatcacgttcccaaacaggtcattcatggtatccggcacaagtggcctcctgaatggtggctcaacggccatcattgctacagactctggagaggtaacatcaactgcaacggctaacccatctgttgctggggttgataacttgcttctaaacccaccgtcagcatttactttgacatcactgtcaaacccgtatgtaggtaaaaaagttgccgtcaggtttgctacaagtaacgttactgtccagcacgcagctggtggaacattcagattgaagggggccgtaaatgtgaccccggcagcaggaagcgttatggtctttatgtactcatccgatacgacctggattgagatatcacgaaacttttaa

SEQ ID NO: 122858 - DNA, 2484 bp, Enterobacter cloacae
atgccggtaatcgaaattcagcgcgtcccggggatgccgaaggacagggcggaagttgaagcagggacggtgttttatgactggctaatgcaggaaagtttccaccgcgatatccgcatcaacgttaacggcaaggagctgcagcctgaagaagaactgggctttattcttcaggaaaatgaccgggtagtcatttttgaccagcccaaaagcggcggattgattggtaccatcctgaacccgctcgagcacctcaacccgataaaatttactcagaaagtactttcagggctgatgccgaaagcaaatgcgggcgctgcaggcggtaacagcaaaacatcgcctaacaacagccttaaaggccagaccaacattgcgcgtaatggcgaagccaagcctgataacttcggtcaggtacgttctttcccggatctggctcaggaatcgctgttcgaatatatcagcaacctgaaatacatcactgaactgatggtattcgggctgggtaaatacgacgttacgtccgtgcgtttttcagagtcaaatctcggttcaatggccggggcgagctacacaatttaccagccaggtgacgttatcccggtggtgaatgaaggctaccagtttgatgacgttgacgggcaggaagtgccagggttaaacgagagcggcgatttcccggttgaaacggctactgcaaacactgttatcagcggtgtctatgccgggggccagatagcgatgaaaatcgtaaaacaggcatccttcgattactttgccgatctgactttcccgcacccggtgacattcaccattaatgtgacgtatccaatcactggcggcaccagaactgaagacgtaactctttctggcaggctgatacagtttcaggaaacaaacgacggagcagtggttaatccgacctattactacaccttcacatttgaccgtctgaatggcccggccatccccattcaggatgcaaccatcaatacgacgaagttcatcctgaatgataacgctgcgctgatagtggggccgtttttctcgccgattgcatcaggccagctatggcttcacacgcagtccggtctcggcggtaacagcgaaacaaactggaaggtaacaatctggaaagttgacgacagcaataaccagatcccaggaacagaacaggtgtttacttaccgtcagacaacgcctcatgactacatgtcagagacgtttaacaggacggataagctaattcctgccggtggatatgggcgctatgcgatcacattccagaggactgataacagcagtgacgccagcaaactgcaggtagaagaaatccatgcagtaaatgtgaggacaaacgtcgttcacgctgaagattcgctggtaatggtaaaggtccgggccactgaaaatgcaacgagcggccgcgacaggaaatacaacgcgctgatcacccgccacgtcatcagttacaacatgacgacgcagcaggtagattacacgctcaggccatcacggaaatttgcagatatcgccctgtttaactggctcgttgtcgggcagcaaccggtatccagcattgatatcttcggcttgtaccagattcaggctgagatagacgccatcgatccacgactcggatacttcgattacacgtttgacgatgaggatgtgtcgctcggctcgcggatggagaccatctgtgacgctgccagcgtgtccgtttatgacgataacggagtactgtcattcacccgagacagcaggaaaacgtctgcggccacgatattcaaccgctcaaacacaaagccagatggttactcgctatcttacgacatgacgcttccaggcggatatgacggcgttgaagtgcagttccgtaacccggacaccaataagcaggactttgtccggtaccggatatcagggagttccatcattgaaggatcgccatccaaagcgaagaagttcgaaatgctctacgtcaggaacagattccaggcggatgagcgggcgcttcgcgagtgcaaaaggctcatcttctcccgtatgaccatggctattacagcaatggctgacggagaatgggttaatattggcgacatggttcaggtgccggatacatacgacaccaaccagcaggcgggctatatcgtttcacgggtcggcaatgacttcgagacgagtgagcgtatcaacttctccgggactatgtttgtacaggtcacggattcaaccggcgctaccacagccagatacccggcatctccgcgcgctgacaccgcgtttggctttactgctgccattccagacattgatctgaacctgtttgacggcgttgacgtccagtcgccttcccggtacgtcattgccacgtcacaggagcttgatgcagggcagtggaccatcaccgccaagcagccagacggcaaaggaaataccgccttaaccctcgctgagtatagcgacctgatttaccaataa

SEQ ID NO: 122859 - DNA, 438 bp, Enterobacter cloacae
atgcatagagacgagtttacttctcgaattgagggcgtgccatggagtaaccgggcgtgcagtttcgacgcagcagactgctgggggctggtggtgatgtattaccggcatgttctcggcatcgaggtacaccagaccgcggactacgaatccgggcgcgacttcatgacgtgctatgcctctgatgtcgtgttctggcagcgaagagaaacattttgcgatgaagggatcttcgtggcctgggtcggcagtcaacccgtgcatgttgggatgatactgggcggccgggcgctgcacagccgcggggaaaacgggcacgtcagatttgacgcgatacggacaattcagaagctattcaccagagtggagttttaccagtatgccggtaatcgaaattcagcgcgtcccggggatgccgaaggacagggcggaagttga

SEQ ID NO: 122860 - DNA, 471 bp, Enterobacter cloacae
atgcccacattgagagaatttcagagccagagaccgaaccggatactttacgagacgatcaccttctacaacgagacgtttggatatgtgcgtctggtgaacaaccagatattccccaaaacgctcggcggtcaggtgttcactccgtgccggatggagcttacggagagccagcaaagtaatacgccggtactcgacagcacggttaaatttagccgcctggcgcaggactttaaacagaagctgaaactctggaaggcgcattcacgcatcacgcctatatctgcaacctatcaacagtttgacgctgctgacatgagcacggctatcaagtcctggacgctatatgtcaatgactgctcgatggatgacaaggacgtaacatgcagtctcacgcgcattaatccgctaaaccggaacgttggccgcctgtacaccgtcgaagaatacccggggcttcagaatgcatag

SEQ ID NO: 122861 - DNA, 495 bp, Enterobacter cloacae
atgccaattccatatcctgactggctgcccctggcgcaaaaaggaaaaacgccgtcgaccgataccgggtttcggacagaccagccggcggtcggcgcgccaatatttcagaaactcaccgatgacctgaaaaccactttctctcttacgtggatattcacccgggatcagcatagggccttcatgcagtggttgcggagcccgaactacctcgataactgcaatcagtggttcacgatgcgcctcgggaccggtactggtgacacagggatagaggttcaggaactgcatttcctttcctggccgacatggtcgcagtccggatccatttttacctggagcggtgatgttgtcgcgcgacaactggttaactctgatgatgagtttgacgacattattgtcgagcttccgccaccgtggggttcatggctcgatatcatcgtcaccggttatccggatggacgtgatccggaaagtctgccgagggttccgtaa

SEQ ID NO: 122862 - DNA, 672 bp, Enterobacter cloacae
atgacagctttaaccgatattggcgaaatctctatcagcgacagccgcgagggcgggaaagactaccttctacggccctcatttgaggctatgacgaggatcggtactccggaagagattgtgcaggcctacgccaccatacatggcagtgacgtcgcccagcttattgaggtctgctctggcacgcttgggcgattccctgcatggctatctccatcattcaaccgcgccgctgagaagcttttctttgcatcatggcaagttttgcaggcctgctgtgaagaagatttgacgccaatgatcggcgagtggaaagcatggagtaactgcgttgtataccgtcctgggcagatacctaagaacgacattatcgtgctggctcaacatctcatgcagcacggagttgtcgggaaagcgaaggtaaggcagctacaaaaacacgaaacgggcgagaagacaaccgagtttagggcgctggattacatcgtcgccgcgcagactcattttaggatgagcgaggcagaggcggtgaggctgacaatgacaaaatttcagatgctactggcagcgaaatacccggatcagaaaggttttactcgcgaagagtacgacagtatcgccgacgattacctggctaaacaggccgcgcgaagggcaaaagcaaagcaataa

SEQ ID NO: 122863 - DNA, 744 bp, Enterobacter cloacae
atggctaattgccagaactcgaacgagcgcctgttcggcggtgcggtcgtgctggaagtcgccgatggctgcccggacgtcaaaccactcgaaggtgagtggatggcgctggccgctggtacgtcgaagggcttcgacttcaacccgaactcggttacctctgatgcggatgacggcggcggctatgtcgagaccatcatcaccaacagtgacttcactctgagctttgaaggcgaggtgcgcaagaaggacaagctggatcagtacggtgttggcaaattcatcaagtatttcgctgacgagctgaaggccaagcgccagcctggtatgtgggttcgcatggattacggtccggtcgaattcgttggctacatgaacatcacggcactgagctctgacggcggtactaacgatatcgtcacattctccaccgagttcaaagtaggcgatgcaaccacaatcgaagtgaacgagctgactgcggtagcagtgactggcgtgacggtaaccccgactaccagcaccggtacggctggcggtaccagcaccttcactgtgaacatcgcaccaactggcgcaaccaacaaagacttcactgtagcgactaccgatgcgaccaaggcaacggccaccgcctccggcaacaccgttaccgtgacgcgtgtcgccaccggcagcgcgcagatcatcatcaacaccgaagacggcaactttgtggccgtgcatacggttaccgttacttaa

SEQ ID NO: 122864 - DNA, 228 bp, Enterobacter cloacae
atgagcagagatacattccaccactgtgaagatggccgtgggcatcggcaggtatttgttaatggcaacaaaattagccgtgtcgtatgggctgatgaagatagaggggttgtgtgttttcatcctgaaccgcttagatgccataggcgaggacctttgcgtgtgtattctcgcaaactgcgcggcagggtgacggttgtctttaatgacgaggcgaaaaccaaatga

SEQ ID NO: 122865 - DNA, 366 bp, Enterobacter cloacae
atggcactggtagaaatcacggcaggtaacgtcttcgccggtgccaacctccgcaaactggaggttggtgcggtagtagaagtcgacgatgcgacggctgctcgctggaaagcgtctggcaaagcaaaggacactgacaagaagaagggcgaaaagttggtgtttgaggtggcaacgccgtcagcacctttaggtgatttgtctggtctgcaaaagcaactcgccgacgcgctggagcagaaccaaaagctaatcgccgatggtgaagtgaaagacaaggctcacgccgacgcgctggcagcagaaaccaaacgcgcggacgaggctgaagcagcactggcggaagcaatcaagaaggcgaaataa

SEQ ID NO: 122866 - DNA, 1086 bp, Enterobacter cloacae
atgcttgtattttctcgctctatcggtgaacgcaccggtaacctcgaagtcaaccaggcgcagttccgcgagctggagatggcgcgcaacatgagtgcgcagtctgtcgctgacttcattgcccgtgctcgcttcggtgaaaacggacacctggacgcggtgaacgcggttgatgatatccgccgcatgtaccgtgcgtacgaccagacagtgctggcacagttcgagccgaacaccgaattcaccctgttcaacgacctgatgccattgtcacgctctgtccgcctggaagagtcagtgtacgaatatgcgcgtaccggcggtcgtggctgggcgcacacttccatgtcaggccagatcggtgcggcgctggatgctcgcgcgtacagctttgacggcaccatggttccggtgcacgacagcggcttcaagttccactggcgtgatccaatcttcaacaaagggtcagcgctggcatcgcttgccgatgcgcagcgcggctctgttgatgatgtgcgccgtaaaatcgtggactacatgttcaacggtttccgcgactcggaaggcaacttcgttaccttcgatggcaaaacgtggaaaggcctgaagaacgatgagcgcgtcggccaggttgatttgggcgcatctggcctgaacatcgacttctccagtcgcactacaaccgcagaacagaaccgaaacggtgcgatcgcgctgcgtgacaccatgaagatcaccaataaccagtacgcgccgcagacctggtacgtatccagcgagatcatgtccaactgggagcgctatttcagcgacaattaccagtccggcaccatcctgcaggaaatcctgaagctgtccggcattgccgcagtgaaagaagacgccgaactcacaggtaaccagattttggtggttcctctgactgccggcgttatcgctccgatcactggtcaggctgtgggcactgttgctgaccctcgccagttctataacagcgactacatctggcgcacctggggcgctatgggcctgatggtcaagcaggatatcaacctcaaacatggcgtgctcttcgcgagcagctaa

SEQ ID NO: 122867 - DNA, 432 bp, Enterobacter cloacae
atggctaaagacggaaaacacgtaattcacgccggtggcgtattccctaatccgctgcttaaccgtgaaggtgccgcggcggccgccaccaagccaggtactgttggcttcttctccgccgccaagttcacggcctcggttgatggcaacgaagaggcgatcctctatgtcgctgactttgactatctgcgctgccagacggttgacgacccaatccctgtgaatgagttggtggtgggcatccatccgatgccgggcatgttccttaacgtgcgcgctgcggcaggcacctacaaaaaagggcagccattatccatcgcaaacggccaggttaaagcccatgccacaggcgagtccattcgcgcatatgtcgaagaagacacggcgtacaccgttgctgcaggcgatctgctgcgcgtcgttatcaagtaa

SEQ ID NO: 122868 - DNA, 1398 bp, Enterobacter cloacae
atgaaacgcaaccgcgttaacgtgctgaccgtcgtcaactccgcttcaaacatcaccactgaaaccatcgacggcaagccacatatcgtggttcgcggcatcacgcctgtcgtggacgatatcgtgatgaaccggaagttgtacccggcagcagaaatcgaaaaggcctacaacacgctcgagcgtaacccgatgccattgggccacccgaaagtcgacggcaagcatgtgtcggcacgtgatgtccgggcggtgaacgagtaccacgtcggtgcctggttgcagaacgtcagccacaaagacgggaaggtgatgggcgacatgtacgttaaccgccagtacgccgagtccagcgacaagggcaagcgccttattaaccgccttgacgagatgctgtccggcaccaactccgacccgatccacatttccaccggtctgctgtattccggcattgccgccaacggtgagtcgaagggcaagaagtacaacgagatcgccaccaacatgatgtttgaccatgtggcagtgctgcttgatgagcccggtgctggcacgccggaggagggtgttggcatcttcgttaactcagaaggtgatgagcagcagatcgaggttgcccgccttgctgatggcattgactgcacccgtgacggcctggtcaacaagaccaaattcttctttaccaacgcctctaacttctcattcgacgacatctcccgggctatcagcgacaagctgcgagagggtgatgccgaagataagtggctttggcctgaaacggtgtggccggacagcttcatctaccgcaatgacaccaaatacctgaagcagaagtacctcatcgatgatgacggcaaggccgtgttcgtcggcgaacctgtagaagtcgtgcgcaaacccactgagtacgagattaaaaccaacggagagaacgatccgatgaaagaactgattatcaatgcgctgaaagccgctggtaagccgaccgatggcaagtccgacgacgagcttatggacgcatacaaccagatggcagccgaaaaggcagttgcaaaaactgagacgcctgaagagaaagctgcgcgcttgaagaaagaggctgacgacaaagccaaagagcaggctaacaacaacgaagagatgccagcgtgggcgaaggtcctcactgagcaggtcaccgcacttaacagccagatcaatgccaactctgacaaagagaaagtcgaaaagcgtgctgcagttaaagaaaagttcaagcttgacgacatggcggtaaacgcactcgacggtgctgcgcttgatggcctttatgcgcagtgccagacctccattggcctgaacggtgcattccgccaccaggtaaccaatacccaatcagtcagcgaaatgccggagtaa

SEQ ID NO: 122869 - DNA, 354 bp, Enterobacter cloacae
atgattaaaaaggccatgctaattggcgccattggtttgttcggtgcgcaggaagcgcaggcaaatttttatacagggaatcagctttttgcctggggcgaatccttgatgagagtcagagaaaacagaataatgggttctgatatcagcgacgcaaacatgtattatggatacgtatcaggagtttacgatctaggtagcggtgtacttttttgcgccagcaatcaacttaatctgaaccagatttctgacgtcgtatatcaatacttgaagcaaaatcctaaacgccgggctgaaaacgcgtctgatttagcagttgacgcccttagtgaggctttcccttgtaagaaatag

SEQ ID NO: 122870 - DNA, 177 bp, Enterobacter cloacae
atgacaacaaaaattgcagaattagattatacaaaccgtgctggtgagttcttagagcatctggctgaaaagattaaatctggggaggcaactgtgattgaaggtaaatcaagagcgatttcagatgcgccagaatacgttacgcacactataattgttaaaattattaaagactaa

SEQ ID NO: 122871 - DNA, 462 bp, Enterobacter cloacae
atgagccgattaacagccatcatctgtgctgtcgttatctgcctgctggtttcaatggcctgggcgattaaccactaccgcgacaatgccatcacctacaaagaacagcgcgataaagccactgagaaactcagcctggctaacgccaccataaaagacatgcagacccgccagcgtgatgtcgctgcactggatgccaaatacaccggagaactggctgatgcgaaagaaaccattgagcgtctgcatagcgatgtcattgctggccgtaagcggctgcagctcaacgcaaactgtcccgcgaacggagcgaccggcaccggcggcctgggcgatgcttccggcccccgacttgctgactccgctgaacgggattatttcaccctcagagagcgaatcatcacagtgacgaagcaggtcggttatctgcaggacttcattaaagagcaatgcttaaactaa

SEQ ID NO: 122872 - DNA, 240 bp, Enterobacter cloacae
atgcaggactttcaactttatgttggcggcactaacaacatcacctatcgctacgaagtgaaaaaggtagatgatgcttttagtgtccgcatcttcaatgtcatcgataaagtgcacaaagaagtgggtaataagctacttcgctcagtcacagctcacgacgttattgatgaatgtgtttcacattacaaaagacaagcggaaggcgttaagggttttctgcgctggcttgggttgtga

SEQ ID NO: 122873 - DNA, 690 bp, Enterobacter cloacae
atgaacagtcagcaactggaatacgtacgtcagcagctaattgtggcgaccgcagatctgagcggtgcgacgaaagggcaactggtagctttcgccgagaacgcgcaattcagcgcgacggcgcgcagccggggccggaaaaaggtattcgacaaggacaagcagcgaatggttaaccctgacggtccgccgatgagtggaagccagtcccgcgccaaaggctcatccatcgctctggttagcccggtagagttcggaactgcatcctggcgtcgtgctgtcctgtcgctggaagagcaccagaaagcatggctgctctggaactacagcgagaatattcgcttcgagtaccaggtagctatcactcagtgggcatgggcagagttcagggaacaactcggcgataagaaggtggccggaaagacgatggagcgcctgaagaagcttatttggctggcggcgcaggacgtcaaagcggagctggcagggcgtgagacttacgagtatcagcggatggcggaactggtcggtgtaacgccaaagaactggtctgagacgtttacggaccgctggattgagatgcgccgcatcttcctgcgcctggacagtggtgctttgttgcaggttacgcgatcacgttcacaacaaaaggcgacaaatttagatagaagtcttgcaaaactggattga

SEQ ID NO: 122874 - DNA, 363 bp, Enterobacter cloacae
atgaatgaatatcgcatcagtctcccatggccgccgagcaacaaccgctactaccggcataaccgcgggcgcacgcatatcagcgcagaaggacaggcgtaccgcgacagcgtcgccagaatcatcaaagcctcaatgctggatatcgggctgaccacgcccgtgaaaattcgtatcgagtgccacatgccggatcgccgtcgccgggacctggacaatctgcaaaaggcggcgttcgacgccctgacgaaatccgggttctggctcgatgaccagcaggtcgactactacagcgtgaagagaatgccgatcgtcaaaggcggcaggcttgaactgaccatcaccgaactggaggccgaatga

SEQ ID NO: 122875 - DNA, 291 bp, Enterobacter cloacae
atggctaatttgtgcaaagcggcacgtggccgcgaatgtcaggtgcggatccccggcgtatgcaacggcaacgctggaacctcggtactggcccacatccgtattgctggcctctgcggtaccggaataaagccgcctgacctgatcgccaccatcgcatgcagcagttgccacgacgagattgatcgccgcacccgactggtcgatgcggaatatgcaaaggagtgcgcgcttgaaggaatggcccgcacgcaggttatctggctgaaagaggggctcgtaaaagcatga

SEQ ID NO: 122876 - DNA, 585 bp, Enterobacter cloacae
atggaactatgggttggttcaatgatcggtggcgcaatcggcgcagtaataggccatggtgcaaaccactttatcgggtggttcaaagaaaataagcagtctagccctgaaagaaaattcatttgtgcagaattggtattcctccttgaaaattacgctgttaagtgtgctgaggttgtccaggatgatggcgagcctaatggcgatcaaggtgagtacgaatctacaacacaacttccagaaaaaattgattattcattagttaagggaaactggaagtctttgaaatcaaaaacaatgtacgaaatttgtagccttccgatgaagcaaaacgaggctataaaatctattaattttatggctgaatacatgtcttcacctccagatcatcgagagtatttcgatgagagacaataccagttttccttacttggattaaaagctgctgaaattgcttcggggatacgcaaagagaatggcttccctgctaccgaacttgcaaagtgggttcttccagcgcttgaggagagacttcagaaaataaaagaaaaaaggctgaaataccaagacgaagaagatctttga

SEQ ID NO: 122877 - DNA, 255 bp, Enterobacter cloacae
atgactgactggaacattgctgcaaagcctcaggaagatcgcgacaaggttaacgttgacctggcggcctccggcgtggcgtacaaagagcgccttagcatgccggtgatcgctgaggtggtgatgcgcgagcagccagagcatctgcgggattacttccttgaacggctgagacattaccggggggatagtttgaaacttcctaaggcaagcgatccacgttacatagaaatgacagaaggcaatactaaatag

SEQ ID NO: 122878 - DNA, 696 bp, Enterobacter cloacae
atggctctatcgaaggatgacattcttcaactgcgcgcatctcttagtaatgctcagtcaaaatgtgagatggaggcgatcatggaaaagatgccaagtcgcttccgaaaggtggtgcgtggtgttgctgaaaatgactcgtctcatgtcgtatctgtaaaagttaacgggatattctttcagcatagagcatatgcagcatggaccaagatattgagtcgcgtctatggcccatcctatttgaacagaaacccaacatatcgagactgcgatattgacgaaagatggctgaaattttctgcgttcgaggcttggtggaaggaaaactatgttgaaggatactccctcgataaagatctgctgatacccggcaacaaaacttattcacctgaggcgtgcgtatacatacctcaaagccttaacgtatttgctctcgattcatcatcatatcgcggggattggcctgtaggcgtttcctggaatgctagaaaaaggctgtatcaagccactatccacaatttcgacggccgcattaagtgccttggctacagagataatcctgaagatgctcatcaattgtggctgaaggaaaaaatagcgatagcaaacaagctaaagcctctatgcgacagcatccatccaaacctatttgaaggcatcctgagaaaaattgagatgctaagcgagggtaaatga

SEQ ID NO: 122879 - DNA, 348 bp, Enterobacter cloacae
atgagcaacatcgacaaacaggcgctgcgcgaagcggcggagaaggcattaaatgcgcgagcacgactggctttgatggaatcagtatttgacgatgatggtgatgatgtcaaaccagaagcgcaggaggatatcagtatatgcgtctcattcaatgaactgacaaaccccgcgaacgtgctggcgctgctggatgagctggaagacgcagagaagcggattgctgagcagcgtgaaactttgcttgcagctcgcagctacgtaatgcagtgcgcacgctggggtgatgctcatgccagtggtgttctgcaggctatcgaccgcgccgcagccggtaaaggagagtga

SEQ ID NO: 122880 - DNA, 459 bp, Enterobacter cloacae
atgagcatcaaacgttatgagtgggtggcctgtgatgagcatgcttgccactgtgatgtggtagagagcgctgaaggcgatatggtcgattatgaagactacgcagcacttgagcaacgcctcatcgagtcagagcgctacggccgacagactgatatcacaatcgataatctggagatgaagctggcgcagatggctgcggagaatgcggggctgaaggatgaaatctccaacattactttcatgcgggatgatgacttctttggctccactcagcgagcgcaggaagttatggggcgtctcgtcaacgtcaagaccccagcgacagacgctttcctggctgaagtgcgagcgcagggtgtggagatgttgcgcgaacatccggcgataaaactttgctctttaactcacgtatgtgatgagttcgccgcccagcttcgcaaaggagtgcagtcatga

SEQ ID NO: 122881 - DNA, 543 bp, Enterobacter cloacae
atgcattcacttgcgtatcaacacaataccggaatacacccgggagcgatgataaaccgcgctcaagccaaagcggcgccagaccacgaaaagatccgcgatgcggtccgggcatggtcgtcggcgctggacaatcaggacgtcgtttcggcgctgatcatcaacgaataccgggagcagggcgggaccgctatcagcttcccggaagacatcagccgtgcgcgtcagaagctgttccgcttcctggataaccgtttcgactccgagcagtaccgcgagaatgttcgccagctgacaccggcaattatggccgtgctgccggttgagtatcgcactcgtctgatcggtgcagattgcaaaatgtctcgcttggctgaggccgagaaagaactcgcagaagctaaacaggccgtgctgctggacgctccagagcatcagaagctgaaagaggtaagcgagggtatagcgtcgctgttccgcctaatgccggagcaggtaggaccgctgatgacgatggtcacatcgatgttgggggtcatgtga

SEQ ID NO: 122882 - DNA, 228 bp, Enterobacter cloacae
atgacgaataaaaccatccagcgcgccattgatatcgctggtagccagaagaaattagccgacctttgcggtgtggcgcagccgacggtatggcgctggttgcacggtggcggcattgatgcccgctacgtaatgaagattgtcactgcaaccaacggcaagctcaaaccagcagatatccgtccagatctcgcccagctgcttggggcgaataacacagccgcctga

SEQ ID NO: 122883 - DNA, 705 bp, Enterobacter cloacae
atgaaaaaagaaactcttgcagaacgcctgaatcaggcaatggaacacactggcatgtctcagggcgctttggctaaagcgtctggcgttgctcagcccaccatctggcgactgactagcggcaatgcccgcggctcaactaaaatcgttgagattgccaacgcccttggcgttcgctctgagtggctttcaaccggagttggcccgatgcgtgacgagggtcaaatgcccgcaatttcgcacccaaaaaccgagcctggacctactgacacattccgcattgaggcgctagacttttacgtaagcgcagggcctggagccatcaacagcgagtttgtagaggtgctacgatccgtggaatattcagtcgaagacgctcgccggatgttcaatggcaggaaggctgagcagattagaatcatcaatgttcgcggcgacagcatgtccgggactattgagccaggtgacttattattcgttgatataagcgttcagcattttgatggtgatgggatctacgccttcatatacgacgatacatcccacgtgaagcgcctgcagaagatgaaagacaagctgctggtaatttccgacaaccagacctatcgcccgtgggagccgattgagaaagaagagatgaatagaattctcgtgttcggcaaggtaattggtagcatgccgcaaacgtacagaaaacacggctaa

SEQ ID NO: 122884 - DNA, 255 bp, Enterobacter cloacae
ttgagtgacttatcagctcatcgcagcgtggtcctctacacctaccgtacgcatacggactcagtgcttacctcgatccaatcgggtgccatttctttttgccaggagcgctacggcttgcctgtcactcagtctgatttgttaaagaagcaggcgacttgctgtccgccgctggctaacttcgctcagctgtcgatgtttcgtttcgatggattgataatagcgatgagtattgtttatagcaatacgtattga

SEQ ID NO: 122885 - DNA, 168 bp, Enterobacter cloacae
atggatgagaaagtagagtttccttcaggttttagcaacctgatgtacgcattaacaaaggaagcagcacgtaacagcttccttgatttccttgaggaatgggggattgaagattacgacgagattaaggccttccttgccaagaatggcgtcaaaacctactgctaa

SEQ ID NO: 122886 - DNA, 213 bp, Enterobacter cloacae
atgggtaagaaaaatgacggtggcttcgccttccctatggaagctacagaggccacagcttggaaagattgcaatcagggaatgacgctacgcgattacttcgcagctaaggctatgcaggcaatgatagctgctcatgagccgcagggagctattcccggctgggcctacgaaatggccgacgagatgctccgcgcccgggaggcatcatga

SEQ ID NO: 122887 - DNA, 159 bp, Enterobacter cloacae
atgacagttacccacaacggcaagcagtacaccgccaaaaagctcaacgataacgagtggcagctgacgtcggtatcggcaccgcgtgaaaagctggtgcttaaccgctggcacatgaagatggctggcctcctggaacaggttgaggtgaaggtatga

SEQ ID NO: 122888 - DNA, 972 bp, Enterobacter cloacae
atgagcgaagtaacggacttaactgtcatcgaaatcaagccggaacaggcgccagcgctgtacgtagctggcggccttgatgcttaccttgagcaaatccgccaggcagtaaacgaagtgccggacctgtccacgaagaaagggcgtgaccgtgtcgcctctctggctgcgcaggtgtcacgcagcaagacggcaatcgaaaaaccgggccgtgagtacctgaaacgcctgaaagaggctgtgcgcccagctgaggccgaaattaagcgatttgttgatgcttgcgacgagctgcgtgatgccacccgccgcccacttactgagtgggaagccgagcaggagcgcattaaggctgaagaagccatgaacgcgctgcacaccgaagcgctggtgatgaacgaagagttcgaccgccagcgtgccgcgcagattgaagcagaccacgaaatggctctgctgatgaatgacaagtttgaccgtgaccgcgaagagcagcgccgcctggctgagcaggctcaacgcgagcacgaagagcgcattaaacgtgaagcggcagaacaagcccgccgcgatgccgaagcgaagcacaaagcggagattgaagccgcagcgcgccgtgaagctgatgagaaggctcgcgccgatgcggctgaacgtaagcgcaaagaagacgctgaacgtgctgaacgcgaaaagaaagaagccatcgccgcagagaagcgtaaagcacaggaagaagctgatcgcattaagcgcgagactgagcagaaagaagcggcgcgcctggcagaagagaagcgcaaagacgacgagcaggcaaagcgtgaagctgacgtgaagcaccgcaagacggtcggaaccaacatcgttaacgcgcttaccagccacaccagcttaacccgcgaacaggctatcgaagtggttaccgccctgaaagatgacctgatcccctgcgcgaaaattcattactga

SEQ ID NO: 122889 - DNA, 681 bp, Enterobacter cloacae
atgacaccagaaattatcctggcccggaccggcattgacgtaaccactatccagcagggcgacgaggcgtggcaccggctgcgcctcggcgtcataaccgcctctgaagtgcacaacgtcatttccaagccgcgctctggcaccaaatggacgggcatgaagatgtcctacttccacactttgctcgccgaggtatgcaccggcgtcgcgccagaggttaacgccaaggcgctggcctggggtaagcaatacgaggaagacgcccgcaccctctttgagttcactacggacgtgaaagtcacggagtcgccgatcctgttccgtgacgaaagcatgcgcaccgcgtgctcccctgacggcctttgcagtaacaatttcggcctcgagttgaaatgcccgttcacctcccgcgactttatgaaattccgcctcggcggtttcgaagccattaagtccgagtatatggcccaggtgcagtacagcatgtgggttaccggaaaagacgcctggtactttgccaactacgacccgcgcatgaagcgcgaaggcattcaccacgtcgtcgttgagcgggatccgcaatacatgaccgatttcaacgaaatggtgccggagttcatcgagaagatggacgaggcgctggcggagatcggcttcacgtttggcgagcaatggaggtaa

SEQ ID NO: 122890 - DNA, 1440 bp, Enterobacter cloacae
atgagcatacctcaagttgtcagtttctctggcggcagaacctcggcatatctcgtccatttaatggagcaaaggagactgtctggcgaagaggttcactatgtctacatggacacaggggcagagcacaaagggacctacgagttcatcaagaagctggcgcgcgaatggtcgattaacctgatctgcctgcgtgtaaaggttaaccctgaactgggtaaggcaaacagttactcggtggtgccgctggatgatatcggtcccgatcttcagccatggaaagacgtctgcgaaaagtacggcaccccgtacgtccacggggcgttctgcacccggaccatgaaaatggaagtattcgaaagatactgccgggacacattcggccagtatcacacttggatcggtattcgttctgacgagcagcgcaggctaaagccccgagaaggcgtaagctatctggcagatataagcgatttcgaaaagcaggacattctcgactggtggaaggatcagccatttgacctcggtattccagaacacttgggtaactgcgttttctgtatcaaaaaagggataaacaaggtagcacgcgacgagcctgatctcgccgctgagttctggaatcttattactgatccttcagtaagggttgtggaacgccgccagcaggaaaacaaaatcatgtatcgcggaaacaattctctggagagcgtaatcgcaatgttctctgacagttcacgcgaagaaattgcagcaacaataaaaggtggcggcggatatgacccgaactcatgcactgaaagctgcgaagccctgacgtgtgaagtggatgacaaccatgagccagagatagaagagcccaaggaagaagaaagccaagtttcgatccgcactggatatggaggaagccataccccagcagaacagcgcgacctctggcgcactccgccagcccttttcgcttcccttgatgctgagttttgcttccagcttgatgccgccgccgcgtcgcataacgcgctgtgtcggaagttcatcaccgccgagcagaacacgctggaaacaccctgggctgattacctgagcattcccggttacgtctggctgaacccgccttacagcgacatcacgccgtttgtgaagaaggccgccgccgagagcatcaatcaaatcggcacggtcatgctggtgccagcagacacttcggttggctggttcaaggaagctatccagaccgcaagcgaggttcgattcatcaccgccgggcggctggcatttatcaacccggtcactggtaagccagtatcgggaaataacaaaggttcgatgctcatcatctggcgaccttacccgcgtacacactaccacttcgcaactgtggaccgggacgagctgatggctttcggggcgaaacttctcgcccgccgggaggccgcatga

SEQ ID NO: 122891 - DNA, 1149 bp, Enterobacter cloacae
atgacgccagcagcgtattacaacgaaatcgaccccttcgctgcgcagtggcttcgtaacctgatcgccggcggccatattgccccgggcgaagttgatgaaaggagtattgaagatgtcacacctgacgatctgcgaggattcacgcagtgccacttcttcgccggaattggcgtctggtctcactccctgcgcctcgccggatggcctgacgataaaccagtctggaccggttcctgtccgtgccagcctttcagcgcggcaggcaaaggagatgggtttgctgacgagcggcacctatggccccacttcttccacctcatcagcgagcgcagacctgagcatgtctttggcgaacaggttgcagctggtaacgcaaatacatggttcgaccttgtacaagctgacctggaaggaatgggatacgccttcgggcttgtgccgtttgcggcagcgggcgtcggtgcgccgcacatcagagagcgggcctactgggtggccaacaccaacagcatcatcagtgaccggcgcgggaacgtccgggagactgggagggatgaatattcaaacagcagtaatccttgcgagttggccaacaccaacggcaaacgtgaaaaatcagccagaaacggtacgcggactggagaatcttggcggggtggtgaagttagcaggatgggtaacgccaacatcacgcgactggaaagactcagcggggatgactgcgcagcgggacgggaaagagcgactggatcagttacctcgccaggcattcatgacaggctggcccacgccgacgacgaacaatactcgatcgccatcagtggaagcagccatgaatatgtatcgacaggacggcagcaagacccagcagcgcctgcaggacttcgcagggattaccgggcccttgaggttaacggtttttggcgagatgcggactggctcttatgtcgagatggcaaatggcgtccagttgaacccggcacattcccgctggttgcaaggtttgccaaaagcctgggacacggaaagtcctcattacgagcaatggctggacgcaaccgcacaggccgacttaagggctacggtaacgccataaacgcacaggctgcggctgaattcatccgggcctatttggaggtgtcatga

SEQ ID NO: 122892 - DNA, 219 bp, Enterobacter cloacae
atggccgacatcatcgataccgcagcagagattgaagagcttcagcgtaacgctgccctttccgcccaccggatcaaccgtaacgccgtatcagctgagcgttgtgaagaatgcgacgaaccaattcccgagccgcgtcgcgctgccgttcccggctgcaagacctgtgcggagtgccaatccgtcatcgagttgaagaataagcagaggggactgtaa

SEQ ID NO: 122893 - DNA, 240 bp, Enterobacter cloacae
atgttccagctaattcaacggggtcagatttacgctgaccagcacggttggcccgtcatcattcacagctgcacatcacagatagtccgctactggcgacagggccggatcaacaccgcttcaatcgaacgattcaacaatgattttgagcacctcgatcaccatgaggcggcacagatacgcgccgaactggagacgagtgagcacattaaatcactgcgtgcccagcgcgcggcatga

SEQ ID NO: 122894 - DNA, 231 bp, Enterobacter cloacae
atgaagaccattcaggacatacgaacgcagctatctacactggtcaccgaggcgcacaaagtagcgtgtgccctcgacattggtgacgagcgaaccgaggctttcgagctatacgaagcgcttcgtcggcttcagcgccagggggctgctggagaaattctctcagcaactaaccctcttctcgcctcgccatattacgacgaggactgggacgaagacgaagaagactga

SEQ ID NO: 122895 - DNA, 1239 bp, Enterobacter cloacae
atgatcacattgcaacaactgctgatgaccgacagcgacctgtcgggcggcatgcaaacagggaaaggcaccgacggtgcacaagactttctttctctgctggcaggcgccctgacggacgcaacaggccagggcaacgatgcgccgctgacgctggctgacctgaaagcagccggcagtaagctgtcaaaagttgctcaggaagccgggggagagaacaccctgcaggccaaaatagccaacctgctctcgcgtcagccagccctgacaggcgatgaaccgacagcagccaccccgctggaaaccctcgtttccgggctggtgccggtttcaaaaggtgatgccctgaagaccctgagcgcggtgaaaacgcaggatgacagcaaaagcgagctgagcgaagaagagctggcagggttgagcgcgctgatggcgatgctgccccaccagcagacggcaacgccggtggcctctggcgcgacaggtattggcgtgacggcgaaatcaacgctgaacgctgccgcgctttcgcaaaatggtgcaggtcaacagtccatgagcaccctgctggcgggccatgaaaaagcgcaacaagcgtcgacttatcaggcgcaggcgcaaaacgccgatccgtctcaaccggtcaacgcaccggcgaccccgatcgtggccgccgccgctgagaagcaggatctcgccagttcaccctcttcaacagccccgaccgcaacgcttacgcccgtcatttccagcaacgtcaccagccacgctgccgcaaccgttgccacggcaccggtattgagccagccgctgggaacccaggagtggcagcaatccctgagtcagcacattacgttgttcacgaaacagggccagcagaccgcagagttgcgtctgcacccggaagatctgggccaggtccagattaccctgaaactggatgataaccaggcacagctgcaaatggtgtcggcgcacagccacgtgcgtgcggccctggaagctgcactgccggtcctgcgcacgtcgcttgctgagagtggcattcagctcgcgcaaagcagtgtcagcagcgagagctttgccggacagcagcagtcctcctctcaacagcagcaacaggcttcacgttccggtaataccggcggttttaatgaggagagcgatgagttactgcctgcccctgccgccctgcaatcctcggcgcgtggcaacagtgccgtagacatctttgcctaa

SEQ ID NO: 122896 - DNA, 1005 bp, Enterobacter cloacae
atgggcgacagtattctttctcaggcagaaatcgacgcgcttcttaacggcgacagcgataagaacgatgatccgcaaccgggtattggcggcgatagcgatattcgtccttatgatcccaatacccagcgccgcgtagtacgtgaacgtctgcaggcgctggagatcattaacgaacgctttgcacgtcagttccgtatggggctgtttaacctgctgcgtcgtagcccggatatcacggtcggtgcgatccgtattcagccgtatcatgagtttgcccgcaacctgccggtgccaacgaaccttaacctgatccacctgaaaccgctgcgcggcacaggtctggtggtgttttcgccaagcctggtgttcattgcggtggataacctgtttggtggcgacgggcgtttcccaaccaaagtggaagggcgtgaatttacccacaccgagcagcgcgtcatcaaccgcatgctgaagctggcgctggaatcttacagcgacgcgtggaaagcgattaacccgctggaagtggagtacgtacgttctgagatgcaggtgaaatttaccaatatcaccacctccccgaacgatatcgtcgtgaataccccgttccatgtggagatcggtaacctgaccggtgagttcaacatctgcctgccgttcagcatgatcgaaccgctgcgtgaactgctggtcaacccgccgctggagaactcacgcaacgaagatcagaactggcgtgaaaacctggtgcgtcaggttcagcattctcagcttgagctggtggcgagcttcgcggatatcccgctgcgcttatcccagatcctgaaattacaacccggcgatgttttgccgatagaaaaacccgaccgcattattgcccatgtggatggtgtccccgtgctgacaagtcagtacggcacaattaacggtcagtatgcgttacgcgttgagcacttgatcaacccgatattgaattcgctgaatgaggaacagcccaaatga

SEQ ID NO: 122897 - DNA, 801 bp, Enterobacter cloacae
atgccttcactgcaggatagcctgctgatcttttccgatctcgacggctcgttgctcgatattcatacgtacgagtggcaaccggccatgccctggctggacaccctccaggataaccaggtgccggttattctctgcagcagcaagaccgccgcagaaatgctggatatccagcaggatctgggtctggaggggttacccttgatagctgagaatggcgcggtgattcagcccgacgtgcgctgggagacaggtcaacgccacatcagggggatgacgcaccgcgacattcgcccgctgatcgaccagattcgccagcagcggggctttaaattcaccacctttgatgacgtcgacgaacgggttatcagcgagtggacggggctgacgcgctatcgttcgaccctcgcgcgccgacacgaagcctcagtcacgctcatctggcgcgacagcgatgaaaaaatggcgcaatttgacgcggcgctggcgcagtgcggcctgaaatgcctgcagggagcccgcttctggcatgttctggatgctcgctgcggtaaagacgttgcggttgactggctgattgagcagtaccgtgcgcgggaaggcattgtgccggtcaccctggggctcggcgatggtccaaatgatgccccgctgctggacagcgtagactacgccgtggtgattaagggcattaaccggcagggcatcacgttacgtgacgataaccccgcccgggtgtaccacacgcaacagcccggacccgcgggctggcaggaggggctggatcacttcttatcctga

SEQ ID NO: 122898 - DNA, 1821 bp, Enterobacter cloacae
atgagcttcagccgggagacgggcagcgcaagcgagacaaggcttaatgacataacgcccggctttgccgggcgtttttaccttccgtatccggcgtcgggcagtaatcagggagtgtgtgtgcagcgcgagacctttgttgtaagacgatcttttctgcaatggctgcatatgcgtagcaatccggggttgattgttaatctctgttttctcatcgtactgatattttccacgctcctgacctggcgagaggtggtggtactggaagatgcgtatatctccagccagcgtaatcatctggaaacggtagccacttcgctggaccggcagttacagtacagcgtggataaaatgctttttttccgcaaaagcatgcgtgatgccatccagacgccgctggcctttgatgtcctgtatgaagcgatttcacgctttaacgcctttcgcacgcgccccagctggcagctcgccgttgataaaaaacgcactctccccatcaacggcgtgtcggatgcgttcgtcgaaaaaaccacgttgttgaatcgtgatcctgagcgtatcagcaatgaaatttctgccgccctcgaagtggggtatttactccgactggcgtcctcggtggggcaaagtgaagagcgggttatctatgcgtcacgcgccgggttttaccttgcgacggacacgcctgaacagacgagtgatattagccagcgctattactatctggttacccagccgtggtttacccagcagtctgaacgtaacaatcgcgctcgcgcggtgcgctggtttatctccagcccgtcgccctggaccggtggtgaacggatgatcacggccagcgtaccgatctattttgaccattactggtatggcgttgtggcgatggatttctcattgaagaccatgaaacatctgctggaagaggcaacgcaagagcgtacagagggggaatatcagctgtacgacacccggctgaatatgattgccacgtcagaagagaccggtagtctagttaaccggtttgacgaacgcgaaacggcgcagatagcacacgcaatcgagaacgataccggcggggggatccgcctcggaagccgctttatcagctgggagcggctcgatcacttcgatggtgtgattttacgcgttcataccctgcatgaaggcgtgaagggggacttcggcagtatcagtatcgtgctggcgctgctctgggcactcttcaccgccatgcttcttatctcgtggctggttatccgtcggatggtcagcaatatgtacacgcttcagcactctttgcagtggcaggcctggcacgatccgctcacccgcctgaataaccgtggtgccctgtttgagcgtgccaaaatgctgtcggaaaaatgtcggcagcagtcgctgccgttctcggtgattcaaatcgatctcgaccattttaaaagcattaacgatcgctttggccatcaggccggggacaaagtgctttcccatgccgcgggcctgattggcagcgcactgcgcaagaatgatgttgccggacgcgtgggtggggaagagttctgcgtggtactgcccggcagcgggcttgaagaggcgagggggattgcggaacgcattcgctcacgcatcaacagtaaagagatcctggtgaaaaagagtaccaccgtgcgtatcagtgcctcactgggggtaagtagcgcccaggaaaaggacaattacgatttcgaacagttgcagtcagtggcggatgcccggttgtatcaggccaagcagtgcgggcgcaaccgggtgttctggcacgatcaggataagaagtga

SEQ ID NO: 122899 - DNA, 492 bp, Enterobacter cloacae
atgacggatgttcacaataaggcgacgcgcagtaaaaacatgcgtgccatcggcacgcgtgataccgccattgaaaagcggctagccgggctgctgaccgaggcggggtttgatttccgcgtgcaggatgccgcgcttgcgggccgtccggatttcgttatcgatgcgtatcaatgcatcatctttacccacggctgtttctggcatcaccacgactgctacctgtttaaggttcccgcgacgcgtacggatttctggctggagaagattggcaagaacgtcgcgcgggacaaccgtgaccttagcacgcttctcgcgcagggctggcgggtgttgattgtctgggagtgcgcgctgcgcggcagattaagacgtaccgatgccgacctgacagaacggctggaagagtggatctgcggcggcgggcaggccgcgcagatcgacacccagggtattcacccgcttacggtttctccacctcacacggcgtaa

SEQ ID NO: 122900 - DNA, 702 bp, Enterobacter cloacae
atggaacttacgcagtggcagtctcgctttgagcgttggctcgataaaaaccacgcgacccacgacgctgcgcatgatatttcgcactttcgtcgtgtctggatgacggcgcaaaaaatcatggcgaaccaggcggtcgattcactggtggtactgaccgcctgttatttccatgacattgtcagcctgccgaaaaaccatccccaacgcagccagtcatcacgtctggcggccagcaagacgctcgacattctgcgtcgcgattttccggatttctcctctgaacgctatgcggccgtggagcatgccattgaagcgcacagttttagcgccggtatcgcgccgcacagtcttgaagccaaaattgttcaggatgctgaccggctggaagcgcttggtgctattggtcttgcgcgcgtctttgcggtatcgggggcgctgggcgtggcgctctttaacgcagaagacccgtttgccgacgcgcgcacccttaatgatcgcgcctttgccctcgaccattttcagaccaagctgctgcgcttgcctgatacaatgcacacagacgtggggcgcgaacttgcgcaacacaacgccgattttctcatccagtttatggcgaaattaagtgccgaattacagggcgactgcctggggctggatacccaggtgctgagccgcttccgtcgcagtttgagcgagtga

SEQ ID NO: 122901 - DNA, 864 bp, Enterobacter cloacae
atgagcattacgcttaccggttcggtcaaggaaagacggcacgccagcacgatgaatatcgatagattgtccacgctggacatgctgaaagtcattcaccaggatgatgccctcatctccgctgcaataaccccatgtttaacaacgatcgcccgcgtggtggataacgccgctgcgaccctgagtcacggtggtcgtctggtcattgttggcgccggcccgtcaggtcgtgtcgcgcagcaggcagccgatgagtatgccccgggaaaaacgccagtgatcgccataacggcgggagaagaggcgggcagctacgagcgcggtgtcgccgacctgcaggccatcaaatttggtgaacaggatatgatgctggcggtcaccgtcagcggcaaaacaccgtgggtctggggcgcgatgcgccatgcgtggtcgttgggttccccggtcgcggctattacggatgacgcgcaaagtgaagccgcgcagctggcgagcatggtgattgccccggagcttggcgcggacgcgatcgcgggttatatcaataccaaagccgggatcgcacaaaaaatgatcctgaccatgataaccaccggcctggcggttcgaaccggacgcgtgttcagcaacctgcgcgtggatctggacgccagcaacaccaaatggtctgaacggcaaattgccatcgtcatggaagcggggggatgcacccggtcagcggcgaaagccgcgctggagagctgcaaccataactgtaaaacagcggtgctgatggtgctgacagggctggatgcctggaaggcgcatgaactgctggcgcagaacaacggctttattcgtctggcactgcaggaagctccgtaa

SEQ ID NO: 122902 - DNA, 894 bp, Enterobacter cloacae
gtggcgacattgatgtattcctttgcccagctggaggcgttcaccgccgtagctgagcacggcagcctgatgaaggcggccagcaagctcggaaaagatcgcaccaccttgcgcgatctgatcgattttctggaagacggtctgggctatgcgctgtttgtgcgcgaggggcgccacctgcaattaacgccggaaggggagcagcttcagcgtcaggcccatctgctgatgcggcaggtgagggccttcgaggcgtttgccagagcggtgccggaaagcgcgatgcaggacatttccctcgtctacgatccgttcacgccaagggcttttttgcaggtgctgttggcgaaaatggcgacgcgcaacgttcgtttgagtttgacctgtgcctcgcgcgacgacgcggaagcgatgctggcgcgcggtgcggccgatctgggcatctgccaggcgcgcaatcgcagcgtcggtaacgagatggagtggcgggcgctcggcgccattgatatggatttttacgcctcgaaagtgcttttcagggagaatgcgtcgccggtatcgctcctcgacctctcccttgtgccgcaggtggtcatgcaccctgcgtccgacgaaccggtcgcgcgtcgcctgaaaatctctgggcatacgatttttaccaacgagctggagatgctgcgcggcctgctggagaaagggtgcggctggggatttttgccgacgcatcttcaggcggcgcgatggcaaaacgtaaaaaggctgcacaccgaagtgggcagccaggggatcggtcagacgatggtgacgatctggaaaccgggcagcgacaagcgtgggttaattaatgaaacgctgtcgctgctgccgtcattgtggaaagactcagcgctgtga

SEQ ID NO: 122903 - DNA, 1299 bp, Enterobacter cloacae
atgaaaaacaaaaccttaaaactcactctgcttgccggtctggttttcagcagcctgttctcccccgccgtcatggctgcctgtcacggcagcgagttgacggcctgtcctgccccgtatgatgcaaaactgccggatgcgcatgctatgctaacctggagccagaccgactgcgtcgtgggctttcgtaatgactaccgcaactatgcgggagacgtgttccgccacggcaacgctatgccgctgctggcggcagacaaaccgctcaccgatgcccgttaccgggttaacggcaagacctggaaccttcagaattacctgaaacgccagaacgtcagcggtatgctggtgctgaagaacggcaaagtggcctataaatatctgggtgaaggcaataccgactccacgctctggacctcgcgttccgtgggaaaatcggtggtctccgcgctggtgggggtggcgctcaaggaggggaaaatccattccccggacgatctcatcacccaatatgaaccggatttaaaaggcaccgcctgggacggcgtaacgctgaaacagctcatcacccatacctccggcgtggcgtggaacgaagactacaccaccccaaaatcagacttcgcgcagcttaccgagtgtgaagcgaagccgggcacctacgactgcgtgcgaacgctggtgaaggggttacaccgcgagcatcccgcgggcgaaaactggtcctactcctcgggcggcgcatggctgctgggggatgtgcttgaacgcgccaccggcatgacgctcgcggcgtatctggagaaaagcatctggcagccttacggtatggcgagcgacggcgtatggcatgcctaccgcaaagggcagcacgacgtcggcgcccacggctttaacgccacgctggaagactggggccgcttcggtcaattcatccttcataacggcacattgccgaacggtaagtcgatcctgcccgcaggctgggtgaagcagtccgcagactggacgcaggcaacgggatcggtgtcgaaggcacacccgaaagggttatacggctatcagtggtggaataacgaagtgcccgccacggccacgagggttaagcccgcggtgaaggattcgctgaaagattcactctgggcactggggatctttggccaaatgattatggtgaatcaaaaagaaaacctggtcatcgtccagtggtcaacctggccgcaggcggaaccgtcattcagcgcccagccgctggaagcgtcgctgatgtttagcgcgattgctcaggcgctgcgctga

SEQ ID NO: 122904 - DNA, 792 bp, Enterobacter cloacae
atgcacacatttatacgttcaggactgaccgggctggtcttgctggcaaccagcgcagcagcgctggcccaggaggtgaccgtcatgatctcgggcggttttaaagccgccctggaaaagctcgcgccagagtatgaagccaaaagcggcgaccgcattgtgctgatcccggggccatcgatgggaaagacgcctcaggcaatccccaaccggctggcgcgcggtgaaaaagcagacgtggtgattatggtcggtgatgcgctggtgcatctggcgaaggacaggatggtccaggacggctcgcgcgttgagctggcggattcgcccgtcggcgtggtggtcaaagccggttcgccggtgccggatatcgccaccgatagcgccctgcgccagaccctgctgaaggcgaacgctatcgcctactccgacagcgccagcgggcggtatgtgcaaactcagctttttaaaaaactggggattgaagagcaggttgcgggaaaagcgcacaaggttgagcggatcccggtcgcgtcggaagtggcaaaagggaagtacagcatcggactccagcaggtgagcgagctgctgcctgttccgggggtaacctttgtcggcaagctcccggataatctgcaatacattacccgttttgccggtgcagtgacggtccacgcggatcacccctcagaggcgaaagccctgctggattacctcgcgtcagccagcgcgcaggagaccattaccgctaccgggatgatccccgtcgctacgccgcgcgatagcgcgcggtaa

SEQ ID NO: 122905 - DNA, 900 bp, Enterobacter cloacae
atgcccgtcaatttcgacctcaacgatctttacgccttcagagccctggtggaatacggtaatttccgtattgcggcagaatctatctgcatttcgcagtctgccttaagccgccgcatcgaaaagctggaggcggcagtgggggccaaactgttcgacagaaccacccggcgcgtgatgctgacgctcttcgggcaaacctttgccgagcgctgtggggcgcttctggaaaacgtggagtcgatgctggccgatatcgacaaggtgagcgaggagcgtaccggacttataaccgtcgccactgtgccttcggctgcctgtcattttatgccggaggtgatccgccagttccacagccgctatccgcgggtgcgcataaagcttatcgacagcagcgcgggcaacgtgattgaggcggtggccagcgggcaggcggattttggcatctgttttgcgagaagcctgcagccggatatcacgttcattccgctggtggaggatgtctacgttgccgcgtgccgtcgcgatcatccgctggcggggcgtaagaatctgacctggcaggcgttttatcagcaggattacatcagcctggatatcacctccggaaaccgcaacctgctcgaccagatgctcggccacattaagcccgagcgtccggggatctgtgaaacgcgccacgtcactacgatgctgggaatggtggaggcggggattggcattgcggccgtccccgcgatgtcaatgccgcacgctgaacattcgattctgacgcagatcccgctgaccgagcccgaagtcaaacgtactgtcgggctgatccggcgcagcgggcgtattcagtcgtggattgccgctgagctggaaacgctgattaccgcgcgctatcgcgcggcgtag

SEQ ID NO: 122906 - DNA, 513 bp, Enterobacter cloacae
atgactgtagcaaccgccagtaaacccgccgcaaccgacgctatcgcgcaggagtacctggtattccgcctgggcgacgaagagtatggtatcgatattctcaaagtgcaggagatccgcggctgcgatcgcctgacgcgtattccgaacgcgccgaactttattaccggcgtaaccaacctgcgcggcgtgattgtgccgattgtcgatctgcgcgtgcgcttcgatctgcccgacccgtcgcacgacgacaaaacggtggtcattgtgctcaatctgaatgaccgcgtggtgggcattgttgttgacggcgtggcggacgtgctgtcgattgacgtggataacatcaagccgaccccggacgtggcctcggtgctctccggccgctacctgcttgggctgggcgtgctcgacagtcgaatgattattctggtgaatattgagatgctgctgagccgcgaagagatggcgctggtggattcggtaacggagtcttacatcgactcccactaa

SEQ ID NO: 122907 - DNA, 1929 bp, Enterobacter cloacae
atggacatgaatgatttttcgcagattttcttcaccgaagcggaagaattgctggccgaaatggaacaacagctgctgcagctagacctggcggcaccggaccaggagcagttgaacgctatctttcgtgccgcacactcgctgaaagggggcgcggccacctttggatttatcgcattacaggagacgacccacctgctggaaaatctccttgaccaggcgcgggcaggggagagaacgctcagtcgctcaatcatcaacctttttctggaatgtaaggacattatgcaagcgcagctggaagcctatcagtcttcgcaggagcctgatgaagcccgttatcgctatatctgtgaagccctgagggagattgcccttgaaggccagcagcctgtgacgccagtggaacccgcgccaacgtcggccagcacgacgcaggaagcggaaaccacgctggtggtgaccctgcgtaacgtcggggcgcgcgagcagacgacgctgcgcgacgagttgaccaacatgggcgaggtgaaagacgttgaggcgacgtcagacagcatgacggtcacgctacagaccaccgcctcggcggatgacatcaccgccgtgctctgctttgtgctcgacagccagcagatcgaggtccgctctgcagaagccaccccgccggtaccaacgcctgctgcgctacctgaaaccgtcattaaaaaagcgccacccgcaccacgcgcagccaatcaggagtcgggcagcattcgcgtggcggtgagtaaagtggaccagatcatcaaccaggtcggtgagctgattatcacccaggcaatgctctctcagctgtcccgcaccctcgatccggccagctacgatctgttgtccggctgcgtggcgcagatggagcgaaacacccgcgagctgcaggagtcggtgatgtccatccgtatgatgccgatggattacgtctttagccgcttcccgcgtctggtgcacgatctgggctctcgcctgaataaagaggtcgagctgaccctgaaaggcggttccgccgagctggataagagtctcattgagcgcattatcgacccgcttacccacctggtgcgtaacagcctcgatcacggtattgaagagaaagaggtgcgaaccgcaaaaggtaaaccggtgaccgggaacctgacgctttcggccgaacaccacggcggcaatatcgtgattgaggtcagcgacgacggtgcgggacttaaccgggagaagatcctcgccaaagcccgttcacaggggatgaccatcagcgacaccatgagtgacgacgacgtatggatgttgatcttcgccgccggtttctccaccgccgagagcgtgacggacgtctccgggcgtggcgtcggcatggacgtggtgcgacgcaacattctggcgatgggcggccacgtggacgtgctctcgacgccgggtgcaggaacaaccatccgtattattctgccgctgacgctggcgatcctcgacggcatgctggtgaaggtgggagacgagatttacgttctgccgctgggcgcggtgatggaatcgctacggccgaccgacgaaatgctgtgccgctttgtgggtgaagagcgcctgctgcaggtgcgcggcgaatatctgccgctggtgctgcttcgccaacgcctctcggtggcaggcgaagcccctgccgacgacggcattgtggtcatcgtgcaaagcgcgggctgccgctatgcgctgtgggtcgatcagcttatcggccagcagcaggtggtggtgaagaaccttgaacataactaccgcaaagttcctggcgtctccgcagcgaccatcctcggggatggcagcgtggcgctgatccttgatgtggttgagctgtcgacgctcaacgctccacaaccccagagggagggggtaaacgcatga

SEQ ID NO: 122908 - DNA, 906 bp, Enterobacter cloacae
atgaagaacgccacccctgtcatcatctcccgtaagcgtaaaaagaaaaaacacgcacatcacggcggtacctggaagattgcctatgccgattttatgaccgcgatgatggcgttctttctggtgatgtggctgctgtcgcagtccacggagatggaaagagagctgatcgcggactatttccgcatgccgcttaagccttcgatggccaacggcaataaaaccagcctgagcgacagcgtcattcccggcggcggggatgatctcatcaaacaggagggggaagtgtttaaggcaaaaatcggcaatctggatcggcacaagcgcgtcgagagcctgaagcaggcgaaagagaagctacaaaagatgatcgaaaccgatccgcggctcaataactttaaatccaacatcctgctcaacctcactaatgacgggctgctgatccagatcaccgactcgcaggaccgcccgatgttccgcgtcggtagcgaactgccggaatcttatatgaacggcattctgcaggcgctggtgccgctgctgcaggaactgccgaacgcgctgagcctgacgggacacaccgactcgctgccgtatgccggtggcgacggcggctacagcaactgggaactctctgccgggcgcgcgaatgccgcccgccgggtgttagtccggggcggccttaacgatgagcgcttcttacgggtgatcggcaccgccagcagaatgcctttggagaacacgtcgccggaaagtgcggtgaatcgccgtatcagcatcctggttctcagtcgctcaaaagagcaggagatccgcctggaagatacgcaggctcagcgtgctgacagcgtgctgagcgatatcaatctgcaaaacgtgcagggctataccgatggacatgaatga

SEQ ID NO: 122909 - DNA, 576 bp, Enterobacter cloacae
atgtgtggtgaaaagagtctgctccaggaaatcgaagaagtgaacattgcgatggggttaatttctctcggggcgagaatgcaggttctcgaatctgaaacatcactcagtcgtcgccgtctgcttcgtttatataaagaattacgcgggtgtccgccaccgaaaggcatgctgccgttttcagaagactggtttatgtcatgggagcagaatattcactcttccatgttctacaacatttacctgtatctgaaaaaaaccgagcagggtcgctctattgaaatgctgatgaaaacctatcgcctgtatctggagcagtgcagcacctgttccgatgagaagccggtgttagggctgacccgcgcctggacattattacggtttattgactgcggcattatttcccgtaaagcctgtaatgtctgcggcggcggttttatcgtcaccacggaatttattaaaaacccatttacctgcagtttgtgcagcccaccgtcgcgtgcgcttaaaaaatcccaggtcagcaatgccggcctgctggggaattttagcacgccagagatcatgacggcgtaa

SEQ ID NO: 122910 - DNA, 723 bp, Enterobacter cloacae
gtggacggtatttatacggccgaagggctggaagataaaacggtagtgtggtctaagtatcactatctggtgcggcaggaagcgctgcgtttaatcaagcgacttcctgccagcgtcgagctggatgatttaatacaggccggggccattggttttttaaatgcagtggagacctttgatccgaaaaaaggggtaacccttagcgcatggatcacccagcgcgtaaagtgggccttattagatgagctgcgggaaaatgactgggttccgcgacgagtaagaacccatacgcgggaaattgtcgctctcattcagcaaatcgaacaggaaaaaggcggcgaagccacggaagcggatattgcagaacgcatgggcgtatcgctgaaagaatttcagcagatgctggcggataataacagtagccagatgtactccatggatgagctgcaggagaattacgccgatagctgggaaacgaatggtgacgagaatgagcagcttaatcccctgcacagcacccttaaacagaacctgatggagcagatcgccgatcatattcaatacatccccgagcgagagcaggtattactccagctctattatcttcaggatttgaacatgaaagagattggaaaggttctggggatcaccgagacgcgcgtcagccagctacacagtctggcgttaaaaaggttacgaagtcgcatggagacctcttattaa

SEQ ID NO: 122911 - DNA, 1626 bp, Enterobacter cloacae
atgctgacaaaactgaaaatttataccgccatcagcctgcttattggcctgatggccgtcatgctgctcggcgtaaccgcctggtcggtgtacaacgcggtgtccaacaacagcaactttaaacgtattgtggtggctgctgaaaataacgatcagatgcgcgatgcggcctataacatcagcgcggtaatggcgaacaccaacggcctgatgctgcaggcggcacacggcaacccgatatcggataacgtggcaaaacacacgcacaacgtgctgaaaacggcgcgccgcaacatggatgactttatggcgtctcccttcaatacgcaggaagaaagccgtttcgcagccgaggtgaatgccgccttcaatgatgtctataaagtcgctgaaacgaagctcggatatctgcaaaacccggcggggtataccggttcacttgagcatgatatggagctgcgcacccagctgcggaataaagttgagcagtacacggatgccagcgcccgcctgaatgaaacctacattcgtgaagccgagcgcggctaccagattatgatgggcgttgggtttgccgtggtgctgatgtcgattgtgctgctgtttgccattcgctactggctgcgtcataccctggttcgtcggatggagactaccgtggagacgctgcgccgcgtggcggcaggtgacctgagccagaccattgacagcggcagccagaacgaaatcggccatatgctcgccgaactggaaaccatgcgtacctccctgaccagcactattctggggatccgcgacagcgttcaacgcattcataccaatgcgcaggaaattgcccacggcaataacgatctctcttcccgtaccgaagagcaggcggcagcgttgcaggagacggcggccagcatggagcagatcaaaaccaccgtgcggcagaatgcggataacgcccatgcggcgcgcgaactggcagagagcgcaagcagcaatgcgcataacggcggggaagtgatgcagagcctggagcagatcatggcggaaatcaccaccagctcgcgccagattgcagatattaacggcgtgatcgacagcattgccaaccagaccaacatcctggcgctgaatgccgcagtggaagccgcgcgtgcaggcgagcagggccgcggcttcgccgtggtcgccgaagaggtacgtaacctggcgaagcgcagcgcggatgcggcgaaagagattaatcagctcatcaacaccagcgttaacaatattgatatcggttcacgccaggtcgggcaggccagcaccgtgatgcaagacattgtcacctccgttgcgcaggtcacgcagattatgggcgagatcacctcggcgtctgatgagcagagcgcggggattaaccaaatttcacaggcggtgaatgagatggatctggtgacccagcagaatgcggcaatggtcgaagaggcggcaatggctgctggggagctggaagcgcagtccgacgcgctggaaaaactggtggcgcagttcaggctgaaccagcagagcaacgtggaaataacggcggtagagccagtgaagccccagcgccagcaggagaatacgctcgctcagtgggaaaccttttaa

SEQ ID NO: 122912 - DNA, 894 bp, Enterobacter cloacae
atgcgattaagtacgctttatatgtatcagaaaagcgccgagagcatgacgaaacgcatgagtcaaagcaacgacgtttatttacgcatgtcggcaggcaaaacgctgttaaaggcctcggacgacccagctgctgcgacggacgcggtgaaacatcaggatgcgctggcgaagctcgagctttacagcaacgtccgttcccgcgtgcgcgggggactggagtttcaggacaatattctcaacggcgtgggcaacctgctgaccacctcgctgaaggaaaagatcgttgcggcgaacagcgatacctattctccggaagatcgtcgtgcgctgggggaggagattaaagggatccgcgccaatattctggatcttgcgaatacgcgtgacagtaatggtcgctacatcttctcggggttcaatactgatacccccgcctttgatgaagtgggtaactaccgtggcggcaatgaggtccgtcagcagactgtggctgatggaacgcaaatgcaaacgggccatctcggcgacgagatcttcggggatatctttatggtactgaacgatgcagtggctgcgctgaccatggatcctattgatgatgcgatgcttgatgatgcgctcgaagctgccagcaaagcgatcgatgcgggcatcgatcgcctgggcaaagtgcaggctgaactgggtaccaatatgcagcagcttgacgcgctggatctctccggggatgtgctgatcaatgacaccattgttaaagtgcagaacgccattggggccgacaccagcatgctggtcaccctggcctctgagtcgcaaatgtccgagctggcgtttagcgcctccatgtatgtctaccaaagaatgcagacgatgagtctgtttaatcaataa

SEQ ID NO: 122913 - DNA, 1599 bp, Enterobacter cloacae
gtggcgcagtcggcgcttcgggtgacaggggataacctgaccaacgggatgtccggcatctacagccgacgcaatattacgattggtgaactcggtggcagatcgaccacgcagggcttttacggtttcggcgcgcaggtaagcggcatcgaacgcgcctatgacgccttcgccaataaccagctgcgcggatcgctctcccattacgcctccctgagcgggcgtattgagcaactgagcgatatcgacaacatgctggccgacgagtccgataacgtctccgttgcgctgaacgacatgtttaaggccatggcaacgctgagcggcgatccggcggacggcccggcacgcgcggcggtgtttaactcccttggcacactcagcaaccgctataacgccagcgctaagcgcctcaccgcactggaaaaaagcaccaatacccagatcgaacaaagcgctaaagatatcaacagctatacccagcagctggccgagctgaacaaacagctcgagcgcgcgcaggggagcggcacgcctcctgccgatctgctcgaccagcgcgacgctctgctggagaagatgagtgagcatattggcatcaccgtaaccgagaaccagaccaccggacgggttgacgtaacgcttgccgatggacgtccgctggtttccggcgacacggcctacaagctgcaaacgtcgccgtcggacagcgatccgaataaaaccatcgtctcgtatgtggacgcgaacggcaaagccacgccgctggatgagagcagcgtgaccaaagggcgtctcggcgggctgtttaaattccgcaatgaagatctgacgattgctcgccaggagctggatcagatggcctttatgatggcgcatcgcatgaacgagcagaacgcggcgggatacgatgcgaatggcaatttggggggcgatcttttctcgctcccggatattaaagcgttagccaatgcgaaaaatcagggtagcgctcagctcgatcagatcagggttaccgattacaaaaatgtgaaatcggaaaattacgccgtcacctttgacggtactgattgggttgtcactggggaagatggccgtaccattactctcgaggcaagcccgttgggaacgctaaagtttgacgggatcgagattaccattcctgtcccatccggtgccatggcaggggacactttcacccttaaccctatggcgggagccgcagaagggatcagccgcaagatcaccagcggacaagagttcgctgcttcagatagccccactggggcaggtaataacaccaacctggaagcgatgctgaaaatccaggatgaaaaactgattggcaaaaataccctgagcgaagcgtatgccagcctggtgggtaccatcggtgaccgggcgcgcagcgtcagatccgaagccaccagtgcggaaatcgacttcaccaccaaatacgaaacgaaacagagcatttcgggcgtgaacatggataacgagcgtatcaacctcgacatgtttatgggctactaccgcgctaacgcgcagctgctgcaaaccgcgaccgatatgttcgacgcgcttctctctatcagataa

SEQ ID NO: 122914 - DNA, 921 bp, Enterobacter cloacae
atgaacgccttcgacaagctcgatcaacccgcctttgatgtccgatcgctggatacgttaaaacgggaggccgggcggcaatcgcccggcgcgctgaaggcggcggcgaagcagctggagggggtattcgtgcagatgatgatgaaaagcatgcgcgatgccaccttcaaggacgatctgctccacagccagtcggccgagatgtacaccgccatgcacgatcagcaggtcgcgcaaaatatcgccgggagtggtcagctcggctttgccgatctcatcgtccgccagctcggcggcgagagcgatgcgcccgtggtgtcaacgccgggtcgcgatctgctgcgtccggggctcgcttctgccccggcaaccgggccgctgcgcctgcccgcgccagtgtcgttcgccagagcggcggaaggggcacatccgtttatttcacgcctgctgcgtccggcgcaggaggccgcacagcagagtgggctgcatccgcacctgattctggcccaggcggcgctggagtccggctgggggaaacgtgaaatccctgcggctgacggcagcccgagccataacctgttcggtattaaagcgaccggcgactggcgcggaaaaaccaccgaaatcaccaccacggaatacatcaacggcgtgaagcaaaaggtgaaagccgcgttccgcgtctatgactcctacgaacatgccctttcagactacgcgaaattactgaccaaaaacccgcgctaccgcggcgtggtgcactctgactcggcagagcagggcgcaaaagcgttgcaggcgggcggctacgcgaccgacccggcctatgccaaaaaactgatcgccattattcagaaggtaaaaggcgacattcatcagggggttaatgcttaccgaaacgatctcgacaaaattttttag

SEQ ID NO: 122915 - DNA, 783 bp, Enterobacter cloacae
atgattcgttctttatggatcgcaaaaaccgggctggaagcacagcagctcaatatggacgtcatctccaacaacctggcgaacgtcaataccaacggctttaagcgtcagcgcgccgtgtttcaggatctgctgtaccagaacatgcgccagcctggcgcgcaggccacggagcagaataacctgccgtcgggtctgcagctcggtaccggcgtacgtcctgtctccactcagcgcatccacactcagggggggatgaactccagtggtgatgagtatgacgttgccattgaaggcgagggctttttccaggtacagatgccggatggcagcaccgcctatacccgggacggtcacttcgggacaaaccaggatcgccagctgaccaatgccgaagggtatccgatccagccaggcatcgttatcccgcaggacgccaccaagctgaccatcggcagcgacggcattgtcagcgtgaaggtgccgggtcaggcggaagagcagcagatcggccagctgacgctgacgaccttcgtcaacaacgcggggctggaaagcatcggcggcaatctctaccgggagacgcagtcttccggcgcgcccaacgagctgaaccccggcatggagagcgcgggcacgctgaagcagggctacgtggagatctccaacgttaacgtggcggaagagctggtgaccatgattcaggtgcagcgcgcctacgaaatcaacagtaaggcggtctcggcatccgatcagatgctgcagcgcctctcccagctgtaa

SEQ ID NO: 122916 - DNA, 738 bp, Enterobacter cloacae
atggatcgcgctatctataccgccatgagtgccgcgaatgcggcgctcaaccgccaggcggtcacctccaataatctggcgaacagctcaaccgcaggttttcgcgctcagctggcggcgtttcgttcggtacccgtcgagggcgaaagcctgcgcacccgtgcgctggtggccgagtccacccccttccatgatgagagcatggggccgattacccataccgggcgcagcctggacgtggcgctgccgcaaaacggctggctggctgtcgccaccgaggagggcggcgaaggctacacccgtaacggcgccattgaagtcgatcagaacggggcgctgagcgtcaacggccgtccgctgatgggcgatggcgggccgctggaagtgccgccgcagtctcacgtcaccatcggcagcgacggtaccgtctcggcgctgggcatgggcgatgacccgaccgcgctggtgccggttggccgcctgaagctggtcaatgcggagatgaacggcatggttcacggcgacgacgggctgttccgccccgcggacggtcagccgctggcgcaggacgaaaccctgcgtttgaccccggaggccatcgagggcagcaacgtcagcccggtgcagatgatgacccagatgatcgccaactcccgcggcttcgacatgaacatgaaggtgatccgcaccgccgacgaaaacgcccagaaggccaaccagctactcagcgtgagctaa

SEQ ID NO: 122917 - DNA, 1224 bp, Enterobacter cloacae
atgggtttttcacaaggtcttagcggcctcaaagccgcctctaaagcactcgatgttgtcggtaacaatatcgccaactcacagacgatcggttttaaagcggggactgccgctttcgccgatattttcgccggtgccgtcggtctgggggtgcagcttgctggcgttacccaggattttggtcagggtaaccttaactataccggcggtaatatggatatcggcatcaacggtcgcgggttcttccgcatggcaagtgaagatggcagcatcttttacgggcgaaacggccagttcgagcaagataaaaacggcaatatttacaataaagtcaataacctgtttttgacaggctatcaggcggtgaacgggcagattgtccccggctcaccgattggacccgtcactatccctaccgggaacatggcgcctgaagcctccaccacgggttccctgaccggtaacctggatgccggggataagaaagtcattacggcaccttttgaccatactgatcctgaaacctataactacgtcagccatatcgaagcaacagacagcctcggcaacaaacacgctatgaaggtgtactttgttcaggatgccgcgggtcagtggaaggcatatggttacgatgagacagcaccaaagaaaatcaccgatcccggaggaggacccgatctggattacagcgaagtggcgttagtgtttaacacggacggtacaatccagggtaacccgaagctgaaagtatttggtgctgcggtgaatggctcctctgacataaccgtagaactggatctcgccggcatgaccaaacaggcgggtgaaagtctggtaaaaggagagaagattaacggccaccccccgggccagtaccagaactttaccattggcgataatggcgaagttgtggcgacgtacagtaatggccagacgctggtcgtagcgcaaatcatcctcgccgatttcgcaaacagcggcggtctggaagcgaaggggaacaacgtctgggcagagacgccacagtcgggtcaggctttcctgggtacctccggtgtgggcagctttggcagcattaacgggcagagtcttgaagcttcgaacgtcgagctgggtgatgagatggtcaacatgatcgtctaccagcgcaactaccagtccaactcacaaactattaaaacccagtctgagctgctgcagaccctggttaatatgcgttaa

SEQ ID NO: 122918 - DNA, 699 bp, Enterobacter cloacae
atggcggtttcttcagtaaataacgacagcaggaacggtgacaccggcgcgggcaacagcgcggccgatctgtcggaccagtttatgaaactgctggtggcgcagatgcaaaatcaggatcccaccaacccgatggacaacaaccagctcacctcccagctggcgcagttcaatatggcggcgggtgtagagaagctcaacacctctgtgacaggggtgcaggcgctgatggttcagcttggcagtatgagcgcctccgcctgggtggggcgcagcgtgctgattgagggagatccaaaagcctccttcggcggtatcggtatcgatcaggaaggggtagagcgacctgccgcggatgattttagttttgtcctcggcggcgacgcggagacggtcaccgtcaccctgacggacgatcaaggcaacggctataccgcagagctgaaaaatgtgaaggcgggcgtcaagacttatagccttgacgatctcgaaaacttcaagccagagcctggtccaccgcaggatcgcgaatacaccctgagttttgaggccagcaatcctgaaggggagaaaccgcaaatattcggcctgatacaggagcaggtagaaggcgtcaccatcgaagcgaacgggccgattctgcatctgcgtaaccacgatccaattggcatgggtgatgtggttgtcatccaaaaataa

SEQ ID NO: 122919 - DNA, 411 bp, Enterobacter cloacae
atgaataaactcgatgatgcctttcgctttcagcagcaggcgttaggtttgctttcacgccgtcaggaaatactggcttcgaatattgcgaatgccgatacgccaggctacaaggcgcgagatatagattttacgcaacagttaaaaagcgccatggaaaataacgccatggccaaatctcccgtatcactgtcattaacgtcaaaccggcatatcgaaggtaaagccatgccgttagacgacagtcagttgctctatcgcattccggatcaaccgagtgctgatggaaataccgtggatatggatcgtgaacgcgtcaattttgcggataacgctgtgaaataccagtcaggactgactttcctgggcgcggatattaagaaaatgatgacagtgttaagccaggggtaa

SEQ ID NO: 122920 - DNA, 699 bp, Enterobacter cloacae
atgacttcccgactcgccggtgcggcgctcgccgcaatgttctgcgccgcgagcgccgcagccagcgttccgtctgagcaaacggcaaagcagcgcctgctgctgaagctggatgtactgatcaaacagcccgagaacggcaaagatatcgtgcgtacggcaacgttgctcgccacgcctgcgcaactgtccgctgtctgcgataacccggaactgagcctggtgggccgcgacagccgtctgacgggcaagcgaacggtgcttgcccaatgcggtgcccggcggcattttctaccgatacgcatcagcgcccagggtacctggtgggtggccagccagagtctgccgggtggcgctatcgtccagcgtagcgacatcgaaccggtcaccggcagcctcgacggccagcccggcggcctgatcttcaacgccgacgagattatcggccagcgcctgacccgtgcgatcaacgtcggtaaaccgctgctggaaaatcagctgcgccagcagtggcggctgcgtaccgggcagacggtagacctggtcaccaccggagagggttttcgtattcgcagtcagggcaaggcgctaaacaacgctgccgtgaatgacacgctcaacgtcaaaacccctggcggacgcaccgtcagcggaaaagtcggcccggacggccaggtgatgattttttcacaacaataa

SEQ ID NO: 122921 - DNA, 291 bp, Enterobacter cloacae
atgagtatcaccagcagccagcacgccgccccgattgcgaaaatcgcgccgactcaggaactgcgtcaccgcacacaggcccaggagcaggacgcttccacccacgtggtgaaaagcgacaaaaccgacgtcacgctcagctcgctgacgcacaaaattcaaaccgacgacagccgcgacattgactacgcacgcgtagaggcgatccgcgctgaactggcggcaggtacgctgcgcattgagcctgagaaaattgctcaggctctggtgcaggaaatgttttcgttttaa

SEQ ID NO: 122922 - DNA, 444 bp, Enterobacter cloacae
atggacaagctctaccctattctcacgcagatgaaaacgtctctggatgaactggaggcgatcatgattgaagaggttaatcagcttaaccgcgcgcagatcaacccggtttcgctgcaggtgctggccgacaataagagccagctcctttcaaccattcagtattacgacgatatgcgtcgccagcaggagcagctttgccgggcggaagccccctacccgggcctgggtaagctgtttgccagctggcagcaggtgacggaaaaagtgcgtcattcaaaagcgctgaatcagcaggtggaatcgctcctgcagagccatatgaagaaaaatcagcatattcagaaggcgatcgaacaggtgggccacgccggctcgctgtatggcccggcgggtgaatccagccacgtcccttctggtcgcaaatacaacatcagtatctga

SEQ ID NO: 122923 - DNA, 306 bp, Enterobacter cloacae
atggaactccttgaacagatgctgataagcaacgcgacgctgctgcagcaggccgataacggcgagtggacggcgtttattgatgaatccgaggcgtacgcgatggggatgcgcacgctgtgtgaagtggatttaacccaactgggacaggagacaaaagcgcaggtgagcgcgctgctcgcccaactgctggatcaggatgcgttactgacgcgggcgattcaggcgcggttgtctaccatcagcagcgaactctccacgctgcgcaaatctaacgcctccgcgaaagcgtataccgctgtctaa

SEQ ID NO: 122924 - DNA, 408 bp, Enterobacter cloacae
atgtacaccaaaacaggtaacagcgcctactctgatatctcgctggagagccagattacgggcgcgacaccacaccagcttatcgtcctgctttacgacggggcgattaacgccatgaagcgcgcagagatttacttccagtccggcaatatcgcccgtcggggcgagatgctctcgcgagcgattaacatcatcgacaacggcctgcgcgccgggcttaaccacgaaaaaggcggacagattgccaccgagctggagagcctctacgaatacatttcccgcacgctgctggaggcgaacctgaacaaatcaggcgaaaagctgccacatctgatcgcgctgatgaccgacatgtccgaaacctggcaggccattgccccacagcagaagctggtgaagcatggataa

SEQ ID NO: 122925 - DNA, 1485 bp, Enterobacter cloacae
atggcagcaaccaattttttaggcgtgggctccggcctgccatttgatcaatggctggcggacgaacgtaaaggcattactcaaaagctgaatccgtatctgcaaaaacagagtacctataaaggacagatttctggctggggttcgatttccagttcattaagcacgctgaaagataatctcagcaagctaagtgatgaagggttcaacggcgttagcgtcagtgacaacaaaaactttaaagcgacggccggaagtggggctatgccaaacagctataccatggccgtagagcagctggcatcggcacaccagatgaacttcgtgcataccgaacgcgataaacccatttctggcaacaaagcgaaaattaccctaaccgtaggggatggcgctaagcccattgaggtgtcactcgaaaaaaatgagacctcactggaccaaatggctaaaaaaatcaatgcgcaaaatagtgatgttgtcgcagaagtggtaacggtcaaagagggtgaacataagctggttcttacgtcgaaaaaaacgggtaaggacggcgagattgagatgaaggtgtcaggcgactcagcctttactgccataatgggaacacccactttagaaaccaaacccaaaaacgcaatcattcatctgaatggcgaagaaatagagcgtagctcgaacacaatcagcgatttaattaccggcgtgacgctggaattgcgtgaggtctcggagaaaaatcctgattatccgggtgatcctgacgcaagcgaattcaaaactgagtctctcaccatcacccgggacacctcacaggtaaaaacgctgattgaggagttcgtcaagaactacaacagctacctcagtaccacggccagcctgactaaatacaccgcgccggaccgcaacaccaattctgacgctctcccacagccggacccgagcaacggtgcgctgttcagcgacggttccctgcgtcgtcttaccagccagctcaaggccactgtcggcgggacctatcccgatgcgggggacgttatccagacgctgggcagtatcggtattaccgtgaagtttgatggcaagatcggcgacgagcgtggcgggattctgggcgaactctccattgactccaaaaagctggacgcggccctgaaggataacccaaaagaggttgaagcgctgttcctcggcaagggcggtaaagagggcatcaaagaccgtatggaggggattttcgatacctacctcggtgataaagacgcgatcaaaaaggaagacggcgtgattgaaaccacgctggagtcactgcgggagcaggagaaacgtatcggaaaacagattaccgccatggaacgccgtatcgaagagaccatgctgcgccgggaaaaagagtttcagcgtctcgataaagccatgagcgatatgacgagtatcagtaaccggctgcagcagtcgctgctggaattgtcaaaaagcctttaa

SEQ ID NO: 122926 - DNA, 1521 bp, Enterobacter cloacae
atggcacaggtcattaataccaacgcgttgagcctgatggctcagaacaacctgaacaaatcccagggtcagctgggtaccgcaattcagcgcctctcttccggtatgcgtatcaacagcgcaaaagacgatgcagcgggcctggctatttctaaccgcttcacctcctctatccgcggtatgacccaggcggcgcgtaacgccaacgacggtatctccctggcgcagaccaccgaaggcgcgctggaagaagtgaccgaaaacatgcagcgtattcgtgagctgaccgtacaggcgaaaaacgggactaactccgcaagcgacctggactccatcaaaaaagaaatcggtacccgtctggaagaaattcagcgtgtggccgatgtaaccaacttcaacggcgtgaaagtgtttgacggttccaagtctgaaatcaccatccagattggtgacaaagacggtgataccatcgatatcaaactgaacaagctggatatgcagaccctgggtctggacaaattcatggacgacttcgccgatatcggaatcactatgaatggtgtgggtacggctagcagccagtacgagcaagctgccgttaaaaagaatgcaaccgaggacacaggcatcgatgcaggcggcggcttaggtaactggaaagtacatgctgatgatgcagctaaaatcgaggccgggatgactggcacgaatactcctgcagctgaggtttatgtacttgatgacaaagcctttgcttatgatactgccaatgacaaattatatgaaatcgaccttgctgcggtgcaatttgaagatgacggcagcggcgcttctgccaaaatccaagcagatttaactgctgctaaccttaacgaagttactgacgcagccgataaagatatgctgctgaaaggtccatcccagctgggtaacccaaccaaactggctctgggtgacacaatgacagctgctgatggtaccgatgtgacgctggatcaaactcagttggatgcaattgccaactctgcttttggtcaggacgcagaagcagctaaaatgcagcttttctccgtaactgagggcggggcaactaaggtcttcgcctatggtaaagatgcaggtggcaacgatgttgttactgaagtgaatttcgctacaggtggtgggacaccaggtggtctgaccacgccagcagcacgtcaccatgacgctgagtttatcaaaaaagaagctggcgccgctgctggcgataaactgctggaaaaattggataacgctattacccagatagctgatttccgcgccgacctgggtgccgttcagaaccgcttcagctccatcattgcgaacctgaacaccaacatcatcaacaccaccgaagcgcgctcccgtatccaggacgctgacttctccgttgaagtgtccgccatgagccgcgctaacatcctgcagcaggcgggtgtgtccgtactggcccaggcgaaccaggttccgcagaacgtcctgtccctgttgcgttaa

SEQ ID NO: 122927 - DNA, 453 bp, Enterobacter cloacae
atgactattctctccaccctctctaatccccccttcaacgctaacttcactcagcagctcatcgcgttaccccttccggcaactgccgatctctttgaggtggctgacctctgtgccgccttcgccagcgtcctggttgaaacggataacgtcagcgagcgttatgccctctgcggacgtttgctgcatgccctgactgcgctggaacggctttgcgatgacgatttaccgcagcatctgattgaacagctcattgccggtgaggctgccccgtcctgtatgccggatagctggcaggaaacaatcacaccggtgaagtacgcgcaggcactggcgcaggcgatacaggggatcaccctgcctcagagcgtgaattacgcgttggcgggattgttgcatgatatggtgtatctgctggcgggcttcgtgaaggagccatacctgcagccttaa

SEQ ID NO: 122928 - DNA, 378 bp, Enterobacter cloacae
atgaagatgaaacctgtgtacgggctgtttgtggcgctagcgctgggaggctgcgccgaacgttcaacggtaacgacggacccggttcccccctcgccagagccggatttttccgcgctgacgatggcctgcagtgacggcagcggcccagaccgtatggcgaaaatgtacaccaaaagtgaaaccgtgacttttgacgggaaaacgtatcgctttgtggcaccgtcgggggaaacgatggacacgtcgaaaatgacgtttcgcaatgaggccggggagcaactgcagttcgacatgagcaagccgggatacacaccgttactgcggatccacgccgggcagcagcaggcatttaagtgccagaacacgcagaaatga

SEQ ID NO: 122929 - DNA, 1899 bp, Enterobacter cloacae
atgatgtttaaaacccttcaaagcagagccatcttgctggtctccgcgttctttttattgcttatctcgcttaccctctgggttgtcatgtcctttgttgcgccgccgctgctgaaagatgagtaccggcgggtgcacctgcagattggtgagcaggccgccgctatctcgcagatgatgtcacgcgtgcaggcccagcagcgcgggctgactgaaaccgtcgcgcagttggacagcgccgatatcgaccgtctgttacccgcgctggtgaaccagtacggcgaccggaatctgtttggcggcggcgtctggccgctgccgggaaaacgtgagccggggctggcgaaattcagcaccttctttgcccgtgacgatcagcaccagctgcgcctgaacaccacctggaatacgcctgaagcgccagagtactggcagcagccgtggtttaaggccgggctgaaggcggagaaagggcagtgcgcctgggcggctgcctacgtggatgccgccagtccgcagccccgaaccaactgcgcaatgcccatctggcgtaacggggagctttggggcgtggcaacgctggacgtcacgctcggctttttcggtcagctcgcgcgcaaaatcgccgagccgctggaagggggcgtgctgattgtcgaggccaacggcaatattgtcggctacagccgcaccacggaaaacgcgccgttgctgaaaaacatccgcgagctgccggggcatgaaatcaccattctgcaggagatgttaacccaggcgcaccgcggcgcgcaggagcggacttaccgcgccgatgacggggagcacaccatttttgtctaccctattgcgggcagtccgtggtttgtggcaacggatacccggaccagcctgctgagcaagcaaacggacaatatcctgtggcgtctgggggcggtgcagatcccgctgctgctgttgctggcggcggtgctgctcctgacggtacgcctggtgatggggaacctgcgcaccgtcagcgatcggcttgccaccttgtctgctggcggggccgatctgacgcagcgcttgccggagagccgtagccaggagctgaatgccattgcccagaacgtgaatgcgtttatggcctatctgcaggggttgttgcagcaggtgcgtaccagcacacgcaccatcgcggaagcttcacaccagattgccgacggcaaccactcgctctcgtcccgcaccgaggagcagtccgcctcgctgacgcagacggcggcttcaatggaacagatagccggcattgtggcgaacaacgcggataacgctgagcatgcggacaagctggcgaccgaggcggcggccgtggccgggcgcggggtggaactgatgcgtgcggcggtcgagaagatgggccatatcgaatcctcttcgcgacgggtgacggatatcgtgggcgttattgacggcattgcctatcagaccaatattctggcgctgaacgcggcggtggaagccgcccgcgcgggtgagcaggggcggggcttcgcggtggtggctaccgaggtacgcaacctggcgctgcgctcctcaagctcggcgaaagagatccgcacgctgatcaacgacgcggtgacgggcatccagaagggcagcacgctggtgcaggacgccggggaaaccatgaacgcgctggttacctccgtgcatgaagtctctaccctgatggaagaggtcaaaaccgccagccgcgaacagagcgtcggcattgagcaggtcaacgtggccgtctgccagctggaaggcgccacccagcagaacgccgcgctggtggcggaagtgtcgatggcggcgaaggcgatggaagagcagtccgtcgagctgtacagcgtggtgcagcggtttaaggtctga

SEQ ID NO: 122930 - DNA, 1164 bp, Enterobacter cloacae
atgatatttgcagtcacactggtcgttatttttattacgttactgatcctggtgcagtccggggtgataccgtggtttattcgcacggaaggggatcggctgcgctcgcaggtggatgcgctggcctctgaattacgcgagcaactggatcgcgttgaagcgcagcagcgctcgatgaccgaaagcgtggtgaccctgaaaagcttcgcgctggacaagagcgcgccgggcgacaccgatatcaccgaagagtcaggcaacagccgtcagttttttaatgcgttggtcaaggagatgggggagcgcctcggcggtcgcgtctggatcgttgaggagaccggctgcatcattggcgatgccgccggtgcgccgaacgtgcagtctctgaatgataccgatctgccgatggcggtaccgctgcgttcgctgctgtcgcagtcgggtgaagggctgcgccatacccgttttcgcagcgccagcggcgagcatacgctggtggtgcagccgctggcggaaatgccgtggttaatcgccctcgacgtgcctacccgccgcatgggggaacgtcccggcattctgctgcataaaccctggccgctggcagcactgctgctggtctccacgctgaccttgttgcgcagcctcaacctgcacctttcccgcctcaatgaagagctgccgtcacagttacaaaacgagcagggtgcgcatctgcccccgctgatgcaggagctgggggaacaggtcagcgcggtggcccgggcggccatcgccattgcggaggctaatgaacgtctgctgcgcgtaccggaggcgagcgccaaccagctggcgacgcttgctgacagcgccacgaacgtggtgctggccatgcataccctgcacggtgccgcgctgaacattgccgaaagcagcggcgtgctggtgcagcttgccagccgggcctacagctattcgctgcataacgaagagggcgtgtttgccgttgagtcgcgcaacctcgccagccgctgcgcgcgctcctcgaaagagcttcgggcgctggtggaggacgcgatgatgcaggcccagagcggcgctccgtccgtggcgcacaataacagcgtcctgatagaagaggtctataccgtggccaatacgctgacgcagcggttacacacctga

SEQ ID NO: 122931 - DNA, 492 bp, Enterobacter cloacae
atgttaactttaaaacgttttatgcaaacgtccgataccccggcaatgttacccgcgcttatcgcccggctggttctggggatatttttctttacaacgggcttcaataaattatttgtgcctgaaaaccagcaactgatggtggataccctgcacgatgcagggatccctttcccggccgtgatggctgtggtggtggcgtttctggagtgcagcatgggaatgctgctcgcgctggggctgttcagccgcttaagtgccctgacgctttttatcatcagcggcgtggcgctggtcaccatcggtatctacaccattcctcagggactgacgctgatggcatggttaagctggctgttttatctgccggagacgctctacatggtgctgagcctgttgttcatcatctggggtggcacgctctacagccttgatggctggctggtgaagcgctggcagggtatgcgccaaatagtttttgtcgagggatga

SEQ ID NO: 122932 - DNA, 816 bp, Enterobacter cloacae
atgctcaatcatattgcgattggatcgttaataacgctggatctccagacgcgcatcctcacccgcacggaccgtggagaaagcgttaccctgccgcaaagcgcctgtttgtgccttgccgcactggtggaagccagcggagaggtgctctcacaggaacagctgatggagatcggctggcgaagcgccggggttgaagtcaccgacaacagcgttcgggtcatgatcaccaaacttcggcgcgcgttcacgcagttggagatgcaggacgttatcaccctcatggcggtgacgcgcactggctatcgcctggttgttcgcagcgacagcagcgaacataagccctttaccgatgcggaaccgatagcaacatctgaggccaccgaagcatctgccgcccctgaagcggtcataccctcttctccccctccgacccgtaacctgttactcccccggctgctcatcaccctgagtgggctggtggcgggcattgcgatagccatgatcctgcgcagcctgttcgattttaacccgcagcccatccactttgtgcgctggaacgggccgggtatcccgcccggtacggtggtgatggtccagcaggataagcagacacagcgcgatctgatcgaatccacactgcagacctacacccgccacgtgctggacagacgccctgccgaaaagcccgctggcgtgctgtacgtcacgaccggctcagaaaaaatgagtaaattccaggggcttattgcctgccaacaaccctttaaggattcagggaatgattgcgaatcgttctattttcgccactattaa

SEQ ID NO: 122933 - DNA, 525 bp, Enterobacter cloacae
atgattgcgaatcgttctattttcgccactattaaatcgccacgcgtcctgctgtttcttggcgggctggtcgccggattaggcgggatggcgttctatgctttctcaacctcgccgtacaaggccgtctgcatcgcgcccatgtcgtattacaccattgaggacgataacaacgcgacgctggcgcgcggtatttaccgttcctaccgtgatggtctgtttagcgggcataccacctatatcggcagcatcagccatttcaaagatggcaaacgcgacgggttacctaaagccgtaaaccgtgaagttcgctacgatgtcggtatgtcaggcaaacgggtccatctgaccgtcaccagccagcaccgtaagctcggcggtcagaccacggatgaagatgtggctgaatatatcttcccacaaattaagccgggtgaaatcgccaccagcaccgtctacctgcttgacggcaaagtgttggcctccgggtcggaaaccgtcgcgcgtattgcctgtatgaactga

SEQ ID NO: 122934 - DNA, 780 bp, Enterobacter cloacae
atggcctttggacttcctctcgagcagctttacgggctgctcagtcactacttctttattatggtgcgcctgggggcgctgctgcatgtcgccccgatcttcggcgagaaaagcatcagcccccggctgcgggcatgtcttgcgctgctgacggcgatcctgattggcggcacgttgccggacgcgcaggtaggtctctactcgtgggaaggcgtctgggtgatggcgaagcaggtcattatcggtgccgcgatggggctgacgctgcagttactctttgctgccgtgcggatggcgggtgagatcatcggcatgcagatggggctgtcgttcgcgaccttctttgaccccggcgccggtaacagcccggtgatatcccgtttccttaacctgctggtgatgctgctgtttttggtctttaacggccatctctggctgctggcgctgctggcggaatcattccaggtcctgccggttaacgccacgccgctgcatgcggggggctttatgtatctggtgacccacgcggggctgattttcagtcaggggctgatgctcggaatgccgattattgcgctgctgctgtgcatcaacttcattctcgggttgttaaaccgtctgacgccgcagctttcggtctttgtcatcggcttcccgctcacgctcaccttcggcatgctggcgctcttcctgattgcgcagacgttggcaccgttctttgagcgcctgatggcccttgggtttgataacctggccgggctgcttcaggcgctggtgtag

SEQ ID NO: 122935 - DNA, 270 bp, Enterobacter cloacae
atgacaccagaaagcgtgatggtcattggtatgcaggccattaaggtagggctgatgatatcggccccgatgctgctggccgcactggtcaccggtctgattatcagtatcctgcaggccgcgacgcaggttaacgaaatgaccatgaccttcatcccgaaaatcctgatgattgtcggtatcgcggtggcgctggggccgtggatgatgaagatctttattgaatatacccgcgcggtgttcgccagcattccttatgtgatcggctaa

SEQ ID NO: 122936 - DNA, 741 bp, Enterobacter cloacae
gtgagccgccggatgctgcacctggtggtcggtcttagcctgatgttgcctgccgccagtggactggccgccaatgcggacatcaccctcggacaggcctcgggggacggaggctggacgctaccggtgcaaaccctgctgctgctcagtgggtttacctttattccagccgtgctgctgatgatgaccgggttcacccgcatcatcattgtgctgggcttactgcgtaacgcgctgggcacgcccacggcaccgccaaaccaggtgctggtggggctgtcgctgtttttgaccttctttgtgatgtcaccggtcttcagtcagatctacgaaaaagcctggcagccgctgcaggagaacaaaatcaccatggaagtcgccctggcggaaggggtgaagccgctgcgtgcctttatgctcgaccagacccgtgaaagcgatctggcgatgtttgcccgaatcgcgaaaacgccggatatcgcctcgccggaggaagtaccgctcagcattctggtaccggcatttatcaccagcgagctgaaaacggctttccagatcggttttaccatctttattccgttcctgatcatcgatctggtggtggcgagcattctgatggcgctggggatgatgatggtgccacctaccaccattgcgctgccgtttaaactgatgctgtttgtgctggtggatggctggcaactgctcgtgggctcgctggcccagagcttttacagttag

SEQ ID NO: 122937 - DNA, 369 bp, Enterobacter cloacae
atgaacgccactgattcactcccggctacggggtcggttctgatgaccatcagcggcgcgctggcgctgattgttctgctgctggtggtgctggcatgggccgcccgccgcagcggtctggcccgtcgtctgcagggcgcccagggaagcatgacgctggtcgccacccagtcgctggggccgcgcgagcgtctggtgctggttgacgttggcgagcagcgtctggtgctgggcgtgaccgcctcgcagatcacctgtctggcaacgcaggcgcgtccggaacaggcgccgcaggacaccgcgccggcggcgttcccgcagatgctggacaagctgcgccagagataccgttcgggaggtgaacagtga

SEQ ID NO: 122938 - DNA, 384 bp, Enterobacter cloacae
atgagcgataagaacacctcatcgggttctgacgatcagtccattgataatctttggggtgatgcaatgaccgaacagcacgctgcgggaattaccgacacaatggctgcaccacaattttctgacgagatgaatctgatcctggatattccggtcaaaatgaccgtggagctgggacggaccaagatgaccattaaagagctgctgcgtttaagccagggctcggtggtgtcgctggacgggctggcgggggaaccgctggatattctgatcaacggttatctgatcgcccagggtgaagtggtggtggtctccgataaatttggcatccgcattacggacattattaccccgtccgagcgtatgcatcgtctgagtcgctaa

SEQ ID NO: 122939 - DNA, 507 bp, Enterobacter cloacae
atgagtaataaaaataaaaaagtcgccagcggcggaggctctcgttcgcttctgatggcattcatgtttttgactgcggttgcggcgtgcggcgtttcgggttacctgttctgggaaatgaaatttgccaaaccggaagtggtggctgcagaaggtgaggccaaaacgccccccgcaccggtgcaggtcgagccactgtacgcctcgatgaatacctttaccgtcagcctgaaacctaccgagaacgaatccgatcgggtgttatatctggggttatcaattcgggtcgctgagccacagtcgctgacggttctggaaaaatatttaccggaataccgcagccgcatatttatgttgctgacccaccagacgtatgagcagttagcaacggatgaaggaaaacgtcggctgattaatgccattcagggtgagctggataaaccgctggcatttaaccagtctattcgcgtcactgatgttcttattaacgaatttattctgcggtaa

SEQ ID NO: 122940 - DNA, 1089 bp, Enterobacter cloacae
atgaatattgatcttgccaccctgttactgggtggagcgcagggcacaccgaaagcgggattgctctccgaagaaggcttcagccagacgctggatgagaagctggcctcgctggccgagcgctttccggggctggatctgcacatgttggtggcgctgccagagacggcgctggcgggcgcaagcttatcggcgagtttgctgccatcgaaactgaccgatgcagcggccattgatgatagggttgaagccgagggcttactgcttacggcagcgccagggctggcggaaacgctaaaagagatcgtgctgagcgacggtgaaggggaagagagcccgcagtggcaactgcagcagctgatcacccgcaacgtcgcaggggctgaacgcggcgttcgggcgaatacaggtaaaatcgccgacggcattacccctgaaaaacccggtgtaccatccggcaaactggccgcgccaatgacggctgccgataaaacgccggtcgccgcgccaggcgtgctgacggcgccacctgcgcccgtcgccagtgaggcggttgcgacggtggaggtcacctccgccccaaccgtgagcgccgtagcgcttccggctgcggtacgcaccagtgtggcccacgcgccgcagcaggtcgtcaccgtgaaccacccgccggagacgccggagtggaaacagtcggtgagccagcatatcgctatttttagccgcaacgggctgcacagcgccgagatccgtctgcatccggaagagctgggggcactccagatcaccctgcgcgttcagcaggagcaggcgcagatccatatcgtcagcgaacatgcacatgtgcgtcacgccatggagcaggccatgccacagctgcgggccgccatggcggaatcgggcattcagctcggccaggctaacgtcagtgcggatgcccagtacggggcggcaggtgagcggggcgataacccctcttctgaacagcaggcgtccggtgagggtgaagaacagccgctgaatgaggaaagcgtgccaacgttattaaccaccacacctggcaatatctacggaattaatacctttgcctga

SEQ ID NO: 122941 - DNA, 450 bp, Enterobacter cloacae
atgaaggtcaataaccccatgacgctcctgcgtgatatggcgcaggagcaactgacggaaaccacccgcgcgctggggggtgtacagcaacagctccagcaggcggtggtgcagcacgaacagcttcagcactacgaacaggagtaccagcagtcgctgcgtcagggaatgatggatagcgggatgtcggtagcagacctggtgaatcaccagtcatttattttatcgctgaagcaggttgtgaagcagcaggaaggacatgtgaacgcctgtgaaaaagcggtagatgacgtgaaacagaactggctgcacaaaaagcagcgcctgaacgcgtttgaaacgttaatcgagcgccgcgcgacggcacaggcgctgattcaaagcaggcatgaacaaaagctgatggatgaatttgcccagcgcgccggacagaagagagaaaggctatga

SEQ ID NO: 122942 - DNA, 705 bp, Enterobacter cloacae
atgatgcctacgtttgataacaaccaccagcaatggcagagctggcagcctgacaatctgctgggtgaaaccgtagaaacgccgctgccgacgctggataacacccagtcggaggcgcagctcaaggcagaactggcacgtctgcgcaagcaggcggagcagcaggggtttgcgcagggccagcagcagggccaggaagagggacgaaagcagggctacgaggcgggcctcaaagagggccgggaggccgggtttacccaaggcatggagcaggcgcgtcaggagcaacaggcgctgctgcgccaggcggagctgtgggtgaacaactttacgctggcgctggaaaacctcgaaagcctggcccccggtcgtctggtgcagtttgcattgacggccgtgcagcagctctacggtaacgccagcatggcggacaaccaggcgctggtgagccagatccgtaccctgatgaaacaggacgtcctgctgcacggtgcctttacgctgtacgtcagccccggtgagcttgccacagttgagcaggcgctgggcgacacgctccggtcaatgggctgggagctgcacgcagatccgcagctggccgcaggcggctgtcgcgcggtttcaccggatgttgaggttgatgccagcatggaaacacgctggcaggcgctgtgccagctggcgcgcgaggagctctcgcaatga

SEQ ID NO: 122943 - DNA, 1680 bp, Enterobacter cloacae
atgagtgccacactaaatgatttaacgaataatccagcagagcgaatgaaatcgatgctgtccgcgcttcgcggtagcccaaagctactgctggtgatttgcggcgcagcggcgctttccgtcattatcgccttactgttctgggccaaagagccagactaccgcgtgctgttcagcaacatcagtgatgaagagggcggcgcgatcgtggcgcagctgacgcaactgaatgtgccttaccgcattgagacgccgggaggcgttatcatggtgccggactcgcaggtgcatgaggtgcgcatgaagctggcccagcaggggttgccgaagggcggctcggtaggttttgagctgctggatcaggaaaagtttggcatcagtcagtttaccgagcaggttaactaccagcgcgcgctggaaggcgagctggcgcgcaccattgaaaatctgggtcccattcagagcgcgcgagtgcatctggcgacaccaaaaccgtccatgttcgtgcgtgagcagaaaaagcccactgcgtcagtgaccgtgaatctgatccagggacgtacgctggacgacgcgcaggtggtggcgattacccatctgatctccagtgcggtaaccgggctggcggcagagagcgtcaccattgtcgaccagcgcggcagcctgctgacccagagcggcgtccgaggcctgcaaacggcgcatctgaaatacaccaatgagatcgaaaccgactatcagcagcgtatccagcgcatcctcgcgccgttagtgggtgatgaaaatattcgtgcgcaggtgacggcacagattgatttcaccgaacaggaacagacgcaggagcagtaccagccaaacgcggatccgcaaaaaatggcgatccgcagccgtcaggccagcctggcagagcagggtaaccgccgtggggccagcggtgtgccgggggcactgagcaatacgccgcccgcaccggccaccgcgccggtcactcagccgttagatacccccgcggacgagaaaaaagagacaaacgcggcaagcaacacccgtcgtgagcctgcgcagccttacaacaaccgcagtgatgaaaccaccaactttgagctggatcgcacgctgacgcacaccaaatccaacaccggccgcatccagcgtctgtccgtcgccgtggtgatcaaccatcttccacagggagaagaggggaagcctgggccgattagcgaggcggaactcacccgcatcaatgccctggtgaaagaggccattggctataacgccgcgcgcggggacagcgtcaatattcttaactcggcgtttaacggcgtggtggaagaggccgtgccgccgttctgggaacaggatcgtttctatgcgttgttaatgtcgattgcccgctatctggtgattgcaatcatcgcctgggtgatgtggcgcaagctggtacagcccgcctggcagcgtcatcaggagaccaccatccgtcgcctggagatggaaaaagaggcccgcgaagagcagatggccgcgaaaaaacgtgcggctgacaaaatcaatcgcgatcgggcgcagcagaaggtggatacggaactcaatagtcaacagctgcgtgaactggctgagcaggagccccgcgttatcgccctggtgctccgtcagtggatgagtaaggagccaaaataa

SEQ ID NO: 122944 - DNA, 324 bp, Enterobacter cloacae
atgtcagcgacattaatgcgtggcgtccttgagcaaatacagactcaggcgcaacaggtcggcggcccggcaaatcgcctgcatccggctcgcaccgacggcccgtcattttcggatgcgttactaaacagcattaacgaaataaataaaactcaggtcgaagcaaaaaccaaaacccagcaatggatgtccggcagcagcgatattggcctgaatgatgtcatgctggcaatgcagaaatcgtccatttctttcagcttcggcatgcaggcccgaaataaaatgatcggcgcctatcaggaaataatgaatactccggtttaa

SEQ ID NO: 122945 - DNA, 855 bp, Enterobacter cloacae
atgagtgaaattaacagcattcctgcacgcttatctctgaatacgctttcattgaccgacggcgaattacagcgtgtcggcaaattaatctataagcgcgcgggaattgtcgtcaatgcccaaaagcgagagatgatttttaatcgtctctctcgccgtgtgcgctcgctggcgtttagccgttttagtgactatatcgagttgcttgagtcgcatccggagcatccggaatggcaaaactttattaacgcgctgacgaccaacctgacctccttcttccgtgagtcttatcacttcccggttctggcggagcatgcgcgcctgcgcgcaaatggttatcgcgtctggtgtaccgccgcgtcaacgggtgaagagccctgctctattgccatgacgctggatgaaaagctgggggtgtcagtggccggcccgcgcgtctgggcatccgatattgataccgaggtgctggcaaaagccgaagccggtgtctatcggttgagcgacctggagtcgctgacgctggcgcaaaagcgccgttacttcctgcgcggcgctggcgataacagcgaatgggtgaaagccagacgagagttattgtccgccatccactatcagcagcttaacctgctggatgagaagtggtccgttccggggccgttcgacgccattttttgccgcaacgtcatgatttactttgatgcccctacccagcagcggctgttgcaacgcttcacgcgcctgctgaagccgggtggcttgctgtttgtgggccattcagaacattttaatcactcacatattccgctgcgcctgcgcggtcagtcggtctatgaactgacggagacgacacggtga

SEQ ID NO: 122946 - DNA, 1056 bp, Enterobacter cloacae
gtgaacccgattcgcgtgctggcggtcgatgattcagccctgatgcgtaacatgctcagtgcggtcgtgaatcaacagccagatatggaaatggtgggaacggctccggacgcgtttattgcacgtgagctgataaaacagctcaacccggacgtgttgacgctggatatcgatatgccgcgcatggacggactggagtttctctcccgcctgatgcgcctgcgtccgatgccggtcatcatgatctcctccctgaccacgcgtggctcaaaagcgaccctggcggctctggagcacggcgcggtggattttctgcccaaaccggaacaccgcggggcagataatatcgaatgctggagccagcaggtggtggagaagatccgggttgccacacgagccaggctggcccagcgtagcctaaccgacatccccatcctcaccggtattaccgtgcgccagcagagcatcatcgccataggctcttccacgggcggcacggaagcgctgcgtcgggttcttatgccccttcccgtcagcacgccggggattgtcattgcccagcatatgccggccggttttaccttttcttttgcacagcgtctcgactctctgtgccagatagccgtgcgcgaggcgcaggatggcgaacccgtgcgacccggcacggccctgattgcaccgggcgatcgccatatggagatcatcagccaggacaacggctaccgggtcaggctcagcgatgccccgccagtgaatcgccaccgtccctccgtggatgtgctgtttgattccgtggcccgtcaggccagcaaacacgccagcgccgccattctgactggaatgggcggcgacggcgcgcggggcctcttgcatctgcgtcagaccggcgcgtttacgctcgcacagagtgaggccacctgcgtggtcttcggcatgccgcgtgaagcgattgccctgggcgcggcgaaaaaggtggtcgacctggatgatattagccagtgcctgctggacagttttaactataaaaactcaactcaaaccgacttacgacgttaa

SEQ ID NO: 122947 - DNA, 639 bp, Enterobacter cloacae
atgaacaccccgttaaacatgcaggcggataacgccaaagagattttcgttcgcattggacaactgacccgtctgctacgcgacagcatggccaatctgggcctggaacaggcgattatggaagtggcggacgcgtttccgaacacccgcgatcgcctgaactatgtggttggcaaaacgtcacaagctgccgatcgcgcgctgaccagcgttgaagtggcgcgtccgctgcaggaagggctgagtgaaaacgcctccgccctgagcgcccgctgggatgcgtggtttgaagcgccgcagccgctcgatgaagcccgtgaactggtcaaagcgacccgcggatttctgagcgaagtccctgacgtgacccagcaaaccaatcgccagctgacggaaatcatgatggcgcaggattttcaggatctgaccggccaggtgctgcaaagcctgatgcacgtgattgagaccgttgagaaagagctgatcagcgtgctggtcgaaaacatgaacgagcgcgacattgatgcgcaaaccagcgacgcgcacctgaagaatggtccgcagatcgacaccaccgccgaagggattgttgcttcacaggagcaggtggacgatctgctggagtcactcggcttctga

SEQ ID NO: 122948 - DNA, 1146 bp, Enterobacter cloacae
atgtcagaacaaaacgacagcgaaaaaacagaagaccccacaccccacaaaaagcagaaagcgcgagaagagggacaagttccccgatcgcgcgagctgacgagcctcgccatgctgctggcgggctgggggttgatgctggtggccggaagctatctggccaaaaagctgcagcaactgctgcacaacggtttaacgtttgaccggctgctggtcagcgatccacagcagatgctgcatcatgccggatcgctgctcggtctggcgtttctggcgatcctgccctttgttggcgggctgtttattaccgcagtcgccacgccgtcaatcattggcggcctgaatatgagcgccaaagcgatcaagtttaacctcaaaaagctcaatccattgagcggcattaagcgcctcttttccgggcaaatggtgtcggaaatggtgaagagcgtactgaaggtcatgctggcggggatcggcggcgggctgtttttgtggttcaacaaggaccgctttatcaacctggtgttcgagccgctgcacatcgcccttggcgatgtcagcgccctgctgacgggctgcatgctggtgattattttatcgcttattccgatggtggttttcgatgtggtttaccagctctggagcaactttaaaaagctgcgcatgagcctgaaagaaatcaaagatgaattcaaaaatcaggaaggcgacccgcagattaaaggccgcatccggcagctgcagcgccagatggcgcagcagcgaatgatgaccgatgtccccactgccgacgtggtggtgaataacccgacccactattcggtcgcgctgaaatatcaggagggcgcaatgggcgcgcctctggtcgttgccagcggcagcgggctgattgccctgcgcatccgcgagctggccgaagagaaccgggtcccgatgctggaagcgccgccgctggcgcgcgccctgtatcgccactgtgaacctggcaccccggtacctgccgagctgtatagcgcggtggcggaagtcctggcctgggtttacggcctcaagcgctggcgtaaaggctacggcctgcgtccgctgacacctaaagatcttcccgttccggcggagatggattttgcacaagagagtagagagtga

SEQ ID NO: 122949 - DNA, 408 bp, Enterobacter cloacae
atgaggagagtcgggctggcgctgcttctgatttcgcccctggcgctggcggctgatggctcctggagcagcgacagttttggcggcaccctgacgcgtggaaggctggttctgaaaagcaaaccggtgcaaagcccctctcctctcccttccggtgcggtggcctcacgcgtccactggaagattaagacctcaggttacacgcccgacgggtttcgtattcgcctgtgcagcgccacgcgctgcctgccattgtctggctttagcggtgaaatccctttgccagccggttttccggctgccgggccatttcgttttgagtattatgccgccgtgggcggccggctcgactctcccctgaccgtgctgagtaatcaggtcacggtgagttatcgcctcgtacgctga

SEQ ID NO: 122950 - DNA, 2139 bp, Enterobacter cloacae
atgaaaccgttatatcaatactcttatctacgccaggcgatccttgtcgcactacttgggacgaccggtgttacctctgccgccacccttatcgataaagacaccctgattgatggcaattcccccgtcaatgaagactatcaggttaaaaacggcgcgacactcaccgcaaatggcgcggttgccggtcagatgatggtcactgcgggacatctggcgatggacggggggcagatcacagaatatctacagattgatgctggcagtacagcagccattaataacgcgacgattaaactggccgcgctaatgggcgacgcacaacttcgtaataccacgattgaaactcagctggtggtctttaacgcgcaactctctgcgacacacattcgtgcccaacagttttatgcaagttacggtgatatcgctattgataacggctattttgccaacattgatgatacgtatacgggggctgttgatttagcgggtaccaacgccgcgtttacgagcagcatcattaagggccataacgccggggtgtatctgagtggggataacagtgttgacctcgccggaagcagcgtttgggcagtaaacggccccgcttttgcggttgccagcggtacgcaacatattctcctgcaaaatggcagcagcgccagttcactgacgggggagttgctgacagccaaaaaaggcagtgacgttgccctgacgctcaatgccagtcatgcagcgggcgacattcgcgcagaagacagcgctgtggtggatgttgtccttgccaatggcagtcagctttccggtggcatgaccaacgtcaattccctctcactcgacggtacttcgcgctatgaaatgacggcgaattccgatatcaacgcgctctccttagcgggcggtacggtgaagtttgcggcaggggaagaatacggcacgctgacgcttggcacgctctccggcaatggccattttatgatgaatgtcgataccgctagctggcagggcgatcttctggatatcaccggcaacgcgagcgggaagtatatactgcacctggcggcaacggggcgcgaagcggtgagcagtgatgcgctggcgctggtccgtaccaacggaggtgacgcggagtttgccctcaacggtggacgtcttgacatgggcgcgtggcagcacgagctggtgcgtagcggtaatcagtgggagctggttcaggcgacaggttctacctccgcctcgaccgatgcgatgctctccatggcctccgcgccgcagtttatccacgaaaatgagctgaacatcctgcgctcgcgccttgatgatacccgcactcagccacagtccggcatgtggggaaccgtgctgcacggccgcagtgatgtagacggtggctggggttctgcctaccgtctggaacagaacggtatgatgctgggtggcgataaggtgaacgctcttgcggcagggaaactgaccacaggcgcctggctgagccagtcaaccggccaggttaagcatgcccgcggtggccagagccgggtaaccagctacggcggcggtctgtatgccacgctgaactcggctaacggctggtacaccagcggctccgcgcaaattaaccattttgccaacaaactgagcgcccgcgtgagcgatggcgcaacggcgcgtgccgactggaacagctggggatatggactgggtctggaagcgggtcgtcatatcgctctcagcgatgccacgcgtctgacaccgtttgcgggtcttgacggctggatgaccccgtctgagtccgtcaagctgaacaacgggatgacggctgaaaccggtgacggacgttcgcttcaggcgcaggcgggcctgcgggtgaccacgtgtctggaagtgggtgaaatgcaggtcatgccttacgtgacggcagcgctgagtcaggggctggtgaaaaacagcgctacccgaattaacgaaacctatgactttaccaacgacttcaccggcacgggcggtaagttctcgggcggtatcagcgtcatggttacaccatcaaccatggtctggctggatgcgagctacgcgaaaagcgagcatgtcgagtcgccggtggtgggaaatatcggtctgcgtgtggatttctaa

SEQ ID NO: 122951 - DNA, 1206 bp, Enterobacter cloacae
atgaagaagaatatcattatgcgcagcctgttaatcgcaggttttagcacggcagtaccttttgcctctgcatcttataacggttttgatgcgcgcagcaccgcgatgggaggaaccggtgtggcgtcggcacactttggtgcggcaccgttagtgaacccggcgttgcttgcgacctcacgctcacaagataaaatcagcctgattgcaccgtccctcggcgcgcaggtcagcgattcggcaaacctgattgacggttttgatgacgtcaaatcggcctgggatacgctggaaaacgccctcggcactggtacagaagctgaagccgcaggtaagctgggtgatattgtgtctggcctctccggggaaaatgcctatgcgaatgtcggcctggcaatggtgcttgcggtacctgatgattcacttcccatcgcgttatccgtaaatagctgggccaaagggaatgcgcgcgcgttagtgagccagagcgatttggactatctggaaggggttgccaacgggtcaattattcctgtgaaagacgatctggataacttaacctcccgcgctgaagggatggctgcgctggtcaccgaatacggcgtgtcgattgcgcatccgtttaccgtgggcgatatgccgatgggcgtggggatcacgccgaagatccagcgtattgaaacgtggaactacaacgttgccatcaacaactatgatacctccgatctgcgcgatggtaactggcagcaccagaccatgagtgccaacatcgatgccggtttctttgcctcacccacgccaggttggatggtggcgctgtcagcacaaaacctgtttgaaaaccgcgttaaaacccgtgaggtgaacggctatcagcctgcttttgttattcgcccgcaggtcaccgccggtacagcatggcaaacgggatcagtgacgctgggcgcagatattgacctgacaccggtcagccatttccagtatgtcgataaaaatcagtatgccgcatttggtgctgaatggcgcacggctgactgggtccaggtgcgggcaggttatcgccttgatatgcgtggcaacgatcgccgcgtcgtcacgggcggtgtgggactctctgccggtgacgccatgcagtttgacttaaccgccattgccggtcgtgaccgtacgataggcggtgtcgcgcaatttaccttctacttctaa

SEQ ID NO: 122952 - DNA, 543 bp, Enterobacter cloacae
gtgcgctatttcgcagttgtggtttcatcaattttaatgtgtggatcatcgctggccgcgtccgtgaacgccgcaacccttcctgagctggctgcgacattaaacacacgatttgaggtgatgaaggatgtggcgggttataaggcggcaaaccatcttcccattgaggatctccctcgagaaaaaaatgttctcctgaaggcagaggccgctgcccgtgacgtcatgctggatccgcagagtattgatgcgtttgtccagacacagatggccgtcagtaaaaatatccagtatcgctatcttgatcgctggcgcttacagcctgaaaaagcgtggcaaccccgcccactggcagaagtaagagcacaaattcttaaactggataacaccattctgaacctgattagccgtcaaatcatgaccgggggcggatttggtgatgagcaagagcgcatattgacgcagttactgaacgataagcagttatccgtgctggagaaggtgcaactgattgacgcactcaggaagattaaacgtctctaa

SEQ ID NO: 122953 - DNA, 408 bp, Enterobacter cloacae
atgagaacgtttattttgttgattgcggcactgggcctaacggcgtgtcaaacaaaccgcgagctaccggtacgggtggtacctccggtcgccatagcacctgcaccggctgtagaagaagtcgccccggttaccaccgtctcgacagaggacaaattgaaaacatgtcatcaaaaaatagatgaactaaaacactacgataagaagcgggcaaacgcggcacgttataccctctcaagggcgataaaaaccaaagccgaaacgcaagccagcgcagcgcatatttcgccggaggcactcaactacgccctgtaccatcaggatcaaagtatcgaggtgacgtgtacgcaagtttcgcaacgccttgacagactgattctgaacaaagtgatgaagacatctgcctga

SEQ ID NO: 122954 - DNA, 180 bp, Enterobacter cloacae
atgaaaatgcaatggccgaaagcatcaacggcctttacaaggtgggggataccgcttgcactgcaaatccatgctgtgtttggactggcgacactgactagaggggagaggtacaacaattgcagagaacttgaacgtctcgggaacatcctgccagctgaagctgaaaaagcgtattaa

SEQ ID NO: 122955 - DNA, 1593 bp, Enterobacter cloacae
atgaatctttcaccagaaatttaccaagccagccagaacatcacgcccgttttaacaaattttcactcaggaaagatatcacaaccgtatccggttgcctcatttccagcagtgctagaaaatataatccgctcattgcacgaatctacgcacatccctgcagagctcatcggtaatgttgtactggctgcaacatcgctcgcctgccagtcactgattgatgtcattcagccacatacaaataccccggaatcgtgttcactttatcttatgaccatcgcggaatcgggagaaggcaaaacgaccatcaataaactggtgatgaaacctctttatgcttatgccgccgaaatgaagcgtgaatatgaagaaaagttagagccctacagacgtgaacataatatctggaaaataagaaatcaggcccttaatagcaacctgagacaggcaattaaaaaagggtattctggtgaagatgaagaacgcgaaattgtaaaacatgcggagtccgaaccacatcgcccagcacgcccgaattttatttatgaagatacctctctgaaggcacttgttgaaggcctcggtgaacacccggaagccggttttatttctgacgaagctatcacgttttttaaaagctatctaaaaaacaacccgggccttctgaataaagcctgggacagtgagatgtttgatttccgcagagcggacggagaagtttaccagattaaaccactcctgacattttccttaatgtcccagccggatgtgttcaaggaatacctaaaaaaacataccgtcaccgccagagccagcgggtttctttctcgttttttatttgcatggtgtgaaagcaccatcggcacccgtaacggtcacgccgattattccaacacagagcaggcgctgaataccttttatgaccgagccaatgaattattgaggcagaataaagcccgcttcagtgacaatgcacatacacctaaaaaaacattagcactgtcagatctggccctgtcagactggaaaacaaatcgaactaaaacagaaaagaaaatttccactggccatgagtgggagcatattcgggatatcgtctcaaaatcaggctccaataccctaagattagccgctctgttacagtatttttacgacgatacctcagtttatgtttcacagggagctatggggtcagcgattaccattatggactggtatttgaatcaggcaagtcagatattctacccgcagtctgaacgctggcaatttgagcaggatgttcgggaactatttcactggattatgaaccgtatacgacaaaataatggtttagctatcctgaaaaatgaccttgagaaatatggaccacaccgactgaggcggacggataagctcacccctgttctaaaccagttaattagccaagggtatttcggagtcatccagatgattaaaaatggcgcactttatatcactctccgtcatcagaacggtacatttaatctacctgccggttatagttacattgatcatgcaattatcgtccagtctcctgttaacactcatggccgaccttatccagtgaatatctaa

SEQ ID NO: 122956 - DNA, 729 bp, Enterobacter cloacae
atgcgcgccacggatcctgcgcatcgtcacgacagactggcactcaggctgtcagttattatcagccggcttcttgccggagaatccctttcactgaaatctctgtctgacgaatttggcgtgtctgaacgcacactgcgccgggatttctctcagcgactgctgcatctagatctcactggcgataacggctgctggcgtttacggacgaacccgatgcgcgatcatactcctggtgcgctggcatttgcccgcaacaccggaattgcccgccttattccctcacagagccgtcagttaatgcagctgttgatgaatgaaaatggcacatctccgtgtctgataggtcatgcatatcaatctgcagggatccgcccggactgctttcagcgacttgctgaaagcatttatctccatcggatggtcaacctgctcgttaagggtattcatcacgaccaccttgagccctaccggctgattttttcacatgcaaattggtatctggtggcctgccggcagggagtccttcaagtttttttgcttgacgaaattaactctgtctcactgtcagaacagaatttcaaacatcgcaacgagactaacgcgcttatcgtcatggaggacttcatcaatgcgctcccgcattttcactttatcagcaacgttattcataccttcggagaaccttctcccgagactcagaccaaaccaaaaggagtcaaaacatga

SEQ ID NO: 122957 - DNA, 504 bp, Enterobacter cloacae
atgaaacacagtacacctcttctgttaagcgcaggaataatgctctcattgatgtcggccgcaaatgccgcgacgcccgaagctcttatacaggcgcatcaccagcgctgcggcaagccagtcttctatgcgcagacccctaaccacaaaaaagaggtcgagatttgcatcatcactccgtcggtatcgtattcattcggcaggatcggcacagaacctaaggaaatgaacattaccgtaccgaccaccgccaccacgtatgcataccagagcaatcaggttatcagcctgcaggaatttactgtccgtaacggtgatatctcatacctggtatctgccaggacaaacgatgaaggtaaacctttcgcgtccctagacgtttatcagggaacacccgatgcgggtaagcatctggcagaaatccggctcgacccggatacggtggtgaacaacatcagccatgcccttgcacaggaaggtgtagcgcaaccagacagcctctga

SEQ ID NO: 122958 - DNA, 321 bp, Enterobacter cloacae
atgtctaaacatatggatatttacagaatgattaacaggcaattaaaaatgacgacggctccccggggcgtattagtgttcttcactcttctgtcagctctggccgtcagcggttgtggtgacaagaacgaaagcgagtttatccggggctgcaagtccagtgggggaaccaccgcggtctgcaactgtatttgggatacgcttaagacgatatatacccacggggaactggagaaaataaaccagcagtatggctatgtgccgccacgttttatgaacaacatgcaaagagctgctttgcagtgcagaaataaggactga

SEQ ID NO: 122959 - DNA, 312 bp, Enterobacter cloacae
atgacgattgttcttaaatatttcgcgattgccttcgccatcgcgcttgtggttctcctgtttaacgtattcgggaacacgggcgaaattcgcagtttcggacaggggatggggtatctgttctggatgacgctcggccccggagccggtatgacagtcggcgcgttcctgcgcctgtggctgatgccggacagcgtctataccaccggtggaatgggaggcctgctgaaggcccgtttgttctggcttgtaggccctcagtgtatcggctggctggccggtctgatgacggttggcaaacaactgatgtaa

SEQ ID NO: 122960 - DNA, 357 bp, Enterobacter cloacae
atgtttaaacatgtactgaccgccacgctgatcatcatcagcacctcagcccaggctgacactgcgcctctgtccgtaaattcacagggaacgtatctgattaataatccgaatcttcccgtctggcaactcactctgaccagcctggaaaacgacatcaccattcagtcactcacgctcaaccgaggcaactgtctgatttccatcgctggccggggtaagaatatgaacaaacgtctgggctacgggcaaacgttttctttcaccacaccgagtaacagtaacttcacccgttgccgtccactggaactgacggttcaaacgagcaagggtccctatacctttaactggcagtaa

SEQ ID NO: 122961 - DNA, 534 bp, Enterobacter cloacae
atggtcgacatcaataccctcagccagcggctcaatacccgtacgctgcatttgatcctgctcagtatggccacctgtggagtctggcccctgctctggctctacaaaaaacaagatatcattagcgataccacgggttacccgctttacggcaagatgtttattatttggttgaccgtctgtttcgggctcagccgccagctgggtgcaatggcaacgcctgacccctacggctatgactcaaccggtgatatcctgcttgcgcttagcggactactctcaatggccagtggcatcatgtatgtggtctgggcctttaaagccagaacggcgctacgtcactatgcgctgaacacgtttcgcttcgacctaaagatgaacgccttttataccgtgctgtttaatgtcttctacatcacatattgcatcaatgacatgcaccaggcactggcgaaacacatgattattcatggtactcccgcaacatcgaacgcccccgctccggcccggacagaacagacaaacctgccctga

SEQ ID NO: 122962 - DNA, 480 bp, Enterobacter cloacae
atgaacaacgcacttcacctcaccggcacggtgacggaatcactcacatcaccacaagatgcagatggaatcgtgtgcacgccggtgcccgatgaacagcgtgtcgacttctgggcacagcactttggcagcataccgcagtggataatcctggagcccacagtcttcgcctggatggaccgcgtctgtgagaattacagtggaggcatctggcagttttatacgttaagcaatggcggtgcgtttatggcgcccgtagccgctgccggccacgatgaaaagtggagattgtttaactccatgaacggcaacggtgccgaaatgagcgcagaggctgccgggctggcagtctgcctcatcgcgtacagccatcatgcctgccgcacggaatgcggcaccatgacggagcactattaccggttgcgggattatgcgctgacgcatcctgaatgcaacgccatcatgcacatcatcgactga

SEQ ID NO: 122963 - DNA, 480 bp, Enterobacter cloacae
atgaaacaacagctacccttgtttgccaccgcactaccagcatccgcacagcagactatccgggaggctatcactctgctggaaaatcaattacgtgaacccggtacgccattcacgtccagccagtcagtacgtgactggctgcgtctgcagtttgccacgcttgagcgtgaagtctttatcgtgatatttcttgataaccagcatcaactgctggcttacgagatactgtttcagggcaccattaacagtattaccgtgcacccacgtgaggtggtcaaggccggactgaaacataatgccgctgcagccgttctcgcgcacaatcacccgtcaggctacgcagaacccagcactgccgacaggcaaattacagaatgcctgaaacaaacactggcattggttgagatccgcctgctagaccacctgattatcggtggtatggatattgtttctcttgcagagcgcggctggctataa

SEQ ID NO: 122964 - DNA, 384 bp, Enterobacter cloacae
atgaaaaagcaatcaattatcgcagtaattgttacgatgggcatttctctttcagcacaggcggcggaagcattaacgggatgtgctgctaaacggtataacatcgagcagcaaattcggcaggcggaaacgcacgaaaatagttatcgcgttaagggcttaaaaaaagcctatgcagaagttgtcgcaacctgtacggatgcctcgctcacaaaagagcgtgaggctgacgtgcttaaaaaacagcaaaaggtcatcgagcgggaacaggagcttcaggaggcaaacgcatccggacgtgctgataagatcgcaaaaaaacaagctaagctcaacgaatccagggcagacttgcaggaagccgaagcagagctacaaaaataa

SEQ ID NO: 122965 - DNA, 483 bp, Enterobacter cloacae
atgaaaaaatctgctttaccaggattagcgttcattgcgataaccagcttactggctggttgtcatgcacaaacgcaaacatcggcctccagagatcaaattcaatttaagactcagacagtgcctttgccgtacaacgtggtgctctcaggttctgttaatgatcatatgcaatgtgaaaactgcggtaataacggcaaaaagaccttcatcaaaggaggtgagcatctcagccagtacagtatgatgattgacagcccgtactttgtcttcctctgtaataactcaaccgacgactgtcgcaacggaaaatggattgcaattaataaaaatctcgtcgaaccgcatgtcagaacgatttcactcgccggcgatacggttcttagcgatctccgcccggcaaatgacgcgcataacacctggctacaggtgacttatgccaatggagagcagcacgtatttactttcgacaacaataaatag

SEQ ID NO: 122966 - DNA, 171 bp, Enterobacter cloacae
atggcaggagaggccagcctctcagccattattcaaacacttatcccgtttcctttcagtgacaagaatcccattgagaaaaccaggcgagaaaagtcggttgatctgcgactatttattgttgtcgaaagtaaatacgtgctgctctccattggcataagtcacctgtag

SEQ ID NO: 122967 - DNA, 1212 bp, Enterobacter cloacae
atgcgcacttaccctgaaacactgacggaaaacctcaccccgaaagcgaactggccactggcgttatgcgccggattgttaggtattgggcaaaacggtttgctggtcatgctgccgcaactggtcaccctgaccgggttatcgctctccgtctgggcggggctgttaatgttcggctccatgctctttttacccgcatcgccgtggtggggacgccagagcgagcgacacggctgcaaggtcgtgatgctggcctcgctaagtggctatctggcgagtttcgctgtgatggcgctggtggtctgggcgatggcaagcgggatgatgagtgctgtctgggggctggcgggcctgatcctctcgcgtacgctgtacggcctgaccgtctcagggctggtgcccgcggctcagacatgggccatccagcgcgcgggtctggataaacgcatggccgcgctggcgaccataagctccggcctcagttgcggtcgtctgctggggccgccgctggcggcgatgatgcttagcgtcaatccggtggctcccctctggttgatggccattgcaccgtttatcgctctcctgctggtccttcgagaggtcgccgatccgccgctgccgccggtcgcgcatcaggcgacgcgtgtgcaggtttcaatgctgccgtaccttgtgctggcgttgcttctggccgcactggtgagcctgatgcagcttggcctgtcaccgcatctcagccttctgctggacggtaacccacgagaggtgagccatcatgtcgcgctgctgctgagtctggccgcgctggccacgctcgccgcccagtttttggtggttcgcccgcagcatttcagcccgatgacgctgctctgcatcgcggcggtgttaatggtggcaggacttgggctgatgtgtgtcgcgggtttaacgctattctacgtggggattgttatcacttcactcggggcggcgatggccacaccgggctatcaactgctgctgaacgacaggctgacgacagggaaaggggcgggagttatcgccaccagccatacgttaggatacggggtgagtgcgatgctggtgccggtcgtaacccgcttttatggtgagtcgtttttaattgctgccgcatggggaatggcgctgctgtttttgctggtgagcataggggtacgctgctccgcgcgtccccatgctgaaaaagcttaa

SEQ ID NO: 122968 - DNA, 948 bp, Enterobacter cloacae
atggcaaacgcgaatatcgtccattctggttatggctttcgctgcaccgcaacggagaacactctgcccctgacgttaggtctcgacggcagcgcagtgcttgagcgcgtgggtggtatcccggaaggctggttagtcgacgcgctggatcagctgtttatcgccgcaccggcactgaccggcgtcacgctcccctggtccgcctggcaggatgaaccgcaggcgcaggcgctgtttacgcttgccagcggagattatctggcgcgcgaaacgttctggcagttacccctgtggctgcagggagaacggccccagaaccacggcggcatgcagttcgatgaaagccgtcagctttacttcccgctgcgccctcaccgcccgcaaggtgaagtctatcgccgttacgacccgcagattaaacgcatcctgagtttccgcgtggccgatgtggcgcaggacggcgaacgtttcacccgctggatgaacaccccacgcgttaacgccttctgggagatggccggcccgcaggcggagcaggaaaattacctgcaccgtcagctcgactcgacctattgttatccgcttatcggctgctttgatgaccagccgttcggctactttgaaatttactgggcggcggaagaccgtattggccgtcactatcgctggcagccgtttgaccgcggcctgcacatgctggttggggaagaaaactggcgcggcgcgcagtatatccgcagctggctgcgcggtctgagccattatctgtggctggatgagccacgcacaacacgcatcgttgccgagccgcgtttcgacaaccagcgcctgttccgccatctttcgtctgccggtttcgaaaccgtgaaagagttcgacttcccgcataaacgctcgcgcctcatcatgaaccagcgtcaccgcttcttcagcgaggtgggactgtga

SEQ ID NO: 122969 - DNA, 2190 bp, Enterobacter cloacae
atgaaacgttctcatctttgggttttaaatccttgcttgcttgcaatgctttctacctctgcgtgggcggaagaacaaaaggaagaaaatattgttgtctccgccagccgcgcgcaccgcagcgtggcggagatggcgcagactacctgggttattgagcgtgctgagattgaacagcaggttcagggtggaaaagagattaaagaagtcctggcgcagttgatcccgggcatggacgtcagcagccagggccgcaccaactacggtatgaacctgcgcggtcgttccatgatggtgatggtggatggcgtgcgtcttaactcctcccgcagcgacagccgccagctcgactccatcgatccgttcaacattgaccgtatcgaagtgatctccggcgccacgtccctctacggcggcggcagtaccggcggcctggtgaacatcgtcaccaaaaaaggccagcctgataccgaagtggagttccagaccggagcaaagagtggctttaacagccataacgatcacgatgagaacgtgtcagccgcggtgagcggcggcaacgacaatgcctctggccggttgtcagtatcgtatcagcgctacggcggctggtacgacggcaaaggcaacgaggtgattattgataacacccagaccggattacagtattccgaccgtctggatgtgatgggaacaggcaccctcaacatcgacgatcaccagcagctgcagcttacgacgcaatactacaagagcgagtccgacgggaagcacggcctgttccttggggaaaacttctccgcggttacgggtgatgccaaagcctacaataaaggcaacctgaactctgaccgcctgccgggcacagagcggcatctgattaacctgcagtactccaacaccgatttctggggccaggatctggtcgcacagatttactatcgtgacgaaagcctgacctactacccgttcccgacactgaccaaaggcgtggtgagcagcatcggtgcgtcgcagcagaaaaccgatttttacggcggcaagctgacgctgaacagcaaaccgatggatgatttaacgctgacctggggtgtggatgctgaccacgaaaccttcgacgctaaccagcagttcttcaatctggacaaagcggcagcaagcggcggtatggatctggagaacgcctataacgtgggccgttacccgggttacagcattaccaacctcgccccgttcctgcaggccagctacgacattgatgccattaccctgagcggcggcgtgcgctatcagtacaccgaaaacaaggtggatgacttcgtaggttatacccagcaacaggccatcgctaacgggaaagccacatcggctgatgcggtaccgggcgggaaaaccaattacaacaacttcctgttcaacgccgggatccttggccgcctgaccgaacagcagcagctgtggtttaacttctcccagggcttcgaaattccggacctggcgaagtactacggctccggtacctaccagcttgtcgacgggcactatcgcctgctgaacagcgtgaacgtgaacgactcgacgctggacggcattaaggttaacgcgtatgagctgggatggcgctacaccggcgacaacctgcgcacgcaggttgcggcgtattactcgctctcggacaaaaccatcaccatcaacaaaacggacatgaccatcaacctggaagacgacaaacgtcgtatctacgggattgaaggccaggtggactatttcttcaccgacagcgactggagcaccggcgcgaactttaacgccattaagtctgaaacccgcgaaaacggtaaatgggagaagctgacggtagacagcgccagcccgtcgaaagccagcgcctgggtcaactgggcaccgggcgactggaccctgcgcgtgcagagtacgcagacctttgacgtgtcagatgccgacggtaagaagatcgatggctataacacggtcgacttcctgggcagctacgacctgccggtgggtaaagtgagcttcagcgtggaaaacgtgctggacaaagactacaccaccgcctggggtcagcgtgcgccggggctgtatagcccaacctacggtgcaccaggtctgtatacttataaaggccgtggccgtacgtttggtctgaactactccgtactgttctaa

SEQ ID NO: 122970 - DNA, 1008 bp, Enterobacter cloacae
atggaaaagcgtaacaatacccgcgcttttaaaaccgttgcaaaaagctggtttgcaaccaaaactaactggtcagaagattatcagcgctcagtctggactcgtcttgaaacttacctgtttcctgatatcggtaacaaagatataggtgagttagatacgggtgatcttttggttccaatcaagaagattgaaacactcggttatcttgaaatcgctatgcgtgtaaaacagtacgctaccgctatcctacgatatgctgttcagcaaaagataatccgcttcaatcctgcctatgatctggaaggtgcagtacagaagccacagacagaacatcgacctgcaattgaactggaagatataccagcacttctggaacgtattgatggttatcagggacttagcaggctcacgttactggcgatcaagctcaatcccctgacgtttgtgcgttccagtgaactacgattcgccagatggtcagaaatcgattttaagggtgggctttgggtcatcccggaacagcgtgaagcaattgagggcattaagcattctgctcgtggtgctaaaatgcgaaggaaacattacgtgccactgtgtaatcaggctctaatcattattgaagagataaagacgctgacttatggcgtaaacaatgataacgattttatctttacgggctgttatgacgcgatgaagcctatgagtgaaaacacaatcaacaaggcgctacgtaaaatgggctataaaaccaaaaccgacttgtgcggtcatggtttccgtaccctagcttgtagtgctctgattgaatcaggtatctggtcagaagatgttgttgaacttcaaatgagccatatggaaaagaacaatgtccgtgcagcctacacacataaggccaaacatcttgaacagcgccgcttaatgttacaatggtgggctgattttctcgatgcaaataagaattctatagtaagaccgtttgatttcgcaactaataaaaatcattag

SEQ ID NO: 122971 - DNA, 348 bp, Enterobacter cloacae
atgaatgaaattaatttggaaggtagagaaagcaatgatgaggtcattgcggcagcaacagatcatatggctttttttctgttctccattctctcaggttgttatccggagattgcgacatctgaatttgaaaacatcttcaatgatgagtttaagtttgatattgaaagttttattaaaaattacaggaaaaacgatggaaacataatgacgatgtcgggtaaagatatcgctcagatatattcaaatcagcggtttcatgaaaagttgtccagagcactcgaacagtgtaaaaaagataagacagctttaactgctatgaatcaagtaaaggcttttcagatataa

SEQ ID NO: 122972 - DNA, 1422 bp, Enterobacter cloacae
gtggcccgcactcagggaacccgtgaacagacccgccggtatgacagtctcggcagacgtaccgggcagcgcagtttctcacccgacctgccggaacagacaatcttcgaacgcgccttcaactacaccgggcgtggagaattgtcagacgtcagtgacaccctgcgtggcaacacaatttacggctatgatgaggaaggccgttttctcaggcactacgaagcccgtccggacctcagtaacaggaggttccggtacgacgctgcggataacctgctgccggatgatgaccttcctgccctgtcgctgagggataaccgcctcacgcactggcagaacctgtttatgaaatacgactggtggggtaacctggtctttcgccgaagtggtctgtatgaacagcattatgtatacgacgcggaaaaccgcctgatacgggccgggggcaatggaccagaaggcaattttaccgcccgctaccattatgacgccctgggccgccgcacacgcaaaacggtcaccatgccacacggcaccacaaagacccgctttctgtggcagggataccggctgttgcaggaacagcagcagaacggacaatgtcagacatatgtttacgacccgaacgaaacatacagcccgctggcgcgtattgaccatttgcgtgacgaaaccagcggagaggttctctggttcacaaccgatctgaacggtgcaccgctcgatatcactgatgaacagggacaactccggtggagcggtcattacgggagttttggtgaggttgcacgacagacggaaggcttccacagattcacgcagcaaactgccctcgctcatcagccactgcgctatgccgggcagtacgcagacagtgaaacgggattacactataatatgttccgttattacgatccgaaggttggacggtttacggtgcaggacccgattggattactgggaggctggaatctttatcagtatgcaccgaatccgctgggttggattgatccgtgggggttagctaacaggccaaataatggtgaatatcatatttttcatgattattcacttgaccctcaatatcgatattccagtgatgcagtccagttcaacagagctaatgtggattttgttcagaaaatggagacgaatctggaatttcgccaagatatgctcaacagatatccaaaactaaatgactggctcaaagatggggatatgagcagaagtccttcgggattaacctggcatcaccatgaagatataaacagactgactctggtcgacagagcagaccacagatctaatcattctttatatcatccaactggtaaaggtggacgtgatatatggggtggtggaaaacctggacgacaaggtaagcttgatggtcctactggtagaaaaatttgtagctaa

SEQ ID NO: 122973 - DNA, 336 bp, Enterobacter cloacae
atgtcgattaaaggtaaccatatgaaattgaaagatataattgacatcatggttaaatcgcgttgcgaagatgataatttttgcatttatggctcagacggagagttattcggagaaaaagaatattttgtctccggttatccacaggtagatgaaaacgataaagaagtctatccgcaagatgcggctagcagaggtttatcatatatttattctggtgagcagtttgctgatgtaatcttatcagtaatcgaacaaaaaccttctgccagtaatcaagattttattgatgctttaaactattaccttgaaaatgatgattttttagatttctga

SEQ ID NO: 122974 - DNA, 486 bp, Enterobacter cloacae
atggacgcactggccaacggtcgcaggaacaagtgcctgacctgtgtggatgatttcacgaaggagtgtctgacgatcaccgctgctttcggtatttcaggcgttcaggtcacgcgtattctggacagcatcgcgctatttcggggctatccgacgacaataagaaccgatcagggcctggaatttacctgccgcgcgctcgatcaatgggcctttgagcatggtgtggaactacggcttatccagccaggtaagccaacgcagaacggatttattgagagttttaacggacgctttcgcgatgagtgtctgaatgaacactggttcagcgatattcttcatgcccggaaaacgattaatggctggcgacaggattataacgagtgtcggccacattcggcactgaattatcagacgccatcagagtttgcaacacggtggcgaaatggaaaatgtgaaggtaaacaaaccgacattactaactga

SEQ ID NO: 122975 - DNA, 264 bp, Enterobacter cloacae
atgaagaagcgtttttccgacgaacagatcatcagtatcctccgcgaggctgaagccggggtttctgcccgtgagctctgccgtaagcacgccatttccgacgccaccttttacacctggcgtaagaggtatggcggtatggaggtgcccgaggttgagcgcctgaagtcgcttgaggaagagaacgccaggctcaagaagctgcttgccgaagccatgctggataaggaggcgcttcaggtggctctggggcgaaagtactga

SEQ ID NO: 122976 - DNA, 609 bp, Enterobacter cloacae
atgataaagctgattggcatgatggattctccttatgtacgccgcgtggcggtctccctggaactttatggcgttgcgtttgaaagccagccgttgtccgtattcagctcatttgaggaattttcccggattaaccctgcggtaaaagcgccaacgctggttctggagaatggaacacgtctgatggactcgtctcttatactgaattattttgaggctcaggccgtgcctgaacggagactcctgcccgtgacgcaggatgcactggcgaacgatctccagacgctgggctttatcctcaccgccgcggagaaagctgtgcaaaatgtgtacgaacacaatctgcgcccggcggagaaacaacataatccgtggatagaacgtattaccgtccagctgctggctgcctgtcgggaatggaacgcgctgctggaagcacgcccggaaaacgcggtggccgatcaggttgctgtcaccaatacggttatctggacatttattcagtcaatgatccctcacgtcgttaacgccggggattttaaaagaattcaggcggtagccgacgttttcgaaaaccaggcggcatttaaaaaatacccttttagctaa

SEQ ID NO: 122977 - DNA, 1455 bp, Enterobacter cloacae
atgaataataagggctccagcctgaccccggctcaggcactggaaaaactcgatgcactgtatgaacagtccgtcaacgcgctgcgcagcgccatcagtgagtatatcgaaacagggaaactccccgacgaaaaggccagaagtaagggcctttttgtttatccatcgctttccgtcacctgggacggcagcgcgactaacacgccgaaaacgcgcgcctacgcacgctttacccactccggctgctacagcaccaccgtcacccgccctgcactgttccgcccttatcttgaagagcaactcacgctgttgtatcaggattacggcgcgcacattgccgttgaaccctcacagcatgagatcccgtatccgtatgtgattgacggttcggcattaacccttgaccgctccatgagcgcggggctgacgcgccatttcccgaccaccgagctgtcgcagattggcgatgagacggcggatggtatctaccacccggcagaattttcaccgctgtcgcactttgatgcccgccgcgtggatttctctctggcgcgcctgcgtcactacaccgggacgcccgtcgaccatttccagccctttgtactgtttaccaactacacccgctatgtcgacgagtttgtccgttggggctgtagccagatcctcgacccggatagcccttacatcgcgctgtcctgcgccggcggtatctggatcaccgcggaaaccgaggcacccgagcaggccatctccgacctggcgtggaaaaaacaccagatgcctgcctggcacctgatcaccgctgacggccaggggatcaccttaattaacatcggggttggtccgtcaaatgccaaaaccatctgcgaccatctggcggtattgcgcccggacgtgtggctgatgattggacactgcggcggcctgcgtgaaagccaactgattggcgactacgtgctggcacacgcctatctgcgtgatgaccatgtgcttgacgctgtgcttccaccggatattcctatcccgagcatcgccgaagtgcagcgtgcgctgtatgacgccaccaaagaggtgagcggtatgccgggtgaagaagttaaacagcgtctgcgtaccggtacggtagtgacgacggatgaccgcaactgggaactgcgttactccgcctccgcgctgcgtttcaacctcagccgtgccgtcgcgattgatatggaaagcgccaccatcgccgcacagggatatcgcttccgtgtcccttacggcacgctgctgtgcgtttccgacaaaccgctgcatggcgaaattaagcttccgggtcaggccaaccgtttctatgaaggggcaatctccgaacatctgcaaatcggcattcgcgccattgatttgctgcgtgcggaaggtgacaggctgcattcccgtaaattacgtaccttcaacgagccgccattccgctaa

SEQ ID NO: 122978 - DNA, 1773 bp, Enterobacter cloacae
atgcacaccccatcacgcttatcggccctgcgccgatggctacaggaaaacaatcttgatggcatgatcgtgccgcgcgcggatgcctggcagagtgagtattgcgcaccgtacgatgaaaagctggcctggctgacgggctttgatggctccgcaggtctggcgctgatactgaaaaacacagcgctgctgtttgtcgatggccgctatcaggttcaggctcgccttcaggtcaatatggatgaaattgaaatccaccatctgcacaatgaaccgctggccgaatggctcacagccaacgccggggccggcatgcgtattgggtttgaagcactgctgatgaccaatacggagttcgggcagctgtctgcaacaccctgtgaactggttccgctcagtcagtcgccgtttgataccttatggcacgatcgccctgccgcgccggcgggacgtattcgagaaatgccggtggaggtcagtggcgaaagcagcctcgccaaacgccagcgcgttgccgccgtgctggccgcacacgatgccgattatctggccgtgactctgccggataacatcgcctggctgttgaacgtgcgtggcgccgacattccatccagtcctgttcccctctcctttgcccttcttgatcgtgacggtagcgtggagtggtttgttaacgacaataagctcagcgagctacccgagagcgtgagaagcgtattcaggattacgccgcaggatgcctttatcgaacgctgccagcgcctgtcacaaggtaagcgggtgatggttgatgccgattccgcaccggtcgccctgcgctttgccattgagccagagggcgaaatagtctggcgaaccgatcccatcactctgatgaaagccactaaaaacccggtcgaacttgccgggtaccgcgagtgtcatcaccaggacggtgctgcctgggtgaatttcctggcctggctaagccgtgaagtccccctgcgtgaggcggcgggaaaaccgctgacggagctggaagcgcaggcgcagcagcttgcgttccgtaaacagcagcctggatttattgagcaaagttttgccaccatctccgcctcctccagtaatgcggcgatgtgccactatcactcaagcgaagccagcaataagcccatcggtcatcatcatttttaccttaatgattccggcggtcagtaccataacggcaccactgacgccacgcgtacgctggcatggggtagcgtgccgccacagcagaagttgcactataccgccgtactgagagggttcctgtcgttgataaccttacagttcccctccggcagtcagggccatcagcttgatgccttcgcgcgtcgtccgctgtgggaaatggggctggattacgatcacgggacagggcatggcgtaggacatcagttgcttatccatgagaacccgcatcgtctcgccaaaaaggttaacccgtggcccctggtggccggcaccatcatgactattgagcctggatattatctggcggacagccatgggatccgcattgaaaaccaggtggagattgtcgaaagccgtccgggattctgcacgttttcctcactgacgctgatcccgatcgacctgagccaggtcgagttacagctgttgaacgaacaggaaaaacagtggctggatgagtatcatcagcaggtgcgtgaggccctgttaccgttggtcgacagcgacgcgcggcaatggttgcttgaggcgacgatgccggttcgggttaaccattag

SEQ ID NO: 122979 - DNA, 333 bp, Enterobacter cloacae
atgaacgctctgtttgtctacggcacgctacgcccgggtcacgcgaatgcacatattcttgaaaacatcggtggcgaatggcaggccggttttgtcaccgggacgttttacgaacgtggctggggcgcggcggcagattttccggggatagtgctgcatccggacggcccacgcgtggagggctttctgtttatctctgatagcctgagtgcacactggccaatgctggacgaatttgaagacggctacgatcgggttgaggtcaatgtgaccacgccggatggaaaacaggtcaacgcctggatttatcagctacaaccgcgtactgcgtaa

SEQ ID NO: 122980 - DNA, 474 bp, Enterobacter cloacae
atggactacagcatcaagcagcaacagaaacgtaaaatcgccggctttcatctggtcgggccgtgggacaaaacggttaaacagggcttcgaacagttagtcatgtgggtggatggacgtcacattcagccgctggagtgggttgcggtttactacgataatccggacgaggtcccggcagaaaaattgcgctgtgatacggccgtaacggtcccggacgattttgtcattcctgaaaacagcgaaggcgtcatgatgacggaaatcgccgctggagagtatgcggtggcgacggcgcgcgttgaaaaccatgacttcgcgaccccatggaaccagttctttaattccctcttgcaggacaacagctaccagatggcccctaaaccctgcttcgagcgctaccttaatgatggtaacgcggacggttactgggacatcgaaatgtatattggtgtagagcacaaagcgggttaa

SEQ ID NO: 122981 - DNA, 981 bp, Enterobacter cloacae
atgacgcagaacaacaatagcctggtcagcagaagtaatgaccgggagcaaattgatttacttgatatagtgctgcaactgtggcgtggaaagtggttaattggagcttttatcgctttttttatcctactggcgggcgtttatatcaccacagctaaagaaaaatggacatcgtccgcgatcattgctcaacctgatgccgctcagattgcaacgtatgcaaacgcgttgaatatcctttatggtggagccgcaccatcgattctggatatccaaactcgtgcaattagtcgttttaattcatctttttcagcattagcgcaggcgcttgaaaatcaggaaatgccggaaaagctgaccatcgattcaacggttaagggacaagcatttccattgaccgtcagctatgtaggtgaatctgctgaagcagctcaaaagcagctagcccagtatattcaacaggttgacgagcaaaccgcgaaagagttaaccgtagaccttaaagataacattaagcagcagatcacaacactgaatgactcgctggagaaccaggagaaagtctcgcaggaacaaaaagatctgcgcattaaacagattacggaagcgctgaagaacgctgaagcggccaaaatcacttctccacagattcagcaaactcaggacgtgacgcaggaaaccatgttcctgttaggcagcgaagcgttgaaatcgatgattgaaaacgaagcttcacgtccgctggtgttctctggagcgtactatcagactaagcagaacttgctggatatcgagaagttgaatgttaacccggacaccattcatgtctatcgctatgtcatgaaaccggatcttcctatctatcgtgacagtccgaaaaaggccatcactctgatccttgctgtcctgcttggcgggattatcggttcgggtgtggtgctgggccgcaacgcattgcggaactacaaactaaaagcgtga

SEQ ID NO: 122982 - DNA, 1077 bp, Enterobacter cloacae
atgaaaaaaatatctataattggtattgttggtattccagcctcttatggtgggtttgagtcacttgtagagaacctgacgagattttctagtgatgatattgactatcaagtttattgctcatcaaagcaacttccaactcgcttggaacaccataatggagctacattaaaatatattcctttaaaagcaaacggaattcaaagtgttgcatatgatattgtttcgatcatgcataccttgaaaactaaaccagatgtaatactggtacttggcgtttctggtgcaattatttttccaatatttaagctttttagtcgtagcaaaatcattaccaatattgatggattggagtggcggcgtgaaaaatggggcaaatttgcgcgtttattcttaaagttttccgaatatatagccattaaattttctgacgtaattatcaccgacaatcaagctttgtctgattatgtttatagcaaatataatctacggagcgaagttattgcatatggtggtgaccacgcaattagtgttgatgagcttttagagccaactggaactgattattttctccatgatgatgaagaattcttcctaagcatctgtcggatagagcctgaaaataatatacatttaattcttgattcttttactaaaactgaaaaaaagatcaagttcattggcaattggaactcgagcgaatatggacgtgcgctagttgagaaatacaatcatttctctaatatcgagctaataaatccaatttatgatataaaattgctttatcaaataaggatgtcttgttctggctatcttcatggacattctgctggaggtacgaacccatccttagttgaagcaatgcattttggtaaaccaatatacgcattcgattgcagctttaaccgtttcacaaccgaagggcaagctttttatttcactgatagtgataatcttgtacaacttttgaatgatcctcagcttaaaatttatgaaaattctgctgcaatgcaggaaattgcagagcgtagatatacatggcagattataaccagtcagtacgaaagcctgtactaa

SEQ ID NO: 122983 - DNA, 1083 bp, Enterobacter cloacae
atgaataacatttttaaaacagtgtttttattattaactgcaatttatctcttttcaatgacatttgatggtgtattaattcgacaagttgtaactgtcctttttttggcattttctcttttactatttatctttgataagacttacttttctccaggcattattgttggaatcgctattcttataatcattttctctgtatcagctttattatcacccaacgatgactggaaactaaaagtctactttatattttctggtgtggcttttttagcattttcatacgctttgtatattttagattataaacgctatttctttcacttttttgtgttggcttgcacgttaattattattaggctgctaattactcatgatgaaaatataattttctttgaggctagtaggaatattgtagcaacttttattattttcccagttgttggtagttttttgttcactttacaaaatagaagtttactaccaatggctattattactgtatttatgtgctttctattaaaaggaagaactgctttattgatatctgctgtaattctttgcgttgcgttatataaaacttttggtttgaaaggaatggtgattgttatactgctttgctcgcctttcatgatgtttattgatgtaggttctcttaacgaaaggattgctgataatactaacttttctgaagggttaaaaactacacgaagtgttatttataatgagtatttttctaatttcagtttgacagattttgttttaggtcgttcatttaatggaatggaaataatcaatatattaaataataaccctcataattcttttatattaatacattcattatttggttttctacctgtcttattacttctaatcctttttttatttgtgacattaaaaacactagttcgttatggtgcaatatgtgctttgctgtttgcattaattcctattaaagcaatgacagatagtgtgatttttttcaatttgttagatgttttttatatgttccctattatgttgttaatgaatggaaagcgaacaattaattcagttggcgcgaagaatgaaggttattaa

SEQ ID NO: 122984 - DNA, 1173 bp, Enterobacter cloacae
atggatttaaaagaaatgagaaaaattgttgttattcatccattggatgatagttatggggcaacgaagattttatcttatgtaatctctattttgtcaaattattttttgattgaagtatggtataaaaatgataaaaagtgcctggaggcctttctcctacaacagtcaagtaaaatggaaaatataaactataatagagttactagtattcctgttgtgcatagtaaaatttttactgcaaatggtgttttttgtctttttaaagatttcatagagttcagttttcatctcttcagaaataaaaaaaagtatgatttaatttatattaatacatatgctgctggtttggttgcatttgtctgtaaattattgcgcgcaaaaaatattatccattgccatgagaatcagaaacaaaaattttcaggcagggcgttggcttttttggtaagaaaaagcgcaaatcaaatcatttgtgtatctaatgttgtgaaagagtatgttactaatggcgataagaaaatatgtgccagtgttgtgaaaaatggggtttccgatatttttgaaaattctattaatgaaaagcgcattgatcaagctaatccaaaatttcttatagtaggtagagttatgcctgaaaaaggatattggttgttagccgatgcagttaaaaaactcacaaataatggaaaccaaagtattcaagttgatgcttatggagatgcaccacctaatcgttcttacttactcgaagagtatcgtaattatctaaaagaaaatgatatagatcaccacatcaggttactcggtttcagtgaaagcgctgatcgcgaaatgtttaattatgatatagttttggtcccatcggtcatgagtgatccttttccgacaacagtgttggaagcaatgcgagcgaagtgcgtagtgattacaacttcacacggaggagctgcagaaataattagcaataattataatggaatacttatcgataaagacgatagtgatgcttttgctgaagtattaaaaaatatatgccagcaaaacgttgatgttgagctcttggcttcgagagccagagattattacaccagtaaccttactaaagctcactttgaaaagaatatccttaatcatgttcaaaaattcataaaagatcatatcgatgaataa

SEQ ID NO: 122985 - DNA, 762 bp, Enterobacter cloacae
gtgggctcggagatgtgtataagagacagatatgggcatgatcacttatatttctctcaactatatatcaaacgcagtaacagctttatcttaattgaagatgggttggcaaattactcctctacgaaggttagtcgttattcttttattagagaaattttattcggttcaaaaggtccattttttggatggagtgatgatattgataaaataattctttcaggcattgttaccataccggaaagaatcagcaataaagttactgagattgatattacaaatgaatggaaccacctaacattcatacagaaaaattattttttagatctattttctgaagaaccttatattcctctctctaaggttgttattttcactcagcctttttctgaagacgggatgatgactgagcatgaaaaaattgaaatctataaaattatttatgaacattattgtagtatttatagtaaaaacgaaatttgcataaaatctcacccacgagaacaaactaattattctaaatattttgactgtgcttcaattcaatcgaagatccctggtcagataatgattttaattgatcaacctgaggtattagcaacaatctattcaagcgtaggttttgtaaaaggtagtgctcaagcgcatgtatggggaacctcttttaacgagtttcttttgaaaaaagtaggtaagtttgaaggaaactataatggatttaaaagaaatgagaaaaattgttgttattcatccattggatga

SEQ ID NO: 122986 - DNA, 747 bp, Enterobacter cloacae
ttggagaaaaaatattttaaaggaaacgttgattttatctctgggcaagggtgcattcttagtgaatttataggagatgtcgcgacacgtcaaataaatattgttgatggtgagtattatgcttcttcctctttgttagataaaaacgaacaagtaggtttcctgctttatgatggtaagaaaagcgacttagacttaagtgactctgaagagatttcaaatgaaaaatttgaaagtgtctggatggattcactcgattcatttaaagaaaaaaaccgaataaagtatttatccggagatgctgtaaagtgtttgaacaaatccacagttattgctcacattgtaaataacaaaggcaaatgggggaagggatttgttttgtctctttcgaaaaaatatccagcttcgaagaaaaactatcacaacaattttaaagataatggcgttccagaattaggtaaggtagattttgttatggttgatgatcaaaaaaggatatttgttgctaatatgtttgcacaggatgggatcaagaaaaacaacaatgataataatcaatatgtatgctatgaattcttagatatttgtctcgcaaaattgtctgactttgcgttgatgaatcgtctttcagtacaaatgccaagaataggagctggccttggtggtggtgattggagtattatagagtcattaatattaaaaaatatttgttataagatgattgattgtactgtattgactttataa

SEQ ID NO: 122987 - DNA, 252 bp, Enterobacter cloacae
ttggaacttgccaactggatatttgtatgcatgtacagcccttacttcgatctcgcggagtatgataaggcgaagaaatggggagagaccacattacgcaaacgtcgaacgaatataggcactgcgccattgatcgacctcggtacggtccgttacgagtggaattattcgaggaagcgaataaatattttaacgatgcttatgtttatggaaaacagcgtgcttttcaggatcggcctaaaaataccttaa

SEQ ID NO: 122988 - DNA, 126 bp, Enterobacter cloacae
atggatagtgaagggcaggtgcgctggagagggggagacaacgcctggtgcaagttgctgcgaaaaggcgagacgcagatatcatgttattcccaggagctgagtatgcaggggcaatacctgtaa

SEQ ID NO: 122989 - DNA, 357 bp, Enterobacter cloacae
atggtaaagcaggatttaatcgatcagttggataaaattgaacaactagtgcacaaatctttacctgctgaatataagcgatttatggttgagaatgttagagacactgactcttatgagattaaaagagcgaatggtgaacatttatatgtattcaattgtttcgatttacttgaaagaaatattacatacacaattcaagaggttgaacctgaatttttattgattggtcaagatggcgatctagggtatttccttaatttgtgtagaggtactgatgaggtttattctttagaacttggtgcgttaggaagcttggatatgattaaagaaagtaatactatatttatgttataa

SEQ ID NO: 122990 - DNA, 498 bp, Enterobacter cloacae
atggcaactggcaagctagtcacttcctggtttgcctgggaagggttcctcctgctgcaggtggtgcatggggatgtgcggctcacctatgtctatagcgatcaggacagcaacgatccgctggtacgaattgacggcgtagataccccggagatcttctggttccattgccagcctaacggcatgcccgagcggacgtcggatagcgaagtgcaggtgcgctgggaaggggttaacagcgcgtggggaaagcagttgcgggaagctgagacgcaggtatcacgattttctcagaacctgcacatgcaggggcaatacctggactgtgagaccgggctgcatacaatctgttccggtattacgatccggacagcgggcggtttacgcaaaaggggccgatatggctggtggggcgataaacctttacccgtatgcgccgaatgcgctggggtgggtggatcctgttggtttaaccgtttgcaaaaacggatgccctaa

SEQ ID NO: 122991 - DNA, 471 bp, Enterobacter cloacae
atggtcgatagacttactatagtgccagcaaaagaaaatcaaaaaaaatggcctaaagaaggcgatgttttttactttcagttaaatgatggtcggttaggctatggcatggtctctttgggtaaaatagatgtcggcccgttcaagaatgccatagttatatatatatataactattttacatcttcgcttcaagaagatgctgtattggcaaaagataatttgctgctgtcgccaattattactgataattcatgttggaaaaacggttatttcgtaacgtttaaaactatcgacatgcgtgaagtggatgtcttacctcaacattattttaaaaaccctgttagaaataaaatatatgatcatcatggcgtggaagtagactcgccgattgcgaatatactaataggtgaagagtcgattcaattctataaaagcgttgtaaaatctatagaaagtataattaactaa

SEQ ID NO: 122992 - DNA, 357 bp, Enterobacter cloacae
atgaatattatcgatggtatccaatttaatgattcaaatgaaagtgttgtttttaattactatagttggattgagttaattaaagcgatcattgttaaatatgcgaatgaaacagagagtgaggctgaacgaatagtattagcctctccacttgttcgttttacggaaaatgattacatgtctattgctttgcgctgtcatgaaagtgaatatcattgggcaatgttaattgcttatggtgatcaatattggacaacaggagtttctccaaatgaacctgacggatacttcgagtgggaaaaggaatacaaggaaaaaaataaactggcagaagaaaactttatttttagtgattaa

SEQ ID NO: 122993 - DNA, 294 bp, Enterobacter cloacae
atgagcacggtttacatagttattttgacctttataaaaccactcgaagagattgacgcagagatacctgctcatgttgagtggcttaaaaagggatacgcagaaggaattttcctggcgtccggtagacggatcccaagaaacgatggtgtcattcttgctaagtgtgagagtcttgcctctcttgaagagcgcttgcgcgaagatccttttcagaggttaaagcttgcgactgctgatctcattccttttgaacccagcatgaaaacagaactcctggaaaatgtattttga

SEQ ID NO: 122994 - DNA, 432 bp, Enterobacter cloacae
atgaaagtaaaatacaaagagggtgacatctttgtcattccattgagcaatgggaaatatgcgatttgtcatattgtttttgctccaagcaaaaaatttcagcaagccatagggttctgcatattatcaatccagcaggctgaagaacttattgatggcgattcattaacaccgctaagttttgaaaagtttggcaaagagacgaaaattatctttaccggcaaccaaaatatcagcaagggcgtttggaaaattattggtcacactgatcttacagaagaaaaaaaacaattgaaaatatttaattatgctggtggtttatataatggagaggacgaaaccaggcggttaactgttgccgaataccctaattacacaacaatgggggtatcagggtttgagcttgtcgataatatcctgaccaatatttga

SEQ ID NO: 122995 - DNA, 483 bp, Enterobacter cloacae
atgaatgataaaaaaatacaaatagttgatctactgatttcacatagtcaaatagtgttacgatcccgagactatgacgaaaagctgagtcagtggggaaagggtaatgtttctcaaggtgctgttcttcacaaggattatgttatattcgatccattaccagaggacgcgtttggagcaaacgtcaatatcaaaatagagaatgctttcaaattggatgaaaatgctcagcgctgtattgttgtaccatttttcattacggataaacataagctgcaaatcgcttctgcaactgagaaattcgatttaaatatagatgtgaacgataaagtttattcacttttttatgagatttgtgaaggcgatgaaatttactataatttcactcttgtaccggcaaaagaagctgttgctgctaagtttttactagatgacccttggggaggaataaaagaccatcctctcaaagaaggtattttttaa

SEQ ID NO: 122996 - DNA, 396 bp, Enterobacter cloacae
gtggtagcggtttgcgccgcggtggaatccgataccgctgaaatggacgacgccggccgtgaagagtccatggccgagcagggtctggaagagccgggcctgaaccgcgtgatccgcgcgggctatgagcagctgaacctgcaaagctacttcaccgctggtgtaaaagaagtgcgtgcgtggaccatcccggtcggtgcgactgcgcctcaggcagccggtaagatccacaccgacttcgagaaaggcttcattcgtgcgcagactatcgcgtttgaagacttcatcacctacaaagatgagcaaggcgcgaaagaagcgggcaagatgcgtgcggaagggaaagattacatcgttaaagatggcgatgtgatgaacttcctgtttaacgtttga

SEQ ID NO: 122997 - DNA, 483 bp, Enterobacter cloacae
atgataaacttaaattttaatgcgaaaacgggaaagctaattttcgatggtctaactttagagattgatactgaagaaggattttgcaacagtaaactttatcacaaactaaatacgtttaatgctgtaaagaaatacatgccttatcactatcttattgatccggtgtttttttgcgataaagaatttgaaattaacatacggccaatatgttttggttttccttttatggttcatcttgtcgataaagatagtgaatattataaatccctaaaggactgggatgcgagaactaatattaacatgctaaataactcagtgaaaagcttgtctgattggctaagcctttctctaaatttaggggttcctgatattacgaaaacagaaatgattagatgggattatgaatggggccgaatttctgtctcgtatgagacaaagtcattcaaccatggtatatatatagtttggaattcaatataa

SEQ ID NO: 122998 - DNA, 201 bp, Enterobacter cloacae
atgattgaaaatctcatttattttaaagaaaataacctgcttcattgggctagtggtgaaagtaacagagtggttagtatgccatttttagaccatgcaatggtcgactcaacacgccagttagtctttgcgttaagcgagtctaagccattaccaaccgttttgaccatcttcgatgctcagggcgaaaaactattttga

SEQ ID NO: 122999 - DNA, 126 bp, Enterobacter cloacae
atgagcacggtttacattgtcattttgacctatataaaaccactcgatgaaatcgacgcagcgatacctgctcatgttgagtggctaaaaaaagggtatgcagagggggggcctggcgtccggtag

SEQ ID NO: 123000 - DNA, 831 bp, Enterobacter cloacae
atggagtttcagcactggttacggcaggccgccagtgagctttccgcgagcgaaagccctaaacgtgacgccgaaattttgcttgagtttgtgacggggaaagcccgcacttacctgctggctttcggcgagactcagctgagcgctgagcaggaagcgcagctcgctacgctgcttgcccgacgcaaaaccggtgagccggtggcgcatctggtcggggagcgtgagttctggtcactgccgttgtacgtctccccagcgaccctgatcccacgtccggacaccgagtgtctggtggagcaggcgctgtcgcgtttacccgcacaagcctgccgaattctcgatcttggaaccggcacaggtgcaattgccctggcgctggccagcgagcgtccggactgcgaggtgacggcggttgacgtgatgcccgatgcggtagcgctggcgcagcgtaacgtggcgcgtctgggcttcccgaacgtcaccgttctgcaaagcagctggtttagcgcgctggataaccgcacgttcgggatgattgtcagcaaccctccctatatcgacgagcatgacccgcacctgacgcagggggacgtgcgtttcgaaccgctgacggcgctggtctctgccaacgaagggctggcggatattgtgcatattgtgacaacgtcacgacagcatttgctccccgacggctggctgctggtggagcatggctggacgcaaggggacgcggtgcgtgacgtgttcatcgcagcaggatatcgtgcggtggaaacctgtcgcgactatggcggcaacgaccgtctgacgctgggacaatgggcatga

SEQ ID NO: 123001 - DNA, 696 bp, Enterobacter cloacae
gtgttaacgcgtgatttcttaatgaaggcagattgtaagacggcatttggtgctattgaggaatcgcttctctggtcagctgaacaacgtgcggcgtcgctcgctgccacgctggcgtgccgcccggatgatggcccagtatggatttttggctacggttcgctgatgtggaacccggctctcgaatttgtcgaatcggcaacaggcacacttcctggctggcatcgcgcattttgtttgcgcctgacggccggtcgaggtagcgcatgtcagcctggacgcatgcttgcactaaaagagggcggacgcaccacgggggtggcctaccgcctgccggatgcaacgctggaagacgaactgacgctgctgtggaagcgcgagatgatcaccggctgctatatgccgagctggtgcaagctggaactcgatgacggacgtaccgttaacgcgctggtgtttattatggatccgcgccatccgctgtatgaagcggatacccgcacgcaggtcattgccccgttgatcgctgccgccagtggaccgctgggcaccaacgcgcagtatctcttttcgctcgaccaggagctgacgcgcctcggcatgaaggacgattgtctgaatgagctggtggtgaaagtgaaagcgctgctggaagggaacccgctgaataatacgctgcgtcccggttttgcctga

SEQ ID NO: 123002 - DNA, 1185 bp, Enterobacter cloacae
atgacatttatggctggcatttcgccaggtgcgaccgaatggctccagcgtgcaaggtcgatgcgccgggagcaactgagcaggctggcacagcttggcgtgctggttaacgccatcagtctgctggtgcatatgctgcagtgcgagcgtggagcctctaacgtctggctctgctcacagggtaagctgtacgctgccgaatgcaaagcgagccgggcgctggtgaatgaaaacctcactgcgctttatgacgttctggataatcactccccgttccagggcagcggcgtgtgcgaacgtatagccgccgcgctgctcagtctggataacctgtcagcccttcgtgacggcgttattcagcaaaccatcacggccccgcaggcgatggattactattgtcgcatcctgcgtcatctgctcagtatcgtaccgcagcttaatgacagcattgacgatccgcaaatcgcaggccgttttgtcgcgctttatagcctgatgcaaggtaaagagctggcgggacaagagcgggcgctgggcgcgattggcttcacgcagggctattttgacgatggcatccgtcagcggctggtggaccggattgacggacagcaggcctgcttcgagattttcatgacccacagcacggcggatgtgcaaaccaccttttcccagaattgccagcctgaccgtgagacggaacaactgaggcgcgtggcctgtacccgccagccagccgctgacaatggccataccgcactggcctggtttgctctgcaaacggcacgccttgagcatctgcgcaccctggaggagatggttatcgccgatctgatgatcgcggtggacgaacgtatccatcgacaggaggactacacgctcccggctgacgagctggacgacccgctggcctcttaccccgataagcccttgttaaccctggttcgccagcaggcgcgcgagatagaacagctttcccgtcagcttgcgtcactgcgcgatacgctcgaagagcgcaaaaccatcgataaagcgaaaagcgtactgatgacccatcaaaagatgagtgaggaacaggcatggacggcgctgcgtaaaatggcgatggacaaaaaccagcgcatggtggatatcgcccgtgcgctgctcaccgtgaagagcttgtggcaggtaacccctaaggagtag

SEQ ID NO: 123003 - DNA, 2499 bp, Enterobacter cloacae
atgaatgaaacccgaacgacgtgcccctactgcggggtgggctgcggcgtgatcgcaacggtagagggcgagaaggtcaccgtgcgcggagatgaacgccatcccgccagttttggacgcctgtgcgttaaaggctcggcattaggcgaaacgaccggtctgcaggggcgactgctgcacccggtggtcgacgggcaggaggtggaatggtcccgggcgctggcggcggcaggtgaacggctgcagaccatcatcgacacctggggaccacaggcggtggcgttttacgcctccggccagctgttgactgaggactattacgccgccaataagctgatgaaagggtttatcggtgcggcaaacatagataccaactcgcggctctgtatgtcgtccgcggtggcaggctacaagcgcgcgtttggtgaagatgtggtgccgtgcagctatgaggatgtggaaaacagcgatctggtggtgctggtcgggtcaaatgcggcatggacccatccggtgctgtatctgcggctggtacaggcgcgccagaacaaccctgcgatgaaagttgtggttatcgatccgcgcaaaacggccacctgcgatatcgctgacctgcatctggtgcttacgcccggtagtgacgccgggctgtttgtcggtttactcaatctgattcagggaaccgacgcgtggcccatcgcccgggtggctgagttttgtgggctctcaaccgaggacgtggggaccttctacgattggtttgtgactgcgccgcgggccatcacgctctacaccatgggcattaatcagtcctcaagcggcagcgacaagtgtaatgccatcatcaacgttcatctggccagcggaaaattcgcccgtcagggctgcggaccgttttcgctgaccggacagcctaacgcgatgggggggcgggaggtgggtgggctggcgaaccagcttgccgctcacatgaatttcgagccggagtctctttcgcgggtggcgcgtttctggggtacggaaagactggcccagacgccgggcctgatggcggtggagttgtttgatgcgatcgcccgcggcgaagtgaaagcggtgtggatcatgggcaccaatcctgccgtctcgttgccggacagccacgcggtgtgccaggcgctggaacattgcccgctggtgattgtctccgaggtgatgcaggagaccgacaccagccgctatgcccatatccgcttcccggtacaggcgtggggggaaaaagacggtacggtaaccaattccgagcggcgtatttcgcgccagcgcgcctttctgccagcgccaggcgagaccaaaccggactggtgggtcatcgcccgggtggcacaggcgctgggctatggtgaagccttcgcctgggaacatccgcagcaaattttttgtgagcatgcagcgctctcggcctttgaaaatgacggcgcgcgggcgtttaaccttcatgaactggcgtcacttacccgtgaggaatgggaccggcttgagccttatcagtggtcagcgggggcctttgcgcgccgggaaattgtgccggtagagcctcagccacacggtgcggtaataaacgcgctatacccgctgattctcaataccggacgtatccgcgatcagtggcacaccatgacccggacggggtacgtcccgaaactgatgcagcatagtgctgagccgtgtgttgagatcgacgccgccgatgccatgcgcttctcactgtacgacggacagctggcgcgcatcagttctccgcgtggggtgatgctggcaagagtacgtatcactgacgggcagcgagaaggtgagctgtttgtgccaatgcactggaatgcccagtttgcccgccaggggaaggtgaatgcgctggtggaagggcgctgtgacccgctgtccggtcagcccgagagtaaacagacggccgtcaggattatgccctggcagccgggctggcagggtgagctttatgcccgtgaactgccggagcttcccccctctgtctgctggtggcgtaaagtctcacgtctgacggtggcgggggataagccgttgctggcgtgggttatgcagtacgccagtgaacggggctggcagctgcaggtcgcacagaccagcgagcgcagcagcgtgctggcctggcatgacggacaactgatgctcgggttctgggaaggcactgcgttaccgacactggcgcacgcggtaattgaagccgcgtttcgttcacctcccgtgacgcttgctgagcgccacgcgttgttgaatggacagggaaccggggacagtgtcgatccgggccggatcatctgcagctgtttcagcgtgggggaaaccgtcatacgcgaggcgattgggggagggtgtgattccgtcgcggcgctgggtgccaggctgcgctgcggaacgaactgcggctcctgtgtgcctgaactaaaaacaatgtttcaggatattccggaaaattcctcttaa

SEQ ID NO: 123004 - DNA, 1446 bp, Enterobacter cloacae
atgttctcacgtaagcatcgggtatttcttacgacgttaatggctgtttcatctcatcttcgtttgcttgctttactccccctcattccggtcggagccgttcacggtgcgccgaattcctttgtgcaacaggcacagaacccctttgataacaacggggataatctgcccgatctcggcatggcggcgcccacgaccgagggcgaaaaacatctggcagaaatggcgaaagcgtttggcgaagccagtatgaccgataacggcctgacgacaggcgagcaggcgcgtcagtttgcctttggcaaggtgcgtgacgcggtgagcggcgaagtgaaccagcatattgaatcctggctttcaccgtgggggaacgccagcgtgaacttgctggtggatgacgacggcaaatttaacggcagcagcggcagctggtttattccgtggaacgataacaaccgttatctgagctggagccagcttggcctgacgcagcagactgacggtctggtgagcaatgccggcattgggcagcgctgggttgccggaaaatggttgctcggctacaacaccttttacgacaacctgctggatgaaaacctgcagcgtgccgggttaggtgcggaagtgtggggcgagaacctgcgtctgtctgcgaactattatcagccctttgccggctggcgcgatcgctctgacattcaggagcagcgcatggcccgggggtacgacgtgaccgctaaagcgtggctgccgtggttccatcacctgaataccagcgtcagctttgagcaatattttggtgataacgttgacctgttcaacagcggtaccggttatcacaacccggtggcggtcaatctggggctgaattatacccccgttccgctggtgaccctcaccgccgggcataagcaaggggagagtggggtgagccagaataatcttggcctcaaactcaactaccgctttggcgtgccgctggtgaagcaactttctgccagtgaagtcgccgccacccgttctctgcgcggcagtcgctatgattcgccagagcgggataacctgccggtgatggagttccgccagagcaaaacgttgtccgtctacctggcgacaccgccatgggatctcaaagggggcgaaaccgtgatgcttaagctgcagatccgcagtaagcacgggattcgccagctgcactggcagggagatacgcaggcgctgagtctgacatcgccggccaacaataccagcgaagacggctggagcgtgattatgcctgcctgggatgacagtgaaggcgcgagcaaccgctggcggctttcggtggtggtcgaagataatgatggcaagcgcgtctcgtccaatgagatcacgctggctgtggcgcaaccgcttgtggcattacccaccgacgatccgcgctggaagctgctgccggatgagtaa

SEQ ID NO: 123005 - DNA, 897 bp, Enterobacter cloacae
atgggtgatgtacaaaaaggcgtctggcagatgagcctggcgatgttaatttccggctcgattggcgcgtttgttctgctttccggcctgccggtgacggaagtggttttctggcgatgcctgatcggggcgatggccctttttattttcatccgaataagtcgaaaaccatttagtccgctcacccgtgtcacgctactgctggcaattctgggcggtgttgcgttagtggtgaactggttgctgctgttcgcggcttatgaacatatttcaatcggcctttctaccgtggtctataacactcagccgtttatgctggtgttgacggggatgtttttaggagaacgcgtgagcctggtgaaatggggttggctcgttctcgcctttggcggcgtggtcatcctgctctccagtgagctgaatggcgcacagggcgaaggctggctcgcaggaatcggtctggcgatgggagccgctttcttctacgcactgacagccataatcgcccgcagactgaaatcagttgcgccccagcatatcgcctttattcaggtactgaccggcgtggtcatgctgttgcccttcgcccaccagccggcattatcagctgatttcccatggccgattttactgacgttaggtgtcgtccacaccgggatcatgtatcagttgctgtatagcgcgatccagaagctcccgacgcccgttaccggttctctgtcttttatctatcccgtggtggccataattgtcgataacgtggtgttcggacactcgctgaatatcacgcaactggcagggggtgcattgatactgtttgcggcggcaggtaataacctgggctggggcgagaaaaaaccccgcgagtgcggggttaggatcaaatcagcaaattag

SEQ ID NO: 123006 - DNA, 444 bp, Enterobacter cloacae
atggaaaaccttctcgatgacatcgatcgccaaatcctggcctgtctggttgaggatgcgcgcatgtcgctaaaggtactcagcggacgtattggactgacatctcccagtacagcagagcgtctgaaaagactggaagagcgtggggtgattgaagggtatggcgcgcgcgtcaatctgacggcgttggggtatacgttgcaggcgctggtgcgggttcgtcctttaccggggttgctgcaaaaggtagataagtacattcaggccatgccggaatgtattgagagcgataaagtcaccggtgaagactgctttgttatcaggctggtcgtgcggtcgattgagcaactggatgcgttgcttgatggtctggcggaacatgctcagtgtaatacgtcgatcgtgaaaagttcaccggtgaagcgccggttgccaccaatgtga

SEQ ID NO: 123007 - DNA, 513 bp, Enterobacter cloacae
atggtgctacccgaagcgtttaacgcccttattttttgttccaggaagagaatcgtgtctcaactctgcccttgtggtagcgctctggagtatagcctatgttgccagcgatatctgtctggcgatcaggttgcaccagacccgtcacacctcatgcgttcacggtatactgcttttgtgatcaaagacgcagactacctgattaaaacctggcacccgtcctgccacgctgccgatttcagacaggatattgaagccgggtttgctaatacccaatggctcggccttaccgtctatgaatcgtcaacgggaagtgatgctgatgaaggttatgtcagcttcgttgcccgctttatcgaacgcaataagcccggtgccattatcgaacgttcccggttcttaaaggaaagcgggcaatggtattatattgacggaacgcgcccacagtttggtcgtaacgatccctgcccttgtggttcaggtaaaaaatttaaaaagtgttgcgggcagtaa

SEQ ID NO: 123008 - DNA, 942 bp, Enterobacter cloacae
atgctatgtcaggaatccaggggacgtaaaacagggctaatgagaaaggttaaaattggactggcgctaggctcaggtgcagcccggggatggtcgcacatcggcgtgataaatgccttaaagcagatgggcattgacgttgatattgttgcagggtgttcaatcggatcgcttgtggggtccgcatacgcgtgcggaaagcttccggaacttgaaacctgggtacgctccttcagttactgggacgtattgcgcctgatggatctctcgtggcagcgcggtgggttgctgcgcggtgaacgggtctttaaccagttccgtcagattatgcctctcgatgacttcagtcattgtcagttacccttcggtgccgttgcgacgaacctcagtaccggccgcgaactctggcttaccgaaggggatatccatcttgccgttcgcgcgtcctgcagcatgccgggcttaatggcccctgttccacacaacggttactggcttgtcgacggaggcgttgttaacccggtccccatttccctgacccgcgctatgggtgccgatatcgttattgctgtggatttacagcacgacgctcatctgatgcaacaagacctgatgccagtcaatcttcagagtgaagatgccgagggcgaaaaactggcctggcatgagcgtctgcgcggacgtctcgggcgcatggccgcccggcgtgcggtaacggcacccacggcgattgaaattatgacgacctcaatccaggtcctggagaaccgcctcaagcgcaaccgcatggctggcgacccgccggatattctgcttcagccgtattgtccgcaaatttctacccttgatttccatcgggctgaggccgccatcgcagcgggctcgttagccgtcgaaaagaaaatagatgagttgctgccttttgtgcgaacagcacgttaa

SEQ ID NO: 123009 - DNA, 870 bp, Enterobacter cloacae
atgatgtcagcccttattatttgcgaggttaatgtgtcgcgattattcacctccgtccgtcggcggctctatcatcttttattcgatcctgaaacggtaaccggacggcgttttgaagccctctgcgccctgtttgcgctgctcagcgtggtgatcatttttatcgaatcgggcgtcggaacgcagtatcacctgacgctggaagaatggcatctttttgtctggctggagctggtcattacgctggtctttaccgctgaatatttcctgcgggtattctgttggcctgatccggccaaatatgtcttcagcttctggggatttattgatttagccacgatcctgccgctctatgtcatgtggctatggccggaaatcagtctgagctatgtttttgcctggcgagcgatgcgtgttattcgggtgttacgcattcttaaactgctgcggtttatgccgtcattgcggatattctggagtgccatcgtcagcgcgcggcatcaactgatcctgttctactcatttattgccatcgtcatggtgatattcggcgcgttgatgtatttgatagaagggccgaagaatggcttctcaacgctgaatgcttctgtttattgggcgattgtgaccgtcacaaccgttggctatggtgatatagcccctcacactccgctgggacggattgtcgcctcggtactgattctgattggttattcggtgattgcggtcccgacagggctcattactacgcacatgagcagcgcctttcagaaccgtaaggcgcaacgaaaatgcccgaaatgtcaccagggtgaacatgaacacagcgcgcggttttgtaatcagtgcggaagtgagttaccggattaa

SEQ ID NO: 123010 - DNA, 411 bp, Enterobacter cloacae
atgaacggaaaagtggttgctgcccttcttgggattgccgtgttgagcggttgtgccagcagtaaaacgtcaccggaaaggcatgcttattatttcgtgtcgcataaaaccaattttactggcggcaattttacgtcaagtgtatcgcaaaattatcgtctgaatgtccctcagttccgtgagctgtatgagcaggggaaaaccgatcgcgctgcaggacgcacactgtctgaggcaaaccagtacgcccaaagcattcgcgatcaactgaagaatcaggcgaaaacggagcatgctttcgacggtaataccgcggataaatggacgtctcaaatggaagagaaggacgccgttttatttggcaacgaactggctgcgacttatcttgatggctataacggcgtacaatag

SEQ ID NO: 123011 - DNA, 633 bp, Enterobacter cloacae
atgaaaaaattagcggtggcagcccttgtattaagcagtctctctggcggcgcgtatgcgcatgaagcaggtgaattctttattcgtgccggttcggcaacggtgcgtccaacagaaggctctgatagcgttttgggtatgggcggttttaacgtcagcaacaatacccagctcggtttgacctttacgtatatggcgacggagaacattggtgttgagcttctggcagcaacgccattccgtcatcgcgttggtttagggccaaccggggatatcgcgacggtgcaccatttaccgccaacactgatggcgcagtggtactttggtgatgctaacagtaaggtgcgtccgtatattggggcaggggtgaactacaccaccttcttcgacgagaaatttaacgataccggtaaagaagccgggcttaccgatctcagcctgaaagactcgtggggtgttgcggggcaggtggggctggactatctgattaaccgtgactggttaattaacgcctcggtctggtacatggacattgataccgacgttcgctttaaagcgggcggtgaacagcaaagtatcagcactcgcctcgatccgtgggtgtttatgttctccgcgggttatcgtttctga

SEQ ID NO: 123012 - DNA, 435 bp, Enterobacter cloacae
atgtttgcgtcaattctcgttcctgtcgatatttcagagcgtcgcctgaccgaacaggtgattccctatgttcaggcgaacgcagcaatcagtaacggcaaagtgcattttctgactgtcgttccttctttcccctactattcctctcttgggctggcctattccgttgagatgccaaaactggaagaaatgcagcaggaggcgctggcgaaattgaatgagatcattaagcagttcaatttaccggccgaccgcattcagacccacgccatttctggcacgcctaaagatcagatcctgaaactggctgagagtatcaatgcagacctgataattattgcgtctcatcgacctgatatttcgacctatctgttaggctctaacgctgcggtcgtcgtgcgccacgcaaaatgcccggtgctggtggtgcgttag

SEQ ID NO: 123013 - DNA, 744 bp, Enterobacter cloacae
atgcaggtaaatccggggatatgtccggctctctttgctgatctcagtcagactgacggagcgcgcatacctctgcgaagcgccgtcgggaacatggatttaatgatgatgatcataatctataaagtcaactggtttgattatgatcatcatcaatgtataattgagccttgttttgtatgggggcgggaacgcatgaaagtgtcaaaagagcaggttcgggaaaaccggatgcgcattgttgaaacggcatcagaactttttcgtgagcgcggctatgacggcgtgggcgtggcggagctgatgtctgcggcgggtttaacccacggcgggttttataagcactttggttcaaaggctgacctgatgtcagaagccatgaactgtggttttgtacacgccgcggaaaacctggcgggtgtggaccgagaaaaattcattgaatattacctctcccgacagcatcgcgatgatatggccaggggttgtgtgatgtctgccctgggcaccgacaccgcccgtcagtccgagtccatcaaagagacatttgcggctggggttgaacgccagttggcaatgttaagcgacgaaaatgtctcacgtgctgacctgatagacacctttgcacatcttgtcggtgctctggtgttgtcccgtgcctgcccggataattctgcgctcgctgacgaaattctggatgtctgccgctcgcgtattctgcgtgaggagccgcgaaaagagtga

SEQ ID NO: 123014 - DNA, 780 bp, Enterobacter cloacae
atgacgaaaacttcagttctcattacaggcgcatcgacgggtattggtgctgtttatgcgcaaagatttgcgagccgtggacatgacctggttctggttgcccgcgataaaacaaaattagacgcactcgccgagcgtctgcgacaggagaagggcgtttctgttgatgttctgccagccgatctcactcaggcagcggatttagcgacggtggaagctcgtcttcgtgaagacgaaaaaataggggtgctgattaacaacgcaggcatggcacagtcgggcaattttaccggccagacgcctgaggcaattgagcgtcttatcgccctgaacgtcactgcgctgacgaggcttgcgagtgccgcggcgccacggtttgtcaaaaccggagaaggcgcaatcgtcaatatcagctccgtcgttgggctcgccccggaatttgccatgacggtttacggtgccaccaaagcctttgtgcttttcctgtcgcagggattgcatattgagctctcctccgcgggcgtttacgtccaggcggtacttccggctggcacttacaccgaaatctgggaacgtgcaggtattgatatcagtaaggcacccgagatgatggaagtgggtcagttagttgacgcagccctggccggctttgatcgtcgcgaactcgtcaccatccctcctttacaaaatgctgcccactgggatgacctggagacggcgcgtcaggctctgctggcggatatcaatcaggctaaagcggcagaacggtacacagtgtag

SEQ ID NO: 123015 - DNA, 819 bp, Enterobacter cloacae
atgacaaaaaaacgtgtagcactggtgaccggagcttcttcggggatcggtgaggcgtcggctaaaaaactgctggccgcggggtatagggtctatggcaccagccggcgcggtgcgcaggcaggtacacatccctttgcgttattaacgcttgatgtgacggacgatgcgtccgtgagcgccgccattgaggcgttactgcacctggaagggcggatagatttgctggtgaataatgcgggctttggggttgctcctgcggccgcggaagaaagttcgattgatcaggccaggcgtattttcgacaccaactttcttggcctggtcagaatgacgcgggcagtgatcccgcacatgcgccgtcagggcagtgggcgcatcatcaacattggttcgatattagggattgtcccgctaccttacgtggcactgtatgcagccagtaagcatgcggttgaagggtatacgggcgcgctggaccatgaactgcgcacacagggtatcagggtttccgtgatcgagccggcctatacaaagacacagttcgacgcaaacaatgtagaacctgacgcgaagctagaagaatatgaaccgctccgggctaagctgaacaacgtcgtcagcaaggcaatggacgaggcggaacgtccggaagtggtggctgatgtggtggtaaaggctgcccagtctttacggcctaaggtgcgttatacggcgggcacgctggcggggaaactgaatttcattcgccgctttgcgcctgcttcacttctggacagggtagtacgcaacagtcttcagctcgacgcgaaagaataa

SEQ ID NO: 123016 - DNA, 411 bp, Enterobacter cloacae
atgaaattttctcaactggctattctgactgccgggttgtttttcatcctggcggcgatatggatgttctgcccgcaactgctgttaacgcagtggggaatcacgccaacaccgggaactgatgtgctcggccatcgctctgccgccctgtacgcgggcctgggggtgatgtgtttattcgccaggcacgcagagccctcgctggcccgctatgccctggcagcagggatcggtacgttatgtttgattttagccgtgtccggcgttgttgagtggtatgcaggacacgttaatgggcagatcgttattgcagtatttatcgagctattcctgggtatcgcttttttactcagcaacagcgttggtaagaaacacgccaccggcaaacccggcagagtaaaagacaaatga

SEQ ID NO: 123017 - DNA, 1020 bp, Enterobacter cloacae
atgaataagaagacgatgaaagcatttacgttcaaacgctatggtaaatcccctgaactgggattcgacgacgtcgattttccgtcccctggtgatgatgaaattctggtcaaagtgtatgcagtaggtctgaacccgatcgataacatgatcccgaccggcatgttcaaacgtgttctgcatttcagtctccccgcgacgttgggcagcgacgtgtccggcgttgtcgttgccacaggacgtcgcgtgacgcgtttcaaagcaggcgacgaggtgtttgccagtatttttgacaggggaacgggttcgcttgctgagtttgtgcgggtgccagaaaaccttgcagcgttaaaacccgccaccctggatttcgtacaggcagcgtcgcttccgatggtcagtctcacctcctggcaagcgctgacggaacgcgcgaagctgcgagcggggcagaaagtatttatcccggccggctccggtggaattggcagttttgctatccaactggcaaaacaccttggcgcaacggtagggacgacaaccagcaccgccaacattgactgggtgagccgccttggtgcagatgaggtggttgactataaaaagcaggaattcgaaaaagtgctgagcggctacgatattgtcctcgggactatcagaggtgacgcgattgagaaatccacccaaatccttaaaccgggagggaagatagtttccctgatcgggccgttagatacggctttcgcacgggaaagacacctcaatgttttcctgcgtttcgtattagggctaatgagccgcaaaatcatgcgactgtcaaaaaaacgaggattaacctattcgtttctctttgtccgccctgatggcagccagcttagccaaatcgctgaactcatggacgctcaacgcatcaagcccgttatcgacaacgttttcccctttgccgaaactggcgacgccttcgcctatctggctcgcgggcatgcaaaggggaaagtggtggttaaaattcatgagtga

SEQ ID NO: 123018 - DNA, 792 bp, Enterobacter cloacae
atgtcagatatcaggctttatatgttccagtcgggctatcagcgttgtaaatatcacgatatcaggatgaatcagggtgaaggctccgactacattatacctgtcccctggtttttactgatgcatccgcaggggaatgttgttattgacggtggtcttgcggtggaagggctgaaggatccccgcgcctactggggaccgactgttgaccagtatcaacccatcatggatataaaccagggctgtaaaagacaactggcaaacctcggaataagaccagaatcggtgcgttatgttttactctcccacctccactctgaccataccggcgcgattggccgctttcctgaagccactcatcttgtgcaacgtgctgagtacgactatgccttttcaccggactggtttaccgccggggcctactgtcggaaagattttcatcgcgaaggtctcaaatggcagtttctggcaggagatgccgatgacggttttgatctgtatggcgacggcgttctgaaaatcatttacacgccaggccactccccgggtcatcaatcttttgtcgtctccctgccgagtggaaaatcgttcaccctggcgatagatgctgcctatacgcttgaccattttcaggataaagccctgcctggcttgctgacatcggccagtgaggtggcacgatcggtggcaaaactaagagtggttacccagatgcataatgcggaaattattcccgggcacgatcctgatatctggccgcattatgcgatgaagacggaaggctataactga

SEQ ID NO: 123019 - DNA, 900 bp, Enterobacter cloacae
atgcgtattttcattcgggtggttgagcgcggaagcatgtctgccgctgcgcgcgatctcggcatcggacagccggcggtcagtgaaaggatagagcgtctggaagctcatcttaatacccgcctgctgcgacgtcacacgcgccgaatgtctctcaccaatagcgggacgctgttctatgaacggagcaaaagcgccgttgcagcggctgaccatgcgctggcaatcgcggataatggtgaggcaattagtggaaccctgcgcattgccgcaccctatggtgccggggaagagttacttatgcccgccctgcttaaactgcaattggcctatccgggcataaacatagatctggtgctcagtgacagagtgacggacccggtcaccgaaggtgtggatatctcgctacgtcttggtgaggcgggggaaggatattatgttgcccgcccgttggggaaaattgagcggttgctggtggcctctcccgaatatttgcagcgttatgatatgccccgtacaccgggtgagctcgcccgacatgcgtttgctcgtgtttcgggcctgtttatgaataaccatgtgacgctgatcgcgcctgacaacgcattactcaccgtccctgtgagaataacattcacttccagtcactggcggccgttacgtactgtgcttctggcaggaaaggcaatcggggtattgcagtctccggtttgccgacaggagattgccgacgggcatctcgtacctgtgttacccgactacattgttccttcattccctgcatatctactttatcccccggctaatatcatctccgctgaaacacgagcatgtgtcgctttccttgaaaacgaacttcgcacaagccttacgcgctcagtaacaaaagggcagccatag

SEQ ID NO: 123020 - DNA, 903 bp, Enterobacter cloacae
atgaaaattgaccttaatcttttacctctgtttctggctgtcgcggaggaacgtagcttcagcgctgccgccgaacgtcttggcgtgacgcgatcggcggtcagccaggggatcagacgcctggaggatacgttcgggaccctgcttgtcatgcgcaccacacgttcggtaaacctgactgaagcgggagaacggctgcgaaaatcgttgtccgtaccgctatcaacgattgacgcggcgtgcgaagacgttctctctgacaacggaccgcgagggcatctgaaaattgctgtcacctcaattgcagaagaatttctttcaggccctctgctcgcgtcctttgcagccgctaaccctgccgtcaccatcgatatcgtcgtgtcggatgacgaatttgatatcgtggcagcgggctatgatgccggcgtaaggctcggtgacgtgatcgaaaaagacatgattgctgtccctctgacgggacagcaacgggaagtggtggtggcatcaccaacttatctggcggcccacagcgcaccgcgccatccgcgagagcttatccgccatcgctgtatcggctggcgcccatcgccagacgtcgcgccctatcgctgggaatttgaggaagcgggaatacctttcgacgtggcggttgaaccgcatatcaccaccaacgatctccgtctcatgctcaggctcgcactggcggggggaggaattacctttgcaacctatgaaacattcaggccatttattgaaaaaggacagcttgtttcattactggatgattttcttccgccttttcctgggttttatctgtacttcccgcaacgtcgaaatatggcccccaagctgcgggctctgattgaacacgtcaggcagtgggggaagacgtcactgcagtag

SEQ ID NO: 123021 - DNA, 723 bp, Enterobacter cloacae
atggataaagtcatcttgatcaccggtgcatccagcggtatcggagagggtattgcacgagagcttggcaatgcaggcgcgaagttattacttggggcacgcaggaaagatcgtattgaagctatcgctgcagaaatccgcagtacaggcgggcatgctgaagcctgcgagctggatgtcacaaatcgccagtcgatgtctgatttcgtgcaggcggcattgactacgtgggggcgtattgacgttctgatcaacaacgcgggaataatgcccctttctccgctggcagcgggtaaatatgatgaatgggaacgtaccattgatgtgaatatcaagggcgtgctatgggggattggcgccgtgcttcccaccatggaagcgcagggctccggtcagataatcaatattggctctatcggcgcgctctctgtggtgccgacagccgccgtctattgcgccacaaagttcgccgttcgggcgatttcagatggcttgcgacaggaaagcgccagcatccgtgtcacctgcgtcaaccccggtgtggtggaaagcgaacttgcctcgaccattactcatccggaaacgcaggcggcaatggaggtataccgttccattgcactccagccggctgatattgcccgcgctgttcggcaagtgattgaagcgcctgaaaatgttgatacaacagaaatcacgattcgacctaccgcgtctgcgaactga

SEQ ID NO: 123022 - DNA, 747 bp, Enterobacter cloacae
atggaactcaacggtaaatcagccatcgtgaccggtgcatcaagcggtatcggcgcagccaccgccattaaattggccagagagggggtcaaagtggggctcgcggcccgccgccgggatcgtctccaggcgctggtgtcagaaatcaaggccttcggcggagaagccattgcgctggaaatggatgtgactgaccaggcgtcagtcttcgacggcgtgaagaaactgcacgacgcctatggccacattgatatcgccttcaacaatgccggactcatgcccatttcagacatcgccagtctcaaactggaggagtggcatcgtatggttgatgtcaatattaagggcttaatgaacacggttgccgcggtactccctgtgatgcaagcgcaaaagtcagggcatatcatcaatacgtcctcgattgcgggcagaaaaacgttcgctggactcggggtatattgcgcgacgaaacatgcggtagccgcattttcagatgtattacgcatggagctttcgtctcaatacaatattcgcgtaacctcacttcagccaggcgcggttgaaagtgaattattcgagcacattactgacgaaaactaccgtgcacagatggaaaacctgaaggaacacatgacgttcctgaagtcagaggatattgctgattccatcctttatgtgctgcgcgcgccggatcatgtcgacgtggcagaattgttcatcatgcccacagagcagcagtggtaa

SEQ ID NO: 123023 - DNA, 882 bp, Enterobacter cloacae
atggctcaacgtacttccgctgaatcattcgaagcgtacattccgggcgaattgctcaaggaacatcgggcacaatcttcccgggatgtcttcattcaaattctggcgcgtcgacagaggcaggacaacgttattatcccggccgtgccagagccttttattgtctggatactctctggacgggccgtcgttgaagaacggcctctgggcggagagtggtcagaaaaccacgttaccgcaggtgatttttttctcacgaccgacacctctccgacagagatgagatggcaagctgagccagactgccctttcatcgttatgcacgtctatattggtgtgtccatgatgcaggacattgagctgcgggaagtgtcgggcgaacgcgatgaaacactgtcagccctgctggaacttatgcgcgcagagctttattttcagcacccacccagtggaccttacatccagggtatcgctcaagcccttgccgtacatctctcccgtgcttaccggacatcggcaaagcgacaccacggcgggttgcaggcatataaattacaccgggtatttaaggcgatgcatgaagagctggctcacccctttgacttagcacgtctggctggccttgccgagcttagcgaattccatttcagccgggtctttaaacagtctaccgggctttcgccttcccattattttatccgcttgcgaatggaagaggcgcgccgcctgttgtccgagacagaggattcgatgatcagcatcgccctgaccgtgggctacaacagccccagccattttgctgccatattccgcaagcacaccggtatttcgccctctcagtatcgccacgaaaatatgcgtagcaaaacaccgacagtgtga

SEQ ID NO: 123024 - DNA, 606 bp, Enterobacter cloacae
atgaaaacaaatactgtcggcattattggtgcaggcgccatcggaaaagcttttgcccaccagctggtcaacgcaggcgtgaatgtcatcctcagtaacagtcgtggcccggacagcctggctgaagtggttgaggcattaggcgacaaagctcgcgccggaacggtacaacaggctgccgaagccgaaatcgtttttataagtaccaactggaacagaaccgaggccgcattaagtggggtgaactgggagggtcgtattctgattgacgcgactaacccggtacttttgccgggctacacccttgcagatctggggggtaaaaattcatcccagcgcgtttcagaatgggcagcgggagcccgagtcgtcaaagccttcaacacgcttctggcaaacgttcttgcgcaagacccgtcccaatctggcgggcgccgcgtggtctttatgtccggcgaccacgctgatgcaaaagcggacgttgaggaattagccacccgaatgggcttcgccagtatagacttagggggtcttgagatggggggatatctgcaacaattcccgggtggtccccttcccgcgctaaaccttgtgaaactggcttaa

SEQ ID NO: 123025 - DNA, 891 bp, Enterobacter cloacae
atgctggatggtatgtcgattgatcaactgcgtactttcattgctgcagttgatgaaggcagtttctcggccgcaggtcgcaaacttcgccgggcgcagtccgtcgttagcgctacgctggcaaatctggaatctcaggtaggctttcctttatttgagcgaacgggacgttacccgaaactgacggaggcgggggtagccttactggaggccgcacgccatacgcttgcgggaatggacgcgtttaaggctaaggcgcgtatcctggcagaaggcctggaacccgaactcgccgtgtctgtggatgtgatgttcccgatagagatcctgaccgcagtcgtgaaggaatttcatctggcctttcccggcacaccgttgcgtctttatgttgaggcgctgggggcggtacttcagccgttgctggccggcaactgtcgggtcgcgattatcggctcgctaccggatgttccgaccgggtgtgcctctgagtgcctgctcagtgttcctgccgtggctgtggtctcacccgatcatcctttggctaaaatggctggcccaattcttcggccggctatggagaacgctgtgcagcttgtattggctgaccgctcatcactcacggcggggcgcaactttggcgtaatgtcggctaagacgtggcgtttgggtgacatgggggcaaaacatgcattcttgcgtgcgggcctcggttggggttatatgcctttgcctatggttgaggacgatcttgctcatggcagactggttatcctgaacctggagatgcagcctgatgttggccctggtttttccatgcatgcggtacatatgacgcaatatcctccagggccagccggacgctggtttattaataagcttaaaacgcagtaa

SEQ ID NO: 123026 - DNA, 777 bp, Enterobacter cloacae
atgaaggaaataaaaatcgccttagtaacactcatcgcagcatcgttcgcttcacaggcatcatcagataaaaaagcatcttatgtcacgattggcgtgggttcacaatatgcgcctgaatataccggctcgaataaatatgatgtcaatacgctgccgtatttcggatggacttacgatgactggtccgtcaataccgacaaaggcattgtctattcccatcagttcagtaatggcgtttacctggggcaagctctggggtattcccttggccgcacggatagcggaaacgcctggcttcaggaaggctctgataaacttaaaggtatgggtaagattaataccgtaatgaataccaccaccacggcaggatggtggatggcgccctggataggctttgagggaaatattacggcaccgctgacggaaagccagggaatgcaatataaaattaaacttaatgtcgttctttttgctaacgacacagatactctgctaatcagtaccgaaagaaaatacggcgacgcacggtataataatacctggtttagggtgaatgaaaatcagagtacccattccggatataggcctttcaacgcgggtagcggattaaacagtgtgaattacgatattaactggcaacacacatttaatgataactggtccggctatgcggatttagggtatatcacgcttgcagaccgtgtaagcagcagccccattgtgcaaaaggatgaatatcttctctttaccgtcggggcattttatatattctga

SEQ ID NO: 123027 - DNA, 687 bp, Enterobacter cloacae
gtgaaacgtgttttaattattgaagacgatttggatgccgcgaatgtgcttgaggcttaccttaagcgcgatcagtttcagacctcttcggccagcagcggtaaccgggggctcgaactggcattcagctggaagcccgacattattttgctggatgtgatgttacccggcatgagcgggaacgatgttctgctggccctgcgccggcgcagtgatattcccgtgattatgatcaccgccatccgcgacggcagcgacaaaatcagcgccctgcgatttggcgcggatgactatgtggtgaagccctataacccgggtgaggtggtcgccagagtccatgctgtactccgtcgttattccggcgagcgcagcagcacgcttattgagtaccggggactgcaggcagatacagagtccatgacagtaagcgttgagagcgagaacgggcaacggacagcgctggatttaacgccgacggaactgttgctgctgatgacatttcttaagtcaccgaataaggctttcacccgtcaggcgcttcttgaagcgtgtctcccagaaagtgaagccctggagcgcgttgtggacacgcatatctataacttgcgaaaaaaactcgagtcagcggggcagactgatttgctgataaacgtaagagggatcggttaccgatttgcaaatgcatga

SEQ ID NO: 123028 - DNA, 1203 bp, Enterobacter cloacae
atgaaaaagtttacgttatctccacgaggcgaaccgagtacgctgtggaactggatatgcaagcggctgatatccctggcagtcggaagtattattcttattgccttttttatgtgggtgcgattttttgttgaaaacaaatggcacgcctaccggatgccagaggccgtcagggctgaactctcagttctgagcaagcaccctgaacagaacatcaaccgctatcatgaaattatcgacacctggtatgggctgtcctactcagatccgacgatggggattaaggactgggtgattcttggcatcctggttctgatattcataccgattatttttatgcttacgctgaaaacagcgcgccccatatcccatcatattagccggcttgccggtgcggcacggtctgttgctgaaggcgggtttgggacccgcgtgcccgtcccggacaatctgccgcttgaattgcgaagcctcagcgagaactttaacgggatgtcgatgcagctggaacgctacgagaaagatttgaaaaaatcgcatgtgatcatggcacatgaattgcgctcgccgctgacggctgccatcggtcgtctgcagggcattatggacggcgtatttgaacccagtcaggcccagttgaacatgatcatgcagcagatgaatgatttaaacagactggttgacgatctgcatctgttaaaactggctgatgccaaccagctgaatttgagcctggtatcaaccagcctggaccagataatccgtgagaaagtggcatggacgatgccttcagcccaaagggtgggagtgaacattatctaccatgagggggaatctgtgacctgtcgggttgatccgtaccggataggccaggtctttttgatcctgatggacaatgctctgcgttacgctgcggaagggggcatcctggatattcgttatcatgtcagcgataaaaaggtatccgttattttccgcgacaacggtccggcagtcccggacgcactgcttgaaaccatattttcaccgtttgtgcgtgaggagcagtcccgttcacgacataccggtgggtccgggcttgggctctctattgcccgagcgatatgcgaggctcatcgcggtactatctttgcagaacggaatgccagcggagggctatcgttcacgatgacgataccgctaagcgaaaaggaacagcattga

SEQ ID NO: 123029 - DNA, 891 bp, Enterobacter cloacae
atgggcttcagacattcgctttttggatgggaacgttcaaacttcacgcattaccaggcggcttattataagtacggcggcagtgttaatactcatcccgacattatcaatttctttatgcagaagaaggaaaaagatttcgcattctggcattaccgacgcgatggcgaggtcaccgcagcgtactttaccagtgatgaaaataccttcggcctgaatgtctggcgcgattacccggtatcttatgatgaaattattatccccatggctgccgatcaaaaaatcgttctgccagtaaaaacaaaccggctgtcttcatcgctgcgtgggaatataataaatgccacctatgcttttcgtgaaaaacgtaaggtttgcctgattaaaacgtctttctcaggtaaaacggtgaaaaaaagaaacggagagctaaaaaaaatgctgactgcgggcggagaatgcatcccgctcagagagatgtcaccggcggatattgctgatatttacgtgcatcttttcaggctgcgttttgctgacagcgtcagatgctataacaggaaaaacatcactgaactgttaaccgccctgccacatatggtcaccggcaatgtacttttctttgaaggtgcccccattgcgatagatctcgtactgtgtgcccgtagtgaaaaaagcctgtattttgatgttcctaacggagggattgacccgtcgatcaccgcattcagcccaggaagtctgctcatgtggaaaaatattgttgatgcacgagaagtgtgtcgcaatgaaaataaggcaatgcaattttcaatcggattgtacgataaaaaatgggactataaactgctttgggccgaaacccagcctacaggtaaatcattggttctttga

SEQ ID NO: 123030 - DNA, 348 bp, Enterobacter cloacae
atgcgaccatctgaactggcggcgctcactggcgtcagcacccgagtgctaagacattatgaagctaaaggactgattgtttctcagcggttggacaacggttatcggaattacgacgcgaaagacgtcgagaaagtgagatggataatctcgcttttaaaatgtgggttcagtacccgacagattgcagagctggaaaagttttctcaggtaagcgacatggatgatgcgcgttttatccagtgtctggcgcagcacagagaaaaacttcgggcactggacacgcttatcgaattacttaatgaacgcagaaatacacttgccacgcgtattcacgcctacgagtga

SEQ ID NO: 123031 - DNA, 753 bp, Enterobacter cloacae
atgaaacagttagacaataaagtcgcgttaattaccggaggcagtagcggtatcgggctggccacggctaaacggtttagtgaagaaggtgcaaaggtgattatcactggcaggaatgcagaaaccctgcagcaggcgatgaatgaactcggtgacgataatgcactgtcaatacaacacgataacggtgacatacgaagccatgaaaacctctttcgcattattaacgaaaagtacggcaagctggatgtgatgtttgcaaatgccggcgttattgtgctttccgatttcccggcctccaccgaagatgattttaatacgcagtttgatatcaacgtaaaagggacgtttttcgccgtgcaacaggccctcccgttaatgtccgacggtggctcgataatattaacgtcctccattgcgcattataaagggttcgatggacacaatatctatgccgcctcaaaagccgcgctgcgatcttttgcccgcagctggacgaccgaccttaaaggccgtgggatccgcgtgaattgcctgagcccaggacccgtcgccacaccgattatcagtaaaatgggcgtttccctgagcgatcgcgagatttttgacgccagcatcgcaagtcgtattccgttaggtcgattaggcaagcctgacgaggttgccgcggcagcgctgtttcttgcatcggatgaaagcagttttatttcgggtatcgacctgtctgtcgatggcgggatgggacaaatttag

SEQ ID NO: 123032 - DNA, 1206 bp, Enterobacter cloacae
atgaaaaaacgtattattattgccggttcgggttttgcaggtatgtgggccgccatttcagcagcaaggctggtacatatggaaaaggcaaatgatcggattgagatttttttggtttctccggaacccgcattaaccattcgtccaagattgtatgaagccgtactggaaaatatggcaccctctattctgcgtgttcttgaggctgcgggtgtgcactatattgccggttatgtcaccgatattgatgcagaaaataaaactatctcggtaaaaaaagagagtggcgaaacctcagttaattttgacagttttgtgctggccaccggaagccaggcatttcacccggaactgccggggatcacggaatacagttttgacgtgaactcattgaatgctgctcatgaactggagcaacacctcatgtcgttagcttcagagcctgattctgccgcacgaaatactgttgttgtcgccggtgggggcctgaccgggcttgagaccgtcactgaaatgccggaacgcctcagagacctcttgggttcggagcgccatttgcaggttattattgtggacagttcgaacaaaattggtcaggcgatgggcgaggatgcctgtgagatcatcaatcaggcgctggccagtaatggcgtgactgtacgaacgggcgtcagagtgcgcgcaatcaacgctgagggggtgatgctttcggacgatgaatttatccccagcaaaacggtgatatggacggcgggaatgcgggccagcgcgttagccgggctcatcccgggcgaccacgataatctgggtcgtgttataggggatgcgtatctgcgggcacctggcgccagggggatcttcgttaccggcgataccgtaaaagtccctacggatgatgaaggtaattataacgtcatgtcctgccagcatgcgatgagcctggggcgcgtcgccggtcataacgcggcagcagaaatactgggattaccgctgcatccttacagccagccaaaatatgttacctgtcttgatctgggcaaatggggggcggtctacacggaaggctgggatcatcaggttatgtaccagggcatggaagcgaaaaaaataaagcaggaaattaatactcagtggatttatccgccagaacccgacagagagaaaatgttttctgttgctaaccctgattatattattgttccgtaa

SEQ ID NO: 123033 - DNA, 897 bp, Enterobacter cloacae
atgaaaaatcatgacattcctcttgaagatgccgttcataaaatggctcaggtattaaagaaccgacctgaattaggcatcgacagtggagatgcgctgcaaattcgctgttatcactggccgcatgggccattgcatgaaactatcccgccactcgatcaacatgtgattattgctcacgttggacatatgcagcgggttgagcgaaaaacagaaaataaaatcgtcaaaaacacgatccggaaaggcgccatcacgacaattcctcagggaagtacatctcgctgggatattgctggtcttgtagatgttatgcatttatatattcctgataatattttcgccgatcttctgaatcaaatggagatacccactgcagagttaatcttacgcacagcgcattttgatgagacggcatcaaaaattacgctggccgttgcggaaatcatttcggacaataacaaaattaaccaactgctctgcgaacacttaacactgtcattaatattacagttaataaaaaaccactccaacacgctgacagccgcaggccagtcgcaaggagtattgtcttcgcgcgcattaaaaatggcgctggaaaaactggataacagcccgataggtgatgtcacgattaaatcactggctcttgagctgggagtttcctcagctcatttctgccgtgcctttaaaaacagtaccggcttaaccccgtacgggtggcttaagcagcgcgtaatggaacgcgctttccacgagttacaacacaccgataaactgattacagaaattgccattgaaagcggctatggctcgcaaaatgcatttacccaggccttcagaaaaataacaggcttgacccccggtcaatggcgtgaaaaaaagaacacgcgttga

SEQ ID NO: 123034 - DNA, 942 bp, Enterobacter cloacae
atggcgatatctaagaatgatgcagcgtcgttagcacctgttaatggtacctcgcatgtggaagccgtttatgaaaaggtgccatcacgttatgcactacaggtcggtaagattgatgttctggtgatcagtgacggcgtgttgtcattacctggacccatgttgggtcataacgcggaggcctccgaacgtacccactggtttgaagataagtttctgcctgccgattttctcgactgggcattaaatgtggttctcgtgcatagcggtgaccggacgatcctggttgatgcagggatgggggaggctttccctgatttaccccgcgccgggcgaacggttaaccgcctggcgtcagcggggatacatcttgccagcgtcacggatgtgattatcacgcatctgcatatggatcacgttggtgggctgcttattgagggtgtgaaagcgcgcatgcggtcagatcttcgcattcatgtcgctgctgctgaggtggaattttggcgtgaccccgatttttcacaggtttccatgccgcctggtttcccggaagcgctgcgccaaaccgctacccaatttttgcaagcgtaccagactcaactgcatacattcgaagatgaatacgaggttgcacccggcgtgcgtgttgttcgtacaggcgggcatactcccggacacagcgtggtaaggctggcctctgagggggaacgactcacctttgccggcgatgctattttccaggttgggtttgaacatcctgactggttcaatggtttcgaccattatcccgaagaagcggcacagattcgcattcgtctgttgcaggaactggcagataacagggagtcattgatcgctactcatctctcattcccgtctgtctgccatgttgctgtcgacggcgatacgttccgttgcattccgggtccctgggattattaa

SEQ ID NO: 123035 - DNA, 768 bp, Enterobacter cloacae
atgtccaaatttgctgcctcccttgccgttgccaccgttttgctgtctgccagcgctattgcagaaaccgctaagccgactgttgtcctggttcatggtgcctttgccgactcttctagctggaatggcgttacccaaatcctgcaaaaggacgggtataacgtcgtcgctgcggcgaatccgctgcgcagtgtttcgactgatgcggcttacgtctcttccgtggtgaacaatattaaggggccggtcgtccttgtcggccattcctatggtggccaggtcattacgaacgcggcccgtgatacaaacaatgtgaaatcgctggtgtatgtcgccgcatttgctccggatgccggtgaagcggcggccgacctggccggaaaattccctggcggcacgcttggccaggcgctcgccgcaccggtgaagctggctgatggtagcgtcgatctctccatcgaccaggcgaagttccaccagcaattcgcacatgacgtttcagctaaagaggcagcgctgatggccgcagggcaaagaccgattaccgaagcggctttaactgaaaagtcaggtgcgcctgcctggaaaaaactgccctcttactttatttacggtgacggcgacaagaatatccccgcccagggtttgcgattcatggctgaacgcgcgggctcaaaacacaccgtggtgatcaagggcgcatcccatgtcgtgatggtttctcatccgcaggacgttgccacacttattgaggaagcggcgaagtaa

SEQ ID NO: 123036 - DNA, 822 bp, Enterobacter cloacae
atgacaactttcaccaccacagacggaacaggcattttctacaaagactggggttcaggtcagcctatcctcttcgctcatggatggccgttatcgtctgatgcctgggatcagcagatgctgtttttcagccagaagggtttccgggtcatcgcacacgaccgtcgcagccacgggcgttcggaccagactttccacggtaacaatatggatcagtatgcggacgatctcgctgagctgattgaggcgctggatctgaaggatctgattttagtgggtcactcaacagggggcggcgaagttgcacattatatcggtcgtcatggtacctcacgtgtggctaaagtcgttctggtcggcgctgtccctcctctgatgctccggacggatgccaatcctgacggcaccccgatggaggtgtttgatgccatccgcgaaggcacggccaaaaaccgctcacagttttacttcgacctgacggttccgttctatggcttcaaccgtgaccatgtccccaccaatgacgggttgcgggaaaacttccgcagaatcggcctgcagggcggtattaaggggcaatatgactgcatccatgagttctctgaagtcgattacacacacgacctgcagcagattgatcgccctaccctgattattcatggcgacgacgaccagattgtccccattaaggcatctgcacaccgcgccgctgagatcgtcgcgaatgcgacgctgacgatatatgccggtggttcacatggactggcggagacagaagccgatcgctttaacgctgacgtactggcctttattcgcagctaa

SEQ ID NO: 123037 - DNA, 480 bp, Enterobacter cloacae
atgactaaacacactacttccgaggattccctgcccgatgtgcacggcatgctctgtttctctctttactcagcgggacatgcttttacccagctctatcgtcccatgctcgataagcttggcctgacctatccccagtatctggtgatggtcaccttgtggaatcaggatgggcgaacagtgaaggaactgagtggaattctttttcttgagtccagcacgctgacccctttactgaaacggctggagactgcggggttgatcacccggacacgcaatccgaaggatgagcgcgaagtgcttatccacctaacggagaagggtgaggcgctgaaaagcgagaccagcactatcacgcgctgtattgtggatacccttgggatggacgccgacatcattgctgacatcaaagcatcagttgataagatccgtgacaagatccaccgtgcgcagaaaccggacgccgatgacctatcctga

SEQ ID NO: 123038 - DNA, 1149 bp, Enterobacter cloacae
atgaccacatttttgtatctaatactctgtgcgatgtctaccgccgccggcaccgatatggttttgcctgctattccactttttgctacagtctttaatatctcatcggagatatcacaaaggatactctccatatatgtagcaggtaatgcctgtggtttattactatttggtaacctggccgatcgcttcagcaaaatcaggatgctcttctttgcgctacttttattttcactaacttcttttggttgcgcgtatgctccagaaataacacttcttttaatattacgatttatacaagggatggcttctgctgcagcatcagttttcatccctggatttattagaggtttgtttcctcatcggaaggcagcccgggcaattggattgttagggagcatacaggcattagttccggcgatagcccctgtagtaggtacacttatcctgcagttctttaactggagaatcacgtttatctctctgggcgtactgacgatggctttagctgtaatgataaggtttgcaaagggaccagaacgaaacccaggccagcacacgcctggaacgtacgtacaattattgaaaaatgctgtttatcttcgctatgcattgagccaggctttggccgttggcggtctgataacgttcggattcggagcaccaagcgtcattatcctttccatgggcgggaacctgaatgacttcatccttatgcaaatgttgaacgtaggaggttacatcatcgccgccaacatttctccgggattggctgaacgttttagccatgaaaaagtaattcttgccggcacgcttatggcattgctcagcgccttcgcgctatcgggatatggtttcctgaacggaagccgggcttttgttatgaccatactctttacgccaatgggttttgcgctggggttaaggggccccgtcgccttctacaggggtatcgtttctgcaggcagtaatgatgccagaggatctgcgcttatgattttcctcaccttcataacgactgcgctggggtcactcataactggacattttattacgggtgggctcacccctcttgccatgtcagtcaccgccatgttcttactgtcatttttgctttttgtgttattgccaaaactgaaccgccagtga

SEQ ID NO: 123039 - DNA, 984 bp, Enterobacter cloacae
atgcattttaattcccgaaggattccgaaaattgagcttcacgttcatttggatacttgtattagctatcattgcgcaaaaatgctgatgcctgcactgaatcttaaagtatttcagtcgaattttatcgcaccgagtcaatgtactgacctgggagattttttaagaagaatttctccgcagctgagcttattacaaacccacactgcattacgtcaggccgtcgaagacatgtttgatcaactccatgctgatggggtaatttatgctgagttacgctttgcgccactcttacatcttaatcaatatcttacggctgaagaggtcattgaaaccgtcctggatgccatgcagataaatagccatatttttgatatcaaagccaatttaatattatgtacactgcgtcattttacggcagaacagagccttgagacggcaagactggtgacaaaatacctgcattatggggttgtcgcgcttgaccttgcagctgatgaagcccgctatccgctggataaccatgttgaggcgtttaattatgtacgccagcatggaggcaactgtatcgcacatgcaggagaggctaaggatttcgtcagcgtaaatgaaacgcttaataaactgaaagtttctcgcatcggacatggcgtcagaagcattgctgacagagcgacactagatcggttgcttgaagagcatatccatctggagatttgcccgggttgtaacattgtctgtaatatttatccttctattgaagagcaccctgttaatgcgctttttcgtgaaggcatttcattaagcattaatactgatgccagaaccgttgccaacacctcactggataaagaatatcaactattacatcatgtttttggatgggacacagaagaatttctggtttgcaatatcaatgctattgacgcatgttttgcctcgctaccgctgaagaaacaactcaaagccaatcttacggggtga

SEQ ID NO: 123040 - DNA, 966 bp, Enterobacter cloacae
atgagaaaattacttattgatactgataccgcttctgatgacgcagtcgctattgtgatggcactcagagagcgtaccgttagggttgaagcaataacagtagtcgttggtaactgtgagatcgaacagtgtgttcaaaacgcattagtgagtattgaaaaagccggaacatatgctcctcctgtattttccggaatgacaaagccgctttttaaaacccacttcacttctcaccatattcatggcaaagatggtatgggtaatatggaaaatccccccaccaccctaaagtcggaatcacttcatgcggtagatgcgattcttctttatgcagaaaaattcaaaggtgaacttgagatcgttaccctgggacctctgactaatctggcaatggcagtactgaaggaaccaacgcttgcgaaaaaaattaaacatgtttatatcatgggcggtgccggccttacttcgggaaatatcacgcctctggctgagttcaatttttttgttgatgcggaagccgctaatatagtgatgcaatcagggctccctatgacagtcgttgggtgggaaataggcatgggagaagctttcattaatgaagatgatatagcatacctcaatcaactgagccccttgggtcagttcgccgtaagatgcaacaaatccttgatggagtttaatgcaggccgaacggtacgcaagggttttgatttgccagaccccaccaccatggcagtagcgctttttcctgatattgtagaggaggcgttttcccgttattcctgggtggagtacaaatgtgagtcatcgtatggacattatgttatcgatgcgacaaaccttacagggaaagcacctaatgccagaattatacttaaaataaaaagtggtatgttcaaagagaaattattctcgttactcgcagactccgcaatgatgtatagaggaactttagatgcattttaa

SEQ ID NO: 123041 - DNA, 153 bp, Enterobacter cloacae
atgacgaacaatgcatccaaaaaaaaggacatctatctctttttagtggacatgccagtcggtctcgcttcaataacgattagtattctgagcgctaacttcgctaagatatttgtgaaaaaatcgtgtgccatagtttttatatatggttag

SEQ ID NO: 123042 - DNA, 666 bp, Enterobacter cloacae
atgaaatcattacaaatagatttatcacattctgacattctgaactctaaacttaaattcattttaccagatgacatactcagcagagctaaattactgatttttaataagggagagattttactccaccaaggagattccccatcgggagtttactgtttaattaaaggtaaggtacaaatagagcatttatctaaagatggtaaagatattactttttgtatagaagaacctctctctgtgattggtgccattgaaattttccaacatgatagcaccagcagaaatctgagtacagtaaagatccttaagacgtcaacgatagtttatttttcacttaactatataaatactattggattaaatgagccagtttttcttcgttttctttgccaacaacttgcaaataaattattcatctcttctcaattaaaaaccactatgtgtttaagttcattacagagagtgtcaaattacctcatgaatgaatataataaacatggttccgttatcaggcttgagcgaagagaattggtcgcatcatttctttccatttcggtgagacatctcaatcgagttttagcagagttacaagaaaatcaaatcatagaactcaagaataaaacgattatagtgaaagacagtgaattattaaagccagagtaa

SEQ ID NO: 123043 - DNA, 282 bp, Enterobacter cloacae
atgcattcagcaaccactatcgttacttttagcggcaagaaaattgattttcttaatctcagtataaatgatatagatataattgatatcgctaagggcttgtcaaatgaatgccgttttggtgggcaatgcgaaagtttctattcagtggctcagcattccgttctggtaagttatttaacgccagtgcatttagctctggaagggcttcttcatgatgccaccgaggcttacataaaagatttcccttctcctttaaaaaatgtatgccgcagtatataa

SEQ ID NO: 123044 - DNA, 267 bp, Enterobacter cloacae
atgccgcagtatataaaccttgagaaagaaattgagtcattgatcagagtgaaatttaatatttcctcctgtaaagcctcagaagttaagcatgctgatcggatcatgctcgctactgaagcgagggatctgggtatggaaaaggtattagactatccttccctgcgagatatatcaccatcggttataattaaagtcgttccgatgctaccgaaagcggcatttagtgcatttcttgaaagattcgccgaattaatagagcgttaa

SEQ ID NO: 123045 - DNA, 624 bp, Enterobacter cloacae
atgaaagtggtggtgttaatgtctgtgctcaaaagctttttcttctttcttttcgcgtcagcagcctgctctgtgcccgtgatttgcctgtgggcggatatctatttatttaacctggatataccggagatatcgctgaccgaaattgtgcaggaatcagttttagggggcatcgtatttatacacttcctgctggcgaagaaatgggcattcatgcgctattgcaacatcctgattggcggctttttcctctccatgctgattcgagaactggatgcatttttcgatcttctggctcacggaagttgggtatggtttgcactgctttccgccgtttgtgctttgctttatcccgttatccattatcgtcttacccttacacaactcgcacactatacccgtaccccgtggtacggcgtgatgctcagtggtctgttggcagtcctggtcttctcccggctgtttggaatgcacgggttatggtacgcgatacttgatcaaagctacgtcagggtggtcaaaaatgtcgtggaggaaggcagcgagtcattcgggtatatgctctgccttatagcatctgtagggtactactgctctttccggtcgctcccccgccagaaatga

SEQ ID NO: 123046 - DNA, 1257 bp, Enterobacter cloacae
atggtgtacttggattatttattaacatttatagaaagcaatccggctctggccattggatttaatcttattctgttggtcatctcaggtttctttgcgcacctgatgtgcaaattcctgctcataaaaatcgtccgtaaggtcttctttgccagccataaacaggatgtcccgctggaaaaagatcgtcgcatagccgaaaagctgtcgaatttcattccggttattatcgtttattacgtcctgcagtttatgcccaatatgcctgcatcgctggtgacggcaataaataccatttgtgggattctattctttatttttctgtcggttttcttcaatgagatgttggatattgtcaacagctcatatttacgcaagacgaagcgtaaaaatcactctatcaaaggctatatccagatagggaaaatatttattcacgtcattgccgcgatcatgatccttgccgtcatgtcgaataaatcccccgcgattattatttccagcctcggggccgtggcggccgtgctgatgttagtctttcagcataccctgctttcgctcgttgccaatatccagctttcgtcaaatgacgtcctgcagttgggggactggattgaaatgcccgataaaaacctgagtggcgaagtgaccgacattgcgctgcacaccattactatccgtaactgggataacacgatctcgcgtatcccgaccaaaaactttctgaccgaaacgtataccaactggcaggccatgttttcgtcaggcgcacgccggattatgcgcagcaccacgatcgatcagcactccgttacatttctcacgcaggaaacgctggccccgatgctggccctgcgcggcacgaatgaaccgctggcaaaactcatcgacgggcgtgatcccatgggcgtaccggacagttggtttatggataatggcctgacaaatttaacgctctttcggcactacctgatggcctggctcgccgatcggcctgatattatcaaagatatgtatattgtggtgagaacgctgaagcctacgccgtcgggtattcccctggaaatttattgctttacctcttccgtactgtggatggagtatgagaatactcagtcagcgatatttgaatacatcaccgctgtcgctggtcagttctcgctccgcttatatcagtatccggcaggacatgatttctggcgtttatcacaggaacacagccttcgggaccgcaccccacctccgggtgaaggttaa

SEQ ID NO: 123047 - DNA, 870 bp, Enterobacter cloacae
gtggaatatacagtattaagcaacaacctcagaatgccgatggcgggttttggtgtttttcaggtcaccgataaagaagaatgtaaacagtcagtgctgagcgccattcgtacaggctatcgcctcattgataccgcagcagtgtacggcaatgaagacgccgtgggcgatgccgttcgtgaagccatcgctgaaggtctgtgtacccgcgaggagttatttattacctctaagctgtgggtgcaggacatggcaagctacgagaccgccaaagcaggtattgaggcatcgttaaaaaaatcgggattagactatttcgatctctacttattgcatcaggcaatgcgcgattatttcagcgcgtggcgggctttggaagatgcgtatgatgccggaaagctaaaagcgattggcgtgtctaatttctacgcccacgtgctcaccaatttctgtgaaacggtcagaattaagcccatggtaaatcaggtggaattacacccttactttgcgcaatctgacgcgcttgagaccatgaaatattacaacgttcagccagaagcctgggcaccacttggcggcggaaggcacaaaccgtacgaaaatgaaatgctcaaggggattgccgaagcgcatcaaaaaaccatcgctcagatcattctgcgctggaatgtgcaacgtggcgttaccgtcattcctaaatccacgcaccagaaccggattgaagagaacctggctatctgggacttctccctgagcgatgtcgaaatggcacaaatcagttcgctcgacttaggctatgttggcgatgcggttaaacactttaaccctgagtttgttcgcgggtgtctgggtgtaaaaatccacgactaa

SEQ ID NO: 123048 - DNA, 765 bp, Enterobacter cloacae
atggttaagtatgattttagtggcaaggtggcgctggtcaccggcgcggcttccggtatggggctcgcgaccgtcagggcattttgcgaatctggcgcaacggtggtgatggcggatattcgcgaggatgcgttatctcgcgaagcggatgcgctactggctgaagggtataccgtgaaacccgttgtctgcgacgtgactgacgaagagcaggtcagacgcatgattgagaacgcagtacaggcgtttggtcagctcgacgccgcctataacaacgccggtattcagagccccattgcagaaaccgcagatgccagcggcgaagagtttgatcgcgtcaacgcgattaacctgcggggtatctggaactgcatgaaatatgagctgcaacaaatgcgccgtcagaaaagtggcgctatcgttaactgttcgtctctgggcgggctggtcggcattgccgggcgcggcgtttatcatgcgacaaagcacggcgttctcgggctgaccaaaagcgcagcgctggaatatgccgcacgtggaatacaaatcaacgccgtttgtcccggcattatccgcacgccaatggtcgaaaatatgctgaacagcgagcctgacgcaatggccgagctcatgaaactgcagccaattggtcgcctgggcgagcccgaagagatcgcgcgcgccgtcttatggttgtgcagttccgatgccagtttcgtcaccggacaggctctggcaattgatggcggttatacggttcagtaa

SEQ ID NO: 123049 - DNA, 900 bp, Enterobacter cloacae
ttggcacgagaaaatcttaatgacttaatggcttttattgccgttgcgcgcgaaaaaagcttcaccaaagctgcggcccaattaggcgtgtcgcagtcagccctgagccatactatgcgtaccctcgaatctcgtctggggatgaaactgctgactcgcaccacgcgcagtattgcgttaaccgatattggtcagtccatgctggatgacctggggccttatatcgatggtattcagggtcgtttgcagtccctgaaagatctcaacagcaaacctgcgggtacggtgcgcatatcaacgtcagattatgctatcgggtctgttatctggccgaagctggaaccgctgcttaaagaatatcctgacattagtctggagctgattgatgactatgccttgacggatattgtttccgggcggtttgatgcaggaacccgtctgggggaacagatctccaacggcatgatttccgtgcgtattggcccggatgtccgttttgccgtggtcggctcacctgattatttttcccgcaatcctcagccgcagcaccctaacgatctgattgattacaactgcatcaacctgcggtttcctacgcatggcaatttatacgtctgggaatttgaaaaagagggtaaaagcctgaacgtgaaagtcactggtcagctggtctttagccggatctatcagtgccttcaggctgcagtggaagggtacggcctggcgcatgttccgcgtgatatcgcagaaaagcatatcgcccgtggggagcttattagcgtgctcgacgactggtgcccctactgggatggctattatatttactatcccgagaaccgaaatctatcgaaagcattccagctggtggtcgacgcgctacgccattacaaacatccctga

SEQ ID NO: 123050 - DNA, 705 bp, Enterobacter cloacae
atgaaaccggaagactcacgggacgctgtaacccaggtcgcgccagcaatggctgcctattcagaacagtttattgaaaaagatctctggaatcgcccggaactgtcgcgacgcgatcgaagcctggtgacggttgcagcgctgatcagccgcaatgatacggcggaacttccccactacctcaacgtgtcgctggacagcggcgtaaaacctgcggaaatctcagagacaatcacccacctggctttttacgccggctggccgaacgccacctctgcggcgctgatcgcgcgtcagctgtttgctcaacgccatatcgataccgcttccttgccaggcggaaaggtggatttcctgccgctggatgaagagtcggaaaacaagcgtgccacgctggttgaatcaaactttggcaaggtctcgccgggcgtagtgaaatacacgaccgacgcgctattccagaacctgtggctcaggcccggactggcgccacgggacagaagtctgatcacggtcagcgcgttggtcactgccggccaggtggcccaggttccttaccatctcaaccgcgccatggacaatggtttaacccggacccaggcgtccgaagtcctgacgcaactggcctttgtggcgggctggcccaatgttttctcggcgatgccggtctttaaagaggtgtttgccggcagggataatgcctga

SEQ ID NO: 123051 - DNA, 495 bp, Enterobacter cloacae
atgatccgtttcacctctgtagcagcatcactattggtatttgcaggtatgtccgcacacagcgaaaccaccccttcagctcaaatgaccgtgtctgaaacgggcagtcgcgcgacggttgccgaacccgctgatcactttaccggacgtgcttacattgaccccctcttctcacctgtcgccccgcaaagaacaggcgccgcgtatgtcaccttcgtgcccggcgcacgttccgactggcatacccatccgcttgggcaaacactggtggtcacgtccgggacgggctgggtgcaggagtgggggcaggagcgaaaaaccgtgcacgccggggatgtcattcaatgcccgccaggggttaaacactggcacggcgcaacggataaaaccacgatggtgcatatggccattcaggaatcgaatgagcaggggcaaaacgtgaactggcttgaaaaagtcagcgatgcgcagtacctgcaggcgggagggcattaa

SEQ ID NO: 123052 - DNA, 357 bp, Enterobacter cloacae
atgaagataaaaattatactgaacgacaagacgctgaccgcaacgttgaatagcagccaaaccagtcgtgactttatcgcactgttgccccttacgctgcagctgaaagattatgccggggaagagaaaatcagcgatcttcctcgccgcctgtccacggccggcgcacctgcgggtaccgcggccgctaagggtgatatcacgctatatgccccatggggaaatctggcgattttctataaagcacacggatatgcgtcgggattaattacgctggggcaattagacgaaccggatgccttgcccgtatcacctgctgaatatactgcccgatttgagctactgacggataagtag

SEQ ID NO: 123053 - DNA, 1104 bp, Enterobacter cloacae
atgaaaggcaacgttattatcattggtgcgggtgtcagcggcctgtatgcgggcacactgcttgaaaaagcgggagtggattacctgatactggaagcgaggaaaagaaccggcggtcgcgtactttcaggtcaggtgttagcaaacacgcctgatggggttcatgtggacatgggcgcgacctggttctggccggaaattcagcctgacttcgcacacctggttcatcaacttggattaacgcctctccctcaggggcgaccaggggatatgctttatgaacgccagacgacgtcccctgcgcaacgttatcctgcctatgtgacatcaccggagtcgttcaggcttcagggtggaatgcaggcgctgacgagcgcattaacacgccagatcccggcgcagaagattaagtcagatcatcaggtggtttccatttcccgtctcggcgaggatatgcaggtcgcgacgcagtccgaaacgggcgaaggctcacttttcaccggtgaacacattttcctcgccctgcctcccgcactggcagcaaaaatgacgttcgagccagcattgccggagcgggtcctttcacactggcgtaaaacgccaacctggatggcgcctcacgcaaaatatgtcgccctgtaccagaccgactttttgcaggcacagtatctctgcggtgatgtaagcagccgtgtgggtccaatggttgaaattcacgatgtgtcagagcccgataccggcaaaacggctatctttggttttattggcgtaccggcaaaatcgcgatggacggtgagcgaggccgaactcaagcgactgtgccgggagcaactggtgcgactcttcggagaagacgcggcagagcctgaagccgagtggataaaagactgggccgccgatccgtttacgacgacagaatttgacctgcagcaggacgtcgggcacgcacagccgcaacagattccggcgcaggaagaatgggctgataaattaaccgggattgccagcgaatggtcaccgcaattttcgggttatctggccggcgcaattgacgctgctgctgaaggcgttgggcactggttacgccacgttgccagaccctga

SEQ ID NO: 123054 - DNA, 588 bp, Enterobacter cloacae
atgcttgatcgcattggccacgagcaggcccgcgcaaccagccttgtcaggtatgctcctgattctgtgtttcctgagcacacccaccccggcggagaagagattctggtgctgagcggtacctttacggaaaacggaaccgattatccggctggctggtatctgcgcagcccggacggctcgtcgcatcgaccgtccagtcgtgacggcaccacccttttcgttaagctgcgccagttcgccgccgaagaacaggaaccggtcaggatcaataccaacgaggcgagtcgctggcacggccagccgcacagactcatttgtcccctgttcgcaagcgtagcggaaaccactcagcttcagaggatcgcaccgggtgaacgactcttctgcgctccgctcgccggaggagccgagcttctgcttctcgaaggggatatcagcgcaccggaaggtcgttacctgaaaggaagctggctcagatttcctgaaggcgatttgccggcgctggcggccgccgcttctggggcacttttttatcttaaaacgggacatctcagcccgaccacactgaccggagcgataccatga

SEQ ID NO: 123055 - DNA, 345 bp, Enterobacter cloacae
atgtttttaaactggaatgaatatcgcaccagcctgctggccaccgtcgggaaatttgccagactgcagcctgaatttatgaaaggcttacagcagatggataaaggggcttctgaaaatcagcaccttgatcccaagacccacgaactgattgcgctggctgttgccgttaccactcgctgtgatggttgcctggcggtacatgtggaagctgcggttaagaaaggcgcaacgcgtgaagagatagctgaagcgctttccgttgccatcagtctgaacgccggtgctgcgttaacctacaccgcccgggctctggatgtttttgacaacctgccaacaaaataa

SEQ ID NO: 123056 - DNA, 282 bp, Enterobacter cloacae
atggcttatctgcaaatcagccttgatatcagtaatgaaaaccgtgcggcagccgccggggtctaccagcaatacaaaaccccgttcctgaccaccatcgacggtgccacctctaaagaactgcttgttcgtgacgaggacgtacaggtcctgcacggatttaaaaccgtgtcccaggcacaggcgtatctcagcagtccgcttttcacccaggacgtcgttgaagcactgaaaccgtatctgaacagcgcgcctgaaatccgcatttacgacgtcctgtaa

SEQ ID NO: 123057 - DNA, 915 bp, Enterobacter cloacae
atgcgttccctgaacagacttaaatggctacatgcttttgaagcgaccgcccgtcacggtagctttaccggtgcggcacaagagcttggcgtgacgcctgccgcagtgggccagcttgttcgttcgctcgaagactgggttggccacccgctgcttcgccgtacgcggtcgggtaaggagcgcctgacgctggtggatgaggctcaggatgcgctgcaggacattacgcagggcctggacaagctggaaagcgggttaaacaaactgcgcggacgtcgcgcacgttctgtcgtggtcgtcaccgcctctcaggtattgatgatgaactggctgatggagcgtcttaaccggttctcagaaacgcatgacacaatcgatctgcggcttaacgtcacggaaaagctgatggacgtatcgcacggcgaggcggatatcggcattcgctgcggacagggagactggcccggcgtgaataaaacctggctgatggatgaagaggcggtgctggtctgtagcccccgcctggtgcctccggagaaaattgcctgtggtgactggctcgccacgcagaagctgatccacgatgacacgccgcacccgggcgcgaattttccctcatgggacgacgttctccgtaccgtcaatgcccctggcgcgctggaaagcaggctgcatattaactccacctccgcggttattctctcggccctgagcggccggggggtggcgattgtgcgtcacgcgctggtgaaacagctgattgaaaccgggcaactggttcaattgcacccagaccatcgttggccgttaacatggtcttactacctggtgaccccgcagcacaccgccatgcgtgaagaagtaaaaatatttcacgactggcttcttcataacgtggtctctgacaatccataa

SEQ ID NO: 123058 - DNA, 777 bp, Enterobacter cloacae
atgaacgcatcttttgccggtaaaaagctgttagtggtcggtggtacaagcggtatgggcttcgaaacggcgaagcgggttctgaaaaacggtggcagcgtggtgctggtggggaaccgcaaggacaaagcggagcaggctcgtcaggcgctggcggtcgacgggccggtatccatcatcgtggctgacctgatgaaagaagagggtatgcagcacgtgatgaataccatcaatgctgaacacaaagacatcagcctgctggtcaatgccgctggtgtgttcttcccgaaaccatttactgaacatgaagcgtcagattacgacatgtacatgagcatcaaccgcgcgaccttcttcatcacccgtgatgtggtgcgcaatatggttgatgccggtattaaaggctccatcgtcaatatcggctctatgtgggcacagcaggccatcggagccacgccgtcttccgcatattccatggcgaaagccggcctgcatgcgtggaccaaaaacctggctattgagctgggcgggaaaggcattcgcgtcaatgccgtgtctccggccgttgttcacacgccaatttatgaaggcttcatcccgaaagacgatgtaaaagaggtgatgaacagcttcgacagcttccatccgattggccgcgtgggtacgccgggcgatgtggctgaaacggttgccttcctgctttctgacaagacaggctgggtcaccggcgcaatctgggacattgacggcggcgtcatggctggccgtaacgcataa

SEQ ID NO: 123059 - DNA, 1008 bp, Enterobacter cloacae
atgcaggtttcctcgccgggcgcgcttgaaatggtcgtcagaccattgcccgagccggggcccgaggacgtactgatcaaaattgaggtatgcggcgtttgtggtgccgatcttcaggatgcggagaaggtaccggaagcggggcagcccgggcgcattccgggccatgaaattgtgggccacattacccggaaaggagatgcagttcccgggatctggcacaccggtcagcgcgtgggcgtcgggcgtcttgggggatattgccagcattgcccgccttgccgtaacgggctttttcacctgtgtgaaaatcagctaacgccggggctgagctgtgacggaggttacgccgagtatgttgttatccgccataccgcgctgattgccatcccttcagcgctcacttccgttcacgcggccccgatcttgtgcgccggtacggcaacctttaacgcgttgcgtcaatccggtgccagcgcgggagacagggtggctattctcggtattggtggcttaggccatatggcgattcagtacgcccggaggatggggtttgaggttatcgtgattgcgcgcggcagtgaaaaggcgcatgacgctttacagctgggcgcccatcactttatcgatgcacagacggaaaacgcggcggaacggttgagagcggaaggcggcgtcgagattattgtggccactgccccggatgcagacgcggtttcagcgttattgccagccctggcccccagaggaaaagcgatcctgttgggtgccggacgcacaccgttgcaggtcatgccgggtatgatcattggcgcggaacgcaccctgacaggttcatttgtcagcaccccgtcgcaaaccgaacgcgcgctgcgctttagccacctctttcagacgctgccagtcacagagctgatgccctttgaacaggcaaatgaggcgctcgacaggttacggcagggaaaggcgcgctaccggatagtgcttacgatgaacccggataactga

SEQ ID NO: 123060 - DNA, 825 bp, Enterobacter cloacae
atgaaagaaatcattaacaaacacgttatagactgggttgaagataatattttatctctggagcatatcgatcggctggtcgtaaaaacgggttacagcagaaggacgctcgaaatctggtttaaacaccaattccaccagtcgctgggtgagtatatgctcaggagacgaatgagctatgccgcgtctttattaaggatgacgtcgctgccggtcaccgaaatcgctcacatttttcagtatcatagtggacagggttttgcccgcgcgtttaagaaattgaccgggaaaacaccgtctcaatatcgaagcgatgaaatatgggacttccagcgttaccatccttcactgttattagaagggctccgtaaacctgacgtgaagatatgtcggctggcgcggacgttttcctataacgataccctgacggaatatgatcatatttttaatcctgcgatacaggatgtgaccaaaagactgagaaaacttttgcttgatcatcgtggggaggtaaaagaaatcgccatcaggggacggcgtccagaaggcctggataaaagccgggaaaacatggctgaagtcataattgattatctgtcaccggataatacgtcgcaccaaaaacaggaatatcatttttccggtaaatatgccgttatgcggtatgacggtacctggagcgcctacggtaagctcagcaaaaagaactatttgtgggtaatgtcttatcatcaattcaggctgcgtaatgaaacccatttaatgacgttccattcctgctccgaagataaggtcgtatttgatatttatatacccatagtctga

SEQ ID NO: 123061 - DNA, 153 bp, Enterobacter cloacae
atgaaagaagaattgtatcgattcgatgatgatgatatcgactcaattgcctattccgtcgcatttagcgaatggctcggtatcgataatctgcaggattgtgccctgacaagaatttcggaggaggacagggggaatatgagcgaaagttag

SEQ ID NO: 123062 - DNA, 360 bp, Enterobacter cloacae
atgaggattgcacagttattagttaagacgttaattgtcggaacggtttcttttccttacgcgacggtgtcggccatgacaccagcggaacatagtcagtatgacgctctgattatcgaggcgagaaaaggcaatacggaaccagccttgtcctggttttcaggccaccatcggcttgatgagtctcaggtcgccgactggatgcaaatcgccctgtgggccggtaaagataatgaggttatcaacgtctattcacaatacaaacatcatacgttaccggcgagggcctattcagcgctggcgatagcctatcgcaacaagcaggtaagagtgatctcactggtgagtaaagcgcagtag

SEQ ID NO: 123063 - DNA, 1356 bp, Enterobacter cloacae
atgaacatgaataacattacgttggctgagaaaatgatcgtgctgtccggtgcgctgctgtttgcactgatgatcgcggtgaactccttttttgttaatgataatccaggtttcagggtacccatgacaacctatttgatcgtcatgattgcgctattttttctggataccattatctctatttttatccagatgcagtatgcgtctgaccgatctcatttatccctgttaatcctgagcatggcgtttctgagcggtctcatctatttcatagaaacgattatcgtcattcagcttcctgaagacgcagggttaacccatacgctaaaaactaacgatacggcggtattttattttttccgccagttaagttttatttttttgctggggcttgctgtatgggtggagaaacacacggcacggcgacggttcacattacggaataaggtctggctggcgctaatatcgttaatccccctggttatgttcccggtgctggcccatgcgttgagcagctacaatccaacctggacattaacgatagccgcgtatcgccccgatcagtatcatcctgtctgggatgtccgctacgttaacgctctgatagtgctctggtcggccctggcctgctacatgacttacgtgacacgcttttcatctggcgtctggaacagcatcatcgtggtgtgcctttctgcgatcacctataactttttcctgctcttactcgatacgtataacctgtcgctctggtatatcagccgggcggtagaagtgttcagtaaactatttgttatctgtaccttactgttacatgtcttcagcttgctgagattttttggcgatcgggttaaccgcgatccccttacgcagatcttcaaccgcaagtatttttttgaggcacttcagcggctccgcatgctcagaacagaaaagggcaccagcattatgatgctggatatcgataactttaagaccattaatgacacctggggacatcctgtgggggaccgcgtcattctggcggtcgtggatattattaaagacagtattcgtgataacgacgtctttgccagactgggaggtgaagagtttggcctgctgttgcccgacacggacaggagtatggccgtagtcgtcgcagaacgtattcgcaagaatgttgagcaacgcaccgggcagggtaacctgtacgcggtgcccctgacggtaacgttaagtattggcgtgtgctcagccattcaggaaaacgtcaacagtagcgatatcattcgtgatgtggatgaagcactgtatgaggccaagcacggtggtaaaaacagaaccgtgtgcagacaggccgcagggtcggtctga

SEQ ID NO: 123064 - DNA, 825 bp, Enterobacter cloacae
atgaaagaaagtattagtaaatatattctcacctgggtagaggaaaataacttttctattttacatattgatcaactggttaaagataccgggtatagcagaagaaccatggaaacatggtttaaagagaaatatcacctctctttaggtgagtacatcctaaggagaaggctgagccttgcagccatcatgctcagaatgacgtcgcttcccgttacggacattgcttatttatttcactaccaaagcagccaggggttttcaagagcctttaaaaagatgtcgggactcaccccttctgaatacagaaatgcaaaagagtgggattttgatatccttcagccctcatttttattagacgatcttcaaacacccaaaataacactctgtgaactcaatgagatttttccgtatacccatgagattatagagcacgatcatctttttgatactgcggtgcacgatgtcactaaaaaaatcaaaaaactcctgcttgagaatcgcgatcggatccaacagcttgccatagtgccgcgccgaccagaacgtctgggtaaaagccgttcctatctggtagaagtcttaatttcatattgtttagacagcactaaaacaacaaagaaagacacacttttacttaccggaaaatatgcaaaaatgtcctttgaaggcagctgggaatgttatagcgcctataacaaaattgcgtttgttaaggcaatggtgacgaaccgcctgacgttgcgcgatggcattcatttaatgcgttttaacgcctgcagcgatgagcgcgttaactttgatatttacatccctgtgttataa

SEQ ID NO: 123065 - DNA, 1698 bp, Enterobacter cloacae
atggaaaataaaatgcaggctaaaattaaagaaatcattaatcttgtttacggggaatcattttccgatacccatttttcggtgttgctggaaaagattgataacgcgatttctgttattacagataagcgtaaggtggggtgggatgaaaaagatgttgtcctgattacgtatgccgatcagttttcggcagaaggggagaaagccctgccggttttcacacggttttataataagtggctctctcactccttttcacatgttcatcttttacctttttatccgtggtcttctgacgacggtttttctgttattgattaccacgacgtcgcaccagaaacaggaacgtggcaggacatcgccgaattaaaacaatcagccagtttgatgtttgatttcgtctgcaatcacatgtcggcgcaaagtcaatggttcgcgaattaccttaagcaaatgccggggtataacgatttcttcatttctgttgaccctgaaacggatctgtcggccgtcacgcgaccgcgtgcttggcccctcctcacgccgtttacgcttcacgatggcagcgtacgccacctgtggaccaccttcagcagcgaccaggtcgatctcaattttgcctctcctcaggttctgattgcgatggtagacgtgctgctgcactacctgactgaaggggcgcgctacattcgtctggatgccgttgggtttatgtggaagatacccggaacgagctgtatccatctggaacaaacccatcagcttatccagcttttccgtgccattaccgaggctgtcgcgccgggtacggtgataatcactgagaccaatgtcccgcataaagacaacgttgcctactttggtgacggcaacaatgaagcgcagatggtgtatcagttctccttgccgccgcttgtgctgcatgcgctacaccgtcaggatgtccgggcgctgtgtcagtgggcgtcgtcgttgacgcttccttccacgaaaaccacctggtttaactttttggcctcgcatgacgggattggcctcaatccgttacgcggaattttacccgagtctgagatcctctcgctggttgagaaacttcaggccgagggggcgctggtcaactggaaaaacaatccggatggaacgcgaagcccgtatgaaatcaatgtcacttatcttgatgcgttaagcacaagggactgcgatgataatcaccgtattgcccggtttattctggctcatgctgtactcctgagtttccccggtgtgcctgctgtctatattcaaagtattcttggctcgcgtaatgattatgagggcgtggagcgcctgggatataaccgtgcgattaaccgcaaaaaatacctcgccggtgcaatcgacagtgagcttgagaacgaaaatagcctgcggcagacagtctattatagattgcgtgaattaatcgccctgaggcgtgcagaaaaagcattccaccctgacagtcaggcttgttttagtacggcaggcgagcatgtattaaaaataatgcgtattgcgcaaagtggcgaaaaagttaccgcgttatttaattttagcgatcgcgttcaaacgcttgagtcgaatattccatccggcagggaattgatcgccgggaaagatattactggtacgactctgacccttaatccatggcaggtgttgtggattaaagaaaactaa

SEQ ID NO: 123066 - DNA, 882 bp, Enterobacter cloacae
atgaagacgttgttttctggtcgttcagatatgcctttcgccatgctgctgttggcccccagcctgattttgctggggggcctggtggcctggccgatgatttccaatattgaaatcagctttttacgtttgccgcttaacccgcgcattagcgccgtgtttgtcgggctggataactatgttcgtatcctcagcgatggcgcattctggcactccctgtggatgacgttctggtacaccgccctggtggtgatgggcagcacggcgctggggctggccgttgccctcttttttaaccgggaatttcgcctgcggaaaacggcgcgttcactggtgattttgtcctacgtcacaccatccatctcgctggtgtttgcatggaaatacatgttcaacaacggctacggcattgtgaactatctgggtgtcgatctgttgcacctgtatgaccaggcgccgctgtggttcgacaacccgggcagcagttttgtgctggtggtgctgttcgccatctggcgttacttcccctacgcgtttatctcgttcctcgcgatattgcagaccattgataagtcgctgtacgaagccgcggaaatggatggggcaaatgcctggcagcgttttcgtatcgtcacgctgcccgccattatgccggtgctggccacggtgattacactgcgaaccatctggatgttctatatgttcgctgatgtttatctcctgaccaccaaggtcgatattttgggcgtctatctctacaagaccgcatttgccttcaatgacctcgggaaagccgctgccatctccgtggtgctgttcgtgatcatcttcgccgtcattctgctgaccagaaaaagggtaaacctcaatggcaacaaataa

SEQ ID NO: 123067 - DNA, 789 bp, Enterobacter cloacae
atgaaaatcgcaacgcaaaaccaggcctttttcccgacttctattctggagaaattccagtacatcaaagcgatgggttttgatggctttgaaattgacggcaaactgctggtggataatctcaatgaagtgaaagccgcaatcaccgccacgggcctgccggtgaccaccgcctgcggtggatatgacggctggattggtgacttcattgaagaacgtcgtctgaacggattaaaacagatcgaacgcatcctggaagcactggctgaagtgggtggaaaggggattattgtgcccgccgcctggggaatgtttaccttccgtttgccgccgatgacctctccacgcagcctggcgggtgaccgcgaagcggtgagtgcttcgctgcgttatctggatgaggtggcggcgcgtaccgggaccaccgtttaccttgagccgctcaaccgctaccaggatcacatgatcaacacgctctcggatgcgcgtcgctatatcgaagagaacgcgctcaggcatgtgcagatcatcggcgacttttaccacatgaatatcgaagaagattcgctaacagaggcgctgcatcgcaaccgggatctgctgggtcatgtgcatatcgccgataaccatcgctatcagcctggcagcgggacgctggattttgccacgttgttcgggcagcttcgtgcggacaactatcagggctacgtggtgtatgagtgccgtgtccgcgccgacgatccggcccaggcttaccaggattcactcacgtatctgcgtgaatgctaa

SEQ ID NO: 123068 - DNA, 2280 bp, Enterobacter cloacae
atgctgaatgtgtctgttttaaccgaaccgggcttctctccccacagtctgaataaatacgcctccatcatggcttgcggcaatggctacatgggcattcgcgcggcacacgaagaggattacacccagcaaaccagaggcatgtatctcgccgggctttatcatcgtgcaggtcgcaatgagaccacggagttaatcaacctgccggatattaccggtattgaggttgaactggatggtgtgaattttaccctgctttccggggcgcttcttgagtggcagcgcgagctggcgtttgccaatggtgaactgcgtcgcagcgtgctctggcgctcgcccgacgggaaacgctatcgcctggagagccgtcgtttcgtttctctcgctcagttgccgttagtggcaatgcaactcgccatcactccccttgatgggccctcgcaggtggtgttgaaaaccggaatcgatgcgacgcaaaccaacaccggcaggcagcatctggatgagatttcagtccgggtattcgaccagaactgtatgcagggcgtgtatgaaacgcaggaccgggtctctgacgtcgttatatccgcgttctgccggctttcagcgggtagcgaaagctgctttaccgctaaaaatcgtcgcatcagtgcgcattacgacctgaacgtttcgcagggtgacactgtcacgcttgaaaagatcgtctgggtcgcccaccgcagtgacaaagccctttcgcaggcgtcgtttgcgcgtaacgcactggccgaactcaaggtgtgcgcagcgcgaggctacgcatcgttgctggagagctctgcctgcgcctgggaagacgtctggcgagatgcgcgggtagcggtaacgtctgcggaaccgcaggatcagctcgcgctggattataccgtctggcatctgaccgccatgacgcctgccgacaatgagcgctgcagtatcgccgcgaaaggattgaccggcgaagggtataaaggccacgtcttctgggataccgaaattttcctgctgcctttccacctctttacgcgtccgcaggtcgcccgcagtctgctgcgttatcgctggctcaacctggccggggctcgtgaaaaagcgcgtcgcaacggctggcctggcgcacttttcccctgggagagtgccgcgagcggtcaggaggaaacgccggaatatgcggcaatcaacatccgcacgggcacgcgccagaaagtggcctctgcgctggcagaacatcacattgtggcggacattgcctgggctgtcgtggcctactggcaggcgacacatgatgacgcttttatgcgtaacgaagggctgacgctactgatagagacggcaacgttctggatggggcgggcgacggaagtcaatggtcgcctggaaatccacgatgtgatcgggccggatgagtacacggagcacgtcaataacaatgcctacaccaactatctggcctggcacaatgtcgcctgtgcgcgccagtttatggcgatgttcaatcatgaagatgccggcttcatggagaatgccagccggtttatgtcccgtttgtggttaccgcaagccaacgcagaaggggtccttcctcaggatgacaccttcatggcgaaaccggctatcgatctgagccgctataaggcgaaagcgggtaaacagaccattctgctcgattactcccgcgcggaagtgaacgagatgcagatccttaaacaggccgatgtggtgatgctcaactacctgctgccggaacggtttactccgcagcagtgtgctgccaacctggcgtactacgagccgcgtaccatacacgactcttcgctgagcaaagcgattcacggaattgttgctgcccggtgtggcgatacggaaagggcctacgccttctggcgcgagggtgtcgccatcgatctgggcgacgatccgcacagctgcgatgacgggattcatgctgccgccaccggggctatctggtccggcgttattcagggatttgccggcatgcagatcgtccagggggaattgcatcttgccccgaagctgcctgcccactggcgaaaactggctttcccgctgcgatggagaaacgcgcgcattcacttcacgtttgaaaatgatgttttaacgattgaaaccactgcaccggtgaccttaacgctgtggggtaaaaccctgtgcataacggatcggcaggtctgttctttcagggatttttttacatctacttatgggaccgctaccacgggagcaaatcatgatgcctga

SEQ ID NO: 123069 - DNA, 678 bp, Enterobacter cloacae
atgatgcctgaggccgttgtcttcgatcttgatggtgtgatcaccgataccgcgcatctgcattttctggcctggcgtgccgtggcgcaggaaattggcatctcgttcgacgtggtgttcaacgacgagctgaaagggataagccgtatggaatcgctgcagcggatcctgcgccatggcggaaaagagggggagtttaacgaccagcagcggcaggcgctcgcggataaaaagaacgcgcgctacgtcgggtctctggcgtcgttgacgcaggattctctgcttccgggcatccgcgaggtgctggcggaaattcgtgcggcgaacgtcaaaatcgggctggcctcagtgtcccttaacgcccccggtattttgcaggcgctgggcattgagagggcttttgatttctgcgccgatgcctcgcgcattgcccgctcaaaaccggacccggagatctttcttgcggcctgcgccgggctgaacgtgcgccccgagcaggctatcggaatcgaagatgctgcagccggcgttgaggcaatcaacgcggcgggaatgctctcggtcgggattggacctggcctgaaccatgcgggcttacaacttcattcaacgcaggaactgacctggaaatgcctgacggatttctgggcatcccgaacggtaatgataaggaattaa

SEQ ID NO: 123070 - DNA, 915 bp, Enterobacter cloacae
atgagtactctactaagaagtgctgcgctcgttctgtgcgcaggggttagctgcgcgcacgcaacggaatcagcaaaacactgggaatttaatatcggtgccatgtatgaaattgaaaacgtcgaaggtcagggcgacgataaagatggattatatgaaccctctgtgtggtttaatgccacatgggatgcctggaccctttcgctggcaatgtatcaggaaggaccggttgattacagcagcatgacccgtgggacctattttgaccgtccggaatttgaattacgctatcgctttattggcaccgatgattttacactcgggttgaccggcggtttccgtaattacggttatcactttaaagatgaacacggtgccaaagacggtagcgcaaatatgcagcgctacaaaattcagcccgactgggatattaaattgtccgacgactggcgttttggtggctggtttgccatgtatcagtttgcaaatgacctggaaaaaaccggttatgccgacagccgtgtagaaacggaaacgggttttacctggaccattaatgaaaccttctctgcaaaagtgaactattatcttgagcgcggtttcaatatggacagttcacgtaataacggcgaattttcaacgcaggaaattcgtgcgtatctacctgtttcattaggccagacgacgctcacgccatatacccgtctggggctggatcgctggtcgaactgggactggcaggacgatcccgatcgtgaaggacacgatttcaaccgactgggtcttctgtacgcgtatgacttcaacaatggattatccatgacgctggaatacgcctacgaatgggaaaaccatgacgaaggcgacagcgaccgtttccactacgcgggtgttggcgttaattacgcgttctga

SEQ ID NO: 123071 - DNA, 1011 bp, Enterobacter cloacae
atgtcacccaccatctatgatatcgcacgggttgccggcgtttcgaaatcaaccgtctcccgcgttctgaataaacaaacgaatatttctcctgaagcgcgtgaaaaagtgttgaaggcgattgacgaattaaattatcaacccaataaactcgcccgcgccctgacctcttctggcttcgacgccattatggttatttcgacacgctcgacgaaaaccaccgccggcaacccttttttctctgatgttctgcatgccattacagccaaagctgaagaggaaggttttgacgttattttgcaaacctcgaaaagcagtgaagacgatctgctgaagtgcgaaagtaaaataaaacaaaaactgattaaagggatcatcatgctgagctcaccggcaaatgaatcctttttcacaacgctggatgcttatggcgtaccggtggtcgtcatcgggaaagtcgaaggtgattttaagaatatttactcggtcgacacggataatttccaggacagcgccacgctaacagaaacctttattaaaaatggccgacgtaacattgcctgtctgcacgcgccgctcaattatcatgtttcgattgatcgtcttgccggttataaatccagcctggaaaagcacggcatcgccattaacccggcgtggatcatcgacggcggatatacccatgaaagcgcgcttgccgcggccacagaattgctttcctcggccacgccacctgatgcggtatttgccaccgacagcatgaagttactcagcctttatcgcgcggcggatactctggaactgaggatccccgagcaggtggtgattgcaggatacagtgacccgatgctctctctcattttaacaccagcacccgggggctttgatatcccaacccgcaagctgggtgaagagagctgcaatcttcttttcaggcgtatcgccggtcagcctgcgccacaaaaagtgcttgtcgatacccattttacgttagcgccctctcttcgttaa

SEQ ID NO: 123072 - DNA, 1209 bp, Enterobacter cloacae
atgaaaattaaactggctattacgctccttgcggctttgatttcgggtcatgctgcggcgaaaacctgggtgctgacaagcgctgaaagcggcgtggagaaaggaaactggaaaataacgagcgatgagctgaaggtaaaagatcaggcgttcagcattgaacaaaaagtgttgcacggtgggaaacaggaaggcagcaaaatccttgttatcagcagtaaaagtggcctgaccattaccttaagcccctctcgcggcatgaacctgctccatgtggaaggcttcggcaccagaatgggctgggattccccggtaaaagaggtcgtgaacccggcatatattaatctggaaagtcgcaacgggcttggctggctggaaggtttcaacgagatgatggtgcgctgtggctatgagtggacggggcatccggtcacggctgacggccaaatctacacgcttcacggcaaggcgggcaatacgcctgtatcgcaggttgaagtggaggtggctgacgccgccccccatgaaattcgaattcgcggtttgattaaagagagcacgttcaaaaaagcagatttgcagaccatgaccgaactgcgctacgtcccaggaaccaaccagttcagtttgcatgatgttctgacaaaccatgccgattacccgcatgattatcaaatcatctaccacagcaactttggtaccccgatcctcgaagaaggtgcgcgcttccttgccccggtcgcgagcgtcagtccattcaatgactacgcgaaagccggtgtcaacgactggcagacctatgccgggccaacgaaaggctttgatgagatggtgtttaacctcaaaccgcttgcggataacaaccacgaaaccctcgcggccgtggtgaataaagccggtgataaaggggcgtccattcagtttgatacccgccagttgccggtgctgaccttatggaaaaacaccgacaccctgaagcaaggttatgtcaccggtattgagccgggtaccagctacgcttacccggtcaccattgagcgcgaacaaaaacgcgttaagcaattgcaaccgggagccagcacacagtttgatctgacctataccctgctccataacccgcaacaggtgaaagacgtggagaatcgaattgcatcgattcagggagagacaaaggtcgacattaatagcacccctatcgcaaaagaatga

SEQ ID NO: 123073 - DNA, 966 bp, Enterobacter cloacae
atgagaagcgttaaggtctatgaagaagcctggccattgcataccccgtttgtgatctcccgcggcagtcgaagcgaagccagtgtggtcgtggtggagatagaagaggatggcattaagggcgtcggcgaatgcacgccgtacccgcgctatggcgaaagtctggcgtcggtaatggcacttatcatgacgctcgttcccgatctggaaaaagggctcacccgcgaggcgttacagcagcgtatacccgccggcgcggcgcgtaatgcgattgactgcgcactctggagtctggaggctgccaaacagcaaacctcgctgaccacgctgctaggcgtcacgttgccgacatcggttgtcacggcgcaaacggtggtgattggcgagcctgaacacatggccgccagcgcaaaagcgctctttgatgcgggggcgacgctgttaaaggtgaagctggacgatcgtctgatcagcgagcgtatggtcgctatccgctcggcagtcccgacagccacgttaattgtggatgcgaatgagtcatggcatcccgaaggccttgccgcacgatgtcagctgctggccgacctgggcgtggccatgctggaacagcctctgccggcacaggatgatgcggcgctgaagaattttatccacccgctgcccatttgcgcggatgaaagctgccatacgcgcgatagcctggttgaactgcagggccgttacgagatggtcaatatcaagctcgacaagaccggcgggctgacagaggcgctggcgctggcagaacaggcgcaagctcaggggttttcaatcatgctgggatgcatgctctgtacatcccgggcgatcaacgcggcgctgccgctggtaaatcatgtcagttttgccgatcttgatggcccgacatggctggcggttgacgtttcaccggcactcacgtttaccagcggcgtccttcatttttga

SEQ ID NO: 123074 - DNA, 756 bp, Enterobacter cloacae
atgacggatgaaaagaaagagaaagcgtctttcccggcagggttagggattatggataaaatctgggaatggcaatggattatccgcttcatctatattgtccttttcgccgatctggcgctgctggtatacagcgggcaaggaatattgacctggcctgttcagacacttaactggaccgagcatctgggttttttctgcgtggcgctcgctgccttaggtttgattgccaccaccctgatgccttttatagccaatatcgtcaggctattacttaatgagctcatctacagcagaatcttcccggatttcttgcgcgcgcagagtgattatcagaagaggtcgggtgaagttccttcaggcgaagtacttgatttagcgttgaaggaaaacaaccagttcctgctgaattattatgaaaaacataatgcaaactggcgcacgaaatttcatgagcgatttaaagtcggggatttactctttgggatcctgtttttcatgatgcttgatgaccatccgcagtggtttagcgacgcgcagcattcgctggtcatcgatctgttcagccacggcggtgaaagcggaaccgttctgttttataccgtactttttatcatctttagtacgctgatgagtttctggttcggtaaatgggactgggggaacatctactatccgccactgtatcgtgaaaaagaggaagcccgcagaaaagcgcgtgagcgggaagcgcagtgggagcagcaggatcgctaa

SEQ ID NO: 123075 - DNA, 567 bp, Enterobacter cloacae
atgatgagcaagaaaatcctgatgttggtcggcgattacgccgaagattatgaaacaatggtgccctttcaggctttacagatgattggccatcaggtggacgccgtctgcccggacaaatcccgtggcgactacatcatgacggcgatccatgatttcgacggcgcccagacctacagtgaaaagccgggccaccgttttatcctcaatgccgatttttccgccgtaaaagagcaggattatgacgcgctgctaatcccgggcggacgagcccctgaatatctccggctaaatgatgacgtgctgaaactggtgcaggccttcgacgccgcgcgcaaaccgattgctgcggtttgccacggaccgcaactgctcgctgctgccggcatattaaaaggacgaacctgtagcgcctatcccgcctgtgcgcctgaagtccgcctcggcggcgggcactatgccaatatcggtatcgatcaggcgcacgtagacggtaatctggtcactgcccccgcctggcctgcgcatccgcaatggctggcgaaattcagtgcattgctagaataa

SEQ ID NO: 123076 - DNA, 1233 bp, Enterobacter cloacae
atgtcgcaaaattgttttgatgcgctgaatttaattaaaacccccgtgtggctcatttcacctgcttcagaacagatcatttttgcaaatgtggccgccgctcagatcatgggcgataaaaccctggatgacctacgcaaaggtacctattccgccaatgcgtatcacgtgctgtcgatgtatgtgcctgaactgaagagtgagcaggagatcgtcgaaatctggaccatctcccgcgatggacatgaaaccgcgctgagctgccgtctctcgcttgcccatttcgtgccccaggggaatgttattgtttttgaagggctgacgcagcaggttctctccgggcttaaggccagccgctccgcgacctaccagcgcaaaaaacagggattttacgcgcgttttttcctgaccaacagcgcgccaatgctgcttatcgatccgtcccgggatggccagattgtggatgccaatctggcggcgctgactttttacggttatgcgcatgatgaaatgtgcagaaaacatacctgggaaatcaatactctggggcgggatgtgatccccgtaatgacggaaattgccgcgttgccgggcggccataagcccctcaactttatccaccgtctggccgatggctccacccgccatgttcagacctatgccgggccgattgaaatttacggtgacaaattgatgttgtgcattatccacgatatcaccgagcaaaaaaggctggagcaggagctggaacacgcggcactgcgtgattccatgacgggcctgctcaaccggcgtcagttctatatcatcaccgaccaggccaacacccatcatcttcccgcgcagcagcaatttagcctgctgctggtggataccgatcacttcaaaaatatcaacgacctcttcggccacctgaaaggtgatgaggtactgatctcgctctcgcgcacgctggaagcctgtagccgcaaagaggacctggtcttccgctggggcggtgaggagttcgtcatcctgctgccgcgcaccccgctcgacaccgccctgcaaatcgccgaaactgtgcgcgatgcggtcgcccgcatcacgatcccgggtttacctcgcttcaccgtcagcattggcgtggcgcgacataatccgggcgagagtatggatgagctgtttaaacgtgtggacgatgcgctttatcgcgccaaaagtgatgggcgcaataaagtcctggcggcatga

SEQ ID NO: 123077 - DNA, 2130 bp, Enterobacter cloacae
atgctcaatatatcgtgggaccctgtgttaatagccctctcgtatctggtggcctttatcgcctcatttgtggccctggacagcgccggaaaaatcccgctttccagccgtaaaacggcgatgttctggcgtatcgccggaggcgtcacgcttgggatcgggatctggtcaatgcacttcatcggcatgctgtcgatgcaaatgccgatgataatgagctataacctctggttaaccctcgcctcactgggcgtggcggtggttgcatccacggtcgccatcaatattgccgtaacgggtaaaaccctttccccttttcgattgatcgttgccacggtgctcctgagcgctggcgtggtctgtatgcactttatcggtatggccgcactgatgctggacagccatattctctgggatcgacgcattgttgccgtgtccgtgttgattgccgttatggcctccggcgcggcgctgtggctggcatttcgcctgcgggatatgcgcaaaggggtgtttatcaatcgtattctcgcggcctgcgtgctgggtgtcgccatctgcgcgatgcactacaccggcatgcgtgccgcccattttcaggaaatgacgcataccctgcccggcggtatcagcgagttggggttatcggtctgggtttctgtcaccacactgtgcctgctcggcggtatgttaatgatttcgctcatcgactcgcaccggcggacgaaccgactgaccgacaacctacgccagcttaatcgtcagcttgaactgcaggcgcggtttgatgcgcttaccggtctcgctaatcgccaccagatggacattcggatgcaggattgcctgcgcagcgcattgctcagcaagaagccattcgccgtgattttcctcaacgtcgatcatttcaaacgcatcaacgatacctggggccacaacaccggggatgagttgttaatctctctcgcgcagcgcattaccgcccgccttacccgcgagatgaccctcgccaggcttggcggcgacgcctttatcctgctggttcccgagtgtgacgacgataaactcaacgcgctgctcacgacattgctggaggatatgcgccgcccgttttcactttgtgggcacacgctgagcacaacaatcagcgcgggggtcagcctctacccgcaggatggcgagacgctgcatgagctgaagctgaaagccgatgcggccctgaatcgcgtcaaagaggatggacgaaacggctgggccgtctaccggaacgagatgtctacggctattccggctaaccccggcttcctgcaggagttaactcaggcgctggaacgcgatcagtttgaactgtggtatcagccgacctggcatgcaaaagactccactattcacggttttgaagcccttctgcgctggcggcaccctgagcaaggggtgttgctgcctaatctgtttttaccgtcgctggaacaaacggggctgatcatcccggtggggaactgggcgattgaagcggcatgccgtcagcttcatttctggacagaacaaggtttcagccagtggacattgtcctttaacctctcccccgtccagttcgaacagccggatatcttccacatcatttcgtcgatgttgcataaatataatctgtcgccctcccggcttatccttgaggtgacagaaagtaccgcactgaaaaatctcgaccgcagtattgaattactcaatgcgttcaatcaagccgggattaccgtctcgattgatgattttggcaccggctattccaacctgttgatgttgagcgttctgcccgctaaagagctaaaaatcgacaagagctttgtgcactcgatgctggtaaatgaaaaaagccgcaagctggtggaaaccattattaatatcgccaggaccatggaaatgaatgtggttgcggaagggatcgagacggaagaacaacaggtggtgctgacggacctcggctgtgattacctgcaggggttccttttctcccgtcctttacctgccgaacaggttccctggctgctgctgcaaaaaaactcagacaaacaaattatacccattggtaaaattcacgcggaacccgcatatatttcacaaaaaaatcatgcctga

SEQ ID NO: 123078 - DNA, 183 bp, Enterobacter cloacae
atgagcatcttactcgctctgcaactgcagtattcacgtcagtccgatccgatccccaccgatccgacaccgatgcccgatcctgttccgcgtccacaacccatgcctgacccgccgcccgatgaagaaccgattaaattgtcgcatcgaaccccgagatctgcgaggatacgcgccatctga

SEQ ID NO: 123079 - DNA, 213 bp, Enterobacter cloacae
atgtcgcaggtaatttttaacgaagaatgggttgttggcgcaagactcacagaaaaaacaggcctgaccgaacgacagattgagaagtatcgccagggctgttgggtggaaggtgtccattttaaacgggtttctccttccggagaaaaaaccttgcgtggcacaacctggtacaactatccgagaattaatcagttaataagggatgcgtaa

SEQ ID NO: 123080 - DNA, 243 bp, Enterobacter cloacae
atgcgactgattaatcgaggcagtaagcaatcccctttggctcgccaggcatgtgaaatcgcactcgcagcccaccagcaaagatatggcgactatgggcgcagcaagatgaaagagacttatacggtgaaggtagaaggcgtgaaggtctgggtcgaagtagtgaactgcaaggcgagctacgtggccacagcactgaccggcatgcgccgactgcgttccctgcccggccaggcaaactga

SEQ ID NO: 123081 - DNA, 1086 bp, Enterobacter cloacae
atgcataacactaacgttaccgttgctgaccagaacaccgttattaactccaacgtggctttgtttgattcccagtatctgaacgccatcagcacttttgcgcagatcatggcgcaaggcaccgcgaccgttcctaaacaccttcagggcaatcaggccgactgcatggctgtagcgatgcaagcagcacagtggcagatgaatccctttgccgtggcgcagaagacgcacctgattaacggtgtactcgggtatgaagcgcaactggttaatgctgtgatttcgcgcagtggcgtactggccagccgctttgaatatgaatggtacgggccatgggaaaaggtcgttggaaaattccatatccgtaaaggcgacaaaggcgagtaccgcgtccctggctggaccctggctgacgaagccgggatcggcatcattatcagcgcaacgctgaaaggcgaggataaaccgagagaactcgatttactgctggctcaggcccgtacccgaaactctacactttgggctgacgaccctcgccagcagctggcgtacctggctgtcaaacgttgggcgagactgttctgcccggatgtgattctgggcgtttataccccggatgaactggatgatcgccgtgaagaacgagaggtaaacccggtaccggcgcagcacgttagcctcgctgatatttcaggtgacaacgtcactacgactcaaacggctcaggaatcagctcaaaacatcgatgcgcttgctgatgatttccgtgaccgcatcgaggcggctcaggacgtggatagcgctaaagctctgcgcgcagatattgaaaccgtgaaagcaacgctgggttctgccctgttcactgagctgaaaaacaaagccgtgaagcgttattacctggttgatgctcgtaacaaagtcgaagcagccatcaattccttgccaccttcagatgatccagatgcagctgctcggttcgcagaggttgagcgcgttcttgcatcgtcgaaacgccatctgggcgacgaattgcatggtcagttcagcatcaccctggcggatatgaaaccggaatacgtggactaa

SEQ ID NO: 123082 - DNA, 3174 bp, Enterobacter cloacae
atggaatttttctatgtagttaaggctacgcagaaatctggtaaagaagacgcagtgatttggttcactgcgaaatcagaagcccgtgcaaacctccagctcgatgttgagctggaagatgctggtattgaaaccggacgcggtaaggattacaccaaaccggttcgcaccgatttccctgtttacaacgatctgcctgaagaaagcactgtggattacacctggtgcaaacgctacgaactgcaggacgatggacgcacctggttgccaaaggctggtgctgagtctactggagcaatggacgacaccgccgcaccggaaaagaccgtaaaagtcgaaactaccgtcgagagtgtcccgcttgaaaaccgcacaccagcggtacgttttgcggtccatctgaccagcgacaaataccagtcacatatcactaaagagcagcagctggctgccagcgaaatgtcactggatgaaggcaatacctatttccagaacctgctgctggcgaaaaacggcattccagaagctgccgaactcagtctgaacgctgagtggaaactagtccaggcgattaaacaggtattcacgccagatgaagcgcacaacaaagaaattattactgcattcatggctgactgggcgagagctgatgccggcgaccgcaatcagttagttgaagagtggagaagcggaaagcttgctcttctcaaatcagaaagcaccagcgacgccgacgctacaactggtcatgacctcaaacctgataacggtatccagattgacgagaatgatgacgaaaccactcgttatccagtcgtgcgtatgcccttccgcaagcagttactcgcccagtttaccgccgacgaactgcgccaccacttaacccgcgaagaatacgaaggtatcagcgcgctggagatggacaccgacaacggctacgtccagaacctgctgctggcggcagaaaactgcgaagaggtgaagggttacgataccaaagacctgtggcgctacaccgatgccattcgcaaggtgttcagccaggagaagcgtcacgaactcgctctggtacttcgttttacccgaatctgggctgcgactgattacattgaccgtggcattctggcgcgcgaatgggctgccggtaatcgcatttctgaagtaggttctcctgcacctttagaaccagcaaagccagaaactacagaatcctataaacgcgctgttgcccagaacatggcgaacttgagcattgagatcgcgattgctcagctgtacccagatgcagtaccgggacaaatcaaccgtacgcaactcctggccgccaaagaactcgctgacaaaaaagatgagtggcacgccaaggcgctcaaggttcttggtaaaaccaccgatatcctcgactacgacgccaacagtatttttggagttacccgcgctatttcatggtctggagaagaaagtacaaccgaactgcgtagccaggtgcgtgagtggttcacggcgaacggcatctatgaaagcggtgagcgctctaaaggctatccagaatggaacgaagactcccgcgcggttcgtcattccacagtggaagaaccaagtactccaagccagccaaaggtcgcaagccttggaagcggcgtgttctccatcgatggcctgatggatggaaataccgaatcggtcatcaataccaactcaaatgaagtcgaaaaaacggaaaacacagcggagaccaccagcgatgtgcagatggaaacggctaagccagagaaagacgaagatgttgattcggtaccaccgggcaaaaacactgatgcagctaattcgcagacagattccgtagcgccggaagagcaacggtcagagccagtaatcgaatacccggcctacttcgagcctggccgctatgaaggtctgccgaacgaggtttaccacgccgccaacggcatcagctccacccaggtgaaagatgcccgcgtcagcctgatgtacttcaatgcacgccatgtggctaaaaccatcccgcgcacagcatccaaagtgctggatatgggaaatctggtgcacgcccttgcactgcagccggaaaacctcgaagaagagttcagcgtagaacctgagatcccagagggtgctttcaccaccaccgcaactctgcgcgagttcatcgacgcgtacaacgccagcctgccgacgctgctaagcgctgacgagattaaagcgttgcttgaacaacataacgaatcccttcccgctccagtgccgcttggcgcgagcctggaagaaacgggtcaaagctatatggctctccctgttgcgtaccagcgtattgaagaaggacagaagcagacagcaacggcaatgaaggcatgcataaaagagtacaacgccaccctgcccgtgccggttaaaacaagcggcagccgtgatgcgctactcgagcaactagcgatcatcaatcctgatttggttgcgcaggaagcgcagaaaccgacgccgctgaaagtgtccggcagcaaagcagacatgatccaggcagttaagtcggttaagcccgatgccatattcgccgacgaattgctggatgcctggcgcgacaatcctggcgaaaagattctggttacccgccagcagctggccacagcgcgggcaattcagtccgcactactggcgcacccgaccgcgggcatgctgctgacacatccaagccgcgccgtagaagtgagctacttcggtttcgacgacgaaaccggattagaagtgcgtgtacgtccagatctagaaattgagttggatggcgtgcgcatcggtgctgacctgaaaaccatcagcatgtggaatgtgaagcaagaaagccttcgcgccaggctgcaccgggaaatcattgaccgcgaataccacctcagcgcggctatgtattgcgagaccgcagcgctggaccagttcttctggattttcgtcaacaaagacgagaactaccactggatcgccatcattgaggcatccaccgaactgctggaactgggcatgctggagtaccgcaaaacgatgcgcgccatcgccacgggtttcgacacaggcgaatggccagcgccgatcactaacgattacacagatgaactgaacgacttcgacctgcgccgcctcgaagcgctgcgcgctcaggcttaa

SEQ ID NO: 123083 - DNA, 165 bp, Enterobacter cloacae
atgtgtaactctaagaaatgcggttactgcgacaagccggttaaaccggaggaagtagtcaaaagtacccttctctatcgcaacggcgcacagctggcgcgcaaagaaaaagaatactgctctgaacgttgtgcttcgtacgaccagatggcccacgaaagctaa

SEQ ID NO: 123084 - DNA, 1605 bp, Enterobacter cloacae
atgcctgaaaaaatattcaatttcaaaagttatcctatagttttcattggttctggtgtttcaaaaagatatctgcaaaattaccccacgtgggaagaattgttacttgaatactggaagcagacaaatccggatgtggatttttataattacctgttaggtatcaaagaaaaatataaacaaacaactgacaacgaatctgatttaagccataaaatatacaccgaagcggcaacaaaaatagagaatgatttcaataaaatgttcaccgaaaacacattgcaagtcaaaggcttagatgctaagcgtgttttcactgaaaacatctccccttttaagttttcgatatgtcaaagattttcagaaaccaatctaaaaaaagaaataaacaaagaagaacttgagtcctttaaacttcttctaaaaaaagcaaaaatgatcattacaactaattatgacgcatttattgaggaacttcttttagagcaaaacgtaactccaaaattgtacatcgggaacaatggatttttcgaagatacagttggttggagtgaattatataaaattcatggcgatataaaagaacctcggtcgataataataaattctgaagactatcaaaagtatgatgataaagctattttaattagcgccaaaattctttctaacatgattaaaaatccaattttatttattggatattcattaactgacagaaatgtcaaaaaattactatcggacttctcatctcaattacccaaagaagatggaagaaagtcagccgagagaataatattaattcagtataaaccagatgaattagaaatcgtatcaaaacaaataacagatcagcaattacaagtcacatatacctctgttgaaacagacaattataaaaaaatttatgatgaaataagcactgttaatgaggggctctctccttatgacgtattgagatatcagagagccataaaaacactcattgtcaacgaaggcgagaaagggaatttacatagtttgcttgtttcacttgctgatcttgataaattagaagatagcgttaagcaaggaaagaaccttgtagtagcgcttggtgataaaaagtatgtatttactcatataaaagagcttaattatcttgaagactatattttccagagaaatgagatatctaataagcttgctatagaattcattactgggtcaaaaagtaccttacgcctacctttctcaaaattaatttcatcttgcaatatcaatgagttaggtttgccagccaaattaattactaaattaaatcaaagaattgaacgacatggtaaactcgacgacttaattacttcaacatctctggataaagtgaatgccgcgaaagagtttaagcatatcgcagacatcaaaagcgcaggattaagtaaacaaaaagaaatttttgttttaatcaaaaatattaagcaccttcccaaagaagaagttgataaatatgttaaggaagaggcatttccacagtttagagattgtgatgccgaattgctcaaaacagaccttagaaaattattccttgcgtacgatttattaataaacggtgatattgaacgtgtttaa

SEQ ID NO: 123085 - DNA, 393 bp, Enterobacter cloacae
atgaaagaaaaaactcatcagattgatcatccgcaggtacaacgactcaatgaaataattgagcgtaaaggcatttctaaagccgatatggctaggatctgtggagtaagcgcacaatcagtgaataattggtttgtacgtgggacgattggcaaaagttctgctatcaaattggcagacgcacttggggtaagcctttcttgggttttaggacaagacgttggagaaaaggacggccttaaagcggacgaacaacgcttgctggaactgtatcgtcagttgccagaagaagaacagcagaacatgcttcgtattttcgcacttagactaaaagaactggatgaactttatgataagtacatgaaaggtcgttttcgcaatcaagatgaataa

SEQ ID NO: 123086 - DNA, 552 bp, Enterobacter cloacae
atgcagactgtttcattccaacagagtaacagagcttcctctaatccattgatattcccgtgtcatcaaagcgaaccggcaacgcaggatatagatcatcgtgatatctgctcagcggtccgggcgtgggcagcggcagaagggcgcgtagctgttgcgcttcaaatccaagaggcggcggaagaacttcaacttgatggcgttgatttctcaggccaggccgatgtgtggaacgttaagctgttccgctggctggataacaaagaagactccgcatcgtaccgaaagaacgtcgaacagttggtgcccgcgatcatgtctgtattaccacttcgataccgcgaccgtgtcgtaaagaacgactcgtttgcctaccggatggccaggttggaaaaagaggtgagtgaggcgaagcaagctctgatgctcgatgcaccgaagaaagaaaagctgaaggaattaggcgaggggatattcgaaatgttcagagtcgatccggatcttacggcgccgctgctggcgatggtcacaaccatgctgggggcaatgtga

SEQ ID NO: 123087 - DNA, 858 bp, Enterobacter cloacae
atggccgacctgtcgaacgggtataccaaggtcgctaacgagatccaacagctcaagcctcgtctgagaatgtcaggccgggaatggcaatgttttgaggcggtgatctggcttacctacggctggaacaagaagcaggaccgcgttacgaacacggtgattgctgagcttacagggctgagtgattcccatgtttctgatgcgctcaaatcgctcgctgaacgcaaaattatcttcagtcagaagcagggcgtaatgaaaacggtcggtataaatactgacctttccgcctggattttagacaaaccgaaaacgggaaaagtcttcccgaaatcgggaaaagtgttaccgaaaacgggaaaaaccttcccggaaacggtagacacccaagactataacaagaacaatattaaaatatcctcgtctcggaattctgacgaatcccgaaaccagaaaactcaaaagtttctctctcgccatccagaagctgccgccgggatatacaccccggcaggtaaatcatgggggtccgctgatgacctcaaggccgcacgctggatttacgacaggcttctcaccgtcaacgcatcgctatcagagccaaactgggctgaatgggcaaacaccatcaggctgatgcgtgtccaggacaagcgtactcactacgaaatttgtgacctgttccagtgggctaaccgggatgagttctggaaagacaacatcctgagcccttcaagtctgcgcaagcagtgggatcagctcaccaccaaacggctgcgtgcaaccggaacggcaaaaccttcccggggcagcattgacctgcataacaccgactggattgatggggtgctggaatga

SEQ ID NO: 123088 - DNA, 699 bp, Enterobacter cloacae
atgaaaaacctagccgagagcattcgcaattttgaccgggaacaggcccgccgcgtggcacacaacatgccagagcagtacaccgaacgcgaacaaacgcagctggtggcgcagattatcaacggtctgctcttacagctggcggccgcgtttcctgcaagcctggttaatcgcagccaggaagacgtgaacgaaattcgccgccagtgggtgctggcgttcaaagaaaacgggatcaccactctggagcaggttgaagccggtatgcgtgtagctcgcagccaggagcacccattcctgccgtcaccaggccagttcatcaagtggtgcagggaagggcgatgtgccctggggatcaccaccgctgacgtcatggctgagtactggaagtggcgcaagctggtgttccggtacccgagcagtgagcagtatccgtggccgaagccagtttattaccatatatgcctcgaactgcggcgccggggaactgatgggcagttgagccataaagagctcgagcgtgaggctggcgagattctgggtatgtgggaaaagcgggtgctagctgggaagccgattccgcctgttcgcagagcgctggccgcaccagtagattcgaaaggccctactccggcagaactgttaaaagcaaagtacgaacgaattaaggcagctgggggaataatgaagatggtttag

SEQ ID NO: 123089 - DNA, 273 bp, Enterobacter cloacae
atgaaaattaaaaaagatgttgttattgaaggcgatataatagctagccgtctagctggtcagaaaaatcagtttttctgtatccatttgattcatttcaaaaatgggaagtatgctatcattcgggcagcgtccggggcctgttttgatgttggccatactgttcgacgtaccgcaagccaatggttttacaatcatcatgaaattcgccttttatcttttgaatatctggaggagcaagaatccagaagacaatttctcgaatgtgattag

SEQ ID NO: 123090 - DNA, 234 bp, Enterobacter cloacae
atgaaatcagaagacacacttgactggtaccctgcgcagctacctcttgtaaaaattatcctaggtgaagctgtgctcgcagttggcaaacagggaaggccaatcaacactcgaaccttacttgagtatcttcaagttatgcaggttaagcaaaaaaaacgggatgataaagttgccatgcagaccgcgattgaagttcttagggacaatcaacgcattaacggcaggcgttaa

SEQ ID NO: 123091 - DNA, 8583 bp, Enterobacter cloacae
atgaaaatgaaacctattgcgtggtttaagcgatctcgttttctgcccgaaggcagcgcacacatatcagccccagtcaacgattcgggaggagaaaactatttacgttcggaactgttttctacccctcagttggaacgctttggaaaaaaactggctcgtacgcacaaattgtctccggaaatactaccgtactaccttcttaaacgactaactgacaatgaaacgataattacgcgatgttgctatctactcaatgcaggaaaaaaaacgagtatcatgcccgcaggtgagtggctgctggacaactattacctgattgaagagcagattcgcatggtacgccagcacttaccgaaaagttttggtaagggtcttccggtactagcttacccacatagttgtcccagaatttatgacttagcctcagaggccatagcgcatggcgacggacgctgggacaccagcagtcttaccagttatatttccgcctatcaagaggtgacacctctgacattgggggagatatgggctttgccaggaatgctgcgtctagcgctgattgaaaacctgcgtcgtgtgagcaacgaagtgacccaggcccagcaggaacgaaatcttgcagatatgtggataacgcggatttttgattgtgcagagaatgctcccgccgacctaattatgattgttgccgatatggcgcgtactcaccctccgctgagcagtgcctttgtcgctgaaatggttcgacgtctgcagggacatggcaatgctcttgtactccctctgaattggattgaacaacgtcttgcagagcagggtgttacaacggaggttctgattcatcgcttcaaccagcagcttgccgccagccagctttccgtcagtaacagtatttcgggtttacgtctgctgagtgaaacgaactggtctgattttgcagagaacatcagcgtagtcgagcaaacgctacgccttgacccaactggtatatatcctcacatgcacttcgacaccagagatcattatcgccatgtgattgaaacacttgccagagatgcgaaattgagtgaaccggaagttgcaaaccgcgtgatggcaatgtcttgcgaaccgagtctagatcctgagcaccgacatatcggttattttctgcttggaggtggaaggccacaactcgaaaaactgttgtcagttgaaaggtctctattgaaacggctgcggcagagtatgaacaaatcgccccttctgtcatggcttggtagcctgagtcttttgaccacggccgctacggctaccatattgtatgaaactgcagtacagggtatattctggctactcatccccctagccctcccccttattgttgccattagtcaactcgccagcgatatgcttagcgaagcaacgacacgcttccgtactcccagacctttgccacggatggacttttcaagtgggataccagttgaatatgccacaatggttgcaattccttgcatgctgacaagctatgaaaacctcagcaaacttctctctcgcctcgaagtctgcagccttggcaatcaggatgaaaatctctgctttgcacttcttaccgattttgcggattcatcaactgaggataccgaggaaaacactgtccttttaagacaagcgattgctgagacgcagagacttaatcggcgaaaccctggcggccgatctcgattttatctactgcaccgccagccggagtggaacgattcgcagagagtctggatgggatatgaacgcaagcggggcaaactagctcttcttaacagctggttacgccaaccgggaactcagttttcgagcgttgcagacctttcctcgcaggctttgcccggaaggattaattacgtcatcactcttgacagtgatacgctcctgcctcgcgataccgctcataaactggtggccaccatggcgcatccgttaaacaaaccagaatatgatccaacgttccaacgagtcgttaaagggtacggaattttacagccaggcttggcagaggaaatgcctctttacggtcaggggcgctacgccgccatgcgcagcagcgtcccgggtaataatccctattcgatgatgtcttcggatatatatcaggatcttttcggcgagggatcgttcgtaggcaaaggtatctatgatgtagatatttttgtccagtccactaccaacgtctgtccggaaaatctcgtactcagtcacgacctgctggaaggatgttacgcccgctctggactgctgagcgacgttctactttacgaacaatatccaactaattatctctcagacgtcgcacgtcgtacgcgctggatccgcggagattggcaacttctcaattggttaagggttcgggtcagaaaagctgacggaagcagagaaaaaaatccattgtccattctttctcgctggaaattattggataatctccgacgcagcctggtagcgccgtcgatcatgctgcttgtatttagcgcgctgctctggctccccaaccctttatactgggttagcgtgcttacgctaatatggtttcttcctgcggcgcttagcatagcatgggatctcgttcataaaccgcaccgccgtccccttaaacaacatctgcaactggtctcagctggagccttgaagcgcattttacgtatcggtctcacgattatgatactcccccacgaggccggttactcattatacgctattggagttacgctttggcgacttggtgtaagccagcgtaacctcaaccaatgggtaagctatatcccagataactaccattccagtatctctgttttaggtttttatcgggcaatgtggctgaatgttgcctgcggtctgagtctcacatcactagaattggtgtttgatccgctgatgatgttcatcgcattgcccattagcgtcgggtggtgcatagctcccattattatggcttggctgagccgccaacccgcgcgtaagccctttctgccagatcagaaacagaaacttctgttgagacagacaagccgagaaatatggtctttttttgagaccttcgccacagcgaaagaaaattggctcccccctgataattatcaggaaataccgcaaccgacgatcgcgcaccgtacatccccaaccaacattggattatcactactggctaaccttactgcttgggattttggctatttgccgggcggtagcgtcttacagcgtataacgctcacgctcgactctcttgataatatggaacattttcgtggtcatttatataactggtatgacactcgaacgcttgcaccgctcagtccgcgttacgtatcaagcgtggatagcggtaatatggccggacatttattgactctgcgagaagggttattagccatgcaaaaccagcccattttgaatggcgaaagaatatttgcagggttaaacgatacattattacttcttgaaaaacactgggggccaggggcaccggatacgcttaaagagcttcaaaagcagtgtttcagctcagcggaacttcctctgggagctatttacagcgaacttaaaaagatgcgtactcagtgcaaacatctcaccgctgcaagtcagcatgaaggcgatattgtggtgcgctgggccgagcatctggagcatcagttgattgaaatatgccacgaatggtcatatctgctcgcgtggttacctcctacatacaaaagcgagacactgccaacactaagctggttggcgcagagtaccgacaccggggaaggaactcctcctgcatcagttatcactcacgcccgtttgcggctggatattatcagcgaacttgaaaagaggttaaatgaccatgcgcgaatggattttgcctttctctacagcgaagctaccaacctactcagcgtcggatataactgcgacacaaataccgccgataaaagccactatgaccttctgccctctgaaatcaggctgacaagttttctcgctatcgcgacaaatcagcttccgatgaaaagctggtatgcgttgggaaggttgttcaccaatatcgacaatgaaaccgcgttgatgtcatggagcggttcgatgtttgaatacctgatgccgaatcttgtgatgccaaactggcgcggcagtttgcttgatgaaatgggtaaatcagcggtgacgcgccagattaactggggcaaggaacgtggcgtaccatggggcgtttctgagtccggctatcatgcatttgatgtccagcgtaattatcagtatcaggcatttggtgtacctggactcggtcttcgccgaggacttgcggacgatgtggttgtcgcgccttatgcaacactactggctctgctcgtttccccccagaaggcctgcgaaaacttgcttagactggagcagagcggtgcacatggcgaatacggattttatgaagcgctggactacacgccatcacggcttgctaccgggcaactgtacgcggttgtacagtcctggatggcgcaccatcaagggatgggatttcaggcgctagcgcatatcctgcttgatgcccccatgatcgagcgatttatggcaagccccacttttatgtcggcgaatcttcttttgcaggaacgcgtcccggatgaagtcgatctttacagccctcgccgtcattttgaatcccatgaaggaagggttaaaccggtacgatatgaaccgagagtttttagtcatgtagacagccctactccggaaatacagttgctctcaaatgggcattaccacttgatgttgacaccaagtggtggaggatacagccgctggaattcgatttcagtaacacgctggcgctgcgatacaacccgtgataactggggatcgttctgttatatccgtgatccgcatacgaatgaggtatggagcaatacttggcagcccatgggcggaaatgcgaacagcaccgatgagataatcttcaccgacgcaggcgcagaattcaggcgtaccctaggaaaccttagcgtcaggacacaggttgtggtttccccggaggatgatatagagctgcgccgtatcaccctagtacaccatggccgtctaccgcgatcgcttgaactaacaacgtatgcggaagtggtgattgcttcagaaaccagtgatctagcgcatccagcattcagtaatttgttcatcgaaactgagattgatcccagccgggacgctattctttgccatcgacgaccgcgttctccagatgaaccgagcccatttctgtttcacatgatggtggtacatagcaatgattataatgaagcctcgtttgaaacagaccgagctaagtttattggaaggggcagaagtccggctgatgccgcagctatctatgctaacgggccgctcagtaatacttctggtgccgtgctggatcctgtcttggcgatacgacaagttgtgagactcatgcctggtattccgataacgattgatatcgtttatggcatcagtgagagccgtcaacaaagccaggcattactggaaaaataccgtgattacccaatcgcggagcgtgtttttgagcttgcctggtcgcacagtctagtagtgctaaggcagataaatgccagcgaagatgacgcaacgctgtttaaccgactcgctagcgctgtgctctatccctgtcacgaactacgcgccgacgttcaggtcataagccgtaaccgccgcggtcagtccggactgtggggctggggaatttcaggtgatctaccgattgtactgcatagcgtgaccagcgatgagagtatgacctctatcaccacactgattcaggctcatcgttactggcggttaaaagggcttgaagtggatcttgttatcctcaataacagcgccggtggctatcagcaggccctacaaacgctgattatggatttaatctatgccggttcagaagccagcctgctggataaacctggcggcattttcgtccgtaacggagagcatttgtcttccgaagataaacaactattgatgagcgttgcatgtatgtatcttgacgatcgcgccggcggactaaacgagcagctcaatcagcggctccactcgtcaattaaaccgcacaggccatttgtaccttttgtcactgtgggaagcaatcgacacgaagactggacgccgcagacagaacatctgttcaacttcaacgggtatggagggttttctgaggatggacgggagtatcagattatcctgaaggaaaatgttccaacgccagccccttggtcaaatgtgctcgctaactcctgttttggtagcgtcatttcagaagccggacaggcttacagttggtatgagaacgctcatgaatatcgtttaaccccatgggaaaacgatccagtaagcgaccgtagcggtgaggctttttatatacgtgatgaagagaacggaacggtatggtcacccacgacattacctgtgcgtggccgcggggattacttaacccgacatggttttggctacagcgtcttcgcgcatcgcgatagtggtatagatagcgagttgacaataatggttgccgaacacgatcctgttaagttggcaatcttgacacttagtaacaattcgggccgcacgcgcaatttatcggtcacaggatacgtagagtggacacttggggaatcacgctcgcgttctgctccacatatctttactcatacggtggtcgtgccgagtggaagtggagttacagcaaataatttttacggagctaacggcgaaggacgcattgcatttttcgctgtcaacgatcctcattgttcgttgacaggtgatcgccgagagtttattggccgcaatggctctttgcaaaaaccggctgcaatgaagctacgcagtttgtcgggaaataccggcgctggtttggatccatgcggtgcagttcagtctgttaccaccttaattgacggtgatcagaagaccttcatttttgtacttggcagcgaggaaaactccgcccgggttcagacaatactcgatcattattttgatgaaaatatcgttcgacaggagttgaacaatgtacatcgtcactggcaccgcatgctggataagatagtggtcaatacaccagaccatacagttgataagttagttaacggttggctgctatatcagacaatggcctgtcgcctcatggcgcgcagcggttattatcaatcgggtggcgcatttggttttcgcgatcaactccaggatacattggcactgacccacgctgcaccggaacgcctgcgcgaacaaatactactgtgcgcgtcaaggcagttttttgaaggcgatgtgcagcactggtggcatccacctcacggtaacggcgtacgcacgcgatgttcagatgattttctctggctcccgctcgccgtctgtcactacgtcgacgcttctggggatatcgggatactagagcagatgattccttatctagaaggacgtcagcttcagcctggagaagaatccgtttacgatacgccgctaatcagccacaccgaagagacgctttggttacactgcgttaaagccattaaacatgggctacgatttggacagcatggtctgccgctaatgggcgctggcgactggaacgatgggatgaaccgggtcggcatcgaaggaaaaggtgagagcgtctggctggggttcttcatgttcgacattttacagcgttttgcgacgctcgctgatcggcgacaagatgagcatatagcgtcactatgccgcactgaggcggtgcgcttgcaaaaaaatctgcacgctgcagcttgggatggcgaatggttccggcgaggttattttgatgatggaacacctttgggatccacaggttctcaggaatgtcgaattgatgctatagctcaaagctggtccgttttatccggcgcgactgacgatgaacgcgccggcaaagctatgcatgctctggacaagcacctggtagatgccgaagccaggctgataaagctactttcgcctccattcgatggtcatggaccaaatcccggctacatacagggttatgtgccaggtgtacgtgaaaatggcggacaatatactcatggtgctatctgggccgtaatggcatttgcccgcatggggaatgcagatcgtgcgtggtatctctggtcattaatcaacccaataaaccactcgtcaactgaccaagaagtagggatttacaaagcagaaccttatgtcatgagtgcagatgtctacagtgtcgcgcctcatactggacgtgcaggttggagttggtataccggatccgcgggttgggcctaccgtcttattacagaagaattaatgggtataaaacgctccggtaatgtcttgacagtccatcccctgttgccagcagagtgggagtctttttctctgacatatcaacatgacgaaagtcattacgagattaatattacacgtggcgatggggagtatcaggttacacttgacggtatcgtactactagatgacagaatatttttaaaaaatgacgggcaaagacataaggttgagatccttcaaaactga

SEQ ID NO: 123092 - DNA, 165 bp, Enterobacter cloacae
atgtccgttatcgattacgcaatgaaactttttggaagcgtattcaccaccactgtcacctgccctgtttgcggcttaaaatccgctcagccttcctctaaactgcgtctaaaaagccccatgctttgtccggggtgtaaagcactttttaactctccgcgctag

SEQ ID NO: 123093 - DNA, 225 bp, Enterobacter cloacae
atgaaaatcgagttaaccattgatcgcatgaagaaacttcctgatggagctatacctgcgcttgaatcagaactgctcaaaagactcagcaaacagttcgataattgtcagctaacgatcaagcgcgccagtaatgatggtttgactgttttcggaggcgacaagaaagaggttgagcatatcgtgcaggagacctgggaaagcgcggacgagtggttttattaa

SEQ ID NO: 123094 - DNA, 603 bp, Enterobacter cloacae
atggcgctagaattacaacttatcaaacaccattcaggaatactgatcccggctacgcccgagaccagcgatatcctgcaatccaaaacccggctcggcgatgttcttgtcgccgagttcaggcgggtacggaatctggcatttcaccggcgctttttcacgcttctcaatcttggctttgaatactgggaaccaaccggcggggctatctcgagtaacgagcggaagctgatcaccggctacgccaagttcctcgcttcttatggtgggaatgaaggggcgctgatcgatgctgctgagcagtatctggaacaggttgcttaccggcgcgtcacgaatggcattagcctgtgcaaatcctttgatgcttaccgctcctgggtgatcgtcgaggcagggcactttgatgccattcagctacctgacggaacacttaaaaagcatcctcgcagcatctcattcgccaacatggacgaggccgagttccagcagctctataaagctgcgctcgatgtcctctggcgttggatcctgtcccgttcattccgcagtcgcgacgaggccgaaaacgtcgcagctcagcttcttggctttgtggggtga

SEQ ID NO: 123095 - DNA, 834 bp, Enterobacter cloacae
atgaatctcggaaatacactcaaatatcactttgctaaatcgacaatgattagcgactctcctcgagctactgcatcagactcattaaccgggacggatatcatggccgctatgggcatgacccaggaacgggcagccttgggttatagcgcctttctcgggaagatgggcatcagcaacaatgaccgggagagggcgatcgaactgctggctcagtacgcgctgaccaggtgcgatcgggttgcggcattacggaagctcgatgcagagattaaaccactggtaatgcatcagttggccagcttcgcgttcgaggactattcccgtagcgccgccagcgtgaagcaatgcgatggctgcaaaggggcagggtttattgacgctgaggttttcagcatgaagtctcacacgccgacaaaagagaagaagttcgtgaagatgtctttgcacgtgggtgtcgagaatattcgaccttctgagtatgaggtgcgtaggcaggtcatggaggtagcgcgcgttctatgccctcagtgtaagggtaagaaggttgtaagttgcgcctgtaaagattgccatggacgcgggaaagccgttaatcaggctcttacagaacggcagggcgttccggttctggccgattgtaagcgctgcagggggcgcggatatgagcgaatctcttccactgaggcttacgccgcggtgtgccagatgactgatgcaatcagcctcgatacctggaagaagtcagttaagccattttacgatcagctaatcaccaagtttgatatcgaagaagcatgggcagatgcgcagctgaagcagataacaaagtag

SEQ ID NO: 123096 - DNA, 195 bp, Enterobacter cloacae
atgatgagagaaggctattactggattcagtacaatggcagcaggcagatcgcttactacgtgcacgaaaaaatcgacgatttagagtcgggtgaaactatctacggagcatggtatgtgactcgtggagatgatctcgccaacaatggagaggtcgaagtgataagtggacgtattgaagagccaaagctgtaa

SEQ ID NO: 123097 - DNA, 522 bp, Enterobacter cloacae
gtgaaatttaatattttcacaatcgtgatagttgttattgctggtctgtcagtcgcactcgttaaaagttgctcagacgccagcggcctacagagtgatatcaaggttctgcgcagtgacaatgctctgcaggagcagataatcgccacccaagcattcaacttcaatcggtttaataaggttgcagatcatacctacaggcttaactccattatcaacaccaggaccgaagaaaccgtcattaaataccgggagattctccgccgtgaaaaaacctgtgatctgcctgttcctgctgacattgctggtgggctgctcgaatacgcgtacagtttacgttccagcgcaatgcacgccgataccaacggacctgacacagccaatgatcgtgccgctgccgccagcgcaatgacgtattgccaggccgttctctggatcaagccgctgctggcagtcattgagaagggcaacaataacttcgcgggaattcgtgaaatcgagaaaaacagagcttcgccgtaa

SEQ ID NO: 123098 - DNA, 174 bp, Enterobacter cloacae
atgaaagttgaagctcttacgcaaaaggcagaagaagaaattgccgctctgatagcaaaaagaatttcagaattacgaaaaaaaactggaaaagaggtttctgaaattcaatttatagcacgtgaatcgatggccggtctcgaaggttatgaggtaaagattaaacttatttaa

SEQ ID NO: 123099 - DNA, 252 bp, Enterobacter cloacae
atgcttgagggacggttggaaaccatgcactgcggaacgccttgctttgcagtgtatggtaaggaagggttcataaacgaccttatagattacatcaggagcagttctaagttgccggctgaaatccgcattattggcgggctggatgtgatggggcgaatgaaaatcaccattacaggtaagatcatagatgaattgtccctagaagattttcagttaatgattttgaaaaactgtaccagcagcgattag

SEQ ID NO: 123100 - DNA, 351 bp, Enterobacter cloacae
atgaccatcaactatcagcgaatgcaggcgacaacggctcgtatgcttaagcagaacggcattgcatacaacgtcacgcgtaagggcacgttaatcgtcatcggtggtgtggagcatcgttccgatgatatccagttcaccgccacaggagtgaagacggattacgcgccaggcgaaattgatggaaccgtcattgaaaacggcgatattcggattgtctttaccgctgagaaggaaattaaaaccggcgatctgatcgtcgtggacggcgtaagccaccgcgtagttaaacctaaccccgtgaaaccgggtgcggtggtgctctgctacaaatctcagttgaggacatag

SEQ ID NO: 123101 - DNA, 2928 bp, Enterobacter cloacae
atgagcaacgacatcgcaacgatttcgctgcgtgtgaacacgagcgaactggagcgcggtaaccgtgaactggatcgctttcaggaaactgcgaccgcggcggccggtaaagcggatgacctgaacagtacgttccgtaccgggattgataaccagaaaaaaaacagcgaaagccttaagcagcagcgccaggaacttcagaacctgctgaataaaatcagcccggtcaacaaggcactggatgagctggacacaattcaggagagcctggctaaattccgcagtaaaggtctggtgggtgacgaagatttcacacgctataacagtgtgcttgaaacgacacgtacaaaactggcacaggtaatggagtctgagaccgcagagggacgggctcgcattgaacaggctcaggcggcgcaacgtgcagctgcggcgagtaaaacgtttatagactccctggaagagcaggtttctgcaatcggtaaaactcgcgcagagttgcttgaactgaaggctgctcaactaggtgtgtcagaacgcgccgcgcctatgatcgcccggttgaaggagcaggaggaagcgtggaaatcgggggctatcagtgcggggcaatatcgcaacgcaatgcgatacctgccgatgcaaatgacggatatcgtgacgtcactggcttcgggcatgcccgtctacatggtagccatacagcagggcggccagttgcgggactcgtttggtggcgttgcaaatgcgctgaaagcgatgttatccatggtcaccccggttcgtgtcgcgattggtggtctggcaggtgctgttctgcttgctgctaaagcaggctccgactatttcacagcctatgaagaaattaacaaagccattattcggactggcaatattgccggaacgtcagcgcttcaggttatggcttcatctcaggctattgccgcttcaactggcgctacggttgatactgtccaggggctcatgaccgaactggttggcatgggatcactgacacagcagcagcttgaaaaggctacgagttcgacagctatggccgttcaaaccggtattgtttcggcacaggacatcacaaaagcctataaagacattgaaaaagaccctgtcaaagcactgcagagcctcaacgatcagtataactttcttaccgtttcgcaacttaggcacattgatgatctggtgaagcagaaaaatcagaccgctgcagtgactcaggcaatggacctgtttggcgatacgatggcacaacgtggagaacaggcttacgactcgctgacaccgtttggtcgcctgtggctggatatcaagggctgggcgtctgaggctatgcagagtatcggtcagtgggtagctgagctggcatcaaacacactgaaggagttcaacgcaatttattacagcgttgcgatcgttttccagaagctgaaccagatcatttcttcctctatcgctgccgcgattaacctcgttcccgactgggcgaaaacagatactttgcagggatggcaggactacaacgaacaaatggccggcgcttatggcgacagcgtctctcagcttaaaaaagactgggatgcagccgacattagcgcaggtaaataccttgataccacccgcaagataaaaaccgcgacaacccagaaggatcgggaagaagtcgctttgtttggtaaaaagacgaaaaccggaaagcagggcgctatatcagctggcgatcgcaccgcggacgcagctcaggctgaactgcttgcgcttcaggcacagttacgtgccctgcagcagcataaaggtctgaacgatactatcagccagcagcgaaaagacctgtggactactgaggctaaattccaggtactggaagaggcatcacggtcacgctccctgacaaagcaggaaaaatctctcctcgctagcaaagaccaggttctgcaactggcgaggcagaaagctctacttggtgaccagattaccgcgcaggaacaactcaacaagcgcatggatacatcgcagaaatacgtcacgcagatggctgagaaacagactgcgttactgggtggcgccgggatgagcgatcggatggctcagcgtgaactcgcgaaaagtcagctcgctgcaggctggaaaaattcaggtggctctctggaggatgagggttatcagaagcagcttaaagcggcgaatgattactatgacgcagaggacaggttgcgtggtgactggctgaccggcgcaaaaaaaggctgggctgaattcgaagacagcgcgaccgatgtttactctcaggtgcagacacttaccagcaatgctttcaccgggatggccagcactcttacggacttctttactactggaaaagctaacttctccaatttcctgacgacctttctgaaaggaacagcccagatgctgacacagttggcgctggttaacggtatgaagtctgcctttggtgggacggcaataggtaatttctttggaatacaggcatggtctggcggctttattcctgagtacgctaatggcggcgcggttggctataccggagatggaggaaagtatcagccaaaaggcgtggtgcatggtggcgaattcgtcttcaccaaagaggcaactagtgcgctgggtgttggtaatctttatgcgcttatgcggggcgctcaaggctatgcaaacggcggatacgtcgggaacgcaccgatgtacggattacaggctgctggttcagggaatgtgacggtgcaaacgtctgttgttgtgcagaaccagaacccgcaacagcaaacaaacgctggtagcgatgcgatgtccagagcctataagcaaactattgatcaatcagttcgggaaggtatagcgaagcagttgagaccaggaggacttatctggaatgcttctaaaacacgttaa

SEQ ID NO: 123102 - DNA, 756 bp, Enterobacter cloacae
atgatcacagcagactatcaaagccttgaacccggcaataaggtccggcttatcgaagttgatggctctacgttcggcgtggatgatgtactgcgatttcacgcgtataacctcccgcacacggaagaagaaatcgccgccgctggtggtgatgaatcaaagctgaaggcgaaaagtatctggtggcagggggaagagtacgccgcctggccgtatcagattgaggggctggaagcatcaacagacggcagcagcgcccagccaacactgacggtcgcagatatcgaaagcaagattactgcgctgtgccttgcttatgacgatatgctacaggcgaaagttaccatccatgacacatattcgcattatctcgatgcgcagaatttccccgcaggcaacgcaacagctgacccacaacaggtcagaaaacgcgttttttacatcgatggtaaaaacagcgaaattccgggcgaacgtatcgagttcttactcgatagcccaatgtcgttacagggaaagatgattcccacacgccagcttcattctctgtgtacctggtgcatccggaataaatatcgcactggcgacggctgcgactatgccggaacccgctatttcgataacaacaacaacccggtgagcgatccgtctctggacgaatgcaacggcacgctgacggcctgcaaacttcggttcggtgaaaataacgaactctcgtttggtggtttcccgggcacgtctttgatcaggagctga

SEQ ID NO: 123103 - DNA, 714 bp, Enterobacter cloacae
atgcgtcagaaaaccatcgatgcgattatggcccacgctgcagctgaatatcctcgcgagtgttgcggcgtggtggcgcagaaaagccgtgttgaacgttatttcccgtgccggaatcttgccgcggcaccggaggaaaattttgtactttgccccgaagactatgcagctgctgaggactgggggaaggtgatcgccatcgctcacagccatcctgatgccacgacgcaaccgagcgaactggataaagcgcaatgcgatgcaacccttttaccctggcatatcgtgagctggccggagggggatttacggaccatccagccgcgtggagaattgccgctgctgaagcgcccgtttgtacttggtcacttcgactgctgggggctggtgatgagctattaccggcaaacgcacgggatagagcttcacgattaccgggtagattatccctggtgggaaaatgactatcctgacaacttctatcaggattgctggtatgagtgcggattccgtgaattcgacgggccaccgaaaccaggcgatatggtgatcatgcaggttcaggctgataagtggaatcatgcggggattctgctggaaggcaacatgctattgcaccacctttatgggcatctgagccagcgcgtaccttatggcggttactggcgtgagcgcacaatgaaaatactgcgctttaaagactgtttctcataa

SEQ ID NO: 123104 - DNA, 267 bp, Enterobacter cloacae
atgaaaaaatacttgagactgaccatttcaggactgcatcgagtcgatgagggaattttaatcggtggaaatgcgaaagtgatagtaacacgtggcgaagatgttatttgcctagaggacttaacaggaaaggtttctgataaatattccaagctatatgacgttgaagataacggtcttcctgtatcagtaacgacttcaagcgattgtccgtttttcaaagctgaagctgactttgtaaacccatttagcgaaacaaacatctaa

SEQ ID NO: 123105 - DNA, 270 bp, Enterobacter cloacae
atgaaaaagaactatttatcgatgcttattggcgtaacgttattgtcaatgtcatcactgtctgtagcttctgaaacgggacacacatccaatcctggatatggtgatggtggaacagcacagaaacgccagattgacgcctgtgttaacgcgaatacgtccactgtcacgtcttacgataatgtctcacacgttaagccatgtactggtggcgtctcttacaaagacagagaactcccgacccaaaaaattaaagcaccattcaagtga

SEQ ID NO: 123106 - DNA, 759 bp, Enterobacter cloacae
atgcttgcaggtgttaccgcaacgaccggggatttgaatgtacagtcaacaacagggagtgtacgttacaacgcagtggcaggcggagaacatgtttttaactctgctgcgcagcgcgctctttttaattgccctgttgctctcgccgctggctcgattactatcccaaacactgcatcagcgaccgcaccttctggccccggtatacgtggtatttatgcaggcgcagacacagccaactttgacaatgcatctaacatcaacctttattcatggtacgggattggtttctgcaccgcgtacacatcaccaactaatggtgttcaggaaggcaagcccgccgtgtacatcaatacacgaaatggaacaattaacgcgaaaggggcggttcaggccaacggcgttactcttacgtcagactggaacgcaaaagaggaagtgaacatcatcgaacctgcggaggctctggaaaagatagccgcgcttgatggttacacgttccgctataagaatgcagattcaaagagattaaccgctggcgcgcttgcgcaagatctcgatttagtgattcccgacctggttattcatgatgaagctacagattatcttgttgccgattatatggggctgatcggctatctgattgctgctgtaaaagggttgaaactgcaaatcgacgagattaccaacggagaaaatttaaacaataacaaagggacaaatgcagagggggaactgaccgagcagaacggcgcgtga

SEQ ID NO: 123107 - DNA, 576 bp, Enterobacter cloacae
atgcaaattggctatgtcagggtgtcaacaaatgaccaaaatacggatcttcagcgacaagcgctcgaacgcgcaggatgtgagcagattttcgaagaaaaaatgagcggaacagtggcgaaccggccagcgttgaaaaagcttcttaaggcgctgaatgagggggatacgctggtggtctggaagctggatcgccttgggcgcagcatgcggaatctggtgctgctggtggaagaactccggcagcgtggcattcacttcaagagcctcacggatagcattgatacatcaagcccgatgggccgcttcatctttcatatcatgtcagctctggctgaaatggagagggagttgatagtggagcgcacccgggctgggttggccgcagcccgtgagaaagggcgaatcggtgggaggcggccaaaattgacacctgagcaatgggctcaggctggcaggttaatcgcaaacggagtggatcggaagcaggtggcgatcatttacgatgtggccgtttgtactctatataaaaaattcccagtaaataaagacgttacacgaacttcaacacattaa

SEQ ID NO: 123108 - DNA, 138 bp, Enterobacter cloacae
atgcactcgcttcgtcaattcggccaggataatctctcaggcacccgccaaaccctcaacgtttcggttgtcacaaaccagttctacaaacaaaccgatccaatcagatcggtggggattatgctggggaacatgtag

SEQ ID NO: 123109 - DNA, 345 bp, Enterobacter cloacae
atgaccctcaatcgcttttgttatttgcttctgttgatcgccgcaatcggaagtctattcacctcgcatccgtttatcctgtggctcctgcttatcaacgtactgacgttagcgacgtatggcgccgacaaaatggcggcgcgaagggccatgcgcagagtgccggaagccacactgctggtatttggccttatcggcggatggcccggggcgattataggtcagcaactgtttcgccataaaacgcaaaagcagcccttcaaaacctacttcgttgtcagtgtcatcgtcagtatttcagcgatggtggcggtgtaccaactctttcctgttttaacgtactga

SEQ ID NO: 123110 - DNA, 450 bp, Enterobacter cloacae
atgaaaattcaaactattacactggcaatgctggtggtcgtttctgcgccttcgaggtcagcttttcaggagcgggaatataatacctggtatataaaaaatgctgttctttacgatatgacccagacttcagacggtttcccggtcatgttgagcatctcccagcctgagcggaaatcagcaaatttgctggtctcctatatcaccgaagggcgctgtgacgggacccggcaagaacttaacgtgaatggcaaagtgcttgcggccacgtattattgtgttcaggtcgggcagaaccggatagagcatttttcggtgaaagatgcgcagagcgttaacggcatggttaaccatctgaaatcggatttcaccttacttcttcaaaacgacatcaaggtctgggctgcgaacattaatgcgcccaaatacggcctcgcgccgcgattctga

SEQ ID NO: 123111 - DNA, 198 bp, Enterobacter cloacae
atgttgagaaagacgatccgcgtgaggcgcctgagtcaggtgataaaaagcctcagccggtcaaaaaatagtccgttgatacgtttcccgccaccggccctgctggtggcgtattgtttgggggaaaccttaactgccatccagatggttcaacagcgcgccgagatgcccaacgacaccaccaaaatcaaaaattaa

SEQ ID NO: 123112 - DNA, 207 bp, Enterobacter cloacae
atgacggtgtcgttaagggtaagtttaaagaaacccgtgtacactcaccttatagactttgcttcattaaggataactgcattgtttggtcgtgtatcagttgccgtacttacccttctggcgattatatggatggcgttaatttttgattttggtggtgtcgttgggcatctcggcgcgctgttgaaccatctggatggcagttaa

SEQ ID NO: 123113 - DNA, 438 bp, Enterobacter cloacae
atgaaaaagctcattgcgttaagtgttatcagtcttgtcctcaccgggtgcgttaatcctggtaaagcctccgttcagccggaccaacttaagagccaccgttttgtgctggagaatgtggacgggaaagccgttaaggccacgacaacgcaaccagagatcagcttcaaagccctgtctgatatcagtctggttaataacattagcgtttccggcgtgatgtgtaacacgtttaacggacaggggaaattgtccgaaggtgagctcaaggtcaaaacgctcgccatgacgcgcaagctctgtaccgaaccacagttaaacgaactggatcaggccattggcgacatgctgcgcaaaggggcgcaggtcgacctgactgaagaccagttaacgctggcgacagccgataaaacgctaatgtttaagcgtgcggagtaa

SEQ ID NO: 123114 - DNA, 1146 bp, Enterobacter cloacae
atgagcaaaaaatttgcccgcagcagcctgtgcgcgctcggcatgaccctcatgacagcgcacgccgcagagccaccgaaggcaatcggcgacggggaaggacgactggatattattgcctggcccgggtacatcgaacggggacaaaccgataaaaattatgactgggtcacgcagttcgaaaaagagaccggctgcgcggtgaacgttaaaaccgcggccacctcggatgaaatggttagcctgatggcgaaaggcggatacgatctggtcactgcctcgggcgatgcctcactgcgcctgatcatggggaaacgcgttcagccgattaaccccgaccttatcccaaactggaaaactctcgacccgcggatcgtcaaaggtgaatggtttaacgtcggcggcaacgtctacggcacgccgtatcagtgggggccaaacctgctgatgtacaacagcaaaacgttcccgacgccgccggacagctggagcgtcgtctttacgaaacagaatttacctgacggtaaaaccaatcagggccgcgtgcaggcctatgatggcccgatttacatcgccgatgcggcgctgtttgtcaaagccacgcagccgcagctgggtatcaccgacccgtaccagctaacagaaaaacagtatgccgccgtactgaaggtattgcgtgaccagcatgcgctgatccaccgctactggcatgacaccaccgttcagatgagcgactttaaaaatgaaggcgtagtggcctccagcgcctggccctatcaggccaatgccctgaaagcggagaaccagcctgtcgccactgttttcccgaaagaaggggtaaccggctgggcggacaccaccatgttgcacgcgcaggccaagcacccgatgtgcgcctacaaatggatgaactggtcgctgacgcctaaagtgcagggcgatctggcggcctggtttggctcgttgcccgtggtaccggaaggatgtaaagccagcacattgctcggcgataaaggctgcgaaacgaacggctacaactatttcgacaaaatcatgttctggaaaaccccgattgcagaaggcggcaaattcgttccttacagccgctggacacaggattacatcgccatcatgggcggccgttaa

SEQ ID NO: 123115 - DNA, 1014 bp, Enterobacter cloacae
atgacgtacgcagtagagtttaatgacgtttcccgtctgtacggtgacgtgcgggcggtagatggggtcaccattgctattcatgacggagagtttttctccatgctggggccttcgggctccggcaaaactacctgcctgcgtctgatagccggttttgagcagctgtcaggcggcgcaatcaaaatcttcggtaaagaggcgagcgcacttcccccatgggaacgcgatgtgaataccgtgttccaggattatgcgttgttcccgcatatgtcgatcctcgataacgtcgcgtacggactcatggtcaaaggtatcgacaagaaaacgcgccatgcgcaggcgcgtcaagcgctggaaaaagtggggctaagctttgctgtcacgcgtaagccttcgcagctttccggcgggcaacgtcaacgtgtcgccatcgcgcgggcgctggtcaatgaaccccgggtattgctgctggatgaaccgctcggcgcgctcgatcttaaattgcgtgagcagatgcagttcgagctgaaaaagctgcagcaggagctcggcatcacctttattttcgtcactcacgatcagggggaagccctgtcgatgtctgaccgggtcgcggttttcaataatggccgcattgagcaagtcgacaccccgcgcgatctctatatgcgcccaggaacgccattcgtggcgagctttgtcgggacctcaaacgtgtttgacgccggtatggcacataacgtgtgcgggatggaaggcatctattctttacggccggaacatattcgcctcaatgagagcggtgaggttcaggttgagggcgtggtgcaggcagtacagtatcagggggcggcaacgcgacttgaactaaaactcgctgacggtgcaaaactgctggtcagccaggccaattttagcgatgccgcaacgctgagcggcgtgacgccggggcaggcggtgatggcgtcgtggtcacgtgatgccatggttcgcctgcaagaggagaggtga

SEQ ID NO: 123116 - DNA, 945 bp, Enterobacter cloacae
atgaacacgcatgtcgcgccgcctcccgcccaccgtagccgcatgagccgccttaccgcactgttctggcgtaagccatcgcttggtctgttcctgctgctgctcgcgccgctaatgtggtttggcatcgtttatctgggatcgcttctcacgcttttatggcaagggttttatacctttgacgatttcaccatggcggtcacgccggaactgacgtttgccaatatcctggcgctttttaatccggcaaactatgacatcattctgcgtacgctgatgatggccattgcggtgaccatcgccagcgctatcctcgcgtttccgatggcctggtacatggcacgttacacccgcggcaagtggaaggcgttcttctatatcgccgtgatgctgccaatgtgggccagctatattgttaaagcctatgcctggacgctgctgctggcgaaagacggggtagcgcagtggtttctgagccacctggggctggagccgatcctgaccgcgatccttacgcttccggccattggcggaaacacgctttccacctccgggctggggcgttttctggtgttcgtctatatctggctgccgtttatgatcctgccggtacaggcggcgctggagcgactgcccgcgtcgttactgcaggcttcagccgatctcggcgcgcgaccacgccagacttttcgttacgtcgttttgccgctggcaatcccgggcattgccgcagggtcaatcttcactttttccctgacgctgggcgatttcattgttccacagctggtggggccgccggggtactttattggcaatatggtctattcccagcagggcgctatcggcaatatgcccatggccgcggccttcaccctggtgccaattgtcctcatctctctttatctggcgttcgtgaaacgtctgggagcattcgatgcactctga

SEQ ID NO: 123117 - DNA, 807 bp, Enterobacter cloacae
atgcactctgaacgcgcaccgttgttcctgaaagtggcagcctggggaggcgttatcttccttcatttcccgctgctgattattgcgacctacgcctttaacaccgaagacgccgcgttcagttttccgccgcaggggttgaccttgaagtggttcaccgtggcagcagggcgtggcgacatcattgaatcagtgacgttgtcacttcaaatcgctgcgctgtcgacggctatcgcgcttgtgcttggcacgcttgctgcagcggcgctgtggcgaagcgcgttttttggcaaaaatgtgatctcgctgttgctgctgttgccgattgcgttaccggggattatcaccggtctggcgctgttgacggcgtttaaaaccattgaccttgagccgggttttttcaccatcgtggtcggtcacgccacgttctgcgtggtggtggtgtttaacaacgtgattgcccgtttcagacgcacctcctggagtctggtcgaggcgtcaatggatctgggggccgacggctggcaaaccttccgttacgtggtcctgccgaatctcggttcggcgttgctggccggggggatgctggcgtttgcactctcgtttgacgaaatcatcgtcacaacatttaccgcgggacacgagcgcacgttaccgctgtggttgcttaatcagctcgggcgtccgcgcgacgtgccggtcaccaacgtcgtcgcattgctggtgatgctggtcacaaccctacccattctgggagcctggtggctaacccgcgacggcgaaaacagtgccggaagcgggaaataa

SEQ ID NO: 123118 - DNA, 759 bp, Enterobacter cloacae
atgaacagtttttactcgcagcaggccggctgcgttgtgcgctggcacgatcttcccggctctggcgatcctgtggtgtttattcacgggttaggctgcgcctcttcttatgaatatcctcgtatcgtctctgacgcccggtttggtgcgcgcagagccattcttatcgatctcccgggcagcggttacagcgacaaacccgtgcagtatcgttatcgcaccagcgagcaggcgcgagtggtggctgaactgttggaccatctcaaactcaatagcttctggctatatggtcatagtatgggtggcagcattgctatcgaggcagcaggactgatggcgccacgcgtaaaagggttgatggtgtcggaacccaattttcacgccggaggtggcatgttcagccgctctattgctgcacagacggaacaacagttcctggcgcaggggtatgatgcgctgctcagtgcagaaacctcaccctgggcgggcagtctgcaaagcaatgcgccgtatgccgtgtggcgtggcgcgtccagcctggtggaaggggtagagccggaatgggaggttcagtttttgtctctgcgctgtccggtgacgttgattttcggcgagtggtctctacctgatgatgatgtggactctctgcaaaagcggggcgttgaggtgaaaatcatcccagcggccggacactccatgtcatgggaaaatccgtcggcactggcgcagacgttagcagagtgtatgaccacgacctga

SEQ ID NO: 123119 - DNA, 2175 bp, Enterobacter cloacae
atgactgcgacgatgaccaccactcaggccttaatcgggtggataaatgagacgcgcctgaacgcccctatgctggataacgaggccgatgcccttcttgcgcgcatcaacgcgacgcaggcacgggagcaggccattgaccgcgccctgtcacgcccgggcagtattggactttacggtcattctcagagtgctaaagcgcatctgcttttatcgctgtgcggcagcggtaatggccgcctgaacgttacgccaggccagcgtacatttgactatttttcgcacattaatccgggacatgccctgaccaacatagccgtgcggttcacccgcggaaatacagaggtgatggatgaggcgttcccgctgcgcctgagcctggtgacagaggcagagctggttcagctgtttatcgcccgcaccacgctgcagccggacatccgcgccgtggataaagcggtcattgagacgcgcctggagaagtggcgtggcctgcgccagccgcagggtgttcctggtattacggctcaggacgtgggtgccatcgcccgcttctggcaaagctcagtacctgccgcgaaacaacaaattgatgatgccctgtggcatcagtttgcacagctggtcccttcgctcgatctcagcacgcgtgccagcgtctggtcgctgctgtggggtgagcaacaggagttgacccagcagtggttaaagctcgctcatgtcctgcatcagaccagccatgccggagcactcgccgccccgctcagcctgctggtcgataacttcgggctgccgggcgaagggttcctgactcacggcaccttttcccttccggaggcccaggagacgctgcttcatccgctgaacaacggcgagatgcttaacgccatcagtatccctgtcgatacgctcgccttcctgacgcgtgagctggtcttgccggtcgaaagcagcgccctggataatgtcgatattattgatattccggtcttttcagataacagcgccgatgcactgaatcaggctaaatgccagtggttgctggagcattatcgccagcagctgcagccggacgtgcttgttatctgcaatgcgacagcccagcacgagcaaacggctaaaaaagcccgggtgctgatgaactgggtcaaagagactcagcctgttgaagaatccgccctgccggggctggtgtgggcgattacgcctcacgacgcacgttttaccacccgtcagaaccttgatgaaacggtacagcacctgttgggcaaaccgggtgtgcgctgggggacactgcaggcgctggacagccacagcatgcagcgcgtgatcgagtggttgtctcaggccacgttatccgctcagcgacagaagcgtcttagcacgctgaaagcaatgctgcgccaggaactctcggccctgatgaaggggtatctggcaccgctggttgaggaacccggcgccagacgaactcaggccgaaaacatggtgcgcgttctgcaaagctccgccgcccgccacggtgaactgcttgaaggtcttctgccgccgcttaaagtctttgaaaccctgctggccgttcagcagccccgcgaggagcaggtgaacggactgtttacggataccattgacctgtttgccgagcatgcccaggagaacgccagcccattccagaccaaagacaaagctcgcctggcgcataaagtctggataaaccatctgcgccagtggagccgcaacgatgccactgccgcgcgccttgggctggaatccgctgttttgcagcaaattgccgacgttctggtggtggccagctaccgactgaacctgccgcagcagctgcagaacatcgttgaaaccgacaagtgcagcgcagcccaactgcatgccgtaatgggcaacttcattggctggctgggctacgatcggacacccgccgaggcacgcccggcgagccgcatccgtaaaggccaggcaatctttgttacgccggtggtcaacagtaccgcgccgcgcctgacgcgtctgggagaacaacccgtacatgcggcaacggtgtatgtctatgactggctggtcgccctctatagccgggcaatagagaacatcgatttccaccacccgcacgatgtacagcctgccgcacgccaggccttacaagccctgttacgttag

SEQ ID NO: 123120 - DNA, 2982 bp, Enterobacter cloacae
atgctggtaaatctttgcgactataaacagagcgtcacgcttattgccaacagcggcgtgcaattcctcgattttggcctgactccgcaggacaccgccagcaacgggcgcttcgtacgtaaaaccgccaacggtccgcttctgcgtctcgatttcgatctcgtcaacgggcgttacacgctgccgggattgaacggcggacagcctgaagtggtgaaaccggaaaccacgatcccactgcatcagtccctgacggtgctggatggcgtctggctccccattcccttcctgcgcttcaatccgccacgtacctttgttgacgggccggataactgggcgcgtgtccaggtgcgtaaacttgaaacgcctgatgcagcaggcaatacgcaccgcgtcacgctcgctctcgacagccagattgcagagcatgctactgccgcgctgtccccggttgaaaatgacattctcaacggcacccgtttcggactggcatggcgtgacgatgaggtggaaagcttcctcgaccagacctggattgacggctggctgcgcgaggcgtttacccactatgcgaccgacgttgaaaaccgcgcggaacgcgacctgcagcaggcaatgcgcagctttgagtaccaggcacactggctcaacctgctgtccatgctcggtgaacagcttaccgtgccggaagtgaaatttgtcacccataccctcagtacgccggctattccggtcgacctgatcctcgacgtcgggaatacccatacctgcggcgttattattgaagatcacggtgatgcgaacgacggtctgcgccagacggccgaactgcaggtgcgctcgttaagcgaaccacagttcctcaatgagccgctgtttaccagtcgtctggagttttcggaagcgcgttttggcaagcagcacttctcggtggaaagtgggcgtgaagatgcctttgtctggccgtctattgtccgcgtgggcgatgaagcccgcaaactggctacgcgccgtctgggcacggaaggtaacagcggtatctccagcccgcgtcgctacctgtgggatgaaaccccggtggtccaggactggcgctttagccagatgaacagcaagacccagcgcgaaccgctggcgaccgcgttcccgctgatgaacctgatgaacgatgacggtgaaccgctctttacgctgccgcaggacgagcgactgccggttttctccccgcagtacagccgcagcacgctgatgacgcatatgctgtgcgaactgctggcacaggcgctggggcagatcaacagcgttgccacgcgcctgcgtctgggctttccggcctcaccacgccagttgcgtacgctgatcctgaccctgccctcggcgatgccgaagcaggaacgcgagatcttccgtcgccgcatgttcgaagcgatcgctatcgtctggaaagcgatgggctggcacccgcaggacgacgattttgccacccgtaagcaccaggaaaaaagcgtggtgccggtacctgcaatccagatggagtgggacgaggccagctgtggtcaactggtgtggctgtacaacgaagcgatctcacattttggtggtcagacggaagcgttcttcgcctccctcgcccgcccggatcgtgaacctgaaccaggcgttcagccggggcgctcgctgcgtgtcgcctctatcgacattggcggtggcacaaccgacatggcgatcacccattatcagctggatgacggctccggtaacaacgtcaaaatcacgccgcagctgctgttccgcgaagggtttaaagtggccggtgacgacaccctgctggacgtcatccagcgctatgtgttacccgccctgcaaacccagctgcagaagtccggcatcgccgatgcctctctgctgatggcctcgctgtttggtgactcaggacgcatcgatactcaggcggtattgcgccagcaaacggcgcttcagctctttatgccgattggtcacgccatccttgccgcgtgggaatccagcgacatcgacgatccgctggcaggcttgcatgccacctttggcgatctgctgtcgcagaaaccgacccgcaacgtgatgaattatctgcaacaggccgtcgatcatgccttgccggcaggttcagaagccttcgatctgtttgccgttccgctgcacgtgaatttccgtgaaatgcaggatgcgatgctggcaggccagttcacgctggcgtcacccctgcatgcggtgtgcgaggccatttcacattacagctgcgatattctgctgatcacggggcgtccgggctgcctgcctggcgttcaggcgcttattcgccacctgcagccggtgccggttaatcgcatcgtctggctggataaataccaggttcatgaatggtacccgttcagccagcaaggacgcattggtaatccaaaatcgaccgccgccgtcggcgcgatgctttgcagcctggcgcttgacctgcgactgccgcgctttaactttaaagccgcggatatcggtgcatattcaacggttcgctatctgggcgtactggataacaccgtaaacaccctgcgtgaagaaaacgtctggtatcaggatatcgacctggataaaccgggtgcgaaactcgacgctcgtctgcacttcccgctgcgcggaaatgtgacgctcggtttccgccagctggcgaacgcgcgctggccggcaacgccgctctatacgcttagcatcaactcggccgaactggccaaagcgattgcgggtgacggcgtgctgaacgtgcggctcaaactttgtggcggcaataagcatgaagggcctgaatccttcgcgctgagcgatgcctggttgcaggacgggacgccggttccgcctgatgctttaaccttcaaactgaatactctggccgatcgccgtcatagcggcagccactactggatcgacagcgggagcgtatacctgaaatga

SEQ ID NO: 123121 - DNA, 1353 bp, Enterobacter cloacae
gtggcaaaaactcttttacgcagcggtaatctggatgactttcaggccgttggcggcggcggacaagccgtttttgaatcagcgttacaaatccgggaagcgctccggttacgcaaacaacaggcgattgtcgactgtctggctattccgcaggtcaatgatggtggcgaccgtgtcgactggtattcgccggtcgacggttgtgtaaccagctggaaagcggcgaacgaagacgatcgttatcgcgcccttcgctatctggaaaatacgctggccagcgttgaatcgctgagtaagaaatgcctgcagtcgccaaaaacagcgcaacagcttttcggctccctgctgtcgaaagcatttcagtttcccggcgaaaacttccttttcctggttgatggaaagccggtcataagcttctgggggtttgtaaatctcaatgagaatgcgcgtgacgacgtactcgactgtttacgtgaatcgctgatccctgagccagccccgattgtcattgaagaccctgaacccgagccggaaccgaccccagtcctgacctttgaacaggccgatgagccgctgatcgccccggccacggtggtgcgcatcacgccggacgaactgtatacgcctgaacctgcgccggtcattgtgccgccagtggaagaactcgatccagagcctgcgatcgtcgccaaaaaacgccgcgttcccctgtgggcgcttccggttgccgccgtgatcgttggcgcgattgccaccccgttgctgtggccaaaacaggccccttctgccgagccagtggctgttgttgcccctgaacctgtcgccattgcgccaaagccgattaaagccgttgagccactgccgatgaaattaccgctgcatcaggcagaggtggtcgcgagcaaagaaaaagagccggctcccgttgccgccccagcgcctgcgccggttgtgattgcggcgatcccgaaagacgccatggtcatggaagcaaaccaggtaaaagcggggtcgacgcgttttctgaacggaacatggcgtgcgatcctcgacgtgaaagatccgattacaggcaaaccaccgtcgctgcgctatcagatccagaacaataaaggcttcgctcgtgttgttcacggtgacaatgttgtctgccgcgtggaggttttctccgggctgcacagcaatggcgaactgatgattaagagtcgcggtaatgcccgctgcacagacggttcacgctacccgatgccagaagttgcctgtaaagcaggtaccagcgatgtcgctgaatgtaatgcccgttatgatgccaaaaccgtcgttccattgacgttcaagaaagcaggtgcctga

SEQ ID NO: 123122 - DNA, 1599 bp, Enterobacter cloacae
atgtctacagggaaaacgttgctcgccctcgcgctgagcactctcttaccagcaggtgccgcatgggcggcgaataatgacaccatcatttattgctctgaagcatcaccggagtctttcaacccgcagatcgccagctcaggcccgtcattcgtggccagctctcaggtcctgtataaccgcctgatcaatttcgacccggtgaaaaacaccccggtaccgtcgctggcagagtcctggacaatttccccggacggtaagacttatacctttacgctgcgtaaaggggtcaagttcaacagcaataaatacttcaagccgacccgtgattttaatgcggatgacgttattttttccgtcatgcgtcagaaagaccctaagcatccttatcacaatgtctcgcagggtaattacgaatactttaatgacgtaggcctggacaagctgattcaggacgtcaaaaaggttgatgattatcacgtgcagtttacgctcagcgaaccaaacgccgcattccttgctgactgggggatggatttcgcctctattctttccgctgaatacgctgacgcgatgctgaaaaaagggacgcctgagaatgtcgatacctggccgattggtaccgggccgtacgttctgcagcagtacaaagtggattcgctgatccgctacgtcgctaacccgaactactgggaaggtgcggttccgacgaaacatcttattttctccatcacgccaaacgtagaaacgcgtctggcgaagctgcagaccaacgaatgccagatcattccggcgccgtcaccggttcagtttgatgttattaacaaaaataaagacctgaagctgcacgccgtggaggcgttgaacgtggggtatctggcgttcaataccgagaaaaaaccgtttgataacgtgctggtgcgtcaggccctgaactatgcgatggacaaaaaagccatcgtgaatgcggtctttatgggttccggtacggtggcgaaatcacccattccgccgaatatgctgggctttaataacgatctgaaggactacagctacgatcctgaaaaagcgaaagctttgttgaaacaggccggtctggagaagggcgcggacgtgacgctgtggtcaatgcctgtgcagcgtccgtataaccctaactcgaagcgtattgcggagatgatccagagtgactgggcaaaagtcggcgtgaaggccaaaattgtctcttacgagtggggcgagtatctctccggtatgcgtaaaggggagcatgattccgcgctgtttggctggatgtccgataacggcgacccggataactttgctgatgtactgctgggatgcgacagcatcaaaaccggatcgaacgccgcgcgctggtgcgataaggggtatgatgatctggtcaagaaagccaaactgaccagcaacccgggtgagcgtgcgaaactctacagccaggcgcaggagatcttctatgctcaggcaccgtggattgcgctggcgaacggcaaaacgttctacgccacccgtagcaacgtaacggggtacagcgtgagcctgatgggcagcgatttctccaaagcgaaactgaactga

SEQ ID NO: 123123 - DNA, 234 bp, Enterobacter cloacae
atgtcacatttaaatgaagttatcgcccgtgtcgataccgccatcgaagagggagtgattagccgaatgaatgaactgctgatcgaactgagcgacgacgcagcgttaagccgtgaagatcgctacagtcagcagcagcgtctgcgtaccgcgattgcacatcacggtaagcaacataaagaagagatggacgcccgtcaggaattgctgaccaaaggcggtacgattctgtag

SEQ ID NO: 123124 - DNA, 2115 bp, Enterobacter cloacae
atgaaaatcatttctgcccgtaaggcaacgcttccactgctgctggttcctgttatctctgcgcctctcactgcgatgagtgccgatgaacagaccatgatcgtcagcgccacgccgcaaaccgtctcggagctcgataccccggcggcggtcagcgtcgtgaatggcgatgatatgcgtcatgctgcgccacgcattaacctgtctgaatctcttggcagcgtgccggggctgcagatccagaaccgccagaattacgctcaggatctccagctttcgatgcgtgggtttggtgcccgctcaaccttcggcgtgcgcggtatccgtatgtatgtcgacggtattccggcaaccatgccggatggacagggacaaacctccaatatcgacctctccagcgtggacagcgtagaagtgctgcgcggccccttctctgccctttatggcaacgcctctggcggcgtgatcaacatgaagacccagaccgggcagcaaccgccgaccatcgaggccagcagctattacggcagttacggtacctggcgctatggaatgaaagccaccggcgcgatgggtgacgggacgcatgccggggatgtggattacaccgtgtccactacccgtttcacgaccaaaggttatcgcgaccacagcggcgcgcggaagaatctcgccaacgctaaactgggtgttcgtattgatgacgtgagcaagctgacgctgattttcaacagcgtggacatgaaagccaacgatccgggtggactgagtgcccaggagtggcatgacaaccctcgccagtctccgcgtggcgaccaatacaatacgcgcaagaccatcaagcagacccaggctggcctgcgctacgatcgtcagctcagcacccaggacgatctcagcgtcatgatgtacgccggcgaacgtgaaatgacgcagtaccagtcaattccttatcagcctcagctgagaccttcccactccggcggcgtgattgatatgcagcgccattaccaggggattgatacccgctggacgcaccgtggcgaactgctggttccggtcacctttaccaccggtctgaactacgaaaacatgagcgaagatcgtcgcggatacgagaacttcgtcatgaacaacggcgtgccggagtacggcgtcaagggtgacaaacgtcgtaacgaacgtaacctgatgtggaacgtcgacccgtacctgcaaaccagctggcagttaacgcagaaactctccgtggatgccggcgtccgatacagctcggtctggttttactccaacgaccattacgtgaccccgggcaacggagacgacagcggtgacgcaagctatcacaagtggctcccggccggttcggtgaaatatgccgtgaccgatgcgtggaatctctatgctgcggcaggtcgtgggtttgaaacgccaaccatcaatgagctctcttatcgtgcggataaccagggcggcctcaacattggcctgaaaccttccacgaacaatacctatgaagtgggcagcaaaacccgtatcggtaatggtctgctgacggcagcgctgttccgcaccgatacggatgatgagattgtcgtcgatgccagcgctggcggtcgtaccagctataaaaacgccggtaaaacccgtcgtcagggggttgaagtttccctggatcagcagtttgctgagaactggaagctgaaaatggcgtggacctatctggacgccacctatcgaaccaacgtgtgcagcaccggcgactgtaacggcaaccgtatgccgggcattgcccgcaacatgggttatgcctcgtttggctggcagccggaagaaggctggtatgcgggatcggatgtgcgctacatgagcgatatcatggcggatgacgagaacacggcgaaagccccgtcctacacggtggttgggctgaataccgggtataaattcaactacggtaactggggaatggacgtctttggtcgcgtcgataacctgttcgataaagagtatgtcggatcggttatcgtgaatgaatccaacgggcgttattacgaacctgcaccgggccgtaactacggcgtaggtctgtcggtctcttatcgcttcgagtaa

SEQ ID NO: 123125 - DNA, 1554 bp, Enterobacter cloacae
atgaccatggggttactgatgcggaataacactcccgttacacaaaacgagtatttacttaacgaaggttcgacgcttatgtcgaccaccaatacgcacagccatattacctatgcgaactctgcctttattgacgccagcggctataaagaagagagtcttctcggtgagccgcataatcttattcgccatcccgacatgcctgcagaggcgtttggcgacatgtggtttaccctgcaacagggtgagacctggacggggctggtcaagaaccgccgccagaacggcgatcactactgggtgcgcgccaacgtcaccccggtttatcaggatgaaacgttaaccggctatatttctgtgcgaaatattccttcgcgtgaagagattgctgtcagtgaaaaacggtatgagaaagtgcgcaataatgaattaaaagatcaccgcttttataaaggcctgtttgttcgccacggtctgttctcttttacgtcgctgtttaaacgcctcagcaccagtaaaaggatccatcttggtattgcgataaccgccctgctcgcttgtctgcagctgtttatatttgccgatcgtattgttgagactgtaggtctggctctgctatttattgccctggccgtttatcttcatgcgcaaattgcgaagccggttaaatccattgtccagcaaatgcagcgggtggtttcaggacgtaaagcggactattaccattttgaccgcgtcgatgaaatcggcctgatgatgcgcatggtgaatcagtcgggtctgaacctccattcgctggtggacgatgtcggtgcgcaaatcagcggtataagtacaatcagccagcaggtggcgaaagaaggtatggcattacaaacgcgtaccgaagaaaccgcagactttctgcagcaaacggcctcagccgtggaagaaattgccagcgcagttcagcagacggctgaaacggcgaaagacgcgatcctgatggcagatcgcacccgcaccagcgctcaccgcggtgaagcaatgatgaaagagactatcggcatgatgcagtccgtgtcgcaggataacagccagatcgtcgacatcatcagcgtcatcgatcgtatcgccttccagaccaatattctggcgctgaacgcggccgttgaagcggcgcgtgcgggtgatgccgggcgcggttttgcagtcgtggcggccgaagtgcgcaaccttgcccagcactctgccaccgcggccaaagagatcaaaacgcttatagagaaaaacgtttccagcgtgaacgccggcgtggagaaggtcgagcaaactgaatcgcagctcacggtgatgattggcaatgtcatggagatgtcttctctgattaaggagataggccacgccacgcaggagcaaacgcaggcgctgaccctgattaacgcgtccatctcccgcatcggtacaatgacccaaaataataccggtatggtggataacgtgacggacgccgcacaccatctgacgcagcgcacgacccgtctgcaacaggcgattgccgtttttagcggttga

SEQ ID NO: 123126 - DNA, 540 bp, Enterobacter cloacae
gtgaaagtgaatgtgattggcaccagcgggagtggaaaaagcaccctggcgaagcgtatcgccgcagaactggatattccttacattgaaatggaccgactttactggtgtccggactggcagggcacaccggacgctatcttgctggaaaaactggagacgacgctaaaggcgtcagcggagtgggtgcttgatggcaactataaccgtacgcgtcctgtgaaatggcgagacgtggatcgggtggtgtgggtggattatgggttcgcccgaaccctgtatcaggctgtcacccgagcgttcacgcgcgcctggcacaaacaggaactgtggcccggtacgggaaactgtgagagttttcgtcgctcattcttgagccgtgagtccattattatctggacaatcaaaacctggcgcagcaaccgcgcacgttatgcacgcgatatggtagacccgcaatacgcccatattcattttgtccgcattacccaccgcagtgaggtggaaaacctcatttcatcgcttaagtcacacgcgtag

SEQ ID NO: 123127 - DNA, 1317 bp, Enterobacter cloacae
atgtctgcaacccgacaattgcggctgggaaccattttgcatggtgcttccgggaacatgtctgcctggcgtcatccggcggcagtcgccgatgccagcattaattttgattttgtaaaagccacggcgttaaaagccgaagaggggaagcttgattttttattcgtcgccgacggcctctatattaacgagaaatccatcccgcatttcttaaaccggtttgagccgttaacggtcttgtccgcactggcaagtctgacctcgcgcctcggtctggtcggtaccttatcgacctcctacagcgaaccgtttaccgtggcgcgccagtttgccagcctggatcatttgagcaacggacgtgcaggctggaacgtggtgacctcaccgctggaagggtcggcgaaaaacttctcgcgcgagaaacaccctgaacatgcgctgcgctaccggatagcggatgaatacctcgacgtagtgaaaggactctgggattcctgggagggggatgcctttgtgcgcaacaaagagagcggccagttctttgacccggcaaaactgcatacgcttgatcaccacggcgatttcttccaggtggccggtccgctcaatattggccgcacgccgcagggacgcccgattgtttttcaggcaggtgcatcggacgacggaaaaaaactggctgcgaaacatgctgacgccatttttacccatcatgaaacgttagaggaagccaaagcgttttatcgcgacgtgaaacaccagcttgaatcgaatggccgcagggcatcggacttacatatttttcagggcgtcagcgtgattgttggcaaagacgcggaggacgtggagaaccagtatcagacaaccgcggctctggtgtcgattaacgatgccctgaattacctcggccgttatttcgaacatcacgatttcagccagtaccctctcgacgagccgttcccggacatcggtgaactgggtaaaaacagttttcgcagcacgaccgatgaaattaagcgtaatgctcgcgaacgcaacttaaccctgcgtcaggttgcactcgaagcggcatccccgcgcccgcgcttttccggtacgccggaggaggtggcagacggtctgcagggctggtttgaggcattcgccgcggacggcttcattattcagggtggaacgccggacacgttcccgcgttttgttgaccaggttgtcccggtgttacaggcccgcgggttattccgcaccgactatcccggcactacgctgcgcgacagtctgggtttagacgaaccgcaaaaccagttcacacaacaataa

SEQ ID NO: 123128 - DNA, 888 bp, Enterobacter cloacae
atgaaatatgcttttctggccggtctggcttttacgaccgcgagccatgcgggtatcgatttacacgccaacgagcagccgctgccggtgacggtagatcggcaggccgtcgcgaagatccccgcgaactataaatttgttgagccgggcacgctcacggtagcgatctcagcgctcaactctccaccgctggcgctgcttgcaagcgataaccggacgcggattggcagcgatccggatattgcccgcttgctggcgggcagtctggggttaaagctgaagctggttcccacggcctgggaagactggccgctggggatcagctccggacgctatgacgtggcgctggtgaatattgcggtgaccgaacagcgaaaagagaaatttgattttgcgacctatcgcgtcgactcactggcgttttccgtgaaatccaccagcgcggtccaggcgattaacagcgcaaaagatctggcaggcaaaaaggtgattgtcggttccgggaccaatcaggagcgcattctgctgggctggaatgaagagaacaaaaaagccggtcgtgcgcctgcgctgccggtctatctgaccgatgatgcttccggcaacctctatattcagtccggcagggcggatgtgttcttcgggcctcaatccgtatccgcctataaagcggcgttgaccggcaaaacgcgcgtagtgggtctcgggccgaagagagcctatgttgccacgacgaccaaaaagggcaatgggctggtttatgctttgcaggctgcgctggagggcgctattacgcgtggagagtaccagcgggtgctggcacgctggggagaagagggcgaagcggtgacgcaatccgacgtgaacccgcctgggataacctattag

SEQ ID NO: 123129 - DNA, 681 bp, Enterobacter cloacae
atgatccagtttctgaacgtctttttctacgatatttacccctatctgtgcggcacggtttttctggtgggaagctggctgcgttacgactacgggcagtatacctggcgcgcctcctccagccagatgctggataagcgcggcatggtgctgtggtcgaatctgttccatatcgggatcctggggatcttcttcggacatcttttcgggatgctgacgccgcactgggtttattcgtggtttctgccgatgtcgcagaaacagctgatggcgatgattctgggcggcgtttgcggcgtgctcacgctggtgggcggtgcgggattattgattcgccggctgacgaacccgcgtatccgggcgacctcctctacggcagatatcctgatcctctgcattttgctggtgcagtgtattcttgggctcaccaccattccgttctccgcgaaatatcccgacggcagcgagatgctcaagctggtggactgggcgcagtcggtagtgaccttccgcggtggctcgtccgaacatctggcgggagtggcgtttatcttccgtgttcatctggtgctgggcatgaccattttcctgatcttccccttcacccgactggtgcacgtctggagcgcgccggtggagtatttaacacgcaggtatcaggtggtgagatcgcgccgctga

SEQ ID NO: 123130 - DNA, 3741 bp, Enterobacter cloacae
atgagtaaactgttggatcgctttcgctatttcaaacaaaaaggcgacagcttcgccaatggacacgggcaggtgtacaacaccaaccgtgactgggaggacagctaccgacagcgatggcagttcgacaagattgtgcggtccacccatggcgtgaactgcacgggctcctgtagctggaaaatctacgtcaaaaacggcctggttacctgggaaacccagcagaccgactacccgcgtacccgccccgacctgcctaaccacgagccgcgcggctgcccgcgcggtgcaagttattcctggtacctttacagcgccaaccggctgaaatacccgctggtgcgccgcacgctgatcgaactgtggcgtgacgcgctggcgcaacacagcgatccggtgctggcctgggatgccattcagaacgatccgcagaagagccggagctacaagcaggctcgcggacacggcggatttatccgctccagctggaaagagctgaaccagctgattgctgccgccaacgtctggaccattaaacattacggccccgatcgcgtggccggtttttcaccgattccggcgatgtcgatggtctcgtatgccgccgggacgcgttatctctctctgctgggcggcacctgtctcagcttttatgactggtattgtgatttaccgcccgcctcgcccatgacgtggggcgagcagaccgacgtgccggaatccgcagactggtacaactccagctacatcattgcctgggggtctaacgttccgcagacgcgtacgccagatgcccacttctttaccgaggtccgctacaaaggcaccaaaaccgtggccatcaccccggacttctccgaggtcgccaaactgagcgatcagtggctggcacccaagcaaggcaccgacagcgcgctggcgatggcaatgggccacgtgatcctcaaagagttccatctcgacaaccccagcgagtacttcctcaactactgccgccgctacaccgacatgccgatgctggtgctgctggatgaacaggccgatggccgcgtggtgccggggcggatgcttcgggcctctgatctcacggacgggctgggtgaagccaataatgctgagtggaaaaccgtcgcctttgatatcgccggcgatctggtggtgccgaacgggtccattggtttccgctggggcgaaaaaggcaaatggaacctggcgccgctggcggcagatcatgaaactgaactcaccctctcgctgctgattacccacgacagcgtggcagaggtggcattcccctattttggcggcaatgaaaatccacacttccgtagcgtcaagcaggagccggtcctgacgcgccgtgtaccgagtaaaaccctgacgctggccgatggcagccagaaacgggtggtcagcgtctacgatctgattctcgctaactacggcctcgatcgtggtctggaagacagcaacgcggcgggcagctatgaccagatcaaagcttacactcccgcctggggcgagcagatcaccggcgtccctgcttacctgatagagaaaattgcccgtgagtttgccgacacggcgcacaaaacacacggccggtcgatgattatcctcggtgccggggtgaaccactggtaccacatggacatgaactaccgcgggatgatcaacatgctggtgttctgcggctgcgtgggtcaaagcggtggcggctggtcacactatgtgggtcaggagaagttgcgtccgcaaaccggctggctgccgctggcgtttgcgctggactggaaccgtcccccgcgccagatgaacagtacgtcgtacttctacaaccacgcctgtcagtggcgttatgaaaaactgaccgcgcaggagttactctctccgctggcggacgcgacaaaattcaccggtcacctgatcgattttaacgtccgggcagagcgtatgggctggctgccctcggcaccgcagctaaacctcaatccgttgcacattaaagcccgggccgacgccgccggcatgaccccgcaggagtacaccgtgcaggcattaaaatcgggcgatatacgtttcgcctgcgaacagcctgacaacggtaaaaaccacccgcgcaatctgtttgtctggcggtctaacctgcttggttcttcggggaaaggtcacgagtacatgctcaaatacctgctcggtactgaaagcggcattcagggcgaggatttagggtcgacggatgacgttaagcccgaagaggtggagtggcaaactcaggccattgagggcaagcttgacctgctggtgacactcgatttccgcatgtccagcacctgcctgttctccgatatcgtgctgcccaccgcgacatggtatgaaaaagacgacatgaatacgtcggatatgcatccgtttattcatccgctttcagctgccgtcgacccggcctgggaatcccgcagcgactgggagatctacaaaggtattgccagcgttttctcagaggtgtgcgtcggccatcttggcaccgaaacggacgtggtactgcagccgctgcagcacgactccccgggggaactgtcacagccgtttgatattcaggactggcgcaaaggcgaatgcgatctcattccgggtaaaacggcgccgacgattgcggtggtcgaacgacattatccggaaacctacgagcgctttacttcactcggcccgctgatggacaaactcggcaacggcggaaaaggcatttcatggaatacccagagcgaggtcgatttccttggcaagctgaactacgtcaagctcgatggcccggcaaaaggacgcccgcgtattgaaacggcgattgacgcctctgaagtgatcctcgccctcgcccctgaaacgaatggccaggtggcagtgcgagcctggcaagcgctgggcgaactgaccggtcgcgatcacacccatctggcgctgaacaaagaagatgagaaaatccgcttccgcgatattcaggcccagccgcggaaaattatctccagccccacctggtcgggccttgagagcgagcatgtctcctataacgccggttataccaacgttcacgagcttattccctggcgcaccctttccggtcgtcagcagctgtatcaggaccatccgtggatgcgcgcgttcggggagagtctggtggcctatcgcccaccgattgatacccgaagcgttagccatatgcgcgaaatcccgccgaacggctttcctgagaaggcgctgaacttcctgacgccacaccagaaatggggcattcactcgacctacagtgaaaacctgctgatgcaaacgctgtcacgcggggggcctatcgtctggatcagcgaaaccgatgccagagagttaggcattgaggataacgactggatcgaagccttcaacgccaacggggccctgaccgcccgggcagtggtgagccagcgcgtcccgccgggcatgaccatgatgtaccacgcgcaggaacgtatcctgaatattccgggttcagaagtcaccggtcgtcgcggcgggatccataactcggtgacgcgcgtctgtcccaaaccgacacacatgattggcggctacgcccagctggcgtacagcttcaactattacggcaccgtcggctctaaccgcgacgagttcatcatgatccgcaaaatgaaaaacattaactggctggatggcgaaggtcgggatcaggtacaggaggcgaaaaaatga

SEQ ID NO: 123131 - DNA, 1386 bp, Enterobacter cloacae
atgtcacaacaaagtgagaagaataatccttatctgctgagcaactggaaacccgaaaatgcgcaattctgggagaataaaggaaaacatattgcccgaagaaatcttttaatttctgtggcttgcctgttattagcgttttgcgtatggatgttatttagtgccattgcggtcaatctgaataaagttggatttaatttttccaccgaccagctttttatgctaacagccttaccctccctgtccggtgcgatattgcgcgtcccctattcgtttatggttcctctctttggtggacgctactggacggtgttaagcacggtgatcctgattgttccctgcgtctggttagggatcgcgattcaggacactgccactccctactggatctttatcgtcatcgcgctgctgtgtggttttgccggcgctaacttcgcctccagcatgggcaatatcagcttcttcttcccgaaaacgaaacagggtagcgccctggggattaacggcgggctggggaatctgggcgtgagcgtaatgcagctggtcgcgccgctggtgatcttcctgcccatgttcacctttctcggcgtaaacggcgtgccgcaggatgacggctcaacgatgtggctggccaatgccgcgtggatttgggcgccccttctcctgctggccacgattgcggcgtttttcggcatgaatgacatcgcgagctctaaggccacgattgccagccagctaccggtgttaaaacgttttcacctgtggctcctgagcctcctctacctggcaaccttcggttcgtttatcggtttttcagcaggcttcgccatgctgtcgaaaacccagtttcctgacgtcaatatcctccatctggctttctttggcccactgattggcgcgctggcccgttctgcgggcgggatgatctcagacaaactcggcggcgtacgcgtcaccctgattaacttcgtctttatggcgcttttcagcgccctgcttttcctgacgcttcccggttccgggtcgggcagttttctcgccttctatctggtctttatgggtctgttcctcaccgccggactgggcagcgggtcaacgtttcagatgattgccatcattttccgccaaatcaccctcacccgcgtgaagcaacaagggggaagtgacgagcaggcgcagcatgaagcagtcaccgaaaccgcggcagcgctgggctttatctccgccatcggtgccgtcggcgggttcttcattccgaaagccttcggcacgtcgctggccatgaccggctcgcctgtgggtgccatgaaagttttcctcgtgttttacatcgtctgcgtcctggtgacctggctggtttatggccgcaaatcttcacaacaataa

SEQ ID NO: 123132 - DNA, 576 bp, Enterobacter cloacae
atgcgatatctgagcaaggatgaaaggcgggaagagattttacaggccgctatgcgcgtggcgctctctgacggactttccgcaatgacggtacggcgaattgccgccgaagccggcgtcgccaccggacaggtccaccaccatttcacctctggcggggagctaaaatcgctggcttttgtgcggttaatccgtgaactgctggatgcggatgtggtcggcaagcaggccagctggcgacagcagctgcatgccatgctcggcagcgatgatggccggtttgagccctatattcgcctgtggcgtgaggcgcagatcctggcaagccgggatacggacatcaggggcgcatatgtactgaccatggagatgtggcaccaggagaccgtcgcccttatcaaagcaggcactgacgcgggagattttaccccgggcgatcggccagaaaatattgcctggcgtttaattggtctggtgtgtggcttggacggcatttatatattagatatcccagagatggacgacgctgcctttaataaccatcttgataaattaatctctctggaattgtgttaa

SEQ ID NO: 123133 - DNA, 459 bp, Enterobacter cloacae
atgcatattttcaaaggacgctgcctgtgtgggatgagccaattcagcgtttccctcaacaatttcgacgtctatgcctgccactgtacccagtgccagaaatggtcggggggaatggccatgtatctggaagcgcaggggcaaccgcttgtggaagaagagtcgatagccccttctcatttcacgtcatctgcgcgcggcgaacgctggttttgtcccggatgcggttgcccgctgtggttcacgctgaccgcacgctcaacgacgcgctatttcattccctggacacagcttgagatgagcgaagacgaacgtcgccgtctgatacttgccgctgaaatctatacagaaacgcaacccgcattctttggcctgaccgggcaatacgcacgctttagcggcaccgaaattgaagcacacgacaagcgctgcctgctgactccccatgacgcacactga

SEQ ID NO: 123134 - DNA, 1074 bp, Enterobacter cloacae
atgaaacttaaattagttgcagtggcagtgacttccatgttggcagcaggcgttgtaaacgcggctgaagtttttaacaaagacggtaacaaactggatctgtacggcaaagtaacaggtctgcactatttctctgatgacgctggcaacgacggcgacaaaacctatgttcgtctgggcttcaaaggtgaaactcagatcaacgaccagatgaccggttatggccagtgggaatacgagttcaaaggcaaccgctctgaatctcagggttctgacggcaacaaaacccgtctggcattcgcgggcctgaaattcaacgaattcggttctttcgactacggtcgtaactacggtgttgcttacgacatcggcgcatggactgacgttctgccagaattcggtggtgatacctggactcagactgatggctttatgactggccgtacgactggcgttgcaacttaccgtaacaccgacttcttcggtctggttgatggcctgaacgtggctgctcagtaccagggtaaaaacgaccgtaacgacatcaccgaagcgaacggtgacggctggggtctgtcttctacttatgaattcgaaggcttcggtgtaggtgctacctacgcgaaatctgaccgtactgaccgtcaggttgctgctgcaagcaatctgaatgcaggcggcgaaaacgcggaagtatgggctgcgggtctgaagtacgatgccaacaacatctacctggcaaccacctactctgaaacccgtaacatgaccaacttcggtagcggtttcatcgctaacaaagcgcagaacttcgaagtggttgctcagtaccagttcgacttcggtctgcgtccatccattgcttacctgaaatccaaaggtaaagacattggtacttacggcgaccaggatctggttgaatacgttgacgttggcgcgagctactacttcaacaaaaacatgtctacctacgttgattacaaaatcaacctggttgacgacagcagcttcactaaagcagctggtgtttctaccgacaacatcgttgctgttggtctgacctaccagttctaa

SEQ ID NO: 123135 - DNA, 819 bp, Enterobacter cloacae
atgggaagcaagaagaaaaccagtgtcgcagttgatgtcataaagcatgagccgttaaaaacgaaagagtatgaaaaagaacttcgtcgcctccacgttgaactggttaaactccagcagtgggtcgtcgcaaagggattaaaggtctgcattgtctttgaagggcgcgacggtgccggtaaaggcggaaccattaaagccatcactgaacgcgttagcccacgcatcttccgggttgttgcgctccccgccccgacggaaaaagagaagacccagctctattttcagcgctatgttccccacctgccagccgccggcgaaattgtcatttttgaccgcagctggtacaaccgtgcgggcgttgaacgggtgatgggattctgcacaccggagcaggtcgagaagtttcttgatggcacgccggtgatggaaaaagcaatggtggatgccgggatcatcctgctcaaatactggctggaggtcacgccaaaagaacaggagcgtcgtctgcgcgatcgtattaacgacgggcgaaagacctggaaattatcgccaatggacattaagtctttcaatttgtgggatgaatataccgtggcgcgagatgcgatgtttgctgccaccgacaccgcctgggcgccgtggtttgtcgcccgttcggaagataaaaaacgcgtgcgcctgaacattatttcgcacctgctggcgcaaatcccgtacaaagccattcacatcgaagcggtgagtttgccgaagcgtaagattggtaaagtgaagccgacccaatacccgttccggtatgttgaagagcgtttttga

SEQ ID NO: 123136 - DNA, 537 bp, Enterobacter cloacae
atgaaatggttgaagtttgcgcttttaagcacagcattgatttcttcacaggcaatgtctgccagatgggtgctaacctatgcaaaagatgagatgcgcggtacaacagaaaagataatacagactgaatcacaacgccctgttgatttaatgccgccatatcaaggcggatcatggttagctatggttttgcgctctccaagagttgaacttaaagagggtgaaaaccctgacaatattgagcttgataaagcaatcctgattataactaaaggtcaattcaattgccctctaagtgatggctgccatatcactgtaaaatttgataacgagaaaatacaaaagtacaaaacccttaagccaaataatggcagtaccgatattatttacttagaaaaaccaaaagaatttcttgatgacatagcgaaacataaaaagcttattatcgaggcagatttttatcaatcgggtgttcgtcagttcacattcgatttgaatggatactcaaacccgttcataaacccggaatcagaataa

SEQ ID NO: 123137 - DNA, 249 bp, Enterobacter cloacae
atgggattctcagagcgcctggcgcaggcaatgaaacatgccggttatacacagggccgcttagccaaagatgtaggcatggctcaatccagcgttaaagcgttaataagctacttaatgacgcaaacggttcgcgtaaaaccgttgagatcgcctctgttctgggtgtgcgtccggagtgctgtctactggccaaggggaaatggcttccgatggcgcaagagaaacgacagcgctataccagattaa

SEQ ID NO: 123138 - DNA, 213 bp, Enterobacter cloacae
atgcagaaagtgtttcgctggattgatggcgataccgagtacgccgccaacaacattcgccagctggctccggcaatcatgtccgtcctaccgctggagtatcgcacgcgcctggtgcctaagaacgacacggtgtctctgatcgcttcagcaatgaaagagtgtgcccaggccaagcaatgctgctggacgctccagagcaccagatgctga

SEQ ID NO: 123139 - DNA, 132 bp, Enterobacter cloacae
atgctgctggacgctccagagcaccagatgctgaaagaggtaagcgagggtatagcgtcgctgttctgcctcatgccggagcaggtagggccgttgataacgatggtcacgtcgatgcaggggcttatgtga

SEQ ID NO: 123140 - DNA, 1098 bp, Enterobacter cloacae
atgcgtatccaatcaatagactacttacgtggcgctatgtcacttagtattgttttttatcattttttttatcagttcactgattggggggtgacagattctggcactctgttgggacgcttgggaatttacgccgtgtctgcattttatatcattagcggcatggctctttatctcgcgcatcatcgcgacaaatggtgtgctggtcagtatctgaagtttctcgtcagacgattttttaggttggccccaacctattgggttgcgcttatcttcgctactgcattcggtgtgctctttgtaaacggcttctttatagatgtctggaagtacgcacaaaatgtacttttgatctttggaatcacgaacccaacggaatacataatcatggggggatggtctataggaaacgaagtcgtattttacctgctgtttccggtgtttattcttgctacaaaatgggtgtcgtcacttgtacttatgggggggctattaatagtaactctcatccatagcgccttctttttcctggattctcatcaaaccctcgccagacagtgggcagactatatcaatccgctgaaccaaatttacttttttatcgcaggagtgatactggctaaaatcctgctcccctatgtgggtaaacgaaaaggactgttgtttttggcagttatggggttagcagttgtctttacgctttatcctgtaacaggtaaccagataaatattgtcacgggtattaacaagctggtgtttgttttacttacggtactgttgtgcgccgttgtttttttgatcggcgatctgctgtcggtgagatatgttcatgctgtgctgaagtttttaggcgatgtgtcctaccccttgtatcttctgcatggcgtatcttttgcgtatttccaaaaatttattttttataggggaatgtcagattcaacacttttcgcctacgcttctgtcctcctgatgatactgctaattctgtcgtggttttgtcatgtctgtgtagaaaaaccagcaatacgggttagccagtatatgaaaattaacgggagtgccgatggcttgatacaagggaacagaagacggtcatga

SEQ ID NO: 123141 - DNA, 1014 bp, Enterobacter cloacae
atggataaaaatagtccaaacattaatttactaaagatagttgcaagctttatggtgatgctcatccatgtatccgctgttaacttcccaaaactcggtaaagaagaatgggacgtttctaatttttataattcattctcacgtgtttgcgtcccaatcttcttcatgatctctggttatttccttatcacaagagaggaatccgctacagccttctacaagaagagatttacaaaaataatccctcctcttgttttctggagtggtgttttctatttatataattatctgtatgtagggattccgctttacaacgcaacagagttatttaaccgcccagcgtctgcacatctttggtttctatatgccatgttcgggctttatttattcactcctttcatatcaaaaatatataacaatagtagcgcgaaagaaaggttgatttttatttgcatttggtttgtggcatcttctgtaattcctatagttaactcaacctttggaatgactgttagtacaggattatttcagctaacaactatatatggatatataggcttctttttcattggtgcgtggataaaagataatcaacctgaaagggataatttcgcggctgttgcagcactgtttttatacatactattaagcttgcttaccatatacctaacaaaacaatttagttatagctctggcaagcctaacgggacgttctatagttacctatcaccttttgtagttataggtgcgatagcattattttatttctttatttccattgaattgaataatgccattatagttaagattgccaatatgttttcttcttttgctttaggggtttactgcatacacaccttgttcatattgcctttagcgaaagaattccatataggtggagatgttaacccaacggaatactacatacttataactacacttatagtgtttttcacatcctgcatattttcttacttcggttcaaaaattccatttgtgaaaagaatgttttaa

SEQ ID NO: 123142 - DNA, 243 bp, Enterobacter cloacae
atggatgatgtgcgtaacaacaccaacaacacgaacgtcatctactgcatcactttctattgcctgaccatcatcagtaatgagcgcgtcaccagcccaataggcgtgctgctggcggccgcaaaaccaaatgagcagtgtgtctccgcgcttaaacagcgtcgagttatcaattacatcatacccttccggcgtttcaacgatgtttgcagaaggaggaatgaatggctttatgaccgctaa

SEQ ID NO: 123143 - DNA, 330 bp, Enterobacter cloacae
atgaagttgctcacaccaacgcaggatagccgcgacattatcaaagccgcggtaaagtgcctggacaaaatttggcaggatgggcaccgataccagaaagccgtcattatgctcggcgatttcttcagccagggcgtggcgcagctcaatttattcgacgagaatgcgccgcgggcaggtagcgagaggttgatggagatactcgatcacctgaatgcgaaagatggaaaaggaacactccattttgctgggcagggcgttcagcagcagtggcagatgaagcgtaaaatgctttctccgcggtatacgaccgcttccaagatttattaa

SEQ ID NO: 123144 - DNA, 408 bp, Enterobacter cloacae
atgttaaaacctattcttgcattagcagtacttaccttgtctgggtgtgcaattattcaggaaccgccaaaacatggtacccctgacgctgtatatacaaccaagagcgatacaaaaagcgttgcattatgcattgctgatgtatttgcagattacgacccttacattttaccaggctataaagaagaattttggggttataagcttgcatattccgccgggccatatggcgaagctgaaatttacaggaaaaataatgttaccactgtgaattattttgagcagaataattcagataagaaaatggtaaagcatcttaaagacggcattcaaaaatgcgtaaccaaggtgtacgacatgactccagtgggtggtaagcagccagatggaagcgtaaaactttggtaa

SEQ ID NO: 123145 - DNA, 156 bp, Enterobacter cloacae
atggtgacgtctgcaactgataaagcgctggtcgacattcacgaccgccggccgctggtcctgtcgccagaagcggcccgggaatggatgcgccaggacgttggcgggaaagaagctgaggaaataattgccgacggcacagtggtcgccgactag

SEQ ID NO: 123146 - DNA, 1179 bp, Enterobacter cloacae
atgaaaaagacaattttttcgttggcacttggcacgtttggcctgggaatggctgaatttggcattatgggcgtattaactgaactggcccatgacaccggaatttcaattcccgccgccgggaatatgatttcgttttacgcctttggtgtggtgattggtgccccgattgtggcgctgttctcaggcaagttctcgttaaaatccacgctgttgtttctggtggtgctgtgcgccgtcggtaatgcgatttttaccttttcaacgtcgtatgcctggctggcgatagggcggctgatttccggttttccgcacggcgccatttttggcgtcggggcgattattctctcgagaattgcgcctccggggaaggtgacggtcgccgtggcgggcatgatagccggcatgacggttgccaatctggtgggcgtaccgctgggcacctggctgggtcatgaattcagctggcgctatacctttttcctgattgccctgtttgatgctctggtgatcatctcggtactggtctgggtgccgcacatccatgatcgctccgaaatcaaattgaccgcgcaattttcctttctgaaaaaaccggagccgtggctgatttttgccgccaccatgtttggcaatgctggcgtgtttgcgtggttcagcttcgtcaaaccgtttatggtcaacgtctctggcttctccgaaggcgtcatgacggtcatcatgatgctgatggggctgggtatggtgttaggtaatctcctgagcgggaaattatcgggtcgcttcagtccgctgcgtattgccgccaccaccgacatggtcattgtcgcgtcactgctgttgctgttcgcttttggggaacataaaacggcgtcgctggtgatgggctttatctgctgcgccgggctgtttgcactctctgcgccgctgcaaattcttctcctgcaaaatgcgaagggcggtgagatgttgggtgccgcaggcgggcagatggcatttaacctcggcagtgcgataggggcgtattttggcgggatgatgatcacgctaggctttagctggagctatgtcacgctgccagcggctgtgctctctttctcagccatgagttcactgctgatctacgcgcaccttcgggccagaaaggcagacgccggttcgctcgcttccgcacgttga

SEQ ID NO: 123147 - DNA, 1203 bp, Enterobacter cloacae
atgaagaagcagattttaattgtgggcagtggtttttccggcatgtgggctgcagtcagtgccgcgcgtctgaatgcgctggagggcaataacagcctgaagatcgccgtgctggcacccgcccccgagttgcgtgttcgcccgcgcttctatgaagagaacgtgacgtcgctggtctcgccgctgaccggactgttcgctgaactgggtattgattttatcgccggtaaagcagaattcattgatataaaagggaaaagtgtttcctatcgtgatgcgaatggcgtaactgccgcagtgagttacgagcggttagtgctggccaccggcagtcagagcaagcgtccaccgattgccgggctggctgagtacgcctttgatatcgatcagcttgaatccgcacagacctttgagcagcatcttgactccctggtctcgcgcccttccaccgctgcgcgcaataccgtggttatctgtggcggcggttttaccggcattgaactggcaaccgagcttcctgcccgactgcgcgctcgcttcggtgatgatacggcgacaagagttatcgtagttgaaaggggtcatgtcattggcggacgatacagtgaagcattgcgtaacaccattgaagacgcgagccaggaactggggattgagtggcgtctgaacagtgaaattgaggccatcgatgcgaacggcgtaacgctgaaaaacggcgaacgtatccccgctgcaaccgtagtctggacggcaggcgttgaagcaaacccgcttggacaacagattaacggcgaacgcgataaccaggggcgtctgaaagtgacagaaacgctgcaggttccggctcatccggacgtgtacgcgacgggagatatggcctacgccagaacggacgagatggggaacacggcgctaatgacctgccagcacgcgatccagttgggtaaatttgccggccacaacgcggcagccagcctgttgaatcgcacgccttatccttaccgccaggttaactacgtgacctgtctggacctgggtgcctggggtgccgtttacactgaagggtgggaccaggccgtcaaatcggtgcgtgatgacgcaaagaaaatcaaaatcgccatcaccaatgaacttatctacccgccagcagcggacaaagccgtggcgtttgccgctgccgatccgttggcgaaatttgtctag

SEQ ID NO: 123148 - DNA, 855 bp, Enterobacter cloacae
atgatgaagctcactcgccttgcactgctatgcaccctcttcacgccggcggtctttgccgcaccgttgaccattgatacctggaacccgcaggagaaaggcatttttgcggtctcgtcgacgctggtgtccggcccgaaagaggccgtcctgtttgacgcgcagttcagcgtgaaagacggtgaagcactggtggagaaaattcgccgcagcggtaaaaccctgaacaagattgtgatcacctccggcgatccggacttctactttggtctgcagccgctggttaaagcgttcccgaatgcgaaagtcgtggcgactcagcaggtggttgaccatatcaaggccaccaaagatgccaagctggccttctggggcccacagatgaaagacggcgcgccaactacgctgatcgttccccaagtgctgacctccaccacgtttatggttgatggtgagaaaatcgatattgaacagccagacagctacgcggcctatgtctggatcccatcagcgaagacgattcttggcggcacgggcgtttcatggggcatccatctgtggacggccgatacccagacccgcgcacgtcgccagcagtggcaggacacgctggaaaacatggcggcgcacaaacctgagcgcgtgatcccgggtcactatctggggacgccaccgtcaggtaccggcgctatcgattttacccgtgaatatctgcagcggttcgagcagacgctggctaatcacaaagattctgctggcgtcattagcgccatgaaaaaagcgtatccgggcctggccgaagagagctcgctggaattaagtgcgaaagtgaataccggcgaaatgaaatggtaa

SEQ ID NO: 123149 - DNA, 960 bp, Enterobacter cloacae
atgatgctaaacaccaggcttgtcgtggcactgaccacgctcgccgtgacgctccccctctttgccagcacgccggagaattttatctataccagctcgggcgaccttgatgccgccgccgcgtttatcgcccgtcgtgatatcggtggcgcgcagattgtttataactggcgtgcactggagcctgagaaagacagatatgacttctcacccatagagcgagacctggcgcgcctgaaggccagcgataaaaagctgtttattcaaattcaggatcgcttcttcgaaaaagatgcccggtatgtccctgattatctgatggcagacacgaagtacagcggcggtatttctccgcagtttgacaaccctggtgaagggaaaccaacaggttcaggctgggtagcccggcagtgggatcctgccgtgcgtgaacggtatcaggccttactggcagccctggcgaagcgttttgatggccaggtttacggtgtgaacttaccggaaaccgcgattgaccttgatgagaaaaagccgccgacaggattttcgtgcgacaactattttgccggagaaatggaaaacctcgcctttgcgcgaaaggttttcacgcaatcccatgtcgtacaatatgtgaacttctggccgtgtgaatggaacaatgaccataattacatggggcggctgtttgaatacgccagtgcccataatatcgggcttggcggaccggatattgttcccaaccgcaaggcgcaaatgaaaaacgcctatccgttctttaaccagtataaaaacaaactgccgctggtcgccatggccgttcaggagcccacgctcacctaccgaaacccggctaccggcaagcccttcaccaaagatgaatttgttcagttcgcagaagcgtatctcggcgcagatattattttctggagcacgacgtcgccctggctgacgacgaaataa

SEQ ID NO: 123150 - DNA, 420 bp, Enterobacter cloacae
atgccaaacagcacggttattaagtggctgcacagagcgctaactgccgcgctgctggtttttgtagggtttcagtattttgcaaaccagtcaccggatgatgacctttactcacaacaacaaattacacccgaggtctatttgtacgttacaaagtacaaaggcgggggtgcgacggtttcagatgtttatcgctattacctggacacaaaactgcaggataatctgttggagcacctgaagaaacgctcaccctttatggtagctgacactggcgacgccaaaatctctggctacggctctcacgtcaatgtaaacctcaccgggcgtgtttattcgtttacgaattcagatctcttttacgcaggtaatgtggccatcatgcccattatcagccttaacgcaaccggcacgcgttaa

SEQ ID NO: 123151 - DNA, 297 bp, Enterobacter cloacae
atggctgtattgccacaaatgccgagtggaggcacaaggttaattgatagcaatatgcgtgaagctagcacgcatggcgcagggcggaatatggcgctaccgcaaacctattactggttctatcaacaggtcaaaaatcgtggcccgtgggattacaaacagcaacgccgtgacctggctaattttggtaattttaattatggggccaccgggtttgcagcagggataccagaagcaaccttgtatatgggcgcgggttttgcacaaagccgggcgggaacgtcgaagccgcaatga

SEQ ID NO: 123152 - DNA, 906 bp, Enterobacter cloacae
atggaccagctcatggcaatgcgcgcatttacgcgggtggtggaaaccggaagttttacgcgtgcggctgattctctgaatatgcctatcgccaccctgagcaagctggtgaaatcgctcgaagcgcacctggagatccggcttttacatcgcacaacacgacgggtagtcaccacaccggagggtgccgggtactatgaaaaagcgctcagggtgctgattgatattgaagatatcgatacgtcgtttcgcgtttctcgcgcgacgccgaaaggccatctgcgcgtggatgtgggcggttcaactgcgcgcgacgtgctgatccccctgctgccggattttatgcagcgttacccggaaatacgcatcgaccttggcgtggccgaccggcccgtggatttgatcagcggtaacgttgactgcgtgatccgcggcggccctctggacgactcctcccttattgcccgtcatctgggcgacgctgaaatggtcacctgcgcgacgtccgattatttaaaacatcatggcgtaccggcctacccgcgggagctgtgcaatggccataagctgattagctacctttctcccgtcaccggtcgggcgttcccgtttcgcttcagggaaaagggagaaaggctggagataagcgttccgcacttccttggggtgaatgaaagcaacgctcatctggcggcggtggtggcaggtttaggcattattcagacgtttcagtattcggcaaaaaggcatttacaggcggggtcgttaactgaaattcttagcgactggcgacctgacgcttatccgtttcatgtggtttatccgcagaaccggcatctgacacatcgactgagagtgtttatcgcctggctggcagaggtgtttcctgacgcgctgaagggatag

SEQ ID NO: 123153 - DNA, 930 bp, Enterobacter cloacae
atgtctgacattttgcttgaactggatagcgtgcatgtcaactttcccgcgcgcaaaaactggttgggccgcgtcacggaacaggtgcatgccctcaacgggctggacctgcagatccgtcgcggcgaaacgctgggcattgtaggggaatccggctgcgggaaaagcacgctggcacagctattgatgggcatgctcaggcccagcaccggcgactatcagcggacgcatcacgcgggcggcatgcagatggtttttcaggacccgctctcttccctcgacccgcgtttaccggtgtggcgcatcatcaccgagccggtgtgggtgcaaaaacgcagcagtgaacgcgaacggcgccagcttgcagagacgctggcgatgcaggtgggtattcgtgcggaatatcttgaccggttaccgcatgccttttcaggcgggcagcgccagcgcattgctatcgcccgggcgctgtcgtccaatccagacatcatcgtgctcgacgaacccaccagcgcgctggatatttccgtgcaggcgcaaatcctcaacctgctggtaaaactgcagcaggaacggaacctcacctatgtgttgatctcacataacgtctcggtggtcagacacatgagcgatcgtgtggcggtgatgtatctgggccagatcgtggaactgggaaccaccgatcaggtgcttgtcaggccgcgccatccctacacccggctgctgcttgattccgttcccagaaccggtgaaccgctggatgaaaacctggcgctgcgtaaaacagagcttcctggcaatcgtcaccttcccaccggctgttttttccgggaccgctgtccgcaggcagcgcaagggtgcgagcgcccgcagtcgctacagccttcagttgagggctgtagcgtgcgctgctggcgcaatctgagctaa

SEQ ID NO: 123154 - DNA, 576 bp, Enterobacter cloacae
atgcccccagagagtgaactgattgatgtggcgaagaccttccctgcgctgcatatcgatctgaaatatgccacagccgacaacatcacgggccgtccgatttatcaggaggcgctgtgcctgctgcataccgatgcggccaccgcgctggcgaaagccatcagcatcgccgcactggccgggctgaagctggtggtctacgacgcttatcgtccgcaggaagcgcaggctcagttgtgggatgcctgcccgaacccggaatacgtggttgatgtggcgattggttccaaccacagccgcgggacggccatcgacgttacgctgatggacgaacagaacaccgtgctggatatgggggccggttttgacgaaatgcacgatcgctcgcatgcctggcacccgtccgtgccgccgcacgcgcagcgcaatcgcctgctgcttaacgccatcatgtccggtggcggctttgtggggatcagcagcgaatggtggcacttcgagctgccgaacgcggccagctatcccctgcttgacgatcgttttgcctgtttcccgttgacgcacacccctctttaa

SEQ ID NO: 123155 - DNA, 1482 bp, Enterobacter cloacae
atggcgaacttgccctggcgtatcagcgtgcgcctgatggcgctcgcaaagaaaatggcgatgatcgcaggagtggtactgatcgtcctgctcgcggttcgggtttatctctcgcagcaggggccggaactgcatctctggcatacctggcgggcagatgagatgtccgtacgcgagatcgataaggcgaatattgctcagtatgtcgcccgggaaaacgccattttcaccgatctggataacgcggtaacgcgcaaaacccagggtgaggaacgcacgccgttaaaccgctactaccgtcagagcctggtttggcccggtaaattttcacccgatgctaaccgctcctttgtgctgatgcccgccggaacgccacgcggcgcggtggtgttgctgcacgggctaacagattcgccttacagtgtccggcatcttgcccgtgattatcagcagcacggttttgtggcggtggtcccacgcctgcccggacacggcaccgcgcccggcgcgctgacggacgttgactgggagaggtggctggcggcgacgcgccttgccgtgcgcgaagccacgcggctggcgggagacaacgttcccctgcatctggtgggttactccaacggtggggcgctggcgatgaaatatgcccttgatgcgctggacacgcctgcgcttcgcaaaccgcaacagctcattctgctctcgccaatgattggcgtcacggcgttcgcccggtttgcaggattggccggattgccggcgatgttaccgccgtttgccaaagcggcatggttaaacatctcgccggaatataacccgtataaatacaactccttcccggtcaatgcggcgcgccagtcatggctcttgacccaggccctgcaggagcaaatggggcgggatgcccgggagcacagactggaccagctgccgccggtactcgcattccagtcggtgatggattcaacggtcagcacccgcgccgtggtcaccggcttatttgacctgcttccggcgaacggcagcgagctggttgtatttgatatcaatcaggccgccagcttccgtcctctctttaaaccgtcgtcgtgggcggcgacctctgagttactgcctgtggcgaaaaggcgttacggtgtcacgattattaccaatgccagcgcggacagtttcgccgcggtggcgaaaataaccccggcgggaggcaccgatgagaccgcggtaccgctggcgatgtcctggccgcaggaggtctattcactgtcgcatgtcgccgtgccgttcccgcctgatgacgatctctatggccgacatcctgcggagaaaaaccgctatggcattagcctcggcacgattgcgctgaggggggaaacctccgtgctgagtgtaggcaaagacgcgttaatgcgggtgacctcgaacccgttttatgcctacatgcaggagaggattgacagacgcatcggggatgagaaaaagtag

SEQ ID NO: 123156 - DNA, 906 bp, Enterobacter cloacae
atgcaaaaaatctgggtacttggcgatgcggtagtggatttattaccggagggagaaggccggttgctgcaatgccccggcggcgcgccggcgaacgtggcggtcggtattgcccgtctgggcgggaaaagcgcctttatcggcagggtcggcgacgatcctttcggtcgctttatgcataaaacgctggctgacgagcaggttgacgtaaagtggatgcgcctcgacccggcacaccgcacgtcaaccgtggtcgtggatctggacgaacagggcgaacgctctttcacctttatggttcgcccgagcgccgatctgtttctggcgtcagccgacctgccaccctttagcgcaggagagtggctgcatgtctgttccattgccctgagcgctgagccgagccgttctgcaacgtttcaggccatgaacgcggtcagggaagcgggggggtatgtcagtttcgaccccaatattcgcccggatctctggccggatgaggacgacctgcgccgctgcctcgaacaggcgctgcaatgcgctgacgtcgtcaaactctccgtcgaagaactggcttttctaaccgccgatcttggggtcacggaagggctggccgcgctgatgcgccgctgtccggcccggctggtgctggtcactgagggcaaagacggggtcatcgcctggcatgacggaacgatgaagcattatccggcaacccccgttgaatgcgtggacaccaccggcgcaggtgatgccttcgtggcgggactgctttatggactggcttccgctgggagcattgacagccacgatcttccacgcgtgatcgcattagcccagcgctgcggcgcgttagccaccacggctaaaggggcgatgaccgcgctgccttatcacccgcaactgtaa

SEQ ID NO: 123157 - DNA, 1407 bp, Enterobacter cloacae
atgacgttaccttcccgctggcctgcaatcctgcaggccgtcatgaaaggccagccgcgtgcgtacgccgacagccattatccgcaatggcatccggcaccggtgacggggctaatgaacgatcctaacgggtttatctggtttgccgggcgctaccacctgttctatcagtggaacccattggattgcgaccatcgctataagtgctggggacactggagctccgcagacctggtgcactggcagcatgaaccgatggcgctgatgcccgatgaggagtatgaccgcaacggctgctattccggcagcgccgtcgataacaacggtgtcctgacgttgtgttataccggcaacgtgaaatttgatgatggcagccgcaccgcctggcagtgccttgccacgcaacaggctgacggtacgttcaaaaaactcgatccggttcttgcgctgccggaaggctacaccggccacgtgcgtgacccgaaagtgtggcagcacgacggggtgtggtacatggtactgggggcgcaggatctgcaaaaacgcggcaaggtgctgctgttcacatctgccgatttgcaccactgggcgtcttgcggagagattgccggtcatggcgtgaacggcctgaccgaggcgggatacatgtgggagtgcccggacctgtttgccctcgacgggacacacgtattgatctgctgtccgcaggggctggcgcgcgaaccacatcgctatctcaatacttatccggccacgtggatgagcggggcgttcgaccatacccgcgcttcgtttgaacatggcgagttgcacgagctggacgccggtttcgagttctacgctccccaaaccacggtggcggaagacggacggcggatcctgatcggctggatgggcgtgccggacggagaagagatgcttcagcccacacgggcgcaggggtggatccatcagatgacctgcccgcgagaattacacttccgtgacggcaaactgtggcagacgccggtgcgcgaactgcacgcactgcgtgaagaggaatgtcgctggcagggtaacgccagcgatgccccggctcttgatgcgacgcgccttgagttcgagctcacctcatcttcagtaaccgtggatttcgccggtgcattgcgccttatcatcgaggacagcgggttgcgtctggaacgcgccagcctgaaaaccggggagacattgacccgttactggcggggcgacgttcatcatttacgcgttctgtgtgacagctccagcgttgaaattttcatcaatcatggcgaaggggtgatgagtagccgctattttcctgaccatccggcacgggtgcgattcgaaggtgggtccgacatcacattacgctactggtcgctgcgcggctgcatggtagaataa

SEQ ID NO: 123158 - DNA, 1011 bp, Enterobacter cloacae
atgtctgttaaaaagctcgatgatggtcgatatgaagtggacattagaccgagcgggcgtaacggaaaacgcatccgtcggaagttcgacaagaaaagcgaggcgatggcttttgaaaagcacactcaatataaccatcactcaaaggaatggctctcaaaaccaacggacaaacgccaattgtcagaactgaaagagttgtggtggaagctaaaaggtaaacatgaggagcacggtcaatcgtatctcaggaaaattgagcgtttcgaaacgatgaccggtaacccatgcgctttccagatcaccaagagcctgataacgcaatattgtgctcaacgccgggctgaaggtattaagccaactaccatcaaccgcgacctgattacattaggtgggatgtttactaccctgattgagtcagaaatgtataacggcgagcatccgtttagggggttcaaaaaactgaaagagcagactgccgaaacgggctatctcactcttgaggaaattgacgccttactggccgcgctatcaggagataatcgtaaaattgccgtcttgtgtctgagtaccggggcaagatggggtgaggctgcaaggctgaaagcggagaacgtgattcataaccgggtgtctttcgttaagacgaaaaccaacacaccacgcacggtcccgatctctgatgacgctgcggcttacgtagtcggcaaaacacgaggctttctgtttcctgaggccagttatgctgacttcaggcgaaccctcaaagaggttaagcccgatttaccggccgggcaagcgacacatgcgctacgacactctttcgccacgcactttatgattaacgggggcaacatcatcacactgcagaggatcttaggtcatacgaaaattgcgcagacaatggtctatgcgcacttcgctcctcagtacctgcaggacgcgatttcgcttaatccgttgaagggtgctaatggtggtcagagtgtccacaatgtgtccacaccctag

SEQ ID NO: 123159 - DNA, 297 bp, Enterobacter cloacae
atgatacccgtaaatgaaaagctagcgatcatgcgtgagtcagaacgtatgaatagaaaagaattcagtgacttaacaggcgttccatacagctctctttcgagttacgaaaagggtgtaaaagatatgggcatacaggcggtgatgaagattttgaatcatcctcagttcaaaaaatacactatgtggttcatgacagagacgatatcacctgaagctgggcagattgcaccggctctcgcgcactttgggcagcagacaacaacgtcaccccactcagaccagaaaactggctaa

SEQ ID NO: 123160 - DNA, 240 bp, Enterobacter cloacae
atgtcaaaaccaataaaacatggctgcattcgtcatatcactaatggtatgcgggtgctgatcgacttaaaaagcgtggccgctatccgtgagcgcactgaaacagccgacaaagttaaggtgcatcttacgtcgggagaagtttttgaacttgatgttgcctatgaggagatagcaggtctgtatctagaatttttagcaaaagaacgtggggttatggcaaaccccaccagtatttga

SEQ ID NO: 123161 - DNA, 189 bp, Enterobacter cloacae
atgactaatcaacaaaatgatgaattaattgccactctaaaatcagccattgcattggttaattcttcctctgatgcgatctctaatcgtgagaaggctgaggaaatcaataaactgtcaatccagttgagagaggcagttcaatctaaaatgcctgtcacgcataaaagctttttagatatcaactaa

SEQ ID NO: 123162 - DNA, 219 bp, Enterobacter cloacae
atgcaaaaacaaaatacagctccaggtggcatgttttccgctcttctggagcaggcagtaaacgaagcacagcgcgacctagcgacacgattctcatctcgatttgacgggcttatcgcgcatatcagcaagtctgagctcaatcgtaccgagattatcgagttattaggtcaagagtcggcaaatttgcacaactcaattttcgattgtgcaggctaa

SEQ ID NO: 123163 - DNA, 2271 bp, Enterobacter cloacae
atgtccaacgaacctcgggggcgtgttgcccccacgccaccaccatttttgaagggcaccagtgattcattcgttggtgcttatccctggaataacgtcaacaaagaggctattggccgcgacagaccccttacacgtgccgaactccgtcaggtgcaaggtgttttaaatcgtattgaccgtctgccatttttcctacaaaccctgtttacatcgcgttataacttcatccgccgtaaaaagagccctttgggtgggctgtatttccttaaaaacacgtttgagcgcaagctgctgccgcgtcttgagcgtgttaatgagctgtgcgggatgaatgaatccgcctcgattggttttctgtcagagcgcgaccagtatgcgcgcttaccagatatgaatgacaaagagctcaggaaatttgcggccagaattgcctctcagctctggagcaaatacgaggagttaagcgacgcctgggtggatgctcacggcgggaaagagacacttttcaccgatgaagctcagtcgcatctatacgggcaagtggccggtgttgctcgcgcatttaacatcaccccgatgtactggaaaaaataccataagggtcagatgacgatccgcatggcattttccgctatttcacgactgattaaagacgagtggtgggtcaaccagctcaaggcgcagcgaatgcgctggcgcgaggcgctgctcatcgcagcaggtgaggtcaacaaagaccgttcaccttacgcaagcaaaatagcgatccgcgatgttcacgcgcgccgcctggctaatctcgaatacctgaaatcctgcgaactggaaaacaaaatcactggcgaacgtattgacctcataagcaaggtcatggggagtatttcgaaccctgaaatacgtcgtatggagctgatgaatactatcgccgggattgaacgctacgcgaccagcgttggtgacgtggggatgtttatcacgttgaccacgccatcgaagtatcacccgacccgtcaggttggcaaaggtgaaagcaaaacggtgcagctcaatcacggctggaacgaaacagcattcacacccaaagacggccagcgctatctatgccgaatctggagcctgatgcgtacagctttcaaagataacgatttagatgtttacgggatgcgcgttgtcgaaccgcaccacgacggcacgccacactggcacatgatgcttttttgcaaacccggtcagcgtaaaaccattaacgaaattatgcgtcgttatgccctcaaagaggacggacacgaaaagggcgcgtcaaaacagcgctttgagtcacgccatcttaatcagggcggagcggcgggttatatcgctaaatacattgcaaaaaatatcgacggttacgcgctcgacggccagctcgatcacgacaccggcaagcctctgaaagatacggccgcagccgtcaccgcatgggcgtcaacatggcgtatccctcagtttaaaccgattggtctcccgacgatgggcgcttaccgtgaactgcgcaaactgccgcgtggggtgagtattgcctgcgagtttgacgacagggtcgaggccgcgcgagctgctgcagatgagggggactttgagcggtacatcatcgcgcagggtggggcaaacatgccgcgtgatgctcaggcggtcagggtcgcccgtaaggtgacggatgaggtcaacgaatacgaggaagatatcgagagggttgtcgggatttatgcccctcatctcggggctaatcgtgtccatgtaacccgtacagccgaatggcgcatcgttccaaagattttggccgttgagcctttgaccttaaaaagcggctctgccgcgcctcggagtcctgtcaataactgtggaaagctcaccggcggtggcgatccagatttgacgcccacaccgtctgagcaagccgcagcggtgttaaatctgattgagcgcggggttatcggctggaatgagccggacgtcgtgaaggtgcttaacggggcgttaaaagctggcgcaccgcgcaaaaatcggcagcaaagaagtaatgcgccgctcaaaaccagcgagcaagcgccatcagccaggatgacaaagcccgaaagggatcgcgtagcaaaaattcgtttcgatttggctcaggaaggcattacaccggaacggtgggagctcgatgctctggcgcgtggggcagtggttatttatggagaaaaaaagttttattatggtaatgttggtgagtggcaggaattttag

SEQ ID NO: 123164 - DNA, 903 bp, Enterobacter cloacae
gtgtctaacgaaattattttgccagattctttagtggataatggattttcgctcgaaagtcatgtttttcgctatagaagtgacagggatttttatgtagaaggaaatggtcaaagtatttgtaagaacctaattgttgaggaaatgtcaaaatttaggttgtggcattctgctgtgggtgctctaaatgatccttttgaaatttatgcaagacggaatttgcaggaatttcaacaaatgtcagagaagcaaaaactaaatctttgggtcaaggttggcactagacttggataccatgccttaatggcgctaagtactaaagaaattttaaaaggctatgaaattgataaggaaagattagaaaaaaccgtttatgaagctactagggatgattctagctttgatagttttataactgagatacgtgagaccttaggaatagcttgctttacctcaatttgtgatagtcgattgatgtggggatattattgcaatggtttggcaggagtttgtttaatatataatagacggttgttagcgtcacaaagagttgaattaaatctagtcaagtatattgatggtccttttgaattgaatattctcgattttatatataattacaaggatgatgttagagccaagactctatctcaaatagttaagacaaagcacctcgaatgggatcatgaagttgagtcaagaagtgtcgtagaattgcgtggtgatgaaattggaatagggcgactaattgaaatgaaatgttcatgtgtagaaggagtaattatcggcagtaaagtcagagctgaagtcagaaaagagattgaatggctaggcgataagcttggatttaaggtgtttcaggcaagtgtcgattaccaactttttggcgttaaaatttcctaa

SEQ ID NO: 123165 - DNA, 1026 bp, Enterobacter cloacae
atgaaaaaacgccaaaagaaacagccaaaacagaccaacatgatcgccagcgcaccgcagaaaatggaagcgttcacctttggcgagccgtcaccggttctggatcgccgcgatattctcgactatgtcgagtgcatcaataacggcaaatggtacgagccgccggtcaacttctccgggctggcgaaaagcctgcgcgccgccgtgcatcacagctccccgatttacgtaaagcgcaatattctggcgagcacctacattccgcatccgttgctttcacgtcaggattttagccgccttgtgctcgattatctggtctttgccaacggctatcttgaaaagcgcatgagcgtcaccggccagctctttaagctggaaacctctccggccaaatacacccgccgcggcgtcgaggatggcgtttactggtacgtgtcggacttcacgcacccgcaccagttcgcccccggctcggtgttccatctgcttgagcccgatatcaatcaagagctctacgggatgcctgaatacctgagcgcgcttaattccgcctggctgaatgaatccgccacgctgttccgtcgtaagtattatcagaacggcgcgcacgcgggttacatcatgtacgtgaccgacgcggcgcagagcagcaccgacgtcgagtcgctccgctccgcgatgcgtgactcgaaagggctcgggaatttcaaaaacctgtttttctatgccccgaacgggaaaccggatggcattaagattgtgccgctgagtgaagtcgccacgaaggatgatttttttaacatcaagaaggtgagcgccgctgacctgctcgatgcgcaccgcgtgccgttccagcttatgggcggtaagcctgaaaatatcggctcgctgggtgatgttgagaaggtggcacgcgtatttgtgcgtaacgagctgacgccgctgcaggaacgctttaaagaggttaacgactggctggggatggaggtgatccgttttaaggattacaacctcgaagaagaataa

SEQ ID NO: 123166 - DNA, 855 bp, Enterobacter cloacae
atggcaaagaaagtttctaaatggtttcgcatcggcgtcgagggtgacacctgcgacggccgtgtcatcagcggtgatgatattcaggatatggccgacacgtttgacccgcgcgtctatggctgtcgcattaacctcgaacatatccgggggataatgcctgacagccagtttaaacgttatggcgatgtaaccgagcttaaggcggagattatcagcgatggctctgtgctcgatggcaaaaaagcgctgtttggcaaaatccagccgctcgacgagctggtcagcatggtgaaagccggtcagaaggtttacacctcgatggagatccgcccgaactttgccaacagcggcaaatgttacctcgttggccttgccgtcaccgatgacccggcaagcctcggcacggaatacctcgaattctgcagccgagccacgcagaacccgctcgccggtaaaaaagaaaagccggacgacgttttttctgtcgcctcactggctgagctggaatttgaagatgtccccgacaccatgctcaacagcctgaccgacaaggttaaagccatttttggccgcaagcaggccagcgatgacgcacgtttcgccgatgtgcatgaggcggtgaccaccgtcaccgagcaggtgcaaaccaacctcaccgccaccgaccagcgcgtcaccgagctggagaccgcttttgcacagcttaagcaggacttgaccagcaaagtcgatgaaaacgcgcaggcgtttacctccctgaaaagcaccctcgataacaccgaaagccagcgccagccgcgccgcgagctttcaaaaggcggcacgggcgacgagctgctgaccaactgctga

SEQ ID NO: 123167 - DNA, 393 bp, Enterobacter cloacae
atgaaaagattccgtagcaaaatgaccaccgaagagctggcagaaaatttgggtgttgcacggcaaacggtgaaccgctggatacgccagcagggatggaaaaccgagggcgtcaatggggtgaaaggcggacgtgcacggctgattcacattgatgcccgcgtgaaggagcacatcatgagcctcccggctgtccgtaaccgtcaggcggtgtaccatctggcggaggtgacatcgttgtacagtgaaccctcctctactctgcgtcctgggatcatcgagacgctggagaatatgacgcaccttgagcaggagcgtctggatgccttactaaagcgtgaagggatacacggctttcttgcacgtctcggcattgctgaatttaatgcataa

SEQ ID NO: 123168 - DNA, 2214 bp, Enterobacter cloacae
atggaaaatagattatctaacttaatgaatagaaaaacttacaataatgtaaagatatttataactgccctggcgctttgcctggttgcggtgccattctcccgttatatctctccgcgcgctgttgttaatggtcatgacgtatatttagcatggctgcctttaagcgtaatgctggcggttattctggtatttgggcgtcgggcggttattcctgttctgttaagttttactatcactaatatattcagcattgatttagcaccgctacaatattcagttttattgttctgtcagaccttctcggtgtttgcggggtgcggcatcctcaggatcatactgggcaagcgctggcgctactgcgtgccgaacaagcatattgggttacggatattttggctcggctttatggtaccgataggcataaaagtgtcgatgtacctggcaggttatttgttccatttcccggttactatctcaaccttcttcggtgaaggtaccgcaatttataacgtagtcgatatacaaagtctgatctgcgcggcgttgatatttaccatgatgttctattacccgttaagaatgataattaatccacgttatgccatcaccttctggcgacgcagtgtgaaacccgtgttttttcaaaagaaatcgctatatatattagtctggctgatgcttttaatcgtcatcctcgcaattttatgtgctccttttgagtcacctattattgcgggctatttaatgccagtgatttttattctctttacgttagggatcagtcgcctgagctacgcgctcatttctcttttctgggcggcatccgcacttctgctgttgacctataactataatttcctcaatggcgtggagtcaggccattcgctctcctttattttgtctgtccttatctctttcgccatctgtttgctctacatgtcgcggatttatcagcgcagcgagtggctgaagcaggactggcaggacagggcgctaaccgatccgctgaccggtttaccgaacattcgtgcactggaagattttttgcaggaccaccctgatgccaaagtgtgctgtctgcgaatggacaacctcgagttcttgagtcgtcactacggcattcttatgcgggtgcattgcaaacggatggtgaccacctcgctgcagccatttttgcaaaaagatgagcggcttttccagctcccgggcagcgaactggtgctggtattgctggggccgggaaccgctgagcgcctccagcatatggtcgatcagctgaacagccgtaagattgtctggaacaacaccgggctggatattgaatttggcgcttcctggggaatggttgagaacggtgagaagttacaccatacgctggggcagctcagctggctggctgagcaatcttgcggagcgcataatgtactggcgctcaccaatagcctcgaggtggcatcaggacaaacaaccgagcgggttttgatgttagcgcgcattaaacatgctctggatgccggacagtttcatttatacgcccagccaatccagaaggcagatggtagcgggtattacgaaatactgacgcgcatggaaagcgagggcgagatcatcaccccagaccgctttataccgctgattgcccagtttaacctgagccaccgcttcgacatgtgcgtgatggaaaaattactggtgtggctgcgcgatcatccagcgacgcatgccggagtgcgtttttctgtcaatctgatgcccctgacgttgatgcaaaaagaggtgtccattgagatttgctcgctctttgaacgctatggggttgcaccacaggcggtggtgattgagatcaccgaagagcaggctttctctaattcgggcagcagtatcaaaaacattcagcagttgcgggactgcggtttccggatcgcgattgatgatttcggcaccggatatgccaactacgaacgtctcagacgtttgcaggcggacatcatcaaaattgacgggtgctttgtgaaagatatctgtaccgacgatatggatgcgatgatcgtgcagtcgatttgcaacctggcgaagacgaaatcactgagtgtggtggccgaatatgttgaaacgtcggaacagcgggagaagctgcttcacttcggggtcgactatctgcagggttacctgattggcaaacccaaaccgcttaatgaattacgggcataa

SEQ ID NO: 123169 - DNA, 477 bp, Enterobacter cloacae
atgaaacaaatcacgctctccgatttgacgcaacaaagtgaagcggcggctaacgccccgcgtttacgcgcacatcgtaactttcatcctgaactgagcgacccggttcagcggctggccatcgcgatggaacctggcacctatgttcgccctcatcgtcatccgcatacctttgagctgttacttcctcttcgcgggcgttttgtcgtgctgaattttgacgaccagggcgtcgtcacccgtcgcgtcgtattaggtgaagcgtgtatggcgctggagatggaggcgggaacctggcatgccgtgctgtcactggatcatggcggcgttatttttgaagttaaacacggtggctatcaaccggtggctgatgaggatttcgttacctgggcccccgccgagggagagcccgatacagccgcgctgatggcatggtataaacaggtacagcctggcgatgcggcctggaaagcataa

SEQ ID NO: 123170 - DNA, 1998 bp, Enterobacter cloacae
gtgaaacaaaacgctatacaacccgccaacctcgaattcaacgctgagggtacacctgtttcccgagattttgatgacgtctacttttctaatgataacggactggaagaaacccgctatgttttcctcgacggaaaccagttaaacgcccgtttccccacgcatccgcgcagtctgttcgtggtcgccgagagcgggtttggcaccggtctgaattttctcaccctctggcagatgttcgatcagtttcacgctgctcaccctgacgctacactgcaaagattacatttcatcagttttgaaaaatttccgctcaccgcgcatgaccttcgtctggcccatcagcactggccggaacttgcgccatgggcggagcagcttcaggcgcagtggccgccgcacctcggcggctgtcatcgtctgctgctggacggcggacgcgtcacgctggatctgtggctcggcgacatcaatgatctgaccgataagcttgatgattcgatgaaccagaaagtggacgcatggttcctcgatggttttgcccccgccaagaatccggacatgtggagccagcatctgtttaacgcaatggcacgcctggcacgtcctggcgcaacgctcgcgaccttcacctcggcaggctttgtccgccgcggattgcaggaggccggctttaccatgcaaaagaccaaaggttttggtcgcaagcgcgaaatgctggtcggaagaatggatcagatgctggagatccccgctcagacgccctggttttcacgcagcgccagcacttcacgagaggtagcaattgtcggcggcgggattgccagcgccctgctttcgctcgcgcttttacaccgtggctggcaggtaacgctctactgcgccgacgacgcgccggcaaagggcgcttccggcaaccgccagggggcgctctacccactgttaagcgctcacgatccggcgctgagccagtttttcccggcagcctttacctttgcccggcgcctgtatgatgccctgcctgtggcgtttgaccacgactggtgtggcgttacgcaactgggctgggatgagaagagccagcaaaaaatcgcgcacatgttgtcgctgggtctgccgctcgaaattgcccgggcggtgaatgcgcagcagataaccgaaaccgcgggcgtcgatacgggctgcgacggtatccactatccgctcggtggctggctgtgtccggcagatctgacgacggcagccattgcgctggcgcagtcgcgcgggttgacggtgcactattcccgccaggtcgcctcacttcaccacacagagcactggaacctgcatttcaccacgggagacgtggcgcagcatacctgcgtagtgctggccaacggtcaccctatcagccagttcaaccagacggaaaagctgccgctttaccctgtcggcggccaggtcagccatatccccacctcgccagcgctggaaaaactgcagcaggtactctgctacgacggctatctgacgccacaaaatccgtccaacggccaccactgcattggtgccagctaccatcgcggtgagaccgacatgcgctacagcgaagacgatcagcagcaaaaccgccagcgcctgatcaactgcttcccgcaggccgactgggcaaaagaggttgatatcaacgccggtgacgcgcgctgtggcgtacgctgtgccacccgggaccatctgccgatggcgggaaatgtgcctgactatgaagcaacgcttgaggcctatcaggatcttgctgaaaaccgtgataccgcggtgagtgcgccagtttatccgcagctgtttatgctcggggggctcggttcacggggattgtgctcagcgccgttgctggccgaagtgctggcggcacagatgaatgatgagcccgttccgctggacagcgttacgcttgcggggctcaatcccaaccgtttgtgggtacggaagttactgaaaggaaaaagagtgaagtaa

SEQ ID NO: 123171 - DNA, 918 bp, Enterobacter cloacae
atggaactgatttttctcggtacgtccgctggagtgccaacccgatcacgaaatgtgaccgcgattctgctggatttgcagcacccgacgcggggtggattatggctttttgactgcggtgaagggacgcagcatcagctgttacataccccgtatcatcccggcaaactggataacattttcattacccatctgcatggcgaccatctgtttggcctgcctggcctgctgtgcagccgctcaatggcgggcaatgccaacccgctgacgatttacgggcctgcgggtattcgggaatttgtcgacaccacgctgcgcctgagcggctcatggacagattatcccctggaggtggtggagataaccactggtctggtgctggatgacggggtttatcaggtgacagcccaacccctgagccatcctgtagagtgctatggttatcgcattgaggagcaggataaacccggtgcgctcaatgcgtcggcattactggccgacggaatcaaacccgggccgctgttccagcgcctgaagcagggcgaaaccgtgacgctggaagacgggcgcatcatcaacgggcaggattatctcgccgccccgcagcccgggaaaaaactggcgattcttggcgacacagccccgtgcccggcggcgttgctgctggcgcagggtgtggatctcatggtgcatgaagccaccctggaggcggcgatggaagagaaagccaacagccggggccatagctctacgcaccaggcggcgcagcttgcgcgtgacgcgggcgtcgggaaactgatcgtcacccatgtcagctcgcgctacgacgcccggggctgtcaacgcctgctggcagagtgccgtgaacggttccaggaatgtgagctggccgaagatttcgctaaggtcagcgtttag

SEQ ID NO: 123172 - DNA, 1296 bp, Enterobacter cloacae
gtgaattcgatttccaccgcgctggagcatctgcgtagccagcttacgcaagcgttacccactgcacccggtttacatcacttcgacgtctctttcccgttaaacgacgccttcgatcccctggcctggctgggcgttcagcattgctatcctcagttttactggcaacagcgtaacggtgatgaagaacttgctgcgcttggtgccgtcgcgcatttctcctctctggcatttgcctcacagtttttgcaggcgcatgatgcggcccgcgacacgcgtatctgcggcctgaatgcgtttaatcccgagcagggcagtctgtttttaccgcgtctgctgtggcgacgtaccgccggacaggccacgttacgcctgcagctgtggagcgacagttcacttcacgatgatgcccgcgccgcgctggattttctccagcaactcggtgaggcgagacccattcgtccactgtccgttgaggttgtgcaggaaaagcatcatccggaacaacccgaatggctgcgccttatccgcaaggcaacccagaccatcgctcgcggtgattttgaaaaggtggtgctcgcccgggcaaccgacctgcagtttaagcactctgttaaccctgtcgcactgatggctgccagccgcgccctgaacctgaactgctaccatttctgcatggtgttcgatgccagcaacgcgtttctcggctcgacccccgagcgcctgtggcgcagacgcggcaagctgctgcgcacggaagcgctggcaggcaccgtcgtcagccataccgatgataaacaggccgaacggctgggcgactggctgatgaacgacgacaaaaatcagcgtgaaaatatgctggtggtggaagatatttgccagcggctccagcaccatacccagacgctggaggtgctgcccgcccaggttgttcggctgcgtaaagtacagcatctgcgtcgctgtatctggaccgagctcaaacacgctgacgatgcacaatgcctgcatgttctgcagcccacggcggccgtcgccggtctgccgcgtcaggcggcgcgcgactttatccaccacaacgagccgttcgaccgcgagtggtacgccggttctgccgggtatttatcccctgaacaaagcgagttctgcgtggcgttgcgttctgcccgtgtttacgaagacgccctgcggctgtacgccggggcgggaattgtcagcggctctgacccggagcaggagtggcaggagatagaaaacaaagcggccggactgcgctctctgctcctaagggattaa

SEQ ID NO: 123173 - DNA, 777 bp, Enterobacter cloacae
gtgatcctcgcgggcgtgcagcaggctggaaagccaggttatccctggctggtctttttgcacggtttttccggggattgccgtgagtggcagacggtcggggcggcgctgagcgattacccgcagctgtatctcgacctgccggggcacggtgattccggcaatactggcgtgaccgggttcgaggagatgagcgatttgctgacccgaaccctgcttagttacaacatactgaatttctggctggtggggtactccctcggcggccgcattgcgatgttccatgcctgccagcagccagaggggctgaagggcattattgtggaaggcggccatcccgggctacaggatgccggtgagcggagtgcgcggctggcatccgatcgccgctgggcgcggcgctttcgcaccgaatcgctcgacgtggttttcaccgactggtaccgacaacctgtatttgcttccctgacggacgttcagcggcaggcgcttattcgcctgcgtagccagaacaatggcgcgactctggcgatgatgctcgaggccacctcgctggccatgcagcctgatttacgtccggcactgagcgcctgcaacgtcgcttttgattatttatatggtgaacgtgatgagaagttcaaagcccttgcggctgaactgcacgccgtacgccatgcgattccccatgccggacacaacgcccaccgggaaaaccccgctgcggttgcttcgagtctggctcagatactgcgtcttcgaataaaggactctctatga

SEQ ID NO: 123174 - DNA, 1362 bp, Enterobacter cloacae
atgagttttaccgactggccgtggcgacactggtgcgcgcagtatgctgataaaccggccctgaggctgaacgatgagacgctcagctggcaacagctgtgtgcgcgcatcgacagactggccgcgggctttcagctgcagggtgtgcaggagggcgacggcgtactgctgctggcgcataatcacccgcaaaccctgatggcgtggctggcattgcttcagtgcggggcacgtattcttcccgttaacccgcagctgccgcacccgctgctggacgtgttgctcccgcagatgacgctgcgctttgccctggtgctggacggcgtctacgacgggctggtcgcgctcagtatgcgcgaggcgccgggcgggtgtcgcgtggcgtggcaaccgtcgcggctggcttccatgacgctgacatccggttcaaccggtttacccaaggcggcggtccatacctgtgccgcccatcttgccagtgcgcgcggcgtgctttcgctgatgccctacgacgatgaagacgactggctgctctccctgccgctgtttcatgtctccgggcaggggattttgtggcgctggttgcaggctggcgcgcgcttaaccgtccgcgagaagcagccgctggcgcaggccctgcagggctgtacgcatgcctcactggtaccgacgcagctctggcgtctgcttaatgcacatcagcctgtcgcgctgaaagccgtactgcttggtggggccgcgctccccgttgacctgactcagcaggcgggccagcgggggatccgcactttctgtggctacggtctgacggagtttgcctcaacggtttgtgccaaagaggcggacggtgaaccggacgtcggcgctgcgctgccgggcagagaggtgcgggtggttgacggtgaagtgtggatcaaagcgcaaagtatggccgcaggttactggcgggacggtgcattgattccgctgaccaatgctcagggctggtttgccacccgcgatcgcggggaatggcataacgggcgcctgacgatccttggccgaatggacaacctctttttcagcgggggcgaagggatccagccggaaagccttgagcgggtgattgcccgccatccgcagataaaccaggcgtttatcgtcccactcgatgacgccgagttcggtcagcgtccggtggcggtggtggagtgtgaaccgggaaccgatatcaccggcttcccggcgtgggtacagggtaaactggcgcgctttgagcagccggtgcactggctgatgctgccggcagagctcaaaaatggcgggattaagatctcccgccaggcattaaaacagtgggtcacccgtctgttgaaaggataa

SEQ ID NO: 123175 - DNA, 1218 bp, Enterobacter cloacae
atgaaatttgataccgtgattgtcggtggtgggctggcgggtctgctctgtggtatcaggctaacgaagcaggggctgcgctgcgccatcatcacccggggccagagcgcactgcacttctcgtcgggttcgctggatctgctggatgaggcatatcgcgatgccctgccgccagagcatccctataacctgacgggcagagacaccgtcgaccgcttcgcccatgaagccgaaacccttctggccgagtgtggcgcacggctgcagggtaacgcccggaaaaatcatcatcgggttaccccgctcggcaccctgcgctctgcctggctcagcccggaagaggtgcctgttgccccctttaacgcaggacgggtcctggtcgtgggtattagcggttttcttgattttcagccccacctcgctgcggcatcgctctgtcgtcagggcgtgaatgcacaaacggctgagatagagcttcctgagcttgacgtcctgcgcgacaacccgagcgagtttcgcgcggtgaatattgcccgttttctcgacaacgacgataaatggccgctgctgtatgccgcgctccggccgcttgccgaaggttgcgacacgctgtttatgcccgcctgctttggcttaagcgacaaccggctctggcgctggctctcggatcgcctgccctgctcgcttggcctgctgccgacgcttcccccttctgtccccggcattcgcctgcatacccagcttcagcggcggtttatcgctcagggtggcgtgtggatggcgggtgacgaggtgaaaaaaatcaccctgacggatggctcggtgagcgaagtctggacgcgtaatcacgctgatattccgcttcgcgcgcgttatacagtgctggcaagcggcagtttcttcagcaacgggctgctgagccgtcgggacggcatccaggaggccattatgggactggatgtccggcaaacgccctcccgcgcggactggtatcagagtgatttcttcaccccgcaaccctggcagcagttcggcgtgattgtcgataagcaactgcacccgcaactttctggtcagccggtcagtaatctctatgccattggctctcttctggggggatacgatcctatcgctcagggttgcggcggcggggtctgcgccatcacggcgctgtatgtggcagagcaaattggccagcgcatggaggctgagcaatga

SEQ ID NO: 123176 - DNA, 1059 bp, Enterobacter cloacae
atgaaaaacccgacctttactaccgatgacgatcgctggctggccgtgctggctcgcgatccgcgtgctgacgatcagtttgtctttgccgtgcaaacgacggggatcgtctgtcgtccgtcctgccgtgcccgccacgcgttacgtaaaaatgtccgcttctaccccgatgtagatcatgcccttcaggcagggtttcgcccgtgtaaacgctgtcagccggacaaacgcgatccgcaggaacagacgctggcaaaagttgaacatgcctgccgtctgctggagcgcgatcccgcgttaacgctggaaatgctggcgcagcaggtcgccatgagtcctttccacttccaccgcttgtttaagtccgttaccggtatgacgcctaaagcctggcaacaggcggcgcgggtacaacgcctccgtaccgcgcttgcgcagggggacaaaattaccgatgccgtgctggcggccgggtttcctgacagcagcagctattatcgtcaagccaacgctgcgctgggcatgacggcgaagcagtaccggaaaggggatgtggcggtgcgttatgcgattggtgagtgttcgttaggccgttgcctggtgggtgaaagcgagcgcgggatctgcgcgattctgctgggtgacgacgatgagacattaaccgaggagcttttgacgctgtttccaaaagcagagcgagaaacgctggaaggagaattcgcccggcgtattgagcgggtgattagcgctatcgatgaccataccgtgccgctggcacttccgctggatattcggggcaccgctttccagcagcgtgtgtggcaggcgcttcgtgacattccccgcggtgaaacggcaagttatcgccaggtggcgcagacgatcggtagcccaggcgctgtgcgtgcggtggcgggagcctgtgccgcaaataaactggccgttatcatcccctgccaccgtgttgttcgtcacgacggtgcgctttcgggctaccgctgggggacagaacgaaaggcgttgttactgaaacgtgaggcaaagaacccggagggataa

SEQ ID NO: 123177 - DNA, 651 bp, Enterobacter cloacae
atgctcgatctttttgcggatgcggaaccctggcaggagccccttgcgcccggcgcggtgatcctgcgccgctttgcgctttcccgcgcggcggcgctgcttgccggcatcgatgaggtggcggcggtctcgccgtttcgacacatggtgacgcccggggggtacaccatgtcggtggcgatgacgaactgcggagaactgggctgggcgacaaacgcgcagggctatgtatatgccccgggcgatcctgtaaccggccagccatggccgccgatgcctgacgtttttcgggcgctctgccatgacgccgccgttgaagcgggctatgccgactttcgcccggatgcctgtctgattaaccgctacgccgtgggggcaaagctctcgctgcatcaggacaaggatgaacccgatctgcgcgcgccgatcgtctcggtatccttaggcctgcccgcggtcttccagtttggcggattacgccgtaacgatccgctgaaacggctcatgctggagcacggtgatgtggtggtttggggcagggaatcgcggcttttttatcacggcattcagcccctcaaaccgggagtacatcctcagaccggcgagttccgccttaacctgacgttccggcaggcatcccgtggccaataa

SEQ ID NO: 123178 - DNA, 1188 bp, Enterobacter cloacae
atgctttccagatttacggtactcagccggatccctcgtggggtctgggtagtgggtggcgtcagtatgttgatggacatctcgtcagagagtattcacagcctgcttccactgtttatggtgactacgcttggaacgagcgtgttggttatcggcctgattgaagggctcgcggaggctaccgctctctttatcaaagtcttttcgggggcgattagcgactatcttggcaagcgtaaagggctggcgctactcgggtatggcctcggtgcgctgagcaaaccctttttcgccctggcatcctcttcggggatggttttaggcgcgcgcctgatggatcgtgcggggaaggggatccgcggtgctccacgggatgcgctggtcgcagatatcaccccgccggaactgcgtggggcggcatatggcctgcgtcagtctatggataccaccggcgcatttctggggccactactggccgtggggttaatgctgctgctacacaatgattttcgcgcggttttctggatagccctgatccccggctttctttcggttgcgctgctgtatttcggcctgaaggagccgaaaacccctgtcgaacataaacgcactaatcccatcaaaagagagaatttaacgcggctgggaaaatcgtgctggtgggtcattggcctgggggcggtattcacactggcacgttttagcgaggcttttcttgtcctccgtgcgcaacagtctggcgttcccctggccttaatcccgctggtgatggtggtgatgaacgtgatctattctttctcggcctatccgtttggcaaactctctgatggtatgagccatacccggcttctgcagtgggggctagtcgttttgattgccgctgatgtcgttctggccctgagtacccactggaccggtattattgtcggcgttgcgctctggggcatgcatatggggatgactcaggggctgctggccgcgatggtggccaaaacagcgcctgcggatttgcgcggtacggcgtttggtcttttcagtctggtcagcggggtcgggttactgatggccagcgtgggtgctggcgctatctgggaactgtggggcgcagaatataccttttatgccggcgcggtgatttgtttgctgacgctgctttatctgcgtaaaacgcctgccgaagtgcggtaa

SEQ ID NO: 123179 - DNA, 960 bp, Enterobacter cloacae
atgaaccgccattctatcatttctttatccgtaataattgcgctttcatgcggaagtgtgaacgccttcgcttctaatttcatgaccatggatgaaaaagccacggctattcagtcgattcgcaatgaagccaatcaggccatggaggataagcaggctgcattaaaggcttacaatgccgaccgttcacctgaaaatatggcccgtttaggggacatcgaaaacagcttacgcactgcaggcgatcgtattaatgcagtacaggcaactgaaatggctcccgatgcgccgcgacctgtaacacaaagaacgccgcaacccctgcagcagaaaacgccacacattacgggcacgacttaccggaacgctgtgatttcaatgcagcaagtcactacagggccagccttacctgcaggaactgccgttaacacccctgacgccaccaaaacgtctgcagtggctgcgccacaaatcacaggcacaacttaccgcgccgcagtggtgtctatgcagcaagcgacaacaggtccagccttacccgctggcacgacggttactgcgccctcgcttactcatactccagccaccacgaaagcacctgataacgttacaagtgttgccataacaaaagacacgggctcgattaacgttgctgtgtccagtatgaagccggggacgcctgtgaatatcacggttaatggtgtcaccactaccaccaccgcaggggagatcgccaaagtcgatccgaatgtgcaaatcgcagttccgcatgtagacgcgttgatcgtctctcagcgtcagggaagcgatcatagccgtaataactcacgacatgagcatggaacggggaacggcagcaacaatgcagccaacagcaacagcgcccacggcttaggcggtggcaatcatattggtggtggtagcgctcagtctggctccagaaacgtgggtcactggtga

SEQ ID NO: 123180 - DNA, 351 bp, Enterobacter cloacae
gtgaaacccttaaaaaaagtgttactgatgaaaaaggctcagtggatattcttcattctggcagcggtgactacaacaggatgtagcattgcttctccacccgaaacggatgcattaagcacccggcctttcatgggggggaacggtaaacgtgttgcggcaatgtcagattttcaaatctgcgaggcgttgggctatgcacaggcccaccacgaaacgaaagtttacaacacgctttccgcattgttggagcaacgccaacaggcgggcacgctcaggatcgctcagggtgattgcaccgcagcagcgctaaacgtcatcaatgaggaaaaggccaaagtgaaaccgtaa

SEQ ID NO: 123181 - DNA, 330 bp, Enterobacter cloacae
atgatgaaaacagtcgagatactgcaatacaatttacacaaaggcaccggagcattttttcataacgtcatggcagaaattagcgttccccttcatcaacgccacggcatcgatgtggtgtcgtttggtaactctctgcacgatcttgattgctactatctcattcgagcctttgaaagtattgaaaatatgaatacggtgcttaattctttctacgcgagcgcagactggcgctgcgggcctcgtgagtccatcattgactgcatcgaaacaagcattaagacagtaattgatctgccacgagtaagtgtggatgggctacgagtgtaa

SEQ ID NO: 123182 - DNA, 174 bp, Enterobacter cloacae
atgcactcgcttcgtaagctcggccaatataatttctctggctccatccaggccctgaacatttcgcttatcgtaaacctactcaacaaacataaaacctccgtaataacttcaagtgggggaggtatttttactgtaaaaatatacagcgtcaagcgtggcggagtgttttaa

SEQ ID NO: 123183 - DNA, 726 bp, Enterobacter cloacae
atgctgaatgttatgacgactcgacttcccctgatattactgcttaatgtcgccggtctggcgctctttttctcctggtatatcccggcgaatcatggtgtctggtttccgctggattctgccatttttcacttcttcaaccaggaactggtgaagagcgaagccttcctgtggctggttgctatcacgaataaccgcgcctttgacggctgctcgctgctggcgatgggcggcctgatgctctctttctggctgaaagaggacaaaacaggacgccgccgtattctgattattggtttgatgatgttgctgcttgcggtggtaattaaccagctggcaacggccattattccggttaagcgttccagcccaacgctcttcttccccgatatttatcgcgtcagcgagctgctgcatattccaacgaaagatgcgtcgaaggccagtttcccgggcgatcacggaatgatgctgcttattttttccggcgtgatgctccgctatttcggccgaaaagcctttgcgatagccctgattatttttgtggtttttgccttcccacgggtaatgattggcgctcactggtttactgatattgctgtcggttcgctctcttctgtgctggttgcgctgccgtggtgtctgatgacaccgctgagcgacaagataatagccgtgttcgatcgctacctccccggcaaaacgcaacaaatcagaaaccaataa

SEQ ID NO: 123184 - DNA, 1389 bp, Enterobacter cloacae
atgaatgcgtttttcctgaaaaatatccgcccctattttaacttcccgggtttatcactcccgacggcactcaatgctggcctctggcttgatgacaaacttgatgccatgcagcacaacgtctcgctggaagtggcggattacctggaacgttacccgcagacaaaacatattgacgtttacctgaacgacatcaatggcattatgcgcggcaagcggctctcggtggaaagcatgctgaatctggaaaaaggctgttacttccccctctccgtctactccatggaccataaaggcaaaatagccgccccgcttgatgatgagcccgaccggctctgcgttcccgtcggcggttccctgcgcccctgttcgcaagaccctcagcataacgcgcagatcctgctgaccatgaaagagagcgacggcaaaccgtgcccgcttgagccaagggtgatattgcaaaacgttctggctcgtttccatcagcacgggctcttcccggtgattgccccggaaattgagttttatctgaccggacgcggcacgcaggatccacaaaatcagggctgctttcatatggatacctcaacggcacacgcggcgctgtttgacgagctggaacagctggcgcacctgcagcgtatccccctgaccgggatcgtggccgaggccgaatccggccagtttgagttaaacctgaagcatagccatcgcgtcgttgaagtctgcgataacgtgctggccctgcgacgcctgacccgctacgttgcggagaaacagggtctgcaggccagctttatggccaaaccgttcagccagcagtccggcagcggtttgcacttccatttcagcctgaacgatattcatggcgaaaacgtattcgcgtctccggtggaagcgctgaacagcatgatgcgcctctgcatcgctggccagctggcgctgatgcccgcctccatcgccattctcgcccctggcgttaacgcattccgccgcctgcgtaaaaacctcacggaaccgctatttaactcctggggctataacacccgctccgccgcgctgcgtattccctgctctgatgaccataaccggcgtattgagtaccggctggccggggctgatgcaaacccgtatctggtggcggcaacgcttctgagcggaatgctgtacgggctggaaaattttgacgagcaggatttacctgaacctcagcaggacgggccggatctgccgctgtttcagcaggaggcgatcgagacatttgcacgctgtcagtatcttaccgacagcctgggagaggctttttctcaacagtgggttgcctgcaaactctccgaactcgactggttcgagagcattgtcacccgggaggagtcgagtctggcgtga

SEQ ID NO: 123185 - DNA, 933 bp, Enterobacter cloacae
atgcgtgttttactggccccaatggaaggcgtgctcgactctctcgtgcgcgagcttctgaccgaggtgaacgactacgatctctgcgtgacggagtttttgcgcgtggtcgatatgttgttgccagtaaaatcattctatcgcctttgcccggaactgcatcatcagagccgcacctcttccggcacgctggtgcgcattcagctattgggtcagtatcccgaatggctggcggagaacgcggcccgtgccgtagagcttggttcctttggggttgacctcaactgcggttgcccatcaaaactggtgaatggcagcggcggcggcgccaccttgctgaaagatccggagctgatttaccgtggcgcaaaagccatgcgtgaggctgtaccgtcgcatctgccggtgacggtaaaggtgcgtctgggatgggacagcgacgcgcggcaatttgagattgccgatgccgtgcagcaggccggggccactgagctggtggtgcatggccgcaccaaagaagatggctataaagccgaacgtattaactggcaggcgattggcgagatccgcaaaagactcaccattcccgttattgccaacggcgaaatctgggattacgaaagcgcgcaggcgtgcctgaaagagactggctgcgatgcggtgatgattggccgcggcgcgcttaacgtaccaaacctcagccgggtgattaaatataacgaaccacgtatgccgtgggctgatgtggtcacgctactgaaaaagtacagccgcctcgaaaaacagggtgatactgggttatatcacgtcgcgcgaattaagcagtggctcagttatttacgcaaagagtacagtgaagcgctggagttatttcaggagatccgcacgctgcagacttccgctgatattgcacgggtgattcagtccaggtaa

SEQ ID NO: 123186 - DNA, 858 bp, Enterobacter cloacae
atgaaacctttatctctgagtattcccctggtttttattctggtggcctgcgcgccggaacatgcctcggtttcccctgtaaatatgcaatcaacaatggctgcggtgaatactacgctgagccataccgcgtggccgaaagatgcatggtggaaaacgtataacgatcctgaactcaattcgctgattgcgaaggcgctgaacgatgcgccggatatgcaaattgcccgtcagcgcatcacgctggcggaagcgcaggcaaaagccaccctggccgccggggggccggaaattgatttcgcagcggatgctgaacggcaaaaaatgtcggccgaagggttgatggggccctttgcgataaccgatccggcggcgggaaccaccggaccgtggtacaccaacggtacttttggtctgagcgcgggctgggatctcgatttgtgggggaaaaatcgtgcacgggttgaagcccgaattggccgggtaaacgcgcaaaaagcggagcttgagcaaacccgacaactgcttgccagcagcgtcgcacgtctttactgggcgtggcaaacccaggccgcggtgggggatgtcctcacggagattaaacaccagcaggacacgattattgcagccgaccgcgaactgtatcagcatgggatcacctcttccgtagagggcgtcgagaccgacatcaacgccagcaaaactgacgagcagctggcagaagtgaacggaaaaatgaaagccattgaggcgcgtctgagcgccctgacgaacacctcctcagtgacgcagcggcaggctaaacgccgagctggatattgcccaggcgcagaacaatctctccgtcgcgcgttataa

SEQ ID NO: 123187 - DNA, 336 bp, Enterobacter cloacae
atgatagccgccacccagcgccgaggtcagctgcagcgtggcgtcaacgtactggcctttgagcatcaccccggtgagctgctccctgagggccggtattctggcctcacttacgcgggagccggcgataatgccggcgcgaaagcgggcctgagccagtgcaacaacgcgggcagcctctttttcgacactctgctggtgctggttttttgcggtcagtgtttcgacttcgctggccgtgcgcgccacctgattcaccgcatccaccaccgctttgttataacgcgcgacggagagattgttctgcgcctgggcaatatccagctcggcgtttag

SEQ ID NO: 123188 - DNA, 738 bp, Enterobacter cloacae
gtgaaggcacttcgtgatccgctgctctggctggtcgtgctctttgtcgctttgctgtttctgatgccgcacagcgcggcgctgtttagcacactcttccccgacttgccgcgcccggtgtatcagcaggagagttttattaatcttgccctggcccatctctggctggtggtgctctcaagtgccatcgctattgtactgggcgtgggggcgggcatcgcggtcacgcggcccgcgggacgggagtttcgcccgctggtggagaccattgcggcgattggccagacgtttccgccggtggcggtgctggcgattgcagtgccggtgatgggctttggtcagcaacctgccatcattgcgctgattttatacggtgtgttgcccattctgcagggtacgctggccggtattgcggcggtacctgcgtcggtactgagcgttgctgaagggatggggatgagtcgcgcagagcggctgcgcaaagttgaactccccctggcggcaccggtcatccttgcggggatccgtacgtcggtgatcatcaatatcgggacggcgaccattgcgtcgacggtgggagccaataccctgggaacgccgattatcatcggcttaagcgggttcaatacggcctatattgtgcagggggcgttgctggtcgcgctggcggcaatcgtcgtcgatcgcgtttttgagcgtctggcgcagtatctcagccgacaccgccacgaacaataa

SEQ ID NO: 123189 - DNA, 456 bp, Enterobacter cloacae
atggagatatcttctatcaccgctaatgacattttaatccggccctggcaggagagcgatcgcccctttttgcgaacactctatctccacgcgcggcgcgaggcctggccatggctggacggttccgagtggcagcttgaagactttgacgcggcaacccgcgacgaagtgatttgggtggccgttcaggacgggcatcgactgggttttgcgtcggtgtggacgaacgacaacttcctgcacaatctgtttgtcgatccgcagtatcaaggtctgggcgtcggtcatttgctccttgaacaggtgcaaaacgcgttcaccagtacgggttcgctgaagtgtctggtaaagaatgaccgggctgttgccttttaccagcgccattgctggcatattgaagcgaagggtgactcgccggaaggcgagtactttttaatgcattacgtacagcgttaa

SEQ ID NO: 123190 - DNA, 1035 bp, Enterobacter cloacae
atgactgacggagaagcgaattatcagctcgatcaacacgtggaaatttatcccctgaccccggcgcttgttgaaagattgcgaccgcctgtcctcaaatctcaggcaaatcctactctggatgagcaggtcaaaaactgggaataccgcataggcaccggcgacatcctgacggtcaccgtctgggatcatccggaattaaccacgcccgcagggcagtatcgtaccgcgagtgacgcgggtaactgggtgaatgcggatggaacgctcttctatccctacgtcggaaaactgcatgttgcaggcaaaacggtcgcgcaggtgcgtgaagcaatcaccgcgcaactggagaaggtcattgagagcccgcaggtggatgtcagcgtggcgtctttccgctcacaaaaagcctatgtgacgggagaggtggcaaaatcaggccagcaaccgataaccaatattccgttgacggtaatggacgcggtcaacgccgcaggtgggctttccgcggatgccgactggcgtaacgtggtcctcacgcataatggccaggacgcgcgcctttcgctctatgcgctgatgcagcatggtgatttaagccagaataagctgctgtatccgggcgatatcctctttgttccgcgtaacgatgccttaaaagtgttcgtgatgggcgaggtggtgaagcagagcacgttgaagatggatcgtagcggaatgaccctggcggaagccctggggaatgcaggcgggctggatcagaatatggccgatgcaaccgggatttttgttattcgctcggtagcgaaaaaaggggcgacggacaaaattgccaatatctatcagctcaatgcgaaggatgcctccgcgatggtactggggacggaattccagcttgaaccgtatgacattgtctacgtcaccaccgcgccgttgtcacgctggaatcgcgtgatcacacagctggtacccaccatcagcggtgtccatgacctgaccgaaaccgtccgcttcatccgttcatggccgcaataa

SEQ ID NO: 123191 - DNA, 450 bp, Enterobacter cloacae
atgttcaactcaatcttagtggtttgcaccggcaatatttgccgttcgccgatgggggagcggctgttgcgacaacagctgcccggcagactcgtgacatcggctgggatttacggatttgaaggacgcccggcggatgcaactgcacgggaggtggcccggtgttacggtgtttcgctggaggggcacgtggcacgcaagatgacgcgcagcatgttgcaaacctccgatttgattctggtgatggagccggagcacctgcgttttattgccgctgtgtcgcccgaatgtcgcggaaaatcgctgctgtttggccaatggctggaaaacagggacattcccgatccttaccgcaaaagtcgtgaagcgtttgaatatgttttcgggcagctggtaaaagccagtcaggaatgggctcgtcgtgtgggtcaaaaaggaattaagcgttaa

SEQ ID NO: 123192 - DNA, 2199 bp, Enterobacter cloacae
atgtcttctcatacatcagacaaatacggtgcagccgcaccgcacagtaatgaaatcgatcttatgcagctacttgctgagatgcttgatcaccgcatgctaatcgggctggtcacgctcctgtttacggtgtgcgcggggctctacgcgtttagcgccacgccggtctaccaggcggatgccctggtacagatagaagcaaagcaggacaactcgttgcttaaaagcttaagccagtttgggtctgacctttcacccgacgctgaacctgaactgttgctgcttaaatcgcgcatgatcctggggggaaccgttgataatctggggctgacatatcaggtaaaacagcgcgttctcccggttgtggggcgcctctgggaacgtctacgcggcagcaaaccgggcaacatgacgataggtgagcttaccctgccccagcaggaggggaaaccgcaagcggttgtcctgaccgtgctggggcagggccggtatcgtctggaaggggagacgcttaaggctgacggtagggttggcaaacggctggtgaaagacgggatcacgcttctggtgacctcgctcagcgcggagccggggacccaatttacccttcaagcctttaccaggcttgaggcaattaacgcgctgcagaagagactttttgtcgcggaatccggtaaacagagcggtatgatcaccctgacgctgacgggtgaagacccggacaggatagcggtggtgctcaatacgattgcagaaaattatctcagccagaatattgcgcgccaggaggcacaggattcccgaagtctggcgtttttacaggagcagttgcctaaggtccgtcacgaactggatgaggccgaagcacgacttaatgcctatcgggcgaagcgcgattccgtcgacttatcccttgaggcgaagtccgtactggatcaggtcgttaacgtggaaaatcagctcaacgaactgacctttcgtgaggcagaggtttctcagcttttcaaaaaggatcacccgacctatcgcgcattacgggagaagcgacaaacgctcgaagagggacgcgcgcgcctgaacagccgggtttcatctatgccttctacccagcaggaagtgttgcgcctgagccgtgatgtcgagtccgggcgtaccatttacctgcagctgctgacacgccaacaggaactgaacatttcacgctccagcgccatcggcaacgtgcggatcattgataccgcggttacgcaacctgagccaataaagccccgtaaagcgcttattattctgcctggcgtgctgctagggctgatggtctccatgggttgggtgttggttcgtactacctgtcggcgagggatcacctcgtcagagcaaatagaagagcaggggatgccggttctggcgacgctgccgcgctcggtctggctgtggaaaaaaacgcatttgcgccgaaagcactttttggcgccccacgggaaacacaaaacctcggatatccccttcctgcccacagaccggccagcggatatgtttgttgaagcgatgcgcggactgcgtaccagcctgcatttcacgatgatggatgcctcaaaccagatcgtggtgattacgggccccacgcagaattgcggcaaaacgctggtcagcacgtcactggcatcaatagcggctcaggccggaaagcgggtgctctttatcgatgcggatatgcgtaaaggctatgtgcataatctctttaagctgaacaaccatcacggattatccgctgtccttgagggaaatgtggcatggcaggaggcgatccagcgcgttgataaggcgggatttgatgttctgacctgcggtccccagccattacgtcccgtggagctgctcatgggagaacgcttccaggaggtgatgtcggggatgaatgcacactatgacgttgttatcgttgatacaccgccggtgctggccgtgaccgatgcggtgctgattgccagagtggccgcaaccacgttactggttgcccgctttggtaaaaccaacgtgaaagagacggaaaactgtgtaaagcgtctgcagcagatgggtgtgcaggtgaacggtgccattctcaatgatatcgtgaaatctgcggcgctgtattacagcgcggggtatagccatttcgactacggctataccccgaaggaaaagaggcgtgagggttag

SEQ ID NO: 123193 - DNA, 1344 bp, Enterobacter cloacae
atggccgacaataccgttaattcgccagcaccagggcgctggcttgaacgtcgttttgcactccgtgcacgcgggagcaccgtgcgcaccgagtgcctggcgggtatcaccggttttctcgccgccgcctatttgctggtggtgatcccggggctgctggccgtgggaggaatggacaaaggcgccgcgaccacgggcaccattctggtcttcgttgccgggacgctgctgatggctttttacgccaacctgccgtttatcgtcgggccaggaattggtggctcggtgctggtcggagtgacgcttgcgggcagtgaaggcattggctggcaaattggtctgggtatcgcctgctggtcggggattttattctttctgctgacccggtttggcctgcgtgaagtggtgacccgctcggtgccacagtccatcaagctggggctgacggcctccatcgggctgtttgtcgccgtactcggtttccgcaacgccgggctggtgctggcgaatgccaaaacgaacgcactgatgctgggagattttttatcacccggtgcactggtggcgttactcggcctgttcctggctatcggcctgcaggctcgtcgtattccgggtgcgatcctgtgggctatcctgctcgcgaccctcgtgggtattccgatgggcgtcacgaaattacccgccagttttatcgatgtgccccactccatcgctcccgtcctcgggcatgtcgatatgctgggcgcgctgaatattgcctttctgccgttcctgtttgtcttcttcgcctccgagtttttctccaccatgggaacaacgctggcggtgggcggggaagcagggctgctggatgaagaaggcaatatgccaaacattaaccgcccgtttatggtggactccattgccgccgcgattggcccgtgggtaggcattcctgccgccacggcgctgattgaatcgtccgcagccgcagaagccggcggcaaaaccggcatgaccgcgctggccgcggcggtaatgttcctgctgatgctgctgtttacccctgtggcgctgatgatcccgaaagaagccacggcgcccgccctgatcctcatcgggctgaatatgtttagcggtctacgtaaggttgatttggcgaacttcaccgacggcttgccggtgttgatgatggtgatgattacgctgattgccaacagtttcgggaccggtattgcgggcgggctgctgttttatatcattatcaaagcgatagccgggaaatggcgcgatatccccgtcggtctttggatcctcgccattcccctggtgtattacttcgccacgctggtgaagcactaa

SEQ ID NO: 123194 - DNA, 1731 bp, Enterobacter cloacae
atgccctttgacctgctgctcaccgatacccgtattgtggatatggtcaccggtgagatccgcgaagcggatgtcggtatcgtgggctcactgattgccagcgtccatccgcgcggcagccgcaacgacgcacatgagactcacgcgctgaacaaccagtttctgtcgccagggctgatggatacccacgtccaccttgaaagctcccatcttatgcccgcccgctacgcggagattgtgcttgcacagggcaccacggcggtcttctgggatccgcatgaactggccaacgtgctgggcattgacggcgtccgttttgccattgaggccagccgcaatctgccgctgcaggtgatggtcgccgcgccttcaagcgtgccctcaacgcccggcctggaaatgtccggggcggatttttccggagacgagatgaacaccctgctcggctggccggaagtgcgcggtgtggctgaagtgatggacatgcatggggtgcttaatggcagccagcgtatgcttgaaattatgcaggccgggctcgacagcggaaagctgattgaaggccatgcccgcggtctcagcggtgcggatttacaggcttatctggcagcaggcgtaacttctgaccatgagttaacgtcggctgacgatgcgctggaaaaactgcgtgccgggctgacgctggagatccgcggttcgcacccttatctgctgcccgatattgtcagcgccctgaaaacgctcccccatctttcgtctcacatcacggtttgtaccgatgatgttccgccagacatcctcatggaaaaaggcgggatcatcgcgctgctgaacctgctgattgaacatggattagcggccaccgacgcactgcgttttgcaacgctcaatgcggccattcgcctgcagcgtaacgacctggggctgattgccgccgggcgtcgcgcggatctggtggtgtttgactcgctggataaactgacggcgcgccaggtctacgtcgccggaaagctgattgcccgggacggggcaacgctcgaacctgttgctgatacgcctcttacgttgccgcgtgataccgtacggttgtctgccctgaccgctgatgatttttgcatgcgcattggcaacgcgaaccatggcgtggctcgcttgcgccacatctgcggcgcgcgctttacccgctggggtgaaacagatgtgcaggtgcgcaacgggtgcgtgcagatcccggacggctttagcctgatctgggttcagcatcgccatgcccgtcatgcagcaaaaccgcaaattgccctgcttcaaggctggggggaactgcgcggggcgattgccaccagctactcgcacgactctcacaacctggtggttttgggccgcgatccgaacaatatggcgctggctgccaatacgcttatcaacagcggtggtggcatggcgctggcgcaacagggtgacgtgattgcccacgttgccatgccgattgcgggcatgctgtcggaactgccacctgccgagctggcgctgcagttcaggacgctgcgcgatcgcagcagtctgattgccgactgggaaccgccttatcgggtctttaaggccatagaaggaacctgccttgcctgtaatgccgggccacatttgaccgatcttggactgaccgatggcagcacgcgccagattgtcgatccgctgatttcttaccgggaaaccccggacaacacacaataa

SEQ ID NO: 123195 - DNA, 918 bp, Enterobacter cloacae
atgacggaaccctggcagcgcttgcccgcgctctctcttcgacagctacagtattttgtcactctggcgcagctgcgtcattttacggataccgccagcaaactggctatcagccagccggcgctcagcagtgcgttgcggcaaatcgagacggtgcttgggggcaaactggttaaccggaccgcctcggccgtgacgttgacggagcttggcaatgccatcctgccgcacgcgcagcgggtgctcagcgtggcgcagcttgcgtttgacgacatgcagcacattgttcaggcgggcggcgaaggaacggtgcgtatcgggttgatcccttccgtgagttcgctgctgttccccttgttgccccggacgctcgcgcaggcttttccccgcctcagggtggaatttcacgatcaaaccaacgatgcgctggtggcccagctgctgaaagggcagattgatttcggcattggtgcgctcgataactctgttcccgaccagctgaacgtgtttcccttacaggatgacccgtttgtcgcggtcattcacagcgacgatccactggccgcgtcggcgcacctgccctggaagcaactggcagggcgggatatcgccgtgttctcaaaaggcaatattcagcgtctggttgcggcgctcgcggaaagccaccgtttgtcgttgccgacacgctatcaggtggactacatcgaaactttgtacggtctggtgcgctcgaaactcgccgtggcgattttaccgcagctctataccacgcacctccaggacccgcagctcagggtggtacatcttcaacaaccggccctggcccgcacggtggcgttaatgcgtgccccgcagccgcttcctccgcttatcgaatcctgctttacgctgatggccgacacgttgcgaacgaaatga

SEQ ID NO: 123196 - DNA, 516 bp, Enterobacter cloacae
atggaaaaccgcacattcagtcgactgcgccgctgggcgcgggaagggatcatcttctttctgctcgcgctggccgtaatgtggggcgtggatcaataccgcaagcccacactccccgccagctttagcgctgcaccgatgcacagcatcgacggaaagatccacgatataacggcactcagccaggaacgcccgctgctgatatacgtatgggcaacctggtgcagcatctgccggtttacgacgccctcggtcaatacgctggcagaacagggtggcaacgtcgtgagtatcgccatgcgttccggcgacgatgcaaagctggcgcgctgggtcgacaagaaacagctggtcatgccggtggtcaacgatgccaacggtgcgctgtcacaggcgtggcaggtgagcgtaacaccgacgctggtgatcgtgtcgaagggggaagtggtcagtactactacggggtggacaagttactggggaatgaagctcagactgtggtgggcagggctgtaa

SEQ ID NO: 123197 - DNA, 771 bp, Enterobacter cloacae
atgcagcctgacctgctcgatttacacgttttacatcagtttcgaacccgttccccgcttacccactgtatgaccaacgatgtggtacagacctttacggccaatgtgttactggcgcttggcgcttctccggctatggtgattgaagccgaagaggccgagcagtttgccgcgctcgcagatgccctgctgattaacgtcgggacgctgacggcgccgcgcgcccagtcgatgcgccgggcgattgagagtgcagtggcagcagggaaaccctggacgtttgacccggttgccgtaggggcgctgacgttccgcacccgtttttgccaccaaatcctcgccctgaaaccggcggccattcgcggcaatgcctcggaaattctcgcccttgccgggatgagtgcgggcgggcgcggcgtcgataccaccgacacggcggcggctgcgctgcctgccgcgcaggcgctggctcgccagacgaatgccattgtggtggtcaccggtgaacgggattacgtcaccgacgggcagcgcacccgcacggtcgtgggcggtgacccgatgatgacccgcgtggtgggaacgggatgcgcgctctcggcagtcgtggcggcgagctgctcgcttcccggcgaccggctggacaacatcgccgccgcttgcggatggatgaaacgtgccggaacggcggccatcgcccggtctggtggtcccggcagttttgccagcgcgttcctcgacgcgctctacactctggaggaacgggtatga

SEQ ID NO: 123198 - DNA, 954 bp, Enterobacter cloacae
atgagtgcttttgctgcacgccttgaaacactgcacgccactcgcccggtcacggtgttgggtgctgcggtcatcgacgtgatcgccgacgcctatgccctgccctggcgcgggtgtgatatcgaactcaaacaacagggtgtcaatatcggcggctgtgcgctgaatattgctattgcgctgaaacggctcgggatcgccgcgcaaaacgcgctccctgtcggtcacggagtgtgggcagacatcatccgtaacgccatggccaaacaggatctgcacagcgtcatcgaagtagaaacgggcgacaacggctggtgtctggcgctggtcgaaccggacggtgagcggacctttatgtcgtttagcggcgtggagaaccagtggcaacagcgctggctggatgcgctgcacgtgccgtctgaaagcctggtctacctctcaggctatcagctggcgtcaccgtgcggagagcatctgacggcctggctggaaggcctggaaaacattaccgcgtttatcgactttgggccgcgcattgccgatattcccgatgcgctgatggcgcggatcatggcctgtaagccgatggtatcgcttaatcgccaggaagccgagatggcagcgggacgatttggcatggaagctgaaacactcggcccgcagtggctacagcgttttggttctgcgctgattattcgccacgataaagacggtgccgcctggtatgagggtgataaatcgggctacgttccggcgtttcccgcaaccgtcgtcgacacgatcggtgcgggcgacagccacgccggtggcacgcttgccgggctggcggcaggatggtcgctggctgatgccgttacgcttggcaatgcagtggcggcctgggtcgttagccaccgcggcggcgactgcgcgccagggcgcgaggcgttactcctcgcacacaaagacgtataa

SEQ ID NO: 123199 - DNA, 333 bp, Enterobacter cloacae
atgtctggttggttcgagttaaacaaaagcagtgatggtcagttcaggtttgttctcaaagcaggaaacggagaaacgatcctgaccagtgagctttacaccaccaaaaattccgccgaaaacggtatcgcctccgttcgcaccaatagcccttctgatgaacgttatgagaagaaggtggccaccaacggtaaattccacttcaatctgaaggccgggaatcatcaggttattggcagcagccagatgtatgcctcggaacagtcgcgagataaaggcatcgcgtcggtcaaaactaacggttcaagccagacggtaaaagacaatacctga

SEQ ID NO: 123200 - DNA, 1404 bp, Enterobacter cloacae
atgaaattctggcgtccgggcattaccggtaaactctttgtggcgatatttgccacctgtatcgtgctgctggtcaccatgcactgggccgtgcgggtcagtttcgaacggggttttattgattacatcaagcatggtaatgaacagcgtttacaggggctgagcgatgcgctgagcgatcagtatgccctgcacggtaactggcgttttctgcgcaataacgaccgcttcgtattccagatcctgcgctcgcttgagcatgataccggtgacgatcgcccggggcccgggatgccgccgcacggctggcgcacccagttctgggtgatagaccaggatatgcgcgtactggttggcccgcgcgcgcccattccgccagatggcacaaagcgggcgatcacagtgaataacgccaccgtaggctgggtgatcgcctcgccggttgaacgcctgacgcgcaacaccgatatcaactttgatcgccagcagcgccgcaccagctggttgattgtcgcgctctccaccctgctggccgcgctcgcgaccttcccgctggcccgcggtctgctcgcgccggttaaacggctggtggaagggacgcataagctggccgccggggatttctccacccgcgtcgatacccgtagccaggacgaactcggcaagctggcgcaggactttaaccagctcgccagcaccctggaaaaaaaccagcagatgcgacgcgattttatggccgatatttcccatgaactccgcacgccgctggcggtgctgcgcggcgagctggaagctattcaggacggcgtgcgtcagttcactcccgaatcggtggcctcgctgcaggcggaagtgggcacgctgaccaaactggtcgatgacctccaccagctctccatgtcggacgaaggcgcgctggcctatcagaaagcacccgtcgatgtgataaacgtgctggaggtggtaagcggtgccttccgcgagcgtttcgccagccgcaacctgaaaatcgatctctcactgcctgacagcgccgtggtgtttggcgacaaagaccgcctgatgcagctgttcaacaatctgctggaaaatagcctgcgctacaccgacagcggcggtggcctgcatatttccggcaaacaagaaaacgtgcattttgccctgacctttgcggattccgcccccggcgtgcaggatgcacagctggaaaaactgtttgagcgattttatcgcaccgaaggctcccgcaatcgcgccagcggcgggtccggtctgggactggcgatttgcgtaaacatcgtcgaggcccataatggcacgatccgcgccgcccattcgccttttggcggggtaagcattacagtagagttacctctggaacgggatttatcgagagaagcatga

SEQ ID NO: 123201 - DNA, 3078 bp, Enterobacter cloacae
atgaagtttttcgccctcttcatttatcgcccggtggcgacgattttactctcactcgccatcaccctgtgcggcgtcctgggcttccggctgctgccggtggccccgctgccgcaggtggatttcccggtgatcatggtcagcgcctcgctgcccggtgcatcaccggaaaccatggcctcgtcggttgccacaccgctggaacgttcactcgggcgaattgccggggtcaacgagatgacttccagcagctcgcttggcagcacacgcatcattctggaattcagcttcgaccgggatattaacggcgccgcgcgcgatgtgcaggcggcgatcaacgccgcgcagaacctgctaccgagcgggatgccgggccgtccgacttaccgtaaagcgaacccgtccgatgcgccgatcatgatcctgacgcttacctcggacacctattcgcaggggcagctgtacgatttcgcctccacccaactggcgcagactctcgcccagattaacggcgtgggtgatgtcagcgttggcggaagctctctgcccgccgtgcgcgtgggcttaaacccgcaggcgctgtttaaccagggtgtttccctggacgatgtgcgctctgccatcagcaatgcaaacgtgcgcaaaccgcagggggccatcgagaacagtagccaccgctggcaaatccagactaacgatgagctgaaaaccgctgcggaataccagccgttgatcattcactacaacaacggtgcggcggtgcgcctgagcgatgtcgcgagcgtcaccgactcggtgcaggacgtgcgtaacgccgggatgaccaacgccaaaccggccattttgctgatgatacgcaagctgccggaagccaacattattgagacggtgaacggtatccgcgcgagattgccggaactccagcagaccatcccggcggcgatcgatctgcagattgcccaggatcgctcccccaccattcgcgcctcgctcgaagaggtggagcagacgcttgtgatctccgttgcgctggtgattctggtggtcttcctgtttctgcgttcaggccgggccacgctgatccccgcggtggcagtgcctgtctcgctgatagggaccttcgcggcgatgtacctgtgcggatttagccttaacaacctgtcgctgatggcgctgacgattgccaccggcttcgtggtggatgacgccattgtggtgctggagaacatctcgcgccatctggaggcggggatgaaaccgctgcaggccgcgctgcagggaacgcgagaagtgggctttacggtactgtcgatgagcctgtcgctggtggcggtgttcctgccgttactgctgatgggcggcctgcctggccggctgttacgggaatttgccgtcacgctctcggtcgccatcggtatttcattgatcgtgtctctcacgctcacgccgatgatgtgcggctggatgttaaaacgcagcaagccccactctcagccgcgccgtaaggggtttggtcgcttcctgctggcgatgcaggaaagctatggcaagtccctgaagtgggtgctgaggcatacgcgcatcgtcggcctggtgctgattggcaccatcgtgctcaacgtctggatgtacattactatcccgaaaaccttcttcccggagcaggacaccggggtgctgatgggcgggatccaggcagaccagagtatttcgtttcaggccatgcgcggcaagctgcaggactttatgaagatcatccgcgaagataaagcggtagataacgtaaccggctttaccggcggttcgcgggtgaacagcgggatgatgtttatcaccctgaagccgcgtgacgagcgcaatgaaaccgcccagcaggttatcgaccgcctgcgcgtgaagctcgccaaagagccgggcgctaatctgtttttgatggccgttcaggatatccgcgtcggcgggcgtcaggctaacgccagctatcagtacacgttactctctgacgatttagccgccctgcgcgagtgggagcctaagatccgcaaggcgctggccgccctgccacagctggcggacgttaactccgatcagcaggacaacggcgcagaaatggcgctgacctacaatcgcgaaaccatgtcacgtctggggattaacgtcgatgccgccaacagcctgctgaacaatgccttcggccagcgtgagatttccaccatctaccagcccatgaaccaatacaaggtggtgatggaggtggacccgcgttacacccaggacatcagcgcgctggacaacatgtttgtgattaataacgacggtaaggcgatcccgctctcttactttgccagctggcagccggcgaacgcgccgctgtcggtgaaccaccagggcctttcggcggcatcgaccatctcctttaacctgccagccggttcgtccctctctgaggccagcgatgcgatcaaccgtgcgatgacccagcttggcgtgccgtccacggtacgcggcagttttgccggtaccgcgcaggtgttccaggagacgatgaattcgcaggtgattttgattctggccgccattgcgacagtctatatcgtgctgggcgtgctttatgaaagctacgtccatccgctgaccattctctccacactgccgtcggcgggcgtcggggcgctgctggcgctggagctgttcggcgcgcccttcagcctgattgcgctgattggtatcatgctgttaattggcatcgtgaagaaaaacgccatcatgatggtggacttcgcgctggacgcccagcgaaatggccacctgacgccagaagaggccatattccaggcctgtctgctgcgttttcgcccaatcatgatgaccacgctggcggcgctgtttggcgcgctgccgctggtgatttccggcggtgacggttcagaattgcgccagccgctggggatcactattgtcggggggctggtgatgagccagctgctgacgctctacaccacgccggtggtctatctgttctttgaccgtctgcgagtgcgtttttcgcgtaaaaacagaacgacggtaaccgaataa

SEQ ID NO: 123202 - DNA, 1209 bp, Enterobacter cloacae
atgaaaggcagtaacaaatcccgctgggcaatcgccgctggcatcattgtggtggctcttgccgccgcctggttctggcacaatcactcttctgacacttccgcaggtgccagcagcccatctcagcgtcccgcgagtggcggacgtcacggcatgcgcggcggtgcgctggctcccgttcaggcggctactgcggtaaataaagcggtgccccgttatctctccgggctgggaaccattaccgccgccaacaccgttacggttcgcagccgtgtggacgggcagctgatggcgcttcacttccaggaaggccagcaggttaaagccggggacttactggcggaaattgacccaagccagtttaaagtcaccctcgcgcaggcgcagggccagctcgcgaaagacaaggccacgctcgcgaacgcccgacgcgatttggcacgctaccagcaactggtgaaaaccaacctggtatcgcgtcaggaactggatacgcagcagtctctggtcagcgaagcgctgggcacccttaaagctgacgaagccgccgtggccagcgcacagttacagctcgactggagccgcatcaccgccccgattgacggccgcgtcggtctgaagcaggttgatattggcaaccagatttccagcggcgataccaccggtatcgtggtcatcacccagacgcatcctgtcgatttagtctttaccctgccggagagcgacatcgcaaccgtggttcaggcgcaaaaagccggcaaagggctggttgtggaggcctgggatcgcaccaacaagcaaaaattgagcgaaggcaccctgctcagtctggataaccagattgacaccaccaccggcaccatcaagttaaaagcccgctttaacaatcaggatgatgcgcttttcccaaatcagttcgtgaatgcgcggatgctggtcgcgacacaagaaaatgcggtcgttatcccgacggcggcgctgcagatgggcaacgaagggaattttgtctgggtgcttaacagcgagaataacgtcagcaagcatctggtgaaaaccggcattcaggacagccagacggtggtgatcagcgccggcctttccgcaggtgaccgcgtggttaccgacggcattgatcgtctcaccgagggggcgaaagtcgaagtggtagaaggccagcaacagcctgctaagcagggagcgacttcctga

SEQ ID NO: 123203 - DNA, 162 bp, Enterobacter cloacae
atggaagactgtctggatttgtctgattggcaggggaaggggcgcggcgtgatgcggacttcaaatcggatcaattggcagtgcataatttaccaggaatattccctgccacctgaaatattcttattatttatctgccgggtgagaaacggagaaagataa

SEQ ID NO: 123204 - DNA, 585 bp, Enterobacter cloacae
atgaaaaaattattactggtggcctctctggtttctgtatttgctgctgcaaatgctatggctgatgttacggcatctgccaccgcatcatgggatgcaacggcaacgaaagatacaaccagcctgctggtcgtgaccccattgaactcgctgacgttccagtatgcagagggcctgaatgggtttaacactcaggatggcgcttttgatgtgacgattcagggacaggaaagtgcaaccgattttgaactgactgctcaggtcatcagcaatacgctgaccaatgcaagcggtgatgcatctaccctgaatgtgggcgtggcatggaatggtcaggcgctgtctaactctgccgaaaccgttctggtgaatgcggcttccacttcaggtctggaaagcctgctggccgatggcgcctataacggcgctgagcgtgtaagcgatcagtccagcttcaaattctccatcgcttcagcgacttctgacggttcgactgctgtaactgactattctgcgctgccggatggttactggacgggtgacgtaaaagttcagttcaatgcaacctggaccactccagcgtaa

SEQ ID NO: 123205 - DNA, 678 bp, Enterobacter cloacae
atgaagaaatatttgccactcgcagcgctggcagggatggtcgtatccttttccagtctggcgattaatgtgggtgatatcacgtcgataatgacggccgatcaaaacgcgttatcaaaagaaattatcaacaccactgattccgcccgctatgtgagcgttaccgtaaaaaggctctcttcaccgctgcctgacggaacagaaatgcaatttgaaacgtcgggagaattactttctacaccggcgagccttattttacccggtgatgcgaaagatgtttttcgctttttctataagggccctgaagatgacaaagaacgttattaccggctgcagtgggttgacgaacccgtaagcgaaagcgcatcgactaaggctggcaaagccgcgattgcgacagcgtcggcagaaatcgggacaatactggtcgtggcgccacgcaaggaacgattcgaatacggtcgtgacggggatgtcatcaccaacaaaggcaacgtctcgtttcgggtcattgcttacggagcctgcaaagaggcgtcacaggatcggggacgcgggtgtcgcgagcgttattacgtcatgccaggtacaaaaataagattgcagaaaagcgatgtgtcaaacagtcgcacccgcattgggatttggcatggcaagcaatttattacagtgaagtaa

SEQ ID NO: 123206 - DNA, 2493 bp, Enterobacter cloacae
atgtcttttaaatatcttataggagggagtttattactctcttatgcgctaacatcaggggttgcgcattctgcaccggttaagattggtaattatgttattccaggggcattcgcgcgttctcttgaacaggggatgacggtccccgtttatatccgctaccaggagacggatacaaaaagccaacaaaaaattgctgatgcggtcatctcgctggttgagggaaatatcgttgtaaaatccattatggttgccgatctgcccaataacgcggtgctttcagagaaaacgcgcgagatggtggaaaaaataggcgatgcgaaatttatcgacaatacctctcttgccctttcgcgagacgcacggctgaaattaaacgtctcctcttttcatctggagatgattgtcagccgggatgccctgactgaagcggtggtcgcccgcagttcattgctgggaccgtccagcgttgatcgactgtctactgtgctgaattacaactttggcacctattacaatgactaccgcaatggcagcagctctcgcagttatttaaccctggataacaccacctcgttgagagagcaccacctcaatatcaatggctcggtctatggtattggcgagagtaaccgctccagcaaactgtatcgtgccatgtatgagcgcgattatgagggttatcgtctggcgttgggcatgctcgacacctggaacgttcagtcgatcgccagcctcaatgcgctgaatggcggcaagatctacggcctcagctacggcaataaaggcagtacggtggttgaaaacacctccctgtccttgatcccaataaccatatttttaccgtctgccggtgaagtgcatgtgtttcgtgatgggcgcttgttaagcgttcagaacttcaacatgggcagctacgaaattgacaccagccggttcccttacggtgtgtatgacgtcacggtggatgtcgtggtaaatggccggacggtgaacacccgcgtcagtcgtgtgaataaaatttttgcccgccagcaggccgcaggcctgcatgaagtcgcatggcaaatttttggcggttcacttgattacgaccgcgtgagttataagcgcaatcattaccgtgatgccggcagtgaacagacctggattgcgggtggtgcggcctcgttaaccctggcaatgctctccgggctcaccctgaaaacgacaggttatgggtttgatgacaatgccgtcaatgaaacggacattacccttaacgtcaacgaatatgtcagcgtcgggacacaaacgctggtggcgaacgacggaacatggcgcaacgtcagcagcgccagtcttaatgctccaggcgggtttggatcgctgtgggcatcgcgggaagacagcaaaatcggtaaccgtctgccggtgcaggagcgggataactattcgattggcgcaacattgaacctgagccggtttattccgcacggtggcacgttaacggtcagccagaccgaaaaccgctattccggtaatacctaccggaacctggattacagtaccaccctctatgcgggacggtacgccacagtggggttacgggccgggatacagcgctattactacaacaatacgaatgatgacggacgtcaggaacgctatgtcagcctggatttatcgctgccgctggcctcgtggatgagtgtcggggtttcacgcgatcgctacggcgcaacacagggcaatatcagcgcgcgtaaacaatttgaggatagcgtcattacgtctgcaggcatttccgcctcgactcgcctgagtggagagcagaactacgacaacaattacgctgtaaatggcaacctgagttatgacacccgctataacggcgggacggtttcggtgacccgttcagcagacaactcgaccaatatgaacttctcctctcagggttccgttgcctgggcgggcggcgattttggtctgagcaaagagcgacagcgctcgggtattattgtgaaaaccgatcttgtgggtgatggaaagctggccgcaaaaataaataaccgaaattatattcttagcggcaaatcgagctttattgcactcccgccttacgcgcaatacaagctggaaattatgaatgataaaaactctgaagacagttttgacattgtctcgggccgtaaacaggcgcttaacctttatcccggtaacgtcggcgtggtgtcacctgaggtgaaaagcatggtgaccgtgtttggccgggtgcgatatcccaatggtgaactggcgtcaaatacggacatccataaccacattggcaaaacgcgcaccgacgcgaaaggtgagttcgccattgatattgataagaagtatcccgttattaccctggtgtccgccaacggtaatatctgcgaagcggatttagatctggaaaaagccaggggcgctgcgtgggtaggggatgttaaatgtgcaccgcaaaccacgatggcgcagagataa

SEQ ID NO: 123207 - DNA, 1617 bp, Enterobacter cloacae
atgaaaaaaagtgcttccgtttttatttcgctcctgtttttggcggggttgattcccttcaccgcaagggcactgaccgcctcatcgtcaggggcgatcaacaacacgtttttatttatcgagaacgacattgacggtgagtatttcattacgccgtccgcgttagatccccgtttcagcgggtcaaatacctgggttaaatacggcacatcccaggtcagcctcggttacctgggttatgtcatttggactgcgccagccaataattatcaggatatgtggattgataattcgcccattgatgctcctttcacaggaatacgctgctaccgaggttcgcagtgtccgacgacgggctacattgccggacagggggtggataacaatggtttttaccacgcgcaggttggatccgtggcgggggttattggcggagcgtatggctttgcttcgctgagcaactcagcctatgagtattttcgtaatatgccgacgggtggcagcgaaacctatgtttttaaccgctgctatacctcggttaactatgattacgcctcgggacaacgctgtaaggatcagacaacaggtcgctggaattacatcaattacacgttaaacaagcggggacatctggcgctggaatcaacaagtgcctttcaggagctgtggatcgccagtgatggaaccccaagcatcacaaatgattccggatcctgtgagctgggtgtcgtcagtaacgttgatggcgtaatttgtaaaatggtcaaatacaaccttgagcagacacaaaatttgacggcatcgttgacgttcagagcgtatatcgattctgctgcgttgggttttaccccttccgcaaccaccgtgaaatattcgggaaatggctcgacatggtataacttcagcgcctcgacggcgtattacaacgtcttttcgacatctggtcagtatatctatgtctttttgtcgaaaacattccttaagaatctggtggatgcaggcgtcagtattaccaacagccagccctttacgtttgcgtttacgaatgcattaactccggagtcaggctattaccagtttaccccctctttgcagctcaatattgtgccgaaggagtatgggattagcattgtctcatcgaataatacggcctctgccagtggaagcggcaccatcggagatgacgcgccgattgagatggattacgtcgtcaccgtatcgggaccccgtcaggctgacagtattacggcccaggttatcggggacagcacgacaatcaacgacaccccttactgcctgtttacgtcggcccagggggggataaacgtgcctgtccctgcctatctgcaatacaacaccgtgtcgggaagccctactcaggtgaggaacagctgcagtgaaaatgccattagtctgaacgatgcgttatggcaacaggtgccatgggatgccaacaacacggatgatggcagctttttcagcaccaacttaacgctgctgttcccgatgaatgattcccgctcagcactgacggtggctggcgctgactgggaaggcgtggtcagcgccagtggtgaaatcaaagtcaccgcgaactggctgggagtaacaaaatga

SEQ ID NO: 123208 - DNA, 696 bp, Enterobacter cloacae
atgatgcgctggcggaaggtcgcggagggtgtggtgggactctgcattgcgctttacacgctttctgcccacgcgctgtatctggactccacgatctatgatatccccgcagagcggtcgttcattagcaaacgtatttacaacgacagccaaaaacagaatgtgtacagcatttcggcgattaaaatcgaccgtccaggaccgggtggggaaaagcgtctgccaatagaggacggggagttgctgtttacaccgctcacgttttcgctcgccccggacgccggggagtattttaagatcttctatcgcgggcccgaggatgacaaagagcgttactaccggattcagtttcgcgagatgccggtaacgctgtttgctgaacgtccttcaggcaaagcaagtgaagctgtacccgctattgcattggatacgatactggtggtcaggcccagaaagctgacgctaggttatactctggatgagcaaaaaggggcgctgacaaataccggcaatacgtttttcaggatcatcgtacacaagggatgccagtcaaccgatgacgaggcgacgatgcgctacctgctgcctggagagacctaccgaagcagtgcgttaaacactaaaaataaaaaattcatcgttgcgttgaaaaaatatataccgataggcgatggttgttttaaaaataacagttaa

SEQ ID NO: 123209 - DNA, 729 bp, Enterobacter cloacae
atgaaaaagataatcaatgatcatattgtatacgattcagagaccagagcgctaagtgtacagggagaaagagtggttctgtccgctgcaacggcaagattactggagctctttattgcgaacaaccgcaaacaattacatcgggatctgattatagaagaagtgtggggaaggtatgggttgatcccatcaggtcacagtctgaataaaaatgtcagtattttgcgcaaaacgttagcagaactgggaatggataatctgatcgcaactatcccccgagaaggatttgtttttcaggcgcagatcgaaaacgtaaaagaagatgcgttgccgcatagcatcactgcattaacctccgccaccaaacccgggttaaggcgatatggtaaaacgatcgttggcggaatgttaggcatcagcctggtgatatctggctttgtccttctgccaaaattattacgagataccgatggtgtcgtgcatgtacaaaaatccggttcctgtgaaatatttacgacagatgataattcagttgagaaaatatccacttttttgaattcatcccgatggcagcaattcaaatctatctgtaagggaagaaataaggtcattgtgttttatgatgacaatggattgtctgcaggtaataaactaaaggaatcatttttcagtatttgtacgttaggctcccggggagttgcacatgcgtgcgaaaattatgtattttag

SEQ ID NO: 123210 - DNA, 474 bp, Enterobacter cloacae
atgcgtgcgaaaattatgtattttagtcttgccgtagcgcttgttatcatttttttgtttttatttaaacgtcatgaggttccggcagcgctggtatgctcagcgaagaaccatcttgtgctcaatacgcaaaaaacaggtatgcacatcgaaggggaggtattgctggttttcaggatatcatctgctgaagagggggtattgtcacaagtgggcgtgattaatgttaatgggaaaagctacgccattaaccgttccacgatgcttaaatttttaggtaatgatagtgacggctacatacgtacccaacgggtttctgtgatcaaaaatgataatgatgatttgcctgatgagatcacgggattaattatgtctaagcaacacaacttttattataaaataatgcatattgcgcacaatgtgtacggtatacgcgatttgcgacgcaccctgttggtgtgtcgggcagcgtaa

SEQ ID NO: 123211 - DNA, 1626 bp, Enterobacter cloacae
atgagctactacacactatgcaatctaaaggcattttattgttttaccttaagtctatgtgaataccaggtcaattgtgaatacactttcctgttcgggaaggctgcgttttacaatgaaaacgtgatggtgattattatgaataagaaaaaggtcttcctgctcagttatgacatttatcttttcgccgggcttagggcttttttgcctaatctggtactggtcgacagtcagacatttatatcagagtcagacctttcttttcagcaatacaactcctgtctgttaattgttgataaccggatgccctttttcctggtgaagaaatggctacatcgtaacagtagccagtttatcatggtaaacagcgttgttctcaggttgagcgaaaatgagtgtattaatcgaggctatgaatacagtacctcaattgatgtaacactgcattatacgaccgtcatcgatatactcacgcgtatactgatgaccaccccgcaaccggaatcacgcgtaaaatcagatgagctggacgttttcgcgttaaccgaatttgaggcagacatgcttaatgccatgatgacgaaagaggggcaggccgaattctgccgggcaaattcattgactacaaaatccctgtatcgctaccgggataaaataacgcacaggcttggttttaaaaattttattgaatctattatttttcttatccgcaatggtttcctgactgaaagggatgtggggcagaacagtacgctaatgcgcaaatccaccgggcgtagttatgataataatgatgcggggcgtctgagtctggcactcaaaaatgatgagattttaccttattatcaacccgttgtcggtgcaggtggtgaactgtgcggtatagagattttggcccgctggccattagggcataattacacgatttcgcagcgagaatttattccgctggcagaaagctgtggcctgattaacgaactcaccagctatttaatgcataaagttgccagtgacttaaagcaaaagaataacgggttaaatacaccgctgtttgtggcgtttaatgtcagtccaaccacgttaagtaacccggtgttttattgggagtgcctcaattttttagagctgacagaatcgttaccggtgaagctcatgattgagatcaccgaaaatcaaacgctggccgtgacgcctgcaataaaagaactgatccgttcactgcgtaatcgcggggtgatgtttgctctggatgactttggtacaggatacgcgaatttatgctatctgaatgaactcgaactggatgtcataaaaattgataagacctttatcaacgctatccaggctgataaccaaccgctgccgatgctggaatcgattattaatctggcgatgattctggggctgcgtaccgtggcggaaggggtggagtacgcttatcagcgagagtggcttatcagcaaacaggtggattacctgcaggggtatcatttcctgcccccggtgccgttcgctgatttccggcgatttgtcgagcaaagccagccgacgacaagagaagcggcatgcaaaaagggcagcgtgctgccaggtaaaaaggaaaatgtgcgttttaacgcgctgtaa

SEQ ID NO: 123212 - DNA, 1353 bp, Enterobacter cloacae
gtgtttattggatttgactacggtacggcaaactgttcggttgccattatgcaaaacgggcaaccacagctcctgaagatggaaaaagagagcacgctgctgccatcaatgctctgcgcacccacacgcgaagcggtcagcgaatggctgttccgtcatcatcaggtgcccgctaccgcagcggaaacccaggcgctgctgcgccgggcggtcagttttaaccgcgacgaagatatcgacgtgaccccttccagcgtgcagtttggcctctcatcgctgggccattacattgacgatccggaagaggtttacttcgttaaatcaccgaagtcgtttctgggcgccagtgggttaaaaccacagcaggtggcgatgttcgaagacctggtgtgcgccatgatgctgcacatccgtaaccaggcgcagacccaggtacccgatcccatcacgcaggccgttattggtcgcccgatcaacttccagggtctgggcggtgaagaggctaaccagcaagcgcaggggatcctcgagcgcgccgcacaccgagccggtttccgtgacgtggtcttccagtatgagccggtagcggcagggctggattttgaagccacattaacgcaagagcaacgcgtgctcgttgtggatattggcgggggcaccaccgactgctctttactgctgatggggccacaatggcatcagcgtcgtgaccgcgaaaccagcctgttgggccacagcggctgccgcgtaggcggtaacgacctggacattgctctggcatttaaaagcctgatgccgctgctcggcatgggcggacaaaccgaaaaaggcattgccctgccaattctgccctggtggaacgccatcgccatcaacgacgttccggcgcagagtgatttttacagcaccgcgaacgggcgcttcctgaacgatctggtacgcgacgcgcaggacgcggataaagtcgccctgctctataaagtgtggcgtcagcgtctcagctatcgcgtggtgcgtaccgctgaagagagcaaaatcgccctctctgaccgtgctgaacacgctgtctcattaccttttatcagtgatgagctggcgaccgcgatatcgcaggaagggctggaaacggcactcgcccagccgctgcagcggatcctcgagcaggtgcaactggcgctggagaatggtaaagagaagccggatgtgatttacctgaccggcggtagcgcccgttcaccgcttatcaagaaagcgctggcggaacagcttccgggtattccgattgccggtggcgatgactttggctccgtaacggcaggtctggcccgctgggcacaggtgatgttccgttaa

SEQ ID NO: 123213 - DNA, 873 bp, Enterobacter cloacae
atgtataccctgacctggcaacccccttacgactggcaatggatgtttggtttccttagcgcacgtgcggtagcgggcgtagagaccgtcacggaccactattacgagcgcagtttcgcctgcgaggggcatcaggggatatttcgcgttacgccggacagccaaacccctacgcttgccgtgacgctcagcccgggcttgattccggttgcgcagacctgccttgagcgtatcgggcgacttttcgatcttggctgcgatcctcaggcgatccgctcgacactgggggatctgggggccgcacggccaggcttacggttgccgggggcgatggatgcctgggagcagggtgtgcgggcgatactcgggcaactggttagcgtggcgatggcggcaaaattggcttcccgcgttgtcgccctgtgcggagagccggttgaagacgccccgggttatctctgcttcccgaccccgcacgcgctggccgcagcggacccgctggcgttgaaagcgcttggaatgccggtaaagcgggcggagtcgatcgttcatctggctcagtctgtggtggacgggacgtttccgctttcccctcctgcggatattgaggcgggaatgaaggccttacagcagcggcccggaataggacgctggacggcaaactacctggccctgcgcggctggcaggcgaaggacgtttttctgccggatgattatctgattaagcaacgttttgccgggatgacgcctgcgcaaattcggcgctacgcccagcgctggcagccctggcgctcgtatgcgttgctgcacatctggtataccgacggctgggcgccatcagttgatggcgaaatagctggtattaagcagtag

SEQ ID NO: 123214 - DNA, 3330 bp, Enterobacter cloacae
atgaataaacaataccagcgggttttggttaccaccccacatcctttattgcgacttgtctgtctgggcctggtcacctttatctttaccttattttcgctggagctgacccgcttcggcaccctgctcgccccgctctggttccctaccgccatcatgatggtggccttttaccgtcatgcgggaaagatgtggccgggtatcgccctggcctgctcgtttggcaatatcctggccgcgtggatgcttttctcctggtcgtcgatcaacccgacctataccgctatcaacgtggttgaagccgtgattggcgcggtgttactgcgtaaactgctcccgtggtataaccccctgcagaatctgaatgactggatccgtctgtccatcggcagtgcgctggtgccaccgctggttggcggggtgctggtgtatcttctggtgccgggtccggagccgctgcgtaatttcctcgtctgggtgttatcagaggccattggtgcgctggcgctggtgccgttagggttactgtttaaacctcattatctgctgcgtcaccgcaacccaaaattgctgctggaaacgctcgccaccatggccgtgacgctggctctcagttggatggcgattacctggctgccgtggcccttcacctgcgttatcgttctgcttatgtggagcgccgtgcgcctgccgcgaatggaggcgtttctggtttttctggtcaccgtgatgatggtctcgctgatcatgacacgtaaccctgtattcatgacgccgcaaaacctgctggtgacgctgaacgctccctggctgccctttttgatgatgctgttgccggccaatattatgaccatggtgatgtatgcctttcgcgccgaacgcaaacatatcaccgaaagtgaagcgcgttttcgtaacgcgatggagtattccgccatcggcatggcgctggtcagcattgaggggcaatggcttcaggccaataaagccctgtgtaacttcctgggatacagccagacggagcttcaggctctcaccttccagcagttaacctggccggaagatttgaataccgatctcgaacagctggagcagctggtcaacggcgacatcaacacctacacccttgagaagcgttactacacccgcaatggtgaagtggtctgggccctgcttgccgtctccgtggtgcgccacaccgacggttcaccgctctattttatcgcccagattgaagatattaacgacctgaagcagaccgagtgggtcaataaacgcctgatggagcgcatcaccctcgccaacgaagcgggcggtatcggcatctgggagtgggatctggagccagacattatcagctgggataagcggatgtttgagctgtatgagatcccgccgcacatcaagcccacctggcagctctggcacgaaacgatgctcccggaagaccgcgctcacgctgaaaaggtgctccgggattccctcatttcacgtttgccgtttaagcttgagttccgcattcgtgttaaagaaggcgtgcgccatatacgctctctggcgaaccgggtactgaacaaacagggtgaagtcgaacgcctgctcggcatcaacatggacatgaccgaggtgaagcagctcaacgaagcgctgttccaggaaaaagagcgtttgcacattaccctcgattccatcggcgaagcggtgttgtgtaccgatatcgacatgaatgtcacctttatgaacccggttgccgagaaaatgagcggctggctgcagaccgaggctatcgggcagcctgtcctgaaagtgttgcacatcacctttggtgaaaagggaccgctgatggagaatattcacagcggcgatatgtcccgttccgatatagaccaggacgtggtgctgaactgccgtaccggcggcaactacgatatccactacagcatcaccccgctcagtacgctggacgggcagaacattggctccgtgatcgtgattcaggacgtgacggaatcgcgcaaaatgctgcgtcagctcagttacagtgcctcgcacgatgccctcacccacctcgcaaaccgggtcagtttcgaaaatcacctcaaacggctcttacagaccgtacaggagacacgccagcgtcatgcgctggtgtttatcgatctcgatcgttttaaagccgtcaacgacaccgcaggccatgcggcgggtgatgctctgctgcgggagctttcgtcattaatgttgaccatgctccgctccagcgacgtgctggctcgtctcggcggggacgaattcgggttgttgctcccggactgcaatatcgaaagcgcgcgttatattaccggccgcctgattaacaccatcaatgactatcactttatgtgggaaggacgtctgcaccggatcggcgccagcgcgggtatcactctgattgatgaaaataaccatcaggcttcagaaatcatgtcacaggcggatatcgcctgttacgcctcgaaaaacagcggacgcggcgtcgtcacggtttacgaaccccagcaggaacgggaccacggcatgcgcagcatgatgtcgcttgatgagcagtggcacatgattaaagacaatcacctgatgatgattgcccgcagcgtcgcgtctccacggataccggaaagctgcaacttctggctgatttcattacgcctgtggaccagccagggcgaagtgcaggaagagcatgcgttccgctccggacttgcggagcctgaactgttgcacgcccttgacagacgtatcttcaacgagtttttccgcacctccgccgcacaggtcgcccacaaaggcatgggggtcgcgcttccgctgtctgaagcgggtttagcaagcgtcacgctggttgatgaacttgtcgacctgctggagaagagccccatgccgggccgtctgctgcatctggttatcgctgccgacgtggtatgtaacccggatgagaacctgcagcagggcctgcaaaagcttcgccatgctggctgccgcgtcgtactcagccaggtgggacgcgatatgaacatctttagccacctcagcgccaatatggccgattatctgatgcttgatacggaaatggtgacgaatgtttatggcaacctgatggatgagatgatggtgacgatcgttcaggggcacgcccagcgcctgggcatgaaaaccatcgctggtccgtgtaaccagcccatcatgatggacacgctctccggcatcggcattgattttatttacggcgacaccatcgccgagccgcagccgttggatctactgcttaataccagctatttcgccatcaactga

SEQ ID NO: 123215 - DNA, 1851 bp, Enterobacter cloacae
atgagaagagttctgacaacgctgatgattttgctggtggttctggttgctggcctttcggcgttagtcctgcttgttaaccctaatgatttccgtgcttacatggtgcggcaggtcgaagcgcgtagtggttatcaactgaagcttgatgggccgctgcgctggcacgtctggccgcaactcagcattctttcaggccgcatgtcgttaaccgcgccgggtgcctcccagccgctggtctctgccgataacatgcgtcttgatgtggcgttgatcccgctcttttcacaccagttgcaggtcgaccaggtgatgctgaaaggggcggtgattcagctgacgccgcaaactgaagccgtgcgtgactcggatgcgccggtcgccccgcgggaaaatacgctgcccgacgagccgacggatacgggctggtcatttgatatagccaaactgaaagtcgccgacagcgtgctggttttccagcatgagtccgacgagcaggtaaccgtccgtaacatcaacctgaagatggagcaggacgcccatcatattgcctcgctggagtttagcggaaggctgaaccgcgatcagcgcgatctgaatctgtcgctgaacgccaacgtgaatgcctcggattacccccatcagctcacggcggatattcagcaactgaactggcaactgatgggagccgatcttcctgcccaggggatcaccggtcagggaacgctgcaggccgtgtggcgcgaagaacaaaaacagcttgagctggataacctcaatctgcaggcgaacgacagcagtctgacagggcaggcgagcgtcacgcttgaggagaagccgaagtgggtaatgaatctgcagtttgacaagctcaatctggagaacttacttccgcctcagccagcgggtgcaaccgacgggaacgccgctcagaatgggcaaagccagccgtccaagccgcgtccggtcatctcctcgagtcttgatcagccagactataacggtctgcgtggattcacggctgatatcttactgaaagctaacagcctgcgctggcgcggtatcgattttaccgacgtgagcagccagatgtttaaccataacggtttgctggtgatctccgaactgagcggcaaaatgggtgccggacatctttctctgccgggcacgctggacgtgcgtaaagagacggccagcgccgaattccagccgcgtctcgacaacgttgagattggtaccatccttaaagcctttaattacccgatctccttaacgggccaattgacgctggcgggtgacttctcggggacaaagattgatgctgaggctttccgccgcgaatggcaggggcaggcccatcttgatctgaaagactcccgtatggaagggcttaacttccagcagctggtacaacaggcggtggagcgcagcagtgatgtcaaagcccaggaaaactacgacagcgcaacgcgcctcgacagctttaccactgacctgacgctggataacgggcagctcaccctcgacggaatgcagggaacctcttcactcctgtcgttaaccggtgaaggtaagctggatctggtgaaagagacggcggatacccgatttaacgtgcgggtactttccggctggcagggtgaaagtaaactgatcgacttccttaaagagacgccggttccgctcactgtctatggcaaatggcaggcgctgaattacagccttcaggtggatcagatcctgcgcaaacatctgcaggacgaagcgaaacgtcgtctgaacgactgggcggatcggaataaagattctcagtcagggaaggatgtgaagaagctgttagataagctttga

SEQ ID NO: 123216 - DNA, 1191 bp, Enterobacter cloacae
atgatcgatattttaaagttaatcggtagaaataaagcattgctcgatactgatgttgttaatcatgagaacgaactgagaaagattgtttcagcttcaaagtttctggtgcttggtggagcagggtcgataggtcaggcggtaactaaagaaatatttaaaagaaatcctaaaaagttacatgttgttgatatcagtgagaataatttagttgaacttgtacgtgatatccggagttcatttggatatatcaatggggattttaaaacctttgctttagatattggttctatcgaatatgatgcattcattaaagctgatggtaaatatgattatgttttaaacttatctgctttgaaacatgttcgtagtgaaaaagacccttacacgttaatgcgtatgatagatgttaatgtgtttaatactgagaaaacaatcattcaatctcatttacacggaactaaaaaatatttctgcgtctcaacggataaggccgcaaatcccgtcaatatgatggggggctctaaacgcatcatggaaatgtttttaatggaacaaagtaagaatataaatatttcaacggctcgatttgcgaatgtggccttttccgatggttcattattgcatggttttaatcagaggatacagaaaagacaaccaattgtagcgcctaatgatattaaacgttattttgtcactccgcaggaatcaggtgaattatgcttgatgtcatgtatatttggagagaatggggatatatttttcccaaaactaagtgaagaattagatttgataactttttcagaaatagcagtattgtatttacaacaattaggtttgaaaccatatttatgtaacacagaggaagaagccagagactttgcaaaaaataatatcggcaaagatttttggccgtgtttgttcactcctagtgatacgacaggtgaaaaagatttcgaagaatttttcatggctaatgaaactgtcgatatgaataaatataataatattggcattgttaaaaattcatcttctcttgacactaaaaaaatccagaatttccgtaaaaagattcatgatatgaaaaaagatttatcctggactaaagatgaaatcgtttctttgtttcacgagactattagtggtttcggacatcaagaaaaaggcaaatatttagatggcaaaatgtaa

SEQ ID NO: 123217 - DNA, 1149 bp, Enterobacter cloacae
atgaacgctgatatcctggtaacttttattagagatctgtataaaacggatgatttcattcctctccatgtgccaacatttaagggaaatgaaaaggcatatgttgcagatactattgaatcaagttttgtttctagcgttgggaagtatgtggatgagttcgaaagaaaaatcgaatcttacacaaaaagccctagggcagtagcaactgtaaatggtaccgctgcgctacatgcggcactctatctttccggagtgcagcgtggtgatttaatcattacacaagcattaacttttgttgcaacatgcaatgcgatatatcatttaggtgcagagcctgttttcatcgatatatcacctatcagcatgggcctttgtccaatagcaatgaataattggcttgatgaaaatgctgagcgcacagaattaggggctattcaccgtaaaacgggtaagaaaattagagcggcagtgcctatgcatacatttggtcatcctgttgaattggatgaattacttcaagtatgccaaaagtgggggattgctttgatagaggatgcagcagaaagccttggttctttttacaaaggaaaacatactggcacgatcggtaagtatggatgcctaagtttcaatggtaacaaaattataactaccggtggcggtggcatgatcttatgtcactcagaggaagaaggtaaaagaactaaacatgtaaccacaacggcgaagataccacatccctacgaattcaatcatgatgagccagggtttaattatcgtatgccaaatattaatgctgctcttggttgcgcacaaatagaaaatattaacttgttcttgtctcaaaaaagagaacttgcgaagaaatatcaagagttttttgctaatagtgaattaaaatttgtttctgaacctgaatatgcacgctctaattattggctaaatgctgttgtatgcgacacaaaagaaaccagagatagactgcttattgatatgaatcaaaatggaataatgattagaccagtgtggaaattaatgcatcgtttaccgatgtataatggatacattcgtgacgatttgaaacaatctgaaatcatcgaagaaaggttaataaatcttccaagtacacctattaatagtttgtag

SEQ ID NO: 123218 - DNA, 1155 bp, Enterobacter cloacae
atgacaaaaaaaattgctgtctttactggtacaagagctgaatatggtttgctatattggttaatgcaagacattaaagatgataatgctcttgaactccaggttttagtcagcgggatgcatttgtctcctgaatttggcttaacatggcatcagatagaagaagatggttttaagattgatgaaaaagtagaaatcttactatcttcggatagtgctgttggggtagtgaaaagtatagggcttggcctaattggatttgccgatgcattaaccaggatgaaacctgatctgattatcattctaggagatcggtatgaagcttttgcggcagctcaggcagcgatgtttttaaaaataccaatctttcatttacatggtggagaaattactgaaggtgcctatgatgatgcgattaggcatgcaataacgaaactaagttatttgcacggagtatcaactgaggaatatcgaacaagagtcattcaattgggcgaggaacctaatagagtatacaatgttggcgcgttaggccttgaacatcttcaccgtacaaaactactaagtttagatgcattaagtaaatcattaaaattttcgcttgatcgcccttattttcttgtcacataccaccctgttactcttgcaaatgaatctccaaagcgttcatttgaagcattattagatgcacttgatgagtttaaagatcacaaagtgattattacttacccgaattcggatgacggtggtaggcaaataattccaattctagaaaaatatgcgaaaactcaagtggaaagagtctatgccattccatctttgggacagctacgctatctttctgccttaaaatacagttcaatggtaattgggaattcttcaagtggtattattgaggcgccatcgttttgtgtcccgacaataaacatcggctctcggcaaaatggcagattagcggcaaattcagtcattaattgtcaaccaaataaatatgatatagttgaggcaattaaaacagctgttcaaatgaaagatgaatttaattctctaaaaattgataatccttatggggaaggtgattcgagtaagaaaatcattaatgctattaaggccctcgactttcaacccatgaaaaaatttcacgatttaggataa

SEQ ID NO: 123219 - DNA, 1077 bp, Enterobacter cloacae
atgactcttatcattgcagaggccggtgtaaatcacaatggtcagcgtgacctggcttttcgtttgatcgatgcagcacacaatgctggtgcagatatagttaagtttcaaacatttaaatctcaaaatctggttacagcaagtgctgctcaagctgaatatcaagttacaaatactaataaaactgaatcacagctagccatgttaagccgattagagctatcttatgaaacccataaggaactaattgactattgcaatcaattaggaattgaattcttatcaactgcatttgatgaggatagtttaaaatttttggtgaatgacttaaaattaaaaacattgaaaataccttcaggggagataacaaacgctccctttgtattatcacatgcattgaccggctgcaatattatgctatctaccggaatggcaacattgtccgaaattgaagatgctctgggtgtactggcatttggatttacttctagtgggaatgtaataccttcacgcaccgaatttcaaaaagcatattcatcggatgcaggacagcgtgctctgaaagaaaaggtacgtatattacattgtactactgaataccctgcaccaatgaatgaaataaatcttaaggcgatggattctttggctgtagcctttggcttaccgaccggttattcagaccatagtcagggtattactatcccagtagcagctgttgccagaggtgcagtgataatcgaaaaacattttactcttgatagaaatatggaaggaccagatcacaaagcgtctttagaaccagacgagcttgctgaaatggttaaggcaattagaaacgtcgaattagctttaggtgatggagtaaaaagaccaacagcctcggagcaaaaaaataaatcgatagcacgacgcagcattgttgctgtgaaagatattagtgcgggatcttattatagcaacgaaaatatttcggtcaaacgtcccggagatggtatttctccgtatgaattctgggatatgctagggaaaatggcaaaaaaagattattgcgaaggtgacagaattagcaatgactaa

SEQ ID NO: 123220 - DNA, 612 bp, Enterobacter cloacae
atgactaaaacaattgcactattgggggggggagggcatgcctccgtaatagcagatgtcttgctcaagcttgagtataaaatagaagttattgttgataaacagctaactttaaatcgtgaaatttttaaaggaattcccgttatttctgatgatctttttttcagtaaatatttaccagggacaattaaagttgctaatggattaggctttgtgcctggttcttgtaaaagaaatacgatctttgcaaaattaaaagctatgggttatgtgttcgaaacaatagtatctaaggacgccttagtttcatcgtattcagaattagacgaaggtgtgcaagttttacccggagcaataattcagcccggcgttaggctgggtgagaatacgattatcaatacacgcgtcatcatcgagcatgatacaattatcggtaataactgccatatctcccctggtggggtcttatgcggtggtgtaaattgtggcgacaatgtatttataggcgctaatgcgactgttatacaaaatataaatattggagacgaaagcattgttggtgctgcagctcttgtccggaaaaatattcttcctaaatcaactttttactaa

SEQ ID NO: 123221 - DNA, 1059 bp, Enterobacter cloacae
atgaaaaaaaaatggcaaaaagttcttatatcaccaaatgacagtattcgaagtgcactgaaaattattaatgacgaagccttacggataggccttgttatagatgatgagagtaggttacttggagtgctgaccgatggagatatccgtcgtggaattttgaaaaatgttgaccttgatgcaaatgtaagctgcgtgatgaataaatcacccgttactgcaactgttgaaacaacgaaaacacagctgattcagctcatgtctaatagatctattttggcgataccaattattgatcctcaatctgggaaagttcttgggctagaaacgtatgaaacaagtattgagaaacgtagctataaaaacccaatttttatcatggcgggaggatttggcactcggttaaaacccttaacagataattgcccaaaaccaatgcttaaagttggtgataaaccaattttagagacacttttaactcagtttatcgcctctggatttgagaatatatatatatctacgcattacatgccagagtatatttctgattattttggtgatggctctaaatggggtgtgaagataacctatgtatatgaggcagagccattaggtactggcggtgcactcgggcttttacctaaagatattgatgatttgccgttgatcatgattaatggcgatgtgcttactacgttaaatattgagaagctattgcaatttcatattgaatcaaaatcaatagcgacaatgtgcgtgcgagaatacgaatatcaaattccatatggagttgtgcgaggaaaaggtaatgttattacggacatggttgagaagccaattcagaagttttttgtaaatgccgggatttatgtcgttaatccagaaatatataaaaatgttgcagcaaatataaagattgatatgccaactttattagagcaacaaataaaaatggataaacaagtaacaatgttcccaatccatgaatactggttagatattggccgtatggacgacttttataaagcgcaacaagatatacaagggttgtatttataa

SEQ ID NO: 123222 - DNA, 690 bp, Enterobacter cloacae
atgatgaagatagcgataattcctgcaagaggcgggagtaaaaggcttccgggtaagaacattaaaaacctttgtggccgccctttaattgaatggacaatagatgcggccttaaaatctgagctattcgataggataatagttagtacggactcagagcagattcgagatatctctatacgagctggagcggaagttccttaccttcgttcgcctgaactttcatctgatacagcaacgacaaatgatgtggtaacagatataattagatggctagaagaaactggcgttgaagtttctactgttatgatattacagccaacttctccactaagaaccgagactgatatagcaaaagctttcgatttaatgaatgaaaaaaaagctagggctatagtttcagtatgtgaagtcgaacatcctatccaatattgtaataccttgcctaatgacttatcaatggataatttcatcccggctattaatattcaacgttctcaagacttacccacatattataggctaaatggctccatttatttgtttaatagagattatgtttctaatattaataatctctacagcaagggaacatttgcatatataatgaatcggtttaattccattgatattgatgagcaaatagattttgaattggctgaaatactactgtctaaaagagttgattaa

SEQ ID NO: 123223 - DNA, 1254 bp, Enterobacter cloacae
atgtcatttctaaagaaatcatcagtatatttgatttcaaacatattaaatgcatcaataccctttattctattaccaattttgactcgatatcttacgacatctgagtatggaaaaattgctattttccaaaccatcattacaggactggtttcagttatagcattcaacactcttggtgcaaccgctcgggtttttttcgataaaaaagatgaacattatctaaagaactacaatggtgcttgtttttgtctcttgattttaagtttagcaattattattcctttaacttttattttttcaacaggtctggtattttttactggaatagataggaactggattctcgcggctatatttataagtggcataaattttgtagttcaatttcggttaaaccaatggcagattactgaaaaagcaatatcatttggcttgttgcaaattgggcaaagccttcttctttttatatttacattaatatttgttgtttttcttgcgcgacatgctgaagggcgaattgaagcgcagatgtattcaatgatgattatttttgtaattactattcttctgatccaaaaagataaactgctcagttttagaaatatcaagaaaggcatgtttttagatgcattaagctttagcgtccctctaataccacatgtttttggcatgtatcttattagttcagttgatcggtttttcataaactcgaaattgggatctgatcaagctggtatatacatggttgcaatgcaattgagtatgggaatggtgattgttttcgatgctgtaaataaagcatttatgccatggctttttaaggaattaagcaatagttcttttattcaaagaaaacatatcgttagcaaaacatattattactttattttattaatctttattggtattttatcatttttaatttctccatatgttttaactttaattgctggtgagaaatataaggctggaaagttggttatagggtggttatgcttagggcaagtttttcttggcatgtatttaatggtaaccaattatttgttttatgcaaaaaaaacaggacagttatcagtattaactatagcctgtggcgtatttaacgtaattctcctcttgtgcttaattgctccattgggtatcgaaggagtagcaatttcctttgcagtttcgatgcttttacgttttttgggaacttggttccttgcttataaaacaaaacttgtaccatggactttagggaatgtatga

SEQ ID NO: 123224 - DNA, 147 bp, Enterobacter cloacae
atgacttacggcatcactccggcgaacgacaggtgcagagcaaaacgcaacgcgcttagcgtcgcgatgccgggcgggtataaccgcccgcaggacgtgttgatggaaattgaaattggggaaaatgagcgcaggaagcctgtataa

SEQ ID NO: 123225 - DNA, 699 bp, Enterobacter cloacae
atgaaaaaaacaatccctgaatatacgcctgttgacttatcacgttgggccagaaaagaacatttcgaggtatttcagtcctttgctcaatctacatttaatcaaactgttcaaatagacatcaccgcattgctcaaggatataaaagaactaggctggaaattttatccgacgatgatttccctcctttctaaaatcgtcaacaaccattcggaattccgtatggccatgaagaacaatgaacttgtcatatggaatgaaattcatccaagctataccattttccataatgaaacggagaccttttcttcattatggagtcacttcgatggcaatattgatcatttccagaacgtttattcggaagatgttgctcgctatggtaataccctttcttattggccgaaggaagagtcgcgggaaaatgtattttttgtgtcggcgatcccctggtcaagttttaccagttttaatatcaacgtagctaatatgcagaacttttttgcccccatgttcacgatggggaaatacgtcaaccagggtggaaaagtattgttgcccctcgccgtgcaggtccatcattccgtgtgcgatggtttccatgtagcaagattgttcaatgagttacaggcgatgtgtgatgacttacggcatcactccggcgaacgacaggtgcagagcaaaacgcaacgcgcttag

SEQ ID NO: 123226 - DNA, 333 bp, Enterobacter cloacae
atgtcaagtatcagagagttaagtttctttgaagtagctcaggtgagtggtggtggaaacgcaggagatcatgaccgcagctctagttcaaattcgggttcaaaaaattcaggctccaaaaatagtaatatttataatggcgttgactcctgcggtgctggaattatcgggggtttagttgctggttctcctggcggaccacttggtatggctgctggcgttattggcggggccattgccggtcagtgtaccaaggatagttttagtagcaaggcagattgcaaaggtagtaatcagaaatccagtgactttactggtcagtgtcgctggtaa

SEQ ID NO: 123227 - DNA, 204 bp, Enterobacter cloacae
atgaccatgaactttgcaatcgtttcactgcgcgatgctgcattgaggtcaagaacgttagcgaaattcaatagtccaaaaccaagtatgaaaaggagtaaatacgttaagaaatatataatttttttcataaataacatagccaaaagaaagacgttaataatcccactattactgcatcatcatgaatcacacaatggctaa

SEQ ID NO: 123228 - DNA, 606 bp, Enterobacter cloacae
gtggacttcaggaagaacataatattttatctggtgccagttcttttttccattgcaattacttcactacctcttctgactacaaggtggattggtctggaaaaatcattgtacgcaatgtatattacagaaggcatccttggcgcttgggttatttcttacatctataaatgctgtttgaaactcggcagtaaaatgcttttatttaaatttttagttttgataatttttattcaaatcatcttttatgtaaagcgagaaccaaactttggggtgtttcatatttcaactgaccatatcatcccttatttatttgccatctttatcatacctttctctgaagaatgtatctacagaggttgtctaattgatttttttagtggcatattcaaaggtaatgttatttggcccgtgatgttatcatctgcagttttttgtgggatgcatacccaatattctagtgcgcttgattttactgtactgtttgttgtttctcttatattttcttttgcaagattgaaatctggaagtttgttgccatcaattattttacattcatttatgaattgcttcgtaattttattgtctaatttaaatgttttttaa

SEQ ID NO: 123229 - DNA, 1266 bp, Enterobacter cloacae
atgttttttaaaatgaaaatattcagggacgaagcgcttaactatcatagtgataacgagtacgggaccattatcttacccgcatccttttccttaactgtattttcttcagtgactatactgacgctcctgtgcataataatattcgtatattcagccagttatactcgtaaggcacatctcaccggtatagtaatgccatcctccggactgataaaaataacacctcaatataacggatatgttacccgagtggcggtatcagaagggcagtacgtggtagctggcgagcctctgtatcatatcagcggtgaacattttaacgggcagggaaccggtacgctggctgccatgaatctctccctgaaaacacagtatgccctgctggcctctcagcaagcttccgaggtgcgggataaccagcaacagcaggaagcagtgcggcagcgcattgctttcctgcattcacaggttaaaagtgcagagcaacgtctgatgctggctgaacggcaggttcagttgacgaccggagtcatgagacgttatgaaatactggctggcacgcattacgtttctgaaatcgaattccagcagaaacagatcgacgtctccgcagcacagcaaaacgcagaggatcagcggcagggtgtactgcagttacgtaccacactcaaaaccgctgaagacgatctcaatcacctcaatgtccagggcgaaagccgaaacgccgaactaggcagacaactgcaggagatcaggcaacagcaggacgaactgtccggacaggagaatctaaccctgacgtcgccggtatccggcactgttgcaactgtgctggtcaggcaggggcagtctgtcagagcatcagagccggtgatgacggtggtaccggacaatgcaagtctgcagattgaactgtatgccacgagtcagaatgccggattcatccagccagggcagcgtgtggctttgcggttcgcagccttcccttatcagaagtttggtgttcagtacggaacaatacatgaaatcagccgtacaacgctgactccttcggatttactctccatatctcctgtcacttggaaggagaatgaagggcactaccgtgtcattgtcgtccctgataacacctttatcctggcctatggaaaaaaagaagccctccgccccggtatgacccttgagggggatgtcagtctggatactcgacatttatgggagtggctgacagagccgctctggagcctgaaaggaaaattgtaa

SEQ ID NO: 123230 - DNA, 2184 bp, Enterobacter cloacae
atgggaacactaaactggacagggagaagacagcttcccgttatccgccagaccgagtcagcagaatgcggtctggcgtgccttgcgatgatggcgtgctggcatggtctccagacggatttgcccactctccgagaacgcttcagtatcagtactcacggaatgaccctgcaaagactgattgagtgtgctgcgggtatccggatgtcttctcgcgctgtcagattagagccggaagatttgaaatccctgtctctcccatgcattctccactggaatatgaatcatttcgtcgtgctccacaaggtccgcgggaacaagctgacagtgcatgatcccgacaaagggaaaatcaccctctccctgcaggaggcaggaaaacacttcaccggggtggcgctggagctgatgccagccagcgatttcacaaccagagacgaaagaaaaaaaattcgcctgcgccagctcacaggtcagacggccggcctgcttcctgcaatgtcatatattatcatttttgcactggcactggagctcttaacgctgggaagtcctcttctcaaccaattagtaattgatgaggtactggttgatgccgatcgaggccttttaagcgtcatcattattgccctgatactgctttctctgacacagatgttgctgtcgctggcccgtcagtgggccagtataaccctttcggtcaattttaatatgcagtggacggccagagtatttcatcatctggtccggctccccctgtcatggtttgatgcgcgcagcaaggggagtattaatgcccggtttgatgcggtagacaccatccagcaggcgctgactacgcaggttctggaggggatcctggatgtactgcttgtagtaaccgcattaagcatgatgttgctgtacagcccagagatgacattgatagcaatactggccgccttcatctacggtgtactgagagcgttgtggtatccatccctgcgacaatcagcggaggatgcatgggatgccagtgtcagagaatcaggccattttcttgaaacccttaacgggatcctgagcctgagaatcaacggcgttactgcacaccgtgaagcagcatggctgaaccttaatgtcgcccgcaggaatacgcagttacgccagagccgcctgctgatgtgctatgacattgcgcatactctgtccggcagtatggtatcggtggcaatcttgtggaaaggagtggatgaagtgctgaacgggacctttaccgtcggtatgcttgttgcctatttgtcttaccagatgcgtttttcttccagtatcagcagcctgacagacaagttttttgcctggcgtatgctcgatgtttataacgagcgtctggctgacattatgctcaccccgacagaaggccatcagccaccacccgctcaggaatatggcagcccattaaccatgcaatcggcttttcgagacagtgccaccgaaaattcagccctcccgctgacactaacgcatatcattttcagccataaaggcagcaataagccattgctccacgggatatcgctgacgcttcatcctggcgaagtcgtcgccatcactggcaaatccggatgcggtaaatcgacgctggtaaagcttattctggggatttatattccagatgaaggaacgatcagaacatttggcattccacattcacacccggattactaccggatgcgccggcgcattggtaccgtcttgcaggatgatcatcttttccgtggttccattgccgataacatcatctttttcagtgatgaccgaaacactgaacgaatgattcagtgtgcccgccttgcccagattgacagtgatgtcatggcaatgccaatgggatatcagacattaataggtgaaaccggcggagggctttccggaggccagaaacagcgtattctgctggcaagagcactgtacaagaaaccgggatttttgttactggacgaagcgacgagtcatcttgatgttgagtgtgaaatacagataagtcagacgctacgcaagctgggtctgcctgttcttcttattgcccatcgtccggaaaccatagcatctgcagacagggttctttatctgtctgaaggggccttaacggaactgcggcacccgtgcataatcgaagagggggatgagatctattcatcttaa

SEQ ID NO: 123231 - DNA, 747 bp, Enterobacter cloacae
atgacagataacatcataggcaaagtaattgtaatcacgggcgcatcaagcggtatgggtgaagcggctgcacgttatcttgctgaaaaaggagcaaaggttgtgatggctgcgcggagaatagaccgcatagaggccattgcgagtgagctccaaaagcagaataaagaagccatcgccgtcgcaaccgatgtgacgaaacttgatgacgtaaacaacctcattgagactgcggtcaacaaattcggtcgtgtagatgttcttatcaataatgccggcctgatgcctctttcccgacttgagcagggaaatgtagatgaatggaatcagatgattgatgtcaatctgcgcggggttctacacggtattgctgcggtgctgccttatatgaaatcacaaaaaacaggtcatatcattaacaccgcatctgttgctgcacaccttgtcttccagagttctgctgtctattcggcgacaaaatttgctgttcgagcattaaccgacggtttgcgccaggaaatggcggcacataacattcgcgtcacgttagtctcccccggtgctgttaaaacagaactgctggagcatataacggataaagatgttaaggctgcaaaccaggattacgttgaaaatattggcgtgccagcagaaacctttgcacgcatggtagccttcgcaattaatgaaccagaagatgttggtgtgagtgaaattattttcagaccaacggctcaggaattgtaa

SEQ ID NO: 123232 - DNA, 453 bp, Enterobacter cloacae
atgaaaaaaatattattcctgttatttattatcatcacgagctttttattcccggctcgtgccagtaattctttacagccagacaaggaagaagctgtgaccattaaaatgactatcaatcagcaaactttttacgttgaacttaagaataatccagccgcaaaggcatttattgaacagcttcccctgactctaacgatggaggaacttaacgggaacgagaaatttgctgatctgccccgtcccttaccgacccaccaggtcaaacctggaaccattaatcagggcgatctcatgttatacggccatcgtaccctggtacttttttatgagacctttcaggcaaactacggatacacacccgttggcagaataatagcgccagaaaatcttggtaaaattgcagatgaaaaagaagtaatagcaaggtttaccacagataaaaaaggttga

SEQ ID NO: 123233 - DNA, 1119 bp, Enterobacter cloacae
atgaagcaggttggtattgttggttggcgaggaatggtgggctctgttttgttacaaagaatggtcgaagagaacgacttcgacaatatttccgcgcatttttacagtacttccagtgcaggtgccgctggtcccgtcattggtggcgtcaaccacacactcaaagatgctaattctattagcgccctggccgaaatggacatcatcataacctgtcagggcggggattataccaaggcgatttatcctgcgttgattagccatggctggcaaggctactggattgatgcggcctcagcgctccggatggatgaaaaagcctgcattattctcgacccggttaaccgcacaaatatcgatcgtgccatcaaagagggaattaaactttttgttgggggcaactgttccattacgctgagtcttatgggactgtcagggttaattaaagctgacctgatagaatggatgagtgtgatgacctatcagtctgcatccggagcgggggctaaatatgtccgggaattaattgctcaaagcgcttatatcagtaaacatttatcttctgatgagctggaatcctcaggttcagtgcttcctttagtcaataaagtgagtgaattaattaacagtgctaacatgcccatccagaatttcggcgcgcctttaatgggcagtattattccatggattgacagcgatttaggggatggtaatagcagagaagaatggaagggtgaggcagaaacgaacaaaattcttggtctttctccgggtacaattgcggtaaatggcttgtgtattcgggtcggtgtgatccgttgccatagtgctgcaataaccctgaagctcaagcgtgaagtcagcgaagaagaatttgcagagcttgtgacgcattcccatccatgggttaactatgtgcccaataataaggatgacagtgtcagtaaattgactcccgctaacattagcggttcgctgcaggtgggtattggccgttacaagaaaatgtcgcttaacaatgaccctatttactcggttctgacggtcggcgatcagctgttgtggggcgctgcggaacccttgcgacggatgttgaatattctgtctggcaaagtctaa

SEQ ID NO: 123234 - DNA, 336 bp, Enterobacter cloacae
atgaaaaacttgatactcagtgttatcgcaaaaatttccaaaatggacgctgaagctaaagagctggcggccaaagtagaagcgcagtctttgttgataggcgcgttgttactgaccattggtaaaaatggcggtatgaacgaaatgctcgagaatgtcagaaaagcaatcaacgcggcgcttgaagcagcagatacgccgctcaaatccgacgctgaaatgttactgaacgaattcaataacctgattttattaacccagctactcgaaactaatgactcagagatcagtatcgaatcgttaaaggaagccccaggcgaaacggcctcagattga

SEQ ID NO: 123235 - DNA, 906 bp, Enterobacter cloacae
atgtctgagaattcaatcccccttccgtggtcgcagcctgtcgcgggcttgcccggttttgcgcactattactcaacggtcgatggggttcgtctgcactatgtcagaggcggacagacgcaaggtgaaacaatcgtgctgcttgcaggcttcccgcaaagcgggtttgcctggcataaggtgatggctcttttagccgatcgttacgatatcatcgcactcgacctcccgggccagggcgactccgataagccgcagtctggctacgataccctcacgctggccagttcggtttttgggctggtgcaggcacttgggatcacaagacattacctggccgcccacgatgtaggtgcatgggttgcctggccgtatgcccttcgttatgaacagcaggtaatcaagctggctctgcttgatgccggtatcccgggtattactttgccggacgccctgcccgcgacgccagaaaaagcctggaaaacctggcacttcgcgtttcatcttcttcccgacctgccggaagccttaattatcgggcgtgaagagatttacctcgaatggttcctgcggcgaaaaaccgccagtccgatggcctttagcgatgcggatatcgcccggtatgtccgcctgatgcagcaaaacggggcgctgcgtgccgggctggccccttacagagaagcggcggtctccgctgttcagaaccggacgctggctgaaacgcaaaaacttcgggtgccgctgctggccgtcagtgccgatcagggttcgattgccgatatggctgccccgcttcgccagtttgcagagacggtgagtggcattacgcttgctcattgcggtcatttcattcccgatgaacaacctcaggccctgagtgaggccctggcagacttcttccgttaa

SEQ ID NO: 123236 - DNA, 609 bp, Enterobacter cloacae
atgtctgagaagctacagaacgcacgcgagcgcggacgtccgcggcaatttgatctcgatgcggccctggatctggcgatgccggtattcagagaaaagggttaccacagcgcgtcgataagtgacctgagcgacgcgatgcagctcactgcgggcagtatttataaagcctttcacgataaacgtggcctgttcctgcaggtattcgcacgttatacctccctgcgtaatcaatcgttgcgcgagcgtctggcgcgacaacctgatggccgggccaaaatagccgagctgctgaacttttatcttgaatcggccagcgctgtcgaaggacgccgcggctgcctggtggtcggcagcacccttgaactcagccagtttgacggcgaaattgccgggctggtgcagagcgcgcttgcgcgaaatcagcacgcgatcctccagctgatcgaacagggtatgcaggacggttcagttaattcgcgacacgacgcgcaggcattgagcggcgttctgctgtgcctggtcctgggcatgcgtgtggcgggcaaagccggagaattaccggcacgcgaacggctggtagagacggtgatggcgctcctcgcctaa

SEQ ID NO: 123237 - DNA, 1197 bp, Enterobacter cloacae
atgtctcttcgttcactgcgggcgttgtgcctgacaagttttttcattgctgatgttcgcgatggcctcgggccctttctcggcatcttcctgacggaacgtcactggaccccggatgatatcggcatcctgatgaccgccggggggctggcgggattactggcaacgctgccggcgggatttattacggatacctcccgcaataagcgttcggttctggcactgctttgtatcgccattacgctgagtacgctgctgctctggtttagtcagcagagcggcgtcgtcgccgtctcgcaaattatcaccggtatctgcgcggcgtttgtggggccactgattgcgggtattacgctgggtctgacgggcccgagcgggtttagcgcgcagatggggaagaacgaggcgttcaaccacgccggcaatttcctgacggcggtgattgcgggcggcattgcctggttctggggcgtcgggggcattttcctgctgatgacctgtacgacgcttctgacgttgtgcgcgctgcttgccattcgtcatacagatatcgacaacgatgcggcgcgggggctgacctcttcagaccgtcaaacggtccccggcgtcgcggtgctgattaaaaaccgggcgctgttgataaccgggctgacgctgctgctgttccatctggccaatgccgcactgctgccgatgctgagcatgagggttgctgcggcaccggcaacaatcaatcccggattatttgcggcggccaccgtcatcatttctcaggcggtgatgatccccgtcgccattggggtggcaggccgaattgagcgctacggttactggcgtttcatcatgctggccctgctgatcatgcccgttcgggcggcactggcagcctccacagacgccccgttgatgatgatcccggtacaaattcttgatggtctggccgcggggatcctgggcgttgtcgtgccgtcgtttatcgtggtgctgttgcgcgggagtgggcacgtgaatgccgggcagagtgtggtaatgctgatgcagggtgtcggggcagcaatgagcccggcgttaaccggcaccattgccggtcattactcttttgcgacggcctttagtgtgctcagcgccattgcgctgctggctgtcctgctctggtggcgctttgctcaccggcgctggacaccagaccgggcgtag

SEQ ID NO: 123238 - DNA, 1107 bp, Enterobacter cloacae
atggaaaaaagaaaaaaaacgacgccagagcgggctgcctggccgacgcgtcaggcgatggtcatgcacgggctggcgatgaacctgccgtggctggcattcgtcaacatcagcttcgccgtgatgatcctgctgcgccacgtctcgcttaagcccgacgaccccctctacctccggtcgcttcctctgctgaagtttatcgatgcctcgatgttcggcattattattctgtcagctgcgttaatcatcatggcctggcgacgtattgccggcatcagcgtggtgctctttttctgtagcgtcatctggtcgatatcctgtttctggtttatcaccgatctgttgctgcctcacgtctggcccctgtgcgcgattctgttactcgccgggttgacggcgctctacttttacccccgtgggttactcgccttcgtgatcccgctctgggtcacgctaccggtcgcaagctgggtactcaatgatggtgtcaatcttcactttgccgccgtctggaccgtctttacgctgattttgctctgcgggcgtttcatcctgataagctggtttgatgaagcctggcgacgtaaccagcaaaaccagctgttgatttcgcggctggaagcgctggcgcatcaggatccgttaacccagaccgccaaccgtcgcaagatggaagtggtgctggagaatgccgttgagcagaaaaaagccttctcgctaattatgctggatatagattatttcaaactttacaacgacacctatggtcatcaggccggtgacgaatgcttgacccgcgtggcgcaggtgctccggcagtcggtgcgaacacctgacgatgtcgtgtctcgctacggcggtgaagagtttgtggtgatcctctttgattgcccggaaaacacagccgaaaaagttgccatgcgtattcaggacggcctgcgcgcggaagcgatagcgcacgatgcctcaaaagtcagcgatcacgtcaccgtaagcatgggcattgcaggaatggcagagggactggcggggacggagattatcgcccgcgccgatgaggcgctgtaccgggcgaaagcggccggacgggaccgctggtcacgatag

SEQ ID NO: 123239 - DNA, 747 bp, Enterobacter cloacae
atgaaaacattatccgcatatgccctgcgtctgggcgacaacggtctggtgctctcccagcgtctgggcgcctggtgtggtcacgcgccggagctggaaatcgatctcgcgctcgccaacatcggtctcgacttgctggggcaggcgcgcaatttcctgacctatgccgcagagctggaagatcagggcgatgaagacaccctggcgtttgggcgtgatgaacgccagtttcacaacgtgttgctggtggaacagcctaacggcagtttcgccgacacgctcgcgcgccagtactttatggatgcctggaacgtagccctgtatgaacgcctgactcacagcagcgacagccagcttgccgccatcgccgcgaaagccattaaagaggcgcgctaccacctgcgcttcagtcgtggctggctggtgcgtctgggtgacggaacggaaacatcttcacagcgtatgcagcaggcggtcgacaccctgtggcggtttacggccgagctgtttgaagccgatgacgtcgagctggcgttgattgcctccggcgtcgcggttgatccgcgcgagcttcgtcagccgtgggagcaggaagtgttttccggtttgcaggaggccaccctgagcgtgccgtcggaagtggcgtatcgcacggggggcaagcgcgggctgcataccgaacatctcggcccaatgctggcagaaatgcagtatctccagcgcgcccatccgggtcagcagtggtaa

SEQ ID NO: 123240 - DNA, 1428 bp, Enterobacter cloacae
atggcgatcacggttcgtactgtcgccgtcattggaagcggcacgatgggcgcgggaattgcggaggtcgcggcgagtcatgggcatcaggttctgatgtatgacattgcttcagacgcgatttcacgcgcgattgacgggatccgccagcgtctcgcctcccgggtgactcgcggaaaactttccgccgatgctggcagccagattcttgccaggctgttgccggtaacggatatcgaagcgctcgccgcggcagatctggtgattgaagccgcgtctgagcgtatcgacgtcaaaaaagcgctgtttgcgcaactggctcagatttgcccgccgcagaccttgctgaccagcaatacctcctccatttctgttacggcgattgcggcggatgttcaccatccggagcgcgtcgcggggctgcatttctttaatcctgcaccggtcatgaagctggttgaggtggtgagcgggctggcgacatcgcccgaagtggccgatgcgctgtgcgagctggcgctgaactgggggaaacagcccgttcgctgtcagtcaacgccagggttcatcgtcaaccgcgttgcgcgtccgttctattctgaagcctggcgcgccctggaagagcaggtcgccgcgccagaagtgattgatgccgccctgcgcgacggcggcggtttcccgatgggaccgctggagttgaccgacatgattggtcaggacgtcaactttgcggtgacctgttccgtgttcaatgccttctggcaggaacgtcgtttcctgccgtcgctggtgcagcaggaactggtgctggcggggcgactgggcaaaaaaagcgggaagggcgtttacgactggcacggtgagaaaccggctgtgccgtggcttgacgcagtaaacgacagctttacccccatgcgtgtgcagcgaagaggtgacggtgtcacggaaattgatgagctcctgttgattgaaacccagggggagaccgctcaggcgctggcccggcgttttaactgtccggtcgtggtgattgaccgcatcgaacgcgacgtggcggtgatcgcagccgcatcggataacccgcataccgccacgcaaaaagccgtctggtacctgcagcagcagggacaccgggtactgcgcattgccgattaccctggcctgctggtctggcggacggtggcgatgattgccaacgaagcgctggatgcgctgcaaaaaggggtggccagcgagaaggatatcgacaccgccatgcgcctcggcgtgaattacccgaacgggcccattgcctggggtgagcgtctgggctggcaacggctgttaacgctgctggagaatttgcaacgccattacggcgaagaacgctatcgcccttgttcactgctgcgccagcgtgcgcttctggagagtagctatgagtcataa

SEQ ID NO: 123241 - DNA, 597 bp, Enterobacter cloacae
atgcccgtttatcaaattgacggtctgacgccggtggtgcctgatgagagctacgttcacccgacggcagtgctcatcggcgacgtgatcctgggcaaaggcgtgtatgttggcccgaatgccagcctgcgcggcgattttggccggattgtggtgaaagacggcgcgaacattcaggataactgcgtcatgcacggtttcccggagcaggacacggtggtggaagaggacggccatatcggccacagcgcgattctgcacggctgtattatccgccgtaacgccctggtagggatgaacgcagtggtcatggacggcgcggtgattggcgaaaacagcattgtcggcgcggcggcctttgtgaaagcgaaagcggagatgcccgccaaccatttgatcattggcagtccggcaaaagcgattcgtgtgctgagcgagcaggaaattgcctggaagaagcagggcacgcgtgagtatcaggtgctggtggatcgctgcaagctgaccctgcatcaggtcgaacccctgcgcgaagtggagcccggtcgaaaacgtctggagtttgacgaggatctgcgaccaaaatcggcgtcatga

SEQ ID NO: 123242 - DNA, 939 bp, Enterobacter cloacae
atgacaagaaatacgcttttactgacgatgatggccgccttttcaggctcagtatacgcaggggaaacgcaatttacgccgaatttctcacctgacagcgtcaccgtttcagcctcgggcgggatgctcagcgggaaatcccatgaaatggtgtatgacgacgtcacaggcagaaaaatcagccagctggactggaaaattaaaaacgtcgctatcctgaaaggcgatatttcctgggatgcgtaccctttcctgaccctgaacgcacgcggctggacctcgctggcatccggctcgggtcatatggatgactatgactggatgaacgaaagacaatccagctggacagatcattcgacgcatccggcaactaacgtcaattatgccaatgaatacgatctcaatgtaaaaggctggatattgcagggcgaaagctataaagcgggcgtgactgccggttatcaggaaacccgttttagctggacggccaccggtggctcttataattatgataacggtaccaatacggggaatttcccggcgggcgaacgcggcattggttatagtcagcgcttctcaatgccttatattgggcttgtggggcagtatcgtattaataatttcgaatttaatggcctgtttaaattcagtgactgggtgcgcgctcatgataacgacgagcactatatgcgcgacctgaccttccgcgagaaaacctcagactctcgctattatggtgcctcagtggatgcaggatattacgtcacgccacacgccaaagtctttgccgagttcgcgtatagccgttacaaagagggcaaaggcggcacgcagattattgatactaacacgggcgaatccgggtcaattggcggtgatgcggcgggcatttccaacaaaaactataccgttaccgccggtctgcaatatcggttctga

SEQ ID NO: 123243 - DNA, 906 bp, Enterobacter cloacae
atgaaaaacctgcatgcactgactatttttgcgcgtgtcgcagaaatgcagagctttactcaggcggcagagagcctgggcattaagaaaggccgcgtttcaacggtcgtacgtgagcttgagcatgacctcgggacgacgctgttgcaccggactacccgtgcggtacagctgaccgaagacggtcgggctttttattcgcgcgcccgggatttgttatcagatgctgaagatctgcagtccatgtttgcgcctggcggcatgtcactgcggggacgtttacgcgtcgatatgccagcagtgttggcccaaagcgtagtgattcccgccctgccacaactgctggacgcgcatcctgaacttgaaatagaactttcaagcacagaccggcgagtcgatctggttcaggaaggctttgactgcgtcattcgttttgggcccattgttgatgagaccctcattgcccgaccgctgggtcagttacggatgattaacgccgccagcccacgctacctggagcgcgtcggggtgcccgagacgatcgacgacctgcttcgtcaggggcaccgaatggtgcattacatgcgaaattttggtgcccgacctgatggctggcaatacccggacggtgatggctaccggtccgtcatgttacccggcgccgcgcgggtcaacagcgtaccggcctatcatgaagccgggctggcgggtctgggcttaattcagggcgggtattccgcgctggcgccccatatccagcgcggcgcgctggttgaagtgcttccccatttgcctcctgaaccgcttaatgccgctttcgtggtcgcccatcggcgtaatttatcgcagcgtgtcagagcttttatgcactggacggaagtcattttaaaaccgtactttgattaa

SEQ ID NO: 123244 - DNA, 288 bp, Enterobacter cloacae
atgaataaaggttatttaatcgcccacgtgaccgttacagatcctgctgcttatgcagaatatgcgaacgctgccggggaagcgctgcaggggttcaacccccgggtcatcgtctggtcaggggaatatgaaaatctcgaaggggaggcgcatgaacgccatgtcgttttagagtttgattcgtatgctgaggccaaacgtttttataacagtcccgggtacgtggccgccagaaagctgcgcgcgggggcggcaaccgggacatttgttgtggttgaaggggcttaa

SEQ ID NO: 123245 - DNA, 1395 bp, Enterobacter cloacae
atgagcgattacctgagaaatatgattaacaatcaaagcataactccacccgccacgttgattaagggcgcaaccctgctcagcatggatgacagggtgggtaatcttgagcgcggcgatatccttatcgaaggcgcaaagatcgtcgccattggtgaaaatctggcagcagaaggcgccagcataatagatgccacacatatgattgccatgccgggcctggtagatacccatcgccatgcctgggagggacaactgcgccgcattaaccccgacgccaaaacgcttgaagattactgcaacgccacgcacttctcattcgccaggtattatcgccctgccgatatttatatcggcaacctgctcaccgccctggggtgtattgatgccggtatcaccacggtgattgataattcccataacagccgcaccgctgcgcattcggacgcggccgttgaggccctgctggatgcggggatccgcgccgtacacgcttccggtgcaccggtgtccggagaatgggatcgcgcgcactggcccggtaactggcagcgcctgcaagaaaagtatttccagaataaccctgaaagtcttgtttcgctggcggtcatggcccagctggaaccggagagatggctggaggcccgcaggctggggttgccaatcgtgaccgaattctttgggggtgaaatggcgtcgcagcttgaggcgctgcatcagcaggggcttctgggaccggacaatatttttaatcactgcaccgcactgccggacgacggatggaaaattctgcgggacgcgggcgtacgcgtgaacgtctgcccccgttccgatgcgcactatgggattgaagacggcatgtttgcccttcagtccgcgctgcgccacggcatcagccccggcctcagcgttgacaatgaaacgtcgtacagcggcgacatgtttatggaaatgcgcgtggctttttacctccagcgcgtcatgggcatgcatcagcagcgctgctgtggttcagcgcacaccgtaaatacgcttcatacccaacagctcctgaaagcagccaccgtcgatggtgcggcctgtgcagggttacaggagagcatcggcagcctgacgccgggtaaacaggccgacctggttctgattaacgccggcgatctcaacctctatccgtccggcaatgcatttggcacggtggtccatgcggcagagcgcagcaacatccataccgtcatgattgccggacgaatcgtgaagcaagacggcaacgtgctgggggtcgacatcacccgccttcgcgaggccattgatgaatcacgtcatcatctctttacctcagccgggtatgagccggacatatttgctgacgccttcctgccgctggcgcaggattaa

SEQ ID NO: 123246 - DNA, 981 bp, Enterobacter cloacae
atggatcgtattcaggcaatgcagatcttcatgcgggtagcgcaggccggaagctttgtccgcgcagccgaaacgctttctctgccttcgtcaacggtcaccagcagcataaaaaatctggagaattacctccaggtgcgcctgcttaacagaacgacaaggcgggtgagcctcaccgctgaaggtatgcagtatctggcgcaatgccaggaaatactggcgttaatcgagcatgcggaaacgagcctgacggcgtcagtccggcgcccgcagggacgcttgcgggtggatatgccgggcgggatcgcggatttcatcgtgatgcctcacctgaaagatttttaccggctttatccggatatctacctgatgttgggcgtcaacgatcggcaggttgatctggtgcaggagggggtggactgtgtgatccgaacgggggatctgaataactcgactcttgttgcccgtcctctgggccggtttcgctgggtgacctgtgcctcaccggactatctcaggaagttcggtattccccgctcgccagacgacttatcacagcatcgggcgatacactatttttccgatcagacccgacgggcggatgcgttacgctttgtccgcgggacagagaccgtctccatccctgtccgcggcgaagcggccgtaaatgccaccgggctttatatcaacatgtgccttgaaggtttcgggctggcgcagctggctgagagcattgtctcagcgcatctgcgggagggaaggctggttgaggttctggctgactggcaaccgccttcggtgcccgtcacgttgctttatccccatcagcgttttctctctcccgcagtgcgtgcctttgcagactggattgccgggcttatcccggacgccagcccggcaccgtcaggcggcgggcttgatccgaaaccagatcgcatacatcgctggcaggaagacgagggtaataatggttccccctag

SEQ ID NO: 123247 - DNA, 3060 bp, Enterobacter cloacae
atgagtggaggtcgtttcaacctgtcagcgcttgcggtacgcgagcgctcggtcacgctgttcttgattattctggttacccttgccggtattttctcgttttttggccttggccgcgcggaagatccccccttcacggttaagcaaatgacggttatcaccgtctggcccggcgcaaccgcgcaggaaatccaggatcaggtcgccgagccgctggaaaaacgtctgcaggaactcaaatggtatgaccgcacggaaacgtatacccgccccggtatggcgtttatcacgttgtcattgcaggacaaaaccccgccttctcaggttcaggaggaattttaccaggcgcgaaagaaactgggggatgaaaccaaaaaccttccggcaggcgtcatggggccgatgatcaatgacgagttttccgatgtcacctttgccctttttgcactgaaagcgaaaggcgaaccacagcgtctgttagtgcgtgacgccgaagccctgcgccagcagcttttgcacgttccgggcgtaaagaaagtgaacatcatcggggaacaggccgagcggatttacatctccttctcgcatgaccgtctggcgacactgggactctcgccgcaggatattttcaccacgctcaacagccagaacgcattaaccgcggcgggctcgattgaaacgcgcggggcgcaaatctttatccgcctcgacggcgctttcgataaattgcagaagatccgcgatacgcccctgatcgcgcagggcaaaacgctccggctgtccgacgtggcaacggttgaacggggctatgaggacccaccgaccctgcagatccgtaaccagcaagaacccaccctcctgctcggtattgtcatgcgtgaaggctggaacggcctggcgctgggtaaagcgctggatgctgaaacggcaaacatcaatgccaatatgcctctggggatgaccctgacgaaagtcaccgatcagtcggtgaatatccgctcgtcggtcgatgagttcatgatcaagttcttcgtcgccctgctggtggtgatggtggtgtgttttgtcagtatggggtggcgcgtgggcatcgttgtcgcagcggcagtgccgctgacgctggcggtcgtttttgtcgtgatggaagcctccggtataaacttcgaccgcgttaccctgggctcccttattctcgccctcggcttactggttgatgatgcgattatcgccatcgaaatgatggtggtaaaaatggaggaaggctacgacagaatcaaagcctccgcctacgcctggagccataccgccgcgccaatgctggccggaaccctggtgacagccatcgggtttatgccgaatggttttgcgcagtcaaccgccggggagtacaccagcaatatgttctgggtagtcggcctcgccctgatagcttcgtggtttgtggcggtggtattcaccccttatctgggcgtcaaaatcctgccggacatcgcaaaagtcgaaggcggtcatgccgccatctatgacaccccgcgctataaccgttttcgtcataccctgagccgcgtgatcgcccgaaaatggatcgtcgccgcgtccgtcgtggccatcttcaccctcgcagtactggggatggggctggttaagaaacagtttttcccgacgtccgaccgccccgaggtgctggtggaagtgcagatgccgtatggcacatcgattgagcaaaccagcgccgccaccgcgaaaatcgaagcgtggctgcgcaaacagcctgaagccagcatcgtcaccgcctacattggccagggttcgccgcgcttttatctggcgatggcccctgagttgcccgatccctctttcgcgaaggttgtcgtcatgacggacagcgagaagtcacgcgaagcgcttaagttccgccttcgcgaagcggtcgcccgcgggctggctccggaggctcgcgtgcgggtcacgcagctggtgttcgggccttattctcccttcccggtcgcctggcgtgtaatgggtccggatgtcgataaactgcgtgacattgcagagaacgttaaaggtgtgctgcaggccagtccgatgatgagaaccgtcaataccgactggggttcacgcgtaccgaccctgcatttcaccctcgatcagaaccgcctgcaggctaccggcttaacgtcgaacgccgttgcccagcagcttcagttcctgctgtcgggcgttcccatcacgtccgtgcgggaagatattcgctcggtacaggttacgggccgcgccgcgggtgatatccgtcttgatccggcgaagatagagggctttaccctggtgggtaacgccggacaacgcgttccgctgtcacaaatcggggagattgagatccgaatggaagatccgctgttgcgccgccgcgatcgtacgcccacgattaccgtgcggggagacattgccgaaaaccttcagcccccggatgtgtcaaccgccatcatgaaacagctgcaacccattgttgattcgcttccacctggctatcgcatcgaaatggcgggatcgattgaggaatccggcaaagccacccaggccatggccccgctgttccccatcatgattgccctgacgctgctgataatcattctgcaggtgcgttcactctcggccatggtcatggtattcctgaccgcaccgctggggcttattggtgtggttcctacgctgctgcttttcaatcagccgtttggcatcaatgccctcgtcggcctgatcgcgctttcggggatcctgatgcgaaacacgctgattctcattggtcaaatcgatcacaaccagaaggacggtctcgatccgttccacgccgtggttgaggcgaccgtacagcgcgcgaggccggtcttactgacggccatggccgccgtgctggcgttcattcccctgacgcactccgtgttctggggaacgctggcctacacgctgattggcggaacgctagggggaaccattattaccctcgtcttcctgccagcgatgtatgcgatctggtttcggatcaagcccgccgcctga

SEQ ID NO: 123248 - DNA, 1110 bp, Enterobacter cloacae
atgctcaggcttcattcagcccgccttgccgtatgcctcctgccgtttgccctggtggcatgcggcgataaccacgccagtgacgatccgcgcacgcagccaccgcttgtcaggtctgcgtccgtgatccctgcgaacgagacgtcgcgcgcctttaccggcgtggtggtggcaagaacgcaaagtgatttaggcttcagggtgcagggcaaaattctcgaacgtcttgtcgatacgggtcagaccgttaagcagggccagcctttaatgcgtctggatcctgttgatctgaaattacaggcgcaggcccagcagcgagcggtggatgctgcccaggcgcgcgcacgtaaagcgtccagcgatgaggcgcgttatcgcggccttgtggcatccggtgcagtgtcggcgtcggaatacgaccagattaaagccgcagccgacagcgccagagcggagctcagcgctgcccgggcacaggcaggcgtggcgcaaaacgccaccggttatgccgtgctacttgccgattcagacggcgtggtgatggagacgcttgccgagcctggacaggtggtcagcgccgggcaggcggtgatccgtctggcccgcgcggggcagcgcgaggcgctggtccagttgccggaaaccctgcgccctgccgtgggaagtacagccctggcaacgctctacggtaacgaaaagcagcccgttagcgcgaagctgcgcctgctgtctgattcagccgatgcgaccacccgtacctttgaggcccgatacgtgctggatggcgcgctggcgaacgcgccgctgggggcgaccgtgacgctgagcatcgaacacggcaaaggcgacagccgcgtgatgcaggttcccctggcgtctctctacgatgcggggaaagggcctggcgtctggcgtatttccgctcagccgacaaaagtcgtctggcagcctgtcagggtgcttagcgtaggggatgatatcgccagagtgaccggcggcgtgcagcccggagagaagattgttgcgttaggcgtccatcttctgcacgaaggcgaagcgatccggctggcggaacagcgcgatgccactcaggcggggatgacaccatga

SEQ ID NO: 123249 - DNA, 615 bp, Enterobacter cloacae
atgactaaagacatgaacaccccatccacacgtggtccactcgatcacacggtccgagagcaaatcgtcgaagctgcgtatgagcacttcggccattacggctatgaaaaaaccaccgtcgctgaacttgccaaagccatcggtttttcaaaagcctatatctataagttttttgattccaagcaggcaatcggcgaggtcatctgcgcgaaccgtcttgatatgatcatggcggcggtcaatgcagccatcgctgatgcgccatccgccagcgaaaagctgcgtcgtctgttcagggcgctcaccgaggcgggaagtgaactgtttttccatgagcgtaaactctacgacatcgccgccgttgccgcgcgggacaagtggccttcaaccgaaaggtattccgaacgtctgctgaagctgattgagagcattgttgtcgagggcagaaaagccggtgagttcgagagaaaaacccctctggacgaagctacactggcgatctatatggtgatgtgccctttcattaaccctgttcagctgcagtacaacctcgaagccgccccgaccgcggcggttgtcctctcctctctgattttgcgaagcctcgccccctga

SEQ ID NO: 123250 - DNA, 819 bp, Enterobacter cloacae
atgaattcttttgattatacaggaaaaacagcactggttaccggtgcatcctcgggcatcggacgggagttcgcccgccagctcgcggcccgtggcgtggggttgatcctggttgcccgctccgaggcaacgctgcaggcgcttgcggctgagctacacaaaacgcacggcgtatcactcaccgttatcgtgcaggacttaacgctgcctgaggccattacccacattgtggaacggctggaagcgttacggctttatcccgatattttgattaatagcgcggggtttgccacctacgggcgatttgaaaagctatctctggcgcgccagcgtgaagagatcaacgtcaactgcgttgcccccgtggcgctcgcacacgccctgctgcccgccatgctgcgtaaaggttcaggcgtgatgattaacgtggcctcaaccgctgccatgcaaccggatccgtatatggcaatttatggggcaacaaaggcatttttactctccttttcgaacgcgctgtggggagaataccgcgctcacggcatccgcgtgctggcgctttgccccggcgcaacggataccgccttttttgaggtggtgaacgccgaggaagcgtcagtgggcaaaagaatgccagcgcagaacgtggtcgcgctggcgttacgggccgtggatacgcaacgcaatacgctgatccccggctgcggcaactggctgctgggccagttacaccggtttgtcacccgccgacgtctggcgatcattgctgaaaaagtattacgacctaagcccgccggtcaggggtcgcgctcagacgcataa

SEQ ID NO: 123251 - DNA, 369 bp, Enterobacter cloacae
atgaggatcggcgagctgtgtgccagaactgggttatcgaaagagacggtgcgttattatgaaagggcgggcctgctggaaaaaattccgcagccaaacggcagtaataactacaaagtctactcggctgtggatttacaacggctgaagctgatcgggcatgccaaaatgctggggtttaccctggctgaaatcgccgatgttctggcggtctgggttgatgaccgctttaccgcggaggaaaaacaggccgctttgcggcgcaaactggcgcaactggcggagaaagaagcggcgctgaatgaacttcggacccgcttgaccgatgcccttcataaagtcggtcagccgtgtgttgatgtattttaa

SEQ ID NO: 123252 - DNA, 936 bp, Enterobacter cloacae
atgggtaaactcgaagatatggcgctgctggtggaagtggccgaggctggcgggctttccgccgctggccgccgcctgtcactttccccggccaccatgaccgcccgcctcaaagcgattgaagaacgctaccagacgcgcctgtttcaccgttccacgcgggctatctccctcacccgggcgggcgaagagttttaccatgcggcacggcgcgtgctggaagagatgcatcatgccgagtcgttactggcacaaaaagagggcgtgctcagcggcaacattcgtctttccgccccctctgactttggcaggcagtatctcagccccgccgtcatggcattttcccgcctgcatccggaaatcaaatttttcgtttacttaagagaacacgtagaggatctggtcgctaaccggctggatatgagcattcgcttcggcaacctgccggacagcagcctgatggtcagaaatatccgtcccaatcaccgggtgctggtcgcgtcagcagcgtatcttgacgaccagggtatccctgcctcctgtgacgcgctgacggatcaccgctgtctggcgctggagtcgcaaggagtggtgatgaatgaatggcggtttgaggttgaggggaaagagcgcgtcgttcgcgtagagcctgccatggtctgtgatgacggagcgctgcttcgtcagtgggccctcgacggggctggcattgtgggcaaatcgtggtgggacgtgaaggacgatgtcgagaaaggaaggctgaaagtgttgcttgccgggagcttcaccggctttagccggtttgatcgcaaagatgtcgggctacagtttgtctacccgcaacggaaactccagccgcttcaggtcaccgcatttagccagttttttatcgactggcttaaaaagactgaacgcggtgagctgatgacgtcgtga

SEQ ID NO: 123253 - DNA, 1113 bp, Enterobacter cloacae
atgaaccagacctcactttttgaacgctacaggttaggggatctcaacctgaaaaatcgcatcgtcatggcaccaatgacccgtgcccgcgctcttcagccgggaaatattccctcgacactgatggctgaatattaccgacagcgggccagcgcgggcttaatcatcaccgaagccacgcagatttcgcctcagggccagggctattcatggactccggggatccatacgccagagcaggttgcggggtggcaactcactaccggcgcggtccaccaggcgggaggggtgattttttcccagctctggcacgtggggcggatgtctcatgcccgttttcacgaagacggactgcccgtcgcgccctcggcgctggcacccgatgcgaaagtatgggtggtgaatgaacatggcgaaggtcaaatggttgactgcccgacgccacgcgtgctgtcgcgaaaagagatcgcgcgcgtggtcgaacagtaccgacaggcggcgcttaatgccgttcaggccgggtttgatggcgtggaggtgcacggcggaaacggctatctgattgatcagttcctgagaaccacgtcaaacattcgcacggatgagtatggcggcagtctcgtgaaccggatccgcttcgcgcaggaggtgctcgatgccattgcgcaggccattggcgctgagcgcaccggtatccggctttcgccgtttattacacagcggggaatgaatgatccgcaggtcatcgaagccattctcgccctcgcggcctggtgccagcaacgaggcattgcgtttattcacctggcggaagccgactgggatgatgcgccacaggttccggaaagtttccgcaaaaaactgcgcgaaacattccgtagcaccctgatcgtggcaggaaattatacccccgaaaaggcggaaaaaatcctcgcagcagggtatgccgatttgattgcgtttggacgcccgtttattgccaatcccgatttaccacatcggctggcgcatcactggccgctgaatgacatcagcgatcccgccacgctctttggtggtacagcggtggggtataccgattaccctacttacaacctgtgtgaggaaaaatga

SEQ ID NO: 123254 - DNA, 720 bp, Enterobacter cloacae
atgacccgtaaaacgttaattattggcggcgcgtccggtattggttttgctgtagcccgtgccctggcagcacgcggcgacgacattattctcgcgggacgcaataaagagaaactgagcgctgcccgcgcgcggctcagtccatctcccgcctctgttgagaccctcgtcctcgatattagcaatgaagcagaggtgatcgcgttaagcgaaacgctgggtgaggtcgacaatattattgtcacggccggctctcaggcaccgggagggccgctttccagcctcgaccctggcgcggcgaaactggcttttgataccaaattttggggcagcatgcatgtcgccagatatctgagcgggaatatttcgccccgcggtacgctgacgctgaccagcggatttgttgcacgccgcgtggtagccggtgccatagtcaaaaccaccatgaacgccgccatcgaggcagcaacaaaagtgctggcaaaagaactttcaccgcgtcgcgtaaacgtcatcagcccgggtctgaccgataccgaagcccacgccgggatggatgcggctgcgcgggaaaaaatgctgactgttgcagcacagacgttgcccgctaaagcgtggggacgagcggaagacgttgctcagggctatctctttgccatcgataatgcctttgttacgggctcggtgattgatattgagggcggggcattacttaactga

SEQ ID NO: 123255 - DNA, 540 bp, Enterobacter cloacae
atgcaatattcaacatatgcacgtccagctgtgctggcgttaattctggctggcgtatccggcgtggcttattcggcccagagcgaccgggtgaaaccgaatcttcttattgtggataacacgctgtcgcaaacgcaattaacggcgagcgaacatgcggccgttacgtatgccacgttctgggataccggcaaagagtctctggcgcgggaagcgctggcggttaattttgtggataaaaccccaccggaaggccgtaaacaggggccagagggcgccattatggcctcgagggcatttcgcaccgcggtgccggatttacgctgcgaggtggaacaaatgatcgttacgggtaatcgtgtcgtgtcccatttgcatttccacggtcatttcagcgggacatttggcaaaataaaagggcagggtcagaccgtggattttatcgcgacggatatctatgagatcggcaacggtaaaatagtgtccaactggcatattgaagataacctgacgctgatgaaacagttgggtgtgatttaa

SEQ ID NO: 123256 - DNA, 468 bp, Enterobacter cloacae
atgaacacacgcccccctttaccgccttttacgcgtgaaagtgccatcgaaaaagtcagactggcagaagatggctggaacagtcgcgacccggccaaaatcgcacttgcctattcgctggatacccagtggcgaaaccgcgcggagtttgccactaaccgtcaggaagcacaggcattcctggagcgcaaatggaaaaaagagctggattatcgtctgatcaaagagctgtgggcatttacggaaaatcgtatcgccgtgcgctatgcctatgaatggcatgatgattcaggcaactggtatcgttcttacggtaatgaaaactgggaattcgagccggatggtctgatgaagcgccgcttcgcctgcatcaacgatatgccgataaaagcgtctgagcgcctgtttcactggccgctgggcagacgtcctgatgaccacccttcactgagcgacctggggctgtag

SEQ ID NO: 123257 - DNA, 585 bp, Enterobacter cloacae
gtgaacagagtcaacttgaataacgataaaacaatcagtgtgagggaaaaaatcttgcttaccgcgcacgatctgttttattccagcggatttaaagcaacgggcgtggataccattatcaagcaggctaaagtcacgaaagtgacgttttatcgccattttccgggaaaaagtttactgattgttgcctatctccactatcgacacgaaatatggattgactggtttgaaatcacgctgcgtcgacatcttgctgcaggcaaaaccccggccaatgcattatctgacacgctgtatgaatggtttatttcgccgttattccatgggtgcgcctttattaatgccagcgcagaagcaaaatctgaagaaaatgaacgcgaaataaaagatatttgccgcaatcataaagccgaaacaaaggcaaaaatagcgtccctgaccggcataaccgatgagaaaaccgttaatgaaatcatgatgctgatcgacggcgcgattattcatgcgcaaatggggatcgcagcggatgaggtcataagctcattgaaaaagggagtagaacggctgacagaaaacgccgcctga

SEQ ID NO: 123258 - DNA, 435 bp, Enterobacter cloacae
atgagcactttgccctctgtcgtgagtcggtttgttgagtactacaccgcactggatagccagccgccctcagcgctggtcgggctttatcattcggatgccacgcttatcgatccgttcggcgagcatgacgggattttcgcgctccagcgctatttcacccatttgctggccaatgtagaaaattgccgttttaccattgatcctccgctgttcggtgaccgccgtttcgttgtcacgtggattatgcactggtcgcatccgcgcattgccggaggcgagccgctcgacctgccgggatgttcggtggtggagaccgaacatgggttgattactcgccagcgtgactattacgacgccggagagatgatctacgaacaccttccgctgctcggttgggcagtgcgcggcgtgaagcggagggtgaacgcatga

SEQ ID NO: 123259 - DNA, 720 bp, Enterobacter cloacae
atgagcacggttctgattaccggagcaagctcgggcatcggcgccgggctggcgaaatccttcgctgctgacggccacacggttatcgcctgcgggcgcgatccggcgcgtctggacgccctgcatcagcacagccccactatcacggttcgcctgttcgatatgacagacagggacgcctgtcgccaggcgctgacgggctgctatgccgacctggttattctctgcgccggtacctgcgaataccttgagcagggcgtggtggatgcagcgctggtagagcgggtgatgaccaccaatttcctcgggccggtgaactgtctggccgcgttacagccgcagctggtttcaggcaaccgcgtggtgctggtcagctccatggcgcactggctgacgttcccgcgcgcagaggcttacggcgcgtccaaagcggcgctgagctggtttgccgacagtctgcggctcgactgggagccgaaagggatcgccgtgacggtggtattcccgggcttcgttgatacgccgctgacgcgaaaaaatgactttgccatgccgggcagggtgagcgttgaggaggccgtgcaggccattcggaccgggctggcgaaagggaaaatgcatattgcgtttccggtggggtttggccttatcttgcggttgctctcagggcttcccgcgtttcttcagcgcacactgctgcgcaggatggtgcgttcatga

SEQ ID NO: 123260 - DNA, 1260 bp, Enterobacter cloacae
atgaagattgccattatcggcagcggcatcgccgggttgacctgtgcctggcgacttgccggtcatcatgaggtgacgctgttcgaagcgggggccactcccggcgggcataccgcgacggttgacgtgccgacgccacagggcactttcgccatcgataccggttttatcgtctacaacgaccgtacctacccgcgatttatgggcctgctgagcgagctgggtatcagtgggcaaaagacgcagatgagcttttcggtgcataacccgcaaaccgggctggagtacaacggacacaccctggcctcgttatttgcccagcgtcgaaacctggtgaacccgtcgttctggcggctgctcggggagattgtccgctttaatcgcctggcgaaacaggcgctggagagcgagccagacccgcacgcgacgctgcagacgtttctggacaggcaccgctttacgccgtttttcgcacgtcattacattctgccgatgggggcggccatctggtcatcgtcgttgcaggagatgaaatgttttccgttgccgctctttttgcgtttctttgacaatcacggcctgctggatgtgacgcatcgtccgcagtggtacgtcgtgcccgggggttcgcgagaatacatccgcgccatgctggataaactcggtgaccgcctgacgctgcacctcaacgccccggtgcagcgggtgattcgtcaggagaatggggtaacgatccagctcgacaacgcgagccacagcgttgatcaggtgatttttgcctgtcactccgggcaggcgctggcgatgcttgacgcgccgagcgcggctgagcaggacgtgctgggcgatatcggctggcagcgtaatgaggtggtgcttcacagcgatccgcgctggctaccggtacgtcagcgtgcctgggcgagctggaactaccgtctgagccagcaggatcaggccagcgcctgcgtcacctacaacatgaatattttgcaggggttgcctgcgggtagcccgctgttctgcgtcacccttaatccggacatccccgtggatgaacgcttcgttctgaaacgctttgtctatgaacacccgctgtttaaccccaaaagctggcgtgcacaggcgcgtcgcggtgagattaacggccaccagcgtagctggttctgcggcgcttactggtacaacggctttcatgaagatggcgtgcgcagtgcgctggacgtggtgaatgcgatagccgccggggaggggaactga

SEQ ID NO: 123261 - DNA, 723 bp, Enterobacter cloacae
atgaacagctgcctctatcacggtgtcttacgccatcgtcgcttccggccgaaagcgcaccagttccgctacagcgtctttatggcctggctcgatctcgatgagctggagacgttgcccgcggtcggggtccgtcgcaatcgtgttgccgccgcttcgttccatgatgcggattatccgctgggcacgccgcttaaagagaacgtcctcaccaggcttgaaagcctgaccggagaacggccgcaggggcgggttatgctcctgacgcagctgcgctacttcggattccattttaatccggtcaacttttactactgctatgaccgggcggagacgctgcgctgggtgctggcggaagttcgcaataccccgtggaatgagcgtcattactacgcggtgaatgggcaggatgcgcgtcccacagaaaaagcgtttcatgtttccccttttaacccgatggacatggtttaccactggcgctttaacccgcctgacgactcgttgcatatgcacattgaaaaccatcaggaagcgaaggtgtttgacgccacgctggcgctacgccgggagccgcttacccgggcggcactgcggtcgctgctgctgcgcattccactgatgaccctcaaaaccgttttcgctatttactggcaggcgctgcggctgtggctcaagcgcgtgccgctgtataaccatcccgtcagcaggagtgaacgctcatga

SEQ ID NO: 123262 - DNA, 1221 bp, Enterobacter cloacae
atgaccgatcccgtctttgcgcttgaacccgatatcccgcgcaacgtccgcatcgcgcgctggctgctgtttcgtctgttaagcggtatccgcggcggctcgctgaccctgcgtgagggtgcgcagacgttccatttcggcgagacatccgctgcgctgcatgctgacgttcagatcctgagcccgggcgtgtactggcgtgtcttaacggggggtagcctcgccgccgctgaggcctggatggatggcgaatgggaaaccacacagctcacgccattgcttgagatcctggcgcttaacgggcaggtgcttggccggctggaaaagggatttcgcctgttcagcaggccgcttgaacggcttcgtcactggacgcggcgaaactcacgcgcccaggcccgcgaaaatattgccgcgcattacgatctgggtaacaccttctatgcccattttctggacaacgagttgctttactccagtgcgctgttcaccgcagatgagcaggatctcacggcggctcaacaggccaaaatggctcgcctgtgcgatcagctggcgctgaacgccaatgatcacctgctggaaattggcaccggctggggagcgatggcggaatatgccgcccgtcattatggctgtcgggtgaccaccacgacgctgtcgcaggagcagtatctctgggcgaaagaacggattgtccgcgccgggttgcaggatcgcgttgaggtactgctgtgcgattaccgcgatctcaccggagagtacgacaagctggtctcgatagagatgattgaggccgtggggcagcgctatctgccaaccttcttccgcacctgtcaggccaggctgcgaccgggaggtcgtatggcaatacaggccatcaccattcaggaccagcgctatcgcgactacagcaaaagcgtcgactttatccagcgctacatttttcccggcggttttttaccaagcatcaccgccatgaatgagcttatgacgcgccacaccgatttcgtgatgcgcaatctctttgatatggggcccgactatgcccgcacgctggctctctggcgccagcgcttcgtgcatgcatggcaggagattgaaaagcttgggttcgatgaacggtttcgtcggatgtggctgtactacctcggctactgcgaagccgggtttaacgcccgcaccatcagcgtggtgcagctgaccgccgagcgcgtatga

SEQ ID NO: 123263 - DNA, 525 bp, Enterobacter cloacae
atgagagctgcggcactgcttctctgcctgataatcctgtcccccgtggctcaggctgccgactggctgacctggcgcaaggtcggtgacgccacgctgacctgggggccgttcaccgtctatacctcacagcttcgcacgccggaggggcgttacagcggggagaacgaggatcgggcgctgatcatcacttacgcgcgtgaaatcgaccgtgacgacctggttgaggcaacgcgcgatcagtggcaggcgcaggggatcctcgagcaggagccccaaagcgaagcctggctgcgtatgctccagtcgctctggcccgatgttgggccgggcagccagctggcgtttgtggtcaccgacaggcaggggcagttctggtaccgcgcttcggcggcgcagaaaaactttattccactgggaccacgtcagtccgccgcgttcagcacgcgctttctggcaatctggctcagtccccgcacgcaatatcccgcgctgcgtcagcagctgacaggagggcaacaatga

SEQ ID NO: 123264 - DNA, 528 bp, Enterobacter cloacae
atgaaacgtattctggtcatcgcgctggcggtaacgatgctgctggccggctgcagtacagaggtgacggaataccgtcagcagcagccgaagctggatatcttccgctattttcaggggaaaaccgaagcgtggggcatggtgcaggatcgcagcggtacacagttgcgccggtttcacgttgagattgccggggacgttatcggcgatacgctgacgctcaatgaacatttcgtctatgacgacggcgaaaagcagcagcgggtatggcatatccgacggatggggggcgatcgctacgaaggcacggcaggggatatcgaaggggtggcgaccgggcaggcggcgggaaacgccttcaactggcattacagcatgcaggtgaaagccaatggcagcacctggctgctgcactttgacgactggatgtacctgcaggatgaaacccatctgttcaataaaacagagctgaagaaactgggcgtcaccgtcgccacggtgacgctgttctttacccgcaaggcgtga

SEQ ID NO: 123265 - DNA, 435 bp, Enterobacter cloacae
atgcaatggatgttaattttactggttattctcggcggcatgggcctctccgtagaggctggcttgctggggccactgggtggggaagtcggcgatttatgggccacgttcagtattttcggtacaggtgccgcgctgacgtttctgctgatgctgtttttcagcccgcgtaacagcccgtcttttttcgcgcagcccgcatggcaactgctcggcggcgtactcgggcccgtttacgtcgtcattttgaccctcgccacgccggccatcggcattgccctgacgatgattggcattctggcaggtcaggtctttaagagtcttatcattgaccactatgggttgctgggcaccacgcccagaaagattaacggtaaacgcatcatcgcgctgcttttcatcattgccgcgctggttctggttgcacaggggtaa

SEQ ID NO: 123266 - DNA, 933 bp, Enterobacter cloacae
atggttgatgccggaaatatgaatatccgctcgctgcgggtttttattgcggtttacgaagcgcaaaacttttctgtggtcgcccggcgggaggggatgtctgcctcgcaggtttcacgcgttatccatcagcttgaggacgcgctcggccagcagcttttctatcgtaatacccgggcggtgatcccaacggaaagcggccacctttttatccgctacgccagagcgatggtggaaagcctggaggaggcgcgtcgggagctggatgagcgttcgacggagccttccgggacgctgcgcataaatggcccggtgtactttgggcagcgacacgttgcccctggcctgcctgcactggcggcgcggtatccccggctgaatatagagctgacgctgaccgatgactttatcgacccacacaaagatgccgccgacgttatctttcgcatcggcatgctgacggattcaacctttcacgcgcgggtttttggccagcagcgttaccatctggccgcgtcgccggactatttgcgaaaacacggtgtgccagacgggccggatgacctcagtcgccaccggtgtctggtctaccgcgggtcgtcaggtcccaatcgctggctggtgcgaggtcagggggaagcctgggtgcattaccccgtggtgccgctgatgacctccaataatgcggagtcgctgctcattgccgcgctgggcgggatggggatcgtgctgtttccggactggctgattggcgacagactgcagaagggggaactggtcgcactcctcgcggaacgggagtgcgccataaataccgagccgctgaacattgcggcgatctatcctcacgcccgtcacccgcccctgaacgtcagggcggtgattgatcattacgtggcgcttttcggcaccccgccttactggcagacgtag

SEQ ID NO: 123267 - DNA, 975 bp, Enterobacter cloacae
atgagtaatgcttttacatttagccttaagcgtagttgctttgatgaaaattataacccttcagaaaatacgcgtaccaccaccaacttcgccaacctggcccgtggcgaaaaacgccagcaaaacctgcgtaatacgctggtgatgatgaataaccgttttaacgcgttagcgcgctgggataacccaaaagccgatcgctatgcgctcgaactggacattatttctgtggatttgcatatcggcgctgagaagcccttcccggctatcgaaatattgcagacaacgatcgttgataaaaagacccatgagcgcatcgacggtatcgttggaaataatttctcgtcctatgtccgcgattatgatttcagcgtcttgctgccggagcacaataaaaatcagtcccgcttcgcgatcccggataattttggtgagctgcacggcactattttccggcatttcgttaactcacctgaatacaaagagaacttcaaaaaggcaccggtgatctgcctgagcgtctccagcaaagacacctaccgccgcacaggcaaccagcacccggtgctgggcatcgagtatcgtccggacggtacatccttaaccgagcagtacttcgggaaaatgggtctgcaggttcgttactttatgcctgagaatagcgcagcgccgtttgcgttttatttcaccggcgatttattacgggattacaccaacctggagttgattagcaccatcagcaccatggagactttccagaaaatttatcgccctgaaatttacaatgcgaactcgaccgccggagaatgctaccagcccgatctgaatcatgaggatcattcattaacaaaaattgtttatgaccgcgaagaacgcagccggctggcaattgaacagggcaaatttacggaagcgtatttcatcaagccctataaacctcttcttgagcagtggtcaggtcataacacgctttaa

SEQ ID NO: 123268 - DNA, 684 bp, Enterobacter cloacae
atgtctgcgattatagattcttttattgccccaccgtgtcacgacgagatcgagatcctctggcaggacgaacatctggtcctgattaataagccttccggtctgctcagcctttcaggcaaaaatccgcaaaaccgcgattccgtgcattatcgactggtacagacgtttcccggctgcacgctggtgcatcgtctggatttcggtacatccgggctgatggtgattgcgcgcaataaagcgattaacgccgccctctgtcaccagtttagccagcgcgccgtgcgaaaggtatacagcgccctgctttgcgggcatgtggaacacgacgagggcgtgattgatgccccgattgctaaagatccggcgctgtttccgctgatgtcgatttgtgcaattaccggcaaacccgcacgctcacgctatcaggtgatggaccggttttatgatgcggcactgccgttgacgcgggtcaaactgaccccggagaccgggcgaacccaccagctgcgtattcactgccagcagttgggctaccctattttaggctgcgatctgtatggtggtcttgcactgccgggcaccgaaccgataccgcggctgatgctgcacgccagcgagctggattttgtgcatccggtgagcgcagaggcaattaacgcccgtcacgccgcaccgttttaa

SEQ ID NO: 123269 - DNA, 804 bp, Enterobacter cloacae
atggttcagacgcattttccccttctgccggagtcaaccctggcggcaatcaacacggtcggccagtggctggcacaggatgatttgggcgatacccgcgacgtggcggcggttgacagggttattctggccggaaacgcggtgatgccgaccatcgacgctgcctgccgtattgccgctgaacacgacgttccgttactgattagcggagggattggccattcgactgcgtttttgtatgcggccatcgctcagcatccgcgttatcacactgtcccggtaacggggcgagcggaagcaagcattctggccgatattgcccgccagttctggcagatccctgatgcgcacgtgtgggttgacgatcaatcaaccaactgcggagaaaacgcgcgttttagctggaacatgctcaaacagcatcatcagacgtccgggcgcgtgctggtcgtgcaggatccgaccatgcaacgccgcacgatggcaacctttgcccgcgtgtgccgtgacgagtctgcttcgccgcagtgggtcagccacccgggctatacaccggtgctgaaaaatggcgagaacgggctggtgttcagcggggagagcgctggcctctggccggtagagcgttatctctcgctcattttaggcgagcttccgcgactctgtgatgacatgaacggctatggcccggccgggcgtgattttattgcacacgttgaattccccgacgaggtgacagcagcgtgggcacggttaaagcaggatcctgtgcttacggatgccctgaaccaccggtcgcttctctga

SEQ ID NO: 123270 - DNA, 1002 bp, Enterobacter cloacae
atgagtaaaattggcattaacggatttggacgcataggacgccttgtcctgcgtcgccttcttgaaacccaggacagcaacaccgtcgtggccatcaacgatctcacctctcccaaagtgctggcctacctgctcaggcatgattccaactacggtggcttcccgtggagcgtagatttcaccgaagacgccctgattgttgacggaaaaactatcgccgtgtacgccgaaaaagaggcaaaacatatcccgtggaaagccgcgggcgtggatatcgtcgtggaatgcaccggcttctacacgtcggcagaaaaatcacaggcacaccttgaggccggagccaaaaaagtgctgatctctgcccctgccggtgagatgaaaaccatcgtgtataacgtgaatgacgataccattgtcgccagtgatacgattatttccgttgcttcctgtaccaccaactgcctcgccccactggcaaaagccctgcacgatgcgtttgaaataaaagtgggcaccatgacaaccattcacgcctataccggcacgcaggcgctggtggatggcccgcgcgggaaagatcttcgcgcctcacgcgccgcggcggagaatatcattccgcacaccaccggggcggccaaagccatcggtctggtgattccggccctcagcggcaagctgaaaggccacgcccagcgcgtaccggtgaaaaccggttcagtgaccgagctggtctcgattctgggtaaaaaggtcaccgttgaggagatcaacgccgcgctgaaaaaagcgacacaggggaataaatcttttggttataccgatgaagagattgtttcgtctgatgtgatcggctcccactttggatctgtctttgacgccacacagaccgaagtttcagaggctggcgatctgcaactggtgaaaaccgtcgcctggtatgacaacgaatacggtttcgtcacccagctggtgcgcacgctggacaaattcgcctcgctgtaa

SEQ ID NO: 123271 - DNA, 531 bp, Enterobacter cloacae
atgcgtactaaatatacaagcctgcaaattgctatccactggctggtgtttttgttaatcatcgtcgcctactgcgcgatggaattcaaaggcttcttcccacgcaccgcccggccggtaatcaacatgatccacgtttcgtgcggcatctctgtgctggtgttgatggtgacgcgtttagtggttcgccttaaattccgcgcaccgccgattgaaccaaagccaaaaccgatggtgaccgggctgtcccatcttggtcatctggtggtgtatctgttgttcatcgcgttgccgctgattggtattgtcatgatgtataaccgcggtactgactggttagcctttggtctggtgatgccgcacgcggcagaatcgaattttgatctggtcgacgttctgaaagagtggcacgagacgctggccaacgtggggtacgttgtgattggtctgcacgcgatggcggcgctgatgcatcactatttctggaaagacaacaccctcctgcgcatgatgccaaaaaaacgccagtaa

SEQ ID NO: 123272 - DNA, 1068 bp, Enterobacter cloacae
atgagtaaagagaagacaatcaacattgcgctgatcgggtatggatttgtaggcaagaccttccatgccccgctgatccagtccgtggacggcctcaagctggcggtggtttcgtctcgtgatgaagagaaggttaaacgcgatcttcctgatgttcaggtggtggcaaccccggaagaggcaattcagcatcccgatgtcgatctggtggtgattgcctcccctaacgccacccacgcgccgctggcaacgcttgccctgaattcaggcaaacacgtggtcgtggacaaaccgttcacactcgacatgcaggaagcccgcgacctgatcgccctggcgcaagagaagcaacggctgctctccgtcttccataaccgccgctgggacagcgacttcctcggcattaagcaggttattgagcaaggaacccttggcaaggtcaaacaccttgagtcgcacattgaccgtttccgcccggaagtgcgcgtacgctggagagagcaaaacgttcccggtagcggtctgtggtttgatctggggccgcacctgattgaccagacgctgcagctctttggactgccacagtcggtacagggcaatatcgccacgctgcgtgacggcgcggaaattaacgactgggcacacgtggtcttagattatccgcaacataaagtgattctgcactgcagcatgctggtggctggcggaacggcacgttttaccgttcacggcgataaaggcagcgtggtgaaagcccgaatcgaccaacaggaagcgcagctgctggcgggcgtgatccccggcagtgaggcctggggcgaggacagtgacagcatggtgttctttggtgcaaacggtgagccgcagaccgttaccacgccgaaaggcgatcagcgtcagtactacatcaacgtgcgtgatgcgctactcggaaaaatcaccaatccggttcatccggtcgaggcgctggcggtaatggcggtactggtagcggccgtgaaatcctcagagacgggcaccactcaggcgctggagttaaccccggaagaacgcgctcaactgcaataa

SEQ ID NO: 123273 - DNA, 744 bp, Enterobacter cloacae
atgcacaaaacggccagacaaaaatatgtgcttgatatcattagtgagcacgggcaggccagcattacggaactggcggacaaactgcaggtctcagcggacaccatccgccgggatctgaccgatctcgagaaacagggactggcgcaaaagaaccacggcggggcaattgccctgaatctgtcggccatgaatcgtcaggggcgcaatacactgctgccggaaaccaaacaacgtcttggtaaacaggtggcgcaggctgttccgccaggttcgacgctgtttctggatgcggggagcacggtaatggctgtcgcctcgttcctgaagggaccgctgacaatcatcaccacctcgctggatatcgcgtggcacttcagcgaccgtgacgatatcgaactgatcctgctcggcggaaaatgggatcacaagcagcgactgtttgccggcagcgccaccctctccctgctgtcacgctaccgcgcggatatcgccattctgggagcctgtgctatccatgctgaactcggtctgagcgccggaaaagaggccgatgccgaggtcaaacgggcgatgctcgcggccagccatgagcgctggattgtcgccgaccatctgaaactaaaccgctgtgaaccgtatctggtcagcggattatccaacatccagcacctctttttagatcgtccctggcctgagcttggggaccctggcgcaatgcacattacggtttgcgcgaaataa

SEQ ID NO: 123274 - DNA, 2181 bp, Enterobacter cloacae
atgaagacacatccacagtacgaaccctggttgcagggcatgctcatcatcgcgaagcactatcggctggacttctcggcagagcatgttcgggtcacgattaaccatgaaagccagtctccacgccagctggtgctggaagagatggcacgccagcttgggttagggatgcgtatggtggcggccgacgcggtctccctcgacccgtggcgtttacctctgcttgcggaatttaccggcgggcaaatcgcggtcattaaccgcatggacagcgagggcaacgtgagcctgcagttcagcggtgacggcggcctggagacgacgctgacgcgtgatgcgctgtgctcacggttgacaggactgctggtgctgcgcccgctcgagtccacgccggatgcccgggtggatgattacatcaaaccgtatgagaaaaactggttctggcagctggccctgaaggactggcgacgctacagcgatattatgctggtggcgctggtcgctaacgtcctggccctttccggcatggtcttttccatgcaggtgtatgacagggtagtgccctcgcaatcggaagccacgctgtgggtcctgtttggcggcgtaatgatcgccattgttttcgaattcatcatgcgcatgctgcgcgtgcacatttcggatgtggtgggtaagcgcgccgacttgcgtatttctgaacgcgtttttgcacacgcgctgcgaattaaaaacggggcccgctctaagtcaaccgggtcgtttattgcccagatccgcgagctggagtcggttcgtgaactgatcacgtccaccaccattgcggccatctccgatctgccattcttcctgctgtttgtgttcattttgtggatgattggcggaccgctggtactggttgtcctgcttgccgtgccgctgctgcttatcccgggcctgctggtccagcgcccgctgggtaaactgtccagcgaagggatgcgcgagtctgccattcgtaacgccacgctggtggaagcggttcagggcattgaagacatcaagctgatgcgcgctgaacagcgcttccagaatcagtggaataacaccaatgatgttgccgctaacgtcggcatgaagcagcgctggctgaccgggctgttgctgacctggacgcaggaggtgcagtcgattgtgtatgccgtggtgctgctggtggggtgttacctggttatcagcggggacatgaccaccggtgcgctggtggggacctctattctcgcgtcgcggaccatcgcgccgctgtcgcaaatttcaggcgtgctctcccgctggcagtcggcgaaagtggcgcgtaaaggactcgacgatctgatgcagcgcccgattgacgatcctcagcagggcaagaaggtgcataaagcccatctgcggggggattatgcgctggaagaggtggggttctggtacgacgatgaagaaaaactcaccgttctgaacatcagcaaactgcagattcgcgccggtgagcgggtggcggtgctcggacgcaatggctccggcaaaagcacgctgctgcaactgctggcagggatgcaggagcctcagcagggcagcattctgctggataatatcgcgttgaaccatctggacccggctgacgtgcgccgcgacatgcagctgctgagccagcaggcgcggctgttctttggctccgtgcgggacaacattctgatgggcaacccgctggccaccgacgatgagatccatcaggcgctggtgaacagtggtgcgctggagtttgtccgcaaacagaaaatggggctcaactacattatcaacgaaggcggcgcgggcctgtccggcgggcagcgtcaggcgttattactggctcgcgccctgatcacctctccgaacattttgttgctggatgaacctaccgcctggcttgacgagatgagtgagaagcagtttatccagcaccttaaaccgtggttgggcaagcgccggacgctggtggtcgcgacccatcgtctgcctattctggaactggttgaccgtatcatcgtgctggaaaacggcaaggtgatcatggatggcccgcgcgacgccatccttcgccagcacggtatggcgccgcaaaaagcctcacagcgtaccgtgaccatgaaaccgacaccagtagcagaggagggcgtagcatga

SEQ ID NO: 123275 - DNA, 1176 bp, Enterobacter cloacae
atgactgatttctctcgcgtcaacagccgcctgaaggagccacgcttgtcgcggtcaacctgggtcgcctggtcgctgttcgccctgctggcggtatttatcacctgggcaagcctgttcagccttgatgaggtcaccaccggtagcggcaaggtgatcccctcttcgcacgagcaggtgatccagtccctcgaagggggcattattcacagtttgctggtgcgtgaaggcgacatcgttgagcgtggtcagcagctggcacagcttgaccggacgaaaaccgaatcaagcgtgctggagagtgaatcgcgcctgaatgccgcgctggcaaccgcctcgcgtctgaaggccgaagtgaacgacacggcactggcttttccggcagagttggatgatgacgttgaactggtcaaacaggaaacggcgctgtatcagtctcgtcgcgaaagtcttgagaaagggctggcagggttacggcagggagccgaactggtgcagcgtgagctgtcgctgacccgtccgctggtgacgcagggggcagccagtaaggtggaggtgttacgtcttgagcgtcaaaaaaatgagcttgagaacaaaatcaccgagatgaaaaaccagtattacgttcgcgcccgtgaagagctggcgaaagcgaacgcggagattgaagcgcaacgttcggtgatgaaagggcgtgaagattcgttgaccagactgaccttcaatgcgccggtgcgcgggatcgttaaggatatcgacgtgacaaccgtgggaggggtgattccgccaaacggcaagctgatgagcctggttccgcttgatgaccagatggtgattgaagcgaaaatctcgccgcgcgatgtcgcctttattcatccgggacaaaaagcgctggtgaaagtgaccgcctatgactactccatttacggtgggctggagggcgaggtgaccatgatttcgccggatacgcttcaggatgaggtgaaaagggatgtgtattactatcgggtctatatccgcactgacagtaaccatctgaccaataaacaaggcaaagccttcccggtgtttccggggatgattgcgaccgttgatattaaaacaggcagtaaaacgattctggattatctgttgaaaccgcttaataaggcgaaagaggcactgcgggaacggtaa

SEQ ID NO: 123276 - DNA, 885 bp, Enterobacter cloacae
atggataatcatatctcatccagggccttgctacatcgaagggatgtcattaaaaacaacccgcgattcagtgaggcaataacagagcactacaccattaatgacgccatctacaaaaaacaacctttgttctacaaaacgatgcttcaggaatcacggttcaacattattctttccatgtgttgttttatctttggaaatcaggctgagtcagtatcagaaattaaagaattatgctcccgttataaaattgccagccccaacagtgtgattgcgatcatcaccttgctcagaaccaccgggcgcatcaagacctggcgctgcagtgaagacagacgcaaaacgagaatcgcaccgactgaaaagggacttaatgaacttaaacgctacatgtccggcgcatttttgccggtaagtattcttttcccaaagtttaatatcaacgttaatctgctggataacgacatcctgcgaaataactttttccgtcgcgcagcggaataccttttcaggggattaacgttcaggaaggttttgcctgaagtgggattgtttattgataaagacggagggcggatgataatgttatatctttacctgcaggccataaaaaataaaaccgcacatggcgcagtaataccctattcagccaacttactggctaaagaattttttgtttcacggatccacgtcaaccgtattatcaaatcggcgcaagaggcgggttatcttaaagatcagggtgatggccagatgtcgatttacccggcgtttatagaactggtcgaaaactatgccggattatacttcgcctatgtgactcactatatcaacgtcgttcctaaagaacgacgccacgttgttaacgtaacgtcgacggtataa

SEQ ID NO: 123277 - DNA, 1464 bp, Enterobacter cloacae
atgacccaaaatatttctttcagaaatgctgctttttatgagcaaaaatttgtcatctcaacctgccatttcacatttcaggggtacagtctgttactcaaacagtacggtatagacgcttcgcacgttcgttttgagggggatgaaccttcccggcaggatctggaaaatatccttagcagtcaaaacgctcaaatctcggtgtttctcggcaaaggtgtggtctctctgctggagagcctgaagcgactcgcttgcgtgctaaataaacttcctgttattcgaaaggtaaccctgtacggggaaatgccggatggctggctgtatcgaactctggggaatcttttaaataatactttccagctttcagtgattcgtatagccagcgtgcctgatgttatgacctgttttcgtatgcataatgacgtatttaaggataactcacgttctttgcgtgaccaatactggggggtgtcttatcaggaaaacgtaaaaggtttaaccgaaagagaggtaagcgttttattaaatttttatcgcggaatgtcagtgaaagagcagtgtaaaaaaatggggctgtctaataaaacggtttatactcatcgtaaggaaggggtgaaaaaattacaccagatccgacgctggctgaaagatccgcatgccttaagaatggaaggaagcacggaacggttaacgcaaaaagaaagtctctctgccaaagagacgtcggtttataatgcattgctaaaaagagaaatattccctgcgtatcagatcataaccgatcgttataagaagggagtggggtttgagatactcattcgctggaataataatggtaaaattatcaagccagttaattttcttactgatatttcaaaccaggagatatggcttaaaattactgcgttagtgattcatgctgcggtgtcaggtattaataaatataacggtaaatattatttttccgtcaatatccccccgcgacttgcctcggggaatgcacttcccgacatggccaaaaaggctgtggcgatgctgctcaatccgcagtgggccgacaaactggtctttgaatttgcggaagatattgatgtgaccaaggataggacgatccctgaaaccatgcggcgtttacgcaataccgggtgccggctgtttctcgatgactgcttttccaaccatcaaaccatgttcccggtaaggcaggtgcattttgatggattaaagcttgaccgggatatcgtcgagcattttgtggcgaatgacaacgattataatcttattaaagcgatacagatatacagcgatatgaccggcacggattgtattgctgaaggggtggatagcgaagagaagtttgagaagttagtcgcccttggggttaaaagctttcaaggctattatctgtcgcaagcggtgaaagaagacgaattagatcgcatggtcagattgtttagctaa

SEQ ID NO: 123278 - DNA, 570 bp, Enterobacter cloacae
atggaagccatccaggcctcgggaattgattacaccatatttttctataaccccaatattcatccacaaaaggaatacctcatccgtaaggaggagaatattcgctttgcggaaaaacatggcgtgccgtttgtcgatgccgattacgacaccgataactggtttgaacgcgctaagggcatggaatgggaacccgagcgcggcatccgctgcaccatgtgcttcgatatgcgtttcgaacgcacggcgttgtatgcggcagaaaatggttttcgcgtcatcagtagttcattagggatctcccgctggaagaatatgcagcagataaatgactgcggccagcgtgcggcagcacgctatccggggatggtctactgggactacaactggcgcaaacagggcggttcctcacgcatgattgagataagcaagcgagaacagttttaccagcaggaatattgcgggtgcgtgtattcgctcagggacagtaacctgcaccgcaagtctcagggccgcccgcttatccggattgggaaactgtattacggtcaggatgagaatgagaaataa

SEQ ID NO: 123279 - DNA, 804 bp, Enterobacter cloacae
atgaaaaaaattgttggcgtgatattactttcctgcttacttgccggttgcgataaaccaaaaattgactcatcaactgatgatgcaatgaaatcgtctatagctaaagtcagagagtcacttccggagaataagcgggaggagtttgatagcgctctgcaagttgtggcattcagtaacatcaacatggctgatctcatgcatgcttcatcagacaatgataaagaagacctcagcaaaaagatgcgcgaacccctgtcgggaaagactgctgaggaagtcatttcttatgctcagaaagtaacagctgagagagagcttaagcagaaaaaacaggcaattcaggaaattaaaacgctagaaaagaaaaaagctgactcagatatggctaaagaggagctgaagaaaatcaaggttttatcagccagatttaccagggagcctgaggaagacggtgagccacaacccgtaattagactggttgtaaaaaacaagagtgaaaacgttatttccagagcctacctgcatggagtgatagcaagcagcggacactcagatccctggttggaaagcaagttcttttacgatattcctgacgggcttaaaccgaatgaagaagctacatgggctctggctccgcctaaaaattctgaatggggtcaactttatgccccaagcgacgctgttttcactgtgacagtcatgagagtagacggtactgataagcgggcgttgtttgatgcaacaatgtttacagaggaagacggtaacaagcttgatgaactgaagaaaaaatacccgtga

SEQ ID NO: 123280 - DNA, 1692 bp, Enterobacter cloacae
atggacaacacaacaacggtgcaggcgcagcgcacgctgagctttttgcatcatatcaggctggttccgctgttttcctccattctcggtggcattattttgctgttcgccttgagctcaggtctggcgggctatttcctgctgcaggcagacgccgatcagcaggatgtcacatcagaaattcaggtgcgtatggggctgtcgaacagttctaaccatcttcgcaccgcgcgtatcaatatgatccacgctggcgcggccagccgtatcgccgagatggatgcaatgaagcagaacatcagcgaggcggaaaaacgtattaagcagtctcaggatggctttaatgcgtacatgaaccgccccgttcgtacggcggaggatgaagcgctggatgccgaactgaaaacacgctttgacgcctatatcgcgggccttcagccgatggttaaatttgccaaaaacggcatgtttgaagcgatcattaaccatgaaaacgaatccgcgcgcccgctggatgacgcctataacgccgtcctgctgaaggcgattaagatccgtaccgaccgggccaatgccctgacggcgcaggcgcacagccgcacgcagctgggcctgatgtttatggtcggggcgtttgccctggcgctggtgttgaccgcgctgacctttatcgtgctgcgccgcacggtcatcaatccgcttcagcgtgctgctacgcgaatcgagaacattgcaaaaggcgacctgacgatgccggatgatgtcgccgggcgcagcgaaattggccggctgacgcgcgacctgcaaaccatgcagcactcgctggagaccacggttggcaccgtacgccagggggcggaagagatctatcgtggaaccagtgaaatctcggctggcaacaccgatctctcatcccgtaccgaacagcaggcggccgccattgagcagactgccgcaagtatggaacagctgaccgcgacggtgaaacagaatgccgataacgcgcaccatgccagcaagctggcggaagatgcctccggtaaagccagccgtggcggccagatggtctccggcgtggtgaaaacgatgagcaatatctccaccagttcgaagaagatctctgagattactgccgtaattaacagcattgcgttccagaccaatatcctggcgctcaatgcggcagtagaagcagcgcgtgcgggtgaacaaggacgcggctttgcggtggtggcgagcgaagtgcgtaccctggcgagccgaagtgcaaatgccgcgaaagagattgaaagcctgatcaacgagtcggtttccctgatcgatcagggttccggtgaagtggtcgccgcgggcaacaccatgaacgacatcgtcgatgcggtgaaacgcgttaccgatattatgctggaaattgccgccgcctccgacgaacagagccgcggtatcgagcaggtcagccaggcgatttcggagatggacaaagtgacgcagcagaacgcctcgctggtggaagaagcctctgcggcggcggcctccctggaagaacagggcgcgcgtctgaccgaggcagtcggggcatttcgtctgagtggcgcaaagcctggccgttcagtctcgtctgcgtcagcggtgaaaaacgcacctttacgtcctgcgcctgcggtgtcgggtgataactgggaaacgttctga

SEQ ID NO: 123281 - DNA, 2382 bp, Enterobacter cloacae
atggcatttggcagcgcgccacgtgggataccccgtatcctgcagtggctccttgccggactgatgacgctcatcggtctggctgttggcggcttaggtttaaagcttgttaccgtaggcggaagtgggtacttcctgatcatgggcgtggcgatggtgattgccgccgtcctgattttcatcaaccgcaccagcgggatcgtcctctatggcatcgcgtttatcgcctcgctgttctgggccgtcagcgatgccggatgggatttctggccgctcttctcgcgcctctttacgtttgccgtgctggccttcctctgtgccatcgtctggccgtttatgcgcgcagcaaaccacaacgccccgaacaaagcaccggcgtttggcgtcgcggccgttctggcggtcgtgatgctggtgagcctcggctggatgttcaagccgcaaacgctggtggtggcgaatgagccggtaccggtaaaaccggtcgcaccaggtcaggagcagaaaaactgggcgcactggggcaataccacccacggtgaccgcttcgccgccctcgatcaaattaacaaacaaaacgtgaacgatctgaaggtggcctgggttgcccacacgggggatattcctcagagcaacggctccggtgcggaagatcagaacaccccattgcaaattggcgacacgctgtatgtctgtacgccgtacagtaaagtcctggcgctggacgtcgactccggtaaagagaaatggcgttacgacgcgaaagcctcggcaccgaactggcagcgttgccgcggtctgggttattttgaagatcacagcagcgtgacaacgtcacagacagatacacagcctgcggcctgccctcgtcgtctgttcctgccgaccaccgatgcgcgactgattgccatcaatgcggataacggcaaggtctgtgaagactttggcgatcgtggcaccgttgacctgagcatcgggatgggggaaatcaagccgggttactatcagcagacctccacgccgctggtcgcggggaatgtggtggtggttggcggtcgtatcgcggataacttctccaccggcgaaccgccgggcgtcgtgcgtgcgtatgacgttcataccggtaagctggcatgggcatgggatccgggtaatccgcaactgaccggcctcccaccggaaggacagacctatacacgcggcacgccgaacgtctggtctgccatgtcttacgatgcaaaactgaacctgatctatctgccaaccggcaacgccacgccagatttctgggcgggtgagcgtacggcgctggatgacaagtacagctcctccatcgtggcggtggacgccgccaccggtcaggtgcgctggcatttccagaccacccaccacgacctgtgggactttgatctcccttcccagccgctgctgtacaatttacccgacggtaaaggtggcaccacgccggtgctggtgcagaccagcaaacagggcatgatctttatgctcaaccgcgaaaccggcaagcccgtggcgaaagtggaagagcgcccggtaccggccggtaacgttgaaggtgaacgttactccccgacccaaccgtactctgttggcatgccgatgattggcaaccagacgctgaccgaatcggatatgtggggggcgacgccagtcgacctgctgctgtgccgcattcagtttaaagagatgcgtcaccagggcgtcttcaccccaccgggtctcgaccgttccctgcagttcccgggctccctcggcgggatgaactggggcagcgtctcaatcgacccgaacaacagcctgatgttcgttaacgatatgcgcctgggactggcaaactacatggtaccgcgtgccaacgtggcgaaaaacgccagcggcatcgagatgggtattgtgcctatggacggtacaccgttcggggctatgcgtgaacgcttcctgtcgccgttgggcattccgtgtcagaagccaccgtttggcaccatgtcagccgttgacctgaaatcaggcaagctggtgtggcaggttccggtcggtacggtggaagatactggcccgcttggcattcgtatgcatatgccgatcccaatcggtatgccgaccctgggcgcgtccctcgctacccagtccggtctgctgttctttgccggcacccaggatttctacctgcgcgcatttgataccgccaccggaaaagagatctggaaagaccgtctgccggtcggtagccagtccggaccgatgacctatgtttcaccgaaaaccggtaaacagtacatcatcatcaacgcggggggtgcccgtcagtcgccggatcgcggtgattacgtgattgcctacgcgctgccggataagcaataa

SEQ ID NO: 123282 - DNA, 885 bp, Enterobacter cloacae
atgagtgatactacacaacgtcagaacgcttacccgcaaccccctttcccggagcaaccgcaaacgccgccgggactggcatcagaaatgcaacccgtacccgaccacggggaaacgagctataaagggcatggccgccttgccggcaagaaagcattgatcaccggaggcgactccggtattggtcgcgcagtcgcgatcgcttacgcccgtgaaggggctgacgtcgcaatcaactatctgcctgaagaagagaaagacgcggttgacgtcattgagcttatcaaagcggaaggacgcattgccgtcgcgctgccgggtgacatccgtgacgagacgttctgccagaagctggtagaagaggcggtggccaaactggggggactggacattctggtgaataacgctggtcgtcagcaataccgggaatcccttgaagagctcaccacggaagattttgacgcgaccttcaaaaccaatgtctatgcgcctttctggataaccaaagcggcgctgcgccatctgaaaccatcggcctctatcattaatacttcctcggtccaggcggttaagcccagccctgtgctgctggattatgcccagacaaaagcctgtctggcggtgttcaccaaatccttagcgaaacagcttggtccaaaaggaatacgcgtcaacgcggttgccccgggtccttactggacggtgctgcaatccagcggcggccagccgatggaaaaagtgaaagagtttggtgccgataccccgctggggcgtccgggtcaacctgttgaaatcgcaccgctctatgtcacgctggcctcggatgaatgttcatttacctccggtcaggtatggtgctctgacggcggtgatggcgtgatttaa

SEQ ID NO: 123283 - DNA, 390 bp, Enterobacter cloacae
atgaaattatcgcttatttccgcttttttgatatttctggtaccggccgcatgggcagataataacggcgggttacaaaaaggtgaagcaccgccaccgccgcacgcactggatagcggttatcgtggaaccgatgacgcacgaattatgaccatcgatcatgcaaaagaaatgcatgatggtgcgactatttcattacgcggaaaccttattgacggtagcggcgataagtttgtattccaggataaaaccggaaaaatagacgttattattccccaggcagtattcgacggcagaacagtaaaacccgatcagatgatcagtatcaacggatcgcttgataagaaatcatcgccgcctgtcgtgcgcgtcgatcatttgcagaaataa

SEQ ID NO: 123284 - DNA, 504 bp, Enterobacter cloacae
atgaagcatcaaagtgataagttacctgggatagatgagaattaccgattgctgacgtttgaatatggatttcgtcaggtgggttttattgtcctgctggccattatcgttgcggcgatagcgggcttcttttcaagcggagtggtgagtgatacgcaaagaacaaactcggcaaagtcgctgaccatcaactacgagcgctttggccgacgccagacggagtcgaagatccacctttcattcccggtcagaacagaagggaaatacaccctgagtgtgaccagcgagagcaacgatgtttacgagccaggaagcgtttggccgcaaccggacagcatgttcagtcgcgggaacacgctcttttttgtttataacaacctgaaaatgtccgacaacttctctgtcttacttttcacgacccctgcacgcgcaggtaaatgggacaatgtcgttcgcataaacaacgagccggaaatccctttctggcaatttatttacccgtag

SEQ ID NO: 123285 - DNA, 447 bp, Enterobacter cloacae
atggatatggtctttcgtgcgctggctatttacctgttcctcgtcgtggtatttaaagttgccggacggcgcgctttgctgcagatgaccagctttgatctgattctcctgttaattatcagtgaggcgacgcaacaggcgctgctcggggaagatttttcggtcaccggcgcaatgattaccattaccacgctggtggtagtggatattatctttgggataatgaaaaaatatttctcaccggtagaaaatattcttgatggcactccggtgatattggttgagaacggcgtgccgctagcagataaactcaaaaaagtcgacgtttcctgtgatgatattctggtatcggcacgccagaataatggtgttacgcagctgagtgaaattaaatatgccattcttgagcgcaatggtcatatttcaatcattccttttgagaagtaa

SEQ ID NO: 123286 - DNA, 519 bp, Enterobacter cloacae
atgagcaaccttcaccatgataacaattataccgtcgccgaactgaccaaaaaagtggcgagcaaattgacagacttagggcttcgcttaaccacggcagaatcctgcaccggcggaaaactctccgtcgccctttgtgctgaagagaacacggccgaattttatgatgtcggcctggtcgtgttcagtgacggcgcaaaagagcgcattctgggcgtgcgtcctgagacccttgaacggtatacggccgtgagtgaacagacggtgaccgaaatggccgcccggatcctggagattgcccaggcggatgtcagtattgccatcagcggttatgccgggccagaagggggagacgatggcacggcggcagggaccgtttgcttcgcctggaaccttcgcggacacacggaaacccgtaccgtcctgttttccggcgactgccaggatgtggttgagaaggcggtgcagtattcattgtctgaattagtgaccagattatcaggctgggataacgagtaa

SEQ ID NO: 123287 - DNA, 987 bp, Enterobacter cloacae
atggctgtgattgtcattaccggcggtacggcgggtgtgggaaaggcaacggcgttgcacttcgcaaaggcaggctacgatgtgggcattattgcccgcgatgagacaagcctgcactcgacccaggaggaattaacgcgatttggcgtcaaagcctgtgcggtacaggcggatgtcgccgacagccaggcggtggtggacgcggcaaacgagattgaatatcgcctcggcgcaattgatgtgtgggttaacaatgcgatgggtgcggtgctggcaccgtttcgtaccctgacgccggatgaatttcgccgcgtcactgatgtgacctatcttggcttcgtaaacggaacccgcgccgcgctggaattgatggtgccacgcgatcgcggcgtgattattcaggtcgggtccgcgctggcctaccgttcgatcccgttgcaatcggcctactgcggcgccaaagcggcgattcggggattcaccgatgcggtgcgcacggaactgatgcatgagaacagccgggtgcagctttcaatggtgcagatgccggggctgaatacaccgcagtttgactgggcaagaaacaaattcgcctggtctatgcgtccggttccgccggtgtttgagcctgaagttgccgcgagcgcgatttttaaggtcgcgcaaaaaccggtgcgcgaactgtgggtgggcagcagtaccattcagtcgatcgtcggacaattcctcttcccgggtttcctggaccggctgatggtgaagaaggcctgggaaggtcagatgactgacgatctgaatgaccgggatcgccaggattatctcgaccagcctgtcaacgacctgcacaaaatccatgggcgttttaccccggaagcgaaaaaccgcgccacggcgatcacctcaggtgtgcccgggaaagtcctgttaggctccctcacggtggcgggcgttgtgctgacgcggctgatgattcggcgtaaaaggtaa

SEQ ID NO: 123288 - DNA, 873 bp, Enterobacter cloacae
atgtttcgacacgtcaaacaattacaatatacggttcgggttgccgaaccgaatcccggccttgccaatttattactggaacaattcggcggtcctcagggcgagctggccgccccctgccgttactttactcaggggctgagtgatgacgacccgggtcgtaaagatatgctgatggatatcgcgaccgaagagttaagccaccttgaaattatcggtaccctggtgggtatgcttaataaaggggctaaaggcgcactggcggagggcgtggaaaatgaagccgagctgtatcggtccatgaccgaaaacggtaacgacagccatattacctccctgctttacggtggcggtactccgttgaccaactccgccggggtgccgtggacggcggcttatgtcgacaccattggcgagccgaccgccgatctgcgctcaaatgtggctgccgaggcccgagcgaagatcatctatgaacggctgattaacgtcacggacgatccgggcgtgaaggatgcgctggcgtttctgatgacgcgtgaggcagcgcatcagctctcctttgagaaggcgcttcagtccattcgtaataatttccctccgggaaaactaccgccaatcgaggaatacaccaacaagtactacaatatgtctgaaggtggagaggttcgcggaagctggaacagcgataaacatttcgactacgttgaatccccccaacctgccgttgacggcggagacgggagtgcaagcgtgacgctgacgaccgaacaggccacgctggtcaaagcgatgtcggcccgcacgaagtccgatccacattccgacccgctgaccggcgccgaactgggtgccgggaagaaaaaaccgtaa

SEQ ID NO: 123289 - DNA, 1506 bp, Enterobacter cloacae
atgcaaaatccctccgcccctgtgattgaaacgcgccagggcgcactgtctggtttaacggatgaaaacgttcatctctggtgtggtattccctatgcggcgcctcccgttggcaactggcgctggcgttcgccacggccgcctgaacgctggaaggggctgcgtctggccaccgctttttcgccctcaagctggcagaacagtgagtattgccaggcgttagggggcggcgatcccggccggttctcagaagattgtctgtatcttaacgtctggtcacccgtcgagcgcccggcgccgcttcccgtcatggtctggctacacggcggggggtttaccattggcgcgggtggcctgccgccctataacggtaaggcgctggcaacgcgcggcgtggtggttgtgacgatcaattaccgtcttggtcacctgggcttctttgcccatcccgcgctggagggagaagaagaccgggtggtgcataactttgcgctgctggatcagattgccgcccttgaatgggttcgggagaatattgccgctttcggtggcgatcctgacaacgtcaccctgtttggcgaatccgccggcgcgcgcagcgtgctgtcgctgctggcgtctccgctggcgaagggactcttccacaaagcgattgtgcaaagcggatacaccctgccggatacgccacgggaacaggccctgcaaaaaggggaagcgctggcggcgcatttcggccttgaggaggcgtcagcagaacagttacgtgccattccccccgaagcgttctggccgctggccgcgccgctgaacatcgccccggcccccatcgtcggagactgtgttctgccggaatcaatgctcgatgtgttctttgccgcgcgtcagcatcctgttccggtgatgatcgggtcgaacagtgacgaagccagcgtgatggcggtatttggtatcgatctcgccggtcagatccagaagcttcgccgtgaacgtcgctttggactggggctgatcaaactgctctatccgggtgtgaaaggggatgtggagcttggcaggcaggtgtgccgggatatggcttttaccaccatgggatatgtggtgatgcaggcccagcagcgcgtgggcggcttgtgctggcgttactggttcgactatgtggcggaagcagaacacgcaacctatatcaacggtgcctggcacggtaatgaggtgccgtacgtgtttgacacccttggtgagattgagccttcctgccactacgttaatgcgcgagaccggcaattcgctgcgcaggttgcagattattgggtgagctttgcgcgtgacgccggtcaccgggaaagccttccaggcccgacgcactggccggcctgtcgaaaaggaagggacgtgctgctacgtatcggcgtgaataaacatgcaggtttcaggcttgaaaaccgctttatgcgcgcgcgcatgagcctctttaagcgcgttatgaaacaccatgtgagcctcgactga

SEQ ID NO: 123290 - DNA, 858 bp, Enterobacter cloacae
atgtcgcgccgttcgctcccgcttaatgccatcgacgcctttttagtcaccgcgcgtcatctgaatctgacccatgccgcaacagagctctgtctgacgcagggagccgtaagtcgcaaaatcgccacccttgaagcgtggttcggctttccgctgttcgagcgtcatgcgcgcggcctgcgcctctccccgcagggcagcgccctgcttccggaattgcaatccacttttgaaacgctgctgaccctggccgatcgggcccgtacccagcaaaccgtgatccgactcaaagcacccacctgcgccatgcgctggctggtgcctcgtctgctggaggtggagcgtgagcagccggatctgcagatagcattgaccaccactaccgaccataacgtcaatttcaaaacggaatcttacgacgcggccattgtatttggcacccatatgagcgcgggcgatctgctgtttgaagaggcgttaaccccggtaatgagccccctgcgagcaggttgcgaactgggtgcgttaaccttccttcacccgacaagggataagacagactggtcattgtggctggcgaagcaggaaggcccgggggttgttatgcacaaaaatcaacacttcgacacgatggaccttgccatcacggccgccattcaggggctgggggtggccattgctgacgaaacgctggtggaagaagatgtccgcgccggaaggctggcgcgaccttttgagagcagcattaaaacgggtgcgagctacagactggttctgcgcgaatcgcctggccaggaaaatgggctggcggcgtttcgctcctgcctgctcagtcgaggctcacatggtgtttcataa

SEQ ID NO: 123291 - DNA, 549 bp, Enterobacter cloacae
atgaccgccactgaatctgaaataatcccggtgactgaccatctcgagcttcgcgccgtcgaagagcgctataccgccgatttgcacaacatggtcatcagaaacaaagcctggctgcaaaccgcctttgactgggcgcagcatgtgggcaccgaagatgacacccgtcgtaatgtgctgagtaatcagatgctgcaccagcgcggctacgccaaaatgtttctgattttcaaggatgaggacctggtcggcgtgctgtcgtttaatgcgattgaacccgccaacaaagccggatacatcggttactggctggacgaggcgcatcagggacagggcattttgtcgcaggcgctgcaggcatttatgcgctattacgtcgagcgaggcgagatccgccgttttgtcattaagtgtcgggtggcgaataaacccagcaacaacgttgctctgcgcaacggttttacgctggaggggtgcctgcgggaagcagaatttctgaatggtaattttgacgatgtgaatctctacggcaaaatttacccgctataa

SEQ ID NO: 123292 - DNA, 981 bp, Enterobacter cloacae
atgaaaaagtacaggctcagcgaggacacccgcctctggcaatggaaaaacggcgagacaacgcactcgacgtcgttacgacagattattgccacggcgaattttaacgacatcgtgagcggcacgaaaggcggttgggttgaagatgagagcgccctcgcgcacgaaggcgactgctggatctacgatgaaaacagcgtcgtctttgccggtgcgacggtgtccggcaacgcgcgccttaccctgccttgcatcgtcagtcatgacgcgcagattggcgacaactgctggctggacggcgcggaggtcagtcacggcgcgcgcataagtgacaacgtcacgatacagcaatcctgtgtgcgcggcgaatgccatattttcggcgaggcgcgggtgcttcataacagcgtggtgattgctgccaaagggcttacgccggaccatgagcagatcctgaaaatttatgacaaggcgacggtaagccagtcacgcattgtgcatcaggcgcaaatctacggcgaggcaatggttaattatgccttcgttgaacaccgggcggaagttttcgacagcgccatcctcgaaggcaacgatctcaataacgtctgggtatgtgactgcgcaaaagtgtacggtaacgcccgcgtcattgccggttttgacgacgatgccatccctaccgtccgctacagctctcaggtggctgaaaacgcggtggtggaaggaaattgtgtcattaaacaccacgtcctgattggcggtcaggcctggttgcgcggcggccctatcctgcttgacgataaggtcgtgatccaggggcgggcgcgtatcagcggcgatgtgcttattgagcatcgggttgaaatcaccgacgatgcggtgattgaggcttttgccggtgagaacatccacctgcgcggcgaaaaggtgattaacggcgaccagcgcatcacccgtacgcctctgttgggggcgttatag

SEQ ID NO: 123293 - DNA, 1230 bp, Enterobacter cloacae
atgggctcggcactctccagacaattaacgcaccgcttcttccgctatctcgccatcaccagccagagcgatcccagagtgaacacccttccctctacgccgggccagcacgacatggcgcgtgagctagcccaggagctggcgcagctgggtttagacgacattgtgattgatgaatacgcgacggttactgcggttaaaaaaggtaatgtagccggggcgccacgcatcggttttattacccatattgataccgtcgatgtcggtttatcaccggatattcatccacaaatattaaaatttacgggtgaagacctctgtttgaataaagagaaatcaatctggttacgcgtaaaagagcatccggaaattctggcttacccgggtgaagagattattttcagcgacgggaccagcgtattaggcgcagataataaagccgccgtcaccgtggtcatgacgctgctggaaaacctgacgccagaacatcagcatggcgacattgtggtcgcgtttgtgccggatgaggagatcggcctgtgtggcgcgaaggcgctggatctaaaccgttttgacgttgattttgcctggaccatcgactgctgtgagctgggtgagattgtttacgagaacttcaacgccgcggcggcagaaattcgctttaccggcgtaacggctcaccccatgtccgccaaaggcgtgctggttaacccactgctgatggcgacagacttcatcagccattttgaccgccagcaaaccccggaatgcaccgaggggcgtgaaggctatatctggtttaacggcattcaggcggggcaaaacgaggccgtcttaaaagcgaatatccgtgatttcgataaagcacagtttgccgcccgcaagcagcagattgccgatgtcgcggcgttgattgccggacagcatcctacggcaaaggtggagtatcgcattgaagatacctacagcaatatcagcaatgcgattggtgaggatcgtcgcgctatcgacctgatgtttgaagccatggaatcccttgggatcacgcccaaaccgacgccaatgcgcggcggtactgacggcgcagcgctctcggcaaaaggcctgctcacgccaaacttcttcaccggcgcgcataacttccactcgaagtttgagtttttgccgctgtcgtcgtttgaggcctcatacaacacggccctgcagctctgcctgctggccgcccgttaa

SEQ ID NO: 123294 - DNA, 1167 bp, Enterobacter cloacae
atgcgcccctcatcctcactctttcctgccgttctcgccggttttgtcgccgttctggtgggatatgccagttccgccgccattatctggcaagccgctgccgccgcaggcgcaaacgcgcagcagatcgctggctggatgacggccctggggataggtatgggggtcagcacgctggcgctttcctggtggtataaagccccggtgcttaccgcctggtccacccccggcgcggcgctgttagccaccagtctgcatggggtaacgcttgccgagaccatcgggattttcatctttgccaacgcgctcattctgctgtgcggcgtaaccgggttgtttgctcgcctgatgaagcttatcccgcattcccttgccgccgctatgctcgccggggtgctgctcaggtttggactgcaggcgttcagcaatcttgaggggcattttttactgtgcggcagcatgctggcggcatggctgttcgccaaagcgctggcaccccgctacgccattgtcgccacgttgctggtgggcagtatggtggcctgggcgggaggtgacgttgtcacaaaagagttaaccctttccgtggtgatgcccacgtttatcgcgccgacctttacgttaaccagtctgataagcattggcgtgcccttcttcctggtcaccatggcgtcccagaatgcgccgggcttcgccacgatgcaggcttccggctatcctctggccgtatcaccgctgatgatcgtcaccggagggctggcactggtgttatccccgctcggcgtcttttccatctgtatcgccgcgatcaccgctgcgatttgccagagcccggatgcgcacccggatgccagcaaacgctggcttgccgccgtggccgcaggcgggttttatctgctggcgggcatttttggcggatccatttccgggctgatggcctcccttcccctaagctggatccagatgctcgccggcctggcgctgctgggcaccatcagcgggagcttgtatcaggcactgaacaacgaaacggagcgcgacgcggcaattgtcacctttctgatgaccgccagcggcgtcacgatcctgggtattggctctgcgttctgggggctggtgctgggcggtgtatgttatacggtcttttcacaccttcgccgcgcgtag

SEQ ID NO: 123295 - DNA, 252 bp, Enterobacter cloacae
atggcattcaacggtgaaataatgatgagaaaagggttaacgctgatattgctggtgtgtgggttattttcaggtcagctgatggcaggacataaaggccatgaatatgtgtgggtaaagaatgtggagcatcagctccgccatgaagcggatagcgatgaattacgcagcgttgcagaagagtctgcggaaggtttgcgcgaacaccacctgtggcagaaatcgcgcaaaccggacacgcactttcggtaa

SEQ ID NO: 123296 - DNA, 363 bp, Enterobacter cloacae
atgaaaaaaatgatagcgcttgcgctgctggtggttgctgttggggcgggtgcaggtatttactctattagtaatgacgaaccagaatatattcagtccgcgaaagcgcgtgttgggtcatatttaaccagcgattacggacgcgtggcctgtaatagcaccaaaattgatgaccagcgctggcaattaggctgcaccaatcaggcaagaggtaaaacattcgagttcgcggtttatccgtctgaaaaagcaccgtatggtgtgtcgcgttcgttttatctggaagccatcaatgatgatgcaaaacagagcgcggagcagggtctgatgcgttatttgcaaatcaataccaaagcgggttaa

SEQ ID NO: 123297 - DNA, 1014 bp, Enterobacter cloacae
atgcgctcgcttatgccagaaaacagcaaaaagatgacaaacttaagacagatttcccgccctcaggtcattgtgctggcgtatgacggtttgtgtacctttgagtttggcgtggcagtggaaatctttggtctgccgcgtccggagctgggagacgaatggtatcgttttgccgtcgcgggcgtagacagcggtgaacttcgggcgaccggcgggattcgcctcatcaccgacggcgatttaaccctgcttgagacggccgacctgatcgttgtgcccggctggcgaggactggattcaccggttccgcccgcgctctgcgcggcattacgtaaggccaatgcgcggggatgccagcttttgtcgatctgttccggcgtgtttgttcttgccgctgccgggctgctggatgggcgtaaagccacaacgcactggcgctatattgaggcgcttaaggcccgttacccggccatcgaggtggttgaagatgtactttatcaggacgacggcgacattctcacctcggcgggcagcgcggcaggcatcgatttatgcctgcacgtagtccggcgggattatgggatggaaatcgccaacaccgtagcgcgtcgtctggtcattcccccgcaccgggatggctcacagccgcagcagctaagccgcccggtggcgcaactgcgcgaaagtcagcgtctcggtcagctgtttgattttctgcatacccatcttgccgtatcgcacagcgttgattcactggcgcgtcgggtcggcatgagtcaacgcacctttctgcgccgctttcaggatgcgaccggcaccacgcccgcgcgctggttgctcaatgagcgcctgctgagggcaaaggattatctggaaagcagtcgcttaagtatcgacagcatcgcggagcagaccggattcggtcaggcatcgaccctgcgtcaccattttcggcagcagttcgccctttccccggcccagtatcgcaaacactattcgcgtcctgcccgctag

SEQ ID NO: 123298 - DNA, 414 bp, Enterobacter cloacae
atgagttatgttactgaatttccggctgctgaaccccaggaagccgttacccattttctgcgccgcctcagcgtcgagaccgattgcgccgatgtgcatcatgccatcacgaatcacgagcaggatttcgtcctgctgcacgtcgtcgggagcccgcagcagtttgcccgccgtcacgttcccggtgcgctacatatgccgtggcgtcagattaccgccgaacgcatggcccagtggcctgacggcacgctgtttgtggtctattgcgccgggcctcactgcaacggtgcggacagagccgcgctgaagctggcgcgtctggggctgccggtgaaaattatgctcggtgggatcaccggctgggaagatgaaaagtttgagtttgcgagccaggaatcgctctccgcattgtga

SEQ ID NO: 123299 - DNA, 1575 bp, Enterobacter cloacae
atgaacgccatacgcacgatcatcgctattgtgtggcttaccggactgctgccagggatggtgcaggcatcggatgccgaccaattcgtggccgccagtcgcagccagcaggcagaactgttgacgcagtgggcaaccgcgccggaggcggcacggttgccgctgctccaggcgctgcagagtgaaagtctctacaccgacagccagaaacatgcgtttgcacaacgccagggggcaatggttcccctgggtgaaacaaaagccgcagcaggccaaaccaaagccgtgcgtctgaccaaccggctgcgcaatctggtggcgacggcaatggcaacccatcagctcgtgagtgacagtgtcacggaaaggcgtacggcagcccgtcaactccagcgggatgcacagcctgaaatgcttgatttcctgcaaaaacgggtgagcagcgaaacggatgatgtggcccgtcagtcgctgatgctggcgctggcgaacctccagctggcaagtccgcaggctgcggtgcgcctgaacgctgtggcgctgttagggcaatcagacgatccggacgttcagtcccggctgacgccgtatacgcaggcagcaacggagccggatgctggcgtgcgtgctgccgctgccgaaagtctgaaactgattgagcatcgcctgatgtggggcgatctgcttggtcaggcgtttatgggactctcgctggggtcggtactgttgctcgccgcgctggggctggcaattacctacggcctgctgggggtgattaacatggcccacggggagatgctgatgctgggcgcgtacgccacctggatggttcagcaggtgatggccgggctcgccccacagtggctggcgctctacccgatcgttgcgctgccggtggcgtttattgtgaccgccagcatcgggatggtgctcgagcgtaccgttattcgtcatttgtatggccgaccgctggaaacgctgctggcgacatggggtatcagcctgatgattattcagctggtacgcatgacgtttggcgcccagaacctggaggtggcaaacccggcatggctgtccggtggcgtgcaggtgtttgccaatctgacgctgccgtggaaccgcattgtggtactgggttttgtgctgctggtgctgttcttcacgtggctcattctgaacaaaacccgtcttggactgaacgtgcgcgcagtgacgcaaaatcgcagcatggcagcctgctgcggggtaccgacaggtcgcgtcgatatgctggcctttgggcttggctcggggattgcgggtctggggggcgtggcgttatcgcagttaggcaacgttgggccagaactgggccagggttacatcatcgactcgttcctcgtggtggtgcttggcggggtgggtcaactggcaggtagcgtggccgcggcgtttgggctggggatctttaataaaattctcgaaccgcaaatgggggcggtattgggcaagatcctgatcctggtggcgattattctgtttattcagaaacgtccgcaggggttattcgcactgaaagggagggttactgactga

SEQ ID NO: 123300 - DNA, 639 bp, Enterobacter cloacae
ttggctgcacatattggcaaatttgcaatgactctgggggcgctgctggtaagcggtcagctgtttgcccattcgcatggacatcagatgacggaagcggaacagaaggcggcgagcggcgtctttgaggataaagacgtcaaagacagaaagctgtctgactgggatgggacatggcaatccgtctatccgtttttgctcgatggcgcgctggatccggtttttaaacagaaagcgcagaaggacaaaaaatccttcgacgaggttaaagcctactatcgcacagggtatgcgacggacgttgaggctatcggcatcgaaaacaacgtgatggaattccacaaaggtaaggctatcagtcgctgccagtatgattacagcggctataagatcctgacttatgcatcaggtaagaaaggggttcgctatctgttcgagtgtaaagatccggacagcaaggcgccgaagtttgtccagttcagcgaccataccatcgccccaaaagcctcttcccatttccatatctttatgggcaacatctcccacgaggcgctgctaaaagagatggataactggccgacgtactacccgaacgaaatgtacaaacagcaggtggtagacgagatgctgcaccattaa

SEQ ID NO: 123301 - DNA, 219 bp, Enterobacter cloacae
atgaaagttacagcctccgccgccctcgccttgctggtgctgttttccagccagaccttcgcggagcaaacccctcgtgcaacgcagcaaaataatcgtgacacgatgattttgccgtcagcacatgaccagtcaccttatgacttcaaccacatgggtgctggtagtgacaaatccgacgagttaggcgtgccttattataatcagcacagcttctga

SEQ ID NO: 123302 - DNA, 963 bp, Enterobacter cloacae
atgtcgtatgataaaaaaccactcataacagtttttggtgccaccagtaaacaaggacgtagcgtaaccagaaccctgctgcaaagtgggcgctatcgggtgcgtgccttaacgcaaaacacggactctcctgcggcgaaacagctggcggaacggggcgctgaactgaggcaaatcacccttcagacgggcaatgatgcgcatctgatcggggcgtttgccgagtcagacggagcgtttctgatgacaccgggtttcatccccgtatcgacgcagatgccaacgggtgaaacggcgctgggctacaggcttgcagatgccgccgtcaacgccggggtaaaacaccttgtcttcagcagtctggaaaacgtcgagagaataacgggcggaactctatgggctcctcatttcagcgataagggccgaattgaagagtacatccacacactccccgtcagcgcgtcgtttattcaactggcgttcttttacaccaatctggccgaatattatccgccgcgtaaagaaggcgacgagctaatctttcccctctatctcccggaagacgttcgggcgccctttgtcgatccgctcacggcaaccggccctgcggtgcttgagatgttcgataaccccgaacactacaacggcatgacgttacccgttgtcggtgagtgtctttcgccgcgtgagatggtggaaaccttcacggaggtcaccggcataaaagcccggtatcgctcagcctacacgcgagaagcactccttcaccacttccccgatttcgcagacaacgcggcactggtcagtgaaattaccggcatgacggaatatgccgtgaactacggctattacggaaaagaccgggatcttacctggagcagaaccataaaccctgccaccttaacgtggcgtgaatttctgattgcgtctggctggcagggggaaaaacgaacgtttgattaa

SEQ ID NO: 123303 - DNA, 963 bp, Enterobacter cloacae
atgcgggcggcgagcgtgaaatcgatttatttcttacatgatatccatcctatgaataccaaaaagcctgacgtaaacctgctgctgactctggaagcgctggtcgcggagcaaaatgtcaccagggccgccagccggctttgtcttagccagcctgccgtcagcgcgcagcttaaccggctgagggggatgtttaacgatccgttattgatcccggggcgcagggggatgacgccaacccccaaagctcttgagctgatggcgacgcttggcggggcgctggcaaaaatacgggatacgctgcaatcacatgaggactttgatccgctgcacgattcgctaacggtctctctggcctgtactgattacgtgcaggccgcggtcattatgccgctgattgtgaccctgcaagagattgcccccggcgtgcgtattgctgtcaggaattacgatccgtatcagctggcccatcaactgagctcaggcgatgttgatgctgccatagccacgccagaccctgcgcaggcgcagctcagaacgcaatatctctatgacgaatcgtacgtgcttatcgggtgccctcagcatcctgaactgaacgaccaactgacaatggaggcgttcgcaaaacttgagcatattatcgtgtccccctcggggggcggttttaccacgccgctggatgtcatgctggcggagtcagggttgcaacgtaaggttgcggtgtctgcggcatcatttctgtttgttcccggcatggtgcagatgagccatctggtagcacttgtgccccgacgattaattatgggaaccgttaacccgctcaccgtggtggaactcccctggctgaaagagacgtttgacgtcagtcttatctggcatgaacgcagccataaccacgccggacaccgctggttaagggatactctcgtcagccttaacggcaatgctgatataagttaa

SEQ ID NO: 123304 - DNA, 483 bp, Enterobacter cloacae
atgtattccattaccgctgaatctgcacatcaccctgatattttgaatctgattgccgcgcttgaccgctatcagagcgaactctatcccgctgaaagtaaccacctgctcgatctgaccgaactgccgacagcctcactgatcctgatgattattcgggaccggcagcttcatgccgtcgggtgtggtgccgtggtgctcaacggcgacgggaccggtgaaatgaaacgggtgtatatcgatccggctcatcgcgggcaacatctcggcgagatgctgctggcggcgctggaagatgaagccctgagccgtcactgccacacgcttcgcctggagacgggcatccggcaacatgccgccgtccgtctgtatgagcagtgcggctatgagcaacgtccggcgtttccgccgtatgttgatgacccgctgagcctgtttatggagaaggcactggtggttgacgttcgtttagcagtgctataa

SEQ ID NO: 123305 - DNA, 1725 bp, Enterobacter cloacae
atggaagaacagagtctagttcgctctccgataacggccttcagcacgaaggccgttgtcattttcctgcaatggttctgtcattttcgtttcgtagactcgcacgcgtctaacgtcttgttactgaagaaaattatgaacctaacgcaaatttttcgccgtattgcgcagcgcctcatccctcgtcagtttggcctgctgaccggtattttctgtattattggtcttttctccgcactgcaactctcctcttcatttttgctcaatgcttccctgaaagatgctcagcgcaacgagcagcaaaatctgctggcataccagcaacagagcaaactggatctggcccgcgtgtctctgctggcagcaagcgatctgcttaaccgctccggcgtctggtttatgcaggataaagagaccggctctgaaggaagctggcacagcctgatggacgaagctcaggcgtcgctgacggtttctcagcaggcctggaacgcctggctggcgctcaatccgccaaaagatgacgccctgatcaccagctaccagcttttctacggtgccatcaaggagcaggcggaagggctcatcaagaccaacacgatcgacgccttttttgccgtacctgcccaggcttttcagactgacttcaacgaaaactatgcccgctatcagcaggccagcgagaagcaggcgatgcagggccgccagagtctgatggcgcaactctctggcctgcaaacgctcttcctgattgcaccggttctgctgcttgccatcgccattctggtatggttcggcatgtcccgctgggtcattacgccgctgcgacggttgattgctcacattaaccagctggcggcaggagacctgtccggtacaccgccgggcgtactgcgctttaacaaggagatcggacagttgagcgacagtgtttccaccctgcagcacggactgcaggaactggtgacccaggtcagcaatgccacccacgcaatggttgaaaatataggctcgctggcacagggcaaccagaagctgtatctgcagtcggctcgtcaggcgaaagagcttgaagatgtgacgacacacatcgccgcactggaaaaccacgtggaagggaatacaggttatgcaaaactcgccagctccagggcggacgaggcgcgccaggtagccgcgggtggcgatcggatgatgacaaccgtcaatgcctccatgcaggcgatcgttgaccgatcgtcagagatgcgcgggatcgtggcgatgatcgacagcgtggcgtttcagaccaacattctggcactgaatgcggccatcgaggccgcccatgcggggaaccacgggcgcgggttcgccgttgtcgcccgggaagtggggctgctggccagaaagagcagccactcgacgcagactattcaggcgctgatcaatcactctttgcagggcatcgaagatggttcccgggccgttaacctgctggaagataatctgcagcaggtgatcgggctggtggctaatttaagcagtctgctgaatgagatctcggtcgcgaccctgagccagggggagagcattcatcaaatgacgcggcagcttcaggcgttaaatcaggtttcccgtcagaccgacatgctggtgtctgacgcgtcggatgcctctgaacggctgcataagcaatccgatcttttattgcaggcggtttcgcgttttcgtcttagcgcctga

SEQ ID NO: 123306 - DNA, 357 bp, Enterobacter cloacae
atgtcgaccctggatccgctttttgcccgcctggcgcgatcgccttttcgttcgcgctttcgcctgggcacgaaggaacggcagtactgctgggacaaaggtgccgaaaccattgaccagcacgccgccgattttattgcccggcgtcttgcaccggcccatcccaacaatgacggaaaacagacgcccatgcgcggtcatccggtgtttatcgctcagcatgccaccgccacctgttgtcgtggctgtctggcaaagtggcataacattccgcagggtgttcagctcagcgcgcagcaacagcattatattgtcagcgtgatccaccactggctggtgctgcagatgaacgcctaa

SEQ ID NO: 123307 - DNA, 1446 bp, Enterobacter cloacae
atgcgttctgctctctctgccttcaggttttttcaacccgatactccgctgcgtaatgcgtcgtggatctttattctgaccaccttattctattttgtgggtgctgaattgcgtctggttgaagcgttgtcgctgttctggccactgaatggcgttatggcgggagtattcgcccgttatgcttatctgaatcgtctgcataactacgcggtcgcgtatgttgccatgctgatgtacgacgcggtcaccaccagctggggaatggcctcgctggtgattaacctgtcgaatatgatttttatcgtcgtggtcgccatactggttctgcgtgataaacggctgatgaaaacccccgatccgcttaatgcgctgcgtctgtttaactactgcctgattgccgcgctgctgtgtgccttgcttggcgcggtggggtcggtcggtatcgacagtcacaccttctggccgctgtttgccgactggtttagcgagcagttttcaacgggggtgctgattgtgccgtgtatgctgacgattagcctgcccgtgcgtgatattcagttacatctggagcagctgttcccggttatggcgttgattgtctcggtggtggcgtcggtggtgattggcggcgcggggagcctctgtttcccgctgccggcgcttatctggtgtgcggtacgctacccgctgcccgtcacctgtttactgacgtttctcacgggtgccgttgagatcattctggttgccaactccattatcaatattgccgttgcgacaccgctttcgaccccgatgatgttctcagcccggctgggcattgccaccatggctatttgtccggtgatggtctccgtcagcgtggcggccattaattcactgattcgtcaggtgtcactgcgggcagattatgattttctgacgcatgtctattcccgctccgggctttatgaagcgttaaaacaagaagaggcgcaccggcattcgcgttttttaaccgtcatgctgctggatatcgattacttcaaaagcatcaatgataactacggtcacgagtgcggtgaccgcgtactggcggcctttgcccggcaggttcagcaggttgtcggtgaggacggtatggtagcgcgaatgggcggagaagagttcgcggtggtcgtgaactccggggatgcgcagcacggttttgaactggctgaacgcattcgaaccaccgtcgcacatcatccgtttacctggcgccagcagacgctgtatctgaccgtcagcattggcctgggcagcggtaaatctgagtcatggcagttgacggaggtctttaataagctgatggctgaagcggacgatcatctctatcgttcaaagaaagcggggcgaaatcggaccagcgcccggctgtcggatgagcaggttactgcaacgtccggcagcgaaacatcactgcattag

SEQ ID NO: 123308 - DNA, 966 bp, Enterobacter cloacae
atgaaaacacctgcaacccctgaaaacgaaacggaacgtctgaactcgctgcgcgaatcaggcctgcttgaaatcgacagttcgccggcctttgaccgcctgacgcgtctggcaaaacgctttttccaggtgccgctggcgatggtcaatcttatcgatgagcattcgctgatcgtgaagtcagcggatggccaggcaccggactctgtcccgcgcaatatctcattttgtggccatacgatcctcagcgaagcgccgctggtggtgggggacatgcgtcaggatgaccgctttgccgataatccgctggtggccggtgagcccggcgttcgtttctacgctggtttcccgcttcgtctgcgcgacggcgcgagcgtcggatcgctttgcctgattgattattctccgcgcgagtttacggcggccgatcttgccgtgctgggagacctgggcgcgctggcagaagatgaatttgccgccgtcagtgcggcgacaaccgatgagctgacgggcttattcaaccgtcggggctttaatcagctcgttcggtttaccctgtccgtcgcccgacgccgtgcagagccgttaaccctcggctggctggatctggatcgctttaaggagataaacgatcgctacggccacgaggaaggcgataaggcgctgaacgtgatggcgcaactgatgcgttcctccttccgtgaggcggatctgctggttcgctttggcggggatgagtttgccgtgctgttcgccgatacggatgagcagggggcctggattgcgatgcagtatctggccgagcaggtcgaaaattataatgcccgcaaactgcatccgtggtcgcttctgttctcgtggggcctcagtgaattcgaccacaatggtcatgacctccagcagtggctaaaagaggccgatgaaaagatgtatgccatgaagcagcaacgccaccgcgaaagatga

SEQ ID NO: 123309 - DNA, 528 bp, Enterobacter cloacae
atgaatacctcactgcacatcaaaaaactcacccgggaagagatcctcacccacctcgatgcgttgtccgcgatcctcgaaaactgcgttaacggcggcgcatccgtcagttttatgttgccctttagcccggaaaaagcacgtgctttctggcgcggtattgctgagagcgtgggacgcaatgaacgtcttgtgctggccagtatcgatccgcaggacggtgttatcggcacggtacagttgatcaccgatcagccggagaatcagccgcatcgcgcggatgtggcaaaactgctggtccatgaaaaagcgcgccgtaaaggggcggcaatggccctgatggaagaacttgaagttcaggccagagccagaggcatttcggtcctggtactggatacgtccaccggcagcggtgccgagacgttctaccagcgagctggctggcaaaaagtgggggagatcccgcgctatgcattgatgccggatggcgcgatgaccgccacctccgtgttctataagttcttataa

SEQ ID NO: 123310 - DNA, 915 bp, Enterobacter cloacae
atgattgttcgtcctaaacagcactggttacaactcatctttgtctggcatggctcggtactgccaaaaatctatacccgcttgctactcaacttcctgctttctatcgccgtgatcctgatgctgccgtggtacacgtcccttggcatcaaatttaccgttgcgccatttagcattctcggtgtggcgatcgctatctttctcggtttccgaaacaacgcctgctattcccgctacgttgaggcgcgccagctttgggggcaactgatgatagcggcacgctctctgtttcgcgaggtaaaaaacaccttgccggacgataaacatctcggcgagtttgtccgcctgcagattgcctttgccaactgtttgcgcatgaccctgcgccgggaaacgaacgccgaacaactttcccgttatcttacggaaaatgatttacgcaaggtgatgaacgccaactcgccggcgaaccgtattttactgatcatgggggagtggcttgccgtcaggcgtcgcaatggcgagctctcagatatcctgttccacagtctcaacaaccggctgaacgacatgtccatcgtcctgtcgggttgcgagcgtattttgacgacacccgtaccgtttgcttacacgctgatccttcatcgtacggtgtatctgttctgcatcatgctgccgttcgcgctggtcgtcgatctgcactacatgacgccttttgtatcggcgctgatttcttacacctttatctctctggatacgctggcggaagagctggaagacccgtttggtaccgaagataatgacctgccgctggacgccatctgcaacatgatggaacgtgacctgttgcagatgaacgatgaagaagagatccccgaaagactgttaccggataagtattatcaactgacctga

SEQ ID NO: 123311 - DNA, 441 bp, Enterobacter cloacae
atggctgttacggtaagagctttacgcgcagaagattattcccagtggcgtccgctgtgggacggctacacccatttttatgactgtgtcctcgatgagtccgtgaccgccgcgacatggcaaagggcgctcgacgagcgatcatcgatgttttgccgggttgcggaaagcgacggcaacgtcatcggcttcgccatgtgtattttgcacgaaggaacctggtcgacagcgcccgtttgttatctggaagacctgtttgttgctgccagccaacggggagcagggaccggaaaagcgctcattgacgccctgatggacgaaggcaagcgcgaagggtggtcgaaactttactgggtcacgcggcagaacaacccggcacgtaaactctacgaccaatatggcgaagccgacgattacgttcgttatcgcgtctcgctttaa

SEQ ID NO: 123312 - DNA, 996 bp, Enterobacter cloacae
atgttcagcaaactcgcatactcaactctggcgttaaccgtttctcttggtaccgtcatgtcctgtcaggccgaagcgaccggtactgatttcgcgacggcgtttgatcatcctcagcagattaacgccggcgaccttaacgtcggttatgtcgacatcggcccgaaaaatggtcaaccgatcattttattacacggctggccctacgatattcatagttatgcgcaagtcgctcccgcgctggctgccaaaggatatcgggtgattgtgccttctctgcgtggctacggaactacccgtttcctctcagacaaaacgccgcgtaacggccagccttcggctatggcgaaagacgttgtgaacctgatggatgccctgaacatcaagcaggccgtttttgcaggatacgactggggtgcccgtacggcggacatcgtcgcggcgctgtggccagaacgcgttaaatcgctggtctccgtcagtggatacctgatcagcagccagcagattggcaaacaacccttaccgccgaaagcagaagttcagtggtggtatcagttctatttcgccaccgaacgtggcgctgaaggctacgccaaaaacacccatgacttcgcccgtttgatctggtcacaggcatcacctgactggaaatttagcgatgcaacgtttaacgccagtgccaaatcccttgataacccggaccatgtcgcggtgacgctcagtaactatcgctggcgtttagggctggaaaaaggggagcgcaaatacgacagttatgagcaaaaactggcaacgcttccgaatattactgtcccgacgatcaccattgaaggcggaaacaacggggcgccacatcctgctccacaggcctacgccgggaaattcaccggtaagtatgaacaccgtacctttggcaaaaccgtaggtcacaatcctccgcaggaagatccgcaggatttcgtcaacgcagttgtggacgcagataaactctga

SEQ ID NO: 123313 - DNA, 1299 bp, Enterobacter cloacae
atgacgctttggccacgctcgttgctgtcccggctgttggtcatcgtgctggctggactcttactggccaatactctcagcctgacgctggtgatggttgaacgcatgcacagcgcccgcaccgtaatgctgggtaatctggaaaacgatgtagccactagcgtggccattcttgaccgacttcccgctcaggagcgggcggcctggctgccgcggctggagcgcggtaactatcgctatattctcgggcctggagaacctggcgcatcccctgaggataaacgttcacgcgacgccattcgaacgctaaaagagacccttacggcagactacccgctcacgtttaccgccgttcccggtcccatttcccatattcaggcgcatctcaccttacgggatggcgcaccgttgaccatcgatctgacaccacgcatgccgccggtcgccagctggttacctgtcgtgctggtattgcagctgctgctgcttgcggcctgtgcctggatcgccgtgcgtcaggtgattcggcctttttctcagtttacccgtgcggttgacgcgctggacccggcggcaaacacaccaatgacggagaaagggccggtagaagtgcaaagagccgcgcatgcctttaacgcgatgcaggcgcgcattcaatcctatcttcgcgaacgcgctcagatcctggcatccatttctcacgacctgcagacgcccatcacgcgcatgaaattgcgcgtcgagatggccgatcaacccgagttacgcgacaagttattgaacgacctcgataacatgacccgtctggtgcgggaggggatttcctatgcccggtcatcagaatccctggaagagacctcgctaaagctggagctcaatgcctgggtaaacagcattgcctgtgattatcaggacattggtaaaaacgtgcagtttcaggcaaacgacgcccgcctgccgatagtgactcggccgcaggcacttcgccgggtgatgaccaacctcctggataacgcgcttaagtttggtggctatgccgttattgagattgatgattcttctgcaggacacattgctatccatattctggacggcgggccggggatacccgaggctgaactcgacgcggtattacagcctttttatcgggtagaaacatcgcgtaaccgtgataccggcggaaccggcctggggctggcgattgccgcgcagctgaccgcgcagcttgacgggaaactgcggctggcaaaccttcctgaaggcgggctgaaggtcacggtaacgctgccgcgtcgctaa

SEQ ID NO: 123314 - DNA, 759 bp, Enterobacter cloacae
atggctgactggaacccttccctgtacctgcgatacggagccgaacgtacgcgccccgccgctgaattgctcgccagaattcccctggatgacgtgtcatccatcgtcgatctgggctgcgggcctggaaacagtacggcgctgttaaaacatcgctggccttcagcgcacgtcacaggggtcgataactcacctgcgatgctcgacgaagcccgcagcgccttaccggattgccactttgttgaggccgatatccgccagtttaagcctggccagccgctgagcctgatttacgccaatgcctcgttgcagtgggtgcccgaccactacgatctcctgccgcacctggtctctctgctcacgttaaatggcgtattggccattcagatgcctgacaactggcttgagcccactcatgtggcgatgcgtgaagttgcctgggaacaaggctatcccgatcggggtcgtgaagccttgcccggcgtgcatgcctattacgacattctgacagacgccggttgtgaagtggatatctggcggacaacctatttccataaaatgagctcacaccaggccatcattgactgggtaagcgcgaccggtttacgtccgtggctgcaggagcttaatgagagcgagcagaaacgttttctcaagcgctaccatgaaatgctggaagagcagtatccgctccaggaaaacgggcagatactgctagcttttccacggttgtttatcattgctcaacgtcagccctga

SEQ ID NO: 123315 - DNA, 585 bp, Enterobacter cloacae
gtgcaatcaaaacgtgcagatgtacgcatcatagaaagtgaaacactgtctgataactggtacatcctgaaaaaatttacctttgatctgcagcgacgcgatggcgaatggcagcggcaaaatcgcgaagtttacgaccggggaaacggagccaccatcctgctttataaccgggataaaaagacggtgatcctgacccgccagttccgtttccctgtctttattaacgggcacgaagatgaccttattgaagctgctgcgggcttgctcgataacatggatccggaaagccggattaaagcagaagcggaagaagagaccggctatagcgtttcccgcgttgagaaaatttttgaagcttacatgagcccgggctccgtcactgaaaaactctatttttatctcgccgaataccagccgaaagacagaaccagtgaaggcggtggactcaaagcggagggtgaggatatcgacgtactggaaatgacgctggaagaggcactgtgcggcattgaaacgggcaggattgtcgacgggaaaaccatcatgctgctttatcatattgccctgaaaggcattctgtaa

SEQ ID NO: 123316 - DNA, 774 bp, Enterobacter cloacae
atgctcacaacgcagcgaaaacaattgatccttgaaaagctcgaggctgaaggtcaggtccagtcgaaagcgctcagcacgcttttcgcggtgtctgaagataccattcggcgtgatttacgcgagctggcagcagaagggcgtttacagcgtgttcacggcggggcgctgccgtcatcctcggccattgccccgtttgctgagcgtaaatcggtaaagatggatgccaagaaaaatgtcgcccgtaaaggtgcgcagctgatttctgacggccaggtggtgatcattgacggcggcacgaccacgtcagagctgattacgtttctgcctcctgatttgaagataaccgtggtcacgcacagccctggcattgcgctgggacttgtcgaacatccctccattgaggttatccttatcggtggccgtctgtataaacactctattgttgcggtcggcgcggctgctatcgaaggcatcgaaaaaatccatgcggacctgttctttatgggagtaaccggcatccatcctgatgcgggcctgacgaccggtgattttgaagaggcgagtatcaaacgtgcattttccggcagagccgccgaaacggttgtgctggcttcccccgaaaaaatcaataccgcgtcatcttttgtgattggcgatctgtcgctggtgaacacgattgtcgttgaagacgataccgatagcgcctggattaacgcggtaaaagaaaagggggtttccgtggtgatgacctctgaaccggaaaaggcataa

SEQ ID NO: 123317 - DNA, 363 bp, Enterobacter cloacae
atgacacaacagttgattttaatcgccggcccctatcgtagcggcaccgatggcgtgcaggcgcgcattgatgaaaaccttgctcgtcttgaaaatgcggcgttagccgtctatcaacgtggccacgttccggttattggcgaatggctggccttaccgttggcaaaagcggctggctcgaaatcgatgggtgatgaaatcagtgaagcaatgctgtatcccgtcgcgcaccgactcattgcgaaatgtgatgctctctaccggattgccggcgcgtccaaaggggccgatatggacattgaggtggcgcaaacgctggggcttaagatttacactgcgcttgaggatatccctcaggtttga

SEQ ID NO: 123318 - DNA, 1620 bp, Enterobacter cloacae
atgaagaggatcctgctcgttacagtgtcatgcttgctctcggtaatctcctttctcagcgtagccgcagagccgcgccaggagccgacagatcgggagcgcgccagaacggtttatattttccatcagccgattgttatgctgcaggcaaaattcggtctgaccacacctgaagagcgagttttgcgcattcgtaatacgctgcgcaatttctctcaacaggatgttcgggagcccctgaaaattattccggttacccgttacaaccaaccgggaagactgattgtgatgaacggcaagccggtgatgttactggcacaagccgatctcgatgagggtgacgacctgacgcttgatgaggcagctcaacgtgtgctgacccgaatggaggcacaacgtacggcgcttcgcgatcaatatgacgccgggtggctggcattatcggcaggcaaaacggccgcagggctgctggcactgtttgttttctggtacggtgcctggcggtcatggcgtggagtaaggcgtttttaccgaggccgcattcttgagaaccgcagtatcattccacaacgctggcgcaggtttgtcggcgcgattgagactcgtgtgtatgctttgctgatgattattttgggtattctcgggctttatatctggctaagttgggcattcagtctgtttccctggacgcgcgtttggggggcatcgctgggtgactggaccatgcgtgttctgcgggatattgcactgtcgattgtctcggctatgccgggcattttaatcgtcctgattatttttcttatcacagccttcattctaaaactccttaaagtcttgttaaatcaggtagaagcagggcgtttacaccttcccgggatccatcctgaaaccgtcggcgcgacgaggaagttaatttctgtggtggtatggttatttgctctgtctgcagcatacccgtttttaccgggggccaattcactggcctttaaaggtatcagtgtattctttgggctgatgttgactctgggatctgccggggtgatgaatcatgccatgagtggcctggtactgatttactcgcgagccttgagaaaaggcgacatcattcgggtcgcggataacgaagggttggtcacagagataggtatgctcgcgacgaaaatcattacgcgggagaattatgttgtaaccgtaccgaatgctgtcgtagttagcggcaaaatcactaatctcagcgcgcaaaatccagatggtggcgtgaacctgacgacaggtgtcactatcggatacgacacgccatggcggcaagttcatgccatgctggagatagccgccagacgggcgaaatgtatcgatcagtcacaacagccgctggtaagacaattgagtttgatggactggtatattgcttatgaacttcaggtgaagctgcgtgccgggcaatcactggcggaggcccgcaatgaactgcacagcaatattcaggatgtctttaacgagtttaatgtacaaatcatgtcgccaaactttgtgatgcaaccagaaggcgcggtcgtcgtgacggaagataactggtatgcagcgccggcagagaagccagagaataaacagcgtgagtga

SEQ ID NO: 123319 - DNA, 966 bp, Enterobacter cloacae
atgaacctccctggtcaaccttcacctgacaacactttacctggttacgacctttctcgcagtctcggtaatcagacaggtgcagatatcgattttaaaaaactggctgaacagctggactgcatgcgaaatttttacaacgtcggtattatttttgacgatggtagacaacgctggcttgtacgcccttcccgccgtatcgcggatgctaatcagagcaccgtgagccatgtggtgataagtaaagtgccggatatcaagcaacacagtgctgaaaaagccgttgttgctgctctcacagcgccgtcactggccactgaaattacctcaactggttttgcctgtggtgcgatgatcgtaacgttggtcatggcgtttggtgccggtgcggcagtaccaatgactgcgggaggatccggggtaatagctgcaattagtctatcaggtgcactcgcgaccggtgcgcagtgcatgattggagctggcagactgctggctattaataacgatcacggatccgatgttgcctggctggacagccaggactggtatattgccacttctacagtcttggatgttatttcgctggctgctgctggaacggcactgaaaggtacattagaaacttacaagctgatgaaagcggcttcctcaagtaaagttataacttggttccagagccttagtcgtgctgagagaaaacgaattacagaagaaatcatcaaagctcagaatcctggcatctccagttccggagttaaggctgcaattcgtgcaggtgtttatccgaaacgattccccagcgaatcattgcaaaaatcactgcagcgtgagttggttaatgcggtaaccaatgcctcggcatttgttggtagttcacttacgggcaccattcgaaatccacagaacacagtcaagtctgggcgctatgtggtaggactattacagtcattttccccaaattaa

SEQ ID NO: 123320 - DNA, 585 bp, Enterobacter cloacae
atgcttaaagagctatcccgtcgtctacaacactgtaacgacatagcggtacgtataaacaatgccaacgcttcacagttgcaagaactgaaaacgcagttggtccagcagatgggtaagcccgtggggctacatactatgggtatccctgcggcaatcagcaccctcggggtgattgtcagttttgctattccgcagctatggttgggctacggcgtattcgccgcactcaatcagccggcagaaaaggtatttgcgtgggtagtgctgattgcccttctgttcgccggcatcaacggtctgacgatgtttatgatgggtaaaggcagtattcgcgccgtgcgggtacatctttctctggcattcataagccttctgctgacggtcgtttatctgattgcggctctgagcggcaccatctggccaggcgtcaatttaacagccgcactggtgagtgttgtcatgttgctgctcagcggtttctgtatacgatctccttccttctataagatgctgctatttacacttcataaccgcgcctggcgccagcaaatccgccagacacgctataacatgcagcgttaa

SEQ ID NO: 123321 - DNA, 471 bp, Enterobacter cloacae
atgcagagtcattacaacctgattatgcgtgaagatgaacgtgaactcttcggtttatgcgctgaggatgggattgcgttgacgccctatagcgcgctggcaagcggccgcctctcccgtaaagatggccacacgcggcgagccgtcgaggatgactacgcccgcgagaagtatgaccgtacggcagaacaagatcggatcattatcgaacgcgttgccgagcttgccgaacagtatcaggtatccatgacggaaatatcactcgcctggctactgaccagggtcacctcacccattgttggtgccacgcaaaaacgtcatgtcgaaggtgcggtaaacgccgtgagtctgcagctgagcccggaggcgatccgctatctggaagaatgctatcagccccaccttctgacgggggttatggcgcaaaatacgccgcataccaaagacgttaagcaggtctggacgcggtag

SEQ ID NO: 123322 - DNA, 732 bp, Enterobacter cloacae
atgaaaaagagtctcatgtttttagcttacctgctaataagcagccctgcctttacaaaaagtcagggcatacagggtacgcccgtgatgaatatcgttgagataagcatcacgcccgatcgggacaggcattttgatgaggttgccaggcaaacaatcaccgcttcggttgatcatgaggcgggcacgctggcgatgtacgcgctgaaacgcagtgacaatgcgcgtcaggcatatatggttgagctttatgcaagcgagttggcctaccgcaaacatctggatgccgctccatacaaagcgtttgatgctcaagctcctgatatgattgatcggaagctgaaaatcacactggtgccgcaatttacaggggacaaacacatcatacccgatgagcggaccatcaataatctggtggtagtcgaggtgaagccggaatatcagaccgaattcaaaaacattgtccttcctgaaatggctcagtcgctcaacatagaaaaaggcgtgcttgccatgtatgccgcgacagacgtagatgatccccaccgctggtatttctatgagatttacgccagtgaggaagattatcaactccacagacagacgctgcactttagggattatctaaagcaaacggcgcacatgagtacccgtaaaacgtctattcctgtcaaaccactatttctgcgtaataaaggcgggataaccgcagaaatcgcccctggcggctaa

SEQ ID NO: 123323 - DNA, 1203 bp, Enterobacter cloacae
atgcagaacataactcaacattttcgctggcttctgcttgttatcccgtcactgagcggttgtggcaccctctcgcaaatgtcctccccggcaggaacacaggaactcctcacccataaatcgctggacggcgacgttgatagcgtggtccgtcactatatggcgcaaaaatccgttcccgggatgacggttgcggtgatccataattacggttctccgcagttttacagttggggcgtaaccgatgtggccaatcgctacccgatcgggtccaataccttgtttgccctcggttcgctcagcaaagggattacggcggaagtggtggcttgtctggtgaacgaaggaaggctgagttgggacgataacctggcgacattgctgccaccgggtacgcccttaagcgcagatgcacaaaaaattactctactggaactggtgacccacacctctggcctgccccgtcagaatatggatgttccgatgctgggaaaattcatcagctatttaagcagtggtgataacttttatggcgaactggatagcgataacgtattgcgctatttagccaactggcatgcaccgcagcataaaatgccgcaatactctaataccggctatgccctgattggctatatcctgaaacacaaaaccggcgaagatattcagagtttagcctcgcgctatatttttcaaccgctgcaaatggctaacagtagttttactccccagacgttaaagggatacccgcagcgtgcgcttggccacgctggcgatcagcccaaattcatcccgcgcggtcagctgacgcccgactggcatttttccaacaacatggtagcggcagcgagtttatacagtaacgccgaagatctggccgcgtatgctcgctatcacgtggcgacaaccgacaatcgcttattggatagcgtctttgctgaagtcagtaataccgatattcaacgccccgacggtgtacagggtattgcctggaccaccgattttatcggtctggaaaaaattacttatcaggtaggctatattggcggctactcaagctttatcggtttcgataaacaaaaaggcaatgcggtagtcgtgcttcaaaatgcatttaactggagtaactatattggtatcgcactattaatggatatggcgaaaaacgatagccagagagaagaacattctcgcgcgctgtaa

SEQ ID NO: 123324 - DNA, 312 bp, Enterobacter cloacae
atgaaaaagatcctgttatccattgtcaccattatggctgtcacctcatctggctgggcagcagaaacgatcaacatgcacgaccaggttaataacgctcaggcaactgcgcatcaaaccatggctgagatgcacaagaaaatgctcaaagctggcccctgtaatactactcccgaatcggcaaagtctttctctgcgatgaatgagcatgagaaggccgccattgtgcatgaaacggcgaacaatgggccgtcttctgttattcaccagcaacaggcagagaaacatcgccgtatgaatcaggcgaattaa

SEQ ID NO: 123325 - DNA, 3135 bp, Enterobacter cloacae
atgattgaatggattatccggcgctccgtcgccaaccgtttcctggtgatgatgggcgctttgtttctcagcgtctggggaacatggactatcatcaatacccctgtggatgcattgcccgatctctctgatgtacaggtgatcataaaaaccagctatcccggtcaggccccgcagattgttgaaaatcaggtcacgtatccgctcacgacaaccatgctgtcggtacccggcgcaaagaccgtgcgtggtttttcccagtttggtgactcctatgtgtacgtcatttttgaagacggtaccgacctgtactgggcccgctcgcgcgttctggaatacctgaaccaggttcagggcaaattgcctgccggagtaagctcagaaataggaccagatgccaccggtgtcggctggatatttgaatatgctctggtggatcacagcggaaaacacgatcttgcagaactgcgttcccttcaggactggttcctgaaattcgaactgaaaaccatccctaacgtcgcggaggttgcgtcagtaggcggcgtggttaagcagtatcagattcaggttaacccgttgaaactggcgcagtacggtgtcacgctgcccaacgttaaacaagctctcgaatcatctaaccaggaagcagggggatcatccattgaaatggcggaagcggagtacatggtccgcgccagcggttaccttcagtccattgatgatttcaataatatcgtcctgaaaacgggcgagaacggcgtgccggtttatctgcgcgatgtggcacgcgtgcaaacgggcccggaaatgcggcgcggcattgcagagcttaacggccagggcgaagttgctggtggcgtcgtgatcctgcgctcggggaaaaacgcacgggaagtcattaccgcagtgaaagacaagctggagacgctgaaagccagcctgccagagggtgtcgaggtggtgaccacctacgatcgcagccagttaattgaccgcgccattgataacctgagtaataaactccttgaagagtttatcgtggtagccatcgtctgtgcgctgttcctctggcatatccgctctgcgctggtggcgatcgtttctctgccgcttggcctgtgcattgcctttatcgtcatgcatttccaggggctaaacgccaatattatgtctctgggcgggattgccattgccgtgggggcgatggtggatgccgccattgtgatgattgaaaatgcgcataaacggctggaagagtgggatcatcaacacccaggggagcagatagacaacgcaacccgctggaaggtcattaccgatgcgtccgttgaagtgggcccggcgctctttatcagcctgctgatcatcaccttgtcgttcatccccattttcacgcttgagggacaggaagggcgcctgtttgggccgctggccttcacgaagacgtatgccatggcgggcgcggccgcgctggcaatcatcgtcattcctatactgatggggttctggatcagagggaaaatccccgcggagaccagcaacccgctgaaccgactgctgattaatgcctatcatccgttattgcttcgcgtgctccactggccgaaaacgaccttgctgattgcggcgttaactatttttacggtcatatggccgctgagtcaggtcgggggggaatttctgccaaagatcaatgagggcgatctgctgtacatgccttcaacgttacctggcgtatcgccggcagaggctgccgcgctcttgcagacgacagacaaattaatcaaaaccgtccctgaagtggcgtccgtatttggtaagaccggtaaggccgaaacggcgaccgactccgcgccactggaaatggtcgaaaccacccttcagctcaaacctgaagatcagtggcgaccaggaatgacgattgacaagatcgttgatgagctggataagaccgtgcgtttgcccggactggctaacctctgggtaccgccgatccgtaaccgtatagatatgctctccaccggcattaaaagcccaatcggtatcaaggtgtctggcaccgttttgtctgatattgatgtcacggcacaacgtatcgaagcggtggccaaaaccgtgccgggcgtggtttcagcactggcagaacgtctggaaggcggacgctacatcgacgtggatatcaaccgcgagaaagcatcccgatacggaatgacggtgggtgatgtgcagctgtttgtctcatcagcaatcggtggcgcaacaaccggcgagacggttgagggcgtagcccgttacccgatcaatatccgctaccctcaggattaccgaaacagcccacaggcactgaaacagatgcccattctgacgcccatgaaacagcaaattaccctgggcgatgtcgctgatattcgtgtcgtttccggacctaccatgctgaaaacggaaaatgcccgtcctgccagctggatttatattgatgcccgtggcagggatatggtgtcggttgtaaacgacattaaaaccgctatcagccagcacgtaaaattaagaccgggcaccagtgtctctttctccggacagtttgaattgctggagcacgccaataaaaaactgaaactgatggtgccgatgacggtaatgatcatattcattttgttatatctggcattccgtcgtgttgatgaggcactgcttattctgatgagtctgccattcgccctggtcggcggaatttggttcctgtactggcagggcttccatatgtccgtggcgaccggaaccggctttattgccctggccggggtggcagcagagtttggcgtggtgatgctgatgtacttgcgtcatgccattgaagcccatccggcgcttgcccagcgggaaacctttaccgcggaaggtctcgatgaagccctttatcagggggcggtactccgcgtgagaccgaaagcgatgaccgtagcggttatcattgccggtctgttgcccatcctctggggaaccggtgcgggctcagaagtcatgagccggatagccgcgccgatgattggaggaatgattacggctccgctgttatccctgttcattattccggccgcctacaaattaatctggctgcgaagacataaataa

SEQ ID NO: 123326 - DNA, 1251 bp, Enterobacter cloacae
atggcctctttaagaataaagtttgctgccgtcatcatcggcagccttattgcaggagggctgatttcagttatcgcctggcagtcggtgtatcccgcagaaaaaacagaacagaccacgactgagagaaaagttcttttctggtatgacccgatgaagccggatacccggtttgataaacccggcaaatctccgtttatggatatggatctggtgccgaaatatgccgatgaaaatgacgaaaaaagcagtgagggtattcgtattgacccgacgcaggttcagaacctgggactcaaaacgcagaaagtgacgcggggagcgctgaattacgcccagaccataccggccaacgtcagttataacgaatatcagtttgtcattgtgcaggcgcgttctgagggtttcgtcgagagagtgtacccactgaccgtgggcgatcatgtcaaaaaagggacgccgcttatcgatatcaccattccggaatgggtggaagcgcaaagcgagttcctgttgttatcgggtaccggcggaagccctacccagataaaaggtgttctggagcgactacgtcttgccggcatgccggaagaggatgttcaacgactgcgtgcgacccggagtatccagacccgttttactatcaaggcccccatagatggcgtgattacggcgtttaacctgcgcacgggcatgaacattaccaaagataacgtggtggcacagattcaggggatggatccggtctggatcagtgcggccgtgccggaatccattgcgtatcttctcaaagacagctcgcagtttgaaatttcagtgcccgcgtatccggataaatcgtttgccgttgaaaaatggaacattctccccagcgtggatcaaactacccgcacgctgcaggtccgtttgcaggtctccaaccaagacgaaagcctgaaacccggcatgaacgcctacctgaaactgaacgccaggagccaggagatgctgctgatcccatcccaggccgtgattgatacgggcaaagaacagcgggtgattgtggtcgatgcggaagggcgttttgtgccgaaaagcattcatgttctgcatgaatctcagcagcagtccgcgattggcagcggactgagcgaaggcgattctgtcgtggtcagcggtctgttcctgattgactccgaagccaatattagcggtgcgctggagcgcatgcgtcatcctgaaaaaactgacgacgcgcattcgggccattaa

SEQ ID NO: 123327 - DNA, 342 bp, Enterobacter cloacae
atgaacagtttatttaacgcggtcgtactgggtgcactctccgttatattttctgcaggcctgcatgctgaaacacatcagcacggggagatgagcacagcagcacaagccacgccagagcaggttatcgcgggaaccggcgtggtgaaagcggttgatctgagcactaaaaaaatcactatcgcgcacgatgctattccagcgattagctggcccgccatgaccatgcgttttacctttgtccaggcagacgaaactattctcgccttaaaagccggcagccacgttaattttacgtttgttcagcagggcaatatctctttactcaagagcattaaatag

SEQ ID NO: 123328 - DNA, 1386 bp, Enterobacter cloacae
atgtgcacattaaaacgacttagcattagcacaatatttttcctggcaggctgcgtctcgctggcaccagaatatgcgcgtccgccagcaccggttccgcagcagttctcgttatcccgaaatagcctcacgccggtggtggcggggtatcacgacagcggatggcgtagcttttttaccgatcctcaggtcgcagcactgatcgccgaagccctgaataacaaccgtgatttaaaaatggccgccctcaaggttgaagaggcgcgtgcgcagttcaacgtgacggatgccgacaggtatccgcaggtgaatgcctcgtcaggtgtaacctacagcggtgggctgaaaacggacaagccgaccacacagcagtacgacgcagggttgaacctcagttacgaactcgatttcttcggcaaactcaggaatatgagtgatgctgacagacagaactattttgccagcgaggaggctcgccgtgccgtgcatatcctgcttgtctccagcgtgtcgcagagctatttcagccagcaactggcctacaaacaacgtcgtattgcccgcgatacgctaaagaactatcaacaatcctgggcttttgttgaacaacagctggtaacgggcagcaccaacgttctggcacttgaacaggcccgggggcagattgaaagtacccgtgcagaaatagcgaaaagagaaggcgagctggctcaggccaataatgccctgcagcaggttctgggaacctatcgcgcgctgccggcagagaaaggaggcggcgtcgatgagattacacccgtcaaactgccgcctcgtctgccgtcagaaatattgcttcagcgcccggacattatggaagcggagtatcaactgaaagcggctgatgccaatattggcgcggcgcgcgccgcttttttcccgtctattacgctaaccagcgggctttcagcaagcagtacggaattatccagcctcttcaccgcaggaagcgggatgtggaattttattccgaaaattgacattcctgtttttaatgccggaaggaataaagccaacctcaaactggctgaaattcgccagcagcagtcaatcgtcaattacgaacaaaaaattcaggcggcttttaaacaggtcgccgacgcgctcgcattgcgggacagcatcagtcagcaacttgacgcccagcagcgttatcttgattcgctacatatcaccctgcagcgagccagaggtttatattccagtggcgcggtcagttacattgaagtgctcgatgctgaacgttctctttttgcaacacaacaaaccattctcgaccttatctattcccgacaggtgaatgaaattaacttattcaccgcgctgggtggcggttgggttgagtaa

SEQ ID NO: 123329 - DNA, 714 bp, Enterobacter cloacae
atgtccagagcagccagtcaggggagtaagatgaaaatactgatcgttgaagacgagataaaaaccggggagtacctcagcaaggggctgactgaggcggggtttgtggtggaccacgctgacaatggcctgaccggatatcatctcgccatgaccgccgagtatgacctcctgattctggatatcatgcttcccgacgtgaacggctgggatatcatccgcatgctacgttccgccgggaagggaatgccggttctgttactctcagcccttggcactattgaacaccgggtgaagggtcttgaactgggcgcggatgattacctgatcaaaccctttgcctttgcggagcttctcgcccgcgtcaggacgcttctgcgacggggcaatacggtgatcacggaaagccagtttcaggtggctgatttgatgattgatctcgtgtccagaaaggtgagccgcgcgggaaaccgcatcctgctgaccagtaaagagttcagcctgctggagttttttatgcgacaccagggggaagtgctgccccgctccctgattgcatcccaggtctgggacatgaattttgacagcgacaccaacgcgattgatgtcgccgtcaaacggcttcgcgcgaaaatagacaatgattatgagccgaagttgatccagacggtccgcggcgtggggtacatgctggaggcaccggatgcgcgttaa

SEQ ID NO: 123330 - DNA, 1461 bp, Enterobacter cloacae
atgcgcgttaaattacccggacgccctttttcattagccctgaggctgacgttttttatcagcctctccacgatactggcatttttcgccttcacctggtttatgctgcactccgttgaaaagcatttcgccgagcaggatatcaacgatctgcagcaaatcagtaccgcgatgcaccgtatcctgcagtccccggcagatccggacgagaagaaaatcagtaaaatcaaagagtcaattgccagctatcgtaacgttgcggttctgcttctcgacgcgcgtggggaggtgttgttcagtacggcgcaggggtcagcgttacgccctgccgtgaacacggcggcgttcagcacgcacagtcgggcacgggatgtgtttctctggacggtagatgcccccaccctgcagagtcattccggcgatgagatgaaaagtgacacgtaccggattatcgcctcgtcaggcacggcaacgctgcagggaaaagcgcagaattacgttatgctgatcgggctttctattaatttccatctccattacctcgatgcgctgaaaaagaacctgattgcgattgccgtggtgatcagcctgctgattattcttatcattcgaatcgcggtccgtcagggacacctgccgctgcgtaacgtcagcaatgccattaaaaatatcacctctgaaaatctcgatgcgaggctggaaccgtcgcgcgttccggttgaactggagcaactggtgatatcgttcaatcatatgattgaaaagattgaagatgtgttcacccgccaggcgaatttttctgccgatatcgcccacgaaatcagaacccccatcaccaatctggtgacccagactgaaatcgcactcagccagaaccggacgccgaaagagctggaagatatcctctactccagccttgaagagtataaccggatgacccggatggtcagcgatatgctgttcctggcgcaggcggataacaatcagctgatcccggacagggtgatgtttgatttaagcgcggaggtcattaaagtctttgatttcttcgaggcctgggcggaagaacgccatatcacgttgacgtttcacgggatgccctgcctgatcgaaggcgatccgcagatgttcagacgcgcaatcaacaacctgttatccaatgccctgcgctatacgccggaaggcaagacggtgaccgtctcaatcgccgaacgggaaaacgattttgagctgatgattgccaaccccgggaaacctgtcccgcaagaacatctacccaggctgtttgaccgtttttaccgggtggatccttccaggcagcgaaaaggcgaaggcagcgggattggtcttgccattgtgaagtcaattgtcaccgcgcatcatggcaaagtccgcgtcgaatcggatgctcagtcgacacgctttatcttgtccgtgcctaagcgggttactcagcactga

SEQ ID NO: 123331 - DNA, 924 bp, Enterobacter cloacae
atgtccgatccggattttaatttgcttgtcgccctcgacgtcctgctggccgaagccagcgtggcgggcgcggcgcggcgtttaaacctgagtacgtcagccatgagccgtaccctgagccggctgcgagaggtgaccggcgacccgatcctggtgcgggcagggcgtaatatggtgctgacgccctgggccgaggccacccgggagcgagccagaggggccgtgtatgaggcaagagccgtattgcagccctccactgaaacgctgaaggtagaaaacctcgagcggctgttcaccatcagagccaatgatggttttgtggttgcatttggcccattgctgattgccgccgtggccgaagctgcgcccgatgtgtgtattcggttctcgccgaagcctgagaaaacgtcacgttatctgcgggaagggctggttgacctggaaattggcgtgcagagcaacatgggacctgaaatacgcctgcagcgattgtttcaggatcggttcattgccgcggtgcgtaagggacatccgctggcggcacaccccacggtcagccttcacgattatgtttcctggggccacgtggttgccgcgcccgacgggtcgctacacggctttgtcgacgatgcgctggcagaagtggggatgaagcgcaaaattgccagcgtcgtgcccggtttcccgacggcgttatccgtggcgctggcgtccgatctgatcgccatggttccggcattgtatctgctgaaccagccgatggcgcagagtgtgcatgtctttgaactgccgtttaaaacccgaaccattacggtatcgcagatgtggcacccgcgaatggaaagggatccggggcaccgctggctgagagagaaagtgctggacgtgtgtcgggctgtgcagcaaccactcagtgctgagtaa

SEQ ID NO: 123332 - DNA, 1410 bp, Enterobacter cloacae
atgacgctattttcaaaccagcccggcgacgaaggattgcccggccatgaacgcgcccgggtgatggccgcggtaatgaccaccacgctgatgggcgtttttgatggcaccatgatcaacatcgccttgccttcgatggcaagcgcgatgcaggtgcccgcgaatgtagccgtctggttcgccaatgggtatctgttgtccgcggccatgactctggccatcttcgctgccctggcggcccgcgttggctaccgcccggtgtttctgaccggacttgccgtctttacactcacctcgctcggctgcgcgctggcccgcaccccggacatgctgatcgggatgcggatattgcaggggattggcggggcggccacactgagtattgctccggcgatactgcgcgccgtcttccccggtcgactgcttggccgcattctgggactgcacgccctgcttatcgcctccagcacggccattgcacccgtactgggcgggacgatcctggacgtactgcgctggcagtggttattcgccattaaccttgttcccggaacgattgccctgctgttggcctggaaggcattacctcgacagccggcttcagatccttctccgttcgatgccccgggggcactgctctccacggtcctgttgggggcgatgatcatgacggccaacagtttccagcatgcttcgcaccacatcagccacgaggctatcagttgggcgctgctcgctacgattagcgtcatcacctttgtctggcatattcgccgcgcccgaagccccatactgcctcccgttattttccacaacggacgctttacgctcgccgcgctcacgtcgctggcctcgtttgtgagccagggcatcacctttatcgccctgccgttcctgtttcagagcgtatatggctacagtccggtggtctccgcgctgctgttcacgccctggccgataggcatcgtactgatcgcgccgcatgcgggccgctgggcagacacaatttcagccccgctgatatctacccttgggcttatcgtgtttgtggtgggattgattctgctcgcgacactgcccgccagcccttccgcttggaatatctgcctgcgaagcctggtgtgcgggatcggttttggctgtttccagagtcccaataaccgggaaatgctctctaacgtggtgcgggagtatgccagctacgcatccggcgtactggctatcgtgcggacgtttggacaatgcctgggggctgccgtggtcggcgttctgctggccacaacgcagaatcagccggcttttgacgatcgggccgttcattattcactgtggattgcggtcattgcttcggcggtttctgtcgtgtttagcgtgagccggctgcgcgccacgcgtcaggctacggcataa

SEQ ID NO: 123333 - DNA, 996 bp, Enterobacter cloacae
atggaattaacgcaacaccaggccgacgcgtttgcccgcatgcctttgacctatttacgccaggaatatccgaaccacattatgcacctgcttaatgatgatggtgatgtcctgccaccccgcgaactgcaccccattttttatggctgcttcgactggcactcggcggtgcacggctactggctgctgctgcgctgcgtgcggctttaccctgaactgtcgtgccgggatgaaattgtcgccctgtttgatgaacacatcacgcaggagaaggtggcgaaagagctggcctatttcaaggcaccgtttcgcgcctcgttcgagcgcccttatggctacggctggcttctggcgctgacgcaggagctgaagcaatccgcgttacctcaggccgccagctggtatcagacactgcagccgttaacgcaggacattcgcgacagactggtggattacctcagcaagcttacctatccgatccgtgtcggtacgcattacaacaccgcttttgccctggcgctggggattgattacgcccgtgcagtgcaggataacgcccttgagcaggctattctgacggcggcgacgcgcttttatctggctgacacgcattacccggctcactatgaaccgggtggtgatgagtacatttccggcgcgctgacggaagcgctgttgatgagtaaggtggcggagcatttcccgacgtggtttgacgcctttcttcctgatgtggggtctgtttctgccctgatgcacccggcagaagtgagcgatcgtaccgaccccaaaattgcccatctggatgggttaaacctcagccgcgcctggtgcatgaagcatattgcccgcgcgctgccggataaccatccgggacaacaggcgctgcacgaggcagtcgaccgacatctggcggcaagcgtcgagcatgtagtgggaagccactacagcggcggacactggctggcgagttttgcgctgctggcgctggagtaa

SEQ ID NO: 123334 - DNA, 987 bp, Enterobacter cloacae
atgatgaccctgatcaccattaaccgcgtgtattacctgatcggctttgtcgtgatgctgctggtcgtgatgaccctgcgcgatcgcgcgaatcctaaacgttttaccaccgcgctgttctggttcctgttcggcgggatcttcctgtttggtgacctgatggtgcaggagctgggcaaatcccttgcttatcgaattatcggcggctgcgtcattgtgattgctctgctggcgggctttggtctggtcggcaaagggcactataaaatggctaccgatgccgagcgcgaagcctcgtcaacgcggctgaaaaactggctgttcctgcctgcgctgatgatcccggtggttacggtgatcgggacattattcctgaaaggggtgtcgatagggggcgtattccttcttgaccagaaacagctcacgctggcggcactgtgcgtcgcctgtgtggcggcgatcctgactggctggtggctgacaaaaggcacacccttgcaggctattcgccagtcccggcgcctggtcgacaccattggctgggcggtgattttgccacagatgctggccatgctgggcggggtgtttgtggtggcgaacaccggcgagtcagtccagaaggtcgtaagcctgtttgtgaaccccgacagccggttcatgctggtggtgatttactgcgtgggcatggcgcttttcaccatgatcatgggcaacgccttcgcggcattcccggtgctcagcgccggtatcgccttgccgtttctgattaacgttcaccatggtaacccggcaccgctgctggcgattggcatgtacgcgggctattgcggcacgctgatgacgccgatggcggccaactttaatatcgttccggccgcgctgctggagcttaaagataagtaccaggtgatcaagatccagatcccaacggcgttaaccctgctggtggtcaacgtgttcttaatgtatttcctcgtttttcgctaa

SEQ ID NO: 123335 - DNA, 549 bp, Enterobacter cloacae
atgactgcaaagaagagtgctggatcatcaaatcacgacgatataaccgatggccgtatcgtgtcctctcgccatctggtatcggaacgttgcgcggaattatcagagctggagtacgcgttgatcatgaccagcaacgcgtttaacaaatggatggtgcgctgcatgaccgccgccggtgagccagatatgggcgcttttgatgtctcgcttctgcatcacgtgaaccaccgcgaccgcaagaaaaagctggccgacatctgctttgttctgaacgtggaagatacccatgtggtgacgtatgcactgaagaagctggtcaaggcgggctacgtgacgagtgaaaaagccggaaaagagctctatttttcaacgacggaggaagggaaagcgctatgcatgaaataccgcgacgtgcgggaagcgtgcctgatcaatatccatgcggagagcgggatttccggagcgtctataggtgacaccgcgcagttgctccggaccatatcttccctgtatgacaccgccgcgcgggcggcggcatcactgtag

SEQ ID NO: 123336 - DNA, 2076 bp, Enterobacter cloacae
atgccaaaggataatacgtttgaaattcgggccggtcatggccagcagcaaggcgcaaattatgacgggaagggggtcaactttgcgctgttttcagcacatgcggagcgggttgagctctgtctgtttgacccttcaggaaaaaccgaaatcgcccggctggagctgccggaatatacccatgaagtgtggcacggctatgtgccggatctgaagcctggcgcgctgtacggctatcgtgtctacggcccctatgacccggaaaacgggcatcgcttcaaccccaataaactgcttatcgatccgtatgcccgtgaactggtgggcgatatcgactggaacgacgcccatttcggctatgagctgggtcatgacgatctcgacctcagttttgatacccgcgacagcgcgccgttcacgccaaaatgcaaggtcatcgaccccaatgcttttgactggcaggatgataaccggccaaccattccgtggccgaataccgttgtgtatgagagccacgtgaagggctttacccagcttaacccggcgatcccgcctgaactgcgcggtacgtttgaagggatgggacacaaagcctcggtcgattacatcaaaagccttggcatcacctcggttgaactgcttccggttcactggttcccggacgatcaacacctgctcgacagggggctgaaaaacttctggggctacaacacgctcggcttctttgcaccggcgtcacgctattacggtccggcggggatccagggttttcgcgatatggtgcgcgcctatcatgacgcaggcatcgaggtgatcctcgatgttgtctataaccacacggcagaaggcaatgagctcggcccaacgctgtcgtttaagggcatcgataacttcagctattaccgcaccttacccgatcaacaccggtattacattaacgacaccggcacggggaatacggtgaatacctcccacccgagagtgctgcagatggtgatggattcactgcgctactgggccgaatcgatgcatattgacggtttccgtttcgacctcgggacaattctgggccgtgagcccgaaggctttgatccgcgcggtggctttttcgatgccgtcacgcaggatccggtgttatcccgtctgaagctgattggtgagccctgggatatcggccccggtggttatcaggtcggcggcttcccgccaggctggggggagtggaacgacaaataccgcgataccgtacgtgagtactggaagggcgataacgtgtctaacgacttcgccgcgcgcctgctcggttccggtgacttgtacgatctgcgcggacgccgtccgtgggccagcatcaactttatcaccgcccacgacggctttacgttgaacgacctggtgtcttacaacgaaaagcataatgccggcaatggtgaagacaataacgacgggcataacgataaccggtcgtataactacggagaggaagggccgacagagaatccggatattatcgctacccgggagcggcagaagcgtaatttcctcaccacgctgttgttctctcacggcacgccaatgctgctggccggagacgagtttggccgtacgcaaaaggggaacaataacgggtattgccaggacagcgagatctcctggatcgactggaaggggttatcggaaaacgacactgccctgcgcgactttacccgccatctgattgcccttcgcgcgaaacagccattgctgcggcgagaaagctggcgcgacggacttgagatccgctggtttaacgccggcggcggcccgcagcaggatgagcagtgggatgaaggttcaaccctcggcgtatccatcagcagaccggacctcagacaggagccgggcctctggcacgatgtgctgatgctgtttaatccgtttgaaggcaccgtgccgttccagatcccccagtttggcgaaggaggctgggtactggaactctccacggcggatgacgttgtccccgggacggtcatcaccaaagccgtggaataccatctggccggacgaagtatttcgcttttcagacgcccttaa

SEQ ID NO: 123337 - DNA, 2469 bp, Enterobacter cloacae
atgatcccttccgcgacctaccgtattcagttccgtaacggcatgacgtttgaccgagtcgtggaactggtgccgtatatgaaagatctcggcatcagccatctttacgcctcacctgtgttcaccgccacgaccggctctacacacggctatgacgtgaccgacccgaatgaaattgaccccgccattggcggacgagaaggattcgaccgtatggcggccgcgctcaagcaggcgggaatgggcttgatactggatattgtgcctaaccacatgtcgacctcgctggagaatcactggtggcgagacgtgattgagcatggcaaacagagccgctacgcacgctatttcgatattgactggtcacggccgcttacgctgccgtttctgggcgacacctttgaggcggagcttgagaagggcgccatcactgtaaaacgtgaccctgtcacggacaaagcagcgctggtctactacgacagcgcctatcctcttaacccgggtacctttgtggagggtaaaagcattgcggcgctgcacgaggcccagagctggaggctgatgtcctggcgtgaagccccgaaacagctctcgtggcggcgtttctttgaaatcaccggcctggtgggcgtgcgggttgaagacgcgtcggtatttagtgatacacaccgattgatccttgaactggttcattctggcgtcgttgacggtctgcgaattgaccatatcgacggtctggccgatccgctgggctatctgcagcgtctgcgccaggcaaccggaccggcctgttacatcacggttgaaaaaattctcgccaaaggggaacagctgcccgtcgaatggccagtctccggcaccacggggtacgagtttattgcctcgctggcggaagttctggtggacgacagccgccttgaccgcctggagaaaatccatgacgacacgctcggggaaaccgttgatcggtttgcagcgttacgggatgccaaagggctaatgaccgatcgcaatttcgagggcgaattcactaccctgttaactatcgccaccgatcttgcccgacgcaatgcggttgaactgcaacccgatgagatccaccatgcgttgcgcgagctgctgatcgcgtttccggtgtatcggacctacggcacccgtgaaggattaaccgcctctgacgtggcgctgctcaatcgcgttgtcgcaagcgttaacacctctgaagcggccctgagcctgatcgtatgcattcttaccggcgatcttcctgaaaattgccacgacgacgcggcacgtttcagaacccgcttccagcaactcaccgggccactgatggcgaaatccgtggaagatacgctgttctttcgccataacctggagctggcgcttaacgaagtgggggcagacccgacgccgcgcgccttttcgctatcgcgttttcatcaggaaatgcgcatccgtcttgcccgccagcctgacgccttactcgggacatccacccatgacacgaagcgcggtgaagatgcccgggcacgcctctataccctgacggaagcgccggaacagtggggcgaaaatctggcccgctggcggcagatgaatcaaacccacgtgcgttttctgagcgacggtaccgcgccgaacgctgccgatacctggatgatttatcaggctctggccggcgtctggcccgccacgctgtcacctgacgatgtcgacgggctgaaatcactcgaagagcgcttcctcggcttcctggagaaagcgctgcgcgaagccaaacaacgcacagactggatagacagcaacgaaagctatgagagcgtggtgctgagctatgcccggcatctgctttcaccgggcaacacgctgttcctgaaggatttcagtgaggcgatgcagccttttatccgtgccgggctgatgaacagcctcagccagacggtgatcaaacttaccgcacccggggtaccggacatctatcagggctgcgaagcgcttaactttagccttgtcgacccggataaccgacgggaaccggatttccccgcgctggtgcaccacctcagcacggcggatgccggggtatttgcccgcccggaatgctggcgagacggaagcgttaagcaatatgtcaccgccacgctgttacggcttcgtccgcattatgccgcgctattccattacggtgactggctgccgctgaaggtgagcggcgagcgggcggagaacctgattgtttatgcacgcgtgaaagacgaggaggcgctgattgttgccgtgccgcggctggtcttcgacgtgacaacccatgaagcactgtgggccaataccactattgctatacccgatgcgctggcaggaaaacgctaccgggatctgttcaccggtgaaagccgggttctgcaagagacgctggatgtaacgtctgaaacgggatgcttaatggttctgcttacctgcgaatga

SEQ ID NO: 123338 - DNA, 1788 bp, Enterobacter cloacae
atggaattcaggacatttcaaaaacactggggtgctgagtttatttccaatgacgttgtacgttttcgcgtctgggcagaaggacagaaagaacttacgctacgtctggcagaaaacgacttgccaatgacggcggtcggcagcggctggttccagattgacgtccccggcgtcacgcacggcacagaatatcagtatgttttgcaggacggcatggccgtacccgatccggcgtcgcgcgcccaggctggggatgttaacggtccctcggttgttatcgatgccagacggtatccgcccggcaaccgggagtgggcagggcgtccgtgggaagacacggtgatttacgagctgcacatcggcacctttaccccggagggcaccttccgggccgccattgaaaaactgccttacctggctgaacttggcattacccagattgaagtcatgcccgtctcacaatttggcggatcgcgcggctggggatatgacggggtattgctgtatgcaccgcactctgcctatggcacgccagaagacttccacgcctttatcgatgctgcgcatgggcttgggctttctgtcgtgctggatattgtgcttaaccacttcggtccggaagggaattatctgcctgtgttgtcacccgcgtttttcgacgcggaacggatgacgccctggggcaacgggattgcttacgagactgagccggtcaggcaatacattaccgaagccccgctgttctggctgacggaataccatcttgatgggttacggtttgatgccatcgaccagattaaagacgcatcggataaacatatcctgcaggagattgccgaacgcattcgcgaggctatccccgggcggcagatccatctcaccaccgaagacagccgtaacgttatcttcctgcatccgcgtgacgcacacggtgcgaccccgctttttaccgcggagtggaacgatgactttcacaatgccgcgcatgtctttgccaccggcgaaacgcatgcgtactaccaggattttgcctttgaaccggagaaaaaactcgcccgtgcgctgacagaaggttttgtctatcagggcgaggtttctctccagaccggcaagtcacgcggcgtggaatgtcacacgcagccgccacagttttttgtcgattttattcaaaaccacgatcaaaccggcaaccgcgctcagggagagagactgatcgccctcgcgggggccgataaaacacgggtgttgcttgctgcactgcttctttcgccccatattccgttgctgtttatgggggaagagtttggtgaaaccaatccgtttttgttctttaccgattttcacggtgagcttgccaaagccgtgcgggaagggcgcgcaaaagagtttaccggccatgccgggcacgatgcgtccgtccccgacccgaatgacgtgaagacctttgttcgctccaaaattgactggaataaggtcgccaccgatgacggtaaaacgtggctgcgcttcacgcgaacgctactgacgttgcgccatcgtcatatcgttccgttactgcgaaagggcgtcacggtggagggcaaggtcatcaggacggcacccggcatgattgcagtgagctggcgattcccgaccggaacgttgtctctggcgttcaataccggcaataaggctgttgatgtgcctgcactggcaggagaaacgctctttagctggccggagatgaacgaggtgttaccgccgaacagtattattgttcgctttgctgatggagaagcatcgttatga

SEQ ID NO: 123339 - DNA, 528 bp, Enterobacter cloacae
atgcagattcgaaaaggattaaataccgacctcgcacgtcttgaatgctgtgacttttcattcaccgtcagtcacgttgcgcgggagccttttatacattgtgatttgcatatcgacgctgtcgccgtgccttatcgtaaaacgtatgagctcgatatgcagacccttgaaaatcattgcgttaatccggatgccatatttcttgtggccgaaacagatgagggagaaattgccggttttatcaccgcctcaatgagctggaataaatttatcgccgttgactatattgccgttgaacgcacgaaacgcagagctggcgcggcgcaaaaattgatggcggccgcacacgtgtgggcgcgaagcgtcaacgcggctggattaaggctcgaaacccagaatgtgaatgtttctgcctgcctgttctaccgtcattatggctttacgttaggcggatacgatcgtttcctctacaacgcattaccggaaaaagacgaaatcgccctgttctggtattacatgctgatctga

SEQ ID NO: 123340 - DNA, 744 bp, Enterobacter cloacae
atggctaaggcattactgctggcattacctgttttgagcgcgaccgccacggcagccgaccacgaaatctgtgagccgaaagcgtatgagatggcgctgcgctatcaacagaaatcggcagaaatcatggcacttcagctgcagacctaccgtttcgccaccgagcgttttaacgaaaaaataaaagggctgtctacgccagagaactatgccgttgtgatggatcttgatgaaacggtgctggataacaccccgttactggcgcgtgatgccgaacagtgccacgactatacgaaatgggacacctggagtgactgggaaaagcagggaaaaccgggattaattcctggcgcgaaggcgtttcttgatcgcgtgaatcaaagtaaggtccgtatttattatgtatctgaccgcatgcaggaaaacaaagcagatacgctcaatacgttaaaatcccttggcttaccgcaggtttcagaagatagcgttctgctcgatacggtcagtaaagaagcccgccgccagagcatcctgaagaaacagcagataatcatgctcttcggtgacagcctgcctgatttcgccgcgcaatttaaaaacaaaaagccgagcgaagcgcagcgtgaactcgttgaggccagcgccgatcgctttggcagtgactggattgtgttgcccaatgccgcgtatggctcgtggtcaaaagccacgcttgaaggctggaaagccccgctgaagcaataa

SEQ ID NO: 123341 - DNA, 987 bp, Enterobacter cloacae
atgctgaccgtaaaaaaacttgccctgacaacgctgatttccagttcgttattgttctaccctgcgcttcaggcttcggcagaaacgccccagcacgtggttaaacagcctgccggggggtacagtgtgcaggttggcgatattatggtgacctcgtttaccgacggtaccgtggcgcaagacctgcacaaattacttcgtcggacgaccccgcagaaaaccgatgcgttgctcacacaaaatttccagaccaacccggtagaggcgtccattaacgctttcctgattgcgctacccggccacaagattctggtggataccggctcaggccagctttttggccccggtaacggcgggcgactgattgagagtctggcaacgcaggggatcgcgccgcaggacatcaccgagattttactgacccatgcacactccgaccatgccggtggcctggtcaaagatggcaaggcggtgtttaccaatgcgcgcgtttttgtcggcaaacctgacatcgactttttctttaacaacgataatcagaaaaaaaccggctacgaccagaactacttcgatgtcgcgcagaaaaccttaaaaccgtatcgtgatgccggcaaggtggttcctttttccggaacctcgcagcttctgcccgggataaccggcacggttcacccgggccatacgcctggctcggccttctatacgctggaaagtaaaggcgagaaaatcacctttgtcggcgatattatccacgtcgcggcggtacagttcccgcagcccgccgtgaccatcgcctacgaccaggatcaggacggtgcggcacgtgtccgccaggatgcttttgctgattttgtgaaaaacagagaccttgtcgcagccccccacctgccgttcccgggtatcggttacgtcacgaaaggcgagcacggcggttacgcctgggtgcccgtcacctataccaatcgtgacagccacagcgcaaagtaa

SEQ ID NO: 123342 - DNA, 912 bp, Enterobacter cloacae
atgacgcccgttgctgagatggatatcgacctgatcctgacgctggatgcattgctccaggatcagaacatcacccatgcggccgcgcggctcggcatcagccagcccgcgatgtctgcccgtctggcgcgcctgcgctcgctctttggcgaaccgttgtttatcccttccccacatggacgtggggtgttgcccacgcccagagcggaggcgctgaggccgcaggtcatgaccgtattgcggggcattaacgcgatgtttgcccccaccacctttgatgcgcaaaccagccagcggacatttgtgattgctctgcatgaaaatccggccctgatgctgggtgccgaactgcttaatcagttccgggcccatgccccggggatccgcttgcgattcgcgctgccagaaatggcaaccctgccacagcagctggaaaagggtgatgtggatgtctatatcggtgtgagcaccggcgcgcacgacggctgggtcagacgtaaacttttcgatgaccagtttgcaacagcccagcgaaaaggccacccccgcggtgtcgggccactggatctggagcactattgcgcactctctcatctggtggtctcttcagagggtgacccgtttaccggctttgtggatcaaaccctgggcggactggggtatcagcgcaacgtggtgatgtccacgcagagctacgccatggcacctccgcttgtcgccagcacggacctgctctgcaccttaccggaacgtatgctgcaacgctttgcctcgacgctggatatctttcccccgccgctgccgctgcagccgattaccatcagcatgtactggcacccgaaaaacagccaggatacggcaagcctatggctgcgcgagcaactgctgctggccgcgggacgtcagatgtga

SEQ ID NO: 123343 - DNA, 885 bp, Enterobacter cloacae
atgcaatttcgtcagacgcgtaatttcattgtcgttgcggaagagcttcacatgcaccgggctgcggagcgcctgaacatggcacaacccgcgctgagtcagcagattaaaacgttagaggaacggttaggcgttacgctctttagccgggcgaaccgccgtttaaccctgacgccggccggtgaagctttcctggagaaagccaggctggccatcgccctgacggaacaggcggtgctggacgccaggcaaacggcgaggggggagcaaggggtgttgaatctcgggtgcgtatcgagcgccatgtttgacaccaggctgcctgccgcgctgcgccagatgcacagtcggtggcctgccataaccatgtcgctaatgacggggaatgtgcagacgctctataccgccgtgcaaagcaaccagctggatgtggccatcatccgggcaccgctgccgtctctgccagacgacctgcaaagccgcccgtttacgtccgagaaaacggtgctggcgctctcttcgcagcatcctctggcgaaatcgtccgcgcttacgctcgcctcggtgaaagatgaaaaatggatctccctgcgcgacccggagggaatgggcctcgaacagtacttctatgacgtttgttacggcgcaggtttccagcctgaggtggtacaaaacgccaccgacgtacctaccgtcatcagcctggtctctgcggggtttggcatggcgctactgccggcctccgccagggcagtcagcgtggagaatgtcgtgtacgtcgacatcattgacaggctcagggaaagcgagctgaagctggtgtgccaccggatcattcgctcagaggtgttaaaaaaattcctgcacaccctcgatcacatctga

SEQ ID NO: 123344 - DNA, 288 bp, Enterobacter cloacae
atgactgcacacctttctaaagaccctttacatggcgtaacgctggagatgcaggtcaatgccctggttgcacgatatggctggagtgagttgggcgatcgaatcaaaattaactgtttcagaaaagacccaagcgttaaatcgagcctgaaatttctgcgccgcacgccctgggctcgcgcagaagttgaagccctgtatcttgattccctgaatgatgaggggatcgcagaaccggacgaacccgcctttaacccctgggctaacagtcggataaccaagagctaa

SEQ ID NO: 123345 - DNA, 612 bp, Enterobacter cloacae
atgaaaagaatccttattacgcttctgctactgttgacctcagcgcaggtgatggcggcgcagaccatgacgccggaacaggagcaacgtgcacagaagatggtttatgactttctgtttaacgacccggactcgccgcgcattggcgctaaggatccgaagctcaccctggtggtctttacggattacaactgcccgtactgcaagaaattcgatccttacctggaaaagatcgtcgaaaaacacccggatgtggcggtggtatttaagtttttgcctttccggtcggaaagttcactgacctcagcacgcgatgccttaaccgtctggcgcgcgcatcctgagcagtttatgaaatttaaccataccctgatggccaaaaagggatatcacgatgacgccagcattcaggaggcgcaaaaacgggccggggtgaacgtcacaacgcctgatgatgagagcctggtgacgatcaaacgcagcctgatcatcgccgaaaaaatgggtatccagggaacaccggccacgctgattggcgaagggttactcccgggctgggttccttttgaacagttcgatgaaatggtcagtgacgcactgaaaaatcgttaa

SEQ ID NO: 123346 - DNA, 2034 bp, Enterobacter cloacae
atgtttaacctcttcaggggattcgtcttcctgtggctgtcctgcattggcattgtccatgcggcggatacaggctggctggtttccccgcaaaacgatcatgcccggatccgcgttcaggcggaaagggagcaaaaccgcatcctcgcgctgctcaccgttgagctgcagccaggctggaaaacctactggcgttcacccggtgagggcggcgtagccccgaaaatcacctggccggctggcgtaacggatgactggcactggccggtgccttcgcgttttgatatctccgggatgaccacccagggctatcacgataaagtcatcatccccatcaccctcgacggtgcggcgggggatgcgctcgacgggacgcttaccctttccacgtgcagtaatgtctgtctgctgacggactataagctgcatcttgattttaaccagccggtggatgagggattcagccacgcgtttgaacgcgcgatgcaggccattcccgcgacatctggcgtgtccgcagacctgtcagcctggttatcagacgacaagctgatcattacgggaaccacgcaagggcaatgggacaagccggggatctattttgacccgctggaaggcgacattcttcccggtgaaccgaccctcaaagccgacggcaatcagcttcgggtaacggtgcccgtgaccgatgagtggggagataaacccacttcgctgcagggaaaagcgctgtcgtttgtgcttaccaatggcgataaagcgcagcaaaccgtgatgaccgtcggggcaacgcccgcggaaccgtcagcggcgggcgtgtctgagggaaccagcaaaatggtgctctttgcgctattgggcgggttgatcctgaacctgatgccttgcgtgctgccggtgatgggcatgaagctcaacagcgtgctccatgcgggctcagacaggcggatgatcaggctccgttttctggctaccagtgccgggatcctggtctcctttatgctgctggccgcaatggtaaccgcgcttaagctgaccggtgcctcgctgggctggggtattcagttccagaatccgtggtttattggcctgatggtcgcggtgaccttcctcttcgcactcaatctgttcggggcgtttgagatgctgctgccttctgccgccgcaggacggctggcaacggcagggggaacggggcttgccggcagtttctgcgaagggatgtttgccacgctgctggccacaccatgttctgcgccgttcctcggcacggcggtggcctttgcccttggcgcaccgctgcattccctgtggcttatcttcctgatgctcggcgtggggatgagtttgccttggttgttcgttgcactggttccaaaaaccgccatgctgctgccaaaacccggtcgctggatgaacggcctgaagattattcttggcctgatgatgctggcttccagcctgtggctggtgacgttgctgagcccgcatctgggtgaggcggtgagccagagcgtgatgttagtgcttatcgtcgtcgctatcgcactgcttgcgatgaccgggcagaaaacctcgccactgttctggtgcgtggtgatcgcgctgtcagcctttggcgggtaccagctgcgcgggttgcttacctcaccgcctgtaagaaacactgcaagcgtcgctcaggcaatcccgtggcaaccgctaagtgaagacgctattcagggggcccttgcgcagggcaaacgggtcttcgtggatatctccgcggactggtgtgttacctgcaaggtaaacgagcatcgggtgttgaatcagcctgacgttattgccgcgcttagccagccggacgtggtggcgctgcgtggcgactggagcaagccttcagcgtttatcgccgaattccttgaaaagcgaaaccgttacgccatcccgttcaacgaggtctacggcccgggcttccctgagggggagatgctttcgccgctgctggataaagacacgcttattgccaccctgaacaacgctaaaggctaa

SEQ ID NO: 123347 - DNA, 372 bp, Enterobacter cloacae
atgcgcaaccgtcagcttctgggaaaatggcttttgataatcacgtgtctggcgatggctatttgcctggtgcagcgtgcggtttatctcaaccattttttgcagggactggatccgcaaacgaccctgattgctgatgccccggctcaaaccaacgacgctgagccgtccgggccatcgccgtgtcagttaggcgcacactcgctgctttgtgctcagccactgttctttgatggtgcgctaccggcgattatcatcttcttcgcgctacttcagttgtttacgcaagggcgggcatgcgttccgagagaacagcccgttcaggcaccgtctccccgaatacacctcaaaaactgcgttttccgtgaatga

SEQ ID NO: 123348 - DNA, 561 bp, Enterobacter cloacae
atgaaaaccgggctggcgggagagtcattgctgatgtcggcgcttaatgcctgccgcgcccggctgaaagcctttatccgcggacgaacgtccgtgcgcgatgatgccgacgatattttgcaggaagtcacctatcagctgatgaaagtggagcagccggtcgaaaacgtcgccgcctggctgtttcgcgcggcacgtaatgagatgaccgaccgggcacgaaaaaaacgagaggtctctctttcaggatattttaccggggatgatgatgaggacttccccgaagatgaactggcggaaaccctgttcggtgtcccgcatacgccggaggaggagtaccttaaaacgctgctgtgggaagaactgggtcaggcgctgtgtgaacttccgccgcctcagcgcgaggtttttgaaaaaacggagctccagagctacagcattaaaatgctggcagaggaaaccggggccagcgagcaggcgctgttatcgcgtaagcacaaggcggtgcttttcctgcgcacgcgactgcgggacgtctatgatgcgctgaccggtgactaa

SEQ ID NO: 123349 - DNA, 420 bp, Enterobacter cloacae
atgagagatttcgatatgcacggaagagggcacggacgcgggtttggccgccaccgtatgggtaaagggctggtgataggcgcggtaatcgtccttgtgcttggactggtggtcatgaccctgtggaatgccttactcccggccattcttggcgtgaaagccatcggtttctggcaggcgctggggattctggtattaagccggatcctgttcggcgggctgggcttccgcccggggatgttcggcgcgcaccgtcgtatgcacgaacgctggatgaacatgacccccgagcagcgtgaggcgtttattcagcagcgtcgcgaaggctttggtcgccatggtcgcgggcattgcggctggcacggtcatcgcgaagataaacgcgacgacagcacgccgaaaacgccggaagcagagtga

SEQ ID NO: 123350 - DNA, 387 bp, Enterobacter cloacae
atggcaattgttgaccttaaccagctcgccgcgcctgacgtcgtggaagaactggactatgaaaccatcctgagcgagcgaaaggcgacgctcgtctcgctgcacccggaagaccagcaggacgcgatcgcgcgcacgctgtcgcttgagtccgagccgctggtgaagctgctgcaggaaaacgcctaccgggaagttatctggcgacagcgcgtcaacgaggccgcgcgtgcggtcatgctggcctacgccaccggcgcagacctcgaccagataggcggaaattacaacgttgagcgcctacagacgacacgacgtttccgcccatgccagctcactgaccaccgtctgcgcattcagcaggccttagagggactaattagttaa

SEQ ID NO: 123351 - DNA, 747 bp, Enterobacter cloacae
atggcaacgcactttgcaagagggatactgacagagggacatctcgtatcggccagaatttcatccgcgtgtcaccaggaagcacgtaaactgccggagcatcgccggacgcggtttttggcatcccgcgcgcttctcgctgagctgatgttcatgctgtacggcaccagtgaactgccggatatcctcacccaacctgaaggccgcccggtctttgccgacccggagctgccgcgtttctccattgcctacacgggcaatatcattggcgtcgcgctcaccactgaaggggattgcggcctggacatggagcttcagcacgcaacccgcggcttccacggcgcgaacccacacgatgactacccgctttccagtaatgaaaagctgtgggtgcgtaaccagaacgatcccatcgaagccagagctcagctcattaccttacgccagagcattcgaaagctctgtggctgtgcatcagacgacgccagcctgctgcaattgcttcccggctccggacgtctgcgttccgctaaagccacgctggtagaggcgctcagcgatgccgaagacgtactgatttggtccatcgcggtgacccccgccatcgaacgattgaaaatctgggaatttgacagtcaacacggatggagtagccttccggatgtgcccgagcgagccaacgaacccgccgcgcgcctgatgagattaaccagtttaccggcagaaaaagcatatacccttagctga

SEQ ID NO: 123352 - DNA, 1026 bp, Enterobacter cloacae
atgacagagatgatgcaacgctggtcaatggacgcccttgggcgtgaaaacctcagactcactcaggcgcctgttccccagccgggcccgggtgaagtgcgcgtgcgggtgaacgctgttgcgctcaactatcgcgataaaatggtcatcgaaggcaacatgccgatcgcgctcaccttcccgtttactccggcatctgacatggcaggcgtggtggacagtacgggtgaaggcgttacccgctttaaacccggtgctcgcgtcatctccaccttctctccggagtgggtcgacggtaaaccgaaaggcgacgcccgcaatttgccctaccagacgctgggcggttacttccaggggatgctgtctgaatacgtgatcatgcgtgaaaactggctggtggccgccccggaaacgctggatgacgcagaggccagcaccttaccctgcgcggggcttaccgcatggtttgcgctggtggagcgcggacagttacgtgccggacagtcggtgctggtgcaaggcacaggcggtgtcgcaatcttcgcgttgcaaatcgccaaagcacacggtgcagaagtttttgtgacgtcgggcagtgatgaaaaactggcgctggctaaaacgctcggtgccgatcggggcatcaaccggcttaaagggaactgggctgacgagatttacgcgctgacgcaggatcgcggtatcgaccatattattgaaaccgttggcggggagaacctgagacattccctgcgggccgttgccgttcatgggcgcatatccgtcattggcgtgttggccgggagtgaaatctcgctgcctgccagcgaactcttgctgaaatcaccggtgattcaggggattggtgtcgggcaccgccgtgcgctggaagattttgtccgcgcagtcgatgtcacggggctgaaaccggtgattgaacaccgctaccgttttaaccagcttgaagaggcgcttgtacacctcgaccgcggtgcttttggcaaaatagtcctcacccgcgagtaa

SEQ ID NO: 123353 - DNA, 1230 bp, Enterobacter cloacae
atgaaacaaatcaccttcgcctcccgtcatcaccagcttaccaatatcaatacctggacgccggacagccagtggctggcctacgatgtgcgtccgtccggcgcatcgttcaccggtgaaaccattgagcgggtcaatgttattacgggtgacgtcgaggtgatctatcgcgccagtcacggtgcgcatgttggcgtggtgaccgttcatccgcagcaggacaaatatgtctttatccacggcccggaaaacccggatgcagactggcactacgattttcatcatcgtcagggcgtggttgtacacaacggtcaggtgagtaacctggatgccatggatatcacgccgccttataccgcaggcgcgctgcgtggcggcagccacgtgcacgtttttagccctgacggacagttcgtgagctttacctacaacgaccatgtattgcatgagcgtgacccgaagctcgatttacgtaacgtcggcgtcgcagcgccttttggcccggtgacgccgcaagggacgcatccacgtgaatattccggcaccttctggagcgtgctggtgagccgcacgacgcccgcgcctaagcccggcagcgatgagatcaaccgagcctatgaagagggctgggtgggtaatgacaggctggcgtttatcggcgataccgtgtctgcgacaggcgagaaagtgccagaactgtttattgtggatctgcccaacgacgagcagggatggaaacgcgcgggcgatgcgccgctgcaggggactcctgagacgctgcctgcgcccccggcgggtgtcatgcagcgccggctgacctttacccaccagcgggcattcccggggctggtaaacgtgccgcgtcactgggtgcgctgtaacccgcaggggacgcagattgcgtttctgatgcgtgatgataagggcattgtgcagctgtggcttatcgctcctgaaggcggcgaaccacgccagttgacgcataacgaaagtgacattcagtcggcatttacctggcaccctgccggtcaccgtcttggatttgtgctggaagagcggattgcctgctgtgatgcgcaaaccggagaggtgacgtttttgacgttcgatcacggcaatccaccgtctggtgatgcggtcgtgttttccccggacgggcgttttattgcatggatggaagagacagaaggtttccgtcagctttggctaacggaaaccgggcagcgttaa

SEQ ID NO: 123354 - DNA, 927 bp, Enterobacter cloacae
atgaatgacgcaaatgaaggtcgaaaccggctgttaaacggctggcagctgtcaaaaatgtatacgtttgaagtggccgcccgccacgagtccttcgcgctggcggcggaggagctgtcgctcagccccagtgcggtgagtcaccgtatcaacctgctggaagaggagttagggatagcgctgtttgtccgctcccaccgtaaagtggagctgacgcaggaggggaaacgcgtctactggacgctgaaatcgtcgctggatacgttgaaccaggagatcctggatatcaagaaccaggcgctgtccggcacgttgacggtttactctcgcccgtcgattgcccagtgctggctggtgcctatgctcggggatttcacccgacgttatcccgcgatctcgctgaccatcctgaccggcaatgaaaacgtcaacatgcagcgaaccggtatcgatctggcgctctatttcgacgatacgccgccagccaatttgacgcatcatttcctgatggacgaggcgattttacccgtctgctcgccggcgtatgcccgggaacatgacctgctgaaaaatcccggccacctcagccactgtacgctcctgcacgatcgccaggcctggagcaatgattccggtaccgatgaatggctcagctgggcggcgcattttgcagtgaacatgccatcatcatcgggcattggcttcgatcgctctgatttagcgattgtcgcggcaatgaaccatgtcggggtcgcgatggggcgaaaacggctggtacaaaagcggctcgaacgcggtgagttgattgcaccgtttggggagaaaacgcttaaatgccatcagcattactacatgtcgaccctgccaggacgacagtggccgaaaattgatgcctttattagctggctgagagaactggctggctga

SEQ ID NO: 123355 - DNA, 1089 bp, Enterobacter cloacae
gtgttaaagcctttgattgccactgcgttactgttctcttccggctgggtgattgccgctgagccaccgctgacggctgcgctttatgcgcaaaagctgggcgtggggatggacgtagactgggcgcgcaccgagcgcggcattcgggagttcgatccgctggtggttcgcgattttcgtgcgaagggtatcagccatgtgcgtatccgcgtggccgatgaaccgacggaagcgcggctgattcatctgcgtaagctggtggaagcctgcgagcaatacggggtgatcccgattatcgcttatcaggccgatgaatataaaaacgacccgaaagccgagacggaaaaagaggtgattaactggtggattgccgtggcgcactacttcggccaaagctatcccctgctgggttttgacctgatttatgaaccggcggacaagctcaaccataacgccgcgtcgcttaaccgggtttacgagaaaaccgtcaaagacattcatgcaattgatgctaatcgcatgatcttcatcgcgccacgtctgcgggctgcgccagaggacctctccagcctgaaactcccggcgcacagccaaaattatctgctggcggagtggcacattttcccgtggggtccgctaaagagtaacggtaaatatccgtggacgtccgggacggtggcggagaaagcggctatccataatcgtattgcgaccgcgctgcactggcagcaaaaaaccggtcacgtcagctgggtgggcggctggggcgtgggtgaatcaaatcacttcaccccaaccgtatcgcaaatggcgtttgcctcgtttatggcctgcgaactgcaaaaggccaaagttccctacgctatcaacgcggatattcagttttacgacggggaagagggcgcctggcgtccagcgcaagagccgctgctgcaggccatgatcgcgcctgtttgtgaaaagcccggcgagaagccgggccatcatgcggttaaaccggctgctcgtgatggggaacacgcgacgccagcggcagccagcacagtaaaatcagcagccccatcagcgtcatcagcaaccccagactag

SEQ ID NO: 123356 - DNA, 1506 bp, Enterobacter cloacae
atgaacccgctgttttcacggctgatcgccgttgctgccagtttttccattttctccgccgcctggttctgcctgtggagcatcagcctgcatctggttgaacgcccggagctggcggtgctgcttttcccgtttggcctgcgtctgggattgatgctgcaatgcccgcgcggtttctggccggtactgctgggcgccgaatggctgatgctggtctggctggcgcaggaggtggcgctggcgcacttgcctttactggtgacgggcagcgtactcacgctgatcccggtggcgctgatctcccgttatcgtcaccagcgcgactggcgcacgctgctgcgtcagggggctgcgctgattgccgccgcgctgttgcagtccctgccgtggaccggcgaggaggagatgcttaacgcccttctgctgacgctgaccggcggtctgacgctggctcccacctgcctggttatctggcactacctcaccagtaccgtctggcagccgctcggaccggcgctggtctctcagccggtaaactggcgcgcccggcatcttatctggtatctgctgctgtttgcgatcagcctgtggctgcagcttggcctgcccgatgagctgtcgcgctttaccccgttttgcctggcgttgccgattattgccctcgcgtggcactacggctggcagggcgcgctgattgccaccctgatgaacgctatcgcgctgattgccagccagacctggcacgatcaccccgtcgatttactgctctccctgctggcccagagcctgaccgggctgctgctgggggccgggattcagcgcctgcgtgaacttaaccactcattacaaaccgagctggcgcgtaatcgccgtctggcagaacgcctgctggaaacggaagagagcgtccggcaggaggtggcccgcgagttgcacgatgacatcggccagaccattaccgccattcgcactcaggcaggcatcgttcagcgtctggcggccgaaaacgctggcgtaaagcagggcggggcacatatcgaacagctctctcttggcgtgtatgactcggtgcggcgactgcttggcaggctgcgaccgcgccagctggacgatcttacgcttgagcaggcggtacggtctctgatgcgcgagatggagctggaaagccgcgggatcgtcagccatcttgactggcgcatcaatgaatctttgctgagcgagggccagcgcgtcacgctgttccgcgtctgtcaggaagggctgaataatattgttaagcacgccagcgccagcgcggtaacgctgcagggatggcaacaggatgaacgcctgatgctggtgattgaagatgatggctgcggtctgccgccgggctccggccagctgggttttggcctggcgggcatgcgtgagcgcgtcaaggcgttgggtggcaccctgaccatctcctgcacccacggcacgcgcgtcagcgtcagtttaccgctgaggagtcagcatgtttaa

SEQ ID NO: 123357 - DNA, 1029 bp, Enterobacter cloacae
atgagaagattcaccatggcgctcgggctgttagtcagcgccttcgccgccagcgctgccgatatgtcccggggcgcagataatttctacaaaagcgataaggttacgcagcagaaggtgacctttaaaaaccagtatcagatgaacgtcgtcggcaatctgtataggccaaaagaggtggataaaaacgccagactgccggcaatcgtggtcggccatccgatgggcgcggtgaaagagcaaagcgccagtctctatgcgcaaaagctcgcggaacagggctttgtcaccctggcgattgatctctcattctggggggaaagcgaaggtaaaccggggcatctgatctcaccagaaatctattccgatgatttcagcgcggccgtggattatctgagcactcagtcttttgtcgatccacagcgcatcggtgcgctgggcatttgcggcagcggcagcttcgttattagcgcggcgaaaattgacccgcgcatgaaagcgatcgccaccgtcagcatgtatgacatgggctccgccttccgcaacggcctcaaccattccgtgacggttgaacagcgtaaagcgatgattgcctctgccgctgagcagcgtctgaaagagtatcagggtgcagagacagcctacattcccgggacggtaaataagctggatgattctacgccggctatccagcgtgagttcttcgatttctatcgcaccgaacgcggcgggtacacgccacagggcgagaaagaggcgctgacgacgaaaccgatgatgagcagcatcggtaagtttatgaacttctatccgttcaacgatatcgaaaccatttcaccgcgtccgatgctgtttatcacgggtgataaagcgcattcgaaagagtttagcgaagacgcctataaacgcgccggtgaaccgaaagagctgtatatcgtgccgaatgcaggccacgttgacctgtatgaccgcacggatctgatcccgtttgcaaaactggcctcgttctttaaagccaacctgaaataa

SEQ ID NO: 123358 - DNA, 1197 bp, Enterobacter cloacae
atgtccgctatggtgaacgaaacatcagcgcgccagtcccgtgcctgctggagcggcgtgctggcaatgaccctctgcgcttttacgctggtcgcctcagaatttatgcctgtaagtctgctgacgcccgtctcgcgggatctcgccgtcagtgaaggcctggcgggcctcgggatcgcgatatccggcgcgctggccgtattgaccagcctgtttctctcttctcttgcgggaggcattaaccgcaaatcgctgctgctgggcctgacggcattgatggccgtctccggtctgattatcgccgtggctgagagctatcccctttatatgctgggacgcgcactgcttggcgtggccattggcggcttctggtcgctctccgcggcgaccgcaattcgccttgtgccaccgcatcaggttcaacgtgcgctggccatttttaacggtggcaacgccctggcgaccgtcgttgcggctccgctcggcagctggctgggggcgacaatcggctggcgcggtgccttttactgcctggtgcccgtgagcctgctcgcgtttatctggcagtggttcagcctgccttccatgtccgtggaaaagcgcaccgcgtcgtccaccagcgccttcggcctgctgaaaaaccctctggtggcaaaaggaatggtcgcgtgcggcgtctttttcatggggcagttcgcgctgtttacctacgtgcgtccgttccttgaaaccgtgactttcgccagcgcgacgcagttatcgttaatcctgctggtgattggcgtggcgggttttatcggcaccctgctgatcggcacgtttctgcgccgcggattttacaccacgctggtcgccattcccgtggtaatggcgctgattgccgcggcactgatggccttcggccatcaccttgccgccgtcaccgccctgctcggcctctggggactggtcgcgacggccgcccccgtcggctggtggacctgggttgccagaacgcttcctgaaaatgccgaagcgggtggcggactgatggtggcaatggtgcagctctccattgcgctcggctccacgctcggtggcctggcctttgaccacagcggctggcaaagcacctttgcactcagcggtgtactgcttatcgccgctgccatgttcacgttttacacctcacacaacgacacacttcacaggagttaa

SEQ ID NO: 123359 - DNA, 888 bp, Enterobacter cloacae
atgaagcgtaacctgaacgatctttttgcttttgtcaccgtggcgcgtgagggcagttttacccgtgccgcggcacagttgggcgtgacccagcccgcgttaagccaggctataaccgggctggagaaccggatgcagatccgcctgctaactcgcaccacccgcagcgtttcccccaccgcagccggtgaacgcttgcttaacgcgattggcaaccgtttcgatgaaatcgaagcggagctggacatgttgacggagcttcgcgacaagcccgccggcacggtgaggatcacctgtggacccgatgtgttatcgcgtactctgttacctaagttgacgccacttttgcggcaataccccgacattcacatcgagttcgacgccaatcacggttttcgcgatatcgttgccgaccgcttcgatgcgggcgttcgtatgggagataccatcgataaagacatgattgcgttgccgataggcccgcagttgcgtatggccgcggtcgcctcgccggactacttcgcccgtcatcctgttccgcaaacgccgcatgagctgacgcagcaccagtgcattaaccagaggatgataaaatccggcgggatttacgtctgggattttgatcaggacggtggcgatctgaacgtgcgcgtgaatggccagctgacctttaatacttcctggcatattgtcgaagctgccctggcgggattcgggattgctttcctgcccgaagacgagtttggcgatcatattgctgaaggccggttaattcgcgtgctggaaccctggtgtctgcccttcccggggtattatctctactacccgagccgaaagcagccgtcgccggccttttcgctggtggtggatgcgttgcggatgcgataa

SEQ ID NO: 123360 - DNA, 780 bp, Enterobacter cloacae
atgaacatcactcagattcgtaatgccactcagctgattacctacgccgggaaacgctttttaatcgacccaatgctggccccgaagggcgcttatccgggcttccccggcacggcgcatgcggagatccgcaacccgatggtcgagctacccgttgacgtcaacacgttgctggaggcggatgcggtgatcgtcacccatacccatgacgatcactgggatcgcgccgcagtggaactgatcggcaaagataaacctgtctttgtgcagaacgacagcgacgccgcgctgctgcgcagccagggatttacccacctgacggtgatgaccgaggaaacggcgtttggcgatatccggatcgcgaaaacccgcggcggccagcacggtaccgatcgtgcttacgccgtgccggagctggcggaacggctgggtgaagcctgtggcgtggttttacgtcatcctgatgagaagacgctctacattgtcggggataccatctggcgtgatgaagtggcagccgatctgcaaaagcatcagccggatgtggtggtgcttaacgcgggctatgctcacgtcatcgggtttgggccgattatcatgggccaggaagatgtgctcaacgtccacttcctgctgccgcaggcgaaaattgtggcgacccatatggaggccatcaaccactgcctgttgacccgccatgcgctgcgtgagtacgttgacgcgaacctgattggtgatgcggtgagcattcccgaggatggtgaaaccgttatattctga

SEQ ID NO: 123361 - DNA, 1047 bp, Enterobacter cloacae
atgaactggcagccttttcgcggcgacgcaccggaaaatatgaccattttcagtgcgtcatttccggatattagcgaccagtggccgatgaaggacgacactgcccgtgagatcaattcgattaaccgggcgttgaaagccgacccggcgcttcgtcctccgttgattgaatacgaagaggggggacaggccgtgcttgtcccacagaaccgttattccgggcaagcctaccgcaatcgtccggcgctcaccgcgtggcgtacccggctggttccctctgcgctggcgctttttgtggtgcaaaacccgctggaggagcgcctgccagacggaacccgaatggacagcgatagccgccagtggtttatccatgcgaacgatgccattggtgtgcgctcccgtgcaaaagtactggctgcgatggtggataaatacatccgcaacgggaacgataacaattgggtgagcctggcaagcggggctgcaatccccgtgctggaggcgctgcgcgaggcgaagctcgacggccagcaggtgtatctgacgctggtggataaagaccctgtggcgctcagttgggccgaaaccatggcggcgcaggaaggcattatcgtgggtgaacagctgaccctgctcaggcgcaacttgctccatacgctggtgcgtaacgaagatttattgcatgagctgggcgagcatcaggccgaactggtggatgcgctgggaattttcgactatttcaacgatgccgatgcggtgatttttctccagcgtgcgctgcggctgataaagcccggcggggcggtgattgtctcgaatatgctggccagcagcccacaaatcgattttattttgcgctgtatcggctgggaggatatttatccgcggacgctccggcagctgcaggatattcatatcgcggcaggcgtgccggtggaaaatgtcaccgtggtggtcccgaaagacggggtatatgcagtgatggagattaaggtgggggataacaaaccgcacggtcagttccctctccctgagggagagggctag

SEQ ID NO: 123362 - DNA, 156 bp, Enterobacter cloacae
atgaagaccttaaatgaagtaataaactctcgaaactgtgaaagtcgagagcgtatcaaggaaatggcccggaagttggtgcaggagactggtcagcagatagagcatgaaaagcaagaatccccaacagacattgagaataaagaaaccagctaa

SEQ ID NO: 123363 - DNA, 450 bp, Enterobacter cloacae
atgatccccctcatgaaaatcgaaaccgcacacccctcacacttcgaacgcctggtcgcgatctgggagtcttccgttcgtgccacccatcactttttacaggaaagcaatattgcggccctgcgcccgttattgctcaatgcctatctgcccaatctcaaggttatgattgcccgcgatgaagcgggtgttattcatggctttttaggcgtggatgaaaaccgcattgaaatgctgtttgtggatgatgcgagccggggaaaaggcgtagggaaattgctgctgaactatgccattgcgcattttggtgcgaatgaagtggatgtaaacgagcaaaacccgcagggcgttgcgttttatcagcatatggggtttgtggaggtggggcgctcagaacgggacggacaggggaatgcatttccgttgctgcatatgcggttgggtgagtga

SEQ ID NO: 123364 - DNA, 1671 bp, Enterobacter cloacae
atgtggcgatggatgagcggattaatgctgttgtggtgcggctatggtgccgcggtgtgtcccgtgtggtctcaggcaaaagcagagaaagagattgcgacattgagtgcgcaagtcaaacgctgggatgatgcctactggaagcagggcatgagcgaggtgaatgacgacgtctatgaccagctcaatggccgtttaaagcagtggcagcgctgctttggcgatataccttctgaggaggccttaccggttctaacggggagcgtaagacatcctgttgcccatacgggagtgcataaagcgggtagtaaagaagagctacgccagtggatgcgtggtcgtgacactctctggatgcagccaaaagtcgacggggtagccgtgacgctggtgtatcgcgacggaaagttaacccaggctatcagtcgtggtgatgggcttaaaggtgaagactggactgcacaagtgtatttaattcccgcagtgcccaaaaaagtgaccggagcgctggccaacagcgtcttacagggagagcttttttggttacgcgacaaccatcttcagcgacagatggggggaatgaacgcacgggcaaaagtggcgggcgcgatgatgcggcaaaaggacagtccacttctgagccagacagggatatttatctgggcctggccggatgggccgaaagtgatgtcgagtgcgctgtctgagttatctaaagccggcttttccctgacggcccgttataccctgcctgtacagactgttgatgctgtcgagaaacagcgctcgacgtggcacgacacggcattaccctttgccacggacggcattgtggtgcggtccgcggatgctcctcccggcgaaaactggttgcccggagaaggcagctgggtcgtcgcatggaaataccccccggtcgcacagatcgccgaagtaagagatattcattttgccgtggggcgcacgggaaaaatctcggtcgtggcggcgctggtccctgtcctgctggatgataagcaggtacaacgggtcagtcttgggtccgttgagcgctggcaaaggctggatattgcgacgggtgatcagatacaggtcagtctggccgggcagggtatcccgcggttcgataaggtggtctggcggggggaagagagacaaaagcccacacccccggcctcgcattatcatgcgcagagctgtttttacgcctcgccggcgtgtatggagcagttctttgcccgcctgaagtggctcagttcaaagcacgtgctgaatattgaaggagtcggtgagtcaggctggcgggcgctgcatcaggcgcatcattttgaacatatcttctcatggctgacattaacgcaggcgcagctggagtctaccccggggttttccgcagcacgcgggctggcgctctggcatcgctttaatctggtacgtgagcgaccctttattcgttggatcatggcattgggtgttccgctgacgcaggcctcgctaaacgctatgggagacctgacgtggcagaaaatgcgtgagcgtaacgcagcagactggcaggcgcttcccggcacaggaaaggagaaagcccggcagcttgttgcgtttattcatgatcctggcattgccggcctggttgcctggctcggcaaacagggagtgcaaggattctga

SEQ ID NO: 123365 - DNA, 1212 bp, Enterobacter cloacae
atggaaaaaataaaacttcgactttatcaactgacactttttctgagcttcatctctttgatgcttgcattagtcaattcagggaagcaacgtgagtttttctatattgcaatttatatcgctattctcggtttagcgtttgaatataaaaaaattacgctaaaaccattctcaatagcactacccatacttcttattggattactgaattttgtctggtatatggtctacgagtaccatagcgaaggcttaaacatgtacagcgattatctcggtgcaagtaaaaaattacttttggcgagtattctcgttttctatattgaccgttttaaagattatatcgacagagaaaactttaagaaatattttcttttagcgactgcgacaggatttgctctcgcaaccggttatggattgtggcaggcatcgcaaggtatggctcgtgttgaaatggcaatcaatcgagccacggtctctgcctatgtttactccgtgctgtcacttgcctttgtgtacagcctttacctccagcaaaatgtaaagctctatgttctggccggttttaccattttggtctcgttctttgttattcttttaaccggaacgcgtgctgcaatggggctctatttacttcttgctatcgtcatgacgctttatcatttcagaagaattcatctgaaatcgactctgatctttttatgtattgtggcgggtattgtagtcgtaagctacaagcctctgatttcacctaagatcatgcaaactcaaactgaactagagaactatgagaaaggcaacgatcgcacttctctcggcgcacgtttttccatgtggactatcggtattcaaaatggtcttgcgcatccgttaggtcagtcagtcgaagagagagaaacatggacaaaaaaatatattcaaaatgggcatccgcatctcgcaacagctctcgtttacattaaagtgcatctacataatgaattcattgaaaagtattcattacaaggaatacctggcctggcaatactgctctttttcttcatgtcgatgattggctacgccatcagaaacaaaaatgcactgctaatgactgccatgcttctattattgctctatggcctgacagacgtcatattgttgagttcagaggcattgatattctttatgatcctgtttgctctgagtacacctttctctcagacaaaacaacgatga

SEQ ID NO: 123366 - DNA, 909 bp, Enterobacter cloacae
atggcttttctaagcatcattattgccgcgcataatgccgaagatacccttcatgccactttagaaagcctgcagaatgcgattggcagtgcaggcgatgctgttgagatcatcatctttaatgacagctcagatgatggcacacaggatattattgaagcgtggttaccaaaattacctcatgcaacaacgcgatgtgtggattaccgtaacgtgggtcgggtccgaaacagcgctgttacgctggcatcaggggactatattactatgctggacagcgatgatcggctaaaaccgggcagcattcaggatgccgtggattttctgcaagcacagcgtccagatatgctactgacgcgcttacgtgaaattcgtgatatcaaaaagatcacctcaacctggcagggtttcgaccctgtggcaatctcgcaacaagacgcgatctcccgttttttgcgacataaagactttcaggcacatctgatcggccaatttattcacaaagacctgtataaagctaaccctataccttcgatggtctgttacgaagatttcgctgtgttccccggaatgattatgcaagcgcataaaatattttatcagcgtcagggacattattattacatcaaacgtcatggaagcttatccagcgaacttgatgccagcaaagtctcttcacttgttgattgcacgcttcgcatggaagaaaccttcccgcgcagttttaaacatctcatcaattgtcactggtttgatatatacagtaaccataaaaagtatctctcgacgccacacttaagtttggtaaaagatcgggtgagccagctttattcgctttcgttctttatggacactcatattcggtttagttataagaaaagggttattgaggcattatggaaaaaataa

SEQ ID NO: 123367 - DNA, 1206 bp, Enterobacter cloacae
atgctgcaacgacacaaaatactgctcctcgataccggcaaagagtggggcggtggcaccaacagcatgctcgaacttctgaagcggattgaccgcgagaagtttgatatcacctgctgtttttacagtgattacagccgtgccgaagggcaaacgatcggccaggtgctggacagtatcggcattcccttaattgtgatccctcagccacggcagcccgtatgggcgaaacttgcgaaagagctgggccgcagtctccttttcttctcgcgccgggggcgtaaggcctttacgcgccatatcgatacgctctggcgtattcggcccaatgttcgcagaattgcaacgctgctcagtgaaggcggattcgatacgctgtatatgaacaatcagcctggctcaaatgaagaagggtatttagctggtgcaaaacagcatgtgcggttaattcagcactgccgcatcgaacctgtcatgacgccgccgctggtcaggctggttaatgaccatgccacaaaaatcattgcggtctcccacggcgttgagcgtgttttacttcagaatggggttcgccctgagctctgcacaaccgtaaacaatgcaatcgacatccaccagcccctgccagaccgacgtgcaatgcgccagcggctgaacattgatgacgatactttcgttttcggtagcgtggggtcactgatcccccgcaaagcaaaccatcatactctggaggcgctggcgcagttcagtcagaagaaccctgacgcaaaatggaagatggtgttagtcggtgaaggtggcgaacgcgacgcattaattgctcaggccaccgcattgggtattgagaagcaggtcatcttcacgggattccagaataccccctttgattaccttgcgacatttgacgcttttattttagcctcacagagcgaaggattacctcgcgtcgtgctggaagccatgttgcttaatatccctgtcattggctcgcaggtgaccgggacagcggaattaattgacccagggtcgacgggactcttgttcccctggggcgacgtttcacagcttgccgcgcatcttgaaagcatctggaaagatgccgatctgcgcgcacgcctggctttggctgcccgtcagaatgtctgccgaacctatgccattgaacagtatgttagcggcgtcgaagcggtacttggcgcaaaataa

SEQ ID NO: 123368 - DNA, 1656 bp, Enterobacter cloacae
atgagcctctggcaacaaaactacgatccggctggcaatatctggctgtcgagcctgatcgcatcgcttccgatcctgttcttcttctttgcgctgattaagctcaagctgaagggatacctggccgcgacgtacaccgttgccattgcgctaatggtggcactgttcttctataaaatgccggtcgatcgcgcgctggcctccgtcgtctatggtttcttctacggcctgtggccgattgcgtggatcatcatcgcggcggtctttgtctacaaaatctcggtgaaaaccgggcagttcgacattatccgctcatcgatactttccattactccggaccagcgtctgcagatgctgattgtcggtttctccttcggggcttttctggaaggggcggccgggtttggcgcaccggttgccatcaccgcggcgctgttagtcgggctggggttcaacccgctttacgctgcaggtctttgtctgatcgttaacaccgcgccggtggcgtttggtgcgatggggatcccgattctggtcgccgggcaggtcaccggtctggacagctttgaaattggccagatggttggccgtcagctgccgttcctgaccatcatcgtgctgttctggatcatggcgattatggatggctggcgcggcgtgaaagagacatggcctgcggtggtcgtcgctggcggctcgtttgccattgcccagtatctcagctcgaatttcctcggccccgaattgccggacattatctcttcactggtgtcgctggtctgcctgacgctgttcctgaaacgctggcagccggtacgcatcttccgtttcgccgatatgggtgcttcacacgtcgatcaaaccctggcacgtaccggttataccgcgggacaaatcattcgcgcatggtctccgttcctgttcctgaccgccacggttacgctctggagtattccaccgtttaaggccctgttcgcacctggcggcgcactgtatgagatggtcattaacatctccgtgccgttcctcgacaagatggtcgcccgcatgccgcccgtggtgcacgccgccacgccgtatgccgcggtgtataaatttgactggttctcagcaaccggcaccgcaatcctgtttgccgctatcctgtctgtggtgtggttacgcatgaagccagcggctgcagtacagacttttgcggctaccattaaggagctgatgctgccgatctactccatcggcatggtgctggcgttcgcgtttatctcgaactattccggcctgtcatcgacactggcgcttgcgctggcgcataccggccacgccttcacgttcttctcgccgttcctcggctggctgggggtgttcctgaccggttcagatacctcatctaacgccctgtttgcggccctgcaggcgacggcagcccagcagattggcgtgtcggacatccttctggtggccgccaatactaccggcggcgtgaccggcaagatgatctcaccgcaatccatcgccattgcctgtgcggcggtgggactggtcggtaaagagtcggacctgttccgctttaccgtgaaacacagcctgatattcacctgtatggtcgggatgatcacgaccctgcaggcctatgtcttaacctggatgatcccatga

SEQ ID NO: 123369 - DNA, 363 bp, Enterobacter cloacae
atgaaagaagtcgaaaagaacgaaattaaacgcctgagcgaccgcctggatctgatccgccaccagatggctggtctctcgctggttgaatccgccgagaagtatgccgagctggagaaagagagtgagaagcttgaagcggaaatcgagcgtctgcgcgaagtcaaaggccagaagctgagcaacgaagcccaaaagctgttgagcatgccgcaccgtcgcgccatcacaaaaaaagagcaggccgacatgggcaagctgaagaaaagcgtccgtggcctggtggtggttcatcccatgaccgagcttggtcgcgaaatgggtctgaaagagatgacgggtttttgtaagaccgcgttttga

SEQ ID NO: 123370 - DNA, 357 bp, Enterobacter cloacae
atgtttctcaactattttgcgctgggcgtattgatttttgtatttctggttcttttttacggaatcatcgccatccatgatattccttataatatggccaaaaaacggaatcatccccatgcggatgccattcatacggcgggatggattagcctgtttacgctccatgcgatttggccgttcctgtggatttgggccacgttgtaccgcgaagatcgcggctgggggatgcagaaccacatctcaaaacctgatgaggtcccgggtatggatgctctgactaaacgtgtggccgaattagaacaaaaactggcagcggtacctcccacggctgacaagaacacgctggagcactaa

SEQ ID NO: 123371 - DNA, 1137 bp, Enterobacter cloacae
atggatctgctgattattttgacctatgtggcctttgcctgggccatttttaaaatattccgtattccggtaaaccagtggaccctcgcgaccgcaacattaggtggggtgtttattgtcgccgggcttatcctgttgatgaactataaccatccctatacttttacggcgcaaaaagcggttatttccattccgattacgccgcaggttactggggtagtgagtgaagttaccgataaaaataaccagctaattaaaaaaggcgaagtgttatttaaacttgatccgggccgctatcaggcgcgcgtcgacagactgcaggccgacctggtcaccgccacgcacaatatcgacaatctcaaagcgcagcttgcggaagcggtcgccaataccacgcgcgtgtccgctgaacgtgatcgcctgtataaagattaccagcgctacctgaaaggcagccgcgcaaaggttaacccgttctctgaaagcgatatcgacaacgcacggcaaaactatctggcgcaggatgcgctggtaaaaggctcggtggctgaacagacgcaaatacaaagtcagttagacagtatggtcaacggtgagcaatcccaggttgcttccctgcgtgctcagcttgctgaagcgaaatacaacctggatcagaccgtggtgcgtgcgccgagcaatggctatatcacgcaggtgctgattcgtccggggacctatgctgccgcgctgccgctgcgcccggtcatggtctttattcctgaacagaaacgccagattgtggcccagttccgtcagaactcgctgctgcgtctgaagccgggcgacgaagcggaagtggtcttcaacgcgctgccgggccaggtcttctccggcaagctcaccagtattctgccggtggtgccgggggggtcataccaggcgcagggtgcgttgcagtctctgaccgtgatccctggtaccgatggcgtattaggcactatcgagctggagccgaatgctgatgtcgatgcgctgcccgacggcatttatgctcaggtggcggtctattcggatcactttgctcacgtctcggtaatgcgtaaggtgctgctgcgtatgaccagctggatgcactacctctatctcgatcactaa

SEQ ID NO: 123372 - DNA, 963 bp, Enterobacter cloacae
atgaataagttccagctaaaaccacgcgagttaaaaattatttccgtcatcgcagccacccacagtattggcgatgccgcagccctgctgggcatggcacaggctaacgtcagtaaatacctttctgattttgaaacgcgtgtcggtcttaaggtatttgagcgcacgacccgtcaactggcgctaacccagtttggcgaagcgttactcccctacattgacgccacgctggataaaaatagccagctcattaatttcattgctgattataagcatgagaagcgcggaaaagtgaccatttacgccccaacgggtatcgtgatgtatctggcgcgacacgtgatccatcagattgaggacatcggtgatatccgtatctcgttaaaaacgtacaacctggatcgtaatgaatattccgaaggggtctcgttccccgatgattgcgatattctcattacctatgctcagccgaaagatgaaagtctggtcgccagtgtattaacgaaatattccgtcacggcatttgccactgaagaatatttgaaaaaccaccccttaactggacctgaagatttaatgaatcactcctgtattttaatagactcgatgctggtggatgaggcgaacatctggcgttttcgcgtccacggcagtgagaccgtatatgattacagagtgaccggaaattatatttgcgacaatacgcagacggcgctggaactggcccgaaataatctcggtattgtttttgcgccgaaagaaagcctgaaaaaagaacttaagagtggttctctggttccctgcttcccgcatcaggaagagtggtggctcgacctgacggcaatattccgcaaacgtgaataccagccctggcgcgtgcagtacattctggacggcgtactgaactgcctgcgtcagcaaattgctcaggctgcccaggggcaacctgagctggagggttag

SEQ ID NO: 123373 - DNA, 741 bp, Enterobacter cloacae
atgactattaaatacaatttactcatcgcagccacgttatttgcaacatcatctgcaatggctggtgacttttcacttggggcgggggctgtatttaatgagtcgccttataaaggttataacgaaaataccacggcggtaccgttaattagctatgaaggcgaccggttttatattcgccagaccaccggcggatggatcctgtggaaagacgaaaaaaatgaattcagtatgaccgcatcgtggatgccactgcgatttgatcctgaagataacgacgacgctcagatgaaacacctcgatgagcgtaaagcatcagcgtttctcggcggggcgtactaccgccatgaacactggggctcgctgaaagtggcggtctcgggtgatgcgatggatgagagcggcggcgtgatcggtgaaatctcatacttccgtccggttcggatggaacgtctgacgctgacgccatcggtaggtattttctacagcgacgaaagctataacgattactactacggtgtatccggcaatgagtctcgccgctcaggcctcaatgaatacaccgcaggtgatagctggacgccgtatgtgggtcttgcggctaaatatcagttaacccagaatctgtttatcaacgccagcgcggtctataccgtgttacctgacgacgtgaagaacagtccgatgatcgaccgcgaagacagtttcgcgctgatgaccggcatgtcctggcgtttctga

SEQ ID NO: 123374 - DNA, 1506 bp, Enterobacter cloacae
atgagtgaaaaagagcccttctggctgggtatcgattgtggcggaacgtatctaaaagccggtctgtacaccagccagggccaggaagtctgtattgagcgccgctcggttgccacactcagcccacacgcaggccacgctgagcgggatatgcaccaactctggcagcagtgccacgccaccgtcgccctgctgcttaaaaatgccgacattggcggcgcacaaatcaaaggcgtcgggatatcggctcagggtaaaggactgtttttactggacaagtatgaccagccgctcggcaacgccatgctctcctctgaccgccgggcgctggagattgtacagcgctggcagcaggacggtattcctgaaaagctttatccgcatacgcgccagacgctatggacggggcatcccgcctccctcctgcgctgggtgaaagagaatgaaccgcaccgttatcagcagattggctgtgtgatgatggcgcacgactacctgcgctggtgcctcaccggcgttaaagggtgtgaagagagcaacatctctgaatccaatctctacaacatgaacaccgggcagtacgatccgcagctcacacgctggctcggcatcgatgaaattgacggcgcactgccgccgatcgtcggttcagcagaaatttgcggggaaatcaccgctcaggccgccgccctgaccggtctcgcagcgggtacacccgttgtgggggggctgtttgatgtggtttccaccgcgatctgcgccgggttacatgacgacagcacgctcaacgccgtgatgggcacctgggctgtcaccagcgggatcgccaacggtataggccataacgagccgtatccctatgtgtatgggcgctacgttcatccgcagcactacatcgttcacgaagccagccccacctcgtccggtaacctcgaatggctgaccacacagtggggcaacatgtcattcgatgcgatcaaccaggccgtggccagcctgccgaaagccggaagcgatctgctcttcctgccgttcctctatggcagcaacgccgggctggagatgacctgcgggttttacggcatgcaggccctgcacacccgcgcgcatctgttgcaggcggtctatgaaggtgtggtcttcagccacatgacccatcttaaccgcatgctagcgcgcttcacgcacgtgcaggcattgcgcgtaaccggcggccctgcccattcggatgtgtggatgcaaatgctcgcggacgtcagcggtctggcaatagaactgccgcaggtcgaagagaccggctgttccggcgcggcgctggccgcgctggtgggtaccggcgtttatcccgatttacgcaccgcgcagcaggctgtcagacatcacattcgcgtcatcacacccgacaagcatgcccatgcggcctaccagcgcaagtatcagcgctaccagctactgatttcagcactacagggctatcacgcccatgttaaggagcacgacctatga

SEQ ID NO: 123375 - DNA, 927 bp, Enterobacter cloacae
atgactaacaccggttttataattggtgcgtacccctgcgcaccctcgtttcatcagcaaggggaacaagaagagcaggacttctggcgagcgctttccgacacgccagacattcgcgggctggagcaaccgtgtcttgaggatctccatccgttgggtgacgaatggctgttccgccatacgccgggggactggcaaatggtggttaccgcggtgatagaaaccatgcgccgccgcggcacaaatggcgcgtttggcctggcctctgccgatgaagaacagcgcaaagcctgcgttgactattaccgccatctgctgcgaaagattgatgccatcaatactcgctttccaggcaaaattatcgctctggagatgcaagccgcgccgcaggcgggaaacccgtctgttgaacaagctaccgctgcgttttcccgttctgtacgcgaaatcacctcatgggactggtcatgcgacctggtgcttgaacactgcgatgcaatgaccggccccgcgccacgcaaggggtttttgcccttagcgcaggtgcttgaggtggtgaaagaaacggatatcagcgtatgcatcaactgggcgcggtcggctatcgaaggacgcaataccgcgctgccgcctgaacatgttaaagccgcacttgaggccgggaagctgggcgcactgatgttctccgggacctccgttcgcggagcgtacggcgaatggcaggatctgcatgcgccattttccccgttctgtgccgacagtttaatgaccaccgaacaggtaaaagcactttttactgcggcgagcgccgcaacattgaaattctccggtattaaattactggaaataaatgctaatgctaacgtcagccatcgtatcgctattttgcgcgacggcattagtgaaatgaaaaaagcaacgcaataa

SEQ ID NO: 123376 - DNA, 468 bp, Enterobacter cloacae
atgattttaggacatatttcgcagccaaatccgtgtcgcctgccgcgggcgatagagaaagcactcgattttctgcgcaccacggatttcacggcgctggcacctggcgtggtggacattgacggacgtaacatttttgctcaggtgctcgacctcaccacccggacgtgggatgagaaccgtcccgaagtgcaccgtcgctatctggacatacagtttctggcatggggtgaagagaaaatcggtgtcgccattgataccggcaataacgaaataagcgaatcactgctggaacagcgggatattattttttatcacggcagcgaaaatgaatcatttatagaaatgacgcccggcacgtacgccatattttttccgcaggatgttcaccgtcctgcctgtattaaaaataaggtatcggcaattcgtaaaattgtggtgaaagtagcaatcagcgaaatagattaa

SEQ ID NO: 123377 - DNA, 456 bp, Enterobacter cloacae
atgaaccgatttatcctggctgatacggaaaaatgcattggctgtcgtacctgcgaagtggcctgcgtggtgtcgcatcagggaatgctttctgcaggcgcgtttacgccccgcattcgggtggtcaaaggcggtgcattcactacggctgtgggctgtcatcagtgtgaagatgccccttgtgccactgtttgtccgacacaggcgattcgccacaccgcgggtgcctggcgggtggagccggcgcgctgtattggctgtaaaagttgtgtggtagcgtgcccgtttggggcaatgcaggttcagcgagtggggaaccgcgttcaggcggtgaaatgtgatttgtgcgcagatcgcgaggctggacccgcctgtgtggaggcgtgcccaacccaagcgctgcgctgcgttgaccccgccagattacgcaccgaacggctgcataatctggcgtaa

SEQ ID NO: 123378 - DNA, 993 bp, Enterobacter cloacae
atgaagataaagaacctgtccctaactctctgcactacgctcctgcttgcaagctttgccggacatgccaaggaagtcaaaattggcatggcgattgacgatctgcgtcttgaacgctggcagaaagatcgcgatatttttgtgaaaaaagcggaatcacttggcgcgaatgtgtttgtgcaatccgcgaacggcaacgaagaaacgcaaatgtcgcaaattgagaatatgatcaaccgcggcgtcgatgtgctggtcattatcccttataacggccaggtattaagtaacgtcgttaaagaagccaaacaagaaggcataaaagtcttagcctatgaccgtatgattaataatgcggatatcgattattatatttcgttcgacaatgaaaaagtgggtgaattacaggctaaaagcctgatcgacaaagtacctcagggcaattatttcctgatgggcggctcgccggttgataacaacgccaagctgttccgcgaagggcaaatgaaagtcctgaagccgtatatcgacagcggtaagattaaagtggtcggcgatcagtgggcggatggctggctgccagaaaacgcgctgaaaatcatggaaaacgccttaaccgccaacaacaacaaaatcgatgctgtcgtcgcatccaacgatgccaccgcagggggcgcaatccaggcactcagcgcccaggggctggcaggaaaagtggctatttcgggtcaggatgccgacctcgcgggcgtcaaacgcatcatggcaggcacacaaaccatgaccgtctacaaaccgattacccagcttgcgaatacggcggcggaaattgccgtggagctgggaaatggtaagcaacctaaggcagacgcgacgctgaataacgggcttaaagatgttccggctcgtctgctcacccccattgaagtcaataaagagaacattgacgccaccgtcattaaagacggtttccacaagaagagtgaactgtaa

SEQ ID NO: 123379 - DNA, 1386 bp, Enterobacter cloacae
atgtctattcactattactcctgtatcaacgactcgccgcataccctgaatatggagctcaatatgcaagcttatttcgaccaactcgatcgtgttcgttacgaaggcccgaaaacaaccaatcctttagcatttcgtcactacaacccggatgagctggtgctgggtaagcgcatggaagatcatttgcgctttgccgcctgttactggcataccttctgctggaacggagccgatatgttcggcgtgggttcctttgaccgtccatggcagcagccgggtgaggccatcgagctggcgaagcgtaaagccgatgtcgcctttgaattcttccacaaactgaacgtgccgtactactgcttccatgacgtggatgtgtcgccggaaggcgcctcactgaaagagtacctgaacaatttcgcgcagatggtggatgtgctggcggctaaacagcagcaaagcggcgtgaagctgctttggggcacggccaactgttttaccaacccacgctatggcgcgggtgcggcaaccaatcctgatccggaagtgtttagctgggcggcaacgcaggtggttaccgcaatgaacgccacgcatcagctgggcggcgaaaactatgtgctgtggggcggtcgtgaaggctatgaaaccctgctcaacaccgacctgcgtcaggagcgcgagcagattggccgctttatgcagatggtggtcgaccataaacacaaaatcggtttccgcggtacgctgctgatcgaaccgaagcctcaggaacctactaagcaccagtacgactacgacgttgctaccgtgtacggcttcctgaaacagttcggcctggaaaaagagatcaaagttaacattgaagccaaccatgccacgctggccggccactctttccatcacgagatcgcgtctgctatcgcgctgggtatcttcggttctgttgatgctaaccgcggcgatgcgcaactgggttgggataccgaccagttcccgaacagcgtggaagagaatgcactggtgatgtatgaaattatcaaagcgggtggtttcaccaccggcgggctgaacttcgatgccaaagtgcgccgtcagagcaccgacaaatacgacctgttctacggccatattggcgcaatggataccatggcgctggcgctcaaagtcgccgcccgtatgattgaagacggtgaactggataaacgtgtcgcgaagcgttatagcggctggaacagtgagttgggtcagcaaattttgaaaggccagttatcgcttgcggacgtcgcgaagtacgctgaacaacatcaactggcaccgcagcatcagagcgggcatcaggagctgctggaaaacctggttaatcactacctgtttgataaataa

SEQ ID NO: 123380 - DNA, 540 bp, Enterobacter cloacae
atgtcacgtactgcattaatcaacatcgatactcagcagtcttttcatcatcgtcattactggcaggaggacgaaattcctgcctttcagcaggcgatgctggggctgattgagggctgccaggcgcgtggcattcctgtcgttgatattttccatgtagatgaagacggtccgttcacactgcaaagcggctatgtcaaaccgatggcctttttacgtcatcagccggacgtggtcttccagaaacacgtccataatgcgttcacggataccgggcttgaccgctggctgcgtgagcgagacattaatcagctcatcgtgtgcggcattcgcacggaacaatgctgtgaaaccactgcgcgggtggcatccgatctgggctatgctgtgacctttgttagcgaggcaacgctcacgtttccaatgacgcacaaggggataaccctgagcgcagaggaactgcgccatcgtaccgagacggtactggccgggcggtttgccgacattaaaacggttgcggagacgctggagtcactgtaa

SEQ ID NO: 123381 - DNA, 921 bp, Enterobacter cloacae
atgagcatcgacgtctggtttgtgatgttgcccggggtgctgtcattagacatgacgggcccggcagagacctttgtgctggccggggacgcgtttcgcctgcattacattggtccgcaggcagaggttccgacgtcgattggtctgatgatgggcggtattcagccgctgccggaaagcttgcctgagggcagtttgctggtgctgccgggggtaagcgactcccgctttcagttttcaacgccgcaggcgcagctgatccagcactggttaatgcgcctgcagccaaaatttcatcgtcaggatatcaccgtcatgtgcgtctgttcaggggcgttgctggcggcaaaatcgggcttgctgaatcaccggcagtgcacaacgcatcatgacgttataagccgtttgcgtacggcggctccgacggcaatcatcaaagaaaaccggatcttcgtgcaggatgagaatatctggaccagcgccggcatcacctcgggcatcgacctggcgctgcatatgattaaccgcctgtgtggcgcagaaaaagcgctggccgtggcgcgcgaaatggtggtctggtttcgtcgctccggggacgatccccagctgtcgccatggttacgctaccgcaatcatcttcacccggccattcatcgtgcgcaggatgcgcttaccaccgagccgcacaaagcctgggctttacccgagattgccgctctggcgcatgtcagcccgcgccatttaacgcggctttttcagacgcatttagggataagcgttcgcgactatctggagcagttgcgtctggcggtggctgaacagtggctgttgcaagggtgtggcgtggaacaggcctcactggccgcggggttttcctccccgcgccagtatcatcgtgcccgacagcgcagcgttaactga

SEQ ID NO: 123382 - DNA, 306 bp, Enterobacter cloacae
atgatgatgaagcgtgcggcgtcactctttctgctgtttatcctggcaggatgcagtacgccaccctctgcacccgtgcaaaaagcacagcagggaaaaatcagcccggaacgctccctgaatatggagcagttctgtaaggatcaggctgcgcgccgctataactcggatgcgcagaacattgatgtcaccggatttgagcgatttcaggggagttatgagctgaaaggccatacgtcccgtaaagagggctttgtctgttcgtttgacgcagacggtcagtttttacatctctccatgcgctaa

SEQ ID NO: 123383 - DNA, 1620 bp, Enterobacter cloacae
atggctcattttgcgcaatccccttcttttattttgcatcaggtgacctgtcagtttgcgacgggcgataccctttttggtccgctgaatctttctctggcgccgtcactgtgcgcgctggttggccgtaacggcagcggtaaaacacgtctgctacgtttgctggcagggtgtgatgaacctgccagcggtcatatcgaacgttttgcaacgcacgcttatgtggcacaacagcccgatatctccccgcgaaccacgcttgctgagctgctggggtatgaggcgatttttgcggcgcgtaagcgcatcgacagcggtgactaccagcccgatgatttggcgttactcgacggacactgggatgtagcagaccgtctgagcgaggcgtttttccacgcaaaacttccaccatttgacccggataaatcagccatggaactcagtggcggcgagcgcattcgcgcgttgctctgtggcgcgtttacgtctgatgcggattatttgctgctggacgaacccaccaaccatctcgaccggcagggacgtgagtggttctacgaccagctcgcccgttatcaggggggcgtgctggtggcctcccacgaccgtgaactgctggcgaaggtaccgcgtattcttgaactgagcgcctcgggtcttcgccactacggtggcagttacgacgactatacgcatcagcgggacgccgaacagcaggcagcccgtgcggcactggaacatgcggcaacagaacgcaaacgcacccgcgcgcggatgcaaaaagagcatgacgaaagccagcggcgttcggcgaagacgttacgtacggtcgataaccttaatatcgcctcgttcgagcgggtcaaatacaaaatggccgccaaagagcgcattggcacctggaaaaaacagcatggcgatcaacatgaagcgctgaatgccacggtgaacaaggcccgggagcgagttgaagaggagaatccggtgatgttcacgttgcctggaagccagattgctgaggggaaacaggtgttggtgatggaggggctggtgctgccgtacgtcactctcccgccgaccaactggcgaatggacggaccgatgcgcgtggcgctaaaaggaccaaacggctgcggtaaatcgacgcttttaaaagccattctcggcgaagtggctccgctctcaggaacgtgtaaggtatcggtaaactgcgcttatctcgatcaacatctgtcgcagctcgatctttcgcagtcggtgatggcgcatctcaatctgagtcatacacctctggaagagggtgtgctgcgaacccgtttagcgcagcttcagttgggcgctgacaaagtggcgcttccgctggctgagctgagcggcggggaacgtctcaaggctgctctggcctgtgtcttgtggcgtgaagacgctacgcagcttttactgctggatgaaccgaccaaccatctggatctggcctcggtcgaggcgattgaagccgcactggccggtttccccggggcattgctggtggtttctcacgatgaggcttttttgcaggggttagcattgacgcatgaactggtctgggaagaggcgggttggcggtgtgcccccctttaa

SEQ ID NO: 123384 - DNA, 288 bp, Enterobacter cloacae
atggaatataaagatcctgagcttgagctgctgagcagcctggaacagattatttttaaagatgtaccgcagacgttaaccctgcaacaaagatccaatccctttaaagaatatgagcaattgcgcaaagggactggattaaaaactgaagaattcgccagagcgatgggtgtcagcgtggctatggtgcaggagtgggagtcaaaacgcgaaaaacccaccccaaccgagctaaagctgatgcgcctgattcaggccaaccctgcactcagcaagcatatagcatga

SEQ ID NO: 123385 - DNA, 441 bp, Enterobacter cloacae
atgatccgcaaatgggaaagtgataatgccgggccactcctgagtctgtggcttgaaagcaccacggaggcgcacccgtttatcagcgcaagctactggaaagagaacgaaggtatggtgcgggatgtatacctgcccgccgccgaaacctgggtatgggaagaggatggaatgctgcgcggctttatcagcgtcatgcagtcccagtttgtaggcgcgctgtttgtctcaactgattttattggtcgggggattgggcgtgcgctgctgaaccatgttcaacagcgcttcccgtatttaagcctggaggtctaccagaaaaatgtccgggcggtgaatttctatcatgcacagggttttcgcattgaagacagcgcctggcaggatgacactcagcacccaacgtggatcatgagctggcaggcggatcaaacgccgtga

SEQ ID NO: 123386 - DNA, 699 bp, Enterobacter cloacae
atgatgataaaaaaaatcagtggtcgccatgctgtttctggcctggcggggatttcagcctgtctgtttttttgtaatacagcatttgcctggcaacaggaatatatcgtttcagacgcccaaagtaatacggcggaacgctatacatgggatgcggatcaccaaccgcgttatgaggatattctcgccgagcggattcagtcctcacaaaatgcccccggacttgcgctgagtttaccgtcgggttccacgccggcaggggccatgagcgtgggctggaacattccggtgtcagggcgtatcacgaccggtccggtgatggcgtggcgttatgacggcacggcaccgatgatgatcaacgaatttggtgacagcgcgacgacgcaggggcttaccgacccactctggcatgccagcgtcagcacgctcggctggcgcgtggatacacagtacggcgagcttcgcccgtgggcgcagataagctataaccagcagtttggcgaaaaccagtggaaatcccagtttgggatgccacagacgccggcaccaacacaaagcggcaactggatggatgtaaccgtcggaacggatattccgtttaacacgcatatggcggcctatgcgtcgttagcacaaggggaatacaccaccacgggtgaggagtttatgtacaccctgggcgtgagcgctaatttttaa

SEQ ID NO: 123387 - DNA, 1287 bp, Enterobacter cloacae
atgaccctacccgcgattgctcaagccgtttcaccgtaccgccagctgctggtggggtttagcggtggcctggattccaccgttttgctctaccgtctcaaactctggcgtgacaacgagcctgatattcagcttcgggcgatgcacattcatcacgggttaagcccgcacgcggatgcgtgggtggcacactgcgaggcggtgtgtgcggcatgggcgatcccgctgactgttgaacgtgtacatctccaggatgaggggctgggcattgaggcgcaggcgcgtaaagcacgctatgccgcttttgccgctgaattacagcctgacgaagcgctggtcacggcgcagcatctcgatgaccagtgcgagacgttattactggccctcaaacgaggaagcggcccggcgggattatccgcgatgccagaacgggctgatttcgccggatcgcacctccttcgcccactgcttggcgagacgcgagcctcgctggaaacgtgggcacgggaacacgggctgagctggattgaagatgaaagcaaccaggatgaccgctatgaccgtaacttcctgcgtctgcgtgtcgtaccgcttctgagcgagcgctggccgcactttgcagaagcggcagcacgcagcgccatgctgtgcgctgaacaggagagtctgctggatgagctgctgagcgaagtgctggcggaactgattaccgagcagggatcgcttaccatcgcaccgctggaagcgatgagcccggcgcgtcgggccgcattgttacgacgctggctggcctctcacggtgccgctatgccgtcgcgggcaatgctggctcgtctctgggatgaagtcgccctggcgcgggaagatgctacgccgtgtgtgcacctgaacggtttcgacgtcagacgctataaaggggcgctctggtgggttaaatcatctccctcgctcgccgacagggtgctcgactggccgtcgcttgcggaaccgctgctgttgccctgtgatgccggtcgtgtgtctctggtgccaaccggccatgtgcgtctgcctgaacccggggagccggtcaccgtgcgctttaaggcgggcggactgctgcatattgtcgggcgcaacggagggcggaagctgaagaaaatctggcaggagagcaatgtgccgccctggcgacgcgataccacgccgctacttttctacggtgaaacgctgattgcagcagcaggggtattcattacgcaagaggggtgggcagaaacgggcgtgcagtttgagtggaaagcgtaa

SEQ ID NO: 123388 - DNA, 801 bp, Enterobacter cloacae
gtgggtaacccatacatcagggcgctggtcgccctgctttttctcgcaccggcatggctatttgccgcgccgcgtgtgattacgctctctccggcaaacaccgaactggcctttgccgccgggatcacgcctgtcggcgtgagcagcttttcggattaccctccgcaagcggcccatattgaacaggtggcgacctggcaagggatgaacattgagcgcatcgtggcgcttaaacccgatctcgtgctcgcctggcgcggcggtaacgccgagcggcaggtcaaccagctctcctcgcttgggatcaaggtgatgtggattgatgcggtgagcattgagcaggtcgctcaggcactgcgttctctggccccctacagccctatcccagcaaaagccgagaatgccgcgaaacagatgctcagcgactatgccgcgctgaaatcccgctacgatacccccgtcaaaaaacgcatcttcctgcaatttggcagccagccgctgttcaccaccgggaaaggatccattcagaatcaggtgctggaaatctgcggcggtgaaaacatctttgcagccagccgggtgccgtggcctcaggtcagccgggaacaggtgctcgcacgccagccacaggccatcgtggtggtcggaaatgcgagcgagattcctaaaattgaacaattctggcaacgtcagctaaaaataccggtgatccccctcaccagtgactggtttgaacgcgccagcccgcgtattatcctcgccgcaaaacagctctgtgccgcgctggcagagagtcactaa

SEQ ID NO: 123389 - DNA, 771 bp, Enterobacter cloacae
atgacgcatctttactgggtcgcgctgaaaagcatctgggcgaaagagattaaccgctttatgcgtatctgggtgcaaaccctggtaccgccggtgatcaccatgacgctctacttcatcatcttcggtaacctcatcggttcccgcattggtgaaatgcacggctttacctatatgcagtttattgtgccgggcctgatcatgatggcggtgatcaccaacgcctatgctaacgtggcatcatcattctttagcgccaagttccagcgtaacattgaagagctgctggtcgcgccggtaccaacgcatgtgatcattgcgggttatgtgggcggcggcgtggcgcgcggtctctgcgtggggattctggtgaccgcaatctccctgttctttgtgccgttccaggtgcattcatggctgttcgtggcgctcacgttactgttgacggccatcttgttctcgctggccggtctgctgaacgcggtgtttgctaaaacgttcgatgatatcagcctgatcccgacctttgtgctgacgccactgacctatcttggcggggtgttctactccctgacgctgttgccgccgttctggcaggcgctgtcacacctgaacccgattgtttatatgatcagcggcttccgctttggtttcctcggcattacggatgtgccactgattaccacggttgcggtgctggtggtgtttattatcgccttctacctgctgtgctggtctctgattcagcgtggacgcggtctgcgcagctaa

SEQ ID NO: 123390 - DNA, 1539 bp, Enterobacter cloacae
atgaagttgccctttaagccacaactgcttgtccttctgtgcagtgtcgggctgtttgccgcctcaggcgtcatgttcgttaaaagccgcgcaacggagcctgtggctcctgcccccgtcgcacaacaaccggctgcgccgcctgccgcccctgccgttcagccagcaccggtcgccgcgccagcctacacggccgcgcaaattgatcagtgggtcgcccccatcgcgctctacccggatgccctgctatcgcaaattttgatggcttcgacttacccggccaacgtcatccaggcggcacagtggtcaaaagacaaccctaaactgcagggcgatgccgccattcaggccgtggcgaatcaaccctgggatccgagcgtaaaatcactggtggcgtttcctcagctgatgtccctgatgggcgaaaatccaccctgggtgcagagcctgggcgacgcgtttctcgcgcagccgaaagatgtgatggattccgtgcaacgtctgcgtttgctggcgcagcaaaccggtgcattgcaatcaacaccgcagcaaacggtcaccaccgagacaaaaccagccccggcgaaaacggccaccggccagacaacaagcaccgccacgacgtcagccccgacggtcattaaaattgagtccgccgacccgcaggtggtttacgtgcccacctacaacccgaataccgtgtatggcacctggccgaacaccgcttatccgcccgtctatttaccgccctctccgggagagcagtttacggacagcctggtcaaaggcttagggttcagcctgggtgtggcgacaacctacgctattttcagcaacatcgactgggatgatgacgatgactgggatcaccaccatgatgacgactgggatcaccacggcggctataaccgcaacggtgataacaacatcaatatcaacgttgagaactttaataaaatcagcggccagcgcctgacggacgccaaccgcacctggcagcataacccggcctatcgtgaaggagtgccctatcccactaacacgctcaacaatcgcttccactcaacgaacacggcaacggggctaagcgcgacgcagcaaaaaccggtcaaccgggacagccaacggcaggctgcgctgagccagatggagaaatcaacgggaaaaaccttcccgcaaaccgcgcgtccgggcaccaaagatgcacagcgccaggcgtcaaccgcccagctgaagcaaatttcccagcgcaacaactaccggggctacgacaccaaaccgcaaacggcacagcggacagccgctaagacgcgagacagccgcccgaccaccacccaaaggcaagagaaacgggtttcgcagcctgcgcggagtagccagccgcgcgccaatgcgctcagcggtaacgacagtcgttccgccaactggcaagcccagcagcagcgaggcgcccagagccggcaacaggctgcccgccatcagcaaccgcgccagacgtctaccgggcgtgctgaacaccgtgaattccgtcaccgttaa

SEQ ID NO: 123391 - DNA, 792 bp, Enterobacter cloacae
atgaaaagcaaattactcagtgggatcgcgttattcatgctgtcggccgccgcaatggcgcagcaatctttcagcacgccagaccaggcaaccgatgcgctggccagcgccatcagtgagcaaaatgaaagcgcgatgaacaccctgctcggtgagaactggcgtgattttctgccgccggaaggggtggatcctgatgccgtggatcgcttcctgcgcgactggaaagttcggcacaatacggtcgttgacggggataaggcacatcttgtggtcggtgacagcgactggcagctaccgattccggtgatcaaaaccgcctctggctggcaatttgatatcaaagaaggggctgaagagatcctgacccgcgagattggccgcaacgaactcgccgccatcgaggcgctgcacgcgtatgtggatgcacagcaaagctattttgcgctgaaccagaaatatgcacagaagattgtcagctcagccggcaaaaaagacggcttatactggccggcctcgcccggcgaagcccccagcccactcggtccggccttcagcccgaaagaacccggcactggctatcacggctaccgttttcgcatcctgccggataaaaatggttttgccatggtggcatggccagtcagctacggtcagacgggcgtgatgagctttgtaataaaccagaccgacaaagtgtatcagtcggacctcggcagcgagtcagagaagaaagcgcaggcgttacctgcttatcacctggaccacacctggcaaccggtcgccccataa

SEQ ID NO: 123392 - DNA, 1383 bp, Enterobacter cloacae
atgaataccgatcagcttgtcgcactttgtctgcgtcaccatgcccttctgctgagcagcgatagcgacatgattagcattgccgtcgtgggaaaccccggtcctgaactgatggaagccctgcgtttcgctacccagaaacggattgatatcgagtgctggagcgccgagcgcatggaaaagcaccggcagttaaccacacaaacgcatctgcccgtcgttacgccgacacactcagcggtggatattcttaaccacacgctgcagcaggcgataaaccaacgcgcttctgatattcatattgaaccgatggagcagacttgccagattcgcctgcgcatcgacggcgtgctttgcccgcagcccccactttcagccgcgctggccaccatgctcagcgcccggttaaaagtgctgggtaacctcgatattgcggagcgccgcttaccgcaggacggtcagtttacgattgagctggcaaacgagccggtctcatttcgcatcgccacgcttccctgcagcggcggtgaaaaaattgtactgcgcctgctgcatcaggttcagcaatctcttgagccagaaacgttggggatgaatactaaacagctggccggctttagcgaagtgctccaccagccgcaggggctgattctggttaccggccccaccggcagcggtaaaaccgtaacgctgtacagcgcgctgcaggctcgaaacacgccggatgtgaacatctgcagcgtggaagacccgatagagatcccgcttgcaggattaaaccagacgcagataaacccgcgtgcgggccttaccttccagacggtgctgagagcgctgctacgtcaggatcctgacatcattatggtcggcgaaattcgtgatggcgaaacggcagagattgccattaatgccgcacaaaccgggcatctggtgttgtcgacgctacacaccaactcgacggcggaaaccctgatccgcctgcagcagatgggggtggcgcgatggatgatctcttccgccctctcgctggtcatcgcccagcggctggtgcgccgtttatgcccccattgccgccaggaaaccgacaagcgggcagaactgcctcgctccgtttggccccggccgctgccgcgctggcaacccaccggctgtgagcgctgttatcacggtttttatggtcgcgtcgccatttttgaagtgctcgtcattgaccagacactccggcaggccattgccagcggagcggggtcagaggtgattgaggccagcgcccgtcaggcaggaatgacctcccttttcgaacatggctgtatggctgttgaacagggactgaccacgctcgaagagttgctgcgtatcctgggaatgcccgatggctgctaa

SEQ ID NO: 123393 - DNA, 1185 bp, Enterobacter cloacae
atggctgctaatcacctctggcgctggcgtgcgttatccgttgaaggagagccccgaagcggggctctgtgggcaactgaccgcaatgcggctttcgacaggctgatgcgcaaagcgctacatcctctgacaatcacccgctgcacgcagaggtatcgctggcgaccacatcaccgctacgaggtatttcaccagctcgccacgcttttgcaggcaggcctgacactgtctgacagcctgcagatgctggcggaccagcatccgatacccccctggcaggcactcttgcaaagccttgccgatgagctgagtgaaggatgccctttttctgaggcgctgaagcgttggcccgcggtatttagcccactgtatgtgtcgatggtgaagaccggcgagctaaccgggaagctggagacgtgctgccgtgaacttgcccagcaacaaaaatcacagcagcaactcagtgcgaaagtgaaaaaggcactgcgttacccgatggtaatcctggctctggcggtactcgtggtgctggccatggtcactctggtcttgcccgaattcgccgccatctacaaaacgtttaataccccgctcccgatgctgacacagatagtcatgggaatggcaacgtttatacagtcctatgccctcgcgctgttcgcggggctactccttcccgtgatcatcgcctggggtttgcggcaggatccacgctggcaacacgtactgctgcatatccccgtcatgggcgcgctggctaaaggacaaaagctggggcaaatttttaccgtgctgtcgctcacgcagcaggcgggcatcgcttttttaaagggtctggagagtgcagaagagacggttgagagcaggtactggcaggggatactccgcgccatccgggaagacattgaaaagggtaatcccctttgggcatcctttcaaaaggcggcggtttttactccgctgtgtattcagctattgcgaaccggtgaaacgtcaggtgcgctcgacatcatgctggtaaacctggcgcgtcaccacacggagcaaacctttcagtcagcagataacctggctgccgtgctggagcctgtgctgctgattgtgacgggtgtgattatcggcacgctggtggtggcaatgtatttgcctatcttccatctcggggatgcgatgagtgcgggataa

SEQ ID NO: 123394 - DNA, 1179 bp, Enterobacter cloacae
atgctctggttgatgacgatggggcgacgcctgaacggcgtgtatgccgcttttatgctggtggcctttatgatgggcgtggcaggggcattgcaggctccgacgctgagtctgtttctcagccgtgaggtgggggcgcagccgttttgggtggggttgttttataccgtgaacgccatcgccgggatcctggtcagtctggcactggcaaaacgatcggacaatcggggcgatcgtcgcaaactgatcctcttttgttgcgccatggccgtgggtaatgcgctgctgtttgccttcaatcgccattacctgacgctgattacctgcggcgtgcttctggcgtcgctcgccaataccgccatgccgcagctgttcgcgctggcccgtgaatacgcggataactcggcgcgggaagtggtgatgttcagctcggtcatgcgtgcgcagctctctctggcctgggtgatcggcccgccgctggcgtttatgctggcgctgaactatggctttaccaccatgttttccatcgctgccggcatttttgtcatcagcctgatattgattgcctttgcgctaccctcggtggcgcgagtggagcagacgacggataaacccatcacccaggtgagtggctggcaggataaaaacgtccgcatgctgtttatcgcgtccatgctgatgtggacctgcaacaccatgtacatcattgatatgccgctgtggatcagcagcgatctggggttgccggacaagcttgcggggatcctgatggggacggctgccggcctggaaattccggcgatgatcctggcgggttattacgttaagcgttttggaaagcgccgcatgatgatcgtcgccgtggcggcgggagtgcttttttatctggggctgatcgtcttccattcgcgcgaagcactgcttgcgctgcagctgtttaacgccgtgtttattggcatcgtggccgggattgggatgctctggttccaggacttaatgccgggacgggcaggctctgccactacgctctttaccaacagcatttcaacgggcgttattctggcaggggtgattcagggggcgttgtcgcaaacctacggccacgcgtcagtgtactggatgattgcggccatttccgtggtgacgctggtgctaacctgccgggtaaaagatgtgtga

SEQ ID NO: 123395 - DNA, 702 bp, Enterobacter cloacae
atgttaaaactgactgatgtaacctggctctaccagcatctgccaatgcgcttctccctttcggttcgtcagggagagatgattgcggttctgggtccgagcggggccggaaagagtactttgctcaatctgattgccggttttctgcaaccgacgagcgggtcgatagtgattgaaaaccgcgaccatacgcgcacgccacccgcccgacgtccggtgtcgatgctgttccaggaaaacaatctgttcatgcatctgacggtgcggcaaaacatcgccctgggtatggatcctggcctgaaactcaacgacggtcagcgccagaagctggagctgattgccgctcagatgggcattaccgcgtttattgaccgcctccctgaagcgctctccggcgggcagcgtcagcgggtggcgctggcgcgctgcctggtgcgcgagcagcccatactgcttctggatgagcccttctctgcactcgatcctgccttgcgccaggagatgcttaccctggtgcaggacgtgtgccagcgtcagcaactgacaatgctgatggtttcgcacagcattgaggatgccgcgcggattgcgccacgatcggtggtcattgcagaagggcgaattgcctgggatggcggcactgaggaactgctcagcggtcacgcaggggcgtcttcattgttgggcattagtgcgggctga

SEQ ID NO: 123396 - DNA, 846 bp, Enterobacter cloacae
atggccgaaacgcaaaacgatcccttattaccgggctactcgtttaatgctcacctggtggcggggctgacccctatcgaggctgagggatatctcgatttttacgtcgaccgaccgctcgggatgaaagggtatattctgaacctgacggtgcgtggggaagggattatcaaaaataacgatcagcagtttgtctgccgtccgggcgatatgctgctgtttccgccgggggagatccaccactacgggcgccacccggaggccaaagagtggtatcaccagtgggtctacttccgcccgcgcgcctactggcaggagtggctctcgtggccggcaatttttgcgcacaccggtttttatcgcccggacgaggttcatctgtctcagttccgcgaactctttgcccaaattattgaagcggggcaggcgggtggccggtatgccgaactgctggcgattaacctgcttgaacaggtgctgttgcgccggatggaggcgataaacgcgtcacttaatcctccgctggacaaccgcgtgcgcgacgcctgccagtacatcagcgaccatctggccgacagccagttcgatatcgccagcgtcgcccagcatgtgtgtctctcaccgtcgcggctgtcacatctgttccgtcagcaactgggcgttagcgtcctgagctggcgtgaggaccagcgtatcagccaggcgaagctcctgctcagcaccacccgcatgcccattgccaccgtggggcgcaatgtgggctttgaagaccagctctatttctcgcgggtatttaaaaaatgcaccggtgccagccccagtgaattccgggcaggatgtgaataa

SEQ ID NO: 123397 - DNA, 1743 bp, Enterobacter cloacae
atggcaacttacgataaattcccggaagtcgcagtagaggggtatgacgattgtgcctggcagggctgggacgcgattgtgcgcgagcttacccacagagcgggtcaatatacacgaaccgtgctggtcattgactgctaccctggcgtcaggctggaggaactggagacaaaactgctgccagcattgggggccacgctgacgctcaatgccgaacagatgcgtctcgacgaacacgctttaagccggctgctggcccgacatctcactgacgaccgcgtcttcggcgtgctctcctgccaccagctcgaggaattcatcgacccggtgaaacgcgaggcgttgcaggcgcaggtcgaactgtgccgcgaagggataatcgttatttacgggccgggtgccgcgctggttaatgcaggcgatattctggtctacgccgatttaccgcgctgggagatccagcagcgcatgcgcagcggtgaactggctaactggggcgcggcgaaccaacacgaggatattctgcgtcgctacaaacgcgcctttttcattgaatggcgcgtattcgatcgtcacaaaaccccgctgctacggcgtactgattttctcctggataccacccaggcggataatccggcgatggtcggcggcgatgcgctgcgcgccgggttgcaacataccacccaacgtccttttcgtgtagtgccctttttcgaccccggcatctggggcggacaatggatgaaacagaaattcgatctcgatccctctgcgcctaactacgcatggtgttttgactgcgtgcccgaggaaaacagcctgttgcttcgttacggcgcggtgcggatcgagatcccctctctggatttggtgctgctgcacccccgggcgctgctgggtgaaaaagtgcatgcccgttttggcgcggaatttcccatccgctttgacctgcttgacaccctcggcgggcagaacctgagttttcaggtgcatccgaccacggagtacatacagcagcattttggtatgcattacacccaggatgagagctattacatccttgaggcagagccaggggctcaggtgtatctggggacccgaacgggtacccggcccgaagagatgatggacgacctcagacgggccagccggggtgaaaagccgttcgacgacgcccgcttcgtcaatcatcttgcggcgaacaagcacgatcattttttgatccccgccggtacggttcactgttctggagcaggaaccgtggtacttgagatcagcgccacgccttacattttcaccttcaagctctgggactggggacggctgggaatggatgggcaaccccgcccggttcatctggcgcatggcgaaaaggtgatcgactggcaacgcgatacgcagtgggtcgaacagcatcttgtaaatcagtgtgaacccctcggcgaaggcaccggctggcgcgaagagcggaccgggcttcacgaacgtgaattcatcgaaacgcgtcgccactggttcagtgaaccggtgacgcactccccccgcggaggcgtgaatgtccttaatcttgttgaaggtgaagaggcgacggtagacagccccgacggcgcattcgcccccttcgtcgtgcactacgcagaaacgtttatcgtccctgctgacgcaggcgaataccgtatttctccgtcagggccgagctgcggtaaatccattgccaccattaaagcctgggtaagaggttaa

SEQ ID NO: 123398 - DNA, 429 bp, Enterobacter cloacae
atgattcacattattgtggcgacacacggcccgctggccaccgccctgctggaaagcggaaaaatggtgtatggcgatcttcctcatcgacaggcggtatgtctgaacgtacaggctggcatagcggggtttcgccgtgatttcgctgcggcataccaccgcgcaggtgcgggcgcagacggcatcgtcgtcctgtgcgatatgcagagcggaacaccgtggaatgtggcctgcgaatacgcgtttaatccccagacgcatccgccggtcgccgtggtggcaggagtcaacttccccatgctcttgctcaccgacgacattctgatggcccgggatgtccatgccgccgccgcgcagctcatcgcattaacgcagcccaccctggttcaggcaaaacgggtggaatccgcccagaacgacgatttctaa

SEQ ID NO: 123399 - DNA, 771 bp, Enterobacter cloacae
atggataactttgggctcgacatgaccatcacccgacacccgctggggttcagctacggtgaggacgtcactggcccgatgccagagatccgtaagcttgatgagatccgcgcgtcgttactggatcctgactgctcaggcccggaagacgtttatgctattgcgatggatgtcgcccgtctggcagaccggcaggagctgaaaaaacgcatgctgctgtttggggtcgtgacttacgcgacgggaacgctgggtgaagagccgatccgcagccaggggcatgttcaccgtaaaagccgtcacagcggctggtctccgcccgagctgtatgaaatctggcaggggcgcgccattatctatatgcaggagtatgttgcggacgatcccgggcgctgtttcgccgtactggccgggccgggcgaaaaggtgctggttccgcctggctgggggcatgccactatctctgcctcgccggatgaaccgctgaccttcggtgcgtggtgcgacagggaatatggttttgaatatgatgccgtgcgggcgcgtaaaggactggcctggtatccgctgctgcaggggagccatatcatctggcagcacaacacgcattatctgccggggcggctacagatgatcacaccgcgtcgctacagcgaattcggtctgacggatgagcctgtctatacgcaatttattgccgatcctgctcgctttcagtttatctctcgcccggataaagtggctgaactgtggcataacttccacccataa

SEQ ID NO: 123400 - DNA, 555 bp, Enterobacter cloacae
atgacttcagatattatcctgccgcctctggtggcctgggccagtggtacacttgcccgcggcgcacttattcttaaatccacacgccttgccgatctcaatggtttgtttgccgatcgagacgcctgggcacaatgcgatccgcatcagacggtgtatgacgtcgaaatgctggaatcgcctgcacaggaaggggcgttgtttgtcggcgttacccatttacatgcaggtaaaatcggccgggaattctttatgacccgcggccattttcatcaacgtcgtgaacagggcgaagtctattttggactgcggggaagtggcctgcttttactccagacgacatccggcgaaacccgtctggagtgcgtgatgccgggatccgtccatattattgcgccttttaccgcccaccgtttaatcaataccggtgagaccacgctctcttcactcgcggtctggcccgccgtcgccggacacgactatgccgcgttaccccacggttttgccgtgcgggtattggccactgacggtggctgggaggttcagaatggataa

SEQ ID NO: 123401 - DNA, 1431 bp, Enterobacter cloacae
atgcctgatttccttttctttattaatgaagtcctttggggttcgataatgatatacctgctactgggtgcaggtatttggtttacgctacgcagcgggtttatccagtttcgttatattcgcaaatttggcagaagtctgaaaaacagcgtcactctccagccgggcggattaacctctttccaggccctctgcaccagcattgccgcacgcctcggcagcggtaatatggcgggggtggcactggccatcagcgccggtggcccgggcgccgttttctggatgtgggtcacggcgcttatcgggatggctacctcctttgccgaaagcgccctcgcccaactctacaaagaaaaagataaaaacggacagtttcgcggcggcccggcctggtacatggcgcgtggcttgggaatgcgctggatgggcgtgctgttttcgctgtttttactgctcgcgtacggtctgattttcaataccgttcaggcgaattctgtcgcccatgctttgcgctatgcctttgcatgtccggagtggatcaccgggcttgttttagccctctgtatcctgctgaccatttcgaccggcctaaaaggtgtcgcccgcctgatgcagtggctggtgcctgtcatggcgctgctgtgggttgccgccagcctgttcgtcgccgcacggcatatcgagcaggtgccggaagtgattgcaaccatcttcaaaagcgcatttggctggcgcgaggcggcatcgggcgcactgggctataccttcagccaggcgctgatgtcgggctttcagcgcggaatgttctccaatgaagccggtatgggatcaacgcccaatgccgcagccgccgccgcgtcctggccgcctcacccggcggcacaaggcattgttcagatgattggcgtttttacggacaccattattatctgttccgccagcgccatgatcctgctgctggccggcccggtacctcactcatcggaaacagccggcatacaactgcttcaacaggcactggtgaatctgacgggcggctggggagccgggtttgtctcgctcatcctgctgttattcgccttcagctcgattgttgtgaattacctctacgccgaaaataaccttattttcctgaaagtggactcccgccgtatgatcacgctgctgcgcctcggggtgatactgatggtgttagcaggttcgctgctcagcatgccgctggtctggcaactggcggatgtctttatggcgctcatggccatcactaacctgacggcgatcctgctgctctcacccgtggttacgcttatcgcacgggactatcttcgtcagcgcaaactgggcgtaccgccggtctttgatgcctcgcgctatcccgacatccaggcgcaaattgcgcccggcacctgggatgatttgccacggcaataa

SEQ ID NO: 123402 - DNA, 1353 bp, Enterobacter cloacae
atgatgaaatcacccctgttctggaaagtaagcaccctgctggggtgcattctgctgttattagtcccgctctttatggtcagtaacctgatttcggagcgtgagagctaccgtaacgatgttgaacactcgcttcgccaaagcaccagcgggccgcaaaagctggtaggaccgctgattgccattcctgtcaccgaggttttttacaaactagaagatgaaaaaaaggtcgaatacaaaaaaagctacctgcactttatcctgccggaatctctgctcgttgagggaaatcagcgcgtggagtccagaagcatcggtatctatgacggacaaatctggaacaccgatctcaaaataaaagcgcagttttcgacggagaaaatggcgcagctgaagggcgaaaccatgacgctggggcaaccattcctggtgattggcgtgggtgatgcccggggcattggtacggtgaaggtcgcaaaaatcaacggtgaggcgctcagcgtagaaccgggaaccggcgtgtatggcacacttgccggtattcatattccgctgagtgataaagcccttgagccgaaaacgctcgcccttgatatgtcgtttaacctggcggggacgggcagttttgcggtggtgcctgtcgggcgtaatagcgaaatgacgctgagcagtaactggccgcacccgggatttatgggatactacttgcctgttaagcatcagattagcgagtctggtttccaggcaaactggcagagcagttggtttgctaacaacatgcaaagctggttcgctgagggcgagtcaccggagtggagttctatcccggcctttagcgtgacggttgccacgccagcggatcagtaccaactaacagaccgcgcgatcaagtacgctattttactgattgccctgacgtttatggccttcttcgtgttcgaaaccctcaccggattgcgtctgcacccaatgcagtatctgctggtggggttgtcgctggtcctcttctatctcgtcttacttgccctgtctgagcatgtcgggtttacgccggcctggattatggcaagccttgtcggcgcgatgatgaatggtgtgtacctgcaggcggtactgaaaagctggaggcgaagcggggtgtttattctggcgctgctggggctggatgtcgtgatgtggttcctgctgcgttctgaggacagcgcgttgctgctgggagctgccgtactggcgatggcactgtttgcagtcatgtacctgacgcgtcaccttgactggtattcactctctcagccgaagcgtcctgtcccccccgttgaatctgatgcggatacgatgcgagtctggaaataa

SEQ ID NO: 123403 - DNA, 1425 bp, Enterobacter cloacae
atgcgtattggcatgcgtctgctgctgggctatttcctgattgtcgctatcgccgcgtggtttgtgctgtctatcttcgtgcaggaggtcaagcccggcgtgcgcagagccaccgaaggcacgctgattgacaccgcgaccctgctggcggaagtggggcgagacgacctgctcgcaggcgatccgcagcagggccagctggctcaggccttttcacggctccatcagcggccgtttcgcgccaacattggcggcattcataaagtccgcaacgagtaccacgtctacatgaccgatgccacgggcaaggtggtgtttgattcggcgggcctggcggtaggaaaagactactcccgctggaatgacgtctggctgacgcttcgcggggaatatggcgcgcgcagcacccagagcaaccctgacgatccggaaagtacggtgatgtatgttgccgcaccggtaatggacaggggcaacattatcggcgtgctgtcggtcggaaaacctaacagcgccatggcaccggttattcaccgtagcgagcggcggatcctgtgggcgggtggggcgctgctcggcattgccctgctgattggtctgctggtggcgggatggatcaatcgttccattggcagattgtcgcgctacgccgatgcggtgaccacggacacgcctctcccgctgcctaaccccggcagcagtgagctacgaaagctggcgcaggcgctggaaaatatgcgcattcgcctcgagggtaagaattacattgagcattatgtgcatgcgcttactcacgaactcaaaagcccgctggcggcgatccgcggcgcggcagagatccttaatgagcagccgccgccggcggtggccgcgcggtttatcgataatattctggtgcaaaacgcgcgtatgcagtcgctggtggaaaaactgctctctcaggcgcgtcttgaaaaccgggtagagatagagccggtgagcgtgagtatcagcacgctgttttcacggcttgcggattcacgctccgccgttatcacggcgaaaaatatcatcctgacctgccagcccacgtcgctgcaggtgcagggcgaccccgagctgcttgaacaggcgctgggcaatttgctggataacgccatcgattttactccacagggcgggacgcttcagctggctgccgaggagacgccaaccgagattcggcttaccgtaagcgacagcggaagcgggatcccggactatgccatggcgcgtatttttgaacgtttttactcgctccctcgcgagaacgggttgaaaagcagcgggctgggtctggcattcgtgcaggaggtggcgcgtctgcatcagggggacattgctctgcataaccagccagaaggcggcgtgaaagccacgctgacacttcaccgtcacttcacataa

SEQ ID NO: 123404 - DNA, 690 bp, Enterobacter cloacae
atgcagcaacctctggtctggctggttgaggacgaaatcagtatcgccgacacgctactctacatgcttcagcaggaggggtttgcggtgaaggctttcgggcgtgggttaccggtactggaagaggcgcggcggcaggtccccgcgctggcgattctggatgtcgggttgcctgacatcagcggctttgaactctgccgtcagcttctggcgcagcatccgtcactgccgatcctgtttctgacggcgcgaagtgacgaggtggataagctgctcggactggagatgggcgcggatgattatgtcgctaaacccttctccccgcgtgaagtctgtgcccgggtgaggactattctacggcggttacaaaaatccaccgcccccaccgagatcgtgcgtatcgggcagtttgaactgaatgaacccgccgccagaatcagctggtatggggagcctttaccgctcacgcgctacgaattcctgctgctcaaaacattgctgcaggcgccgggcagggtcttttctcgccagcagcttatggacaaagtgtggggcgaagacggcgatagcttcgatcgtaccgtggatacgcatatcaaaaccttgcgcgccaagctgcgcgcggtcaatgacgggctttcgcccatcagtacccatcgcgggatgggttacagtctggggctttattaa

SEQ ID NO: 123405 - DNA, 693 bp, Enterobacter cloacae
atgaaaaaaattcttcttgtcgcggccatcgctgcggcaacgtccatgaccgcagcccatgcggctaacaccgccgtcatgaaagtgcaaggcaaactgaccaacgcgtcatgtactcctacaatgagcaacggcggtgcagtagattatggcaaaatatcaatgggctcactgagcgcgactgaggataaccagctcggccagcgtgatatcaccatgacaattacctgtaattctgcgaccaaagtcggctggacaatgtacgacaaccgcaaagacagtctggctgacggccattatattgaagtcgatgattctgccgttgatggcagctcgacattcagcccccagtacacaagcggtttaggttttaccaaagaaggtcagaagattggcggatggtcagtgtataccaacctgccatatgtcacggtagacggcgcacctgctgatgcgattaccgcgggaggcactaatctgactaaatggaaaaaaaatacgacgggtcgtcttgttctggatgactacgaaaccatgtccgtcgccaaaccgggtgaactcgtgccgatggcctttaccgaagccgtattcccaatgaaagtctccatggcaatcagaaataccgacagactgagcattaccgaagataccgaactggatggtcaggcgaccattacgctgaaatacctctaa

SEQ ID NO: 123406 - DNA, 711 bp, Enterobacter cloacae
gtgaaaaaacttcttctcgccactctgattgccgtggcttcgcacgctgcgctcgccgactctaccgttgtgatgaaggtgaaaggcaaaatgaataatgcgtcctgtacgcctgaattaagcaatggcggttctatcgattttggcaccatcgccctggatcaactttctcctacccagacgaatcagatgggtcaaaaggacatgtcgttaaccattaactgcccttcagcgaccaaagtggcctggagcatcgcggacaataaagaagataccaatgcggcaaatgacctgacgtccagccagttctacatccgcgatgcggcggataacggaggtgatgcctggggcgctggcaccacctatggcgttggcaccacggctgcgggcgaaaagattggggcgtatgccatcgcaacgcgcgtgaatgaagttaccgccaatggtcttccggctcaggccatttatgccccggcgtacgtcaacagcaatggcgaatacatgtggcgtaacctgagtaccggtattattgccaacggtaacgcagaaattatgacggcgaccaccccaggcaaatcttctccgctggcgattaccaacgtcgtcttcccgtttaaagtctcgatggccattgtgaataccgatcgcctgaccacgaccgatgaagctcaactgagcggcgaaaccaccattacgctggtttatctctga

SEQ ID NO: 123407 - DNA, 717 bp, Enterobacter cloacae
atgaaaaagcttcttcttgccaccgtgctatccatggcggcaacagccgtttgcgcagaaccgaccgccatgctcaaagtacagggctcactgaccagcgcaggctgcgtgccggaaatcagcaacgggggtctggccaacttcggtgaaatcggtctggactccctctcctccagcgtgccatatcaggcaggccataaagatgtcaccctgaccatcaagtgccagtccgccacacgcgtgggctggacgcttcacgacgatcgcgcggattccaacgccggtgccagcctgccagctaaccagttccacgtggataacgctaccgcaaacggtggccaggcatctggctccagccaactgaacggcgtaggtaaaaccagcgccggcgagaacatcggtgcgtatgccatttctacctacctgacctccgttaccgcagacggcgcggcggtacagcctatcgcggctaccctctataccggcggcacgatcagcagcagaagctggatgaacatgtggaccagcggcatcctctccaacgatggcaccgacgtcatgaccgtttccaaaagcggccagcgtgcacctttagccttcatgagcgcggcattcccgctgaagattgcgctggccgtagccccaagcgacaagctgaccctgaccgacaaaaccgagcttgaaggccagtcaacgatcaccctggtttacctctaa

SEQ ID NO: 123408 - DNA, 744 bp, Enterobacter cloacae
atggggagtttttttcctgaccagcgaatgaaacccactatgtctacgatccacacatcaacacgtttgatctgctcactgtgcctcgcccttccggcttcgctttttgccgccggaatggtgcctgaaaccaccctgctgctgattgacgaagcgaaccacggcggcgtcatgagcgtgaaaaacaccgacagcattcccaccctgctttacacctccatccgggatatcgggggcgaccagggggtaaaactcaacgtcacccagccggtggtgcgcctcgagccaggccaggagcaacaggttcgctttattcttgaaaccgacaaaccgcttagcgttgaacagtacaaacgcgtggtgttcgaaggtattccgcccaaaagcacggataaaaacgtgaaggtcgggatcaacctgcgtcaggatttaccggtcctgatccatcccaaagatctgccggtggtcaccgacgcctggcaattactgacctggtcagtcaccgggaaagaggtcaaggtgcagaatccgtccgcctacgtggtccgtttctccacctctgtcaccttactgccttcgcatacggaaggtctggtcaacaagacgtttatcctgccgggagagaccatgacggtgcagaccgacacctcggttaatggcaccgataacgccattgagttcaatccggccagccgctacgggattgaagttgagagctttaccgcttccctgacgcgccagtaa

SEQ ID NO: 123409 - DNA, 2415 bp, Enterobacter cloacae
gtgattgagttctctttacgtaatcagacgcttcgcgccgccatactgggggctttgacattgcccgcccagtcggtatcggcggccggtatggattttaataccgatattctggcgacccgcggtatcagcaccaacctcgcccactacttctcccaggcccagcgatacctgccggggccgcatgccgtgcaggtaaaaattaacggcgtcgataaaggtacgcttgcgatccgcgtgggagaggaagggcaactgtgtctggatgatgactttacccgtgcggcaggtcttcttccgctgaatatcgatgcaaaagagccctgccatagtcttctgcaagattacccgacggccaccgtcacgctgctacccaacgcggagtcgcttgagatttatgttcccgcagaggcgatggacaatggtttctatgccgcgaaatactacgcgcacggcggtgcggcgggtcttatcaattacagtgcgttcagcaactacaacgagtacggcagcggtggaaacagtaccttttcccagggcaatattggcgccggtctcaacgtggcgaactggacgctgcgcagcaactttatcctgaccgacgataacggaacccgcagcacagagaatctctatacctacgcggaacacgtcttcgaagaacggaaacttcgcattcaggcggggcagattaacgtcaactcggcgctgttcagtggagcacaaattaatggcgttcagttcctgccggaaacgggcctgcaaccgaatattccggcgacgaccatttccggcatcgcccgcaccaaccaggcgcgcgttgacgttcgtcagtccgggcaggttatctactcttcgctggtaaatgccggtccgtttactctgaccgatgtcccggtggtgcgtggtaacgtggatctggacatcagcgtggtcgaaaccgacggttccaccacgacgtttacggttccctcctcctcactgaacgtgagcgggatgacgcgcaccgaagggctcagcgtctctttgggtaaagttcgcgataccggggatgaacaggggtcgccctgggtatttaatttttctgacggaacccggtttacgccccagctcaccggcgtcacggcgggcgtgctggcagagcagtatcaggccctcggggcgatgctggaatggtcgccagccgagtactggctcctttctcccagcgttcagatgagccgcgcgcagttctacggtcaacaaaatggccgcaagatagaattgcaaagtcacctttccctgcccgagcaactcacgcttggggtcagcgcatcaacctacagcaccggctaccgggagttaaacgaggcgatggacgctgaatcccagcgctatcaaagcgcctggaataccagcctcaactggaacaacgcgtgggttggctcgctttctttccagtacagcgagaatgctggcgatgaagagagcagtagctcccgctacctgatggtctcctggggcaagagtctggggcacacgtcgctctcagtgaactggcagcacgccctcagcagcagtgagacggagaagggcggcacaagtgatggcgacctgctctatcttaatctggtcattccgtttggcactgagcgcatcagtacctatatgcgcagccagggtgaaaaacaaaacctcggtattcaggacagcggatcgtggggtcaaaacaccaattacaacctctcggtcgatcgcgacaatcaggacaagacccagtcgtttaacggcaatgttagcaccaacctgcactacacacagttgggcatggccgcagggctgaacgacgggaatcagcataattacagcacctccctcagcggcggcatcgccctgcatggtcatggcattacgtttgcaccctacccgattaaagacacctttggcattgcgcgattaagcgagccggaaagcggtattcaaatcaccacgcccgatggaaccgtctggaccgatgcgtgggggcaagccgtggtgccgggtctgcgcgagtggcaaacctctcagatagtcattgatgccagctccctgccacagggaatggatttatcgaacgggatacagaccgtttctgcagcttacggctcattcgcgcaggtggatttccacgtgctgaacacgcgtcgtctaatgctgagcgtgaaacgccctgacgggtcatggctcgccagagggcttagcgtggtggataaagacagccgttatatcgtgagcgtaatggataacggcagcgtgtttattcccgacgccacggatgcgcccgccctgtatgtggtggacgacaacatggcaaaaatttgccacatcacgtattcgctcagcgaagacaaaaataccgagtcctattacgaaaaagcagaaggaatgtgccagtga

SEQ ID NO: 123410 - DNA, 570 bp, Enterobacter cloacae
gtgaaaacctgttattcccttttattcgcggcgtttgccagcatgattttgctcttctccgcacgcgcgtccagtgaagagtgtcaggttacgttttcgcagcctgttgtctcgtttggacaactcaaaccgtcggatatcgccgcctcgcagaagaactggaaccgaatgccggccaaagaaattacggccaacgttttctgcccggagccgagagtgatggccttgtttctgcagtccactgccggcgtcaacgggggggttctctttggtcaggacgggcgactggccattattgccgacagtatggtggttgacgggcatgcctgcacgctggcgaaaacgacggaccgtatcggttttacgccctcctccagcccgacgcaacgcgcgtttatcaaaaataatgaaggtctcgttgcccggcaaaatgccgcgccggtgcggggtaaacacatgagcttcacccttaagattgttcccgtcattaataacagccagcttcgtcatgttgctgacaatacccttcttgagagcaatatggcctgggaattattaacacaggaataa

SEQ ID NO: 123411 - DNA, 702 bp, Enterobacter cloacae
atgaaaaaatgtttactcgttgtcgcgctggccctggcggccacatccgcacacgcgggcgataccgccgtactgaaagtcaaagcctcgcttgccggtgcctcgtgtgtaccggagctgagcaataatggcgtgatcgattttggcaggattcatattggcgatttgtcgcaaacccaggctacgcagctgggcgaaaaaggggtgatgctgacgatcaactgcccaacgccaacaaaggtgggctggagcattgcggataaccgtaccgattccaacgccagcacgggcagcagtaacctgaaggtgaaaaacgccaatgctaacggcggtgagcttcgcggtgcgatgaacacctttgggctgggcaaaacgcacgatggtaaaaacatcggcgcgtactccatctacaccacgccaggcgatgtgacggcgaacggcaataacgctgagcctatccgtacggccgtgaccgcgggaacgggcgtgagccgctggcagaaagccaacggtggtaccatcgccaataaagatttgggtctgatgagcgttgcgccggcgggcaaaaacgacccgatggcggtcaccagcgtctctttcccgctgaacgtgtctctggcggtcgagaatctgaagaatctgtctttaacggaagatacggagtttgacggtcaggcgaccatcagcgtggtgtatttgtaa

SEQ ID NO: 123412 - DNA, 783 bp, Enterobacter cloacae
gtgacgtaccggtttatcgatacccactgtcattttgattttccaccgtttacgggggatgaagagcaaagcatcacgcgagctgcacaagccggcgtagaggcgataattgtgccggcggttgaagcggcatactttgagcgggtactggatctctcaaggcggcaccaggcgctgtacgccgcgctcggcctgcatcccattgtgattgaacaccatcttgatgagcatatcgacgcgctggacgccattgtgcagacggctggcgacaaacttgtcgccatcggtgagatcggcctcgatctctatcgcgacgatccgcagtttgcgcgccagcagacgatccttgatgcgcagctgcggctggcgaagcgctacgatctgccggtgatccttcactcccgccgaacccatgacaaactggcaatgcatctgaagcgtatcgatcttccgcgaaggggcgttgtgcacggcttttcagggagcctgcagcaggcgcagcgctttattgcgctgggctataaaattggcgtcgggggtaccatcacctatccacgcgccagtaaaacccgcgatgtgatggcgcagctgccgctcgaagcattattactggaaaccgacgcgccggatatgccgctcaacggttttcaggggcagccaaatcgcccggagcaggccgctcgggtctttgacacgctttgtgagctgcgcgaggagccggaagaggtgattgcgcatgccctgctggagaatacccgcgcggtatttggtattacattatag

SEQ ID NO: 123413 - DNA, 414 bp, Enterobacter cloacae
atgacatcccgacgagactggcagttgcagcaactgggcatcacccagtgggccttgcgtcgcccgacggcgttgcagggcgaaatcgccatctccatccctgcgcacgtccggctggtgatggtggcggaggaactgcctgccctgaatgaaccccttattggtgatgtccttcgtagcctgaagctgaccactgaacaggttttacagcttacgccagatagggtcaccatgctgccatccgacagccgctgcaacagctggcgtatgggagacatcgatgaggtctccctggaagggagccagatctgctcgccagcgctggacgaactgaaagccaacccaaaagcgcgcagcgcgctatggcaacaaatctgcgaatatgaacacgatttcttccctcacgacgcctga

SEQ ID NO: 123414 - DNA, 1275 bp, Enterobacter cloacae
atgcaaccggacgcgcacaagcgtgcattaattgcaggctccattggtaactttatcgagtggtatgagtttgcggtctatggttttctggcgaccgtaattgcgaagaacttcttccagcttgagggggacgcggggctaaccagcctgatccttacctacgcttcctttgccatcgccttcttcttccgcccgctgggcgcggtggtgtttggcagaataggtgaccggataggccgaaaaccgacgctgattattgtactggtgctgatgacgctggccaccgccgcaatcggtattgtgccggtctatgccagcatcggtattgccgccccgctgattatcacgctgctgcgcatcctgcaggggttgttcgccggtggtgagtatggtggcgccgtctcgctgatgaccgagtttgccccacgcggcaagcggggcctctacggtgcatggcagtcatttaccgtcgcgctgggcctgttagcaggcgctggcattgtcgcactgctctccgcccttctgacaccggaagccctgcatgactggggctggcgcatcccgttcttcctggcattaccgatgggcgtggtggcgctgtggctgcgggtgagtatggaagagacgccaagctttgtgcaacagcaggaaaagccggttgccgctcaggctgataccgtcgccacgctcaacgccattgtgatgggcattggccgggtgatggtctggtcagcggcgggttatacctatctggtgattatgcccacctatctgcagtcggcgctgcataccgggtttaatcaggcgctgttgattgcggtgatttcgaatatcggttttgcgctgacgattattccgtccgggatcctgagcgacaaaatcggacgccgcacggtgatgatcgtcgccaccacgttgctgctgctccttgccctgccgctgctgaaggttttacaggcggagtccagcacgctggccatcaaagcgctggtggtgctgattgcgggtggtctggtgggtatgctggcaggtcccgggccggcgatgctctcagagatgttcccgacgcgcgtacggtataccgggcttgggctggcttattccctgtcgaacgcccttttctcgggctgtgcggggctgattattaccgggctgattaaagagacgggcaacctggatattccggcttattacgtcatggcgacggcggtagtgagtatcttcgcgctaatgacgctcaggaaggatgaccatttgcggtcactggaggagtga

SEQ ID NO: 123415 - DNA, 1932 bp, Enterobacter cloacae
atgatcaactttttccgtcgtgcaggtctgggtgcaaagctgtcgctgcttaccggtgccagtgtcgccatcctgtttctgtttttcacttttctgctcagccaaaaagccagccagcagcttgaagccctcgcgatagaagacctgcataatcagtccaccggcatggtcgatatggtgcagatgtttaacaccagcctgagtgaagaggttgagaggtatacccggctgtttactacctttttgccccagccactgagcgttgataacactcaaacccagacgattaacgggattaacgttccgctcctgaaaggaggggaaaccgggctacatgaaaacaataccctttcagacgattttctgagccggacaggggcaatctcgaccctgtttgtgcgtagcggtaacgactttgtgcgcgtcgccacatcgctgcgcaaagagaacggcgagcgggcaatgggcaccgttctggataccaccagcccggcctttgccgccgtcacccggggcgaggtttatcgcggtctggcgctgctgttcggcaagcgctatatcacccaataccagccggttaaaaacgcggacggccagatcattgcaatcatctttgttggtgtggacatcactcactcctggaacgtcatgcgcgagaaaatcctcaaccgtcgactgggcgagagcggtcacttctttgttctggatcgcagccacggcaaaacgcgcgggcagtatctgttccacaccagcgcggagggaaaagtaccggagtgggatagcgctatccagcaacagctgttgagtgataaatccggcacgctggagcgcgtcagtgctgatggtcgcacgctgaccatggcgtatacgccgctgccaggctggaactgggccattgtcggcgaagtggataaatcggtactgctctcaagcgtgaccgccatgcgcgaccgcttcctgctggcaggggtggtgctgtcagtgctcttcgcgggtctgtttgtggtcattatacgacgcatactgacgcgcccattgcgcaatgtgatccacctggcccgacagtatgccgcaggcgatctgcgctccagcctgcccgtgacccgccaggatgaggtcggtcagctcatcgatgccattaacggtattggagggggactgcagaaaattgttcttcaggtgcgcgaggccgcagcggagatccatatgggcaccaacgcgctggcatccgatagcgaagaaatctccgggcagattaacaagcaggccagcagtgtagaagagacgtcagccagcatggagcaactggccgcgaccgtgcagcaaaatgccgccaacatggaacaaacgcagcagctggtaggcgaaacgtcgcgcgcgatacatcagggtggtgagacggtcacccacgctgtcgctaccatggatgatattcgcgaagcatcaaagcgaatcgaagacatcacgcgcgtgattgaatccatcgcttttcagaccaacattctggcgcttaacgcagcggttgaagcagcccgcgcaggcgagcacggaaaaggttttgcggtggtggcgcaggaagtacgcgcgctggcaggacgcagcgccaacgcggtgaaggagattgaacagctcatcggcgatacgcttagaaaagtcagcgaaggccatgcgctgtctgaacaaacgcgtctggtgatggattccatcatcgtgcacatcgataacatcaacaagctggtcacggagattaaccatgcgtcccgcgagcaatccgcgggaataggccaggttaatctggccatgacccacattggcgaagcatcgcacatcaacgccgaccacgtcttacgcagcgaacaaaccgcacacacgctacgtgagaaaggctcacaccttacccaactggtgagcctgttccagctaaagagttag

SEQ ID NO: 123416 - DNA, 309 bp, Enterobacter cloacae
atggttatgcgcaggtttgctgctttattgctgatgttactgctcagtggctgtagcgcgctgcagggaacgccacaacccgctcccccggtcgccgatcacccgcaggaaatccgtcgtaatcagacggaaggattacagcgtatgggtaccgtctctgcgctggttcgcggctccccggatgacgcggaagaagcaataaaggcacaagccgtcgccgccaaagcagattattacgtcatcattatgatcgacgaaaccatcattacgggacagtggtactcacaggccattctgtatcgtcaatga

SEQ ID NO: 123417 - DNA, 723 bp, Enterobacter cloacae
atgattgaaattgaaatacgccatctgggtgatcgtgaaatattacacgcaacacccgccggaaaacgtgaggaaccactgcctgttatagtgttttatcatggatttacctcatcgaagctggtctacagctattttgcggtggcactcgcgcaggccggttttcgtgtggtcatgccggatgcacctgaccacggcgcacgttttaccggcaacgaacaggcgcgacttgggcagttctggcacattttgcatggtagcctgaccgagtttgccgggctgcgcgatgcgctttaccaggcagggctggtggctgataatcggctggccgtggctggggcatcgatgggcgggatggcggcgctggggatcatgacgcaccatccagaagtgaagtcagtggcttgtctgatgggctcgggctactttacctcactggcgaagacgctttttccacctcaggcactcacagaggttgaggcggcgcttgcagagtgggaggttacccgggcgttaccgcgtctggccgatcgtcctttgctgttatggcatggtgatgcggacgatgtggttccacccggagaaacgttccggcttcagcaggcgctacagcacgaggggctggatggcaacctgacctgcctgtgggaagcgggcgttcgccaccgcattacgccaacggcgctggacgccacggtggacttcttccgccagcacctttaa

SEQ ID NO: 123418 - DNA, 1059 bp, Enterobacter cloacae
atgccgggcaggttaaaaatggaggagatcgcggccctcacgggatattccgttagcacggtgtcgagggtattaagcggcaagtcatataccagcgataaagcccgggatgcgatcgttcgcaccgcacgagagctgggcgtgctggagtccatggccagtggacggctgttgattaacggtattgccgtttttgctccggaaagaacctttcaggggcgcggcgatattttttatcttgaggtgaccaaagggattactgaggcctgctcgccacacaatgtgtgggtcagctgttgcggattagaagaacagcacgccgatgtaaaattatttatggaaaaggccagccagaagaacatcaacgcgataattattattggtactgatgatgccaccatatttaaactggccagcacgctcaataaaccctgcgtcttaattaattccgtggaccgggagcgggtactggattcggtatcacccgatcaccgggcgattggcttcaccgccatgcagtatctctttgaacaggggcaccgacgggtcctgacgctgacctgccttcggcgagatacgctttacgctcgtctggatggcattaaagaggcgtatcgccattttcacgtcgcctttgagccgcagcgtgatttactcgtgacggagtggtttaccgcagacgaagccgagcgggcgctggatgagtggctgctgagtcatgacagagcgcagtggccagaggtgattttcccgaacagcaccagcatgaccgaaggtgtggtgagggcattaacccgccatgggctgcgcgttccggaagacatctctctgattaccaccgattttgcctggaatttagcgcaccggttggaaaaaccgatcacgggggtcacggtgccctgccgcgaactggggattgaggccgtgcacctgctgcagacccgccttaacaggccgcaggcaccggtttttaacctgctgttgcagggaaaagttatgaattatgggtcggtcagtaacgccacgcgccacgcggctcgcgtggcgctagaccagtaa

SEQ ID NO: 123419 - DNA, 294 bp, Enterobacter cloacae
atgggctacataaaggcgtttgactgttacggtaaagacagcaaatggcagtatctctgcatcatgacattccagctcgcctggtttttgttttatttatggatcccctaccgtagcgattatgccattttgctgtttttactgttttttattcccgtcatttcaagcaatacgcggtgcatcaactactacggcttttcacgcgccctgtgcctgatatggctggttgctccgtacatcatgctttttgttccgctgtttttgacccgacgccgaagcacagaagagagctaa

SEQ ID NO: 123420 - DNA, 357 bp, Enterobacter cloacae
atgaaaaattattcccgtgctaataccggcattgacttaaatcttatccctgtttttattgaagtggtccgctgcggcagtatggcaaaagcctccgtacgtctggagatgtcgcgccccgcggtgagtctggcattaaaacgctttaatcagctgtttgacgagccgctatttttccgcaaagggttatatcttgagccgactgaaaatgcattagcattaacccagtctctggaaatattaatgggcgacattcacgataatattggcgcattaaattcagcgacacataaaaccccgacacagaatgcgccggggcgggaaaatattatgccgctgtctgagccgtcagtttaa

SEQ ID NO: 123421 - DNA, 1377 bp, Enterobacter cloacae
atgcgcattcatatattggggatttgtggcactttcatgggcggactggcaatgctggcgcgctctctgggccatgaagtgacaggttcggacgccaatgtgtatccgccgatgagcacgcttctggagaaacagggcatctctctgattcagggatacgatgccagccaactggatcctgagccggatctggtgatcattggcaacgccatgacccgcggtaatccgtgcgttgaggcggttctggaacgcaacattccgttcatgtctggcccgcagtggctgcatgatttcgtgctgcgcgaccgttgggtcgttgccgtagccggaacgcatggcaaaaccacgaccgccggaatggcgacctggatcctcgaagcctgtggttataagccaggttttgtgatcgggggggtaccgggtaatttcgatgtttctgcgcgtctgggtgacagcccgttcttcgtgatcgaagccgatgagtatgactgcgcgttcttcgacaagcgctccaagttcgtgcactactgcccgcggacgctgatcctcaacaaccttgagttcgatcacgcggatatttttgacgacctgaaagcgattcagaaacagttccaccatctggtgcgcatcgttccgggtcagggccgcatcatcctgccggaaaacgacatcaacctgaagcaaaccctggcgatgggatgctggagcgagcaggagatggtgggcgagcaggggcactggcaggcgaaaaaactcaatgcggatgcctccgagtgggaagtgctgctcgatggcgagaaagtgggtgaggtgaagtggggcctggtgggcgagcacaacatgcacaacggcctgatggcgattgccgcggcacgtcatgtgggcgttcagcctgcggatgcggcggatgcgttaggctcgttcattaacgcccgccgtcgtctggagctgcgcggtgaagcccacggcgtcacggtgtatgacgactttgcgcatcacccgaccgccattctggcgacgcttgcagctttacgcggcaaagtcggcgggaccgcccgcattctggccgtgctggaaccgcgttcgaacaccatgaaaatgggcatctgcaaagacgatcttgcgccatccttagggcgtgccgatgaagtcttcctgctgcagccgcagcatattccgtggcaggtggccgaagtggccgatgcctgcattcagcctgcgcactggagtgcggatgtggatgcgctggcggatatggtggtgaaagccgcacagcctggcgatcacattctggtgatgagcaacggcggttttggtgggatccatcagaagctgctggacggtctggcgaagaaagcgcaggcggtcgcagagtaa

SEQ ID NO: 123422 - DNA, 243 bp, Enterobacter cloacae
atggccacgctgaacgtccgtctggatgacaaactcaaaaacgaggcttatgccgtgcttgaaaaactcaatatcacgccaacggaagccgttcggttactgtttcagtacgttgcggagacggggcgtatgccggtgaaaacggtcactgttagcgacagtgaagatgaactcatacagacagtccgggagcggttggctaatccgcaaaaaggaattaaggttaggctggatgacttatga

SEQ ID NO: 123423 - DNA, 240 bp, Enterobacter cloacae
atgacttatgaactcgtatttgatccgagggcgttcaaggagtggaccaggctgggtgataccgtaaaaaatcagtttaagaagaagcttgcgaacgtgttggtgaaccccagggttgaatcggctcgcctgcatggcctgcctgattgcgacaagataaaactcagatcccagggttatcgtttggtctatcaggttcaggacaacgttgtgacggtatgtgttattgctatcggttag

SEQ ID NO: 123424 - DNA, 573 bp, Enterobacter cloacae
atgaacttgcttgaactcacgcaccccgaactggtgtttattaacccaccctgccgcacgcctgaagcgctgatccgctggctctccgaaccgcttgtcgggcgaaacgtcatcaccgataaagatgcctttatccagagcgtcttacaccgcgaaagtgaaggtcccaccgcgctgggcgaagcgctggccgttccgcacggtaaatcagacgcggtgcagcaggcggcgttttgtctggcgctttttgatgagccggttatctggccggggctggaaggcgatgaagcggtcaggatggtttttctgctcgccatcccgcacgccgaggccggcagtacgcatatgcagctgctgacgacgctgaccagttcgctggcggaagagcgcgtgcgtaacgcgcttctggcggcgcgcaccggcgaagaagcgctgtccgcgttgcgcagagaaacgccacaaaacgcggacgccgaacccgggcgctcacttgttatcccgctgatactggggagtattgcggcggcagcctttctccaggccggactgaactgggcatgcggggtgagttaa

SEQ ID NO: 123425 - DNA, 1404 bp, Enterobacter cloacae
atgggcaagttcaagtttccctccgcttacaccattctcttttttctgattgccgttgtggcggcactgagctgggtcgtgcctgccggtcagtatcagatggcaatgaatgaaaccctcggtaaagaagtgccgattgccggaacgtacgcgcacgtggcggcgcatccgcaggggctggtttccgtactgatggcccccattgccgggctgtacgatcccgtttccggccaggccggggcgatcgacgtcgcgctgtttatcctgatcatcgggggatttctcgggatcgtcaccaaaaccggggcgatcgacgccgggatcgaacgcgtaaccacccgccttcgcggacgtgaagaatggatgatcccgatcctgatggcgctgttcgcggctggcggcaccatttacggcatggccgaagagtccctgcccttttataccctgctggtcccggtaatgctggccgcccgtttcgatccggttgtcgccgcatccaccgtgctgctcggggcggggatcggcacgctcggctccaccatcaacccgtttgccacggtgatcgccgctaacgccgccgggatccccttcaccaacggtatcgccctgcgcgtggcgctgctggtgatcggctggatcatttgcgtggcatgggtgatgcgctatgcccgtaaagtgcggctggatccgtcatgctctatcgtcgcagacaagcaggaagagaacctcgcccacttcctcggcaataaaggcgagcagtcgctggaatttaccccggtgcgcaaaatcattctgctgatcttcgccctcgccttcgcggtgatgatctacggcgtagcggtgctgggctggtggatggcggagatctcggcggtatttttggccagcgccattatcgtcgggctgattgcccgcatgagcgaagaggagctgacctcgacgtttatcaacggcgcgcgagatttgctgggcgtcgcgctgattatcggcattgcgcgcggtatcgtagtcattatggataagggcatgattacccacaccattttgcacagcgcggaagggctggtcagcgggttgtccacggtggcgtttatcaacgtgatgtactggcttgaggtcgtgctgtcgtttcttgtgccttcttcgtccggcctggccgttctgacgatgccgatcatggcaccccttgctgatttcgctaacgtcaaccgcgacctggtggttacggcttaccagtcggcctccggcatcgttaatctggtcacgccgacctcagcggttgtgatgggcggtctggcgattgcccgtgtgccttacgtgcgttacctgaaatgggttgcgccgctgctggcgatcctgacggtggtgattatggtggcgttaagcctgggtgccttgttgtaa

SEQ ID NO: 123426 - DNA, 1263 bp, Enterobacter cloacae
atggctctgagtgatgtgaaggttcgttcggctaagcctgaagcaaaagcctataaacttactgacggcgacggtatggtgttgctggttcaccctaacggttccaaatattggcgactgcgttatcgcttcggtggtaaagagaagatgctggcgctagggaagtatcctgaagtttcgttagctgatgctcgatcgcggcgagacgaagcgcgtaagcttttagctaacgacgtcgatcccagtgaaaacaagaaagcggttaaggtagaacaggagcaagaggcgataacgtttgaagtggtcgccagagactggcatgccagtaatcagaagtggtctgcatcgcatagtgctcgtgtattgaaaagcctggaagataatctctttgctgctatcggtaagcggaacatagcagagcttaagactcgggatcttcttgtacccattaaagcggtggagtcatccgggcgtcttgaagtcgccgcccgtttacagcagcgaactaccgcgattatgcgctttgctgttcagagcggcttaatcgattacaatcccgctcaagagattgccggtgcggtggctacggcgaaaagaaagcaccgtgcggctctggatcttgaacgtattcccgaattacttcaccgcattgatcactactctggcagaccgttaacccgactggctgtcgaacttaccttgttagtctttatccgctcgagcgagctgcgatttgcccgttggtcagaagtagattttgaaacggccatgtggacaatccccggtgagcgtgaaccgctggaaggtgttaagcattctcaacgtggttcgaagatgaggactcctcatctcgttcctttgtcgcgacaagctctcgctatcttggaaaagatcaaaagcatgaatgggaaccgtgatctgatcttcgtaggagatcacgatccgcgtaaacccatgagtgagaacacggtgaacaaggctctacgagtgatgggctatgacacgaaaacggaagtctgtgggcatggtttcaggacaatggcgtgtagttcgttgattgagtcggggctgtggtcgagagatgcggtagagcggcagatgagtcaccaggagcgtagctctgttcgggctgcttacatccataaggcagaacatctgggagagcgcaggttgatgctgcagtggtgggctgattttttggatgctaatcgggagaggggggttagtccgtttgattttgggaaaaccaataataaaacgtga

SEQ ID NO: 123427 - DNA, 507 bp, Enterobacter cloacae
atgaatctaggaaatgagttccctaaaaagcagaatgtttataaaggcatgtggtatttaatcactaacaccaaccgatttgtattatccgcagccgaaaactcaatggcatttgagcttgagaaagaagagtatcaacggaagctcgaacaaggaaattacagtcttgatccaaaaaatcatacctactctcatccccagaggctaaaagaattacgaactttgttactcaagacaacagtctatatttttagcattattattttaatagcaggcattggtttttatacaggagcattaaaaataacacctcatctatcatggaaaaatagcaccagcgctttaggtattattttaatttcatggtctacattatttcaattaggctggggaaatggctcatggagtggaacgtgcctggatgaattggtaagaaattctctttttcgtcttatttttagcattggtgtatttttgagtttattatatttcgttctgccagaatga

SEQ ID NO: 123428 - DNA, 2871 bp, Enterobacter cloacae
atgagccaaagcaacgccataaaaattgccaatcggattagtgcacgactgtcactgcgcgatccgcaggatgaatcattgcgcatcttatgtgacgtgctcgaacagctcggtctcagcaaagatcccgatcttaatcgttggattgaattgctgcgtcagcagtatcccacagtgaaaggatttgaacgtgccttcccttcactatgctttgcactggctacgggtgtaggtaaaactcgcttaatgggagcgatgattgcctggctatacttaaccggacgtagtcgccactttttcgtactagctccgaacttaaccatctatgaaaaacttaagatggattttttacccggttcaccaaagtatgtttttcagggcattccagaactggcacaaacaccgccggttctaattactggtgatgactatcaagaaggacggggcgttcgtctggattatgctattgccgaaagcaaaacgggtgatctttttggcagcgaaacagctccgcacattaatatcttcaatatttccaaaatcaatgcactggaaaatgccaaaggtgctgctaaatccaaggtggctaaaattcgacgtattcaggaatacgtcggagaatcttattttagctatcttgcaaacctgccagatttagttgttttgatggatgaagcccaccgttactatgctagtgcgggcgcacaagcgctcaacgatcttaatccagtattgggtattgaattaaccgccacaccgaaaaccgtaggtgcgaacccacgtgattttaaaaatattatttatcactatcccctttcgcgtgcactaaaagacggatacgtcaaaattccagctgttgccacgcgcaaagacttccgtgctgccaactactctgaagagcagttggaaaaaataaagctggaagatggaatccaccatcatgaatacgtgaaaacggaactaaccagcttcgccaacaacactggtaacaaactggtcaaaccttttatgttagtcgttgcgcaggataccgatcatgcagacaggctaaaagtacgcattgaacacgacgatttcttcaatggcgcttacaaaggcaaagtaataaccgttcactctaaccaatcaggcgaagagtcagaagaaactatgcagcggcttttggccgttgagcatgacaaagacactgaaatcgtcattcatgtcaataagttaaaagagggatgggacgttacaaatctgtatactatcgttccattacgtgcttctgcctctgaaatcctgactgagcagaccataggccgaggactgcgccttccctacggcaaaagaaccggcgtcgaagccgttgatcgcctgacgattattgcccatgaccgttttcaggagattatcgatcgtgccaataacgatgactcgattatcaagaaagttctgtatatcgggctggatgatgatgaaaacggtattccagaagtaaaaccccagcaaattatcgtaccatcaatggctgaattcctgttgggaaatcaagtcattgataatgatgggttgcaggcttgtgaagctcaagcaatatatcagacaaactccatatcaaaaccggtaatcaatacggaaacagagcgtaaagtcgcagaactcacgtttaaagtggtgtcagaagaagctaaacggttaaccagcagtcagcaactcagcacgccagaggtgaaagcaaacgtaactcgacgggtacaacaagccttgcgtgaatgggaagtgactcaacatcaaatctcatcgtcttcggatcaactcgatttgacggaaatgattgaaaagcaggttgaactgccgagcttccttacaatggaggatacggaagttcaggagttggtcgggacgatcaccgaaaaactgatggaatatactatcgatattcctcgaatagtggttttaccagaacgtgaagtcaattacgggtttaatgatttcaacctttccgggttggatcgcattgcgctcaaacccggcagtaaagagctcttactcacgcatctggagaataacgaacagcggacaatcagttggcaggaaggtggagaagcggaagaaaggctagaaaactatctcattcgttatcttctcgaccatgatgaaattgattacgacgaacatgccgacatgctctacaaactggccggacagatggtgagccatttgtgcagttatcagccgcctgaagattcagaatccgttctgaaaaatgctggtcggcagctggctgaatttatatgggtgcaaattaaacaaaatatgtggacaacgccaacgggctataccgggcgtataactcagggctttgatgtaatacatccagcgacgttcaattttgccggtaatgaaaaaccgagagatttccgtgttgcagttcccgcaggagagaaaaataaagtccgccagatgattttcactggttttactaaatgctgttacccttatcagaaatttgactctgtagatggggagctccgcctagcccaaatattggagaatgatccctcagtgattcgttggatgaaacctcgcccaggtcagttccgtatcgaatatgctaatggtagaaattatgaacctgatttcgttgtcgaaatggacaatggctattgcctgattgaaccgaaaaaagcgacagaaatcgacacaccagaagttcaggccaaaacgcgagcagctatccgttggtgcgaatttgcaaatcaaaatgctgaaaaactgaatgggaaatcgtggcaatatgcacttatccctcatgatgaaattgagttaagccgttcaatttctggactaatggctgattttatgatgactaatagtttatctgtataa

SEQ ID NO: 123429 - DNA, 792 bp, Enterobacter cloacae
atgtcaatttggaaacacactctcgcaggccatacacaagaagcgatgaaagaaatgttagctctttatggtgatgagccgtttacaacgcctaaaccagaaagactattacagaccatacttacaatcgcaactaataaaggggatcttgtcctcgactctttcgcaggatccgggacaactggtgcagtcgctcacaaaatggatcgccgttggatcatggttgagctaggtgaacactgtaatacccatattgtacctcgccttaagaaagtaattagtggagaagatctaggcggtatttctaaatctgttaactggcaaggtggtggcggattccgctacttccatttagctccttcattactcaaaaaagataactggggcaactgggtgataaataaggaatataacgccgaaatgctggcagaagccatgtgtaagcatatgaattttacctacgcaccaagtcagactcaatactggaatcatggttacagtacagaaactgattacatctacgtcactaccggttctttggcttatgaacaactcaaagttataagtgaagaggtgggaactgaacgcacattgttgatctgctgcaaagcctttatgaccgaaggggcagactttcctaatctgacattggtaaaaattcctcgtgccattctaagtaaatgcgaatgggatcaggacgactatagttttacgctaaatgtactctctgattcagaacaacctgacgatattgactacgacgaagatactgaaggcgaagaacaattatga

SEQ ID NO: 123430 - DNA, 2388 bp, Enterobacter cloacae
atgacggcgaattatcagcatctaaatatttccaaagcccctcttcagaatgagcgacggacccgcagagtcaatatgcctcgtattcgcagaggcgatttacgtcagcatgggcaaatgttattgaaccagctccagactctgcgcccgatgctgacgcaggtaccaggcagcgccgctgatggtcgatatatactcaaattgaactacagcggtacgatgaatttttcggcattgatacatcatggcgtagagtttgtcagtcaggaaaataaacaagtttgtgtagtctttagtgacgagcaagggctagctacatttgcagaacatctgtcatccctcggtctagataatacagaactaacctacaaacagatcctggaggcacttgacggtattgagggctggtcggcggaagatcgcaaaagctgggctcttcggcgttatggttttcctgtagcggaatgctttaaactggatgtggagctctggcctatcgaagttgcgcatcatcccaaacgtatcgatctgtatacacgttttgagcactggttacaggagcagggtatttccaggcaggataaagtcaatctggacagcctgttaatgtaccgggtcgaggtttcactcgcgcaagcggaacacctattagctcatcgggacgttaggtttattgatttgccaccgtctagtggcattagctatcaacaaattaaccgggacatcaatacacttccagctcgcctgagctcgccagcggaaaatgcgaccaggatatgtattctggatagtggtattaataccaaccatcctttgttaagcgctgccattgctgaaagcgccagctttattcccgatcaagatgcgtttgatgaacaggggcatggcactgccgttgccagtattgcgctgtatggtgatgttgaggcttgtaaccagagcaatttctggcagcctcaactatggctgtataatggaaaagtactgaacgagcaggctgaatttaatgccgaaactattgaagctacgcttgcagccgctgttgcatattttaccgatctcggctgccgcattttcaacctgtcattgggaaacgctaatgctccctacgacggcaaacatatccgcggtatagcgtatttattagatacgttgtcaaggcagtacaatgtactctttgtcgtttctgcaggaaacttctctggtagtgacgagcctccggtaccgcaaagcagctggcgggatgagtatcctgattacctgttgcatgaggcaagcgttatcatcgatccagctcctgcactcaatgtactgacagtgggcagcatcgccaggcataacgcaacgcacgatgcacaacgaagacctgaggatattcagcatctctgcccggcaacagaaaatcaaccttcaccttttacccggcatggtccatcaataaaaggggcgtttaaacccgacgtgatggcacacggtggcagtgtcgcttccaatgtgcggcaagggcaatggcaggcgcatatgcgtggtttgggcgtattaagttgccatcaccagtttcagggcactaccctgtttaaagagctcagcggtaccagcttcgccgcaccgtatattacgcatctggctggacgcctgttaaatgaatacccggatatgtccgccagtatgttacgtgcaatgctggttaatcatgcatctgtccctcaggcgatgacgcaggctttcccgcaggcgatgcgagaaagttataaaaacgcacctacaacgagaaaccgcgagatagaacgtgaggtaacgggttacggcatcatcgatgaagatgctttataccgctcttcagaatatgtggtagtcatgcgatgtgaagagcagatagaaaataacgcccatcagttttttgaactgcccttcccggcttcttttttaagatcgcagcgatcaacccgtgaaattcgcgtcacgctggcttactcacctgctgtacgtacaacgcggatggattataccgccacgcggattagtttccggctggttaaaggccgctcgctggatgaagtgcaggccagttttaatcaccagacgcaaagtgaaacggaaacccgttccgatgatgcccaaactaatcgtgttgtatcagcccagcagcgggagcgcggtacggtacagtcgtcggtatggacttttcgtcaacgtaatccagatgaaaaatggtttatcgttgtaacccgtcaagacagagattggggtgaagcattctgcaacgagcaggagccttacgcactggtagtgactgcgaccgatcgcgataatgcacacgcgcagctttatacacaaattcaggcgcagatccgtgaacaggaacgcgcacgagcacgtattggataa

SEQ ID NO: 123431 - DNA, 981 bp, Enterobacter cloacae
atggctaacggtaaagtattaagacagctgataaaagcgggcgcgacgggcgacactgctacgttccgtcgcgtttcagaagccattattgatgaggaacgtcagaaacagcaccatcttctggctaacgatctggagcatattctttatggcgatcacattgttcaggcttcgcgttcacctacgttgcctccggcaccggtagacaaagaaagggggctgccactgttggatctacggcagccgcagcgcagcctcgatgaaatgatccttccagctaccagtgctacagtgatcgatgagctccttgaagagcaccggcgtagcgatgtattgcatagctatgggatgaaagcagccagtaagatcatgtttttcgggccaccaggttgcggtaaaacgctggcagcggaggtcattgcctttgagctggacatgccgctggcaattgtccgccttgatgtattggtatcctcatttctgggtgaaacagccgcaaatctgcgtaaaatttttgattttattgcccaacatccgctggtggtcttgttcgatgagtttgatgcaataggtaaagaacgcggcgacagcggagaacacggcgaattacgcagggtcgtcaatgctgtactgcaaatgatggatgcttatcaaggcaaaagtctaattctggcggccaccaaccatgaacatattttggacagcgccatttggcgtcgtttcgatgaagtgattgaatttcctctgccagatcagacgcagttacgcgagttgctggcgttaaaactacgcggcattcgccgacagtttgaactggacgatcatgagttgttatccttgcttcatggcaaaagtggtgcagatatcgaacgcattgttcgccgagccactaaacacatgatcctgcgtcaccaggaattcctgacgctgaaagatttaaaaaacgcgatgcagcgagagaacgccagaactcaccgataa

SEQ ID NO: 123432 - DNA, 2850 bp, Enterobacter cloacae
atgtattcagatcaacagcgtagttatctggcgcactggttaacgttaagcggcaaagccgaggattcacttacacagaccatcgccagcgcgcgagttgatatgaatccccatcaggtagaagccgcaatgttcgcactggcatctcctttgtcgaatggggttatcctcgcagatgaagtggggctagggaaaaccattgaggccagtctgattttggcgcaaaagtgggcagaacgacgccgtaaactattgcttattgctccggcaacgctgcgtaagcagtggagtcaggaacttgaagagaaattttcattaccttcgcgcattatcgaagcaaagagcttcaatcaaatgatcaaagagggatgtggtaatccatttgacattgaaaacgcgactggggaggctgcgatatgtatttgttcatacgaattcgcttcccgtaaagaacatgaactggctcgtattccatgggatctggtcgtcatggatgaagcccataaactgcgaaatatctacaagagcgatggcgctaaaacagccaaaaaactcagcagtgcattatctggcaggaaaaaaattctgctttccgctacgccgcttcaaaacagcatccttgagctttatggtctggtttccgttattgaccctcatttcttcggtgatttggcctcgtttaaggcccgttattctcggcagaatattgacgatgcagaattggcgttactaagggtacgtctgaataagatctgtaatcgtacgcttcggcgacaggttcagcaggaaggcgggatcagttttacccgccgtcattcaataaccgaagattttcgcctgacggaagatgaagaagctctctataaacaggtttcctcatatttgcagcaagacgatctattggcaatcaaaagcggtgctcgtcatctggtgacattagtcattcgtaaaattctggcctcatcgtctacggcgattcagggaacgctagagacgatgattcaccgtctagaaaataaaatgccggttttagatgccctgactgattatgaaaattatgatgattacagtgatgaagatggaatcgaggatgaagatacgatcgatcctcaggcactacaggcagaaattgatcagttaaaaagttataaaaccttggcggcatccataactaaaaatgccaaggcggaggcattgttaagcgttctaagtcgggctttcgaatttacagtagagctggggggattgcgtaaagcggtcatttttaccgagtccgtgcgtacccaaacctggctagcgcaactgctttcagacaatgggtatgaaggcgaagtggtgttgctcaacggcagtaacagcgatgcggcgtctagaaaaatttatagcgactggttggagaagcatcaaaactctggccggatttccggttcacgtacggcagatatgaaggcggcactggtcgaaaaatttagggacgaaggtactctgatgatttgtaccgaggctggtgcagaaggtatcaacctccagttctgttcgctgttaatcaattatgacttaccttggaacccgcagcgggttgagcaacgtatcgggcgtgttcaccgttacggacaaaagcacgatgttgtagtggtcaatttcattaataaaggcaaccgggccgatcagcgtgtctttgaactattgagccagaagttccagctttttgaaggcgtgtttggtgcatccgatgatattctgggatcgatagaatcgggcgttgatattgaacggcgtatccatgagatttaccagcactgccgctccgacgagcaaatagaacaggagtttaatcagctccaggacgaactcaaagaccagctggaaaaccgggagaatgaaacccggcgttccttatttgaacatttcgatgtagatgtcgtccgaaatctaaaaactcgacgcacaacgaccctcgcacagttaaacgattatcaggaaaatctgctgctgctagcggaaatgtttctaagtgacaatagcgatttccagcactctgaaactggttttcgttcttcgggaaagtattatgacgttagctggcctgttgcggatgaaaaggatgcagaatttttccgacctaatcagggatacggaaagcaactgattgatgtggccctacatgagggaaaagacctttccacattgccagtttgtcagaagctccatttcatctaccaacccaaggcaggacaattggctgatgtaaaattgctttgccaacaatcagggcagttgttactagcaaaagtcagtatcggaaatcaagaacaacaacgagagcagctacttgtcgctgccgtaacggaaaatggtgaggtagtggcggaagaaaccgcatcccgtctgcttcgcttgccgttgtcagaggtaacatcaatcgaagaacagcctgtgttacctactttaaccgcacaatgtgaggttttacggaattcttttatccagcaggtcgaacgtgataacgaactttattacaatgaagaagtagaaaaacttgaacgctggtcagaagatcgacgcatcgcgctggacctacgcatcaaacagttagatgcagaaattaaagaagcgcgtaaaaccgcccgccaacttccttcgctgaaagagaagatggaagctaaacgctcgctaaaggcactagaacgcgagcgggacaacatcatgttgcagtatcatgatgaaaagaaaaaaattgagcaggaagaagaccgcctgctggaagaggttgaacaaaagctggcgacagagataacgtccagtcaattatttgcggtgagctggacattgaattcaccttccgcatga

SEQ ID NO: 123433 - DNA, 3519 bp, Enterobacter cloacae
atggacagcaatactcaaggattcacttcatactggcgaaataccttagctgatgctgaatctggaaaaggggcatttgagcgcaaagatgaagattcattcacgcgatggatggaagtcgatcggggaagactgggtgaagagatcgtgcaatcgttcttcgagggcgaagacgagcaggttaagaccgttgaggtactactacgaccacaagtatggatccgcctgttaaagcatggcaaggaacgtacggcaggcgcaccaggtatagttactcctctggtgacttccgcactattgaaccgtgaaggatttttgtttcccgcatcgccagccaccattccccgtgacctgctcgaacctcttcctaagggtaccttttctattggtgaaatgccggaatatgacaagtacaaaactacgcatgattcaatcacctttggtcccgttaatgaggatgagctgcgtgatgagactgatgaacaacgagtggaacgatatgctcgttatcagcagttgtggcaaaagtaccttaaagacactgatgaacttttaaaaaatgttgctggcagatggctcgcatcacctgagcaatatgaaccagctggatatggctacattattaaagccaaccagcctggaggggccagcctccatatcctgcctatgtacgatcatctgctgtcgtgcaaaaaagaggtaccattgctggcgcgctttgcctcgaaagataagtttcctgttgagcagcttcttgccagtaatgccatgttcagtgagcgtctggggtattccggtgataaatttccgctggctgtggcgcagcgcgatgcccttagccattatctcactcaacagccgggcgatattcttgccgtgaacggtcctccgggaacaggaaaaactactctagtactctccatcattgctacggagtgggtgagagcggctgtaaacaaaactgaaccgccagtggtgattgcgacatcaaccaacaatcaggccgttaccaatattattgaggccttcggaaaagatttttctaccggcactgggcctatggccgggcgttggttacctgatgtaaaaagctttggtgcttacttcccttcttcaggccgaaaagccgaggcggtaaaaaaataccagacggaagatttttttaaccgtgttgaatcccttgaatatgttgaagatgcccggtgcttcttccttgaaaaggcaagggcagcttttccgagtaaggaatgtcattcacctgaacaggttgtggatatcctgcatcagcgtttggttgaaatctctgcagagcttgagcaaattgagcctgtgtgggatgaccttaacgcaatccgtcaggagcggcatgccatcagtgacgatctcgaacagtatattcaggataagagaacgttactgctcactagcacaaatgaaatctcgctattaatgcagggcaaaaaacagtgggaacaatatcgtgctggtgagtcgatcatgttcgctctcttttcctggcttcccgccgttcgtactaagcgtcactatcaaatgaagctgtttttggaggctacgtttggcgaaagaatgacagcattccagggatctcagcctgatggaattgatgcctttatcgatggattgattgaacaagctcataaagagcaggccaggtatcaacagcaaattgatcttgctgaggacatttcccgacgtgaaagcgaagcagctatacgctggcacgatattactcactcactgggaaatccgggcgaaacagagttgagtcttcatgaagccgatgagcttgcagatacacagctccgtttcccggcgtttctgctagcgacacattactgggaaggccggtggctgatggatatggctgctatcgataatattcaaaaagaaaaaggtcgtactggtgcgaaaagtacaaaggcccgctggcatcgtagaatgaagctaactccctgtgtagtcatgacgtgcttcatgttgccttaccatatgaaaaccagcgagttcgtcggcggcaataagaaattcgacgataactatttatataactttgccgatttactaattgtcgacgaagcggggcaggtgcttcctgaggttgctgcagcctccttcgcactggcgaagaaaagcttggtgattggcgacacagaacagattgcgcctatctggaatagcttgcccggtattgatatcggcaacatggttgaggagaacattcttcctggtggtactcaagaagaacttactgaatcttatgccctggtgtgtgattcaggaaagagtgctgcatctggcagtgtcatgaaggtcgctcagtttaattcgcgctatcaatatgatccggactttgcgagggggatgtatctgtacgaacatcgtcgctgcttcgataacatcattggctactgtaacaccctctgctatcacggtaagttgcagcccaaacgaggggaagaaaaagagacaatatttcctgcaatgggatatttgcatattgatggtaaaggtatgcaggccaatggaggaagccgttataatgcctttgaagctgagacgatagctgcgtggcttgcggcgcacaaagaggaaatcgagcgccattatggtgaaccactacataaagtagtgggggttgttaccccattttcggcacaagtcagtacgattaaatcgtcattacgtaagctggatattaattgtagtggtgatgaaaattcgctgacagtcggtactgtccattcattacagggggcggaaagggcgattgtgcttttctctcctgtatattcgaagcatgaagatggcagttttattgacagcgacagtagcatgctgaatgtcgccgtttcacgagctaaagacagcttcctggtctttggtgatatggatctgtttgagatccaacccggatcgacacctcggggattgctggctaaatacctgtttgcttccattgataatgcattgcagtttgagtttcaggagcgccaggatttaagtacctcacaaacgcagatttcaaccttacacggggtggagcaacatgatgcgtttctgaatcagacttttgatgccactaatcagagcattactatcgtttccccgtggctcacctggcaaaaactggaacagacaggttttctggcgtcgatgtctcaggcgcgtgctcgtggtattgatatcactgtagtaacggataaaacgtttaatacagagcatgcagattttgaaaagcgcaaagagaaacatcagcgtctaagcgaagcaatgaaaaggttgaatgaaatgggcatcacgacgaagctggttaaccgtgttcacagtaagattgtgattggtgatgagaggctgctctgtgtcggttcctttaactggtttagcgctacgcgcgatgagaagtatcaacgatacgatacgtcgatggtataccgtggcgaaagtttaaaaagcgaaattaaaacaatatattccagcctggaacaacgtcagttgtaa

SEQ ID NO: 123434 - DNA, 1191 bp, Enterobacter cloacae
atgaattttaaatcatcggttgttaactttttaaaattaatattgacatgtacaccattctatatattatttggtttttttgtcttgtggtcatatttagacagcattgacaggcttgatgttttcatggaggttattgactccaaattggcatcaataaccctgttggtgtcttttttattattatcgatagggtttgtttcaatattatactttcctagcctaggtattgtgcaactatcggtttttttgggtgaaaattcattccgccgtacattatcgtctacacgaataaaatttattccatttgtgtcaattgcggtgtccttgttatcaattatttctctttgtgttgtatctttctatgctcatattcctgacggattaaagcggtatttttttattatttcttttgcttgcgcatggtgcatttcttttatggccatccagttcttatctgtaaaaagaaagaaggaactacacttcatgcgaaatggtaaaatagtcaaatacaaatactttttaacacataaacttattatatcattttttattgcattttctgcactgtctgtcgctttgccgctactgatgcttattaagttaagcagtgttaaaacgttcgccggatttgccacatttttgtttgtaatgctggttatcatagctatgtcattttttccttcaatgcttttctattctaattctttgttaacaaaaagttttaaacatttattgacttatatcgttcttccaacattttttttgttttttatgttgatgttaataattccaaatctttttgggattatatctataggggcattgaaaggcgttggcgttatagacaaacaacctcatatattccgaatggataatgacagatacccaagttatttgtttccaaaagcagtatgggaacatgtaattattaaccctagagaggaaggcttgtttgtaaagggtactatctttttctccttaggaaagcaagtcatactttgtccaaattttgttgttaaaattagagataaatatatgaaatacgatttcgataatatatggaactcaaaggatgaacttcatgtggcatattttaaaaaggcaatgggtagttgtgtattgattaatagagaaagtattactcaatgggatgggatagttgatggtactaatattttaaacttatag

SEQ ID NO: 123435 - DNA, 153 bp, Enterobacter cloacae
atgaacacgccaagcaggaaaagcgtcgccaggggggagaaggcgacctggtcaaaacccgatcagataaaaggggacattttctatctgtactttaatgccgctatgggtgaagttgagctgaccaaaatgatgaattactcagttaactga

SEQ ID NO: 123436 - DNA, 705 bp, Enterobacter cloacae
atggtgataaagatggcattcccaagttataaagagattgaaatccccttacttttgaatatttataaccgagggggagaagtgagttcttcctcatgttatgaaccgttggggagggagttcggccttaccgatgaagaaatgagcatcttacttcctgatgatagcaaccgtccccaatggaacaacatggtccaatgggcgcgaaaaaagcttgttgactacaaataccttcataatgccaaagaatcaggtcttggcatctggaaactaactacagaaggtatcaaaaaagcagaatcgctttctaccaggttagatattgattatccagatgatgtgcccgaaaccttttatgaaggggccgttaagcagatcaaagttaacaaatacgaacgtagcaaaacagcaagagacaaatgtatagaccattacggctgccattgtagcgtgtgcgatatggactttgagaaaacatatggtgaaaccggcaaggactatattcacgtccaccatatcacccctctctctgagattggagaacgctacaaactcgatcctgtaaatgatcttcgccctgtctgtcccaattgccatgcaatgatccacaggcaaaaaccttcactcactattgaggaattgaaagccttgatgaccagagcacaaaaagaaggtgaatcgatacagaatcagttaactgagtaa

SEQ ID NO: 123437 - DNA, 573 bp, Enterobacter cloacae
atgcaaaacgaattttactggataaacgaaccggccaaatggcatagcgagaacaacacgttatcggtcgtgaccgacgaccacaccgatttctggcgccatacgtggtacggattcgagcgtttctcgggccacatctacgcgactgacgcggcaggtgatttcacgtttcagacaaacatccgcgctgatttcagcacgctctatgaccaggcgggaatcatgctgatgtcggacgagcaacactggctcaaggccggaattgaatacaatgatggcgcgccggccattggcagcgtactgacgttacaggcctccgactgggcaaccggtatcttcccgggtaacccccgggagttctggcttcgcctgacccgcaagggagacgcgttgcggttacagtactcagcagacgggctgtcgtggcctttgctgcgtttatgccattttccgtcggggccagtgaaagtcggtgtcatgtgctgcacgcctgaacgcagcggcttagccgtcgagtttagtgatttcagtctcgctccggccatggataaagcgctgcacgatctcagctga

SEQ ID NO: 123438 - DNA, 996 bp, Enterobacter cloacae
atggcgtctttaaaagatgtggccaaactggccaatgtatcgctcatgacggtttcccgggtgctcaatgacccgaaacgcgtaaagcctgaaaccctgtcccgggtgcaggaggcgatcctgcagttaaattacgtgcctgacctctcagcccggcaggttcgtcgtgtcggctcccggaacaaaaccatcggcgtgctggcgctggataccgtcaccacccctttttcggtagaaatcacgctatctatcgaagaaaccgcacgggcgtacggctggaacagtttcgtggtgaatatgtttaccgatgataaccctgacgatattgtcgacctgctgctcgcccaccggcccggggggatcattttcaccaccatggggctgcgtgaagtgagcatcccgccccgactactggagcacccttgcgttctggccaactgcgagaacatgggagaaccggttgccagctatatacctgacgatgaacaaggccagtatacggccgtacaggccttgctggcggcgggatacagccgccctctctgcctgcatttacctgtcaaccatctggcgacgcgtcgccgccgtcaggggcttgatcgcgcctgccgtgaagccggtatcgatcctgatacgcttgaacactgctatatgcaatttggcgatgagcactaccgggatattccggagatgctgctggcgcatatcgttcaggggaaaccgcaatttgattcggtcatctgtggtaacgaccgtattgccttcatggtgtataagacgctgttaacgcaggggatccgaatcccacaggatattgccgttcttggctacgataatcttgtcggcatcggaaatttgtttttacccccgctatccacggtccagctgccgcattatgagattgggcgcttaagtaccctgcacattatcaatggcgacacccaccgggataaggtgctggtcgagagcccctggctcaggcgcgaatcctgttga

SEQ ID NO: 123439 - DNA, 1239 bp, Enterobacter cloacae
atgaaaaaacggcctactcgaagttacatgctgctcagcgctctgctgttctttttctttgtgacctggtcctcatcaagttcactactctcaatctggcttcaccaggaagtggggctaaaggcatcggaaaccggcattattttttccgtgttatctgtctccgcgctcttcgcgcaggtctgttatggctttatccaggaccgacttggtctgcgcaaacatttgttatggtttatcaccgcgttgttgatcctctccggcccggcttatctgctttttagctacttgctgagcgttaatattctgctgggcagcgtattcgggggcttatttatcgggctgacgtttaatggcggtatcggcgttctggagtcctataccgagcgcgttgcgcgtcagagtacgtttgagtttgggcgggcacgcatgtgggggtctctgggctgggcggtcgccacgttttttgccgggttattgtttaatatcaaccctgaccttaacttcctggtggcgtcatgctcagggttaatcttcttctgtctgctggcccgcttaaaggtggccgcgccggcaagcatggagaaactcgaaattggcgctaaaaaagtttctctggaagacgccctgcgtctgcttactctgccgcgcttctgggcgctgatattcttcgtggtcggaacctgcatttacggcgtatacgatcagcaattcccggtctatttctcgtcacagttcccgacattacgagaagggaacgagatgtttggctatttaaactctttccaggtctttctcgaggccgcgggtatgttttgtgcgccatggctggttaatcgcattggcgctaaaaatggcctgatattcgcaggtatggtgatggcgctgcgcatgattgcttccgggctggtggaaggccccttgcttatctccattaccaaactgcttcacgcggtcgaactgccaatattgttagtcgccatatttaaatacaacagcctgaatttcgacaaacgtctctcctccaccatttatctggtgggatttgcctgcaccagctccgtcattggcaccgtcttgtccccgctggcaggctttagctatgagagatttggcttcgcccaatcctatctgatcatgggcatcatggtgttcagcaccacgtttatttccattttccttttgcgctcaactaaatcctcatctgagccatcttttctgcagcaaaacgctgtgtaa

SEQ ID NO: 123440 - DNA, 1434 bp, Enterobacter cloacae
atgacatccttattagaacaggctgaacaggtgcttgaaaaagcacaatccgggattaatccgcgctggtatccgcgctatcacctcgcccctcgcgcaggctggatgaatgatcctaatggcctggtatggtttgacggctggtatcacgccttttatcaacaccatccctattccccgaaatggggtccgatgcactgggggcacgcccgaagcaaagatctggtgcattgggaacatctgcccgtcgcgctagcgccggaaggcccggcggacaaagacggctgtttctccggctccgccgtggtggacggcgatacgctggcgctcatctacaccggacataaatttcacggcccgtcggacacagacgacaacctctaccaggtacagtgtctggcgaccagccgtgacggcatccattttgaacggcacggcagggtgattgatacaccgcccggactgcatcactttcgcgatccgaaggtgtggcgcgaaggtgagttctggtacatggttgtcggctcccgcgtggaaaataccggccaggtgcgcctgtaccgttccaccgatctccgcgaatggcatgacgacggtattttcgccgaggctgatgaaggcaagggctttatgtgggaatgcccggatttcttcaccctcggagagaagcgtgtcctgatgttctcgccacagggcatggcggcggaagggtatgactatcgcaacctgttccagagtggctatttacttggggactggcagccaggtcaaccgttcacccacagcggacaatttactgagctggaccacggtcacgacttttatgccccgcagagtttcgtgaccccggatggccgacgcattgtcatcgggtggctggatatgtgggaatcaccgatgcccgaacagcaggatggctgggccggaatgctctcgcttccgcgcgaattaagccttgtcgatggccgggtgagaatgaaaccggctgccgaagtgaccgcgctgcgtggcagctattatcccacgcccgtccgctgcctgaacaatcagaacgtccttgtcgcggcagatgccgacgcggtcgaagttcagctggcatgggatttgagcgcatcgacggctgaacagtttggtatcgcgttgggcgacgggctgagaatttacgtcgatgatcaggccgggcgtctggtggtggagcgccgctatccggaatattcgctggaaggcacgcgcagtattccgctaccagcagacagcgttctgtcactgcgaatttttattgaccgctcatcggtggaagtttttgttaacgatggtgacgcttgcttaagcagtcgtatttatccgcagccgggcaagcgcgatatttcattgtttgcaaatcaggggaaggcctcattatacgatgcgggatactggtctttagataaataa

SEQ ID NO: 123441 - DNA, 1266 bp, Enterobacter cloacae
atggatgaaagcgtaatacctcaaaattgcattgtctcgaaagataaaaacatatttgttccaggaaaacagacgctggcattaatggtgacattagcggcatttcctgccattgctgaagacgttacaggaaactatcaaagctattttcaggatgaatcagacaccaacggtacgagtgtatcatcagccaataacggcaatgaacaatcgtcccttcgtgcttcgtcttctccggttgctgcaggtcaaaaacctgaactcacgacctcgtcaaagcccgtgacgttatcggcgcaaacggagaataaaaaagcggaagtgaaaaagcgtcctaaaggggataaccccgaagacgtcagtctgttgcgtttaaggcaggaagatccgccggttcactggaacagtatcggtcgtaacatggaagtgggtggcctgcacggaaacatcgggtctcagatagaaattgacgatgttcgctggagcaataataagaaaaacagcggcaagtttaaactcgccaccattcaggcttttttaaggcacgatgaattgcctaactggtatttcggtttctggaatgccagagaagacagttataaaggacagttcagtaatcaggactatcaaggcaccaatactatcaatgaattttttgtgggccatattttcgaaacctggcgaggtaatatcggtacggaagttatggtcggctccgaaacggcaacgaaacgctggaaaaaccggttcaaggtctggcaggacctgcgactgtccagcaaatggagcctggccggatacgcgtatggcgaatatcagcctcagggtaacgaaccggggaatggcgatctggagcagtacattttcgaaattgagccagccattcaataccgcgtgaatccggatctcggactctatttgcgaccctattattaccataatcgccaggagcgtcagagctggggcgatattgtcgaagaagaatggaaagtcacggccggactctggcgaaactggtatccattattaacctccctgtatgttggatttggccaggacaaaatagataacgccagcaatgccagcgaagttttctatgacggtcggtataagtttatcggtggcacgctgagttatccggtatttggtgaagtgcgattatacggtgaattcaaagcacaatttacgaaagaaaccgggctttggacatcgaccggtcactcatggaacccgtttaccgtggttggcgtgaattataacttctga

SEQ ID NO: 123442 - DNA, 1494 bp, Enterobacter cloacae
atgaaaaaattaatagttgcggcatctgtcgcgctgcttgcactttcactcggcaataatcctgcctggtcgcaaccttcgaaagaaacattacagaataaaagtattacccatattaatggctttttcccgcgggttgacggttcattcgtgggcgaccccatgcccgtgtttaacgatggtaaatttgatatttattatcttaatgatgtccgcggcggcagcgatctgggggtacatgcttttcatctcttgtcgagtgccaacttgtatgattatcaaaaccattccgaagtgatcccctacgttaacgacgttgacgatcctgaactgttattgggaaccggttcgattattaaagtcggcggtacctggcatgcctggtacaccgcacacaatgaaaatgtgttcccggttgagtctattatgcacgcgaccagtaaggaccgccttcactgggtgaaacacccgcaggacaccattttacccggcggtaactatcggggtaatgatttccgggaccctcacgtcgtttgggttgaggaaaagaaagaatactggatgttaattactacccgcagtaacggtcgtggggttattgcccggtacagttcaacggatttaacgcactgggaagatcgcggcgtattttttgataacgacaccatcaccagcaatgccaacctcgaatgcccgacactggtttacttcaacggacgctggtatctcagctttagcgaccaatggccgttacgcctgacacaatatcgggttgcggataatccggaggggccgtggcggaaaccgggcaattatgtggtcgacggctcgggtttttacgcgggtaaactggtactcaaaaacgatcggctgtttgttttcggctggatcccgacgaaagccggtaaccgtgacagcggcaacattgactgggcagggaatctggttgctcatgagctcaccgcagatgatcagggccagctcaacagcatcctgccccaggagcttcagaaggtcatcagtgagaatcctggtccggtaaccaccttaacgagcatcaaaacgcttaaaacggccacgtcgttcggccccttacagtcggcgctgtacccggccttgcctgaacgcggtgagttgagcgcaaccatcgatgttccttctgccggaatggtgatgagctttggtctgaccgacgacagagtcagtgatgcgatgctgaacgttgtgttcaataaaagcaaaggaaaagtctattttttcaacgcgccgctcgcgtcgattcatcaggctaacgcggaatcctgggtggatgttccgatcggggaaaaaattgagttacgcgttctcattcaaaactcaattgctgtcttttatataaacaataaagcggcattcagtacccggatgtattccatgcaggagaagccgtggagtattagcctgcctcaaaacgaccattttcacgcaacgttgaaaataaaagaaatgatttaa

SEQ ID NO: 123443 - DNA, 1014 bp, Enterobacter cloacae
atgaaaaactatcatgctctgtctgttatttttgctcttctgtttcccgcgctggcgaatgcgagcatgagcatcatgaaggacccctcgggaaaggttgttgccgtggacccgtggtcctatctggatgaagaggttatgtggacctcagcccgctcctccaatcctgccggtggccgcgttcatggccaactgaagatgaaatatgccattgaggacaataactggcgtaacagccatttccacaacgggaatgattcactgacgtttgtacaaggcgtgatgcgacacgatgcgttacccggttggtatctggctttttctgagggcagaaccacccactataacgggacgtgggaggatcagtcttacctcagccaaaaccagtggactcagttgatcatcggccatgaatatttttataaacgtctgcgctatggctgggatgtcatggggggaagcgcttcaatcgaggaccgctggcaaggccgcgttaagttctttaccgatcttcgggttacggacaatttctcattctttaactatttgtatcagcagatcgatcaccgccgcagcggtggatcgcaaaatgaccgcgacgtgcgttcatttcagattgagcctggcgtgcaatatattattaataacaccaccggcgtctggttccgccagcaatttgcctctgccattttagacagggcgcagtggggcgatattgacgaaaaaagctggaccacgtctgtcggcgtctggcgcaactgggggaaattatccacaacgctcagcggcgggtatggccattataagaaatataatgcgcagcctgaagatggcgaagtcttccagaatacccgcaaccgcttcctgaaggtatcggcaaattatccgttgacctctcgttttaccgtgtccggagaagttactggctcgttgataaaacaggacggaagctgggtgacccacggtgaggctattaccaccgaatataagctgatgctggattataacttttaa

SEQ ID NO: 123444 - DNA, 951 bp, Enterobacter cloacae
atgaatatctggactcttggcgatgcagtggtggatcttctaccgctttcagacatgcaatatcaggcctgcgcaggaggtgccccgttcaatgtggcaattggcgctgcgcgtctgggctgccagagtggttttattggccgggtcggtgaggatgactttggttattttctgaagaaaacgttgtctgacgcaggcgtttcaaccgaaagtctgcagttggataatcagcacagaaccagcacggtattggtctctctgggccgcgctggcgagcgtggatttacgtttttaaccaacccctccgcggatcaatttttaacgcccgatgcgctgcccggttttagagacgatattctgcacttctgctctctggccctggtcgccgaaacgtgtcgtcatacgctcgtcaccgccatcagccatgtaaaacagcgtgggggattactgagtttcgacgtgaatttacgggagcaaatgtggcccgataagcatgaaatgctcgagacggtgcgtcatttcgccgcccaggccgacattcttaaactctcggaagaagaatggcactggatgacaggctctcacgatttttcccatgcgcttaatgctctcaatgctctgcccgcgcaacttaaagtcgtgacctacggtgagcaaggtgccatggtgctgtggcgcgacagcgttattcatttcgacggttataccgtcaacagtattgatacaaccggggctggcgacgcgtttgtcgcagggttgctggcctggattgcacatcgcgggatgccgcagaatgttgaacaactccaccagtccattgctcaggccagcgcctgcggtgccctcgcgacaacgcgcaaaggggcgctgaccgcgttacctgataccaacgcacttaataactttatcactcgattctcgctaccggattacgaggtgaaaaagggctaa

SEQ ID NO: 123445 - DNA, 1395 bp, Enterobacter cloacae
atggcaatgacaatgaaaataccgtctcgcgagttgtggtcttattttggttatggattaggtcagtgttttagctttggtttagtgggttcgtttattaactatttttacaccgacgtgctcgggatttcggcgctggcggcgagtaccatcttcctgattgcccgcgcgtgggatgcggttcacgacccgctatttgccagcataatggacaccattaacacccggttcggaaagtttcgccactttttgctgatcgccccgttactcattaccggcgtcacgctgctgtcgttctataaaatcgaagcggacatgaccaccaaaattctctacgccggggtgacgtacattctgtggggaacgctgtacgccatctctgatatcccgttctggtcgatgtcgtcggtgatgactaacgactccggccagcgcacccgcgcggtgacggcggccatgctgggggttaacgccgggatcgcctgcgccaacattttctttccgaaactggcggcgttcttcgcccagtacagcaacgacaaaggctattttatggcggcgctggtgatgatgctggtcggcctgccgctgatgctcaacggctttatgcagattaaggagcgtgtgccgcccagcccggaaaaggtgacgatacgtgacacttttcataacctgcgccagaacaagccgctgtttatcgttctgctgtcgttcttcttctgcgtgttccataacgtggctggcggcctctacatctacttctttatcaacaatatgggtgacggcagcctgcagatggcgatcggtgtgatggggattatggcggcggtggtgtgtctcgtcgccccgatgctgacgcgcagaatgcagaagcggaagctgtttatgatcctctgcggactggatgtcgcggtacgcgtggtgatgtggtttgtgggctatcagcagacggcgatgctgtttatcctgcttggcctgagtacgctgtttgtgatgatgtccaacattctcacctcgtcgatgattgccgacaccatcgagtatgcggagtaccacacccacaagcgctgtgcggcgatcactttctccggacagacctttaccggcaagatgtcggtggcggtcggcggtgggttaatcggcgtgtttttgacgatgatcggctatgtcccgcaggcgcaaacccagagtgacggcgtgctgtcggggctgttctttggtatctgtctgctgcccgccatcggctcgctgatccggcttgggtttatgtcgcgctttacctttaccgaggagaagcatgcggagatttgtcggttactggcggaacgtcagcacgagaaagcgcagcaacgtgagggcgaggaaaatctggcgcgcccggccacggtgaattaa

SEQ ID NO: 123446 - DNA, 387 bp, Enterobacter cloacae
atgaacattgcccatgttgcactctggacccgacaccttgatgcacaggtacagttctgggaaacggtttttggcggacgccgtaatgaacgctacctcagcaaaaatcgcccgggctttgcgtcacattttattaccctggatggcgggccaacccttgaactgatgacggtgccggacctgcccgacgccccggctcatccggagtttattggctgggcgcatatcgccattcacgtcggcagccaggctgatgtggaccgtatggcggcgcaggcgcagtcaaacggcaccctgctcagcgccccccgcaagaccggggatgggttttatgaggcggtgattgcggacccggacggcaaccggattgagctcacaggagagtaa

SEQ ID NO: 123447 - DNA, 771 bp, Enterobacter cloacae
atgctcgattatgctgcttttccggagcaacgacaagcgctgatccgtcagatccttcaggagagcggaagggtggtgtgcaccgaactggcgacacaaatgaaggtctccgagcacaccattcgccgtgatttacatgagcttagcaaagagggcttctgtaaaaaggtctacggtggcgcggtacttcagctgccggatgcggggacatttagccgccgcgagcaggaaaacagtgcacaaaaagccacaatcgcgcagaaagcggcaacgctgatcaaggcaggtggctgtatctttatggatacgggcaccaccaatctggcgctggcgaaagcccttcctgccgaactcagcgtgacggtggtgaccaactccccggccatcgcgaccgcgctgctgcaacatccgctgtgcgaggtgatcatcaccggcgggcagatccagcgggcgtccggcgcgacggtgggtgccacggctgcaagccagcttgaggggattatctttgatcaggcctttatcggtggctgtgcgatggatcctgagatggggctgaccggctttgattttgccgactgtgcgttcaaaaaagcggtgatcgcccagagcaaccagaccatcgtggcgttgactgctgacaagcttcccggcgtggcgcgctttgtcgtggcaaagagccgggacattgatgtgctggtggtggacgcgaatattaaacaggacgttatcgacgcgtttgcggcgcaggatgttcgcattgtgtgcgcctga

SEQ ID NO: 123448 - DNA, 603 bp, Enterobacter cloacae
atgcactacacactgaaagaaggcgataaggataaagcggaagggtcaaacggcgcgggcgcgctgcagcaaaaactgctcgagtcccgctcgattgttatctccggtgagatcaaccaggaactggcgcaaaaagtcattacccaactgatcctgctgcaaagcgtgagcaacgatccgatcaagctgtacatcaacagccagggtggccacgtggaagcgggtgataccatccatgacttcatcaagttcatccgtccggacgtacacatcatcggcaccggctgggtggcgagcgccgggatcaccatcttcctggcggcgaaaaaagaacatcgctactctctgcccaacacccgctttatgatccaccagccgctgggtggcgtgcgtggtcaggcgacggatattgagattgaagcgcgcgagatcatccgcatgctggatcgcgtgaacaagctgattgctgacgccaccggccagccgctggaaaaagtgaaaaaagacaccgaccgcaacttctggatgtctccggcagaagcgctggactacggcattgtgggtaaactgattacgcattatgacgatctgaagctggattga

SEQ ID NO: 123449 - DNA, 954 bp, Enterobacter cloacae
atgctccagcgtgaaaatagatcagcgaaacgcctgttttttgttgaggattttcagatattcggtgagcgctacggcatcgactaccggttcccgcagttaaaagatgcgcaggtcaacaaccgcgccgtgctgcaggggaatgtggaagagatgacgctttcatccggcatttcactgacccactccaacgttcgcgttttacaaccttacgaaaccacctctcgccatagcagcccactttatatgctggtggtgctggaagggggcgtcacgatcgtgcttaatggcgttgaatatgtcgtacgatccggcatggccttcagctcccgcctgagtgaagagcagataatgtgcgcgcgtcacgatgccgacagcacgctgaaaacgctctcgtttggtctattcccacacgatgccaggcgcgagaccctgcttgagtcgctgctccaggaatggcaaagcctgaatgcgcccactctggtctggcacgttcctgagtttgtccttgcggggatccagcatgctcagcagcagggtctaagcgcgttatcccgtcagctgttgctggaagggctgatgtatcagcttctgggccagggtttggcgcagcgccagcaatccttcccgtgccggccagagcatgcgcgtcttgaacgcgtgcgcagcaggctggaacagtctccggagcaggatcatactcttgcgcagctggccgccctcgccgccatgagcccgagcagcctgcgcagcaaatttcgtcaacgctacggctgcacccttttcgattacctgcgcgagtgtcggctcgcgctggcgcgtcgctatctgcttgaaggctatagcgtgcagcaggcggcgtggatgtgtggctatcagcacgccaccaatttcgctaccgcgtttcgtcgccattacggtattgcaccgggcgacgtgcgcaaacgccgctaa

SEQ ID NO: 123450 - DNA, 255 bp, Enterobacter cloacae
atgaaagccattctgggatttgactacttattaacgccacgcgtgctggtcttcttctactggatcgtcatgctggtgattttgattgccggcgtgtattccatgtttaccgaccatctgatcaccggatttatcgggatgattttcagcctgatcggctgtcgcgtgacgttcgaactgatcatggtcgcgtttaagaataacgaatatctgcgccgcatcgctgaaaacaccgcggtgaaatcagtcgaataa

SEQ ID NO: 123451 - DNA, 378 bp, Enterobacter cloacae
atgtatgacgttcatgtgattttcgacgctacgccaggggaactggcgcgatttggccagctgctggggtgtaatggtgtggggctggagggcggcggcgtgtttggtaccgaagcccatttcctggtggaagagggcgaaaaagcccatcgcgtgctgcttgagggcgggtttaacgtccgatcagtccgtaaaccgctgatcagaaaactgcagcaggcgcgccccggtgagctgggcgagattgccgcggcgttagcggctcacggtgtgtctgtactgacccagtacagcgaccatgcgaatcacctcattctgctgacggataatgataagctggcggcagagatcaccagaccatgggcagtccatgcttaa

SEQ ID NO: 123452 - DNA, 753 bp, Enterobacter cloacae
atgaccgagacccgacacatccgccagacctttcatcgcgcctgcggccacgagctgcgcagcacgtggcagagcacccaggcgtataaacgtcattgtcacccacagctctctattggcgcgatcctggaaggccagacgtgctgcacagtccatgacagggagtatatcctgacccctggcgacatcatcgtcattccggcgcatgcgccccacagctgcaacccggtggcgggacagccacgcagctaccacatgctgtatatcgacactgacctttcgctggcactgcaggtcattcgcgaccaaacgctgtttaatcactatcttggagtggttgagaacatgaccgcggcctccctgaacgcactgctttgcgcccttcccccctctacaggccgcatagataagccccattcactgagtcagcaggtgcaagaggcgtttctgtcgaacctcaccgctccgccttcccttgacgaccttgcccggcgattttcactgcgcaaagagacgttaatccgcacctttaaacaggacaccggcctgacgccaggacgctttctcagcatctctcgcgtggaatacgccaaagcgcgactgcgtgcgggagatgatctcgccgatgtcggttaccagagcgggtttgccgaccagagccatttccataaaaccttcgtcagctacacggccgccacgcctcgccagtacgcgacgggccgatcaatatcagacaataatcaggatacgtaa

SEQ ID NO: 123453 - DNA, 321 bp, Enterobacter cloacae
atgaaacaccgcattaccgcgctttgcgttctgagcatcacgcttatgctcaccggttgcgtccagtataaatgggtgaaaccgggagtcagtgacgctgagatgaataaaaggctcacggaatgcgaagcacaggccctgattgatctgcccccggacaatgttgtgaccggttcgagctcggaaaaaatggacaaatcgaaaaagaaaaaggatatttccacgagctacacggttgaagacgcgaatgaatatcgccgggataccttagtcgacagctgcatgttcaaaagcggctgggataagattgaagtgcaataa

SEQ ID NO: 123454 - DNA, 918 bp, Enterobacter cloacae
atggctaaatcgacgcggagccgctcggctgaacgtctggtcgatattctggttgagttacatttaaatggtgtggtaaaccgcagtgcgctcatggaaaaatttaaaattaccgagcgcaccgtctaccgggatttaaatgcgctttcacctattgtggaacataccggtaacgggctgtatcgtctgatccactccgcacaatctcccggtggacaaggattacatcacacgattgctaacttcctgaatgccgatagctttttcccggaaagaaatacggaattctggcagaaacttgaaacacgcgttgacgaaaatcatattcttattcttggcaacgaagcagagcacacggtagaacgtgatattcgtcgctatttatcgaaaatcgagaaatcgattaagaatcgtaatgtatgccagatcgtttataagggtaaaacccgcctgattaatccctataaactcattaacaataaaaatatatggtatttacaagccaccgagaatagccgcctaaaatccttctcgttgagtcagattagctggtttgatattcaacaaaaaaccttcacgccggaagaaaatgcgctcgggctgctggaaaaaagccgcgatccgtgggtgtcggaagacactttcgaagtgaaaatattcattaaagatactatttcacattactttatgcgccgcgacctgctgccggaacaagagcttgtcggtgagcagcacaacggcgtcacgctgcgctgtcaggcggcacacgagaaccagatcctgccgctgctgttctactggctgccgaacattcaaatcctggagcccaactggctaaaagagaagctgcttaaaacgctggaaaattatctggcggtagagcgcacagcagataaccacgtgatctcaatcacataa

SEQ ID NO: 123455 - DNA, 1278 bp, Enterobacter cloacae
atgaaaggtactgtttttgccgtagcgctgaaccaccagagccagcgcgatgcctggcgcgacgcgtttgaaaaagccccctacaacacgccgccaaaaaccgccgtgtggtttatcaaaccgcataacaccgtgatccgcacgggcgaccccattcccttcccgcagggagaaaccgtgttaagcggtgccacggttgcgctggttgtgggcaaaacggcgcgtaacgttcccgtggacgaggcggcggagtacatcgccggttacgcgcttgccaacgaagtgagcctgccggaagagagtttttatcgcccggcgatcaaggccaaatgccgcgacggcttttgtccgctgggagagctggccgccctcgaccacgttgataacctgaccatcgtcaccgaaattaacggccgggaagcggaccactggaacaccgctgacctgcagcgcaatgccgccgaactgctgagcgccctgagcgaattcgccaccctcagtccgggcgatgccattctgctcggcaccccacactcgcgcgtcccgctgcagccgggcgatcgcgtacgcattctggcgaaaggcttcccgtccctggaaaacccggtggttgatgaacgcgaggtcgcccatgcgcaaggcccacatccgcacgccacgctgttcgcgcttggtctgaactacgccgatcacgccagcgagctggcatttacgccgccaacggaaccgctggtgtttatcaaagcccccaacaccgtgaccggcgataaccagacctcggtccgcccgaacaacattgagtacatgcactacgaggcggagctggtggtggtcatcggcaaaacggcgcacaaggtcagtgagcgcgaggcgatggactatgtcgcgggctataccgtctgtaacgattacgccatccgtgactacctggaaaactactaccgcccgaacctgcgggtgaaaagccgcgacgggttaacccccctcagcccgcatatcgtgccgaaagaggccattcccgacccgcataacttaaccctgcgtaccttcgtgaacggtgaattgcgccagcaaggcaccactgccgatctgatcttcagcatcccgttcctgattgcctatctcagcgaatttatgaccctgcagcccggcgacatgattgccaccggcacgccaaagggtctgtctgacgtacagccaggcgacgaagtggtcgtggaagtggagggcgtgggccgcctggtgaaccgcattgtcagtgaggagactgcaaaatga

SEQ ID NO: 123456 - DNA, 507 bp, Enterobacter cloacae
atgaacattctctttcgaccgacgacgcccaaagatgttgcagccctgcccgccatcgagcgcgcggcaggcgagcgttttcgggacgtccccgaactggcctggcttgcagacggcgacgtcatttgcgcggaacatcatcttgattacgcgaaacgcgggttaagctggctggcgctggcaaacgacctgcccgtcgggtttatccttgcagaagcccatccgtcatcgctgtttattgtcgaactctcggttcatcgggagtggcagggaagaggaataggtcggcgacttatcgcctgcgtcgcagaccatgcccgcacgctggggctgacatcgctgacgctgaccaccttttgcgaggtgccgtggaatgcgccgttttatgcgcgactcgggtttgaaacggtgacgatgctaacgcctgaactgcgtcagaaaagagaggaagaagcggcgcacggtttcgcgtatgactcccgctgtgccatgcgcctgcctctgtga

SEQ ID NO: 123457 - DNA, 474 bp, Enterobacter cloacae
atgaaacaaaaaaaagtgtggcttattctggcgctcaatctgttgctgattggcgtgacgctggcgtggtacgtctacacgcctccgctgtccggaacctgtgcaggaaacctgacattttcagcccgacatgacgatcatgatttctcctttgaaggggaggttacgctgcgttttcagcccgacaacacagggtaccttacgcttaacggcgacgtggttaacgagccacatcactgggatgtttcccgccaggagatgttcacgtggcggcacgttgagggttcactctatgaaatattcatacaaagcgtggcgcgctttagccatgacaccctgccaccgggagtctttgaaaagtacgtcgccggcctgacgccggggaacaaaagacttctgaagattgaacgcacgccggaagacgcgctggtgatcagcaatttctatgcgccggtcctgatttgttcagaatag

SEQ ID NO: 123458 - DNA, 741 bp, Enterobacter cloacae
atgaaatacctgcttgctgacgccatcgtctataacgacgaagacggttctgtttctcttatcaatgcacccgatctggacagacaaatcctcacctgtaccgccaacgccatcatgaagctgctggttcagcatcacggcaacgtcgtcgaacgtgacacctttctgagtgatgtctgggatcaacgtgggctccaggggtccaacaattcgttaaatcaatacatcagtattgtgcgcaaaatgctgtcgagcctgctgcccgacaccctgtttatcgtcaccgtgccgaaaacgggctttatgctcagtgctgatatcgcggtaacgcccctggaggacgattttcccgtcgtggagtcggtcccggcctcacgacgcattcagccagaatggctattctgcggtgtacttacgctgatggtcgtggcgctgtgcatcggcgcctgtttgacgaaacaggcgcaccagtacagtgacactcatctgctcacccacattggcacctgtccggtctacaccttcgccccgctggcagatgtgtttcacactaaggccatggcgctggcgcagacgcttcagcgggaaggtaatctgccctgcctgaaaaactctattttctatatgcacatccagagaacacttttctatggccacgaagggcggctggtcctttcccagtgttctctcacggacggtaaagccagcgcctgccgaacgctttacttttacgagtggtga

SEQ ID NO: 123459 - DNA, 540 bp, Enterobacter cloacae
atgccgcagacactgaatgccgactataaggtcatcgttttaagcggcaatgccttcttgtggctgggcctgaagacgttcatctcgcagagtgtggacccctgccctgaaattttctggattaacgacgtgagccctgaggggatcctacccctgcggcaactgatgttgaatatccgcgtcaaaaaagggtggctggtattcaccgatgcgtcccgcgtcaacgatattaaaatcattctggggggtgagcgtgtccacgtggtggcgggaaacctgtcactcgcgcagctcagccgctgttttcagaacacgccgttcgcaagcgtaaaaaacgccacgctcacctgccaggagcttcgggtttgcatgctgttccgcaacgggttcagcccggttcgcatcgcgcagatcctgaataaatccccgaaaacgatctacacccacaagcgtaacgcgatgaacaaatttcactgccagaacctggcggaattccatcgcaaactcttcctgctcgactacccggcatcgtgtttgtaa

SEQ ID NO: 123460 - DNA, 546 bp, Enterobacter cloacae
atgtcctccagaattctgaccaccagcattgctggtattgatgcctttatgcgcgatccccgcggtgtgctgacccacgccgaaggcggcacggttgcggtatttgctgacaacgctccggcgttttatgccatcacaccggaacgtctggcacagcttctggagattgaagcgcagttgtcccgcccggcgagcgacgtaaccctcgataaccagttctttgacgagccggttaacgtccccatggccgttcccatgggaaaatttgccctgtatgcgggctggcaacctgatgctgattttcaacggcaggcggcattgtggggcatagcgttaacgcaaccggctacccccgaagagctggccgcgtttaccgcctggtggcaggcggaaggcaaagtattcacccatattcagtggcaacagaagctcgcgcgtcatctgcaaattaatcgcgccagcaataacggccagccaaaacgtgatatcaacgcgttttccgaaccggataaacagatccctaatggattccgaggtgcgaaatga

SEQ ID NO: 123461 - DNA, 642 bp, Enterobacter cloacae
gtggctaacccaggcagcgaactccccgagcacaatgaagaatccagcctgaaagagaaaatctttcagagcgctatcacgctgtttgccgaatacgggttgaacggtgcccgcatggaacaaattgcggagaaagccggcaccaccaaacgcatggttgtttaccacttcaaaaacaaagagaacctgtatcttctcgtactggagtatgtttacacccagatccgcgccagtgaacaggcactcagcctggcgggaatgccccctgtcgaagcgctggttcatctggttgaagccacctttgactaccatgccgaccacccggattacatccgcattatctgcatggaaaacatgcagcgtggccgttttatgcagcagtccagctacctccgccaggtcaaccgcagcgcacttgatctgctggaagcgatcctccgtcgcgggaaagaaaagcagttattcaatcagacggttgaagcccgcgatctgcatcgtttgatcagcagtttcagcttccactacgttgccaacagctacaccttcaccctgctgtttgaagagggtgcggacgaacaggcacagcgccagcactaccgcaaaatggccgttcaggtggcactccgttatacttgcccataa

SEQ ID NO: 123462 - DNA, 738 bp, Enterobacter cloacae
atgtcgtcattgaatggtaaacatggcgtcgtcattagcaggatacccgtaatgcaaaacgggttggggggcgtgatgacacgccattttgccgattttgatttaacgttttgccgttcgctgcaggaattaaccctgctgcagttacggcgtgcagacgtcattatcgctgatatttcaggtgaatacaggaatccccggggcacgctcgaagaatattacggtttattaaatcaatatcgggatattcactggatttttttagtctcccggccgctttatcctattgccgttgagctgcttatgcgtccggaaagcacgttgctttctgatatggagccgatagaaggcgtaattaacgccatccgtgcaggcagtgaacgggcagagcggataagccagacgttattaacgcccgaacctgcctgtaacgatgatgaagacgaccgcgtcattgcgctcacccactctgaacgcaaggtattgcgtctgttaggcaagggctgggggattaaccaaattgccactttgctcaagaagagcaataaaacgatcagtgcacagaaaaacagtgcgatgcgacggttgtcattacggagtaatgccgatctgtacgcctggatcaacagtactcagggattgagagagctgagtttaatgtcagcctatggagagttcgaggaatggataaaaccggttcaacaagacatattgccgtcatcgaaaattgcgcgatga

SEQ ID NO: 123463 - DNA, 687 bp, Enterobacter cloacae
atggataaaaccggttcaacaagacatattgccgtcatcgaaaattgcgcgatgagtgccgtcgggctggagcacctgtttgcactgcccacgctcagccattatcaactgcacatgttcagtgaatttgacagctttaagaaggcgcttcctcatgtctcttttttctcgctgatctattcactttctgatgcgcgagaagagcgtcgaaactgcctggcatccctgcgggatctcgcatttacgcataatcatattcagcgcatcatcctggcggcagatgaaatggaagcgcggttaatcagccatctttccccttcacgccttcacggtgtcgtcagtaaatcggtgtcgctcgaccgcctgcaggaggaactgctggtgttgctgagtgaaacgctgcacatcaatgacaatatgctcaaccactggtacaagagtcaaaacaggatgttaagtccaacggagcgggcgattttgcggtatatgtcctgcgggttttctattcctgaaatcgccgcgcagcttgagcgcaatattaagaccatccgggcgcacaagtttaatgcgatggtgaagcttggggtcaattctgacgtggggctgcttgatgcggcagatattctgactcatctcccggcccgggatccgcgaacatcagtattaagccagccgacatttttataa

SEQ ID NO: 123464 - DNA, 789 bp, Enterobacter cloacae
atggccactcataccgcacaaatcgttgaaccacttctctggagagcccgcctccccaccgggaatgtttcgcttgcggatgccatcagggataagatcgctaaaacccgcgcccacctgctggactttatcaggctggatgaagcgcacccgcaccacgccatgacgctggaagagtggcgacagccgtcgacactgcagtcgttgctggcaacctattccgaccatatctatcgcaatcaaccgacccttacgcgggaaaacaaacccctgctctccctctgggcgcagtggtatatcgggctgatggtgcccccactcatgctggcgctgctcactcaaaagggcatgctggaactctccccggaatattttcatgtcgagttccacgagaccggccgtgcggcctgtttctggattgatctccacgaagaccagaacgcggagcacctctctgctcaggaacgtatggagcagctcataactcgcgccctgatcccggtagtggatgcgctggaagagacgggggaaatcaacgggaagcttatctggagcaataccgggtatttaatccactggtatttgacggaaatgaaacctctgctcggtgatgagaaggtcgaggccctgcgccagtcctgtttctttgcaaaacagctttccgatggccgcgataacccgttattccgcaccgtggtccttcgtgacgggcttctggttcgtcgcacctgctgccagcgttatcgcctgccggacgttcagcagtgtggagattgtacgctcaagtaa

SEQ ID NO: 123465 - DNA, 1065 bp, Enterobacter cloacae
atgacatcacaatcctggcggtctttggtccacagtaaatatcaattatcgttacgtttatttttatttctgaacgcgacctctgctgtgttctcggtaacaaacccgctctattctattcgcctgttatcagtccccctgatttctatttttgttatcagcaccgggctgctcgtctggcactggaaaaagagaacccgcaaggtaaatattcctgccgtttcagcgatcttcggtattttatgggcgtggcaggtggcctcgaaattttcgttaattacccacgatcaggcgacctatttgatcatggcattattaacggtactgtttattggtacgctggccttcgccagtaatatcaaagcatttacgctgcactccttccccacctttattgtctgcctgtggttaagtaatcatgatatatggctgagaatgacctattctttcgcacttcctgtggtagcaattgcgattcataacattttgcaaagacgtaatgaccgcttcgcgcaggaactgctctcccgtttgctggaggagcgtgagaccctcaccgatctgagcatgatggacccgcttaccggcctttataaccgtcgcggactgcaaagccggctggagaatcttccggcagtggagaacggcgagcactttgtcctgctgatggatattgaccactttaaagcctacaacgaccactacggccatatgatgggcgaccaggcgctgatccgggtctctgctgccatccgtgatgccgtgcgttcacgtgatattgtggcgcgcttcggcggggaagaatttatggttctgctgaccaatatttctctcgagcatgcccgccagacggcagagcggatccgccagaaagtctacgatttaaaaatcccgcatatgttcaatgaaagcgtggcgacaaacgtcaccatcagcattgggattgccatttttgaggatgaagacgccgaaggtgcactggagaaagcggacaaagccctctacgaagcaaagcatatggggcgcaataacatcctgctgagcgaagagcttcagaccgcgtaa

SEQ ID NO: 123466 - DNA, 231 bp, Enterobacter cloacae
atgttgaacagggcgctgggaagtggttggggagtgttactgccgggggcgattcttggcggtctgatgtttgccgatctctccattgatgtctggaaagcgctcattgtgtcaggactgttagtgacgtcagggatgctctggcataaacagctacgccactttgtgttactgccgtcatgcgtagcactggtcagtggaattctggtgatattgatgagtttgaaataa

SEQ ID NO: 123467 - DNA, 417 bp, Enterobacter cloacae
gtgctcacgggtctgaggcattgggccgtcagtcgcagcaacaaccaggatcgcgccgtccatctgcgcagcaccggtgatcatgtttttaacatagtcggcgtggcctgggcagtctacgtgtgcgtagtggcgagtcggggtgtcatattcaacgtgagaagtgttgatggtgataccacgcgctttttcttctggtgcgttatcgatctggtcgaatgcacgagcagcaccgccgtaggttttagccagtacggtagtgattgcagcggtcagggtagttttaccatggtcaacgtggccgatagtaccaacgttgacgtgcggttttgtacgttcaaatttttctttagacacggctatattccttactatagtgctctccccttcggagagagcacgggacttaggttttaa

SEQ ID NO: 123468 - DNA, 2088 bp, Enterobacter cloacae
atgtggcgcaggctgatttatcacccggaagttaactacgcactgcgacaaacgctggtgttgtgccttcctgtggccgtgggcctgattctgggccatcttcagcaaggtctgctcttctctctcgttcccgcctgctgcaacattgccggtctggatacaccgcataagcgctttttcaaacggctgatcgtgggcggctcgctgtttgcgggttgtagcctcgccgtgcagcttttgctggcccgcgatatcccgctgccgctgatcctcaccgtcctggcgatgaccctgggcgtaaccgctgaaatcagctcactgcacgcgcgtttgcttcccgcgtcgctgattgccgccatcttcacgctgagccttgcgggcaacatgccggtgtgggagccgctactgatctacgccctcggtacgctgtggtacgggctgtttaactggttttggttctggctgtggcgggaacagcccctgcgggaatccctgagcctgctctacgtgcagctggcggattactgtgaagccaaatacaccttgctcacccagcataccgatccagaaaaatcactgccgcccctgctgacgcgtcagcaaaaggtggtggacctgataagccagtgttatcagcagctgcatatgctcgccgccaataagaaccacgaatataagcggctactgcgcgtcttccaggtggggctggacttacaggagcatatctccgtgagcctgcaccagccgcaggaggtgcaaaaactggtcgagcgcagccatgccgaagcggtgatccgctggaacgcacaaaccgtctccgcgcgccttcgggtgctggctgacgatattctgtatcaccgctaccccacgcgctttaacatggacaaacagctcggcgcgctggagaagattgcccgtcagcatgaagacaacccagtgggtcagtttgccgcgtggcacttcagccgtatcgcccgcgtgttacgaacccagcgtccgctttatccgcgcgacctgatggccgacaaacaaaaacgcctgccgctgctgccggcgctcagaagctacctctcccttaaatcatctgccctgcgcaacgccgcgcgaattagcgtgatgctgagcattgccagcctgatgggcatggcgctgcatctgcccaaaccgtactggattttaatgaccatcctgtttgtcacccagaacggctatggcgcgacgcgggtgcgcattctgcaccgggcaggcggaacgatggcggggctgatcattgcgggcgttacgctgcactttcacgtgccggaaggctatacgctggcagggatgctggtgatcacgatggtgagctacctgatcatccgcaaaaactacggctgggcgatggtgggctttacggtaacggcggtgtataccctgcagttgctcacgctcaacggcgagcagtttattatcgccaggctggtcgataccctgatcggctgcctgattgcctttggcggcatggtctggctgtggcctcagtggcaaagtgggctgctcagacagaacgcccatgatgcgctggaggccgaccagcaggccattcgcctgatcctgagtgacgacccgcagccctccccgctggcgtatcagcggatgaaggtcaaccaggcgcataacgccctgtttaactcgctgaatcaggcaatgcaggagcccggctttaactcgcactatctggcggacatgaagctctgggtgacgcacagccagtttatcgttgagcatatcaacgccatgaccacgctggcgcgagaacatacgatgctgacgcccgatctggcgcagcgctacctgcagtcgtgtgagattgccctgcagcggtgtcagcagcgactcgagtatgacgcgcctggcgagtcaggggattcgaacattctggaggcgccagagacgctcacccacgggccaatgagcaccctggagcagcatctgcagcgcgttctcgggcatctgaacaccatgcacaccatttcgtcggtagcatggcgtcagcgccctcaccacgggatatggttaacccgtcgcttaacgcgaacggagtcttaa

SEQ ID NO: 123469 - DNA, 603 bp, Enterobacter cloacae
atgagcgataaaatcggtgacgatcgtgacccgtatctctacccgggtctgaatgtgatgcgtaaccgtctgaatatccgccaggctgaccgtcttgcaaaggcatcctatgagatcaccgcgctgcgggtggcgacgctcggcttaggcccgtcggcgccggggttaccgcatctctgtgcaatccaccgccacctttatcaggatatttttgactgggcgggcgatatccgcgaaatcgatatttatcagggcgacacccgcttctgccacttcgcctacatcgagaaagagggcaatgtcctgatgcaggatctcgaggaagaggggtatctcaacggtctgcagaaagaggagtttgtggcccgcctgagtcactactactgtgagatcaacgtgctccatcccttccggattggcaacggtatcgctcagcggatcttcttcgaacaactcgccatccatgcaggctatcagctgagctggaaagatatcgacccgggaaaatgggcggcggccaaccagaacggcgcaatgggcgatttaacggccctgaacgccatctttgccaaagtagtgagcgaagcgcgggaaactgagtag

SEQ ID NO: 123470 - DNA, 168 bp, Enterobacter cloacae
gtgaaaaaactcaccgataagcaaaaatcccgtctctgggagcagcagcgaaacagtaatttccaggccagccgccgccttgagggggttgatagcccgctcgttacgctaaacgcccaggatgcgcaaagccgtcttgaagaactcaggaggcactatgagcgataa

SEQ ID NO: 123471 - DNA, 1317 bp, Enterobacter cloacae
atgtctacaacaccgcttgggcttatccagaatgttcgcttaccgggtcgcgaagggctgtggcaaatcgccattgagcaaggccgttttggtggcattacgccgatgggcgataccgaagacgaaaacgtaagaatcttaaacgcgcgtggcggccttgccatccccccgtttattgaaccgcatatccaccttgataccacccagacggcaggtgagccgagctggaaccagtccggtacgctgtttgaaggcattgagcgctgggcggagcgtaaggcactgcttagccatgaggatgtaaaagcgcgcgcctggaagacgctgaaagggcaaattgccaacggtattcagttcgtgcgcacccacgtggacgtctctgacccgacgctcaccgccctgaaggccatgctggaggtgaagcaggaagttgcgccgtggatcacgctgcaaatcgtggcgttcccacaggaaggcatcctttcttacccggacggcgcggcgctgcttgaggaggcgttgaagctgggcgccgatgtggtcggggcaatcccgcattttgaattcacccgcgagtatggcgtgcaatcgctgcagattgcctttgaactggcgaagaaatacgaccgtccgctggatatccactgcgatgaaattgacgatgagcagtcccgatttctggaaacggtggccaccctggcttatgaatcagggatgggcccgcgggtcacggccagccataccacggcgatgcactcctataacggggcgtacacctcgcggcttttccgcctgctgaagatgtcaggcatcaactttgtcgccaatccactggtgaatatccatttacagggacgctttgacgattatcccaaacgacgcgggattacccgagtgaaggagctgctggaggcggggatcaacgtctgtttcgggcatgatgatgtcttcgacccgtggtacccgcttggcaccggcaatatgctgcaggtactgcatatggggttgcatgtgtgtcagatgatggggtattcgcaaatcgacaacggtttgaacctgataacccacaacagcgcccgaaccttcggcctgacggattacggtatcgaaacgggaaatctggctaacctgatcgtgctgcctgcggagagcgggtttgaagcggtgcgctgccaggtgccggcgcgctggtcaattcgggaggggcgagtgattgccacgacgcagcttgcgcagacgtggatcaaaatggatgacgttgcggaagagcacatcttcacgaaaaacagccccttcgctgagcgcaaaggggcgtag

SEQ ID NO: 123472 - DNA, 1329 bp, Enterobacter cloacae
atggatgaattcaaaccagaagacgagctgaaacccgatcccagcgatcgtcgtactggtcgttctcgtcaatcttcagaacgtgataacgagccgcagatcaactttgacgatgttgatctggatgcagacgatcgtcgcccttcgcgtagccgcaacgcgcgtgatgagcgagaagaagaagagggttatgagtccgaagaagattcaatggacgaagagcctgtagagcgtcgcccacgtaaacgtaaaaaagccgctgcgcagaaacccgcctcccgccagtacatcatgatgggactcggcgttctggtgctcgtgctgctgattgtcggtattggttctgcgctaaaagcgccttcgaccccttccggtgagcaagcggcatccactgagaagagcatcagcctctctggtaacgatgcgaccgatcaggcgaatggtgcacagccagcgccgggtaccacctccgccgagcagactgccggaaatacaacacagccgcaggatgtttctctgccgcctgtttcttctacccccgcacagggtcaggcacctgccacgccggaaggccagcagcgtgtagaagttcagggcgacctgaacaatgccctgacgcagccgcaaaatcaggcgcaggtggacaatgccgtggttaactctacgctgccaactgaacctgcgaccgttgcaccgatccgcggtggcaacgctcagccgcaaacggctgcaaccgaaaccaaaccgcgccagacgcaacctgcgacccgtcctgaacgtaagcaggctgtgattgaacctaagcgtgaaaccaaacctcaggcagtcgtcaaagcgccggaagtgaaagcgccggctcagacaaaacgtactgaaacggccacggtgagcgaaccggcaaaagcaccggttacgcagactgcaccgaaagcaacggcgaccaccacggcaccggctgccacttcggcaccaactgcaactgcacctactgcaactgcacctgcagccacggcaacaaccagcgccgcagcaggcaagactgcaggtaacgtcggttcgctgaagtcagccccgtccagcaattacacgctgcagctgagcagttcgtctaactatgacaacctcaacggttgggcgaagaaaacaaatctgaaaaactatgtggtttatcagacgacccgtaatggtcagccgtggtacgtgctggtaagtggcgtttatgcttcaaaagatgaagcgaaacgtgctgtcgcaacgctgccagccgacgttcaggcgaaaaacccatgggctaagccaattcatcaggttcaggctgatctgaagtaa

SEQ ID NO: 123473 - DNA, 462 bp, Enterobacter cloacae
gtggaaaccttgttcgaacgctggtgcgaaagcagcccccgatggcgggtgctgtgctggtgtctgagcgttctctttctggggagtacgacatggggcatggtgcttcgaccggttgcaaagcagatggctgaacttcagcggcaggtcagcgaggccgcacaggctaatgtctcgctatggcccgccgccagtcatgtgccgcggcgtcacgccccccgtgaagccacggtaatgacgcctttttcgccactcgagtttcagggggcgggcacaagactggttcactggaagccgttgcaaaacggaggggaactgacgctggatgctgaatggcaggccatcccgactgttttcagccggctggcgcagcgggatgttcaggttgccgcctttgctctctctgcacagggttcggcattacgcctgcgggtggagctggaggagcagcatgcgaaatag

SEQ ID NO: 123474 - DNA, 495 bp, Enterobacter cloacae
atgagcatgacgaattttttgccgtggcggcggcagcgacgcgtgcgctgcctgcgattctggggcgtactgtttgtcgctacgtggctgctgatactgatgggggttttcagcctgcggatgaatcctctcgtgatgacacgtgcgctgcatattcaactggcgggcatgcagtccgtgcagcaggtgctggtgtctcgtacaaggtcaggcacagagacgccgacgcccgcgccagcgcctcaacgacgcgcctggcagccggtgctggagtcctttgccgggatgatgccatcccaggtctggctgaccgaactgcgctatcagccccctacactgatgttaaccggatatgccgcaacactccccgcgctctctgctctgcgggatgggctcggaaagatggcggggtttaccgcggggccgacgggggaattacagcaggatgacctggggcgctggatgttcacctttcatctgcgaagcgagggctaa

SEQ ID NO: 123475 - DNA, 777 bp, Enterobacter cloacae
atggctttcaaaatatggcaaacaggcgttcatattcaacaggatagggtgcagatagtggcgctggcccgggagcggtcgggctggcgtttgtgccgctggtgggctatcacgctggccgaagggattatccgggatggcaaaatttgccagcctgaacaactggttgacgccctgcgcgactggcggaaaacgttgccccactcccaccgggtgtttctctcatttccggcggcacgcacgttgcaacgatcgcttccccgtccgggcgtggcgctgcgcgacagcgaacagctctcctggctgggggcgacgctcgcgcgtgaactggagatggctgctgacacgctctgttttgattatgcgcaggatacgttcagcaatacattccatgtcaccgctgcacaaaacaacgagattcaccccctgctgacgctggcaaagatattgcgtttacggctcgtgacgatcaccccggatgccagtgcgctggcgaaccttctccctgcggtagcgccggcgcagtgtgtcgcctggcgggatgggcatcagtggctgtgggcgatgcgccatcagtggggacggcgttttaccacggaagcggaaaacgtggccgatctcgcggcactgctggccctcacgccggaggacattgccctctttgatagtcagcgagacccctgggacgccctggttcgttgccatgctcctctgccggcatgcggcgctgattataccgtcgcgctggcgctggccatgagtgaggtgccggaatga

SEQ ID NO: 123476 - DNA, 2136 bp, Enterobacter cloacae
atgagcaccattttgattgttctcgctgctatgctggccggcgcattggttgcagggtgggtatacaggcgtcgcgtaaggcgtcgttaccggctgccctttttaaacgcctttgccggtgcgacgacgcgtaaactgacgcaagaagagcgcgatgcagtagaaaactatctcgaaacactgaaccgttctcagttaacacctgggccgacgggggcaactgctgcgccggtgacgctcaagttaaatgcgcaaagtgacacagtgctctgtgtgacgcgctcgatcacccgctatggcatcaccacagacgatcccaataaatggcgctattatctggattcggttgaagtgcatctgcccccgtcctgggagcagtacattaatgacgaaaacagcgtagagctgatccataccgattcgttgccgctggttatctcgctcaacggccatacgttgaatgaatatcttcaggaagccccgcgttttgcgctggaacgcgcaagctcaacgcaggcctccattcgtggcgaagagacagagcagatcgagctgctgaacattcgccaggagacgcatgaagagtacgccctgagccgccctgacgggattcgcgaagcgattctgatcgtggccgcgttcctgctctttttcatctgcctgctgacgccggatgtgtttgtcccctggctggctggcggtgcggtgctgttgctggcagccgggctgtgggggctctttgccccgccggcaaaaacctcgctacgtgagatccactgcctgcgcggtactcctaagcgctggggtctgttcggtgagagtgaccaggagcacctcaataatatctcgcttggtattatcgatcttatctacccgcgccactggcagccgtggattgcccaggatttagggcagaaaaccgatatcgatatctaccttgaccgccatgtggtgcgccaggggcgctttttatccctgcatgatgaagtaaaaaacttcccgcttcagcactggttacgcagtgcggtcattgccgggggggcagcgctggtctttatcatgcttctgctgtttgtcccgctggatatgcccattaaatttaccctgtcatggataaaaggggcgcaaaccattgaggcaaccagcgtcaaccagttggacgaggctggcgtgcgggtcggtgatacgctgcgcctgaagggcaccgggatgtgtaacattcatacgcctggcgcatggaatacgcgtcagagctcgccgttcatgccgttcgattgctcgcaaattatctggaatgatgcgccgccgctgccgctgcctgaatctgaggttgtcaataaagccacgtcgcttacccagacggtcaaccgccagctgcacccgaaacccgatgacgactcacgcgtgagccctgccctgcgctcggccattcagaaatcggggatggtgcttctggacgactttggtgacatcgttctgaaaacgcaggatttgtgttccgctcaggacgaatgcgtacgtctcaaaaacgcccttgtgaacctgggtaacagtaaagactgggattcgctggtgaaacgcgcggaagcgggccggctggatggcgttaacgtgctgctgcgtccggtcagcgccgagtcgctggataatctggtcgctacgtcaaccgcacccttcgtgatgcgcgaaactacccgcgcggcgcaggcgctgaatagcccggcaccgggcggctttgtgattgtcagtgatgaagggagcgacctggtcgatcagccatacccgcaggtcgcactttatgactacccggctcaggaacagtggggccagttccagcgcctggcgcagatgctgatgcagacgccgtttagcgctgaagggattgtgacgagtatctttaccgatgccaacggcacgcgccacatcggcctgcaccgcatgccagacagcgctggcctgtggcgctacattggcacctcgctgctgatgattgcgatgctggtatgcatttgctggaacggttttatggcgctgcgtcgctatcagcgctcacgcaccaggcttgccgacatccagcagtattacgaaaattgccttaaccctaagctgatcccctcctctgagagcctgatctga

SEQ ID NO: 123477 - DNA, 270 bp, Enterobacter cloacae
atgaaacttgttacaggtatcgtcacttctctggttattgggtcactttcatttggcgcctttgcggcacaagagctggaaaaagataaagttgccgggatgaatctgaccaaagttggtgagatttctacgtctgacacgaccgcgccgatggacgccaaaagagagctgtctaagaaagcggatgagctgggtgggaagtactacgtcgtcaccagtgcagaaaaacagaccaaaaacgtgcgcgcaacggcggacgtctataagtaa

SEQ ID NO: 123478 - DNA, 774 bp, Enterobacter cloacae
atgaagacgctgtggtggcagaccgtagggacgggaaattgccatcttgtgctgctgcacggatggggcctgaatgccgaagtatggaattgcataaccggggaactcgcctcgcaatttaccctgcatctggtggatttaccgggctttggccgcagccgcggctttggggcaatgtcggtcgaggagatggcgcagcaggtgctggacgctgcgccgcaacacgccatctggctgggctggagcctgggcgggctggtggcgagccagattgcgttgacccatcccgagcgcgtgcgtgcgctggtcacggtagcctcgtcaccgtgcttcagtgcaaaggacgactggccgggcataaaaccggatgtgctggccgggttccagaaacagctgagcgaagacttccagcggaccgttgagcgtttcctggccctgcagacaatgggaaccgacaccgcgcgtcaggatgccagagcgctgaagcagaccgtgctttccctgccgatgccggacgttgaggtgcttaacggggggcttgagatcctcaaaaccgtcgatttgcgtgagccgctggccgcgctggcgatgccgcacctgcgtatctacggctacctcgacgggctggtgccgcgcaaagtggttccagtactggattcactctggccacaaagtgagtctctggtgataaataaagccgcgcatgcgccgtttatctctcatccggcggagttttgttcagcgctcgttgcgttaagtcaacgtttagactga

SEQ ID NO: 123479 - DNA, 684 bp, Enterobacter cloacae
atgttaacagtgcctggcttgtgctggctatgccggatgccgcttgccctcagcgcatggggcgtctgctccgtttgcacccgctcgctgaaaaggcaggcgatgacgtgtccgcagtgtgggctaaatgccaccgggcgagacgttccctgcggccgctgcctgaaaaaagcgccgccgtggtgtgccctggtggctgtggatgattatgttgcgccgttaagcggccttattcatgcgctgaagtttgccggccagagtgtgctggcgcgtcccctcgcccgcctgttactgctggccgttttacaggcgcgacgcacccgcggcctgccgaacatcgacatggtggttaacgtgcctttataccgtcgccgacactggcgacgcggctataaccaaagtgacctgctctgccgcccgctcgcccgatggctcggttgccggtacgacgcccgtgcgctcaaacgcgtccataacacggccatccagcatcagctcacggcccggcttcgcaaaaggaacctcaaaaatgcctttcgtcttgaattcccggtcaaaggcctccatatcgcgattgtggatgatgttgtcaccacaggcagtaccgttgctgaactttcccgactgcttttgcaaagcggcgccgcgtcggttcaggtatggtgtctgtgccgtaccttgtag

SEQ ID NO: 123480 - DNA, 1341 bp, Enterobacter cloacae
ttgagtacattaacgctagttttaacagcagttggttccgtattgctgctgctgtttttagtgatgaaagcgcgtatgcatgctttcgttgccttaatggtggtgtctattggtgcaggtctcttttccggtatgccgctcgataagatcgcagcgacgatggaaaaagggatgggaggcacgctgggtttcctggccattgtggtcgcgctgggcgcgatgtttggcaagatcctgcatgagacgggcgcagtcgaccagattgccgtcaaaatgctcaaatccttcggacacagccgtgcgcactacgcgattggcctcgccggtctgatttgtgcgctgccgctgttcttcgaagtggccgtggtgctgctgattagcgtggcgttctcgatggcgcgccataccggcactaacctcgtgaagctggtgattccgctgtttgcgggcgtggcggctgcggcggcgttcctgctgcctgggcctgcgccgatgctgctggcttctcagatgcacgccgattttggctggatgatcctgattggcctgtgtgcagcgatcccgggaatgattattgccggcccgctgtggggcaacttcatcagccgttacgttgagcttcacattccggatgacgtcaccgagccgcaccttggcgaaggcaaaatgccgtccttcggcttcagcctggcgctgatcctgctgccgctggtgctggtggggctgaaaaccatcgccgcgcgtttcgttccggtggggtctaccgcgtacgaatggtttgagtttatcggccacccgttcaccgcgatcctggtggcgtgtctggtggcgatgtacggcctggcgatgcgccagggcatgccgaaagacaaagtgatggaaatctgcggccatgcgctgcagcctgcgggtatcattctgctggtgatcggtgccggtggcgtgttcaaacaggtgctggtggattccggcgtgggtccggcgctgggcgaagccctgaccggcatggggctgcccattgcggtgacctgtttcgtactggctgcggcggtgcgtatcatccagggctctgcgacggtggcatgtttaaccgccgtgggtctggtgatgccggtgattgaacagcttaactactccggtgcccagatggccgcgctctcaatctgtattgcgggcggttcgattgtggtgtcacacgtcaatgacgccggcttctggctgttcggtaaatttaccggtgcgaccgaagcgcaaaccctgaaaacctggacgctgatggaaaccatcctcggcacgacgggtgccattgtcgggatgattgcgtttacgctgctgagttaa

SEQ ID NO: 123481 - DNA, 489 bp, Enterobacter cloacae
atgagtgagattgtgatacgccatatcgaagcccgcgatgcagaagcgttacgtgacattatgtcgcatcctggggtgtatcacgacacgctacaacttccccatccctcaatggatatgtggcatgaccgggtcgcgacgaaaccgggaagacggcatctcgtcgcctgtcttgaccagcgagtggttgggcacatggcactcgatgtgatggaaaatccccgccgcagccacgttgcaacgttcggcattagcgtggccgctgatgtacagggacgcggtgtgggtcgtgcgctcatgcgcgaaatggtcaatctctgcgacaactggttgcgcattgaacgcattgagctcacggtttttgcggataaccctgcggcactggcgctgtataagaagtttgggtttgaaatcgaagggaccggcaggaacttcgccctgcgtaacggcgactatgtggacgcgtattacatggcgcggctgaagtga

SEQ ID NO: 123482 - DNA, 972 bp, Enterobacter cloacae
atgaaaacgaccctcaagccgttactggccgccctgtgcctctccgcttttgcctgctctgtcgctgcgcaaaccatcaaagccgccgatgtgcaccctgaaggctacccgaacgtggtggcggttcagcaaatgggtgaaaaactcaaacaacaaaccgacggcaagctggagatcaaggtcttccccggcggcgtgctgggggatgaaaaacagatgattgagcaggcgcagatgggggcgatcgatatgatccgcgtctcgatggcgccggtggcggccatcctgcccgatatcgaagtcttcacgctgccctacgttttccgcgatgaagaccacatgcacaaagtgatcgacggggatatcggcaagcaaattggcgataagctaactgccaacccgaaatcacgactggtgttcctcggctggatggactccggcacccgcaacctgatcaccaaagatccgattgttaaacccgacgatctgaaagggaagaaaatccgcgtacagggcagtccggtggcgctggcgacgctgaaagatatgggcgctaacgcggtggcaatgggggtaagcgaagtttacagcggaatgcaaaccggcgtgattgacggcgcggagaataatccaccgacctatgtcgcgcataactatatgccggtcgccaaaaactacaccctcagcggccactttatcaccccggaaatgctgctctactcaaaagtgaagtgggacaaactcagcgccgacgagcagaaaaagatcctgaccctggcccgtgaagcccagtttgaacaacgtaagttgtgggaagcctataacgcccaggcgctggaaaaaatgaaggctggcggggtgcagttccacgagatcgacaaaacggtatttatcaaagccacagagccggtgcgcgcccagtatggcgaaaagcatcaggatctgatgaaagccatcgctgacgtcaagtaa

SEQ ID NO: 123483 - DNA, 1218 bp, Enterobacter cloacae
atgccagagcatgccgccgaaccggcgctgagcggattgcgcctcaatctgcgcattgtttccgttgtgatttttaacttcgccagttatctgacgattggcctgccgctggcggtgttgccgggctatgtccatgacgtcatgggttttagcgcattctgggcggggctggtcatcagcctgcagtatttcgccacgctcctgagccgcccgcatgccgggcgctatgcggatctgtttgggccaaagcgcatcgtcattgtggggctctgcggctgttttctgagtggtctgggctacctgctggccgccaccaccagccactggccgctggtcagcctggcgctgctctgtctggggcgtgtgattctgggtattgggcaaagtctggcgggtaccggttcgacgctgtggggcgtgggtgtggtgggtgcgtcccatattggccgggtgatctcctggaacggtatcgtcacctacggcgcaatggcgctgggcgcaccgctgggggtgatctgttatgcctatggcgggctatccgggctggctatcaccattatggtcgtcgcgctgctcgcgattctgtttgccctgccgcgcccgaaggtgaaggccagcaaaggcaagccactgccgttcagggcggtgctggggcgcgtctggccttatggtatggcgctggcgctggcaaccaccggcttcggcgtgatcgccacgttcatcactatcttctatgacgccaaaggctgggacggcgcagcctttgccctgacgctgtttagctgtgcgtttgtcggcgcgcgtttgctcttcccgaacggtatcaaccgtctggggggactgaatgtggcgttgatctgctttgcggtagagattgtcgggctggtgttgaccgggattgccaccgcaccgtggatggcgaaaatgggcgttttcctcgccggcgcaggcttttcgctggtcttcccggcactcggcgtggtcgcggtaaaagccgtgccacagcagaaccaggggtcggcgctggcgacctacacggtgtttatggacatgtcgctgggcattaccgggccgctggcagggctggtgatggcgtgggcaggggtaccggtaatctatcttgccgcggcgggtctggtggttatcgcattgatgctgacatggcggctaaaaaaatggcccccggtgcaggcaccggaggccacgtcatcatcgtga

SEQ ID NO: 123484 - DNA, 390 bp, Enterobacter cloacae
atgaaaaagatcattaaatggtttgctactgttgctgtcgtcggcgcactggccggttgcgcgcgtaccgccccaatcgatcaggttcacgctactgtcagtacaggccacaccgctgagcaggtgaaaaccgccattctgaaagcaggccagaagcgcgactggatcatgagcgaagcgggcccgggcgtaattaaaggccgtctgcaggcacgcgaccattcggtcgaaatccgtattccttattctgcgacaagctattcaattaattacgaaagcagtatgaacctgaaagccgccgacggtaaaatccacaagaactataaccgctgggttcataacctcgaccacgatattcagatgaacctctctgcaggtgccgcgctgtaa

SEQ ID NO: 123485 - DNA, 1065 bp, Enterobacter cloacae
atgtacgaaaaggacaccctcaacgcgctggacgccattaccgaagcgcaacgcatcgcttttgcgccgatgctgtttcagaccgcgcgttgtctgcgtaattcgggcgtgctttcctggctggataaaaaggggaaaacaggggcaagtctcgaggaaataaccgaaaacagtaccctgagcagttatagcgtaagcgtattgctggatatgggattaagcggacggatcgttacctgtaaagaaggacgctatttcctggcaaaggtgggccatttcttattgcatgacaccatgacccgcgtgaatatggatttcacgcaggatgtttgttaccagggattattccatctggccgatgccctgcaggaagaaaaaccggcgggattatccgtgtttggtaactggccaaccatctatccggcattatcacaattacccgcgcaggcaaaagagagctggttcgcttttgatcattactattctgatgccgctttcgacgcggcgctgccatatatattcgcaagctcgccgacaaaattgtacgatgtgggcggaaatacgggtaaatgggcgttacgctgctgccgctatgacgacaatgttgccgtgacgatccttgacctgccacagcagataacgctggcgcaggaaaacatcgaaaaagcaggtttatctcatcgcattggcttccatgctgtcgatatgcttagtcatgcgacattgccgggtgaagccgatatctggtggatgagccagttcctggattgtttctctccggaccagattgtcgccatgttgactcgcgttgcacaggttatgaagcccggcgcgcgactgtgcatcatggaactgttctgggatgcccaaaaatttgaagccgcctcattcagcctgaatgctacctcgctttatttcacctgtatggcgaacggcaacagccggttttacagtgtagagaaattttatcactacctggagcgggccggtttccacgtagaacagcggctggacaaccttggggtaggtcataccctattgatttgtcaaaaaattgaacaatag

SEQ ID NO: 123486 - DNA, 723 bp, Enterobacter cloacae
atgaaattttcactgaacataattgactggcaggcaagagcgccaggcctgagcgatgccgcagagtggcaggcgtggtcacgccagcaccttaccctcgacccggctgcgccgctgcctaagcttaccgaactgccgatgatgaccgcgcgccgcctcaactcgggcagtaagctggcggtagacctcggactcaccctgcttcgccgccacgcgattgatgccgttgtctattccagccgtcatggcgaactggagcgtaatttccgcatcctgcactccctggcgaccggtcaggccgtctcgccgacagactttgccatgtccgtgcacaattcggcggtgggcaacctgacgatcactgcgcgacaccccatcgtctcgtcttctgtttctgccgggctggacaccttccagcaggcattatgtgaagtgttgagcctgcttcaggtgggctattcccgcgtcttgctggtcgattttgacggcgccctgcccgatttttatcatccgggtttaccgccgcagatgcccacctggccctacgcgctggccctggtgattgaagccgggagcacactgcagtgcgaaacccgcagcggcagcacgggtgaagaacctcccctgccgcagagcctgatgttcctgcaacgttacctccgcgatgaacggcagtttgtggtttcaggcgaacgtctgctgtggcaatggacacgcgaatga

SEQ ID NO: 123487 - DNA, 816 bp, Enterobacter cloacae
atgagccgcctgactgcccgtatcaactggttatggcgtctgatgatgaccggcttctgcttcgtgctgtttggcacgggcgggctgctgctgtcgctggtgtggttcaatctgctgttgctggttcagcgcgaccgcgccagacgccgtcgcctggcgcgtcgcagtatcgcggccagcttccgctttttcttacatgtcgcccgtggcaccggggtactggactatcgcattcacaatcttgacgcccttcgcggggatcgcggttgtctggtggtggccaatcacccgacgctgattgattacgtgatcctggcgtcagtcatgcccgaaaccgactgtctggtgaaaagtgcgttgcttcgcaatccgtttgtcagcggcgtcattcgcgcagcggattacctgattaacagcgaagcggaaacgctcctcagtgcaagccagcagcgtctggcccagggcgacacgctgttaatctttccggagggcacacgaacccggtcgggagaggcaatctccctccagcgcggcgcggcaaatattgccgtgcgctgccgcagcgacctgcgcatcgtggtgatccactgcagcgaacctctgctggataaaaaaagtcactggtacgacgtaccgcccgtaaaacctgttttcaccgtagatgttcgcgatcgcgtgaatatcgacgctttttacgatgcgaagacacaagaaccggcactggcggcaaggcagttaaaccggcatctgcagcatcgattaacatcaggccttcaatctttgtcaggaattaatgatgcaagcgcttcatcttga

SEQ ID NO: 123488 - DNA, 252 bp, Enterobacter cloacae
atgactgaacaagaaaccatttatcaggaagtctgcgaactcctggctacgctgtttgaactcgacccacaggaaatcacgcctgaggctcgcctgtacgaagatctggatctggacagtatcgatgcagtggacatgattgttcacctgcagaagaaaacggggacgaaaatcaaaccggaaaccttcaaatctgtccgtaccgtgcaggatgtggttgacgctgtcgctcagcttttgcgcgacgagtaa

SEQ ID NO: 123489 - DNA, 537 bp, Enterobacter cloacae
ttgctggcgtggccattcctgattggattggggctgacgcacaacggtctgcactggctgttgccgctgatggccctgctgctggtgctgcgtctgcatcaggcgcggcgaaacgcaggcccgatgcggtatgtggtgcagtgcattgcgctggcaggcctggcgctctgcgcggcgagctatctgctgaaagcgcatcagtggctgctgctctatccggtggtggttaatctcgtgatgctggccgtgtttggcggctcactgtggacaaccatgccgctggttgaacggctggcacgtctgcgtgaaccgaatttgcctccggcgggtgtgcgatatacccgtaaggtgacgctggtgtggtgcggttttttcctcggtaacggtgcgatagccctgtttaccgtgctacacggcgatatgcatgtctggacagtgtggaacggtatggtggcttattttctgatgggcacgatgatggcgacagagtggctggtgcgtcaacgggtgatgaaaaaagagaagctcgatgaataa

SEQ ID NO: 123490 - DNA, 1362 bp, Enterobacter cloacae
atgaataaacccctcccgctgggccagtggttaaatgctccacgccctgacgacatgccgatcgcctggcttgacgatcgcacctggacgctgggtgagttgcgccacgatgtcaccttgctggtagaagcattgcgacagcaggagggtgaacgctgggcgctgtgctttgaaaacagctacctgtttattgttgcgctgctggcctcactgcatgccggtaaaaccccggtcattccaggccatagccgggtctctctgctcgacgaacagcagtcgctgtttagcggtgtcctgagcgatcagacgctggatattcagggaaaggtcattgtggtgacctcctcccctcagatcgcgccccaatgggcaccgttgcccgtcattgacgacgcgcgcttcgttgaactctttacctcgggctccacgggcaccccgcgccgggtcattaagcacatcgccagcctggaccgtgaagcgtgcctgctggcgaaccgttttggcgaacgcctggcgggctgcagcattgtggcctcggtcgtaccacaacatctctatggcctgacgttccgcatcatgttgccaatggcgatggggcttccgctgcacgccgccatgctctattacgctgagcagctggcggcactccctcacgacaggcagtacctttttatcagcagtccggcgttcctgaaacggctggataccgggctgactgcccctcccgtcgtgatgctgatctccgccgggggaatgctcccctggtgcgatgtcactgagacccatggctggcttaacgtctggccggatgaaatctacggcagcaccgaaaccgggatcctcgcctggcggcaccgtcaggcggacagcgtaccctggttcgccttccccggtgtggtgttccacagtgaaggggaaatctgccgcgtgacctccccgctcattcacgaagccgcagggttacagctggacgatatcctgcacttcgacagtaacggtttttttagcattgccggacgtcgtggtcgggtggtcaaaatcgaagaaaagcgtatctcactgaacgagattgaacgtcgcctgctggagcttgagggcatatgtgaagccgcagcgttaccggttacccgcggaggtcgtcagggtataggtgtcctgctggttctggatgagaagacccgtcagcgctggcatcagcagggcaaaaaatcgcaggaactggcctggcgccgcgccctgcggccctggcttgagccggtcgccgtcccccgctactggcgcattatcgatgagatgccggtaaacagtatgaataagcgtgtctatgcgcagttacaggagttgtttcatgaaaattcatga

SEQ ID NO: 123491 - DNA, 354 bp, Enterobacter cloacae
atgaaaattcatgaaatcgaacgccaccaggcacagccgcagcacctggaaatcgttttgcatcttgacccctccctgttctggttccaggggcattttgccgtacagccgttgctgccaggcgtggcacagattgactgggtcatgcactacgccaccacgctgctggcaccgggttaccgttttcacagcatccaaaatgtgaaattccaggcccctctgctaccggataccacggtcacgctggtccttaactggcatgccgaacgtcagatactgaccttcagctaccagcgccatgccggtgacgatcgccatactgccagcagcgggaagattcgcctgtgtcagtaa

SEQ ID NO: 123492 - DNA, 1692 bp, Enterobacter cloacae
gtgtcagtaaccttccgcccctgcgtgctgatcccgtgctacaaccatggcgcgatgatggcaaaggtactgtcgcggctggcgccgttcggcttgccctgcctggtggtcgatgacggaagtgacgagcagacgcgccgcattctggagcgtctggccgccgggcagccccaggttacgctggtacgtctggcgcaaaacgcaggtaaaggtgccgcggtcattaaggggctggaagagtcggcccgcgcgggctatacccacgccgtacaggtggatgccgacggccagcatgctattgaggatatccccaaaatgctggctctggctgagcgtcacccggaggcgctgatatctggccagcccatttacgatgattccattccgcgctcccgcctctacggtcgctggataacgcacgtctgggtatggattgaaaccctgtccctgcaacttaaagacagcatgtgcggttttcgggtctacccggtctcgcccacgctgcagctggccgcacgtgtgccgcttggcaaacgtatggactttgacaccgaagtgatggtccgtctctactggcagggcaataccagctattttctgccgacccgcgttacctatccgccggacgggttatcccatttcgacgcgctcaaagacaacgtgcggatctcgctgatgcacacccggctgttcttcggcatgctgccccgcattcccaccctgctgtttcgtcgtcgccgccagcactgggcgcagcaggacgaggtgaagggcctgtggggaatgcgcctgatgctgcgcgtctggcagctgtttggccgccgggcctttaccgtgctgctgtggccggttatcggggtgtactggcttacagcccgaccggcgcgacaggcttcacagcagtggacagcacgagtgaagcaggtgctgacgcagcggaacatgcctgttccgccacgccttaacagctttttccattttatgcgcttcggtaacgccatgctggataaagtcgccagctggcgcggcgaactgaagtttcatcgtgacgtggtctttgctcccggtgcatatgacgtgctggatgctgacgcatcgcaaggcaaactgctgctcgcgtcgcatcttggcgatgtggaagcctgccgggcactggctcagctggaaggcagcaaagtcatcaacgcgctggtctttagcgataacgcacagcgctttaaacagatcatgaccgagatggccccccaggcgggggttaacctgatgcccgtgacggacattgggccggataccgccatcgccatcaaagagaagcttgagcgcggtgaatgggtcgccattgtgggcgatcgcatagcggtcacgccacagcgcggcggcgactggcgggtgatctggagttcgtttatgggacagcccgccccgttcccgcaagggccgtttatcctcgcctccattctgcgctgcccggtggtgctgatttacgccctgcgtcagcagggtgcgctcacgatacactgcgaaccgtttgccgacccgctgcttctgccacgcggggagcgccagcaggcgctgcaacaggccgtcgatcgctatgcacagcggcttgagcattacgccttaatgtcaccgctcgactggtttaattttttcgatttctggcacctgccggatgccaaagagaaggagtaa

SEQ ID NO: 123493 - DNA, 606 bp, Enterobacter cloacae
atgagatggttgcctgtgctggcactgatgatcagcccgctggtgagcgccgtgacgctggatgaactgcagcagcggtttaccgggcaacctgtcgtgcgcgcgcatttcgaacaggtccggacgattaaggatctgccgcagccgttgcgctcgcagggcgaaatgttgatcgcacgcgacagcggtctgctgtgggatcaaaaagcgcctttcccaatgacgttgttgctggatgataaacggatgatccagacgatcaacggccagcctccgcagaccatcaccgccgacaataacccgcagatgttccagttcaaccacctgctgcgggcgttgttccaggccgaccgcaaggtgctggaagagaacttccgcatcgattttcgcgatctcggtgaaggccgctggtcgctggtgctgacccccacaacgacaccgctggacaaaattttcgctaccctcgatctgggcggcgcgacctaccttgagacgattcgcctcaacgataagcagggcgatcgtaccgatatcgtcctttcccgccacacactgacgcccgccagcctgaccgatgacgaacgccaacgctttgccgcaccgtaa

SEQ ID NO: 123494 - DNA, 2325 bp, Enterobacter cloacae
atgacgaacgccaacgctttgccgcaccgtaaatccctgcgcccggcgctgctgtgggcgacggtatgcctgattctgttgggcgtgttgctgtcgctgctgcccggcgcgcgcctgaacagcagcgtactggctatgctgccgaagcagacgctcggggcaatcccgccggcactcaacgacgcgtttatacagcgtcttgaccgccagcttgtctggctggtcagtcccggtaaagaacccgatccgcgggtggcgcagcagtggctggatctgttgaaaaacagccattcgctcagggaggttaaaggcccgatggacgccgccgggcaaaaggcctggggcgagttcttctggcagcatcgcaacggcctgattgattcagccacccgggcccgcctgcaaaacggcggtgaggcacaggcgcagtggattttatcccagctctactcggccttttccggcgtgagtggcaaagagttgcaaagcgatcccctgatgctgatgcgcggctcgcagctggcgctggcgcaaaacagccagaagctacggctgatggacggctggctggttacccaggatgccagtggaaattactggtatatgctgcacggtgagctggcgggatcatcgtttgatatgcagcaaacccatcagctggtaaccacccttaccgccctgcaggagacgctgaaaacgcgctttccgcaggcgcagctgctctcacgcggtaccgtgttttacagtgattacgccagccagcaggcaaaacgggacatctccacgctgggcatcgtcacgatccttggggttatcctgctcatcctggcagtgtttcgttccctgaaacccctgctgctgtgtctgatttccattgccacaggtgcgctggcgggcacggtggtgacgctgctgctgtttggcgaactgcatctgatgacgctggtgatgagcatgagcattatcggaatttcagcggattacacgctctattacctcaccgaacgcatggtgcacggcgcagaacattccccgtggcaaagcctggccaaagtgcgtaatgcgctgctgctggcgctgctgacgaccgttgccgcctacctgattatgatgctggcccccttccccgggatccgccagatggcggtgtttgccgcggtggggctgagcgcctcctgcctgacggtgattttctggcatccctggctgtgccgtggtttgccggtgcgcccggttccgtttatggtcctgatgttgcgctggttggccgcctggcgacgcaataaaaaactctctgtgggcctgcctgtggtactggcgctggtctcggctgccgggcttgccaccctgaaggtcaacgacgatatcgcccagctacaggcgctccccaaagacattctggcgcaggagaaaaccattaccgccctgaccgggcaaggtgtcgatcagaaatggtttgtggtgtatggcgcatcgccgcagcaaacgctggaacggctggaagcctttaccccggcgttagcccaggcccaaaaagcgggggatattacccgctggcggaccctgcccttaaattcgctggcgcgccagaaaagcgatctgctgctgttgcagcaggccgcgccggccataacgaacgcgctgcgaaacgcggggctgagcaccgtcacaccgaatctgaatgccatgcccgtgagcgtggaggcgtggctcgccagcccggccagcgaaggctggcgtctgctgtggctgaccctgcctgacggcgaaagcggtgtgttagtgccggtggacaacgcccggaacagcgccgcactcagcgaagtagccgcccgtcatgcgggcgtcgtctgggtcgatcgcaaggccagttttgacagcctgtttgagctctaccgcacgctgttaacgggactcttgtttgtcgcgctggcggtgattgcctgcggggcgatggtacgcctcggctggcgaaaagggcttatcagtctggtcccgtccgtgctgtcgctcagctgcgggctggccgcgctggccgtcacggggcatccggtaaatctgttttcactgctggcgctggtcctggtgctcggcattggcattaactacacgctgtttttcggcaacccgcgcggtacgccgctgacgtcgatgctggccatcacgctggcgatgatgaccacgctactgacgttaggcatgctcgtgttcagcgccacgcaggccatcagcagcttcggtattgtgctggtgagcggcatttttaccgccttcctgctggcgccgctggcgatgcctgttaagaaagagagaaaacgaaaatga

SEQ ID NO: 123495 - DNA, 579 bp, Enterobacter cloacae
atgaatgctttttaccgcgcagccgcgctggtcgcgacgctgctgctggcaggctgtagccattcgaccgatactgaagggacacgtccgcaggcctggcttcagccaggaacccgagtgacgctgccgccgcccggtattaccccggcggtcagttcgcagcagctgctgaccggaaccttcaacggacaaacgcagtccctgctggtcatgctcaacgcggatgatcacaaagtgacgcttgccgggctctcttccgtcggtatccgtctgttcctggcgacttacgacgacaccgggatccacaccgaacagtcgatcgttgtgccgcagctgcctcccgccagccaggtactggtcgatgtgatgctcagccactggccactcagcgcctggcagccacaactgccaaagggctggacgcttaaagacaagggcgatcggcgcgagctacgcaatgccagcggcaagctggtgactgacattgtctacctgcaacgcaaaggcaagcgcgtgccaatcagcatcgagcaacacgtctttaactaccacatcaccattcaatatctgggtgactga

SEQ ID NO: 123496 - DNA, 1170 bp, Enterobacter cloacae
atgatttacatttctgctgttggcatggtcaacgcgctgggtaactcgctggatgagattgccgctaacctgacggcaggcgtagcccctggcatgcattgtcggtccggctggttgcaggatgcgcccgacgccgtgctgggtggcgtggaaggtgaattgccgtccattccggataccctgtccgcgcaccgcacccgcaataaccagctgctgctggccgcgctggcacagattcagtccaccgttgacgacgcgattgcccgggttggccgcgaccgcgtggccgtggttttgggtaccagcacctccggcctcgatgaaggggatgagcacgtacgatcaacgctcaacggcgaagccagcacccggtggcagtatccgcaacaggagctgggcgatccgtcccgctttctggctaactggttacagctcgagggtccggcatataccctctcgaccgcctgctcctccagcgcgcgggcaattatcagcggccggcgtctgattgacgccgggctggtggatattgccattgtgggcggcgcagataccctgagccggatgcccgtcaatggctttcacagtctggaatcgctttctccaacgctctgcgagccgtttggccgcgaccgtcggggtatcaccattggtgaagccgctgcgctgatggtgttgagccgtgaacccgccggggtcgcgctgctgggaacaggcgagtccagcgatgcttaccatatttcggcgccgcatccgcagggtgaaggcgccattcgcgccattacccaggcgctcaatgacgctggtctgcagcctgaggatattggctatatcaacctgcacggcaccgccacaccgctcaacgaccagattgaatcacacgtggtacacgacctctttggagaaaacgtgccctgcagttctaccaaacaccttaccggccatacgctgggcgctgccggtatcaccgaagcggcgttgagctggcttattctgacgcgtgacctgccgttacccccacaggatttcgcccgctacgcgccggacgaaacgctgtcgccgtgcggcgtgctgcaccagagcaccgcgctgaaaaaaccggtcattttatctaactcgttcgcgtttggtggcaacaacgccagcatcctgctggggagagtgtcatga

SEQ ID NO: 123497 - DNA, 474 bp, Enterobacter cloacae
atgagctacttatcacccgtcgactatctgccgcacgatgcgccaatgatgctgctgggatccgttgaacgcgtcaccgacgattccgccgtatgccgtgtcgcggtcaacggccaaagcgtactggcgccctttttgaatgccgagggcgatttgcctggctggtacgcgctcgaactgatggcgcagaccgttggcgtctggtcaggctggcatcgccagcagaaagggcaagatcatattgcgctgggcatggtgctgggtgcgcgcgagttggtctgcgccagtggacgtttcgcaaaagacgcgacgctggacatcaccgtcagactgctgatgcaggatgaacgcttcggcagttttgaatgtacgatctcctcaggtgaggagacgctggccacgggccgggtcaataccttccagccgagcgcagaagaattaacatcgctttttaatcagggatctcacgcatga

SEQ ID NO: 123498 - DNA, 594 bp, Enterobacter cloacae
atgtaccagtttatactgggaaagatctccaccctgagcgcagacccgctggcgtcgacgcttgcacatatggcacctgcgggtgcacgaaatgcatcctggctggcggggagaaccctgctcgccaaaacgctttctccttctccgttacccgagatcgtctatggtgagcaagggaagccggccttcgtggatgcgcagcccttctggtttaacctgagtcacagcggcgataatatcgcgctgctgctgagcgacgaaggcgaagtggggtgtgatatcgaagttatccgcccacgtgaaaactggcaggcgctggctaacgccgtcttcagcgtggcggaacatgcggagctggagcgcgaagacccggagacaaagctttctgctttctgggggatctggacgcgtaaagaggccatcgtgaagcagcgaggcggcagcgcctggcagattgtcagcatcgacagcacgtcgcagacgcattcggtaagccagctccagttcggctcgctcagtcttgccgtctgcacctcaacgccttatacccttaccgccgggacgattgctcaccacgggatgtccgtggcataa

SEQ ID NO: 123499 - DNA, 405 bp, Enterobacter cloacae
gtgagaggaacgttctgggcgttatgcagcgtaatgctggtcagcgcggcgcagctgctgctgcgctatgccatgcaggctctgccgccagtcagcgagctttatgcgtttgtctccgcgctctggcacttatcatccggtactggcgcgctgctgctgggactcatggggtatgtggcctcgatgggctgctggtatctggctttgcatcgcatggcgctcagcaaagcgtatgccttgctgagcctcagttacattctggtgtgggccgcggccattttgttgcccggctggaatgaacacttttcctggcacgggctggcgggggtcgggatgattattctcggcgtgctggtgatttttatgccacggacatcccgtggtgagcaatcgtcccggcggtaa

SEQ ID NO: 123500 - DNA, 339 bp, Enterobacter cloacae
atgacgacctggctctggttgatactggcaagcctgctgacctgcgcagggcagctgtgtcagaagcaggccacccgtccggcgaaagccgggcggcgtggcgcgcatattatgctgtggctgggcctggcattgctggcactgggcagcggcatgctggtctggctggtggtcctgcagcgcctgcctgtcggcgttgcctaccctatgctgagcctcaattttgtctgggtgaccctggcggcgaaagcattctggcatgaaaaagtcgcgttgcatcactggctgggcgtcgggttcatcatcatcggcattgttatcctcggaggaagcctgtga

SEQ ID NO: 123501 - DNA, 1656 bp, Enterobacter cloacae
atgaaagcagcccgttatggcttagcgcttcccgcactgtttatcgtttactacctcattccgatcgatatccgcctgctgtggcagcctgatgaaacgcgctatgcggaaatcagccgcgaaatgctggcgtctggagactggattgtcccgcattttctggggctgcgttactttgaaaagccgattgcgggctactggatcaacagtatcgggcaactgctgtttgggcatactaactttgccgtgcgcgccggcgccatattctcaaccgggttgacggctctgctggtgatctggatggcgtggcgcctgtggcgggataagcgcgttgccattttctccggccttatcttcctgaccctgttcctggtgtatggcattggtacgtacgccgtgctggatcccatcattaccctgtggctggtggccgctatgtgcagcttctggctggcctcgcaggctgaaaccgtggccggaaaagcgggtggctacgtgctgctcgggcttgcctgcggcatgggggtgatgaccaaaggattcctggcgctggcggtgccggtgataggcgtgctgccgtgggtgattgcgcagaagcgctggaaagaggtgctgatctttggctggctggccatcgtgagctgtgtgctgatcgtcctgccctgggcactggccattgcgcatcgagagcctgatttctggcgctacttcttctgggttgagcatattcagcgctttgcccagagcgatgctcagcacaaggcgccgttctggtactacctgccgttcctgctggccggcagtctgccgtggctggcgctgttgcccggcgcatttcggctgggctggcgcgaaagagacaacacgggcggtggcttttatctgcttggatgggtcgtgatgccgctgctgttcttcagcattgccaaaggcaaactgccaacctacatcctgccgtgttttgctccgctggctatcctgatggcgcgctatgcctgcatcgcggcggacaaaggggccagagcgttacgcattaacggcgggattaacctggcgtttggtgtgattggcgtggtggcggcgctggtggtctcaccgtggggggttgctaagcatccggtctggacatccgttgagctgtataaagtcttctgcgcggtgctggcgtttctcgtctgggcggctgtcggctggtttaccgtgcggcaaagcgcgcagcgctggtggctggcggcgttgtgtcctgctggcgtggcgctgctgatcgggtttgccattcctaacctggtggtggattccaaacagccgcagtcgctggtggataccatccgtgacccgcttcagagcagccggtttgtgctggcgaacaatgttggcgtggcctccgggctggcgtgggagcttaagcgtaatgacatcattctgtttggtcagagcggcgagctgagctacgggctagcgtacccggatgtgaaagaccggtttgtcgagaaagataattttgcgcagtggctggcaacgcatcgccagcagggaggcgtgtcactggtgatcctgctgtcaaaacacgacgatattaagcgggctcatctgccagaacctgacagcctgtatattcagggccgtctggcctggctgcagtatttaccgcaatga

SEQ ID NO: 123502 - DNA, 1143 bp, Enterobacter cloacae
atgatgagtgattttttgcctttttcccggccgtccatgggtagcgaggaattagcggcgttgcaggaggtattaacctccggctggatcaccacaggaccgaaaaatcaggcgcttgaagaggcattctgtcagctaaccgggaatcaacatgcgattgccgtcagctcagcgaccgcgggaatgcatgtcacgctgatggcgctgggtattggtccaggcgatgaagtgatcaccccctctctgacctgggtatccacactgaatatgattgtgctgctgggcgcaaccccggtgatgattgatgttgaccgggatacgttgatggtcacgccggatgcgatcgacgccgccattacgccgcgcacaaaagcgattgttccggttcattatgccggcgcgccgtgtgacatcgacgccattcgcgccatcggggagcgtcacggtatcgcggtcattgaagatgcggcgcatgcagccggcacgtactaccactcgcgtcacgtgggctggcagggcaccgcgattttctcattccacgccattaaaaacatgacctgcgccgaaggcgggttagtggtcacggacgatgcgcaactggcgcagcggatccgtagcctgaaattccacggcctgggtgtggatgcctacgaccgccagacgcttggtcgtgcgccgcaggcagaagttatcacgcccggcttcaaatacaacctggcggatatcaacgccgcgctggcgctggtgcagttgggcaaactgaaagaggccaacgcacgacgtcatgacattgctgaacgctatctgcgcgagcttgccgatacgccgttccagccgctgcgtattccttcatggccgcacgtccacgcctggcacctgttcatcattcgcgtggatgaagcccgctgcgggatttctcgtgacaacctgatggcagccctgaaggaaaaaggcattggcaccggcctgcatttccgcgcggcgcacacgcaaaaatactaccgcgagcgttttcctgatgtatcgctcccgaattctgaatggaatagcgcgcgtatttgttctctcccccttttcccggacatgactcatgacgacacaacccgcgtcattaccgcgctccatcagcttgcaggaaattga

SEQ ID NO: 123503 - DNA, 882 bp, Enterobacter cloacae
atgcataagacgacgcttgaacaatggtcattactggaaagagtggtcgaggcaggcagctttgccaaagcagcggaagagaccaaccgcagccagtcctcggtcagctataacctgtcgctgctgcaggagcggctgggcgtggcgctgctggtgcccgagggacggcgggctgtcttaaccccggccggcgaactcctgctcaaccaggttaaaccgttgctgaaagccttcgcctatgttgagacccgtgcggcaagcctgcgtaatggaatgcgcacgcggttagatctggtggtggacagcattttcccgcgccgacgcctgttcgctattttgcgtcagttccagcagctgtatccgcaaacgcaggtccgcctcaccgaagtgctggaaaatagccgcaccgatgtcattaatgatgaagccgacgtgatggtgttaacccgccgccaggacataaccggtcttggcgaatggctgatgaatatcgactttgttgccgtggcgcatcatcaacatcccctctttagcctcgacgcgccgcttaacgacgatatgctgcgcccgtggccgctcattcagatagccgacagccagaccgccgcgcgtgcggccggtgagtcgtggaccttttccaccattgatgcagccatagaggcggtgatgtctcaggtcggctatggctggctgccagaggagcgtattcagacccagcttgatctgggggtgcttaaacgcctgccgcttagccatggcgcgcgccgggctacgccgctgcacctgattgtgaaacgctccctcggcccgctggatgaacaggttgagaccctgctgcgcctttttagccaggagccgccatcctcacctgctacgctttaa

SEQ ID NO: 123504 - DNA, 528 bp, Enterobacter cloacae
atgacgtttagatcgcttatttcaatcctctcgttaagtctggcttcgttttcggcattgagttttcaactgccggcgtcgatgctgtcaatgaaccgcgagctcgccctttctccggcaaaatccgcgctgctgcaccaggaaacaggaccactgcgtacccggatccttgatcaataccagaagtggaaaggcacccactatcagtggggcgggaccacacatcggggcgtggactgctccgcgctgatgcagcatctgttcagcgatgcggcgcaccttaatctgccgcgcacgacgggcgaacagatccatcgcggcgtgaaggtggcgcaataccgtctgaaggcgggggatttggtcttctttcagaccggtccagaccgaaggcacgtgggcgtgtacatcggcaatagccagtttattcatgcctcacgcagccagggcgtaaccgtttcaaccctgactgatgactactggcaggcgcactatattactgcccgacgggtcacagaccgttctgtctga

SEQ ID NO: 123505 - DNA, 399 bp, Enterobacter cloacae
atgcagctactcagcatcattattttgcttacccttacggtggtcatccattcgctgtggatgttttgcgttttaaaattcattaacttagaggtcgactctgcggtgcgtgtggttttgcgtaacgtcgggatcgttatctccatgatcttcgcccatcttcttgaagccggtctgttcgccgggttttattttgttattgatgcatttaacgactggaacaccagcttctacttttcgctggtcagttacgccacggtgggatacggcgatgtcacgttgcctcagcactggcggctgattgggggtgtggaaggcctggtcggcgccttgatggtgggctggtcagtggcggttctggtggccgtactgcagcgtttgcgcggcatgagcgcctaa

SEQ ID NO: 123506 - DNA, 939 bp, Enterobacter cloacae
atggggggcaaagacgtagttctggttaccggaagcgacctggcggagcaggccatggtgatgttgcagggctttgaggtggtgtttgcgggccgccagcccacagaagatgaactgatcgcgctgtgtgaacgacacaatcctgtggcgattctggtacgttacggcaagatcaccgcgaaagtcatggatgccgcccccgctctgcaggttatttccaagcacggaagcgggatcgatgtgatagaccagacggcagcggccgagcgcaacatcgccgtccgcgctgcgccaggtgcaaacgcggcggcagtggctgaacatacctgggcgcagatcctcgcctgcgcaaagtcggtggtgcctctggacaagcgcctgcgagacgggcactgggataaggcgacgcataaatccattgaactggagggcttaacgttagggctcatcggattgggtgctatcggctcgcgtgtggcacatattggtcacgcattcggcatgaaggtgctggcttacgatccctatgctaagtccatgcctgccctgtgcgaacgcgcagaaacgctgaatggacttctttcccgttccgatgtcatctctttgcactgtccgctgaccgatgagaatcgggggatgatcaatagccagacgctcgcacactgcaagcggaacgcaattctggtaaatacggcacgcggcggactgatcgacgatgaatcgttactggcggcgctcagggatggcacgctgcacagcgcagcgctggacagctttacccacgagccgctgacggcgccgcacctctggcagtccgtagaaaacgtggttatttcaccgcatattggcggcgttaccgcagcgtcatatatcaagatggggaccgtggctgcgagcaatattcttgctgtaacagacgtaaccaccgtcagcccgtaa

SEQ ID NO: 123507 - DNA, 1590 bp, Enterobacter cloacae
atgactctcagcacagcacaccctatccgcgaacagttcgaacactgtctggcggttattcgccaggcctcggttgaaattttacttctcctgaatgtacatgtttctgagggaaaagatccacgctggtttctggaacaactggacagcgcgcgtttaggcctggggggctggaatgcggttgcgaagacgctcaatttgaatgacgcggagatgtccgaattcacgctgcaattgcgtctgcttcagcagcgtgttcctcagtacgaaagcggtcaggatgtcagtaaaaaccagctgattgccgcgatgcggtttgtgactacgctggagcaccttcgtttgcaacagcctcttctgacctacagcaccgaagtggcgcctggcagtgaactccagcagcaacaggcgcacaagcaggtgcgtacgattgagttgatgataaaagggctcatccagcaggcctggcccgatcaggtgcggctgaataaccatcttaaaaccctgtttaacgcggaccgcgtgcggcgttggctgaagcttggtgacatcaatgatgtgctgagcggcatgatgttcagtgagctggcacagatgctggtggataaaaaagagttcagccgctactacgcctcgctgtttagcgatccgtcaatgctcacgctgatggtggaaccgcggaaaaccctgcaaaccttcctcgatgatattcggcaaatccgcaacaatattaccgtgcagaaagcgttaagttcggcgcaaatccagctgctggataactactacacgcagatcacccgaccggttcaacgtgcttttgaagaggggagaacccgcgtcaacccggccggactgatggcggtggatgccagcgagctgcatgctttctgggaaaaggcgcagaaaatggatcgcgtgaccggcggggatctctttgaggttcgtgacacgattgaaaaaccgacccagcgcgcaccgcgcacgccagaacagcgtgagcagcttatttccggcgcgttatggggggcggttggcgtgatggtgattgccattgtggcgggcggcttctggctggtaaccagcagtaaaccccagccagcagccgggaacgttgcagaaacggcccagcctcaggagatgcgcgaaaccccgtcctcgcgcgagacgctgtcgcgcatgggcgtgacctgggacgagaataatttccgctcggcgattaaccgcaatgatacccgggtggcactgctgtttttgcagggagggatggactggaagctctcctggacggaagaggcgatgtcggctgactatgacgacgttctggagctgatgttgcgctaccgacagaacatggtggaacagaagccgtgccggcgctttatcaacacgctcagccatgccatgtcgaatggcgagtccctgacgtcaatgcgtaaacagtatctgaaggcgttttgcaccgtgcctgccgtggtgaagcgccagcagcatgatctggatatggcgacgcgtcgggcacagtcacagccggatgccactacaaaaaaatggcagtccatccagaccgccatttatgaagtgattcgttaa

SEQ ID NO: 123508 - DNA, 540 bp, Enterobacter cloacae
atgcctgtcttaacgacatcgcgtcttatctgttcaccgctgcaagaccatgactggccctttttcctggcgttgcagcacgaccccgaggtgatgcgttttgtcgcggaagatcgccccgtggaggcgatccgcgaggcgttcgactctcgtctgacgccctggacgccgggcagcgcgcactggctttgcctcgttgtgcgtgacgccacctccggcgtaccgctcggcgtcaccggttatattcatcgcgatgacgattgcgcggaagtgggttttctttttgcacctgcggcccaggggaaaggctacggcttcgaatcgctgcaggcgctgtgcggttacgcctttcatcagggcggcatacgccgcctcaccgccaccgtcacggcggggaatatcgcctccagacgcctgctggaaaaaacgggctttcgtctggagggcgagttacgcgagagttattaccttggcggacaatggcataatgactggctgtttggtttattgcagcaggaatatctcagcaatcattcctga

SEQ ID NO: 123509 - DNA, 339 bp, Enterobacter cloacae
atgaaaggtcatgcgctgaagatatcttctgccgccattgcgttaataaaaaaacaccaggggctttctctggagaaatatcgtgatgaaaacggtttatgggttattggctatggccatgttattcgccagggcgaatgttttcagcgtcttatcacgccgctacaggctgaatatttacttcacgatgatattcagctgtgcgaaacgctgctgcgggaaaaatttaaacgcccgttaacccaacagcagcacgacgcgctggtgttgatgatgctcagtttcggtgagacgacctcactcccgaccgcaattcttcaggccgtcgcccgggtatag

SEQ ID NO: 123510 - DNA, 603 bp, Enterobacter cloacae
atgcgggtaattatgtttgacaggcagtccctgtttattcacggagcgatacacagtcttcagaaattaattccggaaataaatattacgggaagctgtcaggcagaagatttacgggcgcaaatttcagcgtcaccctcggctatcgtcatgattgacgggaatttaattgaggatgaggggatcgcctggctggaagcgatcatgcagcgttttccgacgatacgcgtggtaatggttctggctaaaaaagaggcccgatgggtggaacaattgctgcagcgaaacgtgatggccattgttccccgcaatgcgcacccggagcgcttttccgcggtgctggattcggtctcccgaggaatggtgtgcttccccggtgagtgggtgaggcaaccgtcggcgccgcaggcgttattatccttaagcgaacgccagcgcgaagtcctgaaattactggcggcgggggagtccaacaaagagatcggacgcaatctcaacatcagcgccgccacggtgaaagcgcacctggaagcgcttttccgccgcctggaggtgaaaaacagaacccaggccgcgatgtactatacccgggcgacggcctga

SEQ ID NO: 123511 - DNA, 1026 bp, Enterobacter cloacae
gtgacgccggaaaacaacccgcaacgacctacccaacatttagattacgaacccatccagaagatggaaaccgggcctgaagaagcaaaaatgccaggcaccgccagcaaagcgctggggactgtcaccagcctggcagagcggatacagcagttccccatgattgcgcacctgatacgcgcaacagagcggtttaatgaccgcatgggtaaccagtttggggctgccatcacctatttctcttttttatcgatgatcccgatcctgatggtgtcctttgccgcagccggttttgtgctcgcgtcacacccaacgctgctgcaggatatcttcaataaaatcctgaataacgtcagtgatccgacccttgccaccacgctcaaaaacaccattaataccgccgtacagcaacgtacgacggtcggtatcgtcggtctgttgattgccctttactccgggattaactggatgggcaacctccgcgaggccattcgtgcccagtcgcgtgaggtgtgggagcgtaagcctcaggaccaggagaaaatctgggttaagtatcttcgcgactttgtttcgctgattggcctgctcgtcgcgctgattgtgacgctctccatcacctctgtcgccggttcggcgcagcagatgattatctctgcgctctatctggattacatcgagtggctgaagcccgcgtggcgcggcattggactggctatttccatcttcgccaactatctgctgttcttctggatcttctggcgcttgccccgccatcgtccgcgtaagaaggcgttgatccgcggcacattgattgcggcgataggctttgaagtgatcaaaattgtgatgacttacactctgccatcgctggtgaaatccccttctggcgcggcgtttggctcggtgctggggctgatggcgttcttctacttcttcgcccgcctgaccttgttctgcgcggcgtggattgccaccgccgagtacaaagacgacccgcgtatgccgggtaaaacacaccgataa

SEQ ID NO: 123512 - DNA, 1107 bp, Enterobacter cloacae
atgaaagcgtttcgctggtgtgtgttagcagcgttgatgctggcggcgatccctcttcgcgccgcctgcacctggcctgcctgggagcagtttaaaaaggattacatcagtgagagcgggcgtgtcattgatcccagcgacacgcgcaaaatcaccacgtcggaagggcaaagctatgcgttgttctttgccctggccgcgaacgatcgcaaagcctttgatcaattgctgacgtggacgcgcgacaacctggccgggggcaatctgaacgataatttgcccgcctggctatggggtcagaaagaccacgacaactgggcgataatcgataccaactccgcctcggatgccgatgtctggattgcatggtcactgcttgaggcgggtcggctgtggaaacatccggactatacccgcacgggtaaggcgctccttaaacgcattgcccatgaggaagtggtgaaagtaccgggactcggctccatgctgctgcccgggaaggtcggttttgccgaggagaaagcctggcgctttaaccccagctatcttcctccgcagatagcgagctatttcacgcgctttggtgccccgtggacgacccttcgtgaaaccaatctgcgcttgttgctggaaacggcgccaaaggggttttcgccggactgggtgcagtatcagaaaaacagaggctggcatttgcagcaggataaatcgctggtgggcggctacgacgccatccgcgtctacctctgggtcggaatgatgagtgacaaagacgcccagaaagcccggttgcttacgcgcttccggccgatggcgacaatgaccacgaaacacggtgtaccgccggaaaaagtggatgtggcgagcgggaagcctgcgggcaaggggccggtcggcttttccgctgcgatgctgccttttttacagcagcgtgatgcgcaggcggtacagcgccagcgcgttgcagataattttcccgataataatgcctattacagctacgtactgactctcttcgggcaaggatgggatcagcatcgttttcgcttcaccgctcaaggtgaattaataccggactggggccaggaatgcgcaacttcacagtaa

SEQ ID NO: 123513 - DNA, 195 bp, Enterobacter cloacae
atgaatatcagcgatatcattcaactggtcgtattctgtgcgctgatctttttcccgcttggctactatgcacgccattccatacgccgtatccgcgatacggccagagtgctgtttgtaaaacctcgctatgtaaaaccagccggaacactgacacgggcatcacacgtcaaggcagaccgaaaacatgactaa

SEQ ID NO: 123514 - DNA, 996 bp, Enterobacter cloacae
atgcgaaaacccgcatgcgccgctctggccgtcatgatgagtttactgttctcccccctctctcaggcgggccaggcctgggagagttacaaagcacgcttctttacgccggaagggcggattgtcgataccggcaacggcaatgtttcgcatactgaaggccagggcttcgccatgctgatggcggtggctaacgacgataaagccacgttcgataagctctggaaatggactgacggtacgttaaagaacaaagaaaatggtctgttttactggcgttataaccctgccgagtccaacccgattgctgataaaaataacgccgccgatggcgatgtcctgattgcctgggcgctgttgaaagcggatacgcgctggcatgacaaacagtacagcgccgcatcggatgcgataacgaaagcactcattagccacaccgtgacccgttatgcgggttaccgcgtgatgctgcccggtgtccaggggtttaccctcgacggtgagatcgtgcttaacccctcttatttcgtcttcccggcctggcaggcctttgccagccgcagccattcgccggtctggggcaagttgattcaggatggccatcgcttgctggcaaaaatgggatcgggtaaagccagacttcccacggactgggtctcactgggctctacgggcacgctgtccccggccaaagcctggccgccacggatgagctacgacgcgatccgcattccactttacctggcctggtctgataagaagagcccgctgttaacgccgtggcgagcctggttcggtcagttcccccgcgaacaaactcccgcatgggtaaacgtgacgaccaatgaatatgcgccttacatgatggaaggggggctgctggcggtacgtgatttaacgatgggacagccatccggagaacccgagatcactgcaaaggatgattactactccgcaagcctgaaaatgcttgtatggcttgctgagcagccataa

SEQ ID NO: 123515 - DNA, 375 bp, Enterobacter cloacae
atgcgttcaattgctctggtgctgttgtcgctcattttatcgggttgccaaatcaatccttataccttccacccggactggaccagccccagctggtttgatgcaggtaaagaagacgccatgaatggtctgccggttaaagataaccagacgctggccgataattttaatgatccgcatgttgatcgtagtgaatatctccggggatatgcagacggacagaagaaagtgtgtgaagaaggttttctccacgcctggggattagcgggcaaatcttttcctgccagctgcgatactgctgaaaatgcagcaaaactgcacgagtcatggcaaaaaggcatggatgaaagcatgcgctccagcagacttaattaa

SEQ ID NO: 123516 - DNA, 489 bp, Enterobacter cloacae
atgctgttccttatggtgggcccagcagcggcaggcacgttcaccgaaaccgataaatcggtacgttcgatcgtttcaggtattgtgagctacacccgatggccgtcactttccggccagccaaaactctgtgtttatgcttcttctcactacacgcatgcactcaccagcaaggacgggcaaagcgaattaccttatacccccgttattgtgcgtaacgatcaggaagccctgtccgcgacgtgtgatgctatttatttcggggcggaatcccccgtaaaacaacgtgaattaataagtcagtatcagggcagagcattgctattaatctcagagcaaaatccggaatgtattattggcagcgccttttgcctgataattgatcgcaaccatgtccggttttccgtcaatctggatgcgctgactcgcagtggcgtgagagtcaatccggatgtattaatgctcgcacggaataagcagcatggataa

SEQ ID NO: 123517 - DNA, 192 bp, Enterobacter cloacae
atgagccagaaaatgagtaatccgattcgcatggttgttggagatggcgctatcatgcctaagatggtgaaaacacagtcagcaaacactgaaaaacatggtgcaacaatacccaagatgcagccaaccccagcacagagtacgggtacttcgtctaacgctccaaagtcgtcaggtgacgctaaaaaatag

SEQ ID NO: 123518 - DNA, 654 bp, Enterobacter cloacae
ttgagtaggactgacgaggaaataaagcaagcaactgcgattttcgcggtttacaaagcggagattgataagcgtgagctatcaaataccgacaattatgacaaaaatattctcactttgtcttcagctgggctagctatatcgctgaccttactaaaagatattgtcagtaaggaagggcctacacttgtggcttccctttatctgtcgtggactttttttgggcttgctatcctatcaaccattgctagttttctcattagtaacaaggcattaaccaaacagttgtctatagctgaacgatattatattgatggagatcaaaatgcgttcagtgaaaaaaacagatgggggaatttcacttcgctgttgaactggctttcaggtagtttcttcatattggctatcatttcggtgattgtattcggtttaagtaatttttctaagaggtcgcaagtggacactgataattccaaaaaatgcgttgtaagcaaccttaatgaagggcaggtagtaccgagaatgcaacaacttcctattgataagggggcttcaattcctgctatgccaaaagttccagcacccactccctctccggttaatcctgtagttttaccaaactccccagcagcccccacgacgacgaagccgtga

SEQ ID NO: 123519 - DNA, 276 bp, Enterobacter cloacae
atgcctacctgccaagcaccacaccgctacgacacaatgtttgccgcccttccagaggatcagagctatccattccgtcataaatgtgccggatgtgcatacgaacttggatttcaggcaggggtatcaaaccaagagcctagcgctgctacggctattgactccatcttaaaaagccaagcggctgaagttcgccatagaagcccaagagtagcctattaccaaggttacaccgatggtctgaacgagtattacctgcaaaaccctcgtggataa

SEQ ID NO: 123520 - DNA, 546 bp, Enterobacter cloacae
atgatcacttatgcttctgattttaatgaaatacctagtgctttaggcaacaaccaagaactccaaagaaaaatgttatctcttattgccagtaaaaagattgcgggcaaagcgaccgaaggagcaggcagggtagaagagttcagagcaattttatctcagctcacaaatggtgaattgcgcttagacgaagcaattagagccgttgaaaatcgtattccacgttacacatcaatccattccggggataacagagtctttgctagtggctgggcagaacgtttaaccagaacacagtttagtcggttctacaaccaagcagtattagaaatcgagatagcaaagggacacaacgaatgctttgttcccccatcgtcgcaggagcaagcatcatcacaatgctcacaagttcttgcaggacgttctcatgacgtcagtcatctactcaaattattagttacctcttatgaggatggcaactgggacaaaacgcctaaaattcctgatcatccccattgcacccacgtgattaagccgatgtcttga

SEQ ID NO: 123521 - DNA, 630 bp, Enterobacter cloacae
atgaaaaaatttaatttcgcttccctgcttccgggatttttagcactcaataattctgtatgggcaagtgattcctctactggagcaagtgatttgcccggtatgactcttaatgagcatgatttagtgatagcaccccttaacacagaagtcccattctacattgctgggcatcgcagccatagctcccatcggagtcatagttctcacagatcctcatcaggtggcgggtactatggtggcagcactccttattatcctaaaacatacagttcaccaagctcatctggctcttcaagttcagggacaagttcctcatcgtcatctgttcgttcgcttcgctctaatgacatggatgcctctacgactacaaactctgctggaacgaatggaactacccgtgcaactagcgggctgacttctgatactgaaaagcgtaaacgtttaatcatgcgagtgcagtttgcattactggataaaggtttttataacggtaatattgatggaagtatgggaccagcgacacgagctgctatcaaagattatagagttgcaaatgggcttcctactccagtaagagaaacattagatactcagttattgaattctttaaatatactggcccgttaa

SEQ ID NO: 123522 - DNA, 1113 bp, Enterobacter cloacae
atgtctgaggttatcaggaacgatatctttcattttgcttcaaaagagactgtgcccgcggggttctatcggttatgcaaacaaaaaccagtgaaccctttattctttttgcccaatttgctggtagttgctgaaagcaataatgatgtcattctaccatgctttgattactctgttattagcactgaattatttgagtcaattgaagatggagatattgggataatcaacaatggcaatatgatacgcgttattctgtcccgaagagccaatcataatactgtcttagtaacggaacgttgcaataacttgtgtctgttttgttcgcagccaccaaaaaaatcaaatgatgattggcttcttacccaatcagctcttgctatagcttcatttggtttgaatggagttgttggggtcagcggtggtgaacctttgctgtatggagatgatttccttcacttcattgattttatcatcgagaattcaccagatactgctttgcatgttttaacaaacggacgcaaatttgctgataccaactttactctggaaatggcaaagcgaagcaaaaagatcaaaatcacctttggtatcccgctctactcatcaagaccacttgtgcatgatcatctggtagggagtgatggcgcatttaatgaaacagtcaaggggttaatcaatgcaggaaactcagggattaatatcgaacttagagttattccgacactggctaactatacagaactggatgacatcgtagagttcgtcggccgtgtgttctccaacatcaatcagatttcccttatggggttggaatctatcgggtgggcacgaaaaaactggtcatcaatctttatcgagcatgataactatcgtgagaaaatcctctctgtcatagacactgcgcaaaggtcaggcatccctctaacaatcttcaattacccattgtgccatcttcctgaaaaagccagagggtttgctacccagtcaatttctgactggaaaaattactatcccaaagaatgtgatgaatgtactcagaagtcttcctgtgctggttatttcagttcgtcaaaaggccgttttcatcaacctccgagaccaattctatga

SEQ ID NO: 123523 - DNA, 1389 bp, Enterobacter cloacae
atggaattgatgccattcaattttgacagattgcctaatggacaggtgtttataagcaacctcgctggttttcatcatttcattgatgagcaagagttgcttgatctttctgatgagcaaatcaatgcggaacaatcaaacgcactcgaaagcaagctattcataaccaacgaaagctcatcggctataacgccctatgctttaagttctgcttttgcaaaacgattgatgaatgaactggctatcaggccaattttcatgattgtgcccacactacgttgcgaccatacctgcaagtattgtcaggtcagtagagcttcagtgaatgcctctggttatgatctagatcccgatctcatccctgatatcatttctactatcaaaaaactatcgacaccaccatacaagatagagatacagggtggagagccactcttgcggttcgatttaattcagtctatctatgagcaatgtgctgaaacgctgggaggtatcgattttgagatggtgatagcatcaagcctgtctgtcttgaatgaggatatgcttgaatggtcgagagataggaacataacgttctctacttcgcttgatggtgaggaagttgttcacaacagtaatcgaattcttggtcatgggcttgcgtacagtagaacagtgtcaggagtagaggctattaaacggtctttaggcgctgggcgagttgcaacggttaccacagttactaaagatcttatcaggcatcctgaatcgattgtccatgctcacttgtctcttggcctcaaggacatgtttatccgacctgttagtccctatgggtttgcacaaaaagcatcgttcaccttttctatggatgaatacttcagtttctatgcctcgttgatagatgaaatccttaagatcaataatgaagggataagggttgtggaacattcggcctctattcatctgaaaaggatcttcaatcccggctttagtggttacgcagatttaaagtcgccaagtggggttgtgcttaacagtattcttttcaattatgacggtcgagtatatggtagcgatgagagccgtatgttgcagaaggtgaatcctgaaacggagttcagtgcgggtgaggttaagacgctacaattttctaagagtccttactataacgcagtattaagttcatcgttcaattttgctctaccaggttgtgatacatgtgcatatcaaccattttgcggtgcagatccatgccagaacataagtgtacagggtgagcctgtcggtgataggagtcgttcaacgttttgtcagtatcacaaggggatgttcaggtatctgatgaactgcatctcagaaggtggtccgaaggctgagatgctaaaaggatgggcatatgtctga

SEQ ID NO: 123524 - DNA, 273 bp, Enterobacter cloacae
atgtgcgaaaggatattaaaaaaagatgtttattctgaatgggttatacgcaataccctgtactggatgacttcgcttactcagtggaagttttgtgaagatatatcctcctggaaaatctcttttgaaaacgatagtcccgaatgcctctatgaattcgagaggctgctgaatgattacgctttgcgagaaaaactacagcataaaacaggggcgttgagagattctattgtccataaagtgcttcgcagtgtcgatgaaaggctttcgtaa

SEQ ID NO: 123525 - DNA, 441 bp, Enterobacter cloacae
atgacagcgtcctcaaaccgcatcgcaagccaggctatcgtggctctcacgtttttgctcagcggctgcgtttaccatgattatccctcccctcgtattgagggcacattgaataacgcaggaaaaccgctgccccgggtaaccgtttcgttagtggaattcgaccgacaaatagccacgacacaaacggataataacgggtatttttatttcgtaccgcagggagactggcatgtttttatacccgtcggaccgcaagatcgcctgagtagctggacactgacaacaatcgaccctcagggacaaaaacgcgatatttacacatcccgacgctttggcgggcctttttcaggctattccaggagcgacaacgtgaaactgttatgcgaactctctccaacaagcggggagagtcaaaatatattttgcgaagctcagtga

SEQ ID NO: 123526 - DNA, 357 bp, Enterobacter cloacae
atgaaaaaaacaattatcgcattatctgccgttctgctggcttccccagtatttgctgcgaccacacatgcaactgacgataccgtcgctgcggcgaaggcaaacgccaacgacgcgaagcaaaaactgcacgaagagcagaataaaggcgaagagctgaagctgaaacagaagcatgctgcagagggtaaaaccgaaaacttaggcagcaaggtcagcgaagattcccagaaagcctggcataaaaccaaagaaggcaccgagaaagggtgggatgccaccaaagaaggtgctgagaaaggctggaataaaaccaaagaaggtgccagcgaactggaaaagaaagtcactgagtaa

SEQ ID NO: 123527 - DNA, 345 bp, Enterobacter cloacae
atgaacagcgaacacaccgcacctgaaacccagggcgttaccgttgaattactctccgtcatcgatctggggccggaaatagcgggcatggccggtcgccagcttcgcatgcgcagggtcactctcgctcccggcgcggtctttggtccggtgcataatcatatcgacagaccgggcaccgtgtttatccttgaaggaaccatcaccgatcatcgtcacggtattacgactgattacggtcccggtgtcggctggccggaagatcacaacacggtccattggctggaaaaccggggtccggtaaccgccgtcgagatctcggtggatattattaagacgtcctga

SEQ ID NO: 123528 - DNA, 558 bp, Enterobacter cloacae
atgttgcgacgcctggttattctgttcgtgttgctctgtccgctggcgcaggccgccccgcagagctataccattgatactgaaaacaccgccatacggttatcctggcacgccttcggggggatcctctcctgggccagattcagtggcgtcacgggttccgtaacgcttaacccggataaggatatcgatgaccatattcatgtcacccttcccgtggccaccctggttgcctcaaacagcctgctcacctggcaactgaaaagcgacatgttttttgaatctgaacgttatcctgttatcgaatttatcagctcacgcgtggtcgctcagggttcaggaacgttcagggtgttcggaacattgaccgtacgcgacattgcccgcccggtcattctggacgccgtcgtgaaagatccgcacgcgccggtccttacgctggatgcgacaacaaccatttcgcgcgcggcctacggcatggataaatttgcgctggtcgttgatgacaggattgccattgccattgcgattcaggctaacggtatcccgtcatcctga

SEQ ID NO: 123529 - DNA, 789 bp, Enterobacter cloacae
ttgaacgcgcaccgttttacagcgccctataacgatgaggctatcgtggcatggatagatggcgagatgtgtcatgccgacgcgcaaaaatttgaagaagagttgagacgtgacgagcgcctctccgggcggaccgccgagttaatgaaaagcaatgcggattaccccggcgcgtttgccgctatgctggatgatgctcctctggagaagatgcaggcccggctggcggaactgcccgatccgaagcccgctaccccggctggcgtaagccggcgcgcactcattgccgcatcggtcagtttcctggtggtcggttccggcgtgggatatgggttgcgacccgctttcgcaccttctgatgaaaacgcccatattcgtgacctcgaagcgcaatacatgtcgctttacagcgtcgagacattgctggatatggacagcgcgccgcatgttctgcagcgtgggctggaacgggcagcgcaggatatcggcctgcaacttcaggcgtcacagcttatcctgcatggagcagagcttaaaatggtccgcatgctgcgctatgaaaccacctctatcgcgcaaatagcctggataaatgccgactacggcccaatggcgctgtgtatctccccggcagagcagacaacgacagccgctcaacaggaacagcggcacgacatgaacctggtgtggtggcagaaagcgggatatcagtttgtgctgatcggccgcaacccgttcccacagttgcggggcagtgcagagcagctgcaaagcctgatttcaggatga

SEQ ID NO: 123530 - DNA, 531 bp, Enterobacter cloacae
gtggagggaaaacacatcgctacccgtgaggttcgccaacagttagccgcacacctctcacgtctctggcgttatgggctggtgttgtcgcgaaacagggatgtcgccgaagagctggttcagtccacctgcgtccgcgcgcttgaaaaaagcagtcagtacatgcccggtacgcgtatcgacaggtggctgtttgcgatattgcactccatctggatctctgagcttcgggcacgccatgttcgtcaggggcaggggtttgtcgccagcgacgagcttctggcgccggatacccgtgaacaggatgagacgcacctgcattacctgaaggtgatgcagcgcgtcaacgcgctcccggaagcccagcgcaacacggtttttttggtgtacgtcgaaggctttacctatcaggaagccgcgaacaccctggcggtgccgatcggtaccgtaatgagccgactggcgacggcacgggcaacgctggcagcgtctgccgatgccttgcccccggttaaggagaaacgctcttga

SEQ ID NO: 123531 - DNA, 528 bp, Enterobacter cloacae
atgaacaccacctctgtgcgtttgatcccggtgctgattttttccctgttgtctcctctcgcgctggcgatgggcgataatagtaccgagagtaaaacacccgactgtccgtccggacaggtgtatgacagtgcaactcagaaatgtgtgcccgataagagcagcagccttagcgatcaggacaaaaccaactatgcctatcaccttgctaaaaaaggtgagtaccaggcggcgctgaaccttcttgattcgctaaaaaataacaacacggctgaagcatggaactatcgcgggtatgccacccgcaaactgggtcgtacggatgaaggtatcggttactaccagcgtgcgctggctatcgccccggattatgccaaagcccgtgaatacctgggcgaggcgtggatggtcaaaggacggctggatctggccaaagagcaactgaaagtgattgccagtatttgcggccagtcctgtgaagagtaccgtgacctgcaggctgccattaacggacatccggaatcctga

SEQ ID NO: 123532 - DNA, 11175 bp, Enterobacter cloacae
atgagccaaatctctgttatatcgaaactcactggcgtggaaactaccacggaaggcacacaggttacgctgagccattcctctatcgttgagcttcatgtagagcgagccgatgtctcccacttcgcccgcagtggtaacgatctggtggtcacgctgcactctggcgaggtcattaccctgaagaatttctacgtcaccgacgcggagggggtgagtcagctggtcctggaagagagtgacggtgcgctgtggtggattgaagatcctaccggggctgctacctacgaatctatcgcctccacggacgtattactggcggcctcaggcggtgataccggtggcgcagccatctggccatgggtactcggtggtcttgctgtcgcaggcgggatcgctgtcgcggcaagcagcggcggcggagggggtggcgacgatgatgatgacaatacgaaccccggcacgccgggcaatccttccgatccggataccacaccgccaaatgcgccttccaaccttcaattctcctcagatggtaaaactgtcacaggtactgccgaacccggcagtacgattacgctgaaagacgcggacggcaacctggtcggcacgggtaaaaccggtagcgacggcaaattcaccattgttctgagcacgccgctgacgaatggcgagcaacttaccgccacagcaaccgactcatcaggcaataccagccaggccgggcatgttacagcaccggataccaccgcacccgatgcgcccgatatcgtaattgtgaatgacgacgttggcggagaaaccggaccgctgactaacggtcagcgtaccgatgatgcccgccccaccttcagcggcatcggcgaagcaggcagtaccatcaccctgtacgataatggtcagccgattggcacgaccaaggttgatgccagcggaaactggacctttaccccgggtacaaatctcgctaacggaagccattccattaccaccaccgcgaccgacgcggcaggtaacaccagcccagcctccggcgccgtgacctttgtggtggataccgtcgcccccacagcgccagccatcacgctcgtgtcagacgataccaatccggtcaccggcccggtcagtaacggtggtagcaccaacgatcagcgaccacagcttaccggcaccgcggaagccggatctacggtcaccatttatgatggcgggatcgcgattggcaccgctgtcgtggccagcaacggcacctggacgtttaccccttcgatcaatctcagcgaaagcacgcatcaactcaccgtccgggcaaccgacgccgccggtaacaccgggccggcttccccggtgttcaccgttaccatcgatctcaccgcaccaactgcgccaaccgccatcgtgctgaacgatgaaacgggtgccatcaaaggcgcaattacctctggcctgttcactgatgccgctaaacctgttcttgcagggagaggagagcccggtgggacaattacgatttttgataacggcgtgcccattgcgaccgttaaagttcagcccaacggcacctggagcatcacaccggacaaaccgctgtcggagggggctcactcaataacggtgcaggtcaccgacgctgccgggaaccagagtgggttgtcgcagccaatcaacttcattgtcgataccacgccgccggaaacgcccgacatcacgcttaatccggcaggcacgcagattaccggcactgccgagccaaacagcagcattgtcatcaccagcagcgacggcaccataattggccggacgacaacggacggcaacggcaacttcgttgccacgttaacgccggcgcaaactaacggccagcagatctccgtggtggcgtctgatgctgcaggtaaccagagcacacctgcgaccgtcacggctacggacacaacccctcctgtcgcccccggaaaccttcaggtggcagataacggccagagcgtcagcggcacggcggagccaggcagcaccgtcaccattaaagatcctaacggcgcggtcatcggtgaaaccaccgccaacagcgatggcacctttacggcggttattagtcctgcacagaccaacggtgaagtgctgacggtcgtggcaaccgacggcagcggtaacgccagcctgcccgctacagccgatgcaccagataccacggcgccactggctccggataacgttgttgtctcagatgacggtaccaaagtgacaggtaccgcagagccgggcagcaccgtgaccatccgtgaaaatggcgtcacggttggcgaggcgaaagccaatgacgacggcagcttcaccgtcacgctgaccccaccaaaagccaacggtgaaaccctgaccgcagatgccaccgatcccgccggcaataccgggccaacaacgcctgccattgcgccggatattaccgccgcgcaaacgccggttatcgtttcagtggacgacgatgcctctgccactacgggccctgtcgcccagaacgggctcactaatgaccggacgccaaccataaacggaacgggcgagcctggcacaaccatcacgctctccagcggcggcacggtcatcggcacggtactcgttccggcatctggcgtatggagcatcacgccatcctcaccgcttgctgatggcggccacgtgctgacggcaacggcagttgacgccgccggtaacccaagcgggccatcaaatgcctggagtatcactgtcgacggtactgcacccgaagtaccggtaatttcgcaagtggtggacgatgttcagggaagcacaggtgcgctcaccgcaggtgccattacgaacgatccaaccccgacactcaacggcactgcagaaccgggctcaacggtcaccattcgtctggacggtgttgatatcggcaccgcgctggtcggtagcggcggcgcgtggacatttacgccaggcacaccgattggtaacggtgagcataccctgaccgccgtcaccaccgacgcggcaggtaacatcagcctgccgtcaggcggcttcacctttacggtcgatatcaccccgcctccggcggcgaccatcacaaccgtaaccgatgacgtcggtgacgttcagggcccgctcaccagcggcgacaccacggatgacacgcaaccgttgctgcagggcagcgcgccggcgggtacggttattacgctttatgatggcaataccctgctcggtaccgccacactcgacggtaccggcggctggagcttcacccctaccaccccgctcaccaacggctcgcactctctgacggttcatgcgaccgataccgccgggaatacgaccgtctccagcccgtttgtgctggtggtcgataccgtggcacccgccacgccggagacgccagagatcaccgtgaaccctgacggcggcacaacagaaaccccgctgaacccgggagagaccacccgcgataccacgccgacgctgagcggcaccggcaatccgggcgataccgtgactatctacaacggcaccgacaaaattggtgacgccgaggtggacagcaacggtaactggacatggacaccggataccccactggccaacggtacctacgacatcaccctgaccgtcaccaacaaggacggcgcgggcaacgaaagcgccccgtcccagccggtgaccatcaccattgacaccgacccgccagctacgccagcagcaccggtgattacggacagcgtcagccagataaccggaccggttgccgacggggaaaccacgaacgatccgcgtccggtcctgagcggcaccggcacagcgaacgatgtggttattatttatgacagcattaatggtcagcctgccaccgaagtgggtcgcgtcaccgtagacagtaacggcaactggagctggcgccctgacgccagcattgatgagggaagccacgaatttaccgccaccgccaccgacgaagccggtaacgtttcggcggcgtcaccggggatcactatcaccgttgataccgtggcacctgatacgcctgtcattagcgccgttggcggtaagccagacggtggtgttaccacggatactacccccggtgtgggcggtactggccctgcgggcgaaacggtcatcgtttataacaatggcgttgaactaggacgcgtcgaaatcggcagcaatggcgagtggtctctcgatcttccgacccagactgatggcccactcaacatcaccgttgcggcagtcgatgctgcgggtaacgtcagcagcctcagcccggtcttcaccgtcaccgttgataccactgcgccagaaatcccgctgattaacgcggtgtctgacagccagctcacaagcaatgtgctttatacccgtgacggcacgccgaccctcacgggcaccggcgaaccgggtaccaccgttatcgtctccgtagacggtacagcatccacggtgccggtaacggtacagccggacggcaactggagctggaccgccgacagcacgctggcggaaggcccgcataccttcaccgtctccgcggtcgatccggccggcaatacgtccggtagctctgcaccgcttagcgttaacgtcgatactctggatccggctgctcccgcggttactggcatagccgctcaaggtactccattgaccggcaccgccgaagcgggggctaccatcactgtaaccgataacaatggtaatgttctcggtacaggcgtagccaccggtggcaccttctccatcgcactcagcccagcccaaacggatggcgctgtgctgacggtgaccgcgaccgatgccgcgggcaacctcagtcctgaggcatcctacaccgtcaccggtacgctgccgaatcttccggatgtgcccatcattacggcgattaacgatgatgaaacgcctgtcaccggcgacgtgaaagacaaaaccaccaacgacattaccccgacactcgtgggtacggccgaagcgggcagcattatcaccatctaccaggacggcatcgcggttccgctgatcaacgtgattgctgatgcggacggtaactggagctataccccactgattgcgctgggtgaagggctgcacacctttgaagtgaccgcgacggtcgggctctcgaccagcggccgctcgccggttgcaaccgtcaccgttgacctcactgcaccggacacgccgaccattggctcagtgattgatgatgtcggccctggcactggtcaactcaccaacgggcagaccaccaacgacaaccagcctacccttaccggctccggcacagtgggcgataccatctccgtttacagcaacggaaccctgctgggtaccgcactggtcggcaatacggggacctgggtcttcacaccgcccgcgctggcggagggcaataacgttctgaccatccgcgagaccgatcccgcgggcaatgaaagtggtctgtcgacaggcttcaccatcgtcgttgatacggtttccaccacgccagcgatcaccaacgtaacggataatgtgggcaatgctgccaccacgattgtgagcggcgatccgactaatgacgccacgccaaccctttcggggacggcggaagcgaacagcgtggtgaaaattttcgacggcggtacccagatcgccgtggtcacggctgacggcaccggtgcctggacgttcacccctgacaccgcgctcggcgaagggcctcacgccttcaccgttaccgccaccgacccacagggcaacgtcagccaggtatctaacggctggaacgtcgtggttgacctgacggcgccaacggttccaacgctggatacagttaacgacaatgcccctggcggcgtgaccggcaacctcaccagcgggcaagtcaccaacgacaccaccccgacgatcggcggcaccggacaaccgggcagtacaatccatatcatgaataacggtacgcaaattggccttgcgaccgtcgacggaagtggtaactggacctttaccccgagcacgccgctgggcgacggcaactatctccttcgcgcctacgccaccgatgcgacaggcaatgcgtcagcaaactcgtcggtctttgcctttaccgtggatgcagcaggccctgctgcgccactggtcagcagtgtgattgacgacgtcggcccggtcaccggtacgctcactaccggcaacagcaccaacgacgcgcgtccgaccttcaacggtacgggcgaagtgggtgccacagtgcatatcattgtggatggcaacgagattggcaccgcggtggttaatgcccaggggaactggacctacacgcctgacaccgccctgagtgacgggcctcatgccatcaccttcaatgccaccgatacggctggcaacaccggcagcacgacggcaccgtttaacctgacagtggatacggcaccaccggcggcaccggccatcacgaccgcgggagacaacgcaggcagcgtacagacgccgctgacttccgggcaaagtaccgacgacaccacgccaacgttgacgggcaccgcggcagccaacgccacggtgaccatctatgagaacggacagccggtcggcaccgcgctggcggatggcaccggagcatggagctttacgccgtcatcagcgctgagcaatggcagtcatacctggaccgcgaccgcgaccgacgcggcggggaacgtcagcccggcttcgcctggctttacgctggttgttgataccagcgcacccaatgcgccggttatcagccaggccgttgacgatgtgggcagcatcaccggcccgctcagttcaggacagacaaccgacgacaccgtgccacggcttgtcgggaccagtgagccgtttgcgactgtgaatatctacgaaggcacaacgcttgtcggaacgggcaccgcggatgccagcggcaactggagtatcttgctcacgaccaccttagccacgggcgcgcacagcttcaccgcgcaggccacggatgcagcgggtaataccagcgtttcgtcagcggcctttagcctgactatcgacacgacgccgccagccctgccggtactgagcagcattgtggatgatgtgggcaatgcggctacgccgattgccaatggcggattgactaacgacgcgcagcctaccctcacgggtacggcggaagcgggcgccacggtgaaaattttcgataacggcgtccagatcggtagcgcggtcgcgaccggcggggcatggagctttaccccttctccggcgctgagcaacgggtcacacagcctgacctttaccgccaccgatgccgcgggcaataccagcgccccgaccaccgcctatgtgatcaacgtggatgccgccgcgccaactacgccgatcatcagtgcggttgtcgatgatgtcggcagcatcaccggaccggtaaccggcaataacccgaccaatgacgcgcgcccatcgctgaacgggaccgccgaagccaacgcgacggtgcgcatctatgacggcacgacgcttgtcggcacggtcaccgccgatgcgaacggcaactggacgctaccgcaaaccaccaccacactgacggaaggcacgcataacttcaccgccaccgccaccgatgccgcgggcaacaccagtacgccatcggccaccaccaccattaccgtggatctgactgcaccgaacgtgccggcaagccttgccgtgatcaccaacggtacgcacgtcaccgggaccgccgaagcgggtagcaccgttaccatcaccaccagtaccggaacagtgctcggtaccgcgacggctgacggcagcggaaactttaacgcgacaatcacgccggcccaaaccaacggtgaatcactgctggtctatgccaccgataaggcgggtaacgccggtgtcagcacgtcggtgattgcccctgcgacgccggtgccgaacgcaccgcttatcaccaccatcaacgataacgtcggcaccgtcaccggtaacctgaccaacggtaaaaccactgacgacaccacgccaaccctgagtggtacggccctgccaggcaccaccgtcacgctgtataacaacggcgtgtcgatgggaacggcagtggcagatagttcaggcaactggaccttcaccaccccggcgttaagcgaaggctctcacgcctttaccgccacggcgacgaacagttcgggcaccagcccggtctcttccgccaccagcgtgattgtcgatctgacggcgccaacggccccaaccggaacctttaacgctgacggtagcgtattgaccggtaacgcggaggcaggcagcaccgtctctatccgtcttggcgatggcagcacggtgaccacaatcgcgggcagcaacggcacctacagctataccttcctcaataaacagacggaaggtcagacgctgcagatcaccgccaccgatgccgcaggtaatacgtcgcagccaggctcagccctcgcaccggtcgtcccgctctccgccagcaataacgtcgaagagctggatatcagcaccacggccaccgtcaccaacagccagtacagtgattatggcttcctgctggtgggtgccgtaggcaacgttctcacgttgttgggtaatgatactgcccaggtggacttcacggtgggcagcggcggcaatgcggatattgtggtgaacgccaatgccacgggtgcggtgctctccctgctcaatacccttgagctggtggtacagcgctgggacagcgtcaacggtacctggactaccgtcgtggataccggacaaccccagtttgccgatctgctgaccctcggggccaccggcgtatcgctgaacctgaccgggctggcgaacggcgactaccgggtgctgagctataacactaacctgctggcgaccggctcctacaccagcctcgatgttgcggtgaaagaaaccagcgccggtaccgtgacgggcgacaccagcctgaacggtaacgtaattctcgacgccgacccgaccgcgggcagcgacaacgccccggcaggcactactgtctctgctgtcaccaacgcactgggtgtcaccaccagcgtgaacgccgacggcacggttgttcagggccagtacggtacgctgaccattaatcgcgatggcagctacacctacaacctgaccgacaccagcgcctcggttgtgggccggacagagagtttcacctacaccatcacccataacggcgtcagcgcgtcggcgaacctggtactgtcgctgggtgccggtactaccgctaacggtattgtggcggtagatgacacggcctcgctgacctttgacacctcggtccatgaaatcaataacggcacctcgtcgcagggcggctttaccgtggtggggatcaatctcggcaacacgctggggctgaacctgctggacgatctgagcaatccgatcatctacaacgtggaggaaggtaccacccgcaccatgaccattcaggcttccgtgggcggtgtggcgctggcgtcggtattcgacctgtatgtctacaagttcaataacgcgacgcagaccttcgagcagatgcgcgtcgaaccgggctggctgcgtgcgccgttgctgggcggtacctcgtctcagctgacgctgaacctgcctgccggggagtacctcttcctgctgaatacggctgcagggatcaccgccctgaccgcctacacgctgaacgtgctggaagatcatgtctacagcgtgtcgagcgtgggcgagaccaccaccggagatgtgctggataacgatgtcgcaaccggcgcggtggtatcagaagtgaacggcgtggcggtgaacagcagcggcctgaccgacatccagggggaatacggcacgctgagcatcaatgcgtccggacagtacacctacaccctgaaaaccggtgtgggtgctgacgcgatcagtacgccggatacgttcgtctataccattaccgcgccaaacggggcgaaggatacggcatcgctcaacatcaccccaaccgcgcgagcgatggatgcggtcaacgatgtcagtaccgcgatggacgtcacctcagtgcatcacacgacgacctactcggataccaccgtcgggacggccagctggacaactgcgctgctgtcatcaacccagggcagcgggagcggaaccttcgtggtggatccgaacaccgcgctgcataacgtgtcgctgcactttaacgtggcatcgctgctggcattgggcggcctgacggtgaactggtcaatcagtgacggttcgaatgttgttcgcagcggctccttcagcggcggttcgctgttgggtggcaatatcgacatcgcgctctccgggctggacctgaatgccggaacctatacgctgagctataccggcagcgtaccggggctcagcgtggggaacattaccattaccccaagcgtgaacggcaccacctactcgctgacccagttcgactctaccagcggccacaccgttgacggcaacatcttcgatggcaccgactctgccggggcgatggatcagttgcattcggtggatacccgcctcagcgtgaccggctacaacggcgtgaccaccacgctggatccgtacaccggcagcgcaacggtcaacgtcgtcggccattacggcacgctggcaattggcgcggacggccactacacctacaccctcaacaccggggtgtcgctctcaaccatcacctcgaaggagaccttcaactacaccctgaccgatgccgacgggaaaacagacagtgccacgctgaccatcaatatggcgccgcagttcatcagctcggaacataacgacgtcattaccggcaccgcctacggcgacaccctgatttaccaggtgctgaacgccaccgcaggcaacgccaccgcgggcaacgtcagcagcactgccggcgatcactggaccaacttctcgctcacgcagggggacaaaatcgatatcggcgatctgctggtgggctggaacgggagcagctcaacgctcggtaattatctgcatgttactaatagtaatggcaataccgtgatctccatcgaccgtgatggttcagggagcacctacactaatacgacgctcgtgacgctggataacgtccagaccacctacgacgagttagtgaaccagcaacacatcgttacctga

SEQ ID NO: 123533 - DNA, 426 bp, Enterobacter cloacae
atgcgtcaacgaactattgtctgccccatcattcagaacgacggggcgtatctgctgtgcaaaatggccgatgaccgcggcgtatttcccggccagtgggcgttatcgggcggcgggatggagccgggagaaaccatggagcaggcgctgcgccgtgaaattcgcgaagagctgggcgacgcgctggagatcacggaggtcaaaccctgggcgtttcgcgacgacattcgggtgaaaacctatgccgatggcaccacggaagagatttatatgatttacctgattttcgactgcatcagcgcaaatcggcaggtaacgtttaacgacgagtttcaggaggttgcctgggtccgcccggaagcaattaaagcactggatctgaacgaagccacgcgcattaccttcgcacagaaggggcttctttaa

SEQ ID NO: 123534 - DNA, 759 bp, Enterobacter cloacae
atgaataacgattttcggccaaataacgtggtcagcttcgagacacttttgcatccaggtggataccatacgccgtggcacagccatcgggccggtcagctctggcggattacgacgggtctgctggttgtcgaaacagcgtctgggcgttcggttgtaccggcgcaacatatcggctggatcccgcctggtcaggagcatgctgccttttccggaagtgcgattgacggtcgtgcgatctatctggatcccgcagggtgtgacgcgctgcccggtgaaacgacgcttttcgaacccgacgagctcaccagcgcgctgttttcacgcttaaacgctgaaggaagcgggtacgatccgcgaaagctcaccctgctgctggatgaactggcgcggggccgtcaggtgcgctatctgctgcccatgccagccgatccccgattaaagaaggtagccagccatctgatgcaacgtgtggacgacaaccagacggttgagcactatgcctcccttgcgggaatgagcgtgcggacattccaccgtcggtttagcgcggaaacgggaatgaacgttgttaactggcggcaacttgcccgcgtcatgcgggcaatggagtggctggcagcaggtaaaccggttggctggatcgcgctgtcgtgcggctacaacagtatcagcgcgtttattgaggttttcagggcctttaccggcaaaacgcccgggcagtgggcgcttaaagaagccccttctgtgcgaaggtaa

SEQ ID NO: 123535 - DNA, 420 bp, Enterobacter cloacae
atgaacatcatcacccgcctgattacccagtctgacaatgctagtttgcgtgaggaaatgtcccgtttactgaccggcctgtttaaaggcgaaattgatccgaaagacgttttttcgccagcgtatcagcagatcacggacggtcattctcttgattattctggatttattcagcacctggagcacgtgcgttcgcagatccgcgatatcgccttccgcgtggaacagatagggtgtcatgacacactgctggctgaccggcatatcgtgaccgtcacgtatcccgaaggccatcaggctgaaatagaggtttatatgtttgccacgctatgtgcaggaaaaatctgccggatccacgaagtcacgcgagtagccaacggtgaagcttctgctcgcgcgctggcccatgcaacgggctaa

SEQ ID NO: 123536 - DNA, 573 bp, Enterobacter cloacae
atgcgcattacttgtgcagtgcggccagcgccgcaagcgttcatggtgaatcccatgtttgaatttctgatcggtatcctcacgcacacccccgtctgggtgtgggttctgtttatttttctcatctcccgcggcctcaacgcccgtaagcctgccaccgttacgctggaaaggctggccatcattcctgccatctttcttatctgggatatctacgatctggtggtctatcgcgatcttactctcgcgacggtggccctttgggttgcggggattgtggcgggcgcggcgctggggtatgtgctgattaagcagacggtcatcacccgcaccgacgcgccgcgcaccctttatcgccagcctgactacacggcactgccgtttatgatgctggcatttggggtgaaatacgtgctgggggtgatgaacgccctctctccccagaccttgcaacagcccgccatgagcgcgctggcgatagtctccggcggggtatttgccggggtctttatcgggaagtttacgcgctatgtaggggtatatctcagcagcgcaccgcaaccggctgagtaa

SEQ ID NO: 123537 - DNA, 921 bp, Enterobacter cloacae
atgcccgcgcaggatcgccagaccctccccataccctcgctgcgaaatattcagtcctttatcgccgtggccaactctctcagtatccatctggcagccgaacagcttaacgtcaccgcgtcagccgtcagtcatcagatcgcctcgctggaatcctggatggggaagaagttatttatccgcagcggcaaaggcgtgaccctgaccccgacgggggaaaaatatctgcgcgacgtctccgcagcgatgagcgccatcggccgtgcaaccgaacaggtgatgaaagaggctgataatccggtattgcgcgttcactcttcaccaacgtttggcctgacgtggttgttgcgccggctcggcaaatttcgcagtgaatacccggatattacggtcaatctttcctgctcctatgagaacctgcagtttgcacgcgataacatcgatattgatattcgccacggcatcccggactgggacgcttacagggtcatgaccattaaaaacgatgcgctggtggtgctggcctcaccggcatatctgcgtgcacatcccgtcaacacgccgcaggacctgctttcacaggcgcttatctcgtcgaccagcactctcgtcaactgggaaaaatggtttgcctggcacaatatcgaccgcccctggctcaacttcagcctgagttttgatcgttcttacatgagctttgaagccgcgcgcatggggctgggatttattctggaaagcaagatgatggccaccgatcacctgaacgatggctccctggtgcaggtgctaccagatgaaacggggatcgccattaatgcgcatcatctggtgatgccgcacatgaacgaacgcacctggaagatccagcagtttgttgaatggattgatcgcgagctgcgtctgtcggggtatcacctgtag

SEQ ID NO: 123538 - DNA, 930 bp, Enterobacter cloacae
atgaattccatctttactgaagagaacctgctggccttcaccacggcggcacgctttggcagcttcagcaaagccgccaccgagcttggcgtaaccacctctgccatcagttacaccatcaagcgaatggagaccgggctggatgtggtgctgtttgtacgcaatacgcgcagcattgagctgaccgagtcggggttttacttttaccgtaaagcgaccgacctgctgaatgattttcatgccatcaagcgcgggatagacaccatttcgcagggcattgaggcgcgggtccgcatctgcatcaaccagcttttgtacaccccacgccatacggcgcggctgctgcaggtgctgaaaaaacagtttcctacctgccagatcaccgtcacgaccgaggtctacaacggcgtctgggactccattatcaacaaccaggccaatatcgcgattggcgcaccggacacgctgctcgacggcggcggcattgattacaccgagatcggtgccatccgttgggtattcgccatcgcgccggaacacccgctggccttcgtgccggagccgatagccgaaagccagctgcgtctgtaccccaacatcatggtggaagacacggcgcacaccataaacaagaaggtcggctggctgctgcacggccaggaggcgattctggtgcccgacttcaacaccaaatgccagtgtcagatccttggggacgggattggttttttaccggagtatatggcccgcgaggcggtggaggacgggctgctggtcacgcggcgaatcaataatccgcgtcaggattcacgcatgctgcttgccacgcagcatgcggcgaccggccaggtcacgcgctggatcaaacagcagtttggtccacagggcgtgctgaccgggatatacagcgatctattgtggcgcgcttag

SEQ ID NO: 123539 - DNA, 300 bp, Enterobacter cloacae
atgactgaactcgaacaactccaggccagcgccggacaggccgcagccctgttaaaagcgatgagcaatccgcgtcggttgctgatcctctgcatgttgtgcggtacaccgggtaccagcgcgggcgatctggcgcgggcgacggggcttagcccatccgccacgtcacaacatctggcgcgtatgcgtgaagaggggcttatcgacagcacccgtgaagcgcagcgcattctgtatttcattaaaaacgatgcggtgcatcagctgatcagcaccctgaaaagcctctattgcccgtaa

SEQ ID NO: 123540 - DNA, 522 bp, Enterobacter cloacae
atgtcactaccgctcatttcaccccagcaggccaatgcgctcgttgctgaaggtgcaaaactgatcgatattcgcgatcccgacgaatatgcccgcgagcatattcccgccgcccggtccgtgccgctggacaccttacccggcgggcttgagacgcacgggggcgaaacggtgatttttcactgccagtctggcgcccggacatcctcgaacgcagcccgccttgctcaggctgccgcgcctgctcaggcgtttatcgttgaaggcggaattcaggggtggaagcaggctgggttgatcacgcaggaagacacgtcacagccgctgccgttgatgcgccaggtacaaattgccgccgggctgctcaccctgtgcggggtcgtgctgggctttacgctctccagcggctttttcctgctgagcggctttgtgggtgccgggctgctgtttgccgggctgaccgggttttgcggaatggcgagactgctgaaagtgatgccctggaaccggcgtacctcgtaa

SEQ ID NO: 123541 - DNA, 180 bp, Enterobacter cloacae
atgttttctgtcggtgattatgtgcaaccgcgtaaaggcggcccaaaactgaaagtactcgaagtgaacggcgatagcgttgtggcggttcaggccagcaatgagcaaggcgagaaatttaccctgaaggccgcagacctggccctgtataccgaagagggtgatttcggcgtctgctaa

SEQ ID NO: 123542 - DNA, 405 bp, Enterobacter cloacae
atgtctttgacgttacagaatcttaataatatccgaactctgcgtgcgatggcgcgtgaattatccctggacgttcttgaagaaatgctggaaaaagtcagggtcgttgctgaagagaaacggagtgagctggcggaattagagcaacaacgcgctgagcagcaggaaaaaattaatgccctgctggaactgatgaaagctgatggtatttcaccgtccgatctcctcggttcagatatggcgcaggtcggtaagccagcgaaaaaacgtaaaccgcgtgaagcgaaatatcgctttattgatctcaacggtgaagagaaaacatggaccggtcaggggcgtacgccaaagcctattgccaatgcactggcaaatggtaaatcactggatgattttctgatttaa

SEQ ID NO: 123543 - DNA, 2223 bp, Enterobacter cloacae
atgggtgataacggcgtacagttgcgggtgcgcggcaaggtgcagggggtagggtttcgtcccttcgtctggcagctggcgcatcagctacagctgacgggtgacgtttgtaatgacggagagggcgtgctggtgcgtctcgcgggtaatgggggggcctttaccgcgaggctgcatcaggactgcccaccgctggcacgtatcgatgctgtcgacagccagccgttcacctgggcaacggtgccgcaggcgttcaccattcgccatagcgcgggcggagcgatggacacccagattgtgccggatgccgctacctgcccggcgtgcctggctgaaatgcgcgatccccgagcgcggcgttatcgctatccgtttatcaactgtacccattgcggtccacgttttaccatcatccgcgccatgccctatgaccgcccggccacgtcaatggcggcatttcccctctgtgagccgtgtgaaaccgagtaccgcaatcccgctgaccgccgttttcacgcgcagccggtagcctgtccggattgtggacccgagctggaatggcgcgcgggcgagaccgttgccacccgcgagtctgcgctgagtgcggcggtccacatgctcaaacatggcgggattgtcgccatcaaagggctgggcggttttcaccttgcctgtgacgcgtccaacgcgcaggcggtggcaaccctgcgggcgcgcaaacagcgcccgatgaagccactggcggtcatgatcccgcaggcggagggagtgccggaatcagtgcaaacgctgctgcgctcgcctgcagcgcccatcgtgctcacgccaaaagcatggtgtcctccgcttcctgacgcgatcgcgccagggctggacaccgttggactgatgctgcccgctaacccgctacagcatgtgctgatgatggactgtcagcgcgcgctggtgatgacctccggcaacctcagcgggcgtccgccggccatcacctgccagcaggcactggatgaattgggcgacatcgctgacggattcctgctgcacaaccgcgacatcctgcagcgtatggatgattccgtgatggatcaggacggtatgatgctgcgtcgcgcgcgcggttttgtgccggatgccatcacgctgcccgccggtttcagcgctgtcccggcgatggtgtgcaccggtgctgatatgaaaaataccttctgtctggtgcgcggtaaccaggcggtactgagtcagcactttggcgatctgagtgacgacggtgtcgaggcccagtggcgttcggcgctgtcgatgatgcagcagatctatgcgtttcagccgcagcgcgtggtatgcgacgcccatccgggctatcacgcccgacagtgggcgcaagcccaggctttgccgatcgacaccgtgcttcaccaccacgctcatgctgcggcatgcatggcagaaaacggctggccgcttgagggcggagatgtcattgccctgacgctggatgggatcggcatgggcgaaaacggcgcgctgtggggcggagagtgcctgcgggtaaactatctcgactgcgaacgtctgggcggtctgcctgcggttgcgctgccgggcggggacagggctgccatgcagccgtggcgcaatttactcgcccactgcctggcgtttgtgccgggctggcagcagtacccggaaacgcgtgacgttcagcggcaaaactggccgctgctggctacggccattcagcgcggtttaaacgcgccgctggcctcatcctgcggccgtctgttcgacgcggtggcctgcgcgctcggcatcacgtcagaaacccagagctatgaaggtgaggccgcctgccggcttgaagcgctggccgcgcagtgccacgacgttcaacatccggttacgcttcaggccgaaaaccttacgcgcttctggcaacagtggctgaactggcaggcggaaccctgcgagcgggcatgggcgtttcacgatgcgctggcgaaagggctggcggagcttgtcactttccatgcccgacgactggggctttccaccgtatgcttcagcggcggcgtgttacataaccgtctgctgcgcgcgcgactgcgccattacctctcagacttcacgctgctttttcctcatcatctgccgtcaggtgacggcgctatctccttcgggcaggcggtggttgctgccgcccggtcatgttcacaaaggatgtaa

SEQ ID NO: 123544 - DNA, 1209 bp, Enterobacter cloacae
atgtcgtatcgcagcaaagtcgccgttgtctatctgctgggcttttttcttgatttaattaatatgtttatcgccagcgtcgctttcccggcaatggctcaggtgttcaacgccacgccctcatcgcttgcctgggtcagtaacggctatattgccggtctgacgctcgtcatccccttcagcaccctgctgacgcgcaggctcgggccgaagcatgtcattctgctttcgctttttctctttagcgccgcctccgttgcggcaggtttgtcatcctcacttgagagcctgattgcctggcgagtgctgcagggcatgggaggggggttactgatcccggtcggacaagcgctgacctggcaacagtttaaaccccatgagcgtgccaggctctcctcagcggtcatgctggttgcattgcttgcgcctgcatgctcacccaccgtggggggagtgctggttcaggcactcagctggcgatggatattttttgccacaacgcctgtcgccgccgtaacgtttttcctggcctgcgtgtggcttaaggatgagagggcccccgtgaaagcgagcaggctcttaaacctgcccctgctggccgacccgctgctgcgtttttccatgcttgtctatttgtgcgtacccggcatgtttattggggtgaacgtcacggggatgtattatcttcagagcgaggcgcacatgacacctgccgcaacggggatgctgatgctgccatggtctctggcctcgtttatggcgatcaccgcgaccggacgttattttaaccgcgtgggtccccggcctctcattgtcgtgggttgcctgttacaggcgctgggcgttttactgctgcttaacgtcagcccgactaccacagtgttgttgcctggcgccgcgtttacgttaatgggcgcgggcggcagtctttgcagcagtacggcgcaaagcagcgcatttttaacgacggcgcgcgacgatatgcctgacgccagcgcgctatggaatcttaatcgtcagatcagtttttttgccggggcattcctgctctcgcaggtgctgaacctgacactggcgtttttcacgccgctcgccgcatggcacgggatgtttagtgttgctgcggccatcacattactgcccgtcgtgtacgtctttcgtcttaacaacacgcaggtgctttcagaggtgcaacaggagaaaccatga

SEQ ID NO: 123545 - DNA, 378 bp, Enterobacter cloacae
atgacccatttcgaacaggacattatcgacgttcacgttatgctggagaactggttgggtaagggcgaaggggatgttgacgccctgcttgcccactttcagccggattttatgatgctcaccccaggtggcgtccattttgactataacgcgcttgtcggtttcctggaccttcagcgcggcagccgtcctggtctggagattgttcttgatgagataacgacgctacagacgtgggccaacggcgcagtgcttcactaccgggaaacgcaaactcgcccggatcagcccgtcaatgtgcgctggtcaaccgccgtgctcaatcagaaggatggcaagataacgtggcgtttgctgcacgaaacggcacaaccgtaa

SEQ ID NO: 123546 - DNA, 1050 bp, Enterobacter cloacae
atgacggacttcgacaacctgacctggctgcacggtaaaccgcaggggaacgggctgctgaaagccagccctgaagattttgttgtggtggaagacctgggattcgcgccggatggcgaaggcgaacatatcctggtacgcattctgaaaaatggctgcaatacccgttttgtggccgatgcgctggcaaaattcctcaaaattcatgcccgcgaagtgagctttgccgggcagaaagataaacacgccgtcaccgaacagtggctctgcgcgcgcgtgccgggtaatacgatgcctgatttaagcaaatttgagcttgagggctgtaaggtactggaatacgcacgccataagcgcaaactgcgtctgggcgcgttgaagggcaaccattttacgctggtactgcgtgagatttcggaccgtgacgatgtggaaaaacgcctgaacgctatcaatgcgtgcggcgtaccaaactattttggcgcacagcgctttggtatcggcggcagcaacctgctcggcgcactgcgctgggcgcaaagcgatgcctcggttcgcgacaggaataaacgcagtttttggttgtcggcggcccgcagtgcgttgtttaatcagattgtgagcgaacggctgaaaaaaccggacgcgaatcaagttgttgtcggcgatgcgctacaattagcgggacgcgggagttggtttgtggcaacggctgaagaaatggccgatgtgcagtcgcgcgtggatactcaaacgctgatgattaccgcagccttgcccggcacgggcgactggggtacgcagggcgatgcgctggctgctgagcagtctgctgtcgctgatatgcaggcattacaaacattgctggtgcgggaaaaagtcgaggcggcacgccgtgcgatgctgctctatccgcaacagttgagctggaactggtgggacgacgtaaccgtcgagttacgcttctggctgccggcaggtagctttgccaccagtgttgtcagggaacttatcaacacgtcgggtgattatgcgaatattgctgagtaa

SEQ ID NO: 123547 - DNA, 1044 bp, Enterobacter cloacae
atgttttccgcaacgcgccaccgtatcgctgccctggcgctcggcgtttgctttatccttccggcccaggcaaaaaatcagccctatggtgaaatcgcgaatatgcaggcgcggcatattgcgaccgtctttccgggtcgtatgaccggcacgccagcggaaatgctttccgccgattatattcgccagcaatttgctgacatgggttaccagagcgatatccgatcgtttcacagccgctacgtctatacctcgcgcaataaaacaaaaaactggcataacgtgaccggcagtacggtcattgcggcccatgaaggtagcgcggcggaacagatcattatcatggcgcacctggacacctacgcgccaatgagcgacgccgataccgacaataatctcggcgggctgacgttacaggggctggatgataacgcggcgggtctgggtgtgatgctcgaactggcagagcgaatgaaagacattccaacccaatacgggatccgtttcgttgccaccagcggtgaagaagagggaaaacttggcgcggagaatctcctgaaacgcatgagtgccgaggagaggaaaaatacgctgctggtgattaacctcgataacctgatcgtcggcgataagctctatttcaacagcggacagagtacgccgggtaccgtgcgtaaactgacgcgcgaccgcgcgctggcaatcgcccgcagccatggggtgtatgccaccagcaacccgggcgggaatcccgattatcctcgcggaaccggctgctgtaacgatggtgaagtgttcgataaagcgggcattcctgttctgtacgtggaagccactaactggatgctgggtaagaaagacggttatcagcagcgggtgaaatcgaaggctttcccggacgggacgagctggcataacgtgctgctggataatcagcagcatattgatagcgcactgccgcagcggattgaacaccgcagtcgggatgtggttaaagtgatgctgccactggtgaaagagctggcaaaagctgggaaagcgtag

SEQ ID NO: 123548 - DNA, 1110 bp, Enterobacter cloacae
atgaaaaccttactgattacaggcgtgaccggatttctgggtggtgcagtacttgaaaaaatcctgaccggcgaaagcgccgtaaatttacttctgcttgcgcgcgccagtgacccgcaaggtgggctggcgcgagtgcaggagaatatgcgtaagttcaacgtgcctgagcatgcactggcctcgctgagcgtggagaatatcctcattggcgatctcagccagccggaagccttcctgaacgatccgcgtcttgaaaaggtgacgcatgtcgttaactgcgcggccgtcgcgtcatttggcaacaatccgcttatctggaaggtgaacgtcgagggcaccctggcgctggcgcgccgcatggaacgggtgtcgaccctacagcgcttcctgcacgttggcacggcgatgtcctgcacgccggagcaggattcgctggtcgccgaaagtgcagaattcagagagaacgccgagcatctggtggaatatacctattcgaaatccaccattgaacagctgatgcgccagcactgtcctgacctgccgctgctcatcgcccgcccgtctatcgtcgtcggccatacccgtcacggctgcacaccttcaagcagtattttctgggtctttagcatggggttaatgctgcaaaaattcatgtgttcgatggaagacaaaatcgatgtcgttccggtggattattgtgccgacgcgctgttaatgctgcttaccagtgatgcacgttcaggggaagtggtacatatttctgccggggaagagaacagcgttcgctttgctgatattgataaggcaatggcgcaggcgctggagaaagcccctgtcggagatcgatacgctcaggtgagttacgaaacgctggtcagaatgcgccgcgaactgaaggatatttttgggccgtgcaacgagcgcctgatgctgaaagcaatgcgtttatacggtgcttttgccacactcaacgtgcgcttcagcaatgataagctgcttagcatgggcatgcctaagccaccccgctttacggactatattgcccgctgcgtgcaaaccactcaggggctgaccattccggaacaaatggcggtcgattttaaatag

SEQ ID NO: 123549 - DNA, 2232 bp, Enterobacter cloacae
atggttgcggtaagaagtgcacatcttaataaagctggggagtttgacccacaaaaatggatagcaagtctggggatttccagccagcagtcgtgtgaacgcttaaccgaaacctgggcctactgtcagcgcaccactctggggcatcctgacgccgaactgttattgtggcgcggcgtggagatggttgaaatcttatccatgctgaacatggatatcgaaacgctgcaggccgcgcttttgttccctcttgccgatgcggatgtcgtcactgaagacgtgctgcgcgacagcgtcgggcaatccgtcgtggcgttgatccacggcgtacgggatatggcggcaatccgccagctcaaagccgcacataccgattccgtctcctcagagcaagttgataacgttcgccggatgctgctggccatggtggacgatttccgctgcgtggtcatcaagctcgctgaacgcgttgcccacctgcgcgaagtaaaagatgcgccggaagacgagcgcgtactggccgcgaaagagtgtacgaacatctatgcaccgctggcgaaccgcttagggattggtcaactgaaatgggagctggaggattactgcttccgctacctgcacccggcagaatataagcggattgcaaaactcctgcacgagcgccgcattgaccgcgagcactatattgaggagttcgtcagcggattgcgccagtcaatgaaagaagagaatgtgcgggccgaagtctatggtcgacccaagcacatctacagcatctggcgcaaaatgcagaagaaacatctcgcctttgatgagctgtttgacgtgcgcgccgtgcgcatcgttgcggagcgtctgcaggattgctacgccgcgttagggatagtacatactcacttccgccatcttccggatgagttcgatgactatgttgcgaacccgaaacctaacggctatcagtctatccataccgtggtgctggggcctggcggcaaaacggtcgagattcaaattcgtaccaaacagatgcacgaggacgctgagcttggcgtcgcggcgcactggaaatacaaagaggggacgtcaggtggcgtgcgctctggtcatgaagaccgcattgcctggctgcgtaagctgattgcgtggcaggaagagatggcggattccggcgaaatgctggatgaagtgcgaagccaggtctttgacgaccgggtctacgtctttacgccgaaaggtgacgtggtcgacctgccagcaggctccacgccgctggactttgcctatcacatccacagtgatgtggggcaccgctgcatcggggcgaaaatcggcgggcgtatcgtaccgtttacctatcagctgcagatgggcgaccagattgaaatcatcacgcagaagcagcctaacccgagccgtgactggcttaacccgaacctgggctatgtcaccaccagccgcgggcgctcaaaaattcacgcctggttccgtaagcaggatcgtgacaagaacattcttgccggtcgccagatcctcgacgacgagctggaacatatcggcataagcctgaaagaggccgagaaattcctgctgccgcgctacaacttcaacgagctggatgaactgctggcggcgattggcggcggtgatatccgtcttaatcagatggtgaacttcctgcaggcgcagttcaacaagccaagcgcggcggagcaggatgcggcggcgctgaagcagctgcagcagaaaacctatgcgccacaacagcgcagcaaagacaatggccgcgttgtggtggaaggggtgggtaatctgatgcaccacattgcccgctgctgccagccaatcccgggtgatgatatcgttggctttatcactcagggacgcgggatttccattcaccgttcagactgcgaccagcttgccgagctgcagtcgcatgcaccggaacgtattgtggaagcagtctggggcgagagctactcggcggggtactcgctggtggttcgcgtcaccgcaaacgaccgcagcggcctgctgcgcgatattacgaccattctcgcgaacgagaaggtcaacgtgctgggcgtggccagccgcagcgatacgcgcgagcagcttgccaccatcgatatgaccatcgaaatctacaacctgcaggtgctgggccgcgtgcttggcaaactgaaccaggtcccggatgtgattgacgcacgtcgtctgcacggcgggtaa

SEQ ID NO: 123550 - DNA, 1146 bp, Enterobacter cloacae
atgaagattgttatcgcaccggattcgtataaggaaagcctgagtgcccttgaggtagccaccgcgattgagcagggttttcgcgagattttccccgcggctgactttgtgaaattgccggtcgccgatggtggagaaggtaccgtagaagctatggtggcggcgacgcaggggcgcattgtccatgcctctgtctcaggcccgctgggtgagcctgtggacgggttctatggcatctccggtgacgaacagagcgcgtttattgaaatggcggcggcaagcggtctggagctggtcgcgccttcgcaacgcaatccccttcttaccacctcctgggggaccggcgagcttatccggcacgcgctggatgcgggcgttaagcatattattattggcattggcggcagtgccaccaatgacggtggtgccggcatggtgcaggcgctgggggtaaagctgctggataccaacgagcagccccttggacaggggggcggcgagctggcaaaactggcccgtatcgacctgagcgggctggataaccgtctggcggagtgccggattgaagtcgcctgtgacgtcactaatccgctcaccggcgacgaaggggcatccgcggtctttggcccgcaaaaaggcgccacgccggagatgattgtgaccctggataacgccctggcgcattacgcgcaggtcattgcccgggatctggatatcgacgtcatcaaccttgccggcggcggtgcggcgggtgggatgggggcggcactctacgctttctgcggtgcgcagcttcgtcaggggattgagattgtcaccgatgcgctgcatctggcagagcaggtggctaacgccgatctggtgattacgggagaagggcgcattgacagccagacgatccacggcaaagtgccggtgggcgtcgcgaaggtggctaaacgctttaataaaccggtcatcggtattgcgggtagcctgacggcggatgtcggggtggtacataatcacggcatcgacgcggtattcagcgtgatttataccatctgttcgctggaggacgcgctggaaaatgccagcgacaatgtgcggatggccgcacgcaatatcgctgcagtgctgaaagtggggcaggcgttcaggctctga

SEQ ID NO: 123551 - DNA, 1341 bp, Enterobacter cloacae
atgacgactcaatcaagcccggtgattaccgacatgaaggtcataccggtggccggacaggacagtatgctgctcaacatcggtggcgcacataacgcctggtttacccgtaatatcgtggtgctgacggactccgcgggccacaccggcgttggggaagcgccgggtggcgaggttatccaccagacgctggtagacgccattccgctggtcgtcgggaaagaggtagctcgcctcaataacgtggtgcagcgggtgcacaagggcaatcagtcggcagactttgacacgttcggcaaaggcgcctggacgttcgaactgcgcgtcaacgctgtcgccgcgctggaggctgcgctgcttgatttactgggtaaggcgctgaaggttccggtctgcgaactgctggggccaggaaaacagcgcgacgcggtgacggtgctcggttatctgttttatgttggcgatcgcaacaaaaccgacctgccttatctggcgcattcccctggcgaccacgagtggtatcacctgcgtcaccaggaggcactttccggtgaggcggtggttcggctggcggaagccgcgcaggatcgctacggatttaaagatttcaagctgaaaggcggcgtattgcccggcgagcaggagattgaaactgcccgcgcgctcaaaaaacgcttcccggatgcgcgcatcacggtggatccgaacggtgcatggctgctggatgaggccattgccttatgcaaagggctggacgacgtgttgacctacgcggaggacccgtgcggggccgagcagggcttctccggtcgtgaagtgatggcggaattccggcgtgccaccggtctaccggtggccactaatatgatcgccaccaactggcgtgaaatgggccacgcggtgatgctgaacgcggtcgatattccgctggcggacccgcatttctggacactctcaggtgccgttcgcgtcgcacagctctgcgacgactggggactgacctggggttgtcactccaacaaccatttcgacatttcgctggcgatgtttacgcacgttggcgcggcggctccgggcaacccgaccgccattgatacccactggatttggcaggagggagaagcccgcctgacgaaagaaccgctggtaatcaaaaatggcaagattgccgtaccagatgcaccggggctgggcgttgagcttgactgggatcaggttcatcacgcgcatgaggcgtataaaaaactgccaggcggcgcgcgtaacgacgcggggccgatgcagtacctgaaccccggctggacatttgatcgtaagcgccctgtttttggacgtcactga

SEQ ID NO: 123552 - DNA, 546 bp, Enterobacter cloacae
gtggacatcgaaactgcaaatgccctcactgccttcacgacccgctattgcgatgcatggcatgaaacgcacggcacttggccgcaaagcactgacttatatggtgtaccttcgccgtgtattatctcttctccggatgattacgttatctggcaaccgcaatccccgacgggtgagcaaaatgtaaatgcggttgaacgggcaatggacattgtggtacaaccagcggttcacgcgttttataccacgcaatttgcaggggatatgcctgcgcgatttgctgatatcacgctgacgctgttgcagacctggagtgaagacgatctgcagcgtgttcaggaaaacctgattggtcatctggtcacgcaaaaacgccttaagctttctccgacgctctttattgccacgctggacagtgaactggacgttatctcagtctgcaacctgtctggtgaagtggttaaagagaccatcggtacccgcaatcgcgagactctcgccccctcacttgcggaattcctcacccgacttgagccacttctgtaa

SEQ ID NO: 123553 - DNA, 447 bp, Enterobacter cloacae
atgaatacagaaaactctttctcccagctctacagcgaactctccctgaaccccgatctcccgaccctggccgggcgctgcatgctgctcaccgaaattctgctggactgcaacgcccacccgcaaacgcagcccgtgtgccgctgtttaggcgcgtatctggaagaagtcaaaagcggactcacagaatcaatgcgtgattttcagatagtggaatttgaggaggacgctgaaccaccgcgacaaaaagcgtggcttctggaagataccgaaacaaagtgcgactactgccgggcagtaaaccacgtgctgctggtgtcccattttgatcgggatatgctgccgcacctgacgggattgctgcatgagatggcgcattccatggccggggatttaatcacgccggcgcagccccgcatgacaatacatcttcctgcccggcattaa

SEQ ID NO: 123554 - DNA, 957 bp, Enterobacter cloacae
atgtcttccatcgtcgatacacttttttctcatcagccccagcctaaatccggctggcagctcttcaataatctggccttcgggaagatcacaccggggctggcatggcaaaaccccgcttatcgacgtaagttcatgctccgttcgctgatgacaccgttcagcaccacgcgtctgctgtcagagctggcaaagcagccgcgcctgatgcaaatgttgcaggtgcagccggggctgccgtgccgcctgcaccgcccgtggttaacggtggacatggatcgccgacaggcgctggaatcgctaacctggcactaccagaccatgacgcgccagcttccggcaacgctggtcaagggttacctttcaccgcagggggcaaccctgctgaccctgaccggaaaagacgaacagcagtttactgtgcgcctgtgcgccgacgccttcatggataaagagggtgaagccaccctcgtcttttgtaaccatcagaataccgtgctggcggaaatgaccttcacgctgtgcccgtttgaaggaaaaacaacgctgttcatcggcggcctgcagggggcaaaagcacatgttccacatgaactgatccagggggcgaccaaagcatgtcacggcctgttcccgaaacgcctgctggttgaaacggcaatgacgcttggcgcagctttcccggttgagcatattgtcgcggtgagtaacgccacgcatatctaccgcagctggcgttaccgcaagaaaaaagagggaaaactgctggccgattatgacagcttctggctctccctcggcgggcaaaaacaggataacggccacttcatgctgccgctcgccatgccccgtaagccgatggacgagattgcgagcaaaaagcgcgctgagtaccgccgccgctatgcgctactggacagcctgacgcaacacgtcacgcaggcgacccgcgcttaa

SEQ ID NO: 123555 - DNA, 435 bp, Enterobacter cloacae
atggttaaatcattgttaattgctgttaatgaaaagctatcgtgcgacgatgccggcaaactcttgttacgacttgccgtcggtgggctgatgctttttcacggtttacacaagttattgggtggcgtggggttcatcagcggcatgctggtggaaaaaggattaccggggtttatcgcctacggcgtgctcattggcgaagtggtggcacctgtcctgattatcgtggggctttttacgcgcccggcggcactggtgctggcgtttaccatgattgtggcgtggctgatggtcgggacgggggaaacctttgcgctggacgcggtaggtgcctgggcgattgagagcctggtgtacttctttatcggtgcgctggcggtagcatgtttaggcgctgggcgttttgcgttggggaaagcgccggtctggcggtag

SEQ ID NO: 123556 - DNA, 1830 bp, Enterobacter cloacae
atgaccaaaaggaccttactgagcgtgctcgttgcgggtgcatgcattgcgcctttcatggcacaggctgcgacgctgcaggcaaccaccagcgagccgttcaccctgaaagccagcgatctggcgaagaaagaacaggaactgactaactttccactgatggcgtcggttaaagacaccattcgtacgctggataatgcccaggttgagctgattgagccaggccgtgcagcgaacccggataacgttaaacgcgttgaaggcattgtgaaggccagcgactgggaataccttttcccgatgcgagcgcagtcctacacctacagtaacttcctgaaagcggtgggcaaattcccggcgctgtgtaagacctacaacgacggccgtgacagcgacgccatctgccgtaaagagctggccaccatgtttgcccacttcgcacaggaaaccggcggccacgaaagctggcgtccggaagccgaatggcgtcaggcgctggttcacgttcgcgaaatgggctggaccgaagggcagaaaggcggttacaacggcgaatgtaatcctgatatctggcagggacaaacctggccgtgcggcaaagacaaagacggcgatttcgtgagttactttggccgtggggcaaaacagctgtcttataactataactacggtccgttctctgaagcgatgttcggcactgtccgcacgctgctcgacaagccggagctggtggctgacacctggctgaacctggcaagcgccatcttcttcttcgcctacccgcagccgccgaaaccgagcatgctgcaggttatcgacggcacctggcagccaaacgatcatgacaaagccaacggcctggttccgggcttcggcgtgaccacccagatcattaacggtggcgtagagtgtggcggcccgactgagattgcccagtctgaaaaccgtatcaagtactacaaagagtttgcgaagtacctgaaagtgcctgtcccggcaaatgaagtgctcggctgtgccaacatgaagcagttcgatgaaggcggctccggtgcgctgaagatttactgggagcaggactggggatggagtgccgatacgccagacggtaaaacgtattcctgccagctggtcggttatcagacgccgttcagcgcctttaaagaaggtgactacacgaactgcgtgaagaaattctataacgtcaacatcatcaacgatgacggttccgccgtgacgccggacgagcatccggtcactccggcaccgacgccatcggaagatgaaaccccggcaccggcaccggttccggacgaaacgccggcagaaccgaccgtggtgaaccacgccccggtcgcgcagattgcgggcccaatcggtgcggtggaagcgggcgcgcaggtatccctgagcgcagaaggatccactgaccaggacggcaacacgctgacctacacctggcgttcacaggatggccagacggtcaccggtgaagacaaggcggtggtgacctttaccgcgcccgagtctgcgacggctcaacagtacgaagtcagcctgaccgtgagcgatggcgagctgagcagcaccacctcctatctgctgaacgttaaggcgaaagccacgacgccgtctgaaaacgacggtacctctggtgcttacgccgcgtggagcgcgaacagcaagtacaaggcaggcgatatcgtgaataaccacggtaaactgttccagtgcaaaccgttcccgtacagcggctggtgtaacaatgccccggcgtactacgagccaggcgcgggtctggcgtggtcagacgcctggacggcgctgtaa

SEQ ID NO: 123557 - DNA, 441 bp, Enterobacter cloacae
atgaaacgctttttattgttattgcttattttaagtcagagtgcggcagcaaattgctgggataaagcggcgcattattatcatgtcgatccgtatttattatatgccattgcgcaggtggaatccggtatgaatccgaatgccgtggggtggaatcaggatggctcgcgggatgtgggattaatgcagattaacagcacgcatttcagcgaactgcagcgccagggcattgacgagaaccggcttgtgaccgagccctgcacctccattatggtgggcgcgtcaatactgtcgacgatgatcaacgtatatggctataactgggaagccgtcggggcttataacgcgggagtgaaaaaagagaattattcaaagcgcatgaattatgcccgcaaggtctgggcgaaatatcaggagataaaacctcgttcctcttattaa

SEQ ID NO: 123558 - DNA, 2715 bp, Enterobacter cloacae
atgaaatttatgaagcctaaatatctggcgcttttcgttgcagcggcgtccagctctgccttcgcggcggcgccaggtacgccaaccctcagcagtggcaatgataagtttgcgattgttgaagttgaccaggcagcgcaagactataacagccttgtgaaagtccatgatggcgcggatgtgaaagttgagtggaacgtctggagcggcgatgcgccaacctcggcgaaagtgcttctggatggtcaggccgtgtggagtggtgccgcaagcgcctccgggtcagccaccttcaaagtgaaaaagggcggacgctatcaggagcaggttgaactctgtaacgccagcgggtgttctaaaagtgccagcaaactgatcatcgtggcggacacggacgggagccatctgctgccgctgaacaccaccctgaaggaaaataacaaaactttctctcaacatacggacaaagtggtgggcgcctatttccctgagtggggcgtctatgggcgtgagttcccggtggataaaatccctgcggcgaacctgaaccacattttgtacggtttcattccgatctgtggcggtgatggcatcaacgacgggttaaaaacggttgagaacggcaacagcttcgccgcactgcagcgcgcctgtgcgggccgtcaggattacaccgtggccattcacgatccgtgggcggcattgcaaaaaccgcaggccggcgtgaccaactgggacgacccctacaaaggtaactttggtcagttgatggcgctgaaaaaagcccatccggatctgaaagtgctgccttccattggcggctggacgatgtccgatccgttcttccagatgcatgattcagcgatccgcgcgcgcttcgtctcttccgtgaaagagttcctgaaaacctggaaattcttcgacggggtcgatattgactgggaattcccggggggaggtggcgtgtcggaaaatcttggcaaccctgctcaggacaaagccacctataccgcggtgatgcacgatctgcgcgcgatgctgaacgagctgtcagcagaaacgggccgtacgtacgaactgaccaccgccattggttccggtaaagacaaaattgaagacgtggattacaccacggcacagcagtatctcgaccacatcttcctgatgagctacgacttctacggcggctggagcaatactgatctcggccaccaggcggcgttgcacggcgcggagtggaaaccggacaccaactacaccactgaaaacggcgtgaacgcgctgctggagcagggcgtgcagccgggcaagattgttgtgggggcgggcatgtacggtcgcggctggaccggcgttcatggctacaccggcgacaatccgttcaccggtacggcaacgggcgcggtcaaaggcacctgggaaccgggcgtggttgactaccgtcagattgcgaacgagtacaaaggcaagccaggctgggaatacaaatacgatgccgcggcagaagcgccgtatctgttcaataaagccaccggcgatctgattacctatgaagacgcgcgttctaccacggcaaaaggtaagtatgtgctggcgaaaaacctgggcggtctgttctcctggtccatcgactcggacaatggcgacatccttaatgcgatgaacgaaagcctgttgggcggcggttcaacgccggttgatcccgttgtcaccaaccatgcgccgatcgctgcggctgccgatcagaccgtgaccgggcctgttaccgtcaccctcgatggctctgcgtctggcgatccggacggcgacgccattacctataagtggacccagatttccggtccagccgtgacccttaccaacagcacgaaagccaaagcctccttcggcgcggcggcagtgactcagaaccagacgctctccttccgcctgacggtgaaagatgcgaaaggcctgacgaacgccattgatgttcaggtcgtgaacaaagcacctaaagcgaaccaggcaccggtggtcaacccgatggaaagcatcacgctgcaggcgggtgaaacctatgccctgcatgcgcaggcagccgatccggatggtgacgcgctgacctatgcctggagcgtgccggcggacatgaacgcaaccggtactgacaccgcgaacgtgaatatcaccgcaccggctgttgcttccgattccacctacaccctaagcgtggtggtcagcgacggtaaaaccagcgttcaatcgaacgtgcaggttattgtcacgccaaaagcagccgatgaggtaacaccaccagccgatgaggtcacgccgccatctgacgaggtgacaccacctgccgatgaggtcacgccaccttctgatgaaggctctgccaccggcagttgtgatgcacctgttgatgccaatgccagccagtacccggcctggagtgcgagcaaaatctacaacagtggtgacaccgtgagcgccgacaacctggtgtggaaagcgaagtactggacacagggcaataaacctggctttgacgcggatgcgtgggagctggtcagccaggtgaaaatgaactggcgttccgatgtggtttacaacggtggcgatacgaccacctaccaggggtatgtctaccgtgcgaaatggtggacccgtggtgataaaccaggtaacagcgatgtatgggtgaaagaaggcgcgtcagcagactgcaaataa

SEQ ID NO: 123559 - DNA, 798 bp, Enterobacter cloacae
atgaacaccgttacgctgatgcgggaaatctacccggtggggttcccggtgatgagtgcgatcctgggcagcatggtgggcagttttctgggcgttgtcgccgagcgcgtgccgggcatggtgatggaggaggaaggtacgggcaacttgctgtttccggcctctcactgcccggtgtgccagcatgatcttgcggcctgggagaatatcccgctggtcagctggctagtattgcgcgggcgctgcaggcagtgcggcacggccatcccgctgcgcttattgatgctcgaactcgtcaccgcgctcttttttggcctcaccgccttgtgcattccgggcgaaccggcgttgttctcactgtggttgctggccgcgtttctgctgccgctggcgatgattgactggcagcatcagttgctccctgactgtctgacccagccgttgctgtgggcaggaatgttgttacacctcgttgaccacacgctgccgcttaaggatgcgctggtgggggcggtggctggctacctttcgctctggtctctttactgggcatttcgtctgcttaccggacgagaaggattaggctatggcgattttaaacttctggcggcgttaggcgcctggtgcggctggcaggcactgcccaccctggaattgattgccgcgttaagcggtattgtcggatatttcgcgacaacacatgcgaataaaaataaccgcattatttctttcggtccttatttagcttttgccggcatgacggtttttgtttatcaggttgcctgttccacattctga

SEQ ID NO: 123560 - DNA, 486 bp, Enterobacter cloacae
atgaaagagcgaatcacgaagctaacgtcgcgttatcaacaatacagcatccgggagaaatatattttaaaaaccggtgccgttgccctcctggccgcggctgtttattacgcgggcatgatgccactggataatatgattcaaaatagcaaatcaacgctgacccgacaaaaagagacgctgaactggatgcgcagagaaatagataaacaccaccttccggtgatggtcattaaaacggataatccgcgcacggtggtggagaatagcgctcatgaaattaacctttccctgacggaggtgcgtcaggacgggcaaaccttatcgttcgtggtgaaccgcgtaaacgtgtatgaattaaaaaactggctgcgggaaatcaaccagacctccggcgtcaggctgcaaaaaatgaaccttacgccggtcgatcacctcagtgacgtgaaagcagaagtgcagctcacctggcgcaaaaccgcatga

SEQ ID NO: 123561 - DNA, 1134 bp, Enterobacter cloacae
atgaaacaggtactttttgttcgtcccgacagccgtgagggcgggaaaataatgtggtgtgcttccggcagccagcaggttgacgttgtggagcgccttgacgcgctggcagaccatcctctcgcggcccgggtctgtttactgttgcccgcgggcaacatgatcttccgccattttacgttgccgaaaaaagttgcctctcagacggcggcgttctcgtggctggcggaagagacgctcattggcgaggtggacaaccttcactggacggtgcttcacaaaaagggggccaacgttgacgcggtggcgattgataccgatgttctgcgcgggtggttagcccgttgccaggaggccggtttgaaggtggttcaggtgctgccggatgcctggctgctgccggtgacggcaggaggaagcacgctggttgccctggatgaccgctactggctgcgcctgtcgccccatgtcgccagcgaaatggaggccagcctgctgccgctgctgatgcaaaaaaaaccagacggtgacgtgtgctgttacggcgaaccgccagccggtgtcggggtggctattctgcacccgtggcagcatccgctggtgttgatccagccccagtggcaatcctgtcgggtcaccctcctgcacggtgaattcagcccgaaggcagggaaaggcagcgcgtctaaaggaataaaaatcgcgatggcggcggcgggcctgctgtctctcgggctgttgctgggcccgcggatcgcgatggcctggatgctggtacagcaggaaaatcgggttcagcaggagatcgttcaggtttatcagcatcattttcccagcatgcgccagcagaccaatatcaaataccactttggtcaaaacatgaaaaagcagcacaaaggggtattcctgcagctggatgatcttgagcaagccaggcaggccgtacccgcacttgagatctccctgcttgagtacgatgcgcaacaaaatgcgctgaccctgagcgtcagtgcgcaaagccaggccgcgctgcagtcgtttgtggagaaaacaggggagcattttgatttcaccctacagcctgtttctaccactgcaccttataccgccatgatcgcagggaaatataaatga

SEQ ID NO: 123562 - DNA, 1011 bp, Enterobacter cloacae
atgaaggctttacgtaaacagaaaggcgtcgcgctgctggtggtactgatcctgctggtcatgatgtcggcgctggctgccagaatcagccagcagttctgccgcaatctgcagaaaacccattaccaggtgagtcagcagcagctgcgctgggccatgcaggctcaggagaaggtggtcaaagatcgtctgcagagcgacgccagcggtgagagtaaagcccttaccctgcagggtgactggcaccagccgctggagacccggggtgacgattacacggtggtcagtcaggtggaagacgcccaggactgcttcaacgtgaataacctgctggcggccgatgacatcgagcaggggcaaaatgcgcccgcggtgccggaaaaaccgcggaaagagcagattgttgagcaactcctgaccgggagtggcctcagccagtccacggcgcacgaggtttactcgcagctggtggactatctggatggcgataccaccacggccagcgagggggcggagggcgatgcctgggcgggcgtggtgcccccccggcagcccgcaaatcagatgatgcgcacgatcgctgagatcacgctgctgccggcatttccggcaacggcataccggaaggtgagctcgctgctgtgtgccttaccggataccgccagcaaggtggatgtgaacaccctgaaaccggaacaggccgccttactggccgccatgttccccggaaaaataacgcaagacgatgccgtacgcctgattgaatcgcgtcctgaaaccggctgggaaaatatggaaaccttcagcaacgcgctggagcaggccttcccgcaggtcaaagacgaccttccgcaggtggccggacaactctccacccaaagccggtacttccgcgttaactataccggcaacaccgatgcgctaacgcttcgcgtggtaagccagcttcaggtcaataacgaagccggtgagatcgtgacgtggcaacgtcgttaccgaatgattgaataa

SEQ ID NO: 123563 - DNA, 351 bp, Enterobacter cloacae
atgacgctgctggaggtgatggtcgcgctggtcatcttctccactgccgcactggcgctgatgaactcggtctccctgaacgtgcgtttcacccacgggctggccgatacattgcaggccagctgggtcgccgaaaatcaactggcggaggcgcagctcaacagacgtgattttcctgacgctgaagcgcagggggcagaggtcatgggcgggcgcagctgggcctggcgaaaacagcgcgtaaaaaccgcggctaacggctgggcgaatgccatccgcgtctatgcagaaggcgatgaaagccagccggttatttcactgcaggtcatcgcgccgggagaggaaccgtga

SEQ ID NO: 123564 - DNA, 1917 bp, Enterobacter cloacae
atgaagaaatttccatgggcgtgcgtggcgctgaccgcattgtcgttatattcgggttcgctgctcgcagccaactttagcgcgagttttaaaaataccgatatccgcgagtttatcgatacggtaggccgtaaccttaacaaaaccattctcgtcgacccgtcggttcagggttccgtatccgtcagaacctacaacgtgctgacggaggatgaatattaccagttcttcctgagcgtgctggatctctacggtctctcggtgatcccgatggataacggcatggttaaagtggtgcgctcaagcgtggcccgcaccgccggtgcgccgctggcagatagcacaaacccgggcaaaggcgatgagattattacccgtgtcgtgcgcatggaaaacgtgccggtgcgtgaactcgcgccgctgttgcgtcaactgaacgatgccaccggcatcggcaacgtggtgcacttcgagccttccaacgtgctgttgttaaccggtaaagcgtccgtggtgaaccggctggtggatctggtccagcgcgtggataaagacggtgtacagcgtcgcgaaatcgtccccctgcgctttgcttccgccaaagcgctctccgacatgttgaataatctcaacaatgaagagcagaaagggcagaacgcgccgcagttggccaccaaagtggtggcggatgacgaaaccaacagcctggtgatcagcggttcggaagatgcgcgcacgcgtacccgcagcctgatccatgagttagatcgcgagcagaacaacgaggggaatacccgcgtcttctatctcaagtacgccagcgccaccaaagtggttccggtgctcaccggtattggcgaacagctgaaagacaaagccggcaccgcgaaggcgaaaacggccaccgcggcaaccgatctgaatattaccgccgacgagtcaaccaactcgctggtgatcaccgcgcagcctaacgtgatgaactcccttgagaaggtgatcgacaagctcgacatccgccgtccgcaggtgctggtggaagccatcattgctgaagtgcaggacggcaacggtctggatctcggcgtgcagtggaccggcaagcacggtggtgtccagttcggctccaccggcctgcccattagtcagataaaaaatggcaccatcaagggcgccagctttactggcctggcgaccggcttctttaacggtgatttcggtgcgctgatgaccgcgctctcaaccgacggcaaaaacgacatcctttccacgccaagcgtggtcacgctggataacaaagaggcgtcatttaatgtcggtcaggacgtgccggtgctttccggttcgcagaccaccagtggcgataatgtctttaactccgtagagcgcaagacggtggggaccaaactgaaaattgtgccgcaaatcaacgacggcgacatgatccacctgaagattgagcaggaagtctcaagcgtcgacaacagcgcaacggaagacgccagccttggcccaacctttaatacccgaaccatcaataacgaagtgatggtgcacagcgggcaaacggtggtgctcggcggcctgatggagaatgtcactaagcagtcggtctccaaagtgccgctgctgggggatattccgctggtcgggcagcttttccgctacacctcgcaggacgcgtccaaacgcaacctgatggtctttattcataccaccgtgctgcgtgacgacgacaactacagcgcggcgtcgaaagagaaatatgaccagatccgcgcccgccagcagcagcgcgttgaggagaaaaagctcgggatcattgaaccggcggataacgccgtgttacccgcgttccctgctgcgagtgctgcatcggtgaaaaccagcgcgtcccgcaatccgtttaaagagtaa

SEQ ID NO: 123565 - DNA, 735 bp, Enterobacter cloacae
atgatgttggcgctgttaatttttagcggccagcaagggtatttcacgtttaaagattataaaaaggttacgaataggttggctaactctaatgcgcagccgctgaaaaaccgccgcgaagagaaaacattcacccttttcacggcggcagcacgtcaggacactgggccggctgcgctaaaagccccgctggcggcggaaatagaaggcattgtgcgcagtgatgacccctggctttccttcgccgttattaaaacgcccgcgggccagaagagctaccgcgaaggggagccgctgaccggttttaacgatgcctttattcaggaaattaacaaagacagtgtcgtcgtgaattatgaaggcatcacgcagacgctggccttaaagaaaccggattatttcaagggtggcgttgatagcggcccggtaaccaaatcgacaaaagatgcaggcgcagacacgctgcatctgaatgattatctggtattaaaaccggttgtcgaaaaaggccaactggaaggctatgccattaatccccggaatgcctcttccttttatagccattcaggattgaaaaaaggggatgtggcagtcgaagtaaatgctgtcgatatgaccgatgaagtaaaggcaaaaaatattattgctgaatggtcaaaaatgaaagaagcggaggttgtcgtcagacgtcacgctcaccttgaaaatattcgggtcaatgttcttaacaattaa

SEQ ID NO: 123566 - DNA, 1563 bp, Enterobacter cloacae
atgtatcagagccactttacttttaaaaccccgcccttcaggaaggtcacccgcttatccggtgattttctggtgccttatcatcaggacgtctttaacctgctgaaagagaaaacccaacaggcgggaatatgcgggctctttagcgacgatacttcgctgttgggccagttcagcgatgcgctgaaaaacagcgacaaccgcgtttttgccatcaacgcgtttccaaaactgagcgccagtagcctgctgtacaagctcagcccggacacgaaagcaatcgccagccgtattcaggcggtcgataccgtgctgcagcagtggcaagccgggaaaacacaggccaccgtgctggtcatttcccatactgaagccatgaaagagacctgccggacggtgctggggatgttgctcacccgtgcgcaggagctggggtttcatttatcggtggtgctgacgggcgcggaaaatcaggcggcgctgctacagcaatctgatctgcgtgaatatgtgcatacccaccacaccttgcgccccctgacctgccgtgaatatctcagctacgtgcaggcgcagtgcgaagagcacggaggcgaaagctcgccgttatccccggcgcgcgtgggtaagatgcacgtaatgacaaaagggaaaatcagtgaactgaatgcgctggcgcacctgtcgatgctcgcggcctggaccgaacgcgcaagccaggtcagtccgcgacatttacgcctggcggccgcagaggtgctgcccgcgaaaaaacagggtaagcgtctggcaacggtttcactgtttgcctctgtgctgttcgcggcttgcggctggtattttaccgcctcaatgactgctcgcctcccggtttcgctgccggtcccgataagctggaatcacccggccgcccccgttcagtcccccgtcgtgccggttatcgacaaggaaatagtcaatcagccggacgcgatgcatcagctttatctgatgtgggggtatgacgcctcggcggacgatgcgctgtgtcaaaacgcggtgaaagtaaacctgatgtgtaagcagggaaatgcctctccggatgcgctggcaggcgaaggttatccgtgggtgagcgagctcaaaaccggcaatcatcttaactatgcggtggtcgcccgcgtcggagaaacctcgatggacctgctgatgaataaccggacctggcaggtcagccgcagctggtttaaccggcatgcaaccggaaactatacgcaactgcaccgcctgacgccggaaggtaaagacgccatcagcgcaaccagtgacggcaaagagatgacctggcttgatcagcagctgagccaggccctttctcaacctgaaacccacgctcagcgctggactgcggagatgatgaaacgcacccgcgcgttccagcaaaaaatgcacctgcatgtggacggtattcccggcgaagagacattgatgcagttaatgcgggaaaccaacaccacgccgagcgtattgatccaggcttcgcatgcattaccggatgcgaaaatgcaggagaagcattcctga

SEQ ID NO: 123567 - DNA, 597 bp, Enterobacter cloacae
atgtctactatcagccttgcggctcagcgcagttacaccaccggggaagcggtctggttttcatatcgtcttcccggactgagaaacgtttttgcccacaccgttttaggactcctgggtctgtgcgccatgctgatggccgggttgtacgcgcatgtgtattgggatctgcgccaccctgcccccgcccccatcaacgcgagcagcgccagaccggaaacacagctttcagatatgcattatgtgtatgtgagcaaacccttcccgcatccgcaccctaaacctgcgccggtgcatgaggatatgcctgccctgcaggatctgccgattaacggcgatgataccgactggcagcaggcgcctgaaggagcggctcagcacgataccgcgcgggatacgttacccggaaccggggcgcacaccgacgcttctgcacgggctggcagcgacagttcctcattaacagaattgtttaagcaggcgttaaaagaacaagagcaggattattcgcaaggcaaaattcccgcgccgccggttgacgaaacgcatgatatttcccggtcccctttacgtcataaaggagaccggctggagtaa

SEQ ID NO: 123568 - DNA, 375 bp, Enterobacter cloacae
ttgaacattaaacgaaactgggcgggggtgatcagctgctttttgctgttcattgtcgtttgcatgtccctcgcttttaatgtgaagggggcgttcagggcgtcgggtcatccggagctggggttgctctttttcaccctgccaggggctgctgccagttttctctcccgccggggggaagtggtgaaaccgttactgggcgcaatacttgcagcgccgctgtgtctgctgctgatgcggtcactgtatatttcaacgcgaagtttctggcaggagctggcgtggttgctgagtggcgtcttctggtgcgcactgggagcgctatgctttttgtttgttcatagcatgttggcccggcgcagacagcacaaataa

SEQ ID NO: 123569 - DNA, 777 bp, Enterobacter cloacae
atgagtctcaaaaataaaaccgccgttatctttggtggcagcggcgctattggcagcgccgctgcgtacgcgctcgcccgtgaaggggctacggtctacctcgcggcacgcgatcaggccaggctggagcacgtcgctaaccgcattcacgccgctggcgggtcagcccggctgtttgttttcgatgctctcgatgccgacgcgacgctcccggacgttaccggcattgatatcgtcgtgaatgccacgggctttatgcacgaccagggtaaacgcctcgacgcattaacgctcagtgaattcagacaggggttcgacccttttctggccgcctgtttcaacatcgccaaagctgtcgcaccccgtatgggcggtgagcgtgccggaacgcttatcaccgtcgttgcgccggctgcaaatatggcgatgccgggacatctcgggcatatcgttggctgcgcgggaacggaagcgttaacccgtgcgctcgcggcggagctgggggcaaagaatattcgcgtcctgtgcgtgcgttcgcatgcgatagccgacgcggttcaggccggttcctgtgtgggtgacctgttcgccatcaaggcgcaggcgatgggtatcagcgtggagcagtttctggagggcgcggcacagagcacgatgctgaatcgcctgccgacgctggagcaggtggcagacaccatcgcgtttctggcgtcagatgcagccggtgccatcacgggaacaacggtaaacatgacggccggcgcgaccacaatctaa

SEQ ID NO: 123570 - DNA, 813 bp, Enterobacter cloacae
atgagcgttaaactgatcgccgtcgacatggacggcacgtttctgagcgatgccaaaacctataaccgcccgcgttttctggcgcaatatgcacgaatgaaagcgcaaggcattcgctttgcggttgccagcggcaaccagtactaccagctgatttccttttttccggagattgcccatgaaattgcgtttgtcgcggaaaatggcggctgggtggtcagcgccggggaagatgtctttaacggtgaactgtcgaagacgcacttcgacaccgttgccgccgtgttaaacgatgtgccgggcattgagattatcgcctgcggaaaaagcagcgcttatacgctgaagcactatgacgacggctttaaggatatcgcggcaaagtactaccaccgtctcgaaatggtgagtgatttcggcaacctgaacgatattttcttcaaattcgggcttaacgtctctgacgacgacatcccgcgtattcaggcgatgctgcacgaaaagctgaacgacattatggtgcccgtcacgaccggccacggcagtatcgacctcatcatccccggggtgcataaagccaacggtctgcgaatactgcaaaagcgctggggcattgatgacagcgaagtggtggcttttggcgatagcgggaacgacgtagaaatgttgcgccagtcagggttcagctttgcgatggcaaacgccaggccgcatattaaggcggtggcgcgctttgaagccccgcacaataacgacgaaggcgtgctggatgtaattgataaggtgttgaacggcgaagcgccgtttcattga

SEQ ID NO: 123571 - DNA, 729 bp, Enterobacter cloacae
atggcacccacttccagccgttcagaattgtctaacttacagacaaataagacaaaacgactttaccgtctaccaccccgcttttatggttatcagcttttaatactgatagcccttgccgtgctgtttacctggctatcccgcgatgaaacgctcgacagatggatcaccggtttatggtatgacgcggctgctcaccgttttccactgcagcaagaccacctgctggacctgctgaaccatcgactggcgaagtacatcgccatcgccgcaggtgctgttgcgctcatttatggcgcgttcaggcgcaatgcgagactggtcacggccgcgctgctgatggggcttggcgcgctggtggttggcgtactgaaaagcataagccatcacagctgcccgtgggatctggtggagtatggcggtaaggccgtttcttatccgctgttcagtgccgctcccgctgacagcggtccgggtcgctgtttccccggcggtcatgcctccagcggctttatggtgatgggactgttctttgccttctggcgcgagcgtccgcgtcttgcctggtgcttcgtcgtgctgggcgtcgttttaggtctggcgatgggttacggccaggtcatgcgcggggcgcattttttctctcacaacctgtgggctgggtggtgggtctggttttcccagttggtggtctacggtctggtctccacctggtttgctaaagagtga

SEQ ID NO: 123572 - DNA, 609 bp, Enterobacter cloacae
atgttagagaatttgaattaccagctgttttatctcatcaacgccactccggcctcgccagagtggatgattgatttcgccaccttcctggcaaaagatctgatcagtatcgtgccggtgctggcggcgatcctctggctgtgggggccgagaagccaggtgaaggcgcagcgtcagctggtaattaagatggcgatggccctcgggatcagcgtgctggtcagctacattctgggcctgacgttcccgcacgaccgccccttcgtcgaccacgcggggtataccttcctgcaccatgctccggatgactcgttcccaagcgatcacgggacggttatctttaccttcgcgctggccttcctgttctggcatcgtctgtggtcgggtgtggtgctgatggtggtggcaggggctatcgcctggtctcgcgtttatctcggcgtccactggccgatggatatggtgggggggttgctggtcggtctcatcggctgcgtcagcgcagcgatcctgtggaatctcttcggtgaagtgctctaccgcggcctgtcttatctgtatcgcaccctttttgctatcccgatccgcaaaggctggatacgtgactaa

SEQ ID NO: 123573 - DNA, 1110 bp, Enterobacter cloacae
atgaacatccccggactgcaggccctggcacgcgatcgtttcttccatctcttattcatcattggcgcagtattaagcatctttgtgccgtttgcgccacacacctggcctgcggtgattgactggcgcaccatcattaccctcagtggcctgatgatgctcaccaaaggggtagagttgagtggctattttgacgtcctgggacgtaaaatggtgcgccgctttgccactgaacgccgcctggcgctgtttatggtgttctctgctgcggtgctgtcgacgtttctgaccaacgacgtggcgctgtttatcatcgtgccactcacgctcacgttgcgtaagctctgcgagatcccggttagccggctgatcatcttcgaggcgctggccgttaacgccggttcgcttctgacccctattggcaacccacaaaatattctcctgtggggacgctccgggctgtcgtttgccgcttttacctggcagatggctccgctggcgctggtgatgatggtgtcgctgctggcggtctgctggttcgcgttcccggtcaaaaaactgcagtatcacagcggtaccacgggcccgcagtggcagccgcgtctggtgtggagttgtctggcgctgtacatcgttttcctgttcgcgctggaactgaagtatgaactggcgggcgtactgctcgtcgccgccggttttttattcctggcgcggcgcgtgctgatcagcgtggactggacgttattgctggtctttatggtgatgtttattgatgtgcatctgcttatccagcttccggttctgcaacacgttctgcacagcgtcagcggcctgtcgcagccgggattgtggctcacggcgattggtctgtcacagttcatcagcaacgtgccttccaccattttactcctcaactacgttccccctgacacgctgctggcgtgggcggtgaatatcggtgggtttgggctgctgcccggttcgcttgctaacctgattgccctgcgtatggctaacgatcgtcgtatctggtggcgtttccatgtctggtcgatcccgatgctgatttgggccgcggcgatcggtttcggaattttccttctcatatag

SEQ ID NO: 123574 - DNA, 159 bp, Enterobacter cloacae
atgaaaaaatcgtgccaactttacaagctgttgttttacaaaggggatgatgtcatgcattgcacagaaaacggggcaatgaacttttattgcaccaaagtggagcaccgttttggtgcgcgtcatttggctcaacagacgaagcgttatttagcgtaa

SEQ ID NO: 123575 - DNA, 990 bp, Enterobacter cloacae
atgcaaatgattaaacagtgctttttcttcctggtcctgggaaccgccgcgttatttatgcctcatgctaacgcgctctgtacctcatccgatctgccaaaacagattaatgtgacctccgtatccgtctcgagcacgttgccggtaggtgccaccattccgggcaccgagcagaccgttcacgtggcgggcaactgctataacccttctgacttcgggcttccgattgttgcgtgctattacggcgcaggtctggagatccccggtctttctggggtgtatgaatcagggctggaaggaattggcgtagcgctgatgaatgacaaaggccagcgaattaccggtgccgggggaatttactgtaactcaagcggcacgccgctgggctatgtctccaacgacatttctgagtcctttaactttaatgtcacgctggaactggtgaaaacgagcaatacggtcaaatcaggttcgctttctcaggcggagtctaaatttggtgtcggggtttatcagcatgaaggcatcagcgatcccaatacgatttcctatgcgggcaatgtgaacctcgaaacggttacctgctctgtcctgcccaaaaatctcaccgtgaacctgggcgattttcccgtcagtgattttatcagtatcgggttgctatccagccctgcacaaaactttgacgtcacgattaattgcgacagcaccgtccagcctgagctaaaggtgaccagcgcaaacggctacgaaacggcattcgaaggggtgatcaaattgactcagcagaacggcatggcaaccggcgtgggcgtgagaatgctctttgatgaccatctcgccacctttgacacctatgtcagcacccgaagccaggccatcgccaacgaaaccctgcgaataccgttcgaggttcgttacgaacaggtcagcaacgtggtgacaccggggccggccaataccgtggcgacgatcactctggcttataagtga

SEQ ID NO: 123576 - DNA, 504 bp, Enterobacter cloacae
atgaaaaagacacttgcgatcctgattctcggcttgattgcccgggcacaggcggacgatattcagatccagatgacaggcaatatttacgccaacacctgcattattgacagcgccagccgcaacctgacggtggatttaggccaggcggtatcaggggattttaaaaatgtgggcgataccggcgcgtggaaagactttacgctctcggtctcgcattgccctcccacacttgcgctggcgaccgcctttttctatggtcaggccgacagtacgcacccgacaaaattcgccaatatcggcagtgcgaaagggttggctctggaactggcagaccgccaggacaatatactcattgccccgcaggcagcctttaacgttccggttaactcagcggaccacacggcaacgtttcctctggctgcccgctattatgcaagcgcattgcccgtcaccgccggaacgtttaacagtgtggtccaggtgacttttacttaccagtag

SEQ ID NO: 123577 - DNA, 990 bp, Enterobacter cloacae
atggcttcacaacttactgatgcattcgcgcgtaagtttttttacttacgtctgtcgattaccgatgtgtgcaacttccgttgcacctactgcctgcccgatggctacaaaccgggcagcgtcaccaataacggctttctctccgtggacgaagtgcgccgcgtcacgcgcgcattctctgaactcggcacggaaaaggtccgactgaccggaggggaaccctctctgcgtcgtgatttccccgatatcattgctgcggtgcgtgagaacgatcgtatccgtcagattgcggtcaccaccaacgggtaccgcatggcccgtgacgttgcgacctggcgcgacgcgggcttaaccgccatcaacgtcagcgtggacagcctcgatgcccgccagtttcatgccattaccgggcaggataaattccgtcaggtgatggatggaattgacgcggcgttcagtgccgggttccagaaagtcaaagtcaatacggtgctgatgcgtgacgtcaaccatcaccagcttgataccttcctggcgtggatcaaatcccgccccatccagttgcgttttatcgagctgatggaaaccggcgagggcagtgagctgttccgtcggcatcacatctccgggatggtgttgcgtgatgagctgctgaaacgcggctggatccaccagattcgtcagcgcagcgacggcccggcgcaggtcttttgtcacccggattacgaaggggaaatcgggcttatcatgccgtatgagaaagacttctgtgccagctgtaaccgtcttcgcgtctcctccgttggtaagctgcatctgtgcctgttcggggatggcggtgtcgaccttcgcgatctgctggcggacgacgcccaacaggccgcgcttgaagcgcggatttctgaagctctgacgcacaaaaaacagacccacttcctgcatcagggcaacaccggcattactcagaacctgtcctacattggcgggtaa

SEQ ID NO: 123578 - DNA, 723 bp, Enterobacter cloacae
atgttgagtctgcgtgcagttaaccagttttacggaagccaacatacgctatggaacgtggatttagattttcccaaaggcatgtgtacaggcgttgttggcctgccggggatgggcaaaacgaccctgatgaattgcatcgccgggaaagtgcctgtcgacagcggcaccatcatctggcacgaagccggtgcaccgccgcgagatttgcttagccagacgccagaacccttcgctggtccgggaataggctatgtcccgcaggacaggcggattttctcccagttaaccattgatgaaaatctgcatatcgccatgcgggcgacagggaagcctgaccctgaagcgaaaagtgacgtttacgacctctttccggaactctatgcgctgcgacaaacccgggccaacacgctttcgccagacgaccagtatcagctggcgctggccaatgcgctggtcatccgtccgcggatgctgattctggatgaaccgatgcatggcgcgggccacagcttcgcccagaagctgagccagctgctggtgcggttaaaccgggaactgggaatgacggtgttgttagctgagcagcagctgtcgtttatccgccgggtcgcggagcgcttttgcatgctgtatcgcgggcgtaacgtggcccagggccacgttaacgagctggatgacgagcttatcgcccactggatgtcgctggaggcaagacgctga

SEQ ID NO: 123579 - DNA, 756 bp, Enterobacter cloacae
atgacacccgtgaataaacaggcgatcgcggcggcatttggccgggccgcgcgcagctattcgcagcacgatgaactccagcgtcagagcgcgcaggggctgcttgctttactcaacgagacccggttccctcaggtgctggacgccgggtgtgggccgggtgccaatagccgacactggcgtgcggccggcagcgaggtgacggctatcgatctgtcgcccgatatgctcgaggaggcccgtcagcagcaggccgcgcaccactatctggttgccgatattgagtccattccgctgccggatgcgcggtttgatctggtctggagccatctggcggtacagtggtgcagtagtctcccgcaggcattaaacgagctttatcgcgtggcacgcccgggcggatgcgtggccttcaccacgctgctggaaagctctttaccggagctcaatcaggcgtggaaagcggtggatgaacaacctcacgctaaccgttttttgccgcacgagcaggtcatccacgcgctggcgggatggcgctatcgctgcgctgagcagaccattacgctgaatttcgacgatgccttcagcgccatgcgctccctgaagggcattggcgcgacccatctgcatgcggggcgtgaaaagaaacctcttacccgcggccagttgcagcgtctggagctggcgtggccgcagcagcgggggcagttcccgctctcatatcaactttttcatgggattattgaacgtgactga

SEQ ID NO: 123580 - DNA, 1158 bp, Enterobacter cloacae
atgacctggcaggcacgtatccattccgcgctcgaagaacggcgggcggcagatgcctttcgcgttcgcaacgtggtagaaaacggcgcaggccgttttctcacccgcgagggccggcagttttgcaatttctccagcaatgattatctcgggctgagccagcacccggcaatcgtccgcgcctggcagcagggggcggagcggtttggcgtcggcagcggcggttcggggcatgtcagcggctacaccacggcgcatcaggcgctggaggaggcccttgccgactggctggggtatccgcgtgcgttgctgttcatttcaggttttgccgccaaccaggcggtcatcaccgcgctaatgggcaaggacgaccgcattgttgccgaccgcttaagtcacgcctcgctgctggaagcggcaagtttaagccctgcgcagctccgccgctttgcccataacgatgcggctcagcttgctggtctgctcgataagccctgcaccggacagcaactggtggtcacagaaggggtgttcagcatggacggcgacagcgcaccgctgcgtccgctgcatgagacggcgcagcgacaaaacgcctggctgctggttgatgatgcgcatggtattggcgtgatgggtgaggaagggcgcggtagcatccatcagcaaaacgtgaagccggaactgctggtggtgactttcgggaaaggttttggcgtgagcggggcggccgtgttgtgcagcgagtctgtcgccgactatctgctgcagttcgcccgtcatctcatttacagcaccagtatgccgcccgcacaggccgtggcgctgtctgcatcactggcggtgatccgcagcgctgaaggcgcggaacgacgggcgcgtctggcggaacatatccggcgttttcgccaggggttacgccatctcccgttccagagcaccgattcgcagagcgcaatccagccggtgatggtgggggaaaacggtctggctctcacgctggcgcagacgcttcgcgagcgggggatatgggtgacggctattcgtccaccaaccgtaccgccaggcactgcccggctgcgtctgacgctcacggcggcgcacgaagcagaggatatcgaggcacttctggaggcgctgcatgacacccgtgaataa

SEQ ID NO: 123581 - DNA, 939 bp, Enterobacter cloacae
atgagactctggcggccggttgccgagaccgtctggcaggggcgcgacgacagcgccgaggccagcaatgcaaaacgtatttttcagaccctacgacagatgccggtatttacccctcagtcatccggcatcgctttgatagggtttgaatgtgatgaaggggtaaaacgcaatcagggcaggcccggcgccgtacaggccccggaggtgcttcgcaaagcgctggcgaacatggcaagtcatcatggacatgaccggctggtggatatggggtcggtatatgtcgagggcgataacctggaagcggctcagcgggcgttaagcgatgccgtgcaggcctgccagcagtccggcatgcgtacgctggtttttggcgggggacacgagaccgcctgggcgcatggccgcggggttctggatgctttcccgaacgcgcgcgtggtggtgataaacctggatgcacaccttgacctgcgcaaggcggaccacgcgacctccggcacgccgtttcgtcagctggcacactactgtgtggaacaggcgcgcgattttcagtatgcctgcctgggcgtcagccgggcggcgaacacgcaggcgctgtgggatgaagctgagcgactaaacgtcacgctggtggaagaccttcatttcaggcgagatgcgttatcggctctggacaaggttctggcccaggccgaccgcgtttacctcaccattgacctcgatgttttgcctgctggcgaaatgccagccgtctcagcgcccgcggcgttaggggtacccgcgctggatcttctgccggtgattgaacatatctgccgcagtggaaaactgcaggctgccgatctggtagaatttaacccgcagtacgatcgggacggacagggggcaaagcttgccgctcgtctggcctggcaaattgctcactggtgggcataa

SEQ ID NO: 123582 - DNA, 789 bp, Enterobacter cloacae
atgcaggccgaaattctcctcactctacgactacagcagaagcttttcgccgatccgcgacgtatcgccctgcttaaacaaatagaacaaaccggttcaataagccagggggctaagaacgctggcattagctataaaagcgcctgggatgccatcaacgacatgaacaccctgagcgagcaaacgctggttgaccgggccacgggcggcaaaggcggtggaggtgcgatcctgacacgttacggccagcgcctggttcagctgtatgatctgctggcgcagatccagcaaaaagcgtttgatgtgttaagtgacgacgataatctcccgctggacagcctgctggctgccatttcccgcttttcgctgcaaaccagcgcccgtaaccagtggtttggtacggtgatggcgggcgataacgcccaggtgcagcgtcatattgagatcctgcttgccgatggaacaacccgtctgaaagccgcgattaccgcacaaagcgcagaccgactggcgctgaatgaaggtaaagaggtgctagtgttactgaaagcgccgtgggtgaatatcactgccgatgccgaaaaagcaaaagccgctgataaccagctacgcggtaccatccgccacgttgaacgcggtgaagagcagtgtgaagtactgatgaccctgccggacgggcaagaactctgcgcaacccttcccctcagcgatgccgcagaattagaagaaggtgctgtggtgaccgcatatttcaacgccgaccgggtgattatcgccacattgtgctga

SEQ ID NO: 123583 - DNA, 381 bp, Enterobacter cloacae
atgaaaatgacgaaactggcaaccctcttcctcacagcctcccttaccctggcaagcggcagcgtccttgccgctgagacgggctcaacagataacaacggtgatgcaaatgccgcggcggcggcgggtcaggtcgcccctgatgcaaaacagaatatcgccccgaataatgtcgataacagccagatcaataccgggaacaccaataccggaggcacaatgttgcatccggacagtagcggctctggcaccatgaatcatgacacgatgagtaccgatgagatgcataagaacaccatgtgcaaagacggtaagtgtccgaattcgaatgacaaagtgggcgacgatgccaataccaaaacggatggcacaacccaataa

SEQ ID NO: 123584 - DNA, 1296 bp, Enterobacter cloacae
atgacagaaagcataacatcgaacgggacgctggctgccagtgattcccgtagaagggtatgggcaatcgtcagtgcctcttcagggaacctggtggaatggttcgacttttacgtctactcattctgttcactttacttcgcacatatcttcttcccgtccggcaacaccaccacacagcttctgcaaacggctggcgtatttgctgcgggcttcttaatgcgccccattggtggatggttgtttggacggatcgcagaccgtcgaggacgtaaggcatccatgctgatttcggtctgcatgatgtgctttggctcgctggtgatcgcctgtcttcccggttatgacgctatcgggacatgggcgccggctcttttgctactggctcgtctgttccagggactttctgttggaggagaatacggtaccagcgccacttacatgagtgaaattgcccttgagggccggaaagggttttacgcctctttccagtacgtcacgcttattggtggccagcttctggccattctggtggtggttattctgcagcaggtgcttaccgacagccagcttcatgagtggggatggcgaattcctttcgcgatgggcgctgtactggcggtcgtcgcactctggttgcgtcgtcagttggatgaaacctcgcaaaaagaggtccgggcgctgaaggaggcggggtcgtttaaagggctgtggcgtaaccgcaaagctttcctgatggttctcgggttcaccgcgggcggttctctcagcttttacaccttcaccacctacatgcaaaaatatctggtgaacaccacgggcatgcacgccaacgtcgccagcgctatcatgaccgtcgcgttgtttgtctttatgctgattcagccacttattggcgcgctctccgataaaatagggcgtcgcacatcaatgctgatctttggcggcatgtccgcgttatgtactgttcccattttaactgcgcttcagcacgtttcctcaccgtacgccgcctttggtctggtcatgctggcgatggttattgtcagtttttacacatcgatcagtgggatcctgaaggctgagatgttcccggcacaggtacgcgctttgggggtagggctttcttatgcggtcgccaatgcactgttcggtggctctgcggagtacgtcgcgctgtcgcttaaatcatggggaacggaaacaaccttcttctggtacgtgacggtgatgggggcactggcctttattgtctccctgatgctgcatcgaaagggtaaaggtattcgtctctaa

SEQ ID NO: 123585 - DNA, 750 bp, Enterobacter cloacae
atgaatctatgcctggtgagtatgtcacacgtcttttcccgcgccgtgcgcgcggtgttttccagcaatatgtttcgcctgagcctgccctgtttatttctggcgggctgtgtttcccatgtgccgcaaagtgcgattagcgataaacaacaagataaatggccagataatcagctggcagattttctgtcgacccgctgtgacgacatctggaacctgtcggggcatgacgttgagagcaatccgctgttctggctacgtggaatagattgcgcccagcgtctggcgccggttgaggcgcgctcgcaagcggcgatgctcagtgacgatacctggcaggacgcgttcaagcgtgggattttactcgcggatgcgaaaatcacccccgtcgagcgtcgcaccaacgtcacgcggctggacacgtttgtcggaaatcttccggcgcaggtgcgcccggtgtatcagctctggcgtgatggtcaggcgttacaactgcagttatctgaagagcgttttcgctacagcaaattacagcaatccaccgacagcgagcttgatacgctgcgccagcaggagcagcacttgcgtgctcaactggataccacaacgcgcaagcttgaaaacctgaccgacatcgaaagacagctctcgacgcgtaaaccggccggaaattatctgcctgacgcgccaaaagggtcagccgcgacgccagacggtgatgcgcagaaacaagaggatgtgaagccatga

SEQ ID NO: 123586 - DNA, 1545 bp, Enterobacter cloacae
atgaaacgagccgtgaacgccctacaaaatttcggaaaatcgttgtacggaccggtacttatcttaccgatcgtcggtctgtttatcgcattcggtaacgtcctggggaacggtaacctcgcagagtatgtgccgtttctcggccatccgctgattcagcatattggtcagcttatcgcgaaatcggccgtgtcagttctggttaacctggcgctggtgtttgccgtcgggataccgattggcctggccacgcgtgataaaggctatgcggccctgatcggcctggtgaccttcgttgttttcattaacgcgatgaacgttacgctgcagctccagggcgaactggctcccgctgaccagatgaaagccgccgggcaaagtatggtgctgggcgtgcaggtgctggagatgggcgttttcgccgggatcctgaccggggcgctgtccggatacttgtacaacaagtactccggcgtacagtttaacggcgcgatggccatctattccggccactgtttcgtcgccatcgtcatgcttcctgtctcaatgctgctcggcgtcgtgatgagcgaactgtggccatttgcccagcatggcatcagcgcactggcgctggcgatcaaaggttccgggccttttggggtggccatttacggcttcctggaacgcattctggtgccgaccggcctgcatcatctggtctatacccccttcctgtataccgaacttggggggacgcaagaggtatgcggcacggtttatcagggcgcacgcaatatctatttcgccgaaatggcttgtccggaagtgaagcagttgagcagcacggtagtgtgggacgcgcgcggcatcagcaaaatgtttggcctgcccgcggcggcgctggcgatgtacatgaccgccaggccggagcgcaaagcggcagccaaagccatcctgatcccggcagcgttaacctctttgctggtgggcgttaccgagccgattgagttttcattcctgttcgtcgctccgctgctgtttgtggtacatgcggtgctgaccggcatcggcatgatgcttttctccctgttcggtgttcatgccatcggcgctaacggaattatcgattttattctttataacctgccgctcggcacggagaagtccaactggccgatgtacatcgtggtcgggctcatcatgttcgcgctctattttgtggtgttccgcttcctgatcctgcgcttcaacatgaagacgccgggacgcgaggatgacgatcaggagacgcgcctgtacagcaaacaggagtatcaggcgaaggggaacaatgacgggctgggtgaatccatcgtggtgggactgggaggccgggaaaacattgaggtagtggataactgctacacccgcttacgcgtcacggtgaaggatgtctccatcatcgacgagccgcgcctgaaagcgaccggcgcgaaagggattatcaaacaaggtaacaacgttcaggtggtctacgggctgcatgtcaaaaaaatgcgagaagccgttgagacgtttctctga

SEQ ID NO: 123587 - DNA, 4953 bp, Enterobacter cloacae
atgacaccgtttcgcttagccgcgatttctctcgcgctgcttaccacattttcgcttgtcggctgtgataacagcgacgataactctcaggctgcggctcccgcagcatccacagcaacgacaccgaaagcaccggaaaagccggacgctgaaaagctggcaacgctggccgcacagagtcagggcaaagcgctcaccctgctggatacttcagaggtgcagcttgatggcgcggccacgctggtcctgaccttctctgttccgcttaatcccgatcaggatttcgccaaaacagtgcatgtggtggataaaaaaagcggcaaggttgacggggcgtgggaactcgcacctaacctgaaagagctacgcctgcgccatctggaacccaaccgcaatctggttgtcaccgttgaacgtgatctgcaggcgctgaacaaagcgacatttggtatcgattacgaaaaagccctgactacccgggatgttgaaccgacggtcggttttgccagccgtggttcactgctgccgggcaaggtggtggaaggtctgccggtaatggcgctcaacgtcaacaatgttgacgtgaatttctaccgcgtgaagcctgaatccctggcctcctttgtcagccagtgggagtaccgtaactccctgaccaactgggagtccgataatctgctcaaaatggcggacctggtgtataccggccggtttgacctcaatccggcacgcaacacccgtgaaaaactgctgttgccgctgcgggatattaagccgctccagcagtcaggcgtgtacatcgcggtcatgaatcaggccgggcactataactacagcaatgccgcgacgctctttaccttaagtgatattgggttgtccgctcaccgttatcataaccgtctggatattttcacccagagcctggaagatggcgcggcgcaatccggcgttaccgtcaccctgttgaatgataaagggcagacgcttgccgaagcgaacagcgatgctgacggccacgcaaaacttgagactgacaaagaagccgcgctgattctggccagtaaagacgggcagaccacgctgcttgacctcaagcttccggccctcgatctggcggagtttgatatcgcaggtagccctggctacagcaagcaattctttatgtttggcccgcgcgatctctatcgccctggcgaaacggtgatcctcaatggtttgctgcgcgacagcgacggtaaaccgcttcctgcccagccggttaaactcgacgtaatgcgcccggacggacaggtggcgcgtacggttgtcatccagcctgagaacggcctctatcgcttcaattattccctggacggcggggcgcagacaggtatgtggcatatccgcgccaataccggcgataaccaacagcgcctgtgggatttccacgttgaagattttatgccggagcgtatggcgcttaatctgacgggacaaaaagcgccggtttccaccgaggataacgtcgactttaacattgcgggttattacctgtatggcgcacctgccaacggaaattccctgcaaggccagcttttcctgcgaccgctgcgcgaagccgtcgctgcactgccgggcttccagttcggtgatatcgccgaagagaacctgagccgcagcctggatgaagttcagctaacccttgatgaacaggggcgcggacaggtctcgaccgaaagccagtggaaagaggcgcattcaccgctgcaactgatcctgcaggccagccttctggaatcgggcggtcgcccggtgacgcgccgtgctgagcaggccatctggccggcggccgagctgccgggtatccgtcctcagtttgccagtaaggccgtttatgactatcgcactgacactaccgtcaaccagccgatcgtggatgaaaacggcaatgccagctttgatatcgtctatgccgatgccagcggggcaaaaaaggcggtttccgggttacaggttcgcctgatccgtgagcgccgtgactactactggaactggtcagagagcgatggctggcagtcacagtttgatcagaaagacctggtggagggcgagcaggcgctgacccttaaggccgatgaaaccggtaaagtgaccttcccggtggagtggggctcgtaccgtctggaggtcaaagcgccggacgacatggtcagcagcgtgcgcttctgggccggctacagctggcaggataatagcgacggcaccggagccgctcgccctgaccgtgtgaccatgaaactggacaagccttcctatcagccgggagataccatccagctgcatatcgctgctccggcggcgggtaaaggctatgcgatgatcgagtccagcgaagggccgctgtggtggaaagagatcgacgtaccggccaacgggctcgatctctcaatcccggtggataaggcctggaaacgtcacgatctctatctcagcacgctggtggtacgccctggcgataaatccaaatcagcgacgccgaaacgtgccgtcgggttactgcatctgccgatgggcgatgagaatcgccgcctgaatgtcgcgctggaaaatccgcagaaaatgcggccaaaccagacgctgtccgtgaaggtgaaggccagcgtcaaagaaggcgccgttccgcagaaagtgaatgtgctgatctcggcagtggacagcggcgtgttgaacatcaccgattacgttaccccggatccgtgggaagcgttcttcggtcagaagcgctacggcgcggatatctacgatatttacggtcaggtcattgaagggcagggccgcatggctgcgctgcgctttggtggtgacggcgatgagcttaagcgcggcggtaaaccaccggtgaaccacgtgactatcattgcccagcaggcgcagccggtcgagctcgatgctaacggtgaagggaccgtgacgctgcccattggagacttcaacggcgagctgcgtctgatggcgcaggcctggacggaagatgatttcggcagcagcgaaggtaaagtgattgtcgccgccccaatcattaccgaactgaacacgccgcgcttcctggcaagtggcgatacctcacgcctgacgctggatgtgaccaacctgacggaccagccgcaaacgctgaacgttgcttttaccgctaccggcaagctgtcgcttgagggcgcacagccgcagcccgtgaagttaccgccgggcgcgcgcagcaccctgtttatcccggtacgtgcgctggatggctacggtgatggtgaagtgaccgctcaggtgaccggcctgcagctgccgggcgagactttcgctgcacaacagaagagctggaaaatcggcgttcgtccggcattcccggcgcagaccgttaacaccggtgccatgctgaatcctggtgagtcgtggagtgcaccggcgcagcaccttaatggcttctctcctgccacgctacagggacaattgctgctgagcgggaaaccgcctctgaatctggcgcgctatattcgtgagctgcaggcatacccgtatggctgtctggagcaaaccaccagtggtctgttcccgtcgctctacaccaacgcggcgcagttgaccgcgcttggcatcaaaggggatacggatgacaagcgccgtgcggccattgatatcgggatctcccgtctgctgcagatgcagcgtgatgacggaggtttcgcgctttgggataaaaacggtccggaggagtactggctcaccgcctatgtcactgacttcctggttcgtgcaggcgagcagggctacagcgtgcctgctgaggcggttaacaacgccaacagccgcttgctgcgttacctgcaggacccgggtatgatgtccatccgctacagcgatgatacccaggccagtaaatttgcggtgcaggcctatgccgcgctggtgctggctcgccagcaaaaggccccgcttggtgcgttgcgtgaaatctgggaacgtcacggacaggccgcttccgggctgccgctgatgcagctggggatggcgctaaaattgatgggcgacgcaccgcgcagccagcaggcactgggtctggccatcaaaacgccgcgtaacgacagcaaaaactggatggccgattatggcagtgcgcttcgtgataatgcgctgatgctctctctgcttgaggagtacaagcttctgccggatgcgcaaaatacgctgttgaacgccttgtcggaacaagctttcagccagcgctggctctcgacccaggagagtaacgccctgttcctggccggacgctcgctgcaaactttatccggcgcatggcaggcgcaaacgtctctggcggatactgcatcaggcggtgataaagccctggtacagaacgtgaacggcgaccagcttggcgcgctgcaggtgacaaataccggtagcacaccgctgtgggtacgccttgatagcaccggttatccggcatctgcacctcagccatcgtctaacgtgctgcagattgagcgccatattctggcaaccgacggcagcacaaagtcgctcacgtcactgaagagcggcgagctggtgctggtatggcttgaagtgaaggccagccagaacgtgccggatgcgctggttgtcgatctcctcccggcgggactggaactggaaaaccagaacctggcgagcagcagcgccagcctgcaggacagcggcagcgaagtgcagaacctgctcagtcagatgcagcaggcggatattcagcatatggaattccgcgacgatcgctttgtggcggcggtgccggttaacgaagggcagccggtcacgctggtttatctggcgcgcgccgtgacgccgggaacctatgaggtgccggtcccgatggtggagtccatgtatgttccgcagtggcgggcaacaggtgcggccagtggcccgctgattgttgtaccgtaa

SEQ ID NO: 123588 - DNA, 1035 bp, Enterobacter cloacae
atgctgttagggtttgttgggcttggcgcggtggtggaaaccgcttatttacctgcattacacaatctgtatggcgattcactgcactgcctgggtttcgatgttcagcctggcaggcaccctgaaggcgtaacgcgctgcgcctctctcaccgaacttctctcgcatcctcttgataccctgtttattaccacggcttctctgcagcatcttgaggtgctggagcacgccctggtgtctcctgtggcgcggatcgtggttgaaaaacccatcgtcgccacgctctcgcagctcgaaaaactgaacagactgctggcgttgcccggtgcggcgtcccgtgtgctcgcacttgaccactggatggcgcgcctcgcaacggttcagcttgggctgatcgggacttttgctgatatcgccagaattgacggttttttgcaggaaccgagcgggtttaacgcaaaaggagaacctgtcgcgcttaacttcgccacgggtgaagtggacacccgcacgcttcgccatcctgacggcgttatcctggacatcggcacgcatgtgctggcgatgctgcgtgaaacggtgcgttatctggggggcggggatgatatgacgctgcaggtggtggccgctactgaccggcttgggcgtgagatcaaacagggcgatctcaccacggcagagggcagcgctcatcttcgcgggcagcttagtggcattccggtggagatttggctcaacaaatatgcgggaccgtcaggcgggcaaaaagggttacagctgtatctgcatgacgggcgcgtcataagccacgatcgtcacggagcggaagatgtgctcgtgctgacggacggcgatcgggttcagcgctggcatattccaggcacgatttatacgcactgcctggcagagcgcattctggggcagaaaagtctgttcgaatgtgacccggaagaagtgagccggacgacacgccgtcgaatggcggaagtagaactgttgctgaccttacagcaacagctgcgtggcccgcactga

SEQ ID NO: 123589 - DNA, 222 bp, Enterobacter cloacae
atgtcgattacctgcccggattgccacgcagagcttgaagcgcaaaatggcgtcgcccactgtgagcactgcgataaggatatctcgctcgaagcccgctgcccggagtgtcatcagccactccaggtcttaaaagcctgcggtgcggtggattatttctgccagaacggccacggcctgatttcgaaaaagcgcgtggagtttgtcccggctgaagcttaa

SEQ ID NO: 123590 - DNA, 831 bp, Enterobacter cloacae
atgaccacagcaaccagcctgaatgagctgcagcagcaaatccgcgatcgctacgatagcctgagcaagaggctgcagcaggtctcccgctatgtgctggataataccaacagcgtggcctttgatacggtcgccgtcattgccgagcgtgccgatgtgccgccgtcaacgctgatccgttttgccaatgcttttgacttcaccggcttcaacgagatgaaacagctgtttcgtatgaacctggtggaagagaccgccagctacagtgaccgcgcccggctgtttcgcgaaatggaaagtcaggccgtcccggaaactccgcttgatattttgcaggagttcgcccgttcaaatgcgcaggccctccagcagctggccgcccgcgccgagccggagatgctggagcgcgccgtacaactgctggccgaagccgacacaatctatatcgccgggttacgccgctcgtttagcgtcgccgcctatctgacctacgccctgagccacctggagtgccggcctattctgctcgacggaatgggggggatgctgcgtgagcagatcaaccgcatcaaggcgcaggacattgtggtatcaatcagcttctcgccgtatgcggaagagacggtgatggtcagcgaaaccgccgccagcgtcggcgcgcggcagattgtgatcaccgacagccagataagcccgctggccaccttcagcgatctctgttttgtggtgaaagaggcgcaggttgacgcgtttcgctcgcagtcggcgacgctgtgcctcgtgcagtcgctggtggtagcgctggcatatcggctgggcagtgggaagtaa

SEQ ID NO: 123591 - DNA, 1506 bp, Enterobacter cloacae
atggagacggtagcgaattttattcacggcgagtgtgtcaccggttcaggccagcgcgttcaggcaatcttcaacccggccaccggagagcagatccgccaggtggtgatgagtacggcacaggaaaccgaacaggcgattgccgcagcacagcaggcatttcctggctgggcgcgtcattctccacttaaacgcgcacgcgtgatgttccgcttcaaagcggtgctggaagagaacatggagcgcctggcccgcatcatcagcgaagagcatggcaaagtcttctccgacgcggtgggcgagctgacccgcggcctggaagtggtggagtttgcctgtggcatcccgcatctgcaaaaaggtgagcactccgctaatgtcggcaccggtgtcgacagccactcgttgatgcagccgctcggcgtatgtgccgggatcacgccgtttaatttcccggcaatggtgccgatgtggatgttcccgattgcgctggccaccggcaacacgttcgtgctgaaaccgtcggaaaaagatccctctctggcgctcgcgctggcaaaactgctgaaagacgccggcctgccagacggcgtgtttaacgtggtgcagggcgataaagagtcggttgacgtgctgctgactgacccgcgcgtgcaggctgtgagctttgtcggttcaacgccgatcgcccaatacatttacgagaccgcctccgcccacggtaaacgctgtcaggcgctgggcggggcaaaaaaccactgcatcttaatgccggatgccgatatggatatggcgacgaacgcgattatgggcgctgccttcggcgcggcgggagaacgttgcatggcgctgtcggtggtgctggcggtgggggataacactgctgatgaactctgttcccggctggaaaaacagattgccgcgctgcgcgtcgggccgggtctggaccagacgccagagaacgaaatggggccgcttatctcctcggcacaccgtaacaaagtgctgggctatatcgacagcggggaaactcagggagcccgcctgcgcgtggatggccgtgggttcagcgtgaaaggccacgagcagggctattttgtcggaccaacgctgttcgataacgtcacgccggagatgaccatttataaagaagagattttcgggccggtactttctgtggtgcgtgttgcagattacagcagcgcggtggacctgattaaccggcatgaatatggtaatggctcggcaatatttacccgtgacggtggctgcgcgcgccgcttctgcgaagaggtgcaggcggggatggttggggtgaacgtgccgatcccggtgccgatggcgttccacagttttggtggctggaagcgttcgatctttggtgcgctgaatgtccacggcaacgacggcgtgcgtttctacacccgaatgaaaaccatcaccgcacgctggccggaaatgcagcaggagactggcgctgcgttctccatgccgacgctgggctga

SEQ ID NO: 123592 - DNA, 1926 bp, Enterobacter cloacae
atgcaaaccgaacgtatgaccatggctcaggccctggtcagattccttaatcaacagtatgtctccattgatggacacgaaacgcccttcgtggagggcgtggcgaccatttttggtcacggcaatgtgctgggtatcggccaggcgctggagcaggatcctggccacctgcaggtgatgcaggggtgtaacgaacagggcatcgcccatatggcgaccggattcgctaaacagcatcgccgtcggcgcatttttgccgtcacctcatccgtcgggcccggcgcggctaatatggtgacggccgcggcgaccgccaccgcgaaccgcattccgctcctgctgttaccgggggatatctatgccagccgccagcccgatccggttttgcagcaaatcgagcagtaccacgatctcagtatcagcaccaacgactgcttccgtcccgtttcacgctactgggaccgcattaaccgtccggaacagttaatgagcgcgatgttaaatgcgatgcgaacgcttactgaccccgcagcgacgggggcagtgaccatttgcctgccgcaggacgtacagggcgaagcctgggattatcccctgagcttctttgcgcgtcgcgtgcatcacattgaacgccgtccgcctgacccccagcgtctggcccaggcacaggcgttgattgcccgtaaatgccgtccgctggtggtgtgtggcgggggcgtgcgttattccggcgcgcatgaggcatttcgggaatttgttgagacgctgcagctgccgtttgccgaaacccaggccggaaagggggcgctggtaagcgatcacccccttaatctgggggggatcggtgtgacgggcggaatggccgctaaccagcttgcacccagggcggatttggtgattggcatcggcacgcgcctgacggactttaccactggctctaaagcgctcttttcccatccggacgtcgagttcctgcttttgaatgtcgccgagtttgatgccctgaaactggatgccacggcgctgattgccgatgcgcaaaccgggctgcacgctttaacgcaggcgctccccgcgtaccgaagccactggggagaggagatcgctcaggcgaaatctgcctggcatgctgagtgccagcgcttatggggccgtcagtggcatcccgacgatgcgcctgaagtggcaggacaccttgatgcgcagctggcggaatacggtgaggcgctcaacacccgtctgacccagacgcgggtgctggggcttatcaatcaacatatcgaagataacgccatcgtcgtgggcgcggccggatcgctgcccggggatttacagcgcctctggcaggtgaagacgccggacagttaccacctggagtacggctactcctgcatggggtatgagattgccgcggcgataggcgcgaagcttgccagcccgcatcagccggtttacgccatggtgggggatggctcctacatgatgctgcactccgagctacaaaccgcggtgcaggagggaatcaacgtcaccgtcctgctgtttgataacgccagcttcggctgcattaataacctgcagatggggcatgggatggggagcttcggtacggaaaaccgtcatcgaaatccagattcaggccggcttgacgggccgctggtgaaagtcgatttcgcccagaacgcggaaagctacggctgtcgcgcgtggcgggtccacgacgagcagagtctgctggcggcgctggcggcgtcgcgggcgcatcctggcccaacgctgctggatatcaaagtgctgccgaaaaccatgacccatgattacgcgtcatggtggcgaaccggtgatgcgcaggtcgcgggatcgcctgcggtgcgcaaagccgctgagcaaacccaggcgcagctgaaaaaagcacgccagtattaa

SEQ ID NO: 123593 - DNA, 987 bp, Enterobacter cloacae
atgtttaacattgctttactgggcgctggccgaattggccaggtacatgcagctaacatcgccagccacagtgagaccacgctctggtctgtggtcgacccgaatcaggaatttgccacccgcctcgccacgcaatatcaggctcgtttgcagagcctggaggacgcgatgagcgacccaaacgttcatgccgtgctgatcgcgtctgcgaccgacacccacgcggatctgattgagatggccgcccgccacggcaaagcgatcttctgtgaaaagccggtgcacctggatcttgcccgcgtgcgcgactgcctgaaagtggttaacgagtacaacgtaccgctgtttatcggttttaaccgccgctttgacccgcagtttcgccgggtcaaaaccgaggtacaggccgggcggatcggtaagcccgaatcgctgctgattatctcccgcgacccgtccccgccaccggcgcaatatgtgcgcgtttccggcggtatgttccgcgacatgaccattcacgattttgatatggcgcgcttcatcatgggcgaagagccggtgtcggtatatgcccagggcagcaatctggtggatccggcgattggcgaggcgggggatatcgataccgcgtttatcgtactgaagtatgcctccggcgcgatggcgaccatcgtcaacagccgccgctcttcttacggctacgaccagcgcctggagctgcacggctcagagggcctgctgtgcgcgggcaatattcttgaaaatcaggtgcagcactacggcaaacagggctgcaccggcgcgctgccggaacacttcttcctgcagcgctacaaatccgcttacgccgcggaatgggaacactttgttgcggtgctgcgcggcgaagcgacgcctgactgtagcggcgacgatggtgaacgtgcgctgtacctggcggataaagcgctggaatccctgcgtagccagcgtgagatcgtcctctaa

SEQ ID NO: 123594 - DNA, 930 bp, Enterobacter cloacae
atgaaaaaactgatcttagccgccctcatcgccatgaccgccggggcagcaatggccgaaaacgagcaaatagttttcagtacaccaaacctggcgatgccgtttgaagttcacatgcagcgtactgcggtaaaagccgcaaaagagatgggcgtaaagcttcaggtactggacgggcagggcagctcgccgaaacaggtcgctgacctggaaaacgccatcacccgtggtgcgcaggggttcatcgtctccccgaatgacgtcaatgccgtctccagcgcggtggatgaaattcaggatgcgaatctgcccgttgtgacgcttgaccgctccgtcgacagccagaagaaggtgccgcattttggtgccaacaactacaaaggcggccaggcgattggcgacttcgttaaaagcaaattccccaacggggcagacattattctgctcaccggccagccaggttcctcctccaacattgaacgtaccaaagggatccgagacagcctgaaggcgggcggggacaagtacaagatcgttgccgatcagaccggcaactggatgcgttctgaagggatgcgcattgtggaaagcgttctgccgtcactgccgaaacgcccacaggtgatcctctccgccaatgacgacatggcactgggcgcaattgaagcgctgcagggccagggcgtgaagccaggcgaaattctggtgaccggatttgacgcggtccctgaggcgctggcgcgcgtgcgcgacggctggctggcggtcacggcggatcagcgcccgggcttcgcggtacaaacggcgatgagccagctggtggccaacgtgcgtgagaagaaagccatcaccggcgcggactacccgccaacgcttatcaccaaagaaaatctgcagcaggctgagcgcatcagtgaggccggtaactga

SEQ ID NO: 123595 - DNA, 1548 bp, Enterobacter cloacae
atgtcgcaacccttactgaaagtgaccgacctggcaaaaagcttttctggcgtctgggcgctgagcagcgcacagctcaccgtcggtgccggggagatccacgcgctgctgggtgagaacggagcggggaaatccacgctgctgaaagccctggcgggcgcacagccgcaaacgtgcggggatatctggttcaacggcgacacgctgccggtggacgattcaccggttgagcggcagaacaagggcattatcactatctatcaggaatttaacctgctgcccaatatgaccgtcgcggaaaacatgtttctcgggcgcgagccgcgtaaacgtaacctgattgtcgacgaaaaagcggtgaaccaggaggcgcaggtgatactcgattatctgcagttgaacgttgcgccaaccacgcctgtcgcccgtctgagcgtagcccagcagcagatggtcgagattgcccgggcgctgacgctgaacgccaagctgatcatcatggatgaaccctccgcggcgctgagcgacagcgaggtggaaagcctgcaccgcgtggtgcgcgagctgaaaaaccggggggtgagcattatttacgttacccaccgactgcacgaagttttccagctttgcgatcgctttaccgttttccaggacggccgtttcaccggcagtggcgccgtggcgcaaaccaatgtcgagcagctgatccgtctgatggtggggcgtgacgtggcctttaatcgtcgtcccgccagcgaaacccatcatgaaaacaagccggtccgtctggcagtaaaagggctaagccgcgaaaaaccgccgctggatccgcacggcattgccctgcatgacatcagcttccatgtccacgccggagaagtactgggcattgccggcctggtgggggcagggcgcaccgaagtggcgcgctgcctgttcggggcggatgcctttacctcgggcagctttgaactggacggcgtcccgtatcaaccgcgcgacccaatgtacgcccttgagcagggcatcgcgctggtcccggaagatcgcaagaaagagggggcggtgctggggttatcgattcgcgacaacctgtcgctctccagtctctcttctctgatgcagtggcgctggtttgtgaatacccgcaaagaggacgatctgattgagtcctaccgcaaggcgctgcagatcaaaatggtcaacagcgcgcaggaggtgcgcaagctctccggcggtaaccagcagaaagttatcctggcgcgctgcatggcgctgaaccctcgggtgctgattgtcgatgagccgacgcgcggtattgacgtgggcaccaagtcggaagtgcaccaggtgctgtttgatatggccaaacagggcgtggcggtgatcgtgatctcctccgatctgcctgaagtgatggcggtatccgatcggatcatcacgctcagtgaaggccgggtgaccggtgagatccacggcgacgacgctaacgaagagcggctgatgacgatgatggccatcaaccacaacgccctcaacgcggcataa

SEQ ID NO: 123596 - DNA, 1029 bp, Enterobacter cloacae
atgacgcagatgatttctaaaacgcaggttccggtgaaacgtagcggacgcctcgatcccatcgccttcttcgagcgcttcggggtactgattttcatgatcctgctgctgattttctttcagtcgcagaacagcaattttttctctgaacgcaatattttcaacatcctgaccgaggtgtccatctacgggatcatggccgtggggatgaccttcgtcattctgactgccggtatcgatctttctgtcggctccatcctggcggtctgcgccatgaccgccgcatacgtgattaagggcgacaacttcaccaccgttgatccgaacgcctggggcggcatgagctggctgattgggctgggcatttgtctggcgatgggcacggcgattggcttcctgcacggcctgggcgtaacccgcctgcgcctgccgccgtttatcgtcacgctcggcgggatgaccatctggcgtggcctgacgctggtgatcaacgacggcgcgcccattgcaggtttcgacccgggttaccgctggtggggacgcggggagctgcttggcatctccattccaatctggattttcgccatcgtggcgcttggcgggtatctggcgctgcataaaacccgctggggacgcttcgtctatgccatcggcggtaacccggaggcagcgcgcctggcgggggtcaacgtgaagcgcgtgctggtgagtgtctatgtgctgattggctgtctggcgggactggcgggcttcattctcagcgctcgtcttggcagtgcggaagcggtcgctgggatctcctttgaactgcgcgttatcgcctcggtagtcatcggcggcacttcgctgatgggcggctatggacgcatcggcggcaccatcattggttccatcattatggggatcctgattaacggtctggtgctgatgaacgtctcggcctattaccagcaaataatcaccggattaattatcgttctggcggtggcattcgacacctatgccaagagccgtcgcggcgcattgtga

SEQ ID NO: 123597 - DNA, 1134 bp, Enterobacter cloacae
atgaaagaggttcgtattggattgattggcaccgggtatatcggcaaggcacatgccatcgcctatgcccaggcgccgacggtatttaccctgcgcggcaaactggtgcgcgagatggtggcggaagtgacgcccgcgctggcggcagagcgggcgcaggcctttggcttcaaccgctcaaccggcgactggcgggcactggtggctgacccggcgattgatgtcgtggatatatgctcgcccaaccatctgcataaagagatggcgctggaggccattcgccacggtaagcatgtctactcggaaaagccgctggcgctgaatgcccatgacgcacgtgaaatggtggacgccgcgaagcgggcaggggtgaaaacgctggtgggttttaactacatgaaaaacccgacggcacagctggcgaaagagatcatcgcccgcggcgagattggcgaggtgatccacttctacggtacccacaacgaagattatatggccgacccgctttctcccattcactggcactgttttaaagagaccgccgggctgggtgcactgggggacctggcggcgcatatcgtcaacatggcgcagtatctggtcggggacattcagcaggtctgcggtgatttaaaaattgttgtgcctgaacgcccggcgcaggccggttcgtcgcaaaacgttgcggttgaaaacgaagatcaggcgcacgcgatggtccgtttcgccggcggagcacaaggggtgattgaaacgtcccgcgtcgcctgcgggcgcaagatgggactgtcgtatgtgataaccggcaccaaaggggccatcagttttacccaggagcggatggcggaactgaagctctatctgcatgacgacccggtaaaccgccagggattccgcacgctgctcgtgggtccgtcacatccggactatggtgcgttttgcatgggggcgggccatggtatcggctttaacgatcaaaaaacggtggaagtacgcgacctggtcgacggtattgccgctgatgtgccgatgtggccggactttgaagagggctggaaggtttcgcgggtgctggacgccatcgcaatctcgcaccaggaaggccgctggctgaacgtgaacgacattgtctga

SEQ ID NO: 123598 - DNA, 1905 bp, Enterobacter cloacae
gtggaaaagcagtttgatgtgatatgcatgggccgcgtggcggtagacctctacagtcagcaaattggtgcccgtcttgaggatgtgtcgagcttcgcgaaatatctcggcggctcgtccggcaacgtagcctacgggacggcgcgtcaggggctgcgctcatcgatgctggcacgcgtcggtgatgaacatatgggacgcttcctgcgagaagagttacaccaggtgggctgcgataccagccatctgatcaccgacaaagaacgcctgacggcgctggtgctcctcggcattaaagaccgggacacctttccactgattttttatcgcgataactgcgcggatatggccatcaaggccagcgatgtggatgaacgctacattgcctccgcacggtgccttgccatcaccgggacccacctctcgcaccctcagacccgtgacgcggtgctgacggcgcttaactatgcccgccgtcacggtgttcgcacggtgctggatatcgactaccggccggtactgtgggggctgacctcattaggggacggggagacacgctttattgccgcagaaaacgtgacccgtgaactgcaggaggtgctgcaccttttcgacgtcattgtcggcaccgaagaagagtttcacattgcaggtggcagtaccgataccctgcaggcgctgggtcgcgtgcgcgccgtgagtaacgctacgctggtttgcaagcgtggcgcgcttggctgttcggtgtataccgacgctataccaccccggctggatgagggtctgacggtgaccggcgtgcgcgttgaggtgctgaacgtgctcggtgcgggcgacgcgtttatgtccggcctgctgcgcggctaccttaacgacgaaggctgggagcaggcctgccgctatgccaacgcgtgtggcgcgctggtggtttcccgccacggctgtgccccggcgatgccgagcaaggctgagctggacgactacctgtcgcgtgcggcgtcggtgccgcgtcccgatcttgactcgcgcctgaaccatctgcaccgcgtcactacccgccgccgcgagtggccggagctgtgcgtgatggccttcgatcatcgcagccagctggaagatatggcgttgcagtgcggggcatccctgaagcgcatcccggcgctgaagcagcttattctgcaggccagccgtgaggcggccagcagcgcagggcttgagggcaaagctggcctgctgtgtgacggtacttttggtcaggacgccctgaacgcgattaccggtgaagggtggtggataggccgccctattgagctgccgggctcccggccgctggagatggagcacggtaacatcggcacgcagctcatcagctggccgcaggaacatgtggtgaaatgcctggtctttttccatccggaagatgcgcacggcctgcgtctggagcaggagcagaaaatcgcagaggtctaccacgcctgctgccagtccggtcatgaactgctgctggaggtgatcctgcctgcgagcatgccgcgcagcgatgagctttacctgcgcgccatctcgcgtttttacaacctggggatttatcccgactggtggaaactgccgccgctctctgccgatggctggacggcgctgagcgagattattgaacgtcgggatccgcactgtcgtggcgtggtgatcctcgggctggacgccccggctgagcagcttcgtgctgattttaaagccgcctcgggacacgcgctggtgaagggctttgccgtaggacgcacgctgtttggcgatgcgtcccgtgcatggctgaaacacgatattgacgatgcgcagctggtggcacgcatccgggacaattacctgcagcttatcgcctggtggcgcgagcgcggacacgcataa

SEQ ID NO: 123599 - DNA, 891 bp, Enterobacter cloacae
atgagtgtgcaattaggcattaacccgctgacatggacgaacgacgatctgccttcactcggcgcggagacgccgctggatacctgtctgagcgaagggaaagaggccggttttgccggtttcgaactgggcaataaattcccgcgtgaggcgcgcctgcttggccccattttgcagcgccacgatctgcagctggtctccggctggtattcagggcgtctgctggagcgtagcgtggaggaggagattgccgccgtgcagtcccacctgacgctgctgcgcgaactgggggcaaaggtgctggtattcgccgaagtgagcggctgtattcacggcgagcaacagacgccggttcatcttcgcccgcgcttcccgcacgcgcgctggcaagagtacggcgagaagctgaccgcttttgcccgctacacgcagcagcagggggtgcagattgcctaccatcaccatatgggaacggtcattgagtccgctgaagatgtcgataacctgatgacccataccggtgaagaggtgggcctgctgctggacacgggccatctgacctttgccggggctgatccgctggcggtggcccagcgctgggcatcgcgcattaaccatgttcactgcaaagacgtgcgcgccgacgtgctggcggacgtcaaaaaccgcaaaaccagcttccttgatgcggtgctgagtggggtcttcaccgtaccgggtgacggctgcgtggactatccgcccatcatgcgactgctgaaggcgcaggattatcacggctggctggtggtggaggcggagcaggatcctgctatcgctcacccgctgacctacgcccgtctggggtataacaacctgagccgcatggcgcgcgacgccgggcttatctga

SEQ ID NO: 123600 - DNA, 813 bp, Enterobacter cloacae
atgtcacgtctgttatcacgctggcaaccgccgagtgcggagggccgtacccagtccgtcacgccggaacgcgcgggctggggatacgttggctttgaagcgtatgaactgcaggaagggcagacgctgacgctgcccgccgtcagcgaagagcgctgtctggtgctggtggccggacgggcctctatcagcacacctaccgcgcagtttactgacatcggcgagcggatgagcccgtttgagcgcataaagccctgggcggtctacgtcacgccgcaggagacggtgcagattaaggcgctgaccacgctggagctggcggtctgtgccgcacccggcaaaggatccttcccgacacggcttatcgctccgcaggatatcgacgcgcaggcgcgcggcaaaggccataaccagcgctacgtgcacaacattctgccggaagatcaacccgccgacagcctgctggtggttgaggtctggaccaacgaaggctgcaccagttcatacccgagccataagcacgatacggataatccaccgcaggaaacctacctggaggagacctactatcatcgcctcaatcccgggcaggggttctgcatgcagcgggtctataccgacgacaggtcgctggatgagtgtatggccgtttataaccgcgacgtggtgatggtaccgaaggggtaccatccggtggcgacgctggctggttatgacagctactatctcaacgtgatggccggtccggtgcgaaaatggatgttcacctgggaagacgatcacgcgtggatcaaccgcgactatccgcgttga

SEQ ID NO: 123601 - DNA, 1218 bp, Enterobacter cloacae
atgtcacatgcgtcaccactaccgtcagatcgaaaaaccgggcacgtccgctcaggcgacatgccgcgtagcctggtgtggctgttcgccctcgccagcggcctaagcgtggccaatgtctattacgcacagccgttgcttgacgcgttgtccagagactttggcatcagccatggtgccattggcggcgtggtcaccgccacacagattggctgtgctctggctctgctgttcgtggttcctctgggggataaagtggatcgccggcgcctgatggcgctacagcttgtcgtactggtcgccgcactggtcacggtcggcatggcgcagacgtcaacgatgctgctggcgggtatgctcgccaccggcatggcaggaacggccatgacgcaagggctaatcgcctatgccgccaacgccgcgtcgccgcatgagcaaggccgcgttattggtgcggcacaaggcggggtatttatgggcctgttagtggcccgcgtcgtctccggaggcatcagtgatatcgcgggctggcgtggcgtgtatctctctgccgccgggctgatggtcattattgcgtttccgctgtggtggaggctgccccgcttgcctgcggtgcctgaaacgatgagttacccgcgcctgattcactcaatgctgatcctgctgcgggaagaaaaagtcctgcaggtgcgcggcgtactggctttactgatgttcgctgcgttcaatattttctggagcgccctggtgctgccgttaagtgccccaccctataacttatcgcataccgccattggtgcttttggcctggccggaatggcaggcgcgttagcggcaacccgggccggagagtgggccgatcgaggatatgcccggcgcaccagcgcggctgcactggtcatgttactcctggcgtggtggccgatttcactgatggaccgttcgctcggcattttgctcattggcatcgtgctgctcgatttgggcgggcaggcgctgcatgtcaccaaccagagcctgatctttcgcgcccgccccgaggcacatagccggctggtcgggctttacatgctgttttatgctgtcggcagcggtctgggcgcgctgagcaccacgatgacgtatgccatcgcgggctggcagggcgtctgcctgactggcgcagcggtgagcctgatggcgctggtgttctggtgggtaacgcgcaagacaggataa

SEQ ID NO: 123602 - DNA, 447 bp, Enterobacter cloacae
gtgccgtctcgtaaaccgattgaacaggaattttgtcccgttgcccgcagcgtcgatctgattggcgatcgctggtcgcttctgattgtgcgcaatgcttttgacggcatgcgccgtttcggggattttcagcgggatctcggggttgcgcgtaacattctggctgaccggctgcgcaagctggtcgacgcgggcattctcgcgatgcagggggcgtcagacggtacgtcgtatcaggaatacgtcctgacggacaaaggcgaaagcctgtttcccatcgtcgttgcgcttcgccagtggggagagcagcatctgtttgaacgcggggagcgccactcgctgttgatcgacaggcgtaccggcaagccggttcccctgatggcgccagcagcgcaggatggaacggcgctgaaggcgcaagatactgacgtgcagaaagtgacgtaa

SEQ ID NO: 123603 - DNA, 744 bp, Enterobacter cloacae
atgaaagcacgctctgtactgacggcgggtctgctggcgctttccgccagcgcctttgctgagagcaaaaccagcgtggtgctggtccatggcgcgtttgccgatggcagcagctggaacaaggtcattacccggctgcaaaaacagcataccgaggtgatcgccgtccagctgccgctcacgtcgcttaaagatgacgttgccgccacccggcgcgccattgcacgggcgcatggcgatgtggtgctggtaggtcattcctggggcggaacggtgatcagcgaagcgggcaacgatgcacgggtaaaatccctggtgtacgtagcggcctttgcgcctgattccggccagtcgacggcggacctggcgggaagttacccaccgccagcggggagtgcggatatcgcaaaaacggcagacgggtatttgtatctcccgccagaagccgtgatgaaagacttcgcaccggatgcaggcgccgttgaacagcagacgattgcagccactcaggggccgatcaaggccgacgcgtttgcggaaaaagtgagccatgcggcctggcatgaaaagccaagctggtttgtggtcagcaaaaatgaccggatgattaacccggagcttgaacgtgcgatggcgaaaacgatccacgcgaaaaccacggaagtggcagcaagccacgtgtcgatggtgagtcaaccggatgatattgcccgcacgattgagcaggcaatcacaaaccattaa

SEQ ID NO: 123604 - DNA, 468 bp, Enterobacter cloacae
atgatccgtcgttatttactgctccctgcacttgttctggcgtcagcaacctgctcctgggccgcaccgctggataacctcagcgctgccgacgtcaacggccctgccgcggttgccccgctggaacgtccacagccggccgctaagctgattgtcgatccaccgcttgccggcccgctgagcaagggggcggtctttattcaataccgggctgaaaacctgcgcatcgagccggtattcgggcccgatgcgctgaaggtcacaccacgtatcggccatatccatgtcgtggtggatgacgccccctggcactgggccgataccagcggagagccaatcattctggttgggttacccgccgggaagcataaagtgaccataattctggccgaccccacgcataaacccatcgaccataaaaccattgaattcaccgtaccgcctcacgcaacggtccatcatttttaa

SEQ ID NO: 123605 - DNA, 1194 bp, Enterobacter cloacae
atgaaaacacctgcccttccccgtcacctcgccctccgggcaggttgtcatcagcttatcaactgggggatctcgttttatatgcccgggacctttgcccaggccattgtggccgaccgggggtggtcatcaccgcagctctacctcggcctgacgctggcgatgctggtaatggcgatggtctccccttttgtcgcccgactgctggcgtacgctggcgggcagaacgtggtgatgagcggaacgttactgattgccgcaagctgcgcgggcatggcatatacgcagacgctgttcggctggtacggtgcctggctggttgccggtatcgggatgcggctgtcgctgtatgatgcgctgttcgccgcgctggtgaacctgtacggccagcaggcacgcagaacgatctcgcgcatcacgctcgcaggcgggctggcctcagcggttttttggccgctgggtgatgggctgctgaaagtgatgagctggcaacacgcattgcagatctacgccctctttggccttctgagtgcggtgctgattcgcacgcttccccaccagcggctggcggcccccccgcacgttaccgcgccgcccgtgcgccaggaacggcgtaacggctggcggtatgccacgtttattgccctcatgacctttgtctctaacggcacgtccacccgtctgccagagtttattgccagttttggcctgccggtcgccatcggcatgctgtggggagttggccagacgggcgcacgcgccacggaggtgctggcgggtgcacgcttaaccccgctcaacctgacgctcctgaccgccctcgccatgccgctctgctttgttatcgggttaagcagctcgctgtttgtcgggtgtgccgccggttttgtgctgggctatggcgccatcaacgggctgatgacgatagtaaaagccaccctgccgctgacgcttttcagcgccgaaagctatgcccgccgcaccggcatgctgctcattcccgcacagcttatggccgcggcatcgccgtttgcctatgcgtggctaaacaaaacgctggggaacgccggcgcaatgtgggtttccaccgcgctgacgctggtgattgccgggctggcgatagcgattgtgcgcagtgccgaccccgcgcggaataatgaaatgtatcccactgtatccggagcgccacgctga

SEQ ID NO: 123606 - DNA, 891 bp, Enterobacter cloacae
atgacaacgctcaacctgggctatctcgcgacgttccgtctggctatccagcgcggcagtttttccgcggcggcggacctgctgggcatttcccagccggccgtcagcctgcaaatccgccagctggagcagtttctgcaaacccggctggtagagcgtaccgggcggggcatcaaacccacggctgccgggcaggcgttgctggtgcacggggagcgtattcagcaggcggtggatgaagccattcggtccgtgagtgagttcagccatgacgtgagtggcaccattacgcttggcacgggcgcaacggcctgcattcatcttctgccgccgctgttgcagcagctcggacgtgactatccgcttctcagagtgggcgtgacgaccggcaatacgctcgacatcgtccgggcaattgaagaaaaccgtcttgatatggggctggtgacgttaccggtgagcggaagagcgctcgacgttacgccggtgatggacgaagagtttgtttttatcgcgtcgctggaccagcaggacggttttcagttgttgacgccggctgcgttgcacgcgcagccattcattgcttttgaatcaggcagcggcacccgggcgctgatcgacggctggtttgctgccgaggggcgaatcctcacgccggtgatgcaactgggcagcatcgaggcgatcaagcggatggtacgtgcggggcttggctacagtatcgtgccgcgtatggccgtagacctggcggctgaccgcgaagggctatgcgtgatgtcgctcacgcccgtgctgcagcgacagctggctgtggtgatgcgccaggataaaatcctgagcaaaggaatagcagggataattcggatattacaaaatccttcgacgcgttag

SEQ ID NO: 123607 - DNA, 2241 bp, Enterobacter cloacae
atgaacattatttctttcctgaaaaacaataaagaccgctggtgggctttaccgcttattttaccggtgggtttactgcctgtattaagcgttgccaatacctttacccgattgggcgatggtctggtggcactctattatttacctctctcctttctgctttcggtgatgatgttttttggtctggaagcgctgcccggcatcgtattgtcactgttcatccgctactacccgtcggttgggttgttcgaaaccatcgccggcatttttcattttattgtccctgttgtgctcagttggggagggtatcgggtgtttgcgcccagacgcagcatgacggcttacggggatgtcagactgatggcgcagcgtatcttctggcaggccttttgccccgcgacgctgtttctggtgctgtttcagtttgccctctatctgggggtgtatgagagccgtcagagcctggaggggttaaccccgcttaatattcgcacgctgattaactatcaggcgctgctggtcagtgggctgacgggcgtgccgttaagctatttactgatccgtctgattcgtcatccgcggtatatcagaagtcttgtctcgcaggtgcgaatgcagatagacaaaaaggtgacggttattgaatttctgctgtgggccattgcgcttggcgggctgcttaccctgctgctgctcccgatgaatgaaaacagctcgattttcaccaccaactacaccctgtcgttgctgatgccggtgatgctctggggagcgatgcggtttggctataagctgatgtcgcttatctggaccccggtgctgctggtgtccatccactatttttaccgctatatccctcaacagtccgggtatgacattcagctggcaattacctcttccagctatctggtcttttcgtttgtggtgatttacatgtcgatgctggccacctgccagcgcgccgcgaataaacgttcccgcaggctggcgctactcgacccggttgtccatatgccgaacctgcgggccttgtcgcgcgatcttgctaaaaacccgtggtcggcgctctgtctgctgcgcattccggagctggaggtgctgggccgaaattacggggtgttgttgcggatcctgtataaacagcagctggcgcagtgggtcaatggcaccttgcagcccagtgagcgggtctatcacctcaccggctgtgacctggcggttcgccttaacgcggaatcgcaccagcaacgcattgaggcgctggacgagcatattaaacagttccgctttgtctgggatgggatgccgctgcagcctcaggtgggcgtgagctactgctatgtgcgctcaccggtgacccatctctatctggtcctcggtgaactgggggtgattgccgatctgtcgatttcgaccaaccatccggaaaatctgcagcagcgcggtgctgtccatctccagcgtagcctgaaggacaaggttgcgatgatgagccgtctgcaaagtgcgctcgacagtaacgcgtttactctgctggtccagccggtttgcggcgtgcggggcgattgctaccacgaggtgttgctgcggatgtcggatgcaaacggggcgttgctctctcccttgcaattcctgcccgtcgcccaggaatttggtctgtcgtcgcgggttgatttgtgggtactggagaacacgctacgcttcctggcagagcatcgggtaaatctgcccggccagcgttttgccattaatctgggcccttccaccgtgtgccgtgcgcagttcccggctgaggtgagtcgtctgctggcgaaatacgccgtggaaccctggcagctgatatttgaagtgaccgagtgcagcaccttcggcagtggtgagcaggcgttacataccctcaggcagttgcaaaaaatgggggtacgcattgcgattgatgatttcggtaccggctatgcgagctacgcgcggctgaaaagcgtggacgccgatatccttaagatagacggaagctttatccgtaatatcgtcaacaacagtctggactatcagatagtggcctcgatttgccatctggcgcgaatgaagaaaatgctggtggtcgcggagtatgtcgaaacagaagagatacgtagcgcggttcacgcgctaggtatcgattatgtgcagggttatctgattggcagaccggtggcgcttgagtcactgctggaagcagaggcgtcgccggtcgagacctga

SEQ ID NO: 123608 - DNA, 825 bp, Enterobacter cloacae
atggaaatcaaattgcacgccaatgccaccaccacgccgcggatccgtcgctatctgcaacaatccaataaaagcgacagagaactggctacggagctgggtatttccgtgacgaccgtgcggcgatggcgcaatcgcgatcgggtttctgacaaccatacgaccccaaaagtgatacacaaagcgatgagacaagagcagattgacctcgttaatgcgctgcgtgatatcacgggcgcaccgctggatgaactcctgctgctggttaacgtggtgctggggatttccgtttcgcgggcgacgctgaaccgttatctccgtcccgctcctgcgaaacgcaagggcgttgaacttcacgggaaaaaagcgctaaaggcaggcgttttacccacaaaactgctggtgcatcaccagcctttatcgctgcatatggatgatggcggggagcagcatctgctgtgggggcgcgaaccggtgagcggctggtgttatgcccggctctatgcgggaatttcatcacagctgctgaacagctggatgtgtgagttgctgaacgcctgtccggctgatatccaatctgttgagacttccggttttgaacccgacttacccgcgggtgaacctgtcgtaaaagtacagccgaccaggcacaaggccgtgcaggttgcggtaccgctcggcgacatcattccacgagtgaatgctgttccgttagggcaggtgttgatcgagatgtgcgagttttacaatcggggcaaagcgcagaaaaagctgggagagagcacgccgcaggcctttctggaagcgctgcggcgtaaggattag

SEQ ID NO: 123609 - DNA, 357 bp, Enterobacter cloacae
atgacagacgcggtaaaaatctaccacaacccacgctgctcgaagagccgcgacacccttagcctgctgaagtcgaacggcattgacccggaagtggtgctgtatctggagacaccgccagatgcacagacgcttcgtcagctgctgcacatgctgggaatgggcagtgccagagagctaatgcgccagaaagaggacctgtatacgtcgctcaatctgaatgacagtcgtctaaccgaggctgagctgattcaggcgatggttgaaaatccgaaactgattgagcgccccattgtggtcgcaaacggtcaggcgcgtattggacgcccgccggaagaggtgctcgaaattctctaa

SEQ ID NO: 123610 - DNA, 570 bp, Enterobacter cloacae
ttgacaacctcatcacaacattacctggttatcactgcgctgggtgctgacaggccgggtatcgtgaacaccatcacccgccatgtgagcagctgcggctgtaatatcgaggacagtcgtctggctatgctgggcgaagagttcacgtttattatgctgctgtccgggacatggaatgccattacccttatcgaatcgaccctgccgctcaaaggtgcggagctggatttgctgatcgtgatgaaacgcaccactgctcgcccacgtccggccctgcccgcgactgtctgggtgcaggttgaagtccccgattcaccccatctgattgagcgcttcaccgcgttatttgacagccatcagatgaatattgccgaactcgtttcccgaacgcagccgggtgacggcagcgccattcccaccctttttattcagattaccgcgcacagtcctgcctcgcaggatgcgtcaaatatcgagcaagcgttcaaagccctctgtacagaattaaacgcgcaaggcagtataagcgtcgtcaattattcgcagcatgaacaggatggagttgagtaa

SEQ ID NO: 123611 - DNA, 1974 bp, Enterobacter cloacae
atggtggcgtttgaacatctgattcgcgagcttgagcacaaaggtcatcgtcggctggtggtgctcagcggcgatgagcagtggacattcacgcaggcatcagccctgcgtgatgccttgcccggagactggctgtggctggcggataacgcgtccagagccatcagcgggctgctgggacgcgagttccggcacgcaatttttgatgcccgcgccgggtttgacgtctcagcctttgcggctctgagcgggacgctgcgtgccggtagccttctggtgctgctggtaccgccccctgacgtgtgggcggaacaacctgacagcgattccctgcgctggagtgacagcgccgaacccatcgccacaccaaattttattcaccacttttgccggacgattgccgaggatcctgaggcgataatctggcttcagcaccagcctttatcgcttcctgcacgatccgacgcccctgactggcagcccgccagcggtgcgccgcagcgcgagcaggctgagatactggcagcactcctggccatgaaacgcggcgttgtggccgttacggccccgcgcggacgcgggaagtctgcgctggcgggaatgctgctgagcagcacgcagggcagtgccattgtcaccgcgccatcaaaaggggcgacggaggttatcgcccgttttgccggcgaacgttttcactttatggccccggacgcgctgctggcctctgaagagcaggccgactggctgattgtcgacgaagccgctgccatccccggaccgctgcttgaaaagctggtcgaccgtttcccgcgcgtcctgctgaccacaacggtgcagggttacgaaggaacaggaagaggctttctgcttaaattctgtagccggttcagcgggttgcagcggtataccttatcaaccccggtacgctgggctgcaggatgtcctcttgagcgggtcgttgccagcgcactgctgtttgacgatacgcttatcgatcgcagcccaacaggcgccatacagttgacctctctggccccggaagcctggacgagcaacccggcgctggcggcgagtgtgtatgagctgctttgtgcggcacattaccgcacctcaccgcttgatttacgccgcatgatggacgcgcccggccagcacttcgccgtcgcccaaacggactctgtcattgccggggcgctctggctggtggaagaggggggattaacggcgcagctcagccgtgccgtctgggcggggttccgccgccctcgcgggaacctggtggcgcagtcccttgccgcgcatggcggctccccgctggcggcaacgctcaaaggccgacgggtgacccgaatagcggtacatcctcgtcgtcaacgggaaggcatcggacaggcactgatccgcagcgcaagcggcgaggattacctgtcggtgagctttggctataccgatgaactgtggcgtttctggcagcgatgcggctttgtgctggtgcgcatgggcagccatcgcgaagccagcagcggctgttataccgcaatggccttgctgccgctcagcgacgcggggcgacagctgtgtgagcaggcgcatcagcgactgcgccgcgatgcgcgcgtgttatcggccctgaacggtgaaaagatcccggtggacgacggctgggaggctacccttaatagtgacgactggctggagctggcggggtttgcctttgcccatcgcgcgttttctacctccgtcgcggcgttaacgcggttgctgctaagcgtggacatgccgctgcccgccctgcgcgggaaagtggaggcgagaagtgatgacgcccggctcagcgctgaactgcttctttcggggcgaaaagcgttactggccaggcttcgcagtgaaacggcgcaagcgcttgaaagccttgaacctgcacgctatcagcagctgaaagacgacattttgcaatggcaattttttcaatga

SEQ ID NO: 123612 - DNA, 1695 bp, Enterobacter cloacae
gtgaccgttaaacgccctgtttccgcaagcctggcctgggctttcttttcgatgattgtgttatccgttctgaccagcaccgtcgcgctgctgacgcttgccagcagccagcgtgacgccgaagccatcaatattgcgggttcactgcgtatgcagagttaccggctgggctatgagatgcagcgcaacagcccttccctgacacagcatcgccaacactggcaacacaccctgagcgcacctgcactccaaaagctgaaccgctggtacgtgccggacgatgtcaaacagcgctaccagcagctgcatctggcctggcaggagatggatacgcacatcgcccgcggcgatctcgcgtggtatcaaacccatatcgaagattttgttggccgtattgatgcctttgtgctcgcccttcagcactataccgaacataaaattcagacggtgaccctgctctctctggctggcgcgctggggatcctgctgctgacggtgtttaccctgcgacgcatccgtcaccaggtggtcttgccgctcaacaatctggtcgccgcaagcgaacgcgttgaacggggacaatttgataccccggcaccggataccgctttgccgaatgaactcggtcagctgtcccgcgcctttaaccatatgtcggcggagttacacaccctctatcgctcgcttgaagattcggttgcggaaaagacccggcacctgaacgaggcgcaccagcagctcgaaatgctgttcaaatgttcgcaggcgctcaacaccggacagatagacagccactgtttccgccatatattgcaaatcgtccatgaatacacccggatgaattatctggagttacggaccagcgacgactggcgtctgtgtgaagggagtgaggcagccgacatgccgctgcaaaacctgccggtgctgatgcaggacacgctctacggcgagctgcgctggcagagcgagacggacagcgtcccgcttccgctgatgagaagcgtggcgacaatgctcgggcgcgggctttacttcaaccaggcgcaaaagcattaccagcagttgctgctgatggaagagcgcgcgacgattgcccgcgaactgcatgattccctcgcgcaggtgttgtcgtatctgcggatccagcttgcgctgcttaagcgtgccgtaccgcaagagaatgcccccgcgcagaccatcatcaccgacttctcccgcgagcttaacaatgcctggcatcagcttcgcgagctgctcaccaccttccgcctgacgctcaaccacgctaacctgccggcggcccttcaggagtcactcgacggtctgcagagccagacgcaggcaaagctgcatcttgactgtcgcctctcctcgctggcccttgacgcacaaaagcaggtgcatctgctgcagatcgtgcgtgaagcggtgttgaacgcaatcaagcacgcgcaggccagcgagatcaccgtaagctgtatcaccgccgtggacggcacgcacagcgtgagcattcgcgacaatggcatcgggattggcgaagccagcgagccgccgggacattacgggctgaatattatgcgtgaacgcgcggaacggctcggcggtatcctgcacttttcgcagccacaaaatgggggaacacaggtgagcgtgacattcccttcgtcgctggcgttaacaggtaaataa

SEQ ID NO: 123613 - DNA, 450 bp, Enterobacter cloacae
atgaagagtactgagatccatccggcagattatgatgcgcaagggcgtgtcaggctgccctttttgttctggtgcgttctgctgctgcaggcccgtacctgggtgctgtttgtgatggccgccgcgtcgcgcgggcagggcgatacgcttctgacgctcttttatcccgatcacgatgccttctggctcggcttgctaccgggcgtgccggcagtgatggcgtttttatgcagcgggcgacggcatacgatcccgcgcctgtggggtgcgcttcgctggctgctgatcctcgctcagcttgcgctgctcgtctggcaaccggtgctctggtggggcggtgaaccgcttacggggatcggtattgcgctggtcgtagcggatatcgtggcgctgctgtggctgctgacgaatccccgccttcgcgcctgttttatgcatcaggaagattaa

SEQ ID NO: 123614 - DNA, 576 bp, Enterobacter cloacae
atgaaatcgctgcgtttacttttatgcgctctcccgctggcgttaaccggctgttcaacgctctcatcaattaactggtctgcggcctatccgtggaactggtttggctcttcaacggaagtgaccgagcagggcgtgggtaaaattaccgccgcgacggcgctggatcaggacgcccttcaggatgcactgggtggcggttatcgcctgcgcagcggcatgaaaacagaaaacggcaatatcgtgcgttatttcgaagcgctgaagggtgacacgctggcgctggtgattaacggtgataaaggcacggtaaaccgcattgctgtgatggacgacgacatcccaaccgaaagcggtgtgaaagtgggaaccccgtttagcgaactctataaacaggccttcggcaactgcaccagcgccccgtctgacgacggcgtggcggtggaatgtaaagcgcagggcagccagcacatcagctatctcttcaccggtacctggagtggtccggaaggtttaatgccttctgacgacacgctgaaaagctggaaagtgagcaaaattatctggaagcagtaa

SEQ ID NO: 123615 - DNA, 342 bp, Enterobacter cloacae
atgacgaccattcaggctacaacccagcccattcaaaccagcggtggcgggagtcgttcttccggcggcaacgatatcgctgcccagatcagccgcatcactgacaagataaccaagctgactcaacagttaaaagaggttgcgaacggttccggcagtgcggaagagaagaagaaacagcaggagcttatccaggtgcaaatcaaagtgctgcaggcacagctcgcacagctgcagcgccagcaggcggaagaagctcagaagaaacaagagcaaagtctggtcaacgtggaaggcccgaagaacgcatcagacaatcatcaaatagacatctacgtctaa

SEQ ID NO: 123616 - DNA, 825 bp, Enterobacter cloacae
atgaccctctcgaataatccctggttctctgccgacatcattcgtgccgctaaacctgatttcactccgcgggttgcgtttattctcggctcaggtcttggcgcgctcgccgagcagattgttgatgctgtagtactgagctatgaaaaactgccgggcttcccggtgagcaccgttcacggtcacgccggtgagctggtgttggggcatcttgccggtgttccggtcgcctgtatgaaagggcgcggtcacttctatgagggccgcggcatcgccgtcatgaccgatgcaatccgcaccttcaaactgctgggctgcgaactgctgttcagtaccaatgccgccggttcattacgtccggaggttgaaccgggaagcctggttgccctcagcgaccacatcaacaccctgccgggtaccccgatggtcgggctgaacgatgaccgttttggcgaccgttttttctcgctggccaatgcttatgacgcagattgccgtgccctgctgcagaccgtggcgagcgagaagggctttccattgcatgagggggtgtttgtctcttatccaggccctaacttcgaaaccgcggctgagatccgcatgatgcagatcatcggcggagatgtggtgggaatgtcagtggtgccggaagtgatctcggcgcgccactgtggcctgaaggtggtcgccgtttcggccataaccaaccttgctgaaggtctgagcgatgtaaaactgtcgcatgaacaaacgcttgccgccgccgaactctctcgccagaacttcatcgatcttatctgcggttttctgcgccagcttgcctga

SEQ ID NO: 123617 - DNA, 1257 bp, Enterobacter cloacae
atgaacatcacggcgcgcttaaagatgatgtcctttatgcaatattttatctggggaagctggctcgttactctcggcgcttacatgattaacaccctgggtttttccggctctgacgtgggtatggtctacagctcgaaggggcttgccgcgatcgtgatgccctcgctggtgggcattattgccgataagtggctgcggacagatcgtgcatacgtgatttgccatctcgtctgtgccgttgcgctttgctatgcagcgcaggtcaatgaaccggggctgatgttctgggtcatgctggttaatgccatggcctttatgccgaccattgcgctatcgaataccctttcctactcctgtcttgagcaggcagggctggacacggtgacccattttccaacggtgcgggtctatggcacggtaggcttcattgtggcgatgtgggccataagcctgatgggtgcagagttaaccaacattcaactctacattgctgctgccgcgtcgctggtactggcgctctattcactgacattaccggccattccggtggcgaagaataaaacctcatcgtcgctgacaagcaaacttggcctgaatgcgttcgtcctgtttaaacagccccgaatggcggtgttctttttgtttgcgatgctgctgggcgccgtgctgcaaatcaccaatactttcggtagcccctttctgcatgattttgcgcgtaatccggcgtatgcggaaagctttatcgttaaatacccttctattttgctctccgtctcgcagatgtcagaggtgctgttcatcctgaccattcctttcttcctccgacgttttggcataaaaaccgtgatgctgatgagcatggtggcctggatgctgcggtttggactctttgcgtatggcgatccttccgcgacaggcgtcgggctgttgatgctgtcaatgctggtctacggttgcgcgttcgacttcttcaacatctccggctcggtgtttgtcgaacaggaggtaagcgctgatatccgcgccagcgcgcaagggctgtttatgacgaccgttaacggtatcggtgcttatttcggatcggtattgagcggcgcggcggtagattatttctccgtggatggggtgaaagactggcagaccatctggctggtatttgcggcgtatgcgttggtgctcgccgtggtgttttatttcagctttaactatcgccacaccagtaaaaacagcgagttgcgcacagttgcgcattaa

SEQ ID NO: 123618 - DNA, 888 bp, Enterobacter cloacae
atggaacgcgtctaccgaaccgacctcaagctgctgcgctattttctggccgtcgctgaggaacttcattttggacgggctgcggcccgtctcaatatgtcgcagccgccgttgagcctgcatataaaagagctggaaagtcagctcggtaccttactgtttattcgccactcacgaagcgtcgccttgacccatgcgggtaaagtattgatggaagagtcccgtcgactgcttgccagcgcaaaccaggcactggcgcgggtcgaacaaattggacggggtgaggcggggcggattgcgctgggcattgtcggtaccgctatgtggagcgaagtgcgcacggtcatgcgcacatttttgaaagagcatccgaacgttgatgtcgtctttcgcgaaaagtcgccggtaatgcaaatggcgctgctggagcgtcgggagctggatgtcgggatctggcgaatggcaaccgagcccactgcaggatttaccagtatccgcttacgggatgcggcatttctggttgcgctgccggaggatcaccggctggtgggggaaagcgcaattgcgctcaccgaactgcagaatgagtactttgttactatgccgtctgcgcattctgactggtcgttcttacagcgagtgtgtcagcaggccggtttttcaccgatgatagtgcgtgaagccgatgaaccgcagacggtgctggcaatgatcagcatgggaatggggattacgttagctgctgacagctatgcgcaaatgcagtggcccggtgtggtatttcgtccattacaggtacgtataccggcagatttgtatgtggtgtatgacgagaagcaggcgacaccggcgattaagtcgttgatagcaacgttgacggaagagtga

SEQ ID NO: 123619 - DNA, 894 bp, Enterobacter cloacae
atgttgctggcgatcctcttagccgggtttaccctgcatacgcactggaacacctttcttcagtggtgccttgccacgcaaattaccctgcaccgttatctggtgatgtacctgctccagcttaacaaccaccagtacagcggcgggttatggctgttaaccggcgccttcttctatggcgtattgcacgccatcgggccggggcatgggaaattcattgtgacgacctacctcacgacaaataaagaaagcgaccgggtcgttccttttcttggcagcctgatgcagggcgtcagcgccattctctttgtctttattctggcggtagggtttaacctcgcatcgggggatatcagtaccagccgctggtacgtcgagaagataagcgcggtgctcatcggtgcatttggtgtatttgtcatttaccaggcgctgaaaagcctgcgacctcgccggatggctatctcagccatcacgccccttcatcaacataatgaacactgtggttgtggtcatcacggtgtaggtgcagacctggcgcaaggcgactggaaaacccggttgggcgtcatactggcgattggtgcgcgtccgtgcagcggggcgatcatgatcctgatgttttcaaatgcgctgggtattgttacctgggggatggccgcggtcatgaccatgtcgctgggaacggcgttgtcgattatgggcctctcactggcggtacgttatgcccgagagcggacggtggcctggtttggcggcggggcttcactcagctggctggtcccggtctttaaaatagccggagggatagtcctgatcctgttcgcgaccgtgctgttcctgacggtactccccatcagcgccaatggcgattacatcgccgcaggctgctaa

SEQ ID NO: 123620 - DNA, 993 bp, Enterobacter cloacae
atgaagattaaagccacgattgaacgcataccgggcggtatgatgctggttccgcttgtactgggcgctatcctgaataccctggctcctgaaaccggcgcttattttggcgggttcacaaaagggatgattacgggcaccgttcccattctggccgtctggttcttttgtatcggcgcttcaattaatttacgggcaacaggcaccgtattacggaaatccggcacgctggtgattacgaaaattgccgtggcctgggtagtggcaatgatctgtgcgatgttcattccggagaatggaattcagaccggattcttcgccggattatcggttctggcaattgtctctgcgatggatatgaccaacggcggtttgtatgccagcctgatgaaccagtacggcaccaaagaagagtcaggtgcatttgtcctgatgtctctggagtccggcccgctgatgaccatgctgattctgggctctgctggcctggcgtcctttgaaccccaccactttatcggcgcgatcctgcccttcctgatcggttttgctctgggtaacctggatcacgatctgcgtgatttcttcagcaaagccacgccggtgctgatcccgttcttcggttttgcgctgggtaacaccatcaacctgaatgtcatcctcgatacgggtctgctgggtatcgtgctgggcgtggcggtgatcattatcaccggtattccgctgattattgccgaccgggtcattgggggaggaaacggaacggcggggatcgccgcctcttcagccgcaggtgcagccgtggccaacccggtaatcattgcgcagattaacccggcttttgaaccggtggccgcgtccgcgacggcactggttgcagccagcgtgattgtaactgcgattctggttcccatcatcaccgcactgtacgcaaaacgcgtcggacatgttgctgaggttcagacagagcctaagcctgttgaaacacaccactaa

SEQ ID NO: 123621 - DNA, 2355 bp, Enterobacter cloacae
atgcacacacagaccatttttgaattaagccaggaagcagagcgtttgttacagctcgccctgcaaaatcttgatacgttgaaatcaatgccgacggcgaagctggaaagcaccgccgcagccattacgggtgaaaagaacaacgtcttacctttgcattttagtgcgcggggtgtcgaagcccagcaggctatgctgaataatgaattacggaaaataacccgtctggaaatggtgctggcaattgtgggcaccatgaaagcggggaaatcgaccaccatcaatgccattgtcggaaccgaagtgttgccgaaccgcaaccgaccgatgacggcgctcccgacattgatccgtcatacgccgggtcagaaagagccggtgctccattttgctcacgtctctcctatcgatgaattaatcctcctgttacagaaaaagctctgcgattacgatcgcgggaagctggcgcagcgtctggaaattgataaggacatgattacgctgctggaaagaattgaaaaaggtgaggctttcgagaagcatcacctgggtgcgcagccgatatttcattgtctgaaaagccttaacgacctggtgaggctctcacaggcgttgggcgtcgagtttccgttctctgaatatgcggccatcgaacacattccggtgattgaagtggagttcgtgcatctcgcgggtctggatgcccaccttgggcaactgacgctgcttgatacccccgggccgaatgaggccgggcaaccgcatttgcaaaaaatgctgagcgagcagttatcccgcgcgtcggcggtgctggcggtgatggattacacccagctcaaatcgatttccgatcacgaggtccggcaggccatttcagtcgccggtaaatcggtgccgctgtatgcgctggtcaataaattcgatcagaaagatcgtaacagcgacgatgaagaacaggttaaagcgatgatctccggcaccctaatgaaagggaatatttcgccggggcaaatttatcccgtttcgtcgatgtgggcgtatctggcgaaccgcgcccgttatgagatgactacccacggtcagctaccggatcacaaggagcagcgctgggttcaggattttgccgaagccgcgctgggacgccgctggcgtacggaggatttggacgacatcgaccatattcgtcatgctgccgatttgctgtgggaagattcgttatttgaacagccgatccgcaagcttatttatgccgcctatgccaatgcatcgctcttcgctctgcgttcggcgtcgcataagctgcttaactacgcccaaaatgcccgggagtacctcgacttccgctaccaggggctgactgtcgcttttgaggcactggaattgaatatcgcgcgcctggaagaggacatggccctgctgcatacgcgtcagcgcgtggtgagcgacgaagtgaagcatgaagtggagcaggcgcttaacgccaccgctgactttatgatgtcgcagaatacttcactccagcaggcaattagccatgtgtttagcgcccgctctgttctcgacctggcgggcatcgaaccgcgggatcttcgccgtgacaagccgcaggcgctgaaacagctggtactggatgatgaaggacaggcgcaaattgcgctgagtaaaatccgctcctcctgcgagctgatcatgctggatgcgcagacgaagatcggccgggagctggcgttacgcttcgatcaactggagtcgacgctggcgcgctcgctgaatgaagctatgcggccaatcgaaacgcgtattaaagaacaactcagccatgcgggttttcgcgcgcggataagcttcccggcctttcaggcgcatcaacttaacttcaacacccgggcgctgtttaacgatgcgattgcgcaggatcaccgcccggcaggccagccagcgggcgcggcgagcatgcgtgaaaccgtctctcgctggctgaataacccgggctggggctgggaagattatgttgttgcacgcacacactatgtcattgatattgaacagctgcatgagaaattcaagcagcatatcgatcagttctgtgaacaaatccgtaaagctttgaccgcccaggtcgatgtctctgttacggcggggatggcaacgttctttgcggaattttcgttatgcctgaccgggttacaggaaagtttgcgtgatagcctcgcagtacgtcagcaaaatgagcattcgacccgagcgctcagccagctgttaaagcaaagtatcacgactgcgacgtggatacaggaagatacccgactgttacgcgatgatattcaaaccctattcgcggcagaacaaccatga

SEQ ID NO: 123622 - DNA, 438 bp, Enterobacter cloacae
atgccgttaagtccctacatctctttcgccggtaactgtgccgaggcctccgccttttatcagcacgccgttggcgcagagctcctctataaaatcaccttcggtgaaatgccaaaaggcgacagcagcgaagaaggctgtccgtctggcatgcagtttccggattcggcgatcgcccactcgaatgttcgcattgcgggcagcgatatcatgatgagtgatgggcagccgcccggcagcaaagcgcagtatgccgggttcacgctggtgctggacacccaggacgtggcagaaggcaaacgctggttcgacaatctggccgcggaaggccatatcgaaatggcctggcaggagaccttctgggcgcacggtttcggtaaagtcaccgacaaatacggcgtgccgtggatgattaacgtcgttaagcaacagcagtga

SEQ ID NO: 123623 - DNA, 534 bp, Enterobacter cloacae
atgcaaactgttatccgcgtcgagaaactgagcaagacctttcatcacaacaaggccctgcatgccgttgatctgaccgtccagcagggcgaaatggtggcgctcctggggccatccggctctggtaaatccacccttatgcgtcatttaagcggccttatcacctgtgataagacctcagaaagccacgtcgagctgctgggcaacaccgtgcagcgtgcaggacgcctggcgcgggatatccgcaaaagccgcgcccagacgggctatatcttccagcagttcaacctggtcaatcgcctgacggtactggagaacgtgctgattggcgcgctcggcagcactccgttctggcgtacctgtctgcgctggttctccccctctcaaaagcaggaagcgttgcaggcgctgacccgcgtcggaatggcgcatttcgcccaccagcgcgtctccacactttccgtgtggacagcagcagcgcgtggctatcgcccgtgccctgatgcaaaaagcgcaaatcattcttgccgatga

SEQ ID NO: 123624 - DNA, 450 bp, Enterobacter cloacae
atgaaaaggattgcgtttggttgcgatcacgttggcttcatactgaaagaggacatactggcccatctgcatgggcgtggcgtagaggtggtggataagggtacctggtcgcccgaacgcaccgattacccgcattatgccagcgctgttgcgacgtccctgctcgacggtgaggttgatggaggcatcttaatttgtggtaccggcgttgggatctctattacggccaacaaataccccggcattcgtgcagtggtatgtagtgagccttattctgcgcagctttcaaggcagcataacaacaccaatatactggcatttggctcacgtgttgttggccttgagctggcaaaaatgattgtcgatgcctggctcaatgcagaatttgagggcgggagacaccaggtgagagtggaagcgataggggtgattgaacaggcgcagaaatga

SEQ ID NO: 123625 - DNA, 945 bp, Enterobacter cloacae
atgcaaaaacagcctgatgtcgtcgccggagtggatatgggcgctacccatatccgtttttgcctgcttacagccgacggggccgtgctgcactgtgaaaaacaccgtacagcagacattatccgttcaggcgtcatgtgcggcgtcgcagaaatgatcgttgcaaggcttcgtcactatcaggttcgctgtcggggtctggtgatgggttttcctgcactggtcggcaaagacaaacgcaccattatctcgacaccaaacctgccattacaggcaacagaccgacgggacctggcgggcaaactggcggacgcgctgggatgcccggtcgaattctaccgtgacgttaacctccagctctcttttgatgttatgcagcacaacttgcagcatcagcaggttctggcagcctatctcggtaccggcatggggttcgccatctggctgaacggcgcgccctggacaggtgcacacggggtcgcgggcgagcttggacatattccgcagggcgatatgtcacgccattgcggttgtggtaacacaggatgtctggaaaccgtctgttccggtattgccctgaaacagtggtatgaacaacagccccgtgattacgcgattggcgagatttttacctcagcgtgtcatgacccctttgtcatacagctcttaaatcatgcagcccgagccattgccaccagcgtaaatctcttcgacccggatgcggtgatcctcggcggcggcgtgatggatatggtcgattttccacgcgacgcgctgattgccagaattaaacagcatctgcgccgtccgctgccgtatgaggcagtccgtttcattacagcatcatcgtcatcctttaacggtgctcagggggcggcgaccctggctctcagccagttcctgtcatcaccttgcgcaacgcctgcgccagctgaacacgggtaa

SEQ ID NO: 123626 - DNA, 672 bp, Enterobacter cloacae
atgctcacggtacaccacctgaaccagtcccgctcacaccgtgtgatctgggcgctggaagaactttccctgccctatgagattgttcgttaccagcgcgaaaagagcatgctggcgcctgagtcgctcaaaaaagtgcacccgttgggcaaatcgccggttattgaagataacggcctgatcctcgccgagtcgggggccatcctcgaatatcttcaggaaacctacgatcctgagtcgcggcttaagcctctggatcctgcgcataaggtgcaataccgcttctggttgcactatgccgaaggttcgctaatgccgctgctgttgatgaagctggttttcagtagcctcggtaagccgcccgtgccgtttggtatccgcacgttgggtaaagcgctggggcagggagtgcaaaaagcgtatctcaaccgccagcttgaaacccatgcacgctttattgagtcgcatcttgcccataacagctggtttgccggcgatacgctcagcatggcggatattcagatgagcttcccgatttttgccctgctggcgcgaggtggcatcgataacctcccgcatacccaggcctggaagaaaaaagtggagagcagccctggctggcaaaaaacgctggagcaaggtggcccgttatcgattccgggtggggagtga

SEQ ID NO: 123627 - DNA, 1401 bp, Enterobacter cloacae
atgaaagaaaaacgacgtgagattgttaatgacagcctgcgggcgttgcatgcgctggcagatctgatgccccagcttcacgcccattgttcgctgagtgagatgcttgagacgatcaaccgggccttcggggcaagcctggcctggattagcgttgatactgacgggctacagcgcgtggtctgtgccggtgaagtgacctgtcactcatttgaggtggccgattttcttgccggtaccctgctggagaagcatcaccgtgcgtggcgggtcgtctactggaaagagaatatcggccgcgcattattctccgctcatcatcctggctattcgcaattgcaaagcggggtgttatgtaagctttcaacccataacggacaaggcagcggctatttctttctggcgtttgctgagccgttatattctctggccatcctgaaaagtattgttgcggtgctggtcgaaaaattaaaagactatttttcagaaattatcgttcgtgaaaaaacagcgcaggaaatgcagcgtgtggtgacccaatataaaaccctgtttgaacgagcgcctgttttaatgaactcattcgataaatttaaccgctgcgtgctgtggaatgctgagtgtgaaaaagtgtttggctggacaatggcggagatcagcgcccatgccgatccgctctcactgttttaccccgacccggaagagcggcgacgggtcagggagtcggtaaatgtctcgccgctaaaggatatgtacgagtggcatccactgcgtaaagacggtacgccgttgacggttttgtggtcaaacattctgctgccggacagctcagtcctgaatatcgggcttgatattaccgagcgtaaaaaagccgaacagcagctggaagtgaaagccaccacggacgatcttaccgggtgttttaaccgttcaaccattttacagcagctggaatccgcgctggcggcaaatgccaggcaggatgctgacagccatttttgcgtgctcatgtttgacctggattttttcaaacagatcaacgatcggtgggggcatcaggtgggcgatcgggcgcttatccacttttgccaggctatccgtgagttaagccccgagaacgctgcgcttggccgtgtgggcggcgaggagtttttactcctgctggcgcgaaccgacggcaacgcgggcgcccttttttctgcgaggctacgtactgccctcaaaaccaacccgctggtggtgggagagaaaaagctggtgctgtcattcagcgccggggcggtggaggtctgccagggccaacgcgatacttcaggattactgatgcgtgccgataaagcattatatgacgccaagcgtacgggtcgggggaaaacggtggtggctgctgattatttataa

SEQ ID NO: 123628 - DNA, 1011 bp, Enterobacter cloacae
gtgaagccttatcgcgacggtctggttgtgggcaaatttgcgccattacacgtggggcatgaagcgctgataaatgctgcgctggcccagtgtgggacggtctatatcatcagttattcgcgtccggaaattccgggttatgaccccgacaagcgccttcactggttaaccgcgcgcttcccgcaatgtcatcaccttgtgctcacgccggaggtcatcgcgacccatgcgcttgaaccactgccgcataatgatgcggatgccaatcttcaccggcattacgtggcaacgctgtgtgaaaaaatacttcgctgccagccacaggccgtatttaccgccgaagactacggcgacggatttgcggcggtgttaagccagcgttttggcaaacaggttacgcatgtccgcctccagcgtccgaaagggcctgatgcgccctcgggaaccatgatacgttctgacgtccatcgctaccgcacgatgatgtccccggaggtctaccgtagctttgtctttcggatttgtttattggggggcgaatcgacaggaaaaagcacgctttcccgcgcactggcgacgacgctcaacgccccatttgtcgccgagtttggccgagaatattgggaagagaagaatggcgtgctgggatgcgacgatctgctgcatattgcccgcgagcaggtgcgtcgtgaagcgatggccagcacggctcccttcctggtttgcgatacctcgcccttaaccacgctgttttatatgctcgaccagtttggcagcgcgccacgcgagctagaggaattagccgggcgcgcatattctctggtggtgctctgtggcgatgagtttccttttgttcaggatggtacccgtcagggggctgcattccgccagcgacaacaggcatggtacatccgcgcgttaactgacagaaatatcccctatctgcctgtttctggttcgcttgctgaacgcattgaacagattcgacgacatctgcaggaacggatctga

SEQ ID NO: 123629 - DNA, 558 bp, Enterobacter cloacae
atgtcaccatccgaaatggccgcttgtctggcttatgccctctcggtctggctggctgccagaaacagtattcacacgtggtggataggcatcatcggcagtgggctttatggctgggtcttttattcggttcagctttacgctgacgttaccctgcagctctttttcatcatcaccagcattaccggctgggtgcactggctcaaaggtcatcgcggggaggtattgtccgttcggcgtaccccgcccagacatttcttcatcctgctcgcctgcgccctgctggtggccgcgggttatggcctgatcttgcatcgctacactaacgcctgggccccctgggtggattccgttattttgacattcagcgtgcttgcacagtttatgttaatggggcgacgcctggagaactggtacgtctggctggctgtaaatacgctggcggtaccgttatatgcgatgagagatctgcatttgaccgcgggtttatatctggtgttttggtttaatgcctggcacggtttatatcagtggcgtaaggagattcgcgcccagtga

SEQ ID NO: 123630 - DNA, 513 bp, Enterobacter cloacae
atgaaagtaaccattcaacgcgccaccgtggatgatgcaaaacagctgagtgaaatggggtatgccagctaccggcatcactttgggcatctatgggaaagccagacggagcttgccgcctttcttgagcaggaatacgcgccgcaggcgatagcagacagcctgatgcagccgggcacttactggctcattgccagcgcacagacaccagtcggtttcgcaaaattctcaacccagcagaccatcgagcccgaggggctgacgggtacgctcctgcataaactctatttattgccggatgccacgggacaccgctacggcgagcaactccttgcggaagtgattcgccaggcaaaagcctgttcggaaaatctgctgtggctggaagtcctcgaaaagaaccctcgcgcacgccggttttacgaagcgcaggggctgaaacatgtcaaagacaccctcttcgtcactgcggcgcaaaccagcaccctccatattatgtcgatgccagtctaa

SEQ ID NO: 123631 - DNA, 456 bp, Enterobacter cloacae
atgccagagcaacgccaggtggctattcgtcatgttgtctgcggcgaaaacgtcgtcatttacgaacccgcgaatctttatgaatgttcgctgggcgataacgtctttatcggcccgtttgttgaaatccaggctaactcgcacatcggtgctgacagcaaaattcagtcccataccttcatctgcgagtacgtcaccgtcggcgagcgctgtttcattggccatggggtgatgttcgccaacgatatgttccgcgacggtaaacccaatgccgaccggcgcagctggggacacattcgtgtgggcaacgacgtttcaatcggcagcggggccaccattctggctgtctcaatttgcgatggggcggtgattggggcgggaagcgtggtgacaaagtccatcaccgagaaaggggtttacgccgggaacccggcgagactgttgcggcgtttgtaa

SEQ ID NO: 123632 - DNA, 639 bp, Enterobacter cloacae
gtgaagcgacctgggatcatcctgatttgtctgcttttgcaggcgtgctcggccaccaccaaagggctgggccattcactgtgggaaagcatgttcggtacgccgggcgtgcatctgaccgatgacgaacttcagaacatgccctatgccagtcagtacatgcagctcaacgatggcccgcagctgtttgtggtgctcgctttcgatgaaaacgggcagcagaaatgggtgacgcaggatcaggccaccatcgtaacgcagcatagccgtatcgtgaaaaccctgctcgggggcgacaacctgcttgaagtcaacaatctcgccgccgatccgctgaacaagccgaaccagataaccgacggggcaagctggacccgcacgatgggctggaccgaacacaagcaggttcgctatgccaccgcccgctccaccttccgctgggatggcacggacagcgtcaatgtgggcagcgacgaaacccgggttcgcgtgctggatgaagaggtcactaccgatcaggcaacctggcataaccgcttctgggtggacgatgacggccagatacgccagtcgttacagtatctgggtgccggattcttcccggtcaaaaccacgctgatcaaggccgcgaaatcatga

SEQ ID NO: 123633 - DNA, 585 bp, Enterobacter cloacae
atgaatcatggccagcaaataatcggcgttgttctggcgggtggcaaggcaacccgaatgggggggaaagataaaggtcttcagctccttaacggtaagccactctggcagcatgtcgctgatacgcttgcggaccaggtcatgacaatggtcatcagcgctaacaggcatagagatgtttatcagcgtagcgggtatcccgtttacgaggatacgcaggagaattaccccgggccgctggccggtatgctttcggttatgcagcagtcgcacggggagtggtttatcttctgtccgtgtgataccccgtttattccgtcttgtcttgtcgaacgcatggtacggcttcgtggtagcgcacccgttgtctgggcccatgacggtgagcgtgaccaccctgctgttgcgttgatccaccgttcgttagttccggcgttacaggagtacctgacggcaggagagcgcagggtgatgacttttatgcgccagtcaggcggccatcccgttgattttagcgatttgaagtcggcgtttatgaacgtcaataccacagaagatttgcagatgatgcaggagaaaaaatga

SEQ ID NO: 123634 - DNA, 915 bp, Enterobacter cloacae
atggcactcgaaaaagggattgatacgctggttcaggcgttcatcgcagcaggacgtccttctgcgcgtagccaaagtattgatgaccggagagcaggctatattgccagcacggcgcttgccggtgagagagaaacgcgcgttgacgtagaaacgctgaacctcgaaggcatcacatatcgcgtcttctctccgccagatgctgctgaaaagctgccgaccgttatctactaccacgggggatgctttatcagcggcggcttcgatactcacgataatcaactgcgccagttagcgttttatggcaactgccgcgtcattgcgatccagtacagacttgctcctgaacatacctaccctgccgcccatgatgatgcagaaagaggcgcacatctggtctggcaatacgcggatatgtttggcgtggataaaaaccgtatcaccctgtgcggggacagcgcgggaggccatctggcactggtgacggccctgcggctcacgtcttccggactctggcagcctgcgcatctcattcttatctacccgatgctggatgccacggcctcttttgaaagctatacccgtaacggcgcggattacgtcatcacccgcgatacgctgctgagcggatatgagctctatctggcccacacggaacgccagcatcctgaagcgagcccgctctggcgaaaggattttagcggcctgcctcccgtgcacatcattactgccgagtttgatccgctttgcgacgaaggtgaggcgctatatcagcgcctgactgagcaaggcgtcacgtgtacggctcagcggtggctgggggttatccatggatttttccagcttggcggggtcagcccgtctgcgcgcgatcttctgagggatattgccagacggatcggcgcgaggaattaa

SEQ ID NO: 123635 - DNA, 315 bp, Enterobacter cloacae
atgatccgcaaagcatttgtgatgcaggtgaaccctgacgcgcacgacgagtacgcgcgtcgccataaccccatctggccagagctggaggcggtattaaaagaccacggtgcgcaccactacgctatctatctcgatgaggcgcataacctgctgtttgcgagcgttgaaattgaatcggaagcgcgctggaacgcggtggcaaagaccgacgtttgtcagcgctggtggaaatacatgggtgaggtaatgccctcgaaccccgacaacagcccggtgagtgccgaactgaaagcggtgttttacctgccctaa

SEQ ID NO: 123636 - DNA, 1260 bp, Enterobacter cloacae
atgaccactcaacttgaacaagcctgggacctggctaaacagcgttacgccgccgtcggcgtggatgtcgatgaggcgctgcgccagctcgatcgtcttccggtctccatgcactgctggcagggcgacgacgttgccggttttgaaaacccgggcggctcgctgacggggggcattcaggccaccggcaactatccgggcaaagcgcgtaacgccaccgagctgcgcgccgacctggagctggcgctgagcctgatcccggggcctaagcggctgaacctgcatgctatctatctggaatctgacacgccggtcgcgcgtaacgagatcaaacctgcgcactttaaaaactgggtagcgtgggcgaaagccaaccagctgggcctggatttcaacccatcctgcttctcgcacccgctgagcgccgacggttttacccttgcccacgcgaacgacgatatccgccagttctggattgaccacgtaaaagccagccgccgcgtctccgcgtactttggcgagcagcttggcacgccgtcggtgatgaacatctggatcccggacggcatgaaagacatcaccgttgaccgtctggccccgcgtcagcgcctgctggcggcgctggatgaagccatcagcgaaaaactgaacccggcgcaccacatcgacgccgtagagagcaagctgttcggtattggtgcggaaagctacaccgttggctcgaacgagttttacatggggtacgccaccagccgccagaccgcactgtgcctggatgccggccacttccacccgacggaggtgatctccgacaaaatctccgccgccatgctctacgtaccccgcctgctgctgcacgtgagccgtcccgtacgctgggacagcgatcacgtggtgctgctggatgacgaaacccaggccattgccagcgaaatcattcgccacgatctgtttgaccgcgtgcacattggcctcgacttctttgatgcctccatcaaccgcatcgcagcctgggtgattggcacccgcaacatgaaaaaagccctgctgcgtgcgctgctggagcccaccagcgccctgaagcagctggaagagaacggcgattacaccgcacgcctggtgctgctggaagagcagaaaaccctgccgtggcaggcagtgtgggagatgtactgccagcgtaacgacaccccagcgggcagtcagtggctggataacgtgcggatgtatgagaaagaggtgctgagtcagcgcggataa

SEQ ID NO: 123637 - DNA, 1470 bp, Enterobacter cloacae
atgacttttcgccattgcgtggctgtcgatctaggcgcatccagcggccgtgtaatgctggccacttatgacggcaagcggcagacgctttcgcttcgcgagatgcaccgctttgttaactgcctgcaaaagcaggacggctgtgaggtgtgggatatcgacagccttgaggcagcgatccgcaccggactgcagaaggtctgcgatgcggggatccgtatcgacagtatcggcatcgatacctggggcgtcgattacgtactgctggacagcaacggcgaacgcgttggtttgccgatagcctatcgcgacagccgcaccgacggcctgatggcgcgtgcgattgccgggcttggcaaagagaatatttatggccgcagcggcattcagttcctgccattcaatacgctctatcaactgcgcgcgctggtcgaacagcagccggcgctggttccccgcgtggcgcatgcactgctgatcccggactacttcagctaccgcctgaccggcaacatgaactgggaatacaccaacgccaccaccacgcaactggtgaacatcaactccgataactgggatgaacacctgctggcctggaccggggcttccccctcctggttcggtacgccgacgcatcctggcaatgtgatcggtcaatggatgtgcccgcagggtaatgcgatcccggtggtggcggttgcgagtcacgataccgccagcgccgtcattgcgtcaccgcttgccggtaacgacgcggcctacctctcttccgggacctggtcgctgatgggctttgagagcaaaactccctacaccagcgatgccgcgctggccgcgaacatcaccaacgaaggcggtgccgaagggcgctaccgcgtgctgaagaacatcatgggtctgtggctgctccagcgagtactaaaagagcagaacattaccgacctgcccgcgcttattgccgacaccgaacgactgaaagcctgcagtttcctgatcaatcccaatgatgaccgctttatcaacccggcggacatgagcgccgaaatccaggccgcctgcgtcgacgccgggcagcccgtgccatcgaaaccggcagaactggcacgctgtattttcgacagcctcgccctgctgtatgccgagatcctgagcgagctggccgaccttcgtggccggccgttcactcagctgcatattgtcggcggcggctgccagaaccagcttctgaaccagctctgcgccgatgcctgcgggatcaccgtggtggcgggcccgattgaagcgtcgacgctcggcaatattggcattcagctcatgaccctggacgaacttgccagcgtggacgatttccgcacggtggtctcgtcgaacgccacgctgaccacgttcatccccaatccctgccatgaaattgcccgctatcgggcgcagtttcagcaaaaccgactgactaaggagctttgcgcatga

SEQ ID NO: 123638 - DNA, 597 bp, Enterobacter cloacae
atgaaaagttcggcacgttctcttttcctgtgtttagtgatgctcatcgcgggtgtccccctgcacgccgccgaaaccactgccccgacgacagccccctatctgctggcaggtgcgccctcgttcgatcagtcaatcagccagtttcgtgaaaccttcaataaaaccaaccccacgctaccgctggatgaattccgcgccattgacagctcccgggatacgccaaccctgacccgggctgcgagcaagattaacgagaatttatatgcctccactgcgctggagcgcggcacgctaaaaattaaaagcatgcaaataacctggctgccgattcaggggccagagcagaaagccgctaaggcaaaagcgctcgagtacatgagcgcgatactgcaggcttttacgcccgcgctgaccaaaaagcaaagccagcaaaagctgcaaaaactccttaccgccggtaaaaataagcgttactacgccgataccgaaggggccatacgctatgtggtggcagataacggcgaaaaaggactgaccttcgctgttgaaccgattaagctggcactatcagacacactcggcggggcgaattaa

SEQ ID NO: 123639 - DNA, 765 bp, Enterobacter cloacae
atgcaccacgacatcagcacccttctgaccgacctcattaatggcaccgtagcgctacgtgacgtacggtttgtcgccccgcccgacccacactcccgcacatcgccttgcctggtcattaacctcgataatgcctgcgaagcgtggttttcttcctctgcggaggggttacttcataccggacacgcgctcagcatcagcttcggtaaacagcagctgtcgcttcgtctttatcgggataacgtgcttatacagcaccagcaggttgcccggcgcggcccccgaaccggagcgtttctcctgcaaacgctggccgaactgcagatgcagcctgatgaacaggaaacggccagactggtggtactgagtatgctcagccactgtcgcgatcttcttggcagcgacattcatactgacagccgcagtcgtgctttgtttgaagccatccggcgctatctcgatgaacatcacgcctcaccgctgacccgcgattccgtggcgcgggcgttttatatttcacccaactacctttcacatctgtttcagaagaccgggaacgtggggttcaatggatacctgacccaaacgcgtctggaacacgcgcgccagttgctcaagggttatgatctaaaaatcaaagacattgccgcccgctgcggctttacagacagcaactacttctgccgcctctttcgtaaacataccgaacgctccccttccgagtaccgccgccagtatcacagccagctgactgccaaaaactag

SEQ ID NO: 123640 - DNA, 1164 bp, Enterobacter cloacae
atggaaaaggttgtcattgttgatgcgattcgcaccccgatgggccgttcaaaaggcggtgcattccgtaatgtgcgcgcggaagacctctccgcgcacctgatgcgtagcctgctggcgcgtaacccggcactggatcccgctgcgctcgacgatatttactggggctgtgtacagcaaaccctcgaacagggctttaacatcgcccgtaacgcttcgctgctggcggagatcccgcattcagttccggcggtgaccgttaaccgtctgtgtggttcgtcaatgcaggcgctgcacgacgcggcacgcatgatcatgaccggtgatgcgcaggcctgtctggtcggcggcgtggagcacatgggccacgtgccgatgagccacggggttgatttccacccgggtatgagccgtaacgtggcgaaagcggcgggaatgatgggcctgaccgctgagatgctttcccgcctccacggcatcagccgcgaaatgcaggatacctttgccgcgcgctcccacgcacgcgcctgggccgcaacgcaatccggcgcatttaagcatgagatcatcccaaccggtggtcacgatgctgacggcgttttgaagcagttcagctacgatgaagtgattcgcccggaaaccactgtagaaaccctttctacgctgcgcccggcgtttgacccggtcaccggtacggtaacggcaggcacctcgtctgccctatctgacggggccgccgcgatgctggtgatgagtgaaagccgtgcccgcgagttaggcctgacgcctcgcgcccgggtgcgttcgatggcggtggtgggttgcgatccgtccattatgggttacggtccggtgccggcctcgaagctggcgctgaaaaaagcaggcttaaccaccagtgatatcgatctgtttgagatgaacgaagcctttgccgcgcagatcctgccgtgcatcaaagatctgggtctgatggatcagatagacgacaagattaacctcaatggcggcgcgatcgccctcggtcacccgctgggttgttccggggcacgcatcagcaccacgctgattaacctgatggaacgcaaagacgctcagtttggtctggcgacgatgtgtatcgggctgggtcagggtatcgcgacggtatttgagcgagtgtaa

SEQ ID NO: 123641 - DNA, 702 bp, Enterobacter cloacae
atgacaaccttaagctgtaaagtgacctcggtagatgctatcaccgacaccgtatatcgcgtccgtttagtacctgaagcggcattctctttccgcgccggtcagtacttgatggtcgtgatggatgagcgtgataagcgtcccttctctatggcttctacgccagcagagcaggaatttattgagcttcatattggtgcgtctgagcttaacctgtatgcgatggccgtcatggatcgcattctgaaagaacgtgaaatcgtggtggatattcctcacggtgatgcctggctgcgtgaagatgaagaccgtccgctgatcctgattgcggggggaacaggtttctcttacgtgcgctctatcctgctgacggccctggcgcgtaacccggatcgcgatatcaccatctactggggcggccgcgaagagaaacatctctacgacctgtctgaactggaagcattaagcgtcaatcatccacatctgcgcattgagccggtggtggagcagcctgaagagggctggcgtgggcgcagcggtacggtgctgacggcggttctgcaggatcacggcacgctggcgggacatgatatctatattgctggccgttttgagatggcgaaaattgcccgtgacctgttctgcaacgagcgtgacgcgcgtgaagaccgtctcttcggcgatgcgttcgcgttcatttaa

SEQ ID NO: 123642 - DNA, 783 bp, Enterobacter cloacae
atgtttgatatcggactcaacctgaccagctcgcagtttgcgaaagactgcgatgaggtcgtcgcgcgtgcttttgccgccagggtgaaaggactgctcctgacgggaaccaacctgcatgaaagcgagcaggcgcaacagcttgctcaacgctatgatcgctgctggtcaaccgctggcgtgcatcctcatgacagcagccagtggacgccgcagagcgctgaaatcatacacaggctggcgaaaacccctgaagtcgtggccattggcgaatgtggtctcgatttcaaccgtaacttttccacaccagccgaacaggaaaacgccttcaccgcccagctcgccctggcggcagagcttggaatgcctgtgtttatgcactgccgtgacgcgcatgagcgattcctcgccttactggaaccctggctcgataaactgcccggtgcggtactgcactgctttaccggttcacggcaggaagcgctggattgtctggaacgcgggttatatctgggcattaccggctgggtttgcgatgaacgtcgcgggcttgagcttcgcgagctgttgccggtgatcccggcggaccgcttgcttgttgaaaccgacgcaccttatctgctgccgcgagatatgcaacccaaaccggcttctcgacgtaacgaaccggcctatctggggcatattcttgagagcgtagcgcgctggcgcggagaagacccgcactggctgtgcgcacagacggatgacaacgtgcgtcgcctgttcgggatagacgtttaa

SEQ ID NO: 123643 - DNA, 678 bp, Enterobacter cloacae
ttgagccacctgaagggggttctcgagtcccttgagtgggagagtgccttttttggtctgccatcagccatcgtgcgcctgcgcgacgatgcgccggttctgactgacgccgacttcaccgcctggccgcgggtgcaggccaggatccccgcagaccgtgccgacctgctcgatgcgctccagcaacaaggttttcagctggttgaaggcgaggttgatctgtcccttacgctcacccatcatgattcgcccggtgcggaagtggcaacggagcaggatatccccgcgctgcgtcagatggcggcgcaggcgtttgcccggagccgttttcgcgcaccgtggtatgcaccggacgacagcgggcgtttctacgcccagtgggtagagaacgcggtaaaaggcacctttgaccatgtgtgcctggtgtttcgcactgcaggcggccagattgagggatttgtctcgcttcgtaagctcaacgcgaacgaggggcgtattggtttattagccgggcgcggcatgggcgaaaaactcatgcaggcggcgcttcactgggcgcagcagcaacagcttttgactctgcgggtggcaacccagatgggcaacaccgccgcgcttaaacgttatatcgcgagtggtgccaacatcgacgccaccgcttactggttatacaggtga

SEQ ID NO: 123644 - DNA, 1476 bp, Enterobacter cloacae
atggctaactactttaatacactgaatttgcgccagcagctggcgcagctgggcaaatgccgctttatggcgcgcgacgaatttgccgatggcgcgagctaccttcagggtaaaaaagtggtcatcgttggctgcggcgcccagggtctgaaccagggcctgaacatgcgtgactccggtctggatatctcctacgccctgcgtaaagaagcgattgctgagaagcgtgcgtcctggcgcaaagcgaccgaaaacggttttaaagtcggtacctacgaagaactgatcccccaggcagacctggtggttaacctgacgccagacaaacagcactctgacgttgtgcgttccgtgcagccgctgatgaaagacggtgcggcgttgggttactcccacggctttaatatcgttgaagtgggcgagcagatccgtaaagacatcaccgttgtgatggtggcgccgaagtgcccgggtacagaagtacgtgaagagtacaaacgtggcttcggcgtgccaacgcttatcgccgttcacccggaaaacgatccgaaaggcgaaggtatggcgatcgccaaagcatgggctgcagcaacgggtggccaccgtgcgggcgttctggaatcgtctttcgtcgcggaagttaaatctgacctgatgggtgagcaaaccatcctgtgcggtatgctgcaggcgggctctctgctgtgcttcgacaagctggtggaagagggtacagacccggcatacgcagaaaaactgattcagtttggctgggaaacgatcaccgaagcgctgaagcagggcggtatcacgctgatgatggaccgtctgtccaacccggcgaaactgcgtgcttacgcgctgtctgaacagctgaaaacgatcatggcaccgctgttccagaaacatatggacgacattatctccggcgagttctcttccggcatgatggcggactgggctaacgacgataagaaactgctgacctggcgtgaagagaccggtaaaaccgcttttgaaaccgccccacagtttgaaggtaaaatcggcgagcaggagtacttcgataaaggcgttctgatgattgcgatggtgaaagctggcgttgagctggcgttcgaaaccatggtggattccggcatcatcgaagagtctgcctactatgaatcactgcacgagctgccgctgattgcgaacaccatcgcccgtaagcgtctgtatgaaatgaacgtggttatctctgataccgccgagtacggtaactacctgttctcttacgcttgcgtaccgctgctgaaagagttcatgacgaccctgcagccgggcgatttgggcaaagcgattgcggaaggcgcagtggataacgcgcagctgcgtgatgtaaacgaagccattcgcggccatgaaatcgagaaagtgggccagaaactgcgtggctacatgacagatatgaaacgtatcgcggtagcaggttaa

SEQ ID NO: 123645 - DNA, 1146 bp, Enterobacter cloacae
atgatgaaaaaatccctgtgctgcgccctgctgctcagcacctcctgcgctgcattagccgcacctctgtcagaaacacagctggcgaaggtcgtggaacgtaccgttacgcccctgatgaaagcgcagtctattccgggtatggcggtcgccgtgatctatcagggccagccgcactacttcaccttcggcaaggccgatgtcgccgcgaacacacccgtcactgcacaaacgctgtttgagctgggctcaatcagcaaaaccttcaccggcgttctgggtggcgatgctattgctcgcggtgaaatttcgctgggcgatccggtgaccaaatactggcctgaactgaccggcaaacagtggcagggcgttcgcatgctggacctggcaacctatactgccggtggcctgccgttacaggtgcccgatgaggttaccgataatgcctcgctgctgcgtttttaccagtcctggcaaccacagtgggcgccaggcaccacgcgtctttatgcgaatgccagcatcggtctgtttggggctctggcagtgaaaccttctggcatgcgctttgagcaggcgatgacggagcgggtcctgaagccgcttaacctgaaccatacgtggattaacgttccgaaggcagaagaacagcattacgcctggggttatcgtgacggtaaagcggttcacgtttcgccgggcatgctcgatgccgaagcatatggcgtgaaaaccaacgtgaaggatatggcgagctgggtggtggctaacatggcccccgatggggtacaggatgcctcactgaagcagggcatggtgcttgcacagtctcgctactggcgcacaggctcgatgtaccagggcctgggctgggagatgctcaactggccggtagaagccaaaaccgtggtggagggcagcgacaacaaggtagcgcttgcaccgttgcccgtggcagaagtgaaccctccggctccaccggtaaaagcgtcatgggtacataaaacaggctcgacgggcggatttggcagctacgtggcatttatccctgagaaggaactcggcatcgttatgctggcgaacaagagctacccgaacccggcacgcgtggaagcggcataccgtattctgagcgctctgcagtaa

SEQ ID NO: 123646 - DNA, 531 bp, Enterobacter cloacae
atgcgcattttgcctgttatcgccgcagtgacagccgcgtttttagtggttgcctgcagctcccctactccccctcccggcgtcaccgttgtcagcaatttcgacgcacaacgttttcttggaacatggtatgaaatcgcgcgccttgaccaccgttttgaacggggtttagagaaggtcacggcaaattacagcccgatggatgacggcggtattcaggttatcaaccggggctataatccggaccgggaaatgtggcagcagtcgattggacaagcgtactttaccggcgacccgcgacgggccgcgctcaaagtctccttcttcggcccgttctatggcggatataacgtgatcgcgctcgacagagagtaccgtcacgcactggtctgcgggccggatcgcaactatctgtggatcctctctcgcaccccaaccctttcacctgagatgaaacagcagatgctggacgtcgcgacccggcaagggtttgatgtgtcgaaactcatctgggtagaacaaccccattaa

SEQ ID NO: 123647 - DNA, 600 bp, Enterobacter cloacae
atgttcaaaattcttttgattgaccgttgtcacttcacccgcaccgggtttgaagcatggctcaatcattccggtttatttccggaaaacgtcgttgtgaccggcctgaataatcttttcctcgccagagagcacattctgcaatggaaaccgacgctggtcattgctgacctgcatgggttcagacaggatgtacatccctttcagtccctctcatctttgctgaacgccagcgaaagagtgccctttattttgctgcaatcgggtgaggatagtgaaatgaccgcctggctgaagcaattcccggtctggtcatcgctgttgaaaaatgcccgtcttgaacaactggggacagttatccacgacgcactcatttcgcacgcgaacagtgaaaagccaaaggtaaccgcgcctttgctgacgcgccaggaagagaaagtgctgacgttgtggatggagggtgccagcaatcaaaaaattgcggctcacctgagtattaacggtaaaacggtctatacctataaacggaatatccgcatgaaattgcatatggatacgcgttattcaccgtttttatccctgcaggaatcagaaagctga

SEQ ID NO: 123648 - DNA, 1239 bp, Enterobacter cloacae
atgagtggactaaaacaggagttgggactggcgcagggcgtgggtctgctgtcgacctccttgttaggtacgggtgtgtttgcggtacccgcgctggcagcactggtggccggcaataatagcttgtgggcgtggccagtgctgattgtgctggtgtttccggtcgcggtcgtgtttgccatcctcggacggcatttccccagcgcgggcggcgtagcgcactttgtcggtatggcgtttggtccgcgactggagcgggtcaccggctggctgtttctttctgttattcccgtcggtctaccggcagcgttgcatatcgcgaccggttttggccaggcgctgtttggctggcataacgagcaactgctgctggccgagctgggtacgctggccatcgtctggtgggtcggctcacggggtgccagttcaagtgccaacctgcaaaccgtcgttgcaatactgattgtggccctcattgtcgccatctggtggaaaggggatattacgctgaaggagatccccttccccgcggtaagtgacgtcaaccattcgcagctgttcgctgcgctatcggtgatgttctggtgttttgtcgggctggaggcgttcgcccatctggcctctgagtttaaacaaccggaacgggatttcccgcgcgccctgatgattggcctgctgttagcaggtaccgtttactgggcctgtaccgtgctggtactgcatttcaacgcgttcgccgcggataaagcggccgctgcctcgctgccgggcatggtggtgcaactgtttggtctgaaagcgctgtgggtcgcctgtgttattggctatctggcctgttttgccagcctcaatatctacatccagagctttgcgcgtctggtgtggtcgcaggcgcttgataaaccagagagccgccttgcgcgcctgtctaaacgtcagctgccgttgaatgcgcttaataccgtgctgggctgctgcgtcttgagttcgctatgtatttacgggctgaatatcaatcttgatgccctgatcgtgtacgccaacgggattttcatcatgatctacctgctgtgcatgctggcgggttgtcgtctgctgaaaggtcgctataaagcgctggcagtggttggtggcgtgctttgcctgctgttgctggcgatggtggggtggaaaagcctgtatgcgattagcatgctggcggggctgtggctgtttttaccgaaacgcggcaccctgtaa

SEQ ID NO: 123649 - DNA, 1302 bp, Enterobacter cloacae
atgtttggagcagaactcgtcatcgtcctgttggcgatttatttgggagcaagactcgggggtatcggcattggttttgccggcggtctcggggtgctcgtacttacccttatctttcagattaaacccggcgcaatcccttttgacgttatcgaaatcatcatggcggttattgccgctatcgcagccatgcaggtggcaggcggtatggactacctggtgagcctggcggagcgtatgttacgccgccatccaaaatacattaccttccttgccccgctggtgacgtggtttatgaccattctcgccggtactggccacaccgccttctccacgctgccggtcattaccgaagtggcgaaagagcagggcatccgtccgtctcgtcccctctcgattgccgtggtcgcgtcccagattgcgattaccgcatcacctatctccgctgcagtagtcttcttcgccggtatccttgagcctatgggcgtgagttacctgacgctgctggccatctgtattccggtgacgctgattgcagtgatgatcaccgccgtgctgtgtaacttcctcggcgccgaactgaaagacgatccggtttatcaggagcgtctggcaaaaggtgaagtgaaactgcgtggtagccaggtcttcgaactgaagccgcatgcaaaacgctccgtcttgctgttcctgatcggtatcgttgcggtcatgttctacgcaaccgccatcagtgacaccgtgggtctgatccagaacccggtcctgccgcgtaacgaagcgattgtggtattcatgctgactatcgctacgctgatcagcatcacctgtaaaatcgacaccagcgaagtgctcaacgccagcacctttaaatccggtatgagcgcctgcgtgtgtgtactgggtgtggcctggcttggtgataccttcgtgaaagctcacatcagcgatatccagaccgttgcgggcgacctgctgcacaactatccgtggctcctggctgtggtgctgttctttgccgcaaccctgctttactctcaggcggccaccaccaaagccctgatgcctgcggcgctgatgctgggagttaccccgctgacggctattgcctcgtttgctgccgtttctgcgctgttcgttttacccacctacccaaccctgctggcggcggttgagatggatgacactggctcgactcgcatcggtaagtacgtgtttaaccatgcgttcctgatcccgggcgtggtggctatctcgctgtgcgtgatcctcggctttatcattggcggcatcgtgctgtaa

SEQ ID NO: 123650 - DNA, 1542 bp, Enterobacter cloacae
atggcacttcacagcaaaaaactctcttttacccggccaataatggccagcttcgcggggatactgtgcagttttgcactgatcgctgtcgtggttacgctttcgcaacgaaaggattttcttgaggattatcataaaattaatggtaatttcacgcataatctggcggttaactataccgaatcaatgttgcgtgaaaacgactatattcttggtcgttctgcgatgtacttttcccgcaacgaaatactgaatgagacgctgaacatcaacccgacgcaagggttgcagatgttgatgcatttgcaaaacctgatgccgaccgtgtcatccatctcgctggccgacacggaagggcattatttgcacgttccagaagcgcctcccacggaaaagagtaaaaacgccgatccgcggactcgcccgtggtttgtcgcccacgcggaagccagtattttcagccattatacccacccttatatggactactttaccgggcatccaacggtcacgctttataagccattgatttcaacagaaggcagactcaagggaaccctggcctttcatcttgatctggcgtcgatggggtatacccttcgacagatggtggcccctgtacaaggggaattcttcgtcgtcgagcgcgacggaaccgtggtgcttcatcctgacacgggcgcgctgttcaaaaaatacgtgagcgaagcgctgatggacaaaatgaccagcggcgaggggcatttatacgaccggaaaagtaaaacctggtattactactactccttcactaacccggattggtttgtcatctaccgggtctttggcgcgaccctgacggatataacccgccacgaaaccactatcgttggttggggatttgcactggcggcgattattatcattctcttcggtttgtaccttcgccatgcctcgcgtaccgtgctgatgcatattatcaacgccatcaaaactggcgacgtcagccaggcaccgcgtctggaagcgatgctgagtcataccatccagtcgaataaagagcgtgagatggcatatgtccgccaggcaacccacgatgcgctaacaggctgcaaaaaccgccgcgcgttcgataccgatgtggaagagttaatggcggctcaacagcctttcgcactggcgctggtggacatcgataacttcaaatcaatcaacgatacctggggccaccttagcggcgatattgtcctgcgtaacgtggcgcgtgaagggatccagatcatgcaaccgcaccacatctcggtgtaccggtacggtggagaagagtttgcggtggtcttccaggctgcgcaaattgctgatgcaatctcgttgctggaagcgtggcgtaccaccattgaaaaacgcgtctggcgcgaagaaaacctgcaggtcacgttcagtgcaggcctgggggaatggcatttcgaaccgctggagcaatttgtcgggagcgtggataacgcactttacagcgcaaaacagcagggtaaaaaccgcatccttcggacctccatccgttaa

SEQ ID NO: 123651 - DNA, 474 bp, Enterobacter cloacae
atgctgactcccctcccctttctgctcgtttacttcgcactctccggtttactggtacgtgaagatattcgtgccggccttctcccggataaatacctctgtcccctcttatggaccggcctgctcttccagcgttgccttcatcctgactttctttcgaacgcagtgactggcgcgatggcagggtatgcgagctttgcgattatctactggggctaccggcttctgactggacgtgaagggatgggctatggcgatgtgaaatatctttcggcactgggggcgtggcacggttggcacatattgcccgcactggtgttaaccgccgcattgttggcgcttctttaccagctcattctcgctttaccggctcctgataaacaggcattaaaaaacccactgccttttgggccatttctggcggcagcgggtttaagcgttggctggcagacgctgtttagtcagccactttaa

SEQ ID NO: 123652 - DNA, 369 bp, Enterobacter cloacae
atgtggttgctcgaccagtgggcagaacgccatatcagcgatgctcagcgaaaaggcgaatttgataaccttgcgggacgcggcgagccgttagtgcttgatgatgattcgcatgttgcccctgaattacgggccggatatcgcttactcaaaaatgccggttgtttaccaccggaattggagcagcgtaaagaggccatgcaactggctgacctgctgaaagggattcgcaaggatgatcccagccaccgtgaaattagccgtcgactggctctcatcgaactcaaaatgcgtcaggctggaatgagcacagactttttgcacggtgagtacagtgacaggctaatgcagaaaataaatgaggaataa

SEQ ID NO: 123653 - DNA, 1140 bp, Enterobacter cloacae
atggcaggggaaaggatgacatcgactgagttatggctacggttaatacacaccggttctctttatggcgatgtgatgctggaagcggcagcacgattgcacaaccagacaaccattgacggtcccgttgtcagagacgccggtctgtctgtcaaacaggctgcacggttctttgcgctcagagaaagtgagctggaaagtagcctgctctggctcgaacagccgggtaaccatctgatcacggcggagcatcctctttatcctcctttactccggacgatcccggattatccaggcgcagtctttgttaaaggcaaccctgatgtactgaatgcagttcagctggcggttgttggcagccgtgcaccgtcatggtacggcgagcgatggggaaaaattctctgtgaacagctttctcaaagtggtttaacgatcaccagcgggctggcctgcggaattgacggtgtcgcccacaacgctgcgctatcggcaaaagggcgtagcgttgcggtgctgggtaacggtctctttagtatttatcctcgtcggcatcaggcgctggctgcgcggcttatcgattctggtggcgcgatagtgtctgagtttccgctgtcagcgcagccccggccgggacactttccccggcgtaatcgaattatcagcgggctaagtcagggggtattcgtggttgaagcagcggtacgcagcggttcgcttgtgaccgcacggtgcgcgcttgagcaggggcgagacgtgtttgccttacccggcccaattggtaacccgggctgcgaagggccgcactggctgataaagcagggtgcaacaccggtaacggaagtcagagacattcttgaaaatttgcaatatggattgcaacggctgcaggaagatcccgaaaagcgacattattcatcagatcagggaaaggtggcattgccatttcccaagctcctggctaacgtaggagatgaggtaacacctgttgacgttgtcgctgaacgtgccggccaacctgtgccagttacggtagcacagctactcgaactggagttagcaggatggatcgcagctgtacccggcggctatgtccgattaaggagggcaagccatgttcgacgtactgatgtatttgtttga

SEQ ID NO: 123654 - DNA, 558 bp, Enterobacter cloacae
atggagtcggacaccgactaccgcctgcgcattcaacaggcttttgaggggctgagtactgcaggctcaaccggtgcatatcagtttcatggccgcagcgccgacgggcgtgtcgcggatatttccgttatcagtcctgagcctgcgtgtgtgaccgtgtcagtgctctcgcgcgaaaataacggcgtggcctctgacgagctgctcgacatcgtgcgcactgcgctgaacgatgaggatgtcaggccggtggccgaccgcgtgaccgtgcagtctgcgaaaattgtcgactacaaaatcaccgcatcactttacctttaccccggtcccgaaagtgagccggtactcagtgcggcaaaagcaaaactgcaggcgtatatcaccgcacagcaccggctcgggcgtgacatccgtaaatctgcgatttatgccgcgctccacgttgagggtgtgcagcgcgtcgagctggccgcgccggtggctgacatcgtgctcgatgagactcaggcgtcatggtgcaccgagtacagcgtgaccatcgggggcaacgatgaatga

SEQ ID NO: 123655 - DNA, 531 bp, Enterobacter cloacae
atgaatgatacccgactgttgccggtgggctcgtcgccgcttgaggtggcggcggcgcgcgcctgcgctgaaatcgaaaatacccccgttcccctgcgccgtctctggagccctgacgactgcccggcaaatctgctgccgtggctggcgtgggcgttttcggttgaccgctgggatgagaaatggacggaggccacaaaaagggaagtgatccgcgcggcgtggtacatccacgcgcacaagggaacgataggcgcggtgcgtcgtgtggtggagcccctcggctatctgattaacgttactgagtggtgggaaaccagcgacccgcccggcacgtttcgcctcgatatcggcgtgttagagaccggcatcaccgaggaaatgtattacgaaatggaacggcttattgctgatgcaaagccagccagtcggcatcttatcggccttaacatcattcaggatgtgccgggctatctctacaccggtgcgctgacatatgacggcgacatcatcacggtttaccccggataa

SEQ ID NO: 123656 - DNA, 426 bp, Enterobacter cloacae
atgaaagacagatatttctggagtgcaaaagaaaacggcttttatcctgaatccatgaaagaactttatgagaacagccctgatggctggccggaggatgccgtagaaatcagcgaagaactttataattcactactggaggggcaaagcagggggaaagttatcgcctcaggccgcgacggaaaacccctgctttcggatccggtgattgaccacactgcgctggcggaagctgaaaagagccgtcttgggagtaaagcggaagaaatgattttgcccctgcagagggcggtcaagtatggcattgcgtcagaagaagaaatggagcggctcaaggaatgggaaattttcagtgtggaactcagccgtgttgatacttctctggcaccagaaatagaatggcctgagccaccatcgagcgattaa

SEQ ID NO: 123657 - DNA, 1194 bp, Enterobacter cloacae
atgggcgactatcaccacggcgtcgaggtcatcgagataaacgatggcacgcgcaccatttccaccgtctcgacggccatcatcggtatggtctgcacggccagcgatgctgacgattcaacattcccgcttaatgagccggtgctgattaccagcgtgcaaaacgcgatcgctaaagccggtacaaaaggcacattatcaaaatccctgcaggccatcgccgaccagtgcaagccggtcgttgtggttgtgcgcgttgccgaaggtatcgacgacccggatgacccggaagcggcacagaaagaaaccatttccaacatcatcggcacgaccgacgaaaacggcaaatataccgggcttaaggcgctactgacggcaaagaccgtcaccggcgtcaagccgcgcattctcggcgtgccgggtctggattctctggaagtggcgaccgcacttgcgtcgacctgccagagcctgcgcgccttcggttacattagcgcgtggggctgcaagaccatttctgacgccatcgcctaccgtgagaacttcagccagcgcgagctgatggtcattcaccctgattttctggcatgggacaccacggcgaacaaaaccgatattgcatgggcgaccgcccgcgcgctcggcctgcgtgccaaaatcgaccaggagaccggctggcacaaaacgctgtctaacgtcggcgtgaatggcgtcaccggcgtcagcgcctcggtgtcatgggatttgcaggagaaggccaccgacgcgaacctgttaaatcaggccggtgtcaccacgctgatccgtaacgacggctttaaattttggggcaaccgaacctgctcagatgacccgcttttcctgtttgaaaactacacccgcacggcgcaggtgctggccgacacgatgggtgaggcgcacgcctgggcgattgataaacccgttactgcaacgcttatccgcgacatcgtcgccggtatcaatgcgaaattccgcgagctgaaaaacaacggctatatcgtcgacggcacctgctggtacgacccggagtcaaacagcgtggaaaccctgaaagccgggaaactgtatatcgattacgactacacccccgtcccgccgctggaaaacctgaccctgcgccagcgcatcaccgatacctatctggcgaacctgtcagactcggttaacagctaa

SEQ ID NO: 123658 - DNA, 1164 bp, Enterobacter cloacae
atgattacgggtatgaatattcaggccggtgcaaagattgccccggcgtttatgctcaagctggataacgaggatattacgcaggattttagtaatcgccttatcagcctgaccatgaccgataatcgcggattcgaggccgaccagctcgatatcgagctcgatgatgtcgacgggcaaatcgcactgcccccgcgcggcgcaacgttaacgctgtggctgggctggcaggatagcgccctgataaaaaaaggcacttttacggtcgatgaaatcgagcaccggggcgcgcctgatacgctgactatccgggggcgcagcgctgattttcgcgggtcgctcaattcccgccgggaacagtcatggcacgacaccacgctcggggtcattgttgagacaattgcagcacgcaataagctgacagccagcgtggccgacacgctgaaagcgatcccggtctctcacattgaccagtcgcaggaatccgacgcggcgtttctttcccgcctggctgaccggaacggtgcggcggtctctgtaaaagcggggaatctgttatttctgaaagccggaagcggtaagacggccagcgggaagcccattccgcagatgacacttgaacgcggcgacggcgaccggcatcagtttgccattgctgaccgcgaagcctacaccggcgttacggcgaaatggctgcacaccagagacccgaagccgcaaaagcaaaaggtcaagcttaagcgcaagcccaaagagcagcacctgcgcgcgctgcagcacccaaaggccaccaaagccacgtcaaagcccaaagctaaaaaggaccaggaagcgcgcgagggcgagtacatggtcggtgagtctgacaacgtgctggagctgacgaccatctacgcgacaaaggcgcaggccatgcgcgccgctcaggcaaagtgggacaagctgcagcgcggcgtcgcggagttttcaatctcgctggctattggtcgggcagatttatttcctgaaacgccagtcgcggtaaaaggctttaagcgcgttatagacgagcaggcatggataatcagccgggtggtgcataacctcaacgggaacggctacacaacgggcttagagcttgagcttaaggtttcggatgtggagtacgaaagcgaagaattatag

SEQ ID NO: 123659 - DNA, 468 bp, Enterobacter cloacae
atgaaatcaaatgagttgcttgagattgctgctgacgaagagtcaccggctaaagtcattgcatggagtaacgacggtaactatcaacctaagcctaagcgcccttatgataaaattttaactgacctttctgaagaagatttgaagtcaccaggtgtacacaaactgattctcgccaagagtagtgaactcgagtacgaaaattacgaattgaagaaaagtgattcaaaacatagagatcttgaagtcaaatatgcttcactaacagcagaactgtctcaacttaagtcagctaaaaaatcaattgagttacttttttctgcttgtttaggcacggggacatgccttgttgggttgtcattctcgatatacgctgcaagcaacccattaggtggatatctagtaggtggtattggggtggccctttccggtgtatcaatagctgtagtttcactgggaaacaaataa

SEQ ID NO: 123660 - DNA, 366 bp, Enterobacter cloacae
atgaagttcaaaatcaatgggctgagagagcctggtaatcttgagaaagaacgagctgttatcgaaattcttgaggatggaaatgtcggtacactaattgttgcatcaactaagcagcaggatgaaggtagcgtttcctccggaattaagaattcctactggattccagatcaagatgttcaaaaaggtgatttgattattatttatacaaaggcaggtaagaaaaataatagagttaacccctcaaactcaaccagttacttcttctacattggtctggaaactcctctttacaatgagaatgatgagacagtcgttgtatttgatatctcatattggaaatcgttaagacgtagcgaggtgtaa

SEQ ID NO: 123661 - DNA, 291 bp, Enterobacter cloacae
atgagaatgaaacgttacgccgctggtatagcgacaagttgcctgatgttgtgcgcaggctgcacacccgcgccggttgcgcctccgccggtcattgtttacagcgcctgcccgagagtgagctattgcccgatgccggaaagcgaaccgctcactaatggcgacctgagcgccgatattcgcaggcttgagctcgcgctcgccgcctgcgcgctgcaggttgaaaccgtcaaagattgtcaggataaactcgatgaagaaagcacgcatcctgcgcgaagcgctgattaa

SEQ ID NO: 123662 - DNA, 492 bp, Enterobacter cloacae
atgaatcttgctatagatacaggcgcttttttcttcaataaaatgctgatgctgacaccacttacaaccaaaaaagaaataatgaataatgataatttaaattgggagccttggccagataagggatgtgatacagtctcttatagagctatttttaacataaaaggaaacacgcatggtgatatttatttgatagttaactttattcaacctaatgatgaaaatgctattataggtagttggagtttcgcgccttataaattaatcgatggggagcaaaaaaaaccagaggggaaagttacaaaaagattaagggactggttcaaagaaaaaactaatgttgacctcccaattcatggtgcatggggccatattaatgcggcatatgaccattggaattgctcaggtgcaatttattgtaattatcgttctggtttcagagatgaaaaatcctggagggattattgcaaatggaataatataaaattatga

SEQ ID NO: 123663 - DNA, 1038 bp, Enterobacter cloacae
atgatttttgaaatgtatctacataaaattgaacacttcactaatgcgagagcagagattgaaagttttggaaattatgtctatgttcaagatgaaccagacctttttcccgtttattttaaaaaagaaaatgggaagtatgcagagttgagtcgttggcaaacttgctttcctaaagttatgttacagcgtgcattaaagaagctaggcctaagtgaagaagggaaatatgcatttgaagtttttctatctcgattaggttatctgtttcaaatagataatcgacagcgtatagataaagatatctttatattattttatatacatcaacttctttctttaaaaaacaacaaagaagattacgcaataaaagcaaaaggcttttttttaaggtttttgtgttttgaaatgggcatggatgatgactcttataatttgctatgcattactaatgccgggctctgtataaatactgttcagcatggtaatgtaactgtattatcattgcttgagcaattttatgcacaacttgaaaaaaagaaaaaccttgaagatattaaggctataaaatactatcaatcatcggtattaaattttttgtttgttgcgaataacgaagataatcacctgttgtttaatgataaaaattgctatcttatcgatcctggtaattttattaatgcatataaaaaatctaaaaaaataatatataaagctttggatcagtgttttgataagcatcaatctacaaaaaatttattaatatccaacttcattctaatgaattacgcttattatattcttagagataatttagcagatcttaaaacattgagaagacatgtttcttcagatatatttggaaggataatttccgctatagtatacagaggtttctttgtagatgaagaaaaaatactgaggttagttggtgatgaatataaattcggacctgaaggtgaagaacggaaattatttaatatattcgatttaaatgttaatgttcgaccacaatcgagggtgttaggatttgaataa

SEQ ID NO: 123664 - DNA, 474 bp, Enterobacter cloacae
atgacatttaatgttaaaaatgggaatgttaaaattgatggttatcctatggaacttagctcttttgaaacattcacttcatctgaattttacaaaacccatccgcaattcactaagataggtaaattttatttttcgaaaaatgatattgaatgggaagggcagaactttatcgtagagttcagaccagcaattttctcatttaatccatctctttttcttacaaataaagacggagatttttatcaatcactcaaagattgggataagagggcatcgttaaaaaatctagaagaggaagaaagacgattgacagaatgggttcaaaataaattttccagaaacaatatgggaaagataaataagcctccatatggaacaaaatggacttatgaatggggagagataacagtgcaatcaaatgaaagatcctttgattgtgggatatatattgaatgggatcttaatctctga

SEQ ID NO: 123665 - DNA, 327 bp, Enterobacter cloacae
gtgccgctgacctgtgtctacagccaccaggacagctacgatccgctggcgcgtattgatggcgtggatgcaccggagatcttctggttccactgccagcccaacggtacgccggagcggatgacggatagcgaagggcaggtgcgctggggaggggtgaacagcgcctggggcaagctgtcgcgggaaagcgagacgcagttatcaggatattctcagaacctgcgtatgcggggcaatacccggatcgtgagacaggtctgcactacattctattccggtattacgacccggactgtgggcggtttacgcatcaggacccgatag

SEQ ID NO: 123666 - DNA, 660 bp, Enterobacter cloacae
atgtcctattatgtgatcatgaatgactttgaatcatcactcatgccaagaaatttacagggcatggttgatgaaagattacagatcgatgaaaactgggaaatagaaggctctgcattttccttcccttatcgaataacagacgatgcatgtccagatcgtatttatttgttgtgcaataaaaatgttggggctttgaaatttgactattataaaaaagactttgggcacttgatggacaagtctttattttcaattttagaaaattataagcacaatgttatttttgatcgagatataacaccagtttcgattaggaatggacaagttcttcgagatgattttaaatatgtatattttccaggcgtggatgttatagatgaagaaaaatctattcttgaagatgataaattcggagatatcataccttttaaaattgaattaaagaatgatgcgattgaatatgatattttttcgtttagcggcacattattaggagggtttgtcattattaaacaagaggttaaggaagtaattgaaagtaaaggcttccggggtttgaaacttgttcaactggaaaatgctttagacgttttctgtgaagattatttctacgaaatagactcaaatcgtaagagaaagggcaataaactatcttaa

SEQ ID NO: 123667 - DNA, 564 bp, Enterobacter cloacae
atgtatataaaaaatactattcaagactttgttatcaaattcaaaacgaatgatttaaatatgggagagatagactttacagcagaagaaaatgaaagttctctccctgtgaatttgaatggcgaaattcgatttttttatagccatttgattttaaatgaccatccaacattttatggtactttctttatacaaattgttgagtctcaagatctcaatgaaatattatcaggttggcgagttcaaaatgatacggcctggcacgatgagtatataatctttgctgaaagaaatggagacgttcttttttgtgacacccgaaatataacatctcctgtttatggtagtattcaaaaacgaaactttatcatttccggttccttagctgactttttggatgttttttgttctgccattgagatagagcaaagtaaatatgatggtgatggtacagatgatgattttaatttcagagaggattttctggaagatatcgattttatgcttaaaagcaaactaaaggatgttgaggcaaaagggtttaagcaattcttttttggttaa

SEQ ID NO: 123668 - DNA, 450 bp, Enterobacter cloacae
ttgcgattcaccatcaataaacacatgaaaatcggttacgataaatttgatgaaaaaagagttacatcttttatagaaaaaggaaatgagtttcatgatgataaaaaatatactgaggcgttagagcaataccacaaagcctggcaagctcttcctgagccgaagctcgaatgggaaattgccaactggatctgtgcatgcatatacagcgtatattttgatctggcggattatgctgaggcaaagaaatggggagagacgacattacggacatgtggatcggatatagacactgcacccttaatcgatctcggcatggtctgttatgagttgaatcaatttgaggaagcgtataaatattttaacgatgcttataactacggcaaagagcgtgcatttcaggatagacctagaaaataccttgaattttttttgcgcaaaagaacatga

SEQ ID NO: 123669 - DNA, 381 bp, Enterobacter cloacae
atgaaaataacaaatcgactgaaaaagaagttattagccctagatggcattgacaatgatttcatagagtatggaaaggaactagcatgccctgaatgcgatggtgtaataatatattccatagtaaattcatatggttttgactcgctcaccgaagaggtaaaatgctttcttgttaagaaaatgagaggtgtgaagtatcttagtgaagataataaatatagctatgatgaaagccaattgtatgtttcgaaaaacacatgtcaaaactgtttaaaagacttttcaactgtttttacgtataaagaagttcagtcagcccggtaccgtctatatcttgtggggttttttgaaggtgacttaaaacagatcaaacattga

SEQ ID NO: 123670 - DNA, 366 bp, Enterobacter cloacae
atgattgaaaatcttaattgtattaaagaaaatgatctgcttgaatggacgtgtggtgaaattaacccactgattactataccatttttagactatgtaatgatagattcaacacgccaattagtctttgcgttaagcgaaccaaagccattaccaaccgttttgacaattttcaatgctcagggcgaaaaactgttgtcgtctgcacctcctgaaggcgctattttctattacttaacattcgatctatcaaaggaagtggttgtcgtctgtagttatgcagtacaagagaatggctggtatgattggttttattcctttgatatgaagcgtaatgcgttaactcgaactggcccagcgtattaa

SEQ ID NO: 123671 - DNA, 444 bp, Enterobacter cloacae
atgaataaatccattcatgtccagacgaatactgccacattagttatttatgatttgatgtcattaaaacatagaattgataatgatgcagattggtggagtcttccagaagatgaaattgaagaaataaataaagggaatgtattatttctcaatcttggagaggatggcacctataaaattcatataaaaaataatgttgacgagtatgttggagcactatttttaaacgtaccttctggaaaggttttcattggggcgggggaggatgtcacgggcggagatcttgagcctgatgactcagatgctatttctggtgagtttattattttagaacctggtagttacaaagttaaatttaaaaagcaaggttcagatgttctaatttcctttacaaaagcaacgtttattgaaaactcattagaagagggagtttatctctga

SEQ ID NO: 123672 - DNA, 156 bp, Enterobacter cloacae
atgcgtgcggaaggcaaagattacatcgttaaagatggcgatgtgatgaactcttgtttaacgtttgatttccttacggggtcaaaacacattttccaggagttctgtcttcatactgggttcaaaaggaatgatttcggcagtcgcaagttttaa

SEQ ID NO: 123673 - DNA, 126 bp, Enterobacter cloacae
atgagcacggtttacatagttattttaacctatataaaaccactcgaagagattgacgcagcgatacctgctcatgttgagtggcttaaaaaaggatacgtagagggggggcctgacgtccggtag

SEQ ID NO: 123674 - DNA, 519 bp, Enterobacter cloacae
atgaatgttaataaagatgatgaactccttgtaatagtgaagaacgaaggaagattttactggttcgttgcctttaaagaaatgtgggttttggacagagttagatgggtagacgattttgtgaaaaacggggtggaaattaacttacaggatatccataaagaaagatatgacataccagtagtaaatgaagaaaacgtacaaatattcattgataacttaattaaagagggttatttatacgataaggatgatatgtctgtggcgttttacaataggctttcagaaaaaacaacatggtgggatatatatgatctaatgccggatttatttatagactttgatagtaagcgactatattctgaatgtgttgagaatatgcattatcacaaatatgttcctgatggatggttaggtgaacttgttgatttctgcagtgatggaaccttacctcaagatgaaatattctggataaaaaatgaaacagattatagaagcattgtgatcgttaaacggtaa

SEQ ID NO: 123675 - DNA, 861 bp, Enterobacter cloacae
atggccgaacaaatctcaagatgggtgatcagttttattacatctgcgggagttctgacgttgcttgcattcctaacacgttcaacgttggctaaattcttcactaaatcagtagagcatcatttcgagaaaaaatttgaaaaatttaaggctgagatacgcgacaacgaaaaggagctagagcaaatcagaacattcatgagttctgcacgaagagaccgtgattcagcacttcaatctaaacgcttcgaggctgcagaaagtttattacgtgcacgtcaacttatatctgaattttcgggtttggctgagtacttaaaaattcttaaagttgatgaaataataaaaaacaactccgaccccaaaataacaaacttcattaaaacattaactgacccattcaatatagatgaaaaattaaaaacctttaaagagatcgacagaactctcccaaacttataccttaacgagcgcacaataaaaacctttgaggcatacgagacaattatactcaatgctgtaacaattatgaaattactgtctcttcccggtttaaaaatcgacccaaatctatttaataaagaaaaaatgaaaagcatgattattgatctttacccacaatctcaagcgggctttgaacaatatggagacaatcatgttttttatttgaccatgtatttttatacgcaaattttgaatgagctcagaaatgaacttctcgggactggtaacatgatgaaagatactgaggctgctgctaatcttgcgagagatatacgtaatgcacatatgaatattcttaactccctcgaaaacaatgaaatccccgaaagcataataaacaatcctgatgccacatag

SEQ ID NO: 123676 - DNA, 561 bp, Enterobacter cloacae
atggcttcgacttggattgatgttacagataatgccgttaaaattggactagggtcactgatcgcacttgctagtagctggctcacccttaaactcgctcagaaccatgaaaataaaaaacaagttttttcccaaatcaataaagatattgaagacaaaaccaaaaggtacgttgatttcttaacaacatctcaatcgttaatgcagagatatctttttacacaatgtaatggtagtagcgacgactatcttaattatttaagactgcataatgaaatcagtatcacatctgatgatttcatacgattacatgcttttaaattacagagtgccgtttcatctttcattctttacaacaaaggtggtgatattgagctaatagataaacttcgagacaacggtaggaatgaggtgtcgaagtttcaatgcattgcctttactgaattagaacagttaaacacgaaaatacgtgaaaagaaagttgtatcccaaatcatttttagttggtttaaaagacgcgttacgctctggaaaatcaagaaaatgggtcagagttcatag

SEQ ID NO: 123677 - DNA, 204 bp, Enterobacter cloacae
atgaaagccacaggccgtgaaaacagcgcagtggtggaattcaccggcaaagtacagcgtatcgcgcaaattcatcagtacgggctaaaagaccgccctaacccgcacagccgtgacgtgcagtatgcagagcgccagttactcggattcagccgggaagataaacagctcgtcgagacactgataataaaacatcttgattga

SEQ ID NO: 123678 - DNA, 378 bp, Enterobacter cloacae
atgagtctgggaagttataatttcaaacccaagagaacaatatatgatggaaaggatgatgatttttatgattattcagaaaaaatatccataccaaagttagattgcgagattgttttcaaaaatgaagatgccaaacctctttggggtatacatgatgatttaaaaaaacagatcttgaaaaatatctctgggataaaggttaaaacatatagcgatgatctaagtccctcctataaatataacgatttagatatttatgtttattccggtttgtttgcaggcaatgttttgcatatagttttagctgagggtgaaagtcaggctgccagatataaaatcatattattagggtttgtattaactgactgcaattaa

SEQ ID NO: 123679 - DNA, 198 bp, Enterobacter cloacae
atgcaaagacaagagcttattgaactgataaaaaaaatccaacgtagtgaaggtacagaagaggaagctgatcacaacattgacctactttgtagaagtgtcgcagaccctcaggcagccaattacatttattatgaagaacttagcgcagaagaaattgctgataaaattataaactacaaaccaatccaactataa

SEQ ID NO: 123680 - DNA, 1185 bp, Enterobacter cloacae
atgtatttttataaatacctgagggtcgacaacctaaatctttccatgcttcgccacggagaggttttttttgcatcaccaaaagaattaaatgacatacacgaatgcaaaccacagtttatatttaatgccaaccgtgaggtatgggtaaagtttatccaagaaatcatctccagcatctgcattaatttgaacttaaaaccaaaatctcacttattaacaactttatactcactcaaaaaagatatccttaatgcacttttaagtaacaggaaatcactatcactaaattacgaggaaacaataaatagaatctcatatgaaatcagcaaaaaagccataacagaattagacttcattgacgcacgaaatgtgataagcgcccttaactcatacataaaaaatgaattaaacaccgagttaaatgataaattgtatattacatctttttcaaaaagcgccactatcctaacaatgtggggtcattacggtagtgcagaaaaaggttttgcaattatttatgaaacaaataatggggatattagtttagaaagcgacatagaaatattcccctctgtcacaagactatcagaatcaagatattcattaggcacttcgaggtttagtaaagcaaaacttcttgaggtggcatataaaaacaaaccagttagagcaaatggtttcagaaaactaatccccacattctcttttagtgaccaggaggatttttacgattgccgtgagattttattggcagacctaccgaaatacaatgagaatgatatcggtcgagtaaaattcaccgactggaaatatgaaaaagaattgcgtttacacttaccagtttatgatgagctagccccacctctcagaaatataaaaatatccatacaacatatcaaaggtgtgattttcggaactaacacaagcaccaatgataaggagaacatcctctccgcttgttatcacttaaaaaaatcaaatgcaaacaacagcgagctatatattttccaagcaaagtccataccaagccagtacaaaataaatataactgccctaggtaggatgtgtgacattcaaggcaaaggattaccttttatagtgaaagttaatccgaaaaactctgacgacaaaaaacaccttgaggaaatactaaaaatatcagagtcaattaatgcgagttaa

SEQ ID NO: 123681 - DNA, 210 bp, Enterobacter cloacae
atgaaagccactggccgtgaaaacagtgcagtggtggaatttaccggcaaagtgcagcgtattgcgcagatccaccagtacgggctaaaagaccggccaaatccgcacagccgtgacgtgcaatatgcacaacgccagttattagggtttagccagaatagtatacagatggtagaaaaattgatcataaatcattttagttctaggtaa

SEQ ID NO: 123682 - DNA, 642 bp, Enterobacter cloacae
atgaataatctaaattctctgcaggaaatcgcacgcgcgatccgcaaccttatccgcaccggcatcgtgaccgacgtcgacctcgacgagggactttgtcgcgtccagaccggcggcatcgaaaccacctggcttaactggctcaccagtcgcgccggtcactctcgcgtgtggtgggctccctccgtcggtgagcaggtgttattgctggccatcggcggcgagctcgataccgcttttgtgctgccgggcattttctctgacgaccatcccgcgccctcggcctcacccgatgcgtttcatgtgtcatttcctgatggcgctgtcatcgagtacgaaccccaaaacagtgcgctcaccgtgtcaggcatcaaaaccgccgacgtcactgcgtcagattccattacggcggccgtgccggtggtactggtgaaagcctctacccgcatcacgctcgatacacccgaggtggtgtgcaccaacaagctgaccactggcacgctggaagtgcagaaaggcgggaagatgaccgggaacatcgagcacaccggcgggaaatttatcagcaacggcgtgcaggtggatgaccacgcgcacggcaacgtacagagcggcgggagctggactaaggggacacaatga

SEQ ID NO: 123683 - DNA, 315 bp, Enterobacter cloacae
gtgatcgtgtgtgactttgtgggcgaccccgatttgatattcgtgccggtggccgcatggctgcgtgagaatcagccggatatctgcacgctcgatgacggacgcaaaaagggctaccgtttccagatggatttaaacgacggggacaatgttgatatcagcatcagcctgcagctcaccgaacgcaccatcgtcaaagaggaaaacggcgcgctgcacatgagctatgcccctgagcctccgctgcctgagcccgtcacccggccaaaagagctctacatcaacggcgaactggtgagtaagtgggatgagtga

SEQ ID NO: 123684 - DNA, 291 bp, Enterobacter cloacae
ttgcttgttcaggacggcacgctgcccggcaaggagcagtggcgctgggatgctgccggtaactcgctggaagattctgctgagaaggtcacgcacaacagcctgacgcaggtcagcttccgctacgatccactcggtcgcagcatcagcaaaatgcgacgccagatgctgggcggacagccaaccggcaagccagtcagcacccggtttgtctgggaagggttccgtctgctgcaggaagtgcacggggacgtgccgctgacatgtgtctacagcgatcaggacagctag

SEQ ID NO: 123685 - DNA, 684 bp, Enterobacter cloacae
atgacggcagttgccccggtaatcaccattgatgggcctagtggcgcagggaaaggaactctgtgcaaggcgatggcggaagcattgcaatggcatcttttagattcgggagctatctatcgcgtgctggcgctggcagcgctgcatcaccatgtggatgttgcgtctgaagaggcgctggttccgctggctgcgcatctggatgtgcgttttgtctcgaccgatggcaacctcgaagtgatcctggaaggggaagatgtgagcggcgaaattcgtacgcaggaggttgctaacgcggcctctcaggtggcggctttcccgcgcgttcgtgaggccctgttacgccgtcagcgtgctttccgtgaagcacccggcctgatcgctgacgggcgagatatggggacggtggtattccctgatgcgccagtgaaaattttccttgacgcctcctcggaagaacgggctcaacgccgcatgcttcagttgcaggagaaggggtttagtgttaactttgatcgccttttatccgagataaaagagcgcgatgaccgcgaccgtaaccgcgccgtcgccccacttgttcctgcagaagatgcattagttctggattccaccagtttaactattgagcaagtgattgaaaaagcgctacaatatgcgcgccaaaaactggcactcgcgtaa

SEQ ID NO: 123686 - DNA, 2265 bp, Enterobacter cloacae
atgggaattcccacactaagtctgtgcgccattctggcgatagtgccgctactctggttacctgaactacctgcacggcatactgtatggatcatggttgccggtggggtgttgctgggcttacagcgaagcttcagtctgaagtgtatcggtatgggggtgttattttgcgcgtggggcattctggcagcgcaggaaagcgtctggccgatgcagcatttaaccaccggtgcagtcaaggctgaggtagagatcaccgccaccgatggcacaacagtccatcaggggaaaatcgttgcacttaatggcaaacgctggtgggcatcgacgggcatcgtgctgtacggcaattacctgccgcaaaaggcctgcgcgggtcagcgctgggccatgacgctcaggctcaggcctgtacatggtgaactgaacgacgggggatatgatcctcagcgaaatgcttttgcccggcatcaaacgttaagcggacgttttacacgggcagaaatcattgatgaacgctgcagcttgcgtgcccgctatctgtcatcgctgcacgacaccctttcagcctatcgatggggagcggtgatcctggggctggggatgggcgagcgcctggatgtgccccgggaaataaaaacactgatgcgtgaaaccggcacgtcgcatctgatggcgatctcgggtttgcacatcgcgctggcggcttccatcgtctggttgcttgccaggggtattcagtttttattgccgtgtcagtggatccgctggcagatgcctctgcttgcgggactgttttttgcggccttctacgcatggctaacgggtctgcagccgccagcattacgcacggtcatcgcgcttgcggtgctggccgctctgcggatcggcgcgcgtcagtggtcagcatggcaggtctggtgtagctgtattgcagcgatactcatcgttgatccgctggcggtgctttctcaaagcctggcgttgtcagtgtttgctgtcgcggcgttgattttctggtttcagtggctgccactccccagctggcgctggactcgccgggtgcgacccctggtaaatttactctatctgcaggttgggatgttgctgctgctcctgcctttgcaggtattgatgttccatggcttcagcgtctcttcgctggtggccaatctctttgccgttccgctggtgacctttatctcggttccgctgatcctgctcggtatgctactgcacctgctcccgctggtccccctggagactggcgtatggtttgcggcagataagtccctggccggtttgttctggctgctgcagcgtctgcctgatggctggcaggacgtcgatgagcgctggcagtacctgacattgctgtcctggctggccattatcggctggcgttttcgctcctggaaaagcatgccggcggtgtgtctgacaggagctgtcgtgctggcatccccattcatgcaaacggagaaaaccgatagctggacgttgcatatgctggatgtggggcaggggctatcaatggttattgagcggcagggtaaagcgcttctatacgacaccggtcccggctggcctgggggagacagtgcgcagcagttgattattccttggttacgctggcatcacctgcaaccagagggcgttattctcagtcacgagcacctggaccatgcaggtggtctggcatcgctgcaggcggtatggcccggcttatgggtacgaagcccgctggggtgggcgcagcatcttccctgctttcgcgggcagcagtggaaatggcaggggttaacattcaccgtccactggccaccggctggatccactgcccagggtaacaatcgctcctgcgtggttaaaattgatgacggtgagcagagtgttttgctgacaggggacattgaagcgcaagcggaacaggctatgcttagccattactggcgttatctgacgtcaacggtgatacaggtgccgcaccatggcagtaatacctcctcatcgttgccgctggtacaacgggtgggaggcgaaatcgcgctggattctgcggcccgttacaatgcgtggcgattcccgtcagtgaaggtggtgaagcgttatcgaaaagagggctatgtctggcacgatacccctcattcgggccaaatatcggtgacgttttcgcaacatgcctggcaaatccggtggttgcgggagcaatatttaccgcgttggtatcatcagtggtttggcgcgcccgtcgataacgggtag

SEQ ID NO: 123687 - DNA, 774 bp, Enterobacter cloacae
atgaatatttccgtctccgggttaagtgtgacccgacaagcacagacagtgcttgaggatatcgatctcgacctgtcatccgggcagattgtcggcctgttagggccaaacggctcgggcaaatcaacgctgttacgctgtcttgccgggctgtttccacaccacagtgaacgcgtcgcgcttaatggcacgtcgcttagcgtgatgccgttaaaaacgcgcgcgcggcagttagctttcgtcccacaacatgccgacgttgagggagaactgaccgtcgaggaaatcgtgcggctgggacgtacgccttaccggaaggcgtttcagagaagcactcgcgatgatgatatggcggtggaagaggcgattagcctcatgcggctatgcggattacgccagcggcggtggcagcaactgtctggcggggagcgtcagcgaacccagatagcgcgagcgctggcacagcagccccgggtgttgctgcttgatgagccgacaaaccacctggacattcagcaccagctggagctgatgcgacttatatcgcaactgcctcttacggtgatggtggcgctgcacgatctcaatctggcggctaactactgccagcggctgatcctgctgaaggccgggcgtatcgcggccacgggcgcgcctgcggaagtgctcacccctgaaaatatcgagcaaacctggtgcgtcaaagcgagcgtctacagggcagacgccgggatgacgatcggctacaacatgggcggcatggcggaggtgtag

SEQ ID NO: 123688 - DNA, 1005 bp, Enterobacter cloacae
atgcttctgaaaaaagggttattactgacagtactgctggccatggcaccagccacgtttgcagcaacaacttacccgctgacgattgaaaattgcggcgtcaggcagacctttacgcaagcgccacagcgcgtcgttaccgtgggtcagcatgaaacggaattgatgctcgcgctggggctggaaaaatctgtcgccgcaacctcagtctggttcggcaaactcccggattcgctggctgatgccggaaaaaaactcccccggcttgcggataactccccctcttttgaagccgtggtgggacaaaaaccggaactcgtcctcgctcagtatcactggcatattggcccgcagggcgaggtgggaacacgcgagcagtttgcatccctggggattaagacgtggatctcccctgccgactgcacggacaaaacggtgacggcaacctcaaacgctgacggagcacggagcacgccgttttcactggcagaaataaaacacgaagtcacagacctggccgccatctttgatgttcccgcgcgcggcgagcagctcaatcgtgagctgacagaacggattcagaaagcgcaggcgcgcatctcagcaaaacccctgaaggttgtcttttggttttcaagcagccgcctgaatggcgatccctgggtggcagggaattacggcgcgcctggctggataagccgcacgctggggttaaagaacgttattgactcgcatgatgaatggcccgctgtcacctgggaacatattgcccaaatgcagccagacgttatcgtcatcgctcagatgtcacgcaggctctaccctgccgatgacgccgcggtaaaagaggcctttttacgacgcgatccggtgacaagaaacattccggcggtcaggaataatcagattattgtggtgcccgcaatgtcgttaaacccttctttgcgtaacgtcgacgcggttgagcttatcagcgatcggctggcttcattccagggcgaataa

SEQ ID NO: 123689 - DNA, 951 bp, Enterobacter cloacae
atgagtgatatcttaagcgttatcgtcgacgggctgtggcggcaggggaacaaaagcctcgccgtcaggctggtggcggaaaacggtgaagcgctgccagagtggcagcccggtgcgcatatcgacgtgcatctgccctgcggggttatacgtcagtattccctgaccggcccatgcgggagtgaagtctatctgatctgcgtgggccgggaaaccgcctcgcgcggcgggtcgcgctatattcatgagacgctgcgtcccggtcagacgctgctgatctccgcgccgcgcaatctgtttgccctgcaggaggccgaacgggtgttgctgctggctgcggggatcgggattacgccactgtatgccatggccctgcaactggaagcagccggaaccccgttcactctgcactattatgtcaaacacgctgaaagcgcggctttcgcccgcgagctggcgcagctgaagcacggcgaatgcgttatccataccaccagcccgcgcacgttgctggcagagcatatcccggtggccgaggcgggtcttcacgcctgggtctgtggcccggccgggtttatggaaaaagtacgtgaggtggcgacggcgaaaggctgggatggcgccacgatccacagcgaggcgtttcaacccgcagcgcctgataccggcgctgaaagtggcgagatcttcacggttaaactggcctccaccggagagcgctggcctgtgcccgctgataaaactattgcccaggtgctgcaggaaaacggtgtggccgtaccgctctcctgcgagatggggatctgcggtgcgtgtctgacaccggtgattgacggcgtggtggatcaccgggatagcgtacagtcagaggcagagaaaaacgccccgaacccgcatgtggcgctgtgttgctcaagaagtcattccgctgagctggtgattgggctgtaa

SEQ ID NO: 123690 - DNA, 501 bp, Enterobacter cloacae
atgataacgctggacgattttaatcaccggggtcacgatgaggtgcttacgctattacacccttgcgtggccattcccgactgggccgaggcgctggtcgccgggcggccttatccgagccgggatgctctgtttgatgcggcccaggcgctgacgaaaagctgggatgaacacgcgctcacgcgggccctgagcgcgcatccgcgcatcggtgagaagcccatgggcacgcaggcggaggcggcgctgtcgcgtcgggagcagggagcggtgaatcatgatgatgcccggcttgctgaggcgttacgggcaggtaatgcccgctacgaaagccgtttcgggcgcgtctttctgatccgcgccaaaggccgcagcggggaggagatcctccaggccctgaacgcgcggctggaaaacagcgatgcgcaggaggtgcaggccgcactggatcagctgcgggaaattaccttattacgactggaaggagtcattggcgcatga

SEQ ID NO: 123691 - DNA, 324 bp, Enterobacter cloacae
atgagcacgctcagtacacatattctggatatctcgacgggcaaacccgcgcagggggtgacggtacgtcttgaacacgacgcggagatcatcgcaactggcgtgaccaacgcgcagggccgcatcaccgaatttgttccagtcctgcctgcgggccgctatcggctggtggccgagactggcgcctggtttagcgaaacggggcgcgacacgctctatccctgcgcgcagattgattttcttatcggcgaaacggcagatgagcacttccatctgccgtttgtgattgcccctggcggctggtcaacctaccgcggcagctga

SEQ ID NO: 123692 - DNA, 744 bp, Enterobacter cloacae
atgtcgtctgtccgtatacaagtcattaatcccaataccagcctcgcgatgacggaaaccatcggcgcggccgcccgcgcggtggctgcgccgggcacggagatcctcgcggtctgccccagtgcgggtgtgccctcaatcgaaggtcattttgatgaagccattgccgccgtgggtgtccttgagcaagtcaaaaaaggcagagagcaggcggtggaggggcacgtgattgcctgctttggcgatccggggctgctggccgcgcgcgagctggcgcaagggccggttgtcggcattgccgaagccgccatgcacatggccacgctggtggcgacgcgcttttccatcgtcaccacgctgccgcgcacgctgattatcgcccgtcatctgctgcagcagtatggttttcaggatcactgcgcggccctgcacgcgattgatctcccggtgctggcgctggaagacggcaccggcctggcgcaggagaaggtgcgcgcgcgctgtatacaggccctgaaagaggatggctgcggcgccatcgtgctgggctgtggcgggatggcaacgctcgcccaggagctgacgcgcgagctgcgcgtgccggtgatcgacggcgtcagtgcggcggtgaagatggtggaatcgctggtggcgctggggctgtcaaccagcaagcacggggatctggccttcccggagaacaaaccgttaagcggacattttcaggcattgaatccattttaa

SEQ ID NO: 123693 - DNA, 933 bp, Enterobacter cloacae
atggggctttttgaagagggttatccgcgggatctgcgtggctacgcaggcaacccgccgcatgcgcagtggccgaatcaggcacgcatcgccgtgcagtttgtgctcaattatgaagagggggcagaaaaccacgtcctgcatggcgatgccgggtcggaacagtttctctcggacatcatcggagcggccagctatcccgacaaacacatgtccatggactccctgtacgaatacggcagccgcgccgggttctggcgaattcatcatgaatttcagaaacgcggcctgccgctgacggtctttggcgtggcgatggcgctggcgcgtcacccggagattgtcgcggcgattaaggcggcggattacgacgtggtcagccacggctggcgctggatccactatcagaacatggatatcaaccaggagcgggaacatctgcacaaagcggtgcacgtgctgaccgatctgtttggcaagccgcctgcgggctggtacaccgggcgcgacagccccaacacgcgccagctggtggtcgagcacggcggttttgactacgacagcgactactatggcgacgacttgcccttctggacggaagtggcctgcagcgatggcagccgtaaaccgcacctgatcgtgccctacacgctggacgcgaacgacatgcgcttcgccaccgcccaggggtttaataccgccgagcagttttatacttatctgaaagacagctttgacgtgctgtatgaagagggtgaaagcgcgccgaagatgatgtccatcggcatgcactgccgcctgctggggcgtccgggccgatttcgcgcgctgcagcggttcctggattatgtgcagcagcatgagcgggtctgggtttgtacccgccagcagattgctgaccactggcgggacgtgcatccgtttcagaaatag

SEQ ID NO: 123694 - DNA, 189 bp, Enterobacter cloacae
atgacaacacaacaacctgactggcatgcctacctggcgcagatggaggccgtgctgggcattgagctggatgacgcccgccgcgcggagcttcagcagcagtttaggcgcattgccgccatggccgccccgctgatggcgctgccgcttgatgaccgtctggagatcgcaggagtatacaaagcatga

SEQ ID NO: 123695 - DNA, 1239 bp, Enterobacter cloacae
atgagcccggcggcagagcgggtgatgggccgtgccgatgcgctggccgccatcagcgaaaccccggacggcctgacgcgggtttatctttccacgcagcatctgcaggccaaccagctggtcgggcagtggatgagccaggcgggcatgaccgtctggcaggatagcgtcgggaatatttgcgggcgctatgaggcgcagctggagggcgcaccggcgatactgcttggctcgcatctggataccgtgcgcaatgccgggcgctacgacggcatgctcggcgtgctcaccgccattgaggtggtggacagcctgcatcagcagggtgtgcgcctggcgcaggccatcgagattgttggcttctgcgacgaagaggggacccgcttcggcatcacgctgttaggcagtcgcggtctgacgggcacctggccggagaattggcttgatacctgtgatgccagtggcataagcgtggcgcaggcgatggtgcaggcggggctggatcccgcgcgggtagcgcttgccgcgcggcatcaggacgatttcagcgcctgtctggagctgcatattgaacaggggccgtgtctggagcaggaggggctggcgttgggggtggtagaagccattaacggtgcgcggcgtctgaactgtctctttaccggcgaagccgggcatgccggtaccgtgccgatggctcaccgtaaagatgccctggccgcggctgccgaatggatggtgcaggttgaaaacaccacccgacaacgcggcggcaatctggttgccacggtgggggcgttacgctgcctgcccggcgcggtcaatgtgattcccggcgaggtggcgctctcgctggatattcgcggcccgcaggatgccccgctggacgcactgctcactgcactgctcattcaggcggaagagatcgcagcccggcgtgggctccgtttcagcgccgaggagttttaccggatagccgccacgccctgcgatgccaggctgcaatcgttgttaggggaggccgtgacatcggttcagggccgtacgctatcgctgccgagcggtgccgggcacgacaccattgcgctggcagaacgctggccggtggggatgttatttgtgcgctgcaaggggggcatcagccaccatccggcggagtcggtgatggctgaggatgtcgcgctggcgattgaggcgtttgggcgggcggtgagagcgctggctgacggtggcgcgcgttaa

SEQ ID NO: 123696 - DNA, 504 bp, Enterobacter cloacae
gtggcgtggtttgacaatctgctcaatcattttgcgcattatccgacgcatctctttgcgctgctcttcgtgctggctttgagtaaatccacggtgctgatctcctccgtgctgccgcccgcctcggtgatgttgctgaccgggatcaccgtcagccaggcgagcctgcatccggcgttgacgtggctggcggtggtaatgggggccacgctcggttcgctgctgaactatcatatcggtcagttgatggggcatacgcggctggtgacgcgcattacctcaaaacatgccgatacatttttgcgggtgcagcatcagctacagaaaaacggcgtgctggtgctcttcaccgcccgttttttggcggtactgcgctatatcgtgccgctggcggcgggcatgctcaggctcaaccgggtgaaggtttacgcggtcagtctgttttctgccgccgtctgggcggcgctgtatgtcggcattgtcaccggcatcagcgccttttaa

SEQ ID NO: 123697 - DNA, 750 bp, Enterobacter cloacae
atgggtcgtttagcaggtaaatatacgctgattaccggcggaaccagcggcattggccttgccactgcgcaggtgtttctcgccgaaggggcgcatgtcgccgtcaccggtcgtaacccggaaacgctcgccgaagcagagcgcattctgggcgataaggcctgggtgatcccgaccgatgcgggagatattgcttcgcaaaaagcgctggcggagacgcttgccgcccgctggccacgccttgacgcggtgtttctcaatgccggcgacgtgacgcacgcgccgctggaagcgtggcaggaagaggcctgggatcgtctgatgggcatcaacctgaagggaccgttctttttaattcaggcgctgctgccgctgctgaataatccgtcctcggtgatcctgtgcggctccgtaagcgcgcgcatcggcctgcccaccagcagcgtgtatgccgcgagcaaggccgccctgctgtcgctggcacgcacactgtcggcagagctgttaccgcgcggcattcgcgttaacggtctgagccccggcccggtagaaaccccggcctttacgaaaacgggcttaagcgaagaaacgcttaacgcgatgatggcggagatcatcaagcttgtgccgctgggcagaatgggctcgacgacggagctggcaaaagccgcgctctatctggcctccgacgaatccagctacacggtaggaacggaactgctggtggacggcggaatgggaagtttgtaa

SEQ ID NO: 123698 - DNA, 795 bp, Enterobacter cloacae
atgactacgcaaatcactaccgccctgattacgggtgcctcttccgggattggtgccgtctatgccgatcgccttgccgcgcgcggcgctaacctggtcctggtcgcccgccgcgaggatcggctgcaaaccctcgccgccgacctgcgcgcgcgctatggcgtgaccgtcggtattctggtggccgatctcaccgatgaaaccgggatccgcgcggtagaagacgaactgcgtagcaataccgccattgatgcgctgattaacaacgccggcaccgcgcagatggcgccgttcctcgtgggcgatgtggcccagcatcaggccattaacaccctcaataccacggcgctgatgcgtctgacctatgcgatcctgccgcgcctggcgcagaataaccacggtacgcttatcaatatcgcctcggtgttgtccctgcacgtgcgtgcaggcagcgcgctgtacagcgccaccaaagcctgggtgctcagctttacccgtgggttacaggaggagtttgccgacagcaacctgcgtattcaggccgtgttacccgccgcgacgtcaacagaaatctggcagcattccggcgtgacggtgaacgatctgccggaaggctcggtgatgaccactgacgatatggtggatgcttcgctggcgggtctggatcagggcgagctgattaccattccgccaatgcatgatgccagcctgtgggatcgctacgaaacggcacgtctggaactgtttaacagcgcccgcaccggcataccggcgccgcgctatgtaaaacagtag

SEQ ID NO: 123699 - DNA, 456 bp, Enterobacter cloacae
atgaaaaacacatcgttatttatgatgtttacattactgggagcgcctggggttgtcaccgcggcgaattcagatttggctacctctgaatataactttgcggtaaatgaattaagccgtacatcattaaatcaggcagccattattggtcaacagggtgtacttaatgacgctcaggtgcgccaggacggttcaaaattattgtccatcgtttcccaggatgggtcaggtaacagggcgcgggttgatcaatcagggacttataatattgcgtatattgctcagagcggctttgcgaatgatgcagatattacgcaggatggatttggtaatagtgcgaaaattatccagaaagggtcgggtaatagggcaagcatcacgcagtacggtacacagaaaaacgcagttgtagtgcaaaaacagtcgcaaatggcaattcgcgttattcaacgttag

SEQ ID NO: 123700 - DNA, 462 bp, Enterobacter cloacae
atgaaatttatcaaagtggcagctcttgcagcaatcgtggtttctggtagtgctatggccggtctcattgatcaaggtggctggggccatggacacggtcatggccatggtcaaggcggtaatggcccaaattcaaccctgaatatttaccagaacggtggcggtaactcagctgtcgccttgcagaccaatgccagagattcaacgctgtctattagccagagcggtggcggtaatggcgcagatgttggacaaggttctgacgacagcaccatctctctgactcagaatggttttgccaacagcgcaacgcttgatcaatggaacagtcacgactccacaatgaatgtgagccagtacggtggatttaacggcgcaatggttgatcagactgcgtctaattctacggtcaatgttacccagattggttttggtaaccacgctgcagcttatcagtattaa

SEQ ID NO: 123701 - DNA, 333 bp, Enterobacter cloacae
atgaataccttaattctccttgccgcgctttccagtcaaataacgtttaacacatcgcagcagggcgatatgaccaccattattccccaggttacgctgacaacgccgtgtgattgtctggtacaaatcgtggctgaacgggaagggcagagtggccaaagtacatcacgccagcaaaacaggctttttatccccgctaatcagacgatcgatttaatgcggctgagtttaaatattggtacgggggatacggtgaacattattgtcaccgtctctgatggtaaatcgcttcatttatcacagcagtggtcaccgccggagaataggctttaa

SEQ ID NO: 123702 - DNA, 321 bp, Enterobacter cloacae
gtgaccaaatatatcgctcaactcgcttctggttttagtctgctcgtttctctttttgtaaccccggtttttgcggcgacggttgttgagggtggggtcattcattttcgcggcgcgattgtcgccgacccctgtgaagtgactgcacaaacgcggcagtttgcgttgtcatgcccggaaaataaccggattcatacgcgcatggtcagttatgaagatgcacttaatggccatgtgaccgataccagccttgccaccctcagcatgaagtacctcaatcctgaaaaaacgctcgcggtggtacaaattcagtaccgctga

SEQ ID NO: 123703 - DNA, 810 bp, Enterobacter cloacae
atgtttttaatcaatggccttgagcaagaatctctgcctgccagcgacagggcgactcagtttggtgatggctgctttaccacggcgcgcattgcggatggcgacgtgtgtctgctggatgcgcatatacgtcgtctgcaaacggcctgcaaaacgttactgatcccctttacgcaatgggacacgttgcgccaggaaatgcgccagcttgcgtccggaaagcccagtggggtactcaaggccattatcagccgcggcagcggtggacggggttatagcggtgtcagttgccaacatcccacccggatgctgtcggtttctgcctatcctgcccagtatccgcgctggcgtgaagagggcgttaccctgacgctcagcccggtacgtctgggaagaaaccccatgcttgccgggataaaacatctcaatcgtcttgagcaggtgctaatccgtactcatcttgagcagacggcagccgatgaagcgctggttcttgacagcgaagggttcattacggaatgctgtgcggctaatttattctggcggcagggcaacactgttttcacgccttcgctggaacaggcgggagtcaacggtatcatgcgtcagttttgtttgcagcaactggcacgctctgactttcacgttgtcgaagttaacgcacgcgaagaggcgttgcaggcagcagatgaaatcgttatttgcaacgcgctgatgccggttatacctgtccgcgcttatggtcaaatttgcttgccatcgcgcgagctgttctcttttttagccccgatatgtgagcaaaccagatag

SEQ ID NO: 123704 - DNA, 825 bp, Enterobacter cloacae
gtgcggttacgcaactctgactgcacgcgtgaagcgatcctcacgcgttattttccgcagtatcgtcttatcgcgccgcaggcccactccgggcttggcggcgcgagttgcattctggaacagggcgagcagcgtctggtgttgcgtcatcaccacgatcccttagcccccgcttcccattttcgccgtcagtttcgtgccctgaagcgtctaccggcggatctcgtgccagccccgcgctttttcagacagggctggatggcggtagagtatctggcaggggagatccggcatacgctgcccgacagcgcaacgcttgcgacgacgctctgtcagttgcaccatcagccgtgtctggggtggcgagtcacgctgctccctttgctggaacaatattggcagcgagcctcaccggacagacgtaccccatggtggcttgcgcagcttaaacggttacacactgcgggagagcctcagccgcttcggctgtcgccattacacatggatgttcatgccggaaatattgtgcatacgtccaccggcatcaggcttatcgactgggagtatgccggcgatggggatgtggcactagagctggcggctgtctgggtggaagatgatacagcgcgccaaagactgatcggcgattacgcccgcattgcgcatctggacgcgggacagctggcgcgtcaggtcagacgctggcgaccctgggtcgtcatgctgatggcgggctggtttgaaatgcgttttcagcagtccggcgagaaacaatttattgcgctggcagatgatgcctggcgccagttacacattaaaggataa

SEQ ID NO: 123705 - DNA, 1224 bp, Enterobacter cloacae
atggataaattacttgagcgttttttacagtacgtttcgctggatacccaatctaaaccgggtgtccgccaggtgccaagcaccgaaggccagtggaagttattaaacctgctcaaagagcagcttgaggccatggggctggtcaatgtcaccctgagcgaaaaaggcactgtgatgggaacgctgcctgccaacgtccccggtgatattccggcgattggctttatctcccatgtcgacacctctccggattttagcggtaaacatgttaatccgcagattgtggaaaactaccgtggcggtgacattgcgctgggaataggtgacgaagtgctttcgccggtaatgttcccggtgctgcaccagctcctcgggcagacgctgatcaccacggatggcaaaacgctgctgggggcggatgacaaagcgggtatcgcggagatcatgacggcactggcggtgctgaaaggaaaaaatattccgcacggtgatatccgtgtggcctttacgccggatgaagaggtgggcaagggggcgaaacattttgatgtcgaggcctttaacgcgcagtgggcctataccgtggacggcggtggcgtgggcgaactggaatttgaaaacttcaatgccgcgtccgtgaccatcaaaattgtgggtaataatgtgcatcccggctccgccaaaggcgtgatggtgaatgcgctgtcgctggcgtcccgtattcatgcggaagtcccggcgaatgagagcccggagcagaccgaaggttatgaaggtttttatcacctgaccagcatcaaaggcacggtggacagcgcgcagatgcactacatcgtgcgtgactttgaccgtaaagcgttcgaagcgcgcaagcgtaagatgatggaaatcgcgaagaaggtgggtaaggggctacacccggactgctatattgagctgattattgaagacagctactacaatatgcgcgagaaggtcatggagcatccgcatatcctggatatcgcccagcaggccatgcgcgactgcgatattgatccggtgctgaagccgattcgcggcggcaccgacggttcgcaactgtccttcatgggattgccgtgcccgaatctctttaccgggggatacaactaccacggtaagcatgagtttgtgacgctggaagggatggaaaaagcggtgaaggtgattgtgcggattgcggagttaaccgcgaagcgttag

SEQ ID NO: 123706 - DNA, 492 bp, Enterobacter cloacae
atgtcaaactaccgtcgccattacgtccccggcggcacctggttttttaccgttaacctgcaaaaccgacagagcgatttacttacccgccatattgatagcctccgccaggccacctcctcggtgaaacgatcaaagccctttacgattaatggctgggtgatccttcctgaacatatgcactgtatctggaccttgccggaaggtgacagcgatttttccgggcgctggcgtgacatcaaaaaaacgttctcacgaaacattgaaatgcgccacatctggcaggcgcgtttctgggaacataccatccgcaacgacaatgattaccgccgacatatggattacatctacctcaacccggtgaaacatgggtacgttggtaaggttgtcgactggccgttttcaacgtttcatcgggatgtacgggaagggttgtatccggcggatcgggccgcggagattgtggattttgcggcgggggagtggaagtaa

SEQ ID NO: 123707 - DNA, 483 bp, Enterobacter cloacae
atgcataaatttaatctagcagctgcttttcttttttttggcgcttttaccatgccagtatttgccagtaattcaatgtctataaattatgctgcaggcaaagagagtggggccgaaaagatgcatggcatgaatgtgatatttaaacacgatatgggtaattttgcactggtcgcatcaggtacttatatacagaataccagcggttccgggaactcttatttgaaaaacaaatacgcatcaattatgccggggctcgctattaatatcacacaagatataaatttttatggacttgctggtatttcttgtggttcaaaaatgaaacctgatcaaagtcatgagatttatggggcagcttttggtactggtttgttttacaacttaacaaacaatattcaattaaatacaggatatgaattgggtcttgttgataacaaagaaatagatactttcatcattgggataggatatttgttctga

SEQ ID NO: 123708 - DNA, 537 bp, Enterobacter cloacae
atgatatcaaaaaaaataataagaatatatgttattactgataactattttttatattacggcatcagggaactcatttacgattctaaagtatttgaatcttacacatataacgttgagcaaaccgctaagcttccagctcttattttttatcataagtatcatactcaagatataatcattacagataatttcttacattgttacgcagtttcaaaatatagaccggaaaaaacgttaattttgccatgtaattatgatttggataaatatatagagtgttttaatgatttaacaaatcaagattatcttcacaatgcactttattttaaaaagttatcatcgaaagagaccctactgttaactttattttctgagggagcaacagatgacaaaattgctattatgcttaacataacaaaaaagacaatcagctctcataggcgtaatattttgcaaaaattaaacctgaagaataggcatgaattgtatatgtatgctttggcaacaaaagaagggttgtatgaacacgtataa

SEQ ID NO: 123709 - DNA, 600 bp, Enterobacter cloacae
atgtttaaccatatcttagagattgttgaaggatctaacaagtttatgcgcatttatgcgtcaaatggacaacgaataaacttcatgcttaataataaaccacatgtatactttctcactgaaggtagagtagacatttatagaaaagcagacgatattctaattttcactgtatatgcgccttatattctagggataatctttatgttcgaaaaggatgattaccattactttcgagcttcaacggatgcaactttcacagcaatttcaactgtggaattggattgtttggctgatagtaataacttgtggaaacattttttcttaatgacttgtgaaatcactttaaactttttcaaaagagaccagagattttcatcaaaaaatgcctacgatattataaaaaacaatttagaagccatatgggaattaccagagaatgaaagatctcaaatttcagtgttcaagttcattttgtccagaagctcaatttctcgtagttccttaaataaagttttaaaagatttgaatgatggtggatatattaacattcacagaggaaagcttctaaacatcaaaaacttaccattaaaatattaa

SEQ ID NO: 123710 - DNA, 1302 bp, Enterobacter cloacae
gtgttaagtaaaactcaaaaaaatttcttgtggatgattgcagaaaaaacaatcggcgtagtgggccttttctttataaatgctttggtggctaaatacctggggcctgtggtaattgggcaaatagcaattgcaactgcaatttttcaaattgttcaggttgtaggggtgtttggcagcgatagtatattctataaaaggataagcacaaacttgattggtggcatacaattaatgatacctgtatttgtgttgagaagtataatatttatctttttggcaagtatttgcataatttttttaaatatgagaatggatttaacaggtatgacattagtactgtcaatctgtttggcgtattatttttatactattgatacttacacaagttttaacgagtcactactgaactcaagaattaatgctattgcaaacgtagttggccttattttcggcttagtagccagggcattaatggttagatataaagtgccgattatctattttggattgcctctaataataataagtgccattccttattttctaaaatcatatgtatttagaaaacaatataaaaggatggtaacaattaagtatagtgtactaaaaaaaagattattccatctgagttatgcgggaagcattcttgttattccttcaatcatctcatcaatctatccaaggttgaatgtgcttataatctcttttttatatggtaatcatgatgtcggtatttattcagtttctcaaagcattgcaacgagttggagtttcattttattatcgttgttgacgtcttgtcttccatctgtatttcgagagaaaaataatcaaaaaataattaagttaggtgccaggttacatttaaatatcattttgttgtcgatcccggtaatgttggtgattacatttttagtaaacttcgcaattctctatctatacggggaatcctataaggagtcaataacaccctgcattttgttatgtttctcaacattattgtctacacttggcatggcttcatcaaaaataataattaagttttctgggtataggtttttattatggaagactatatttatattggttttaagtctggtgctttcttattccttttctatcaggttcggattgattggtgctgcatcagcggttatcattactgaagttttttctctgacagtttttaactatttgtttatgcagggatttatattatcagtccacatcgagatgtttaaaattatttatgtgtattttcgggggttatttggaatgaaaaaatcagatgggagctaa

SEQ ID NO: 123711 - DNA, 309 bp, Enterobacter cloacae
atgttgcacgccgtcacgctgacttacctgacacaacctgatgcgatttctgatcatcttgaagcacataaacaatggttgctgagggggtttgatgaaggagtgattctttttgccggcccgctcagcaatagtgctggcggcttcattctttttcagggggataacatcagcaatattcataactttcttggggatgacccctttataatgcataacattgcagatgccgaagtaatgagtattgagccggcgttatgcgcgctgggattcccaaaaaaatgggcggataacgctcgtttcatctga

SEQ ID NO: 123712 - DNA, 636 bp, Enterobacter cloacae
atgaaaattctccatcttgattcaagtatcaattatgaattttcagtaacccgacagttgtcggctgaaacagtgaaacaactgatggcaaccagtcaggggaatcaactgacttaccgggatcttgtaaaagacgaaatcagccatctcaccggggaaatcgctgcagaattcaggcctgttaccggacgacccgcaactacaacgcgtctggactctgagcgagaattatcaaatgctctggtctctgagtttcttgaaagcgacgtaattgttatcggagcgccaatgtacaacttttctgttcccagccaattaaaagcctggatggacagaatcgcgcagccagggaaaaccttcagctacaccccaacaggccctgttggtcttgcgggggaaaaaagagtcatcatagcctcagcccggggtggtttttatgccggtacggcatttgaagaaatggactttcaggagcaatttctgcgtaagtttctgggcttcctgggcatctcaaatgttgtgtttgtccgggctgaaggcgcatctaaaggggaggaagtaaagctcagagaactatcccatgctttctctttaataccacaagccattaataccgtttctgccgctaaggaataa

SEQ ID NO: 123713 - DNA, 780 bp, Enterobacter cloacae
atgcgtaagcaaaatttaatgtcggtcgcgctgcgaaaaggagtatttgctttgtgtcttttatttatgagcaacccgccgcttatggcacaggattcgggtgtaaaaaatatcgtgctggttcacggtgcctttgctgacggatcgaactggtcagccgtcatcgctctcctgcaggaccggggctaccacgttactgctgttcagaatcccctgacatccttacgagaggatgtggctgcaacagagcgtgtacttgagcgtcaaaatggtaacgtactgctcgttggccattcatgggcaggggcggtgatcacccaggctggtaatgcgaataacgtaaaggggctcgtctatttgtccgcccttgttccggacagcaatcagtctgtttctgacgcacttgcgcacttcaatgcccccatgaaaggtatggaagccgataaaaacggcctcatctggcttgataagccacagttgtttcatcaggttatggctaatgagctaagcatgaaacagagccttctgatttctgcggtgcaacagcctatcgccgctgccgcttttaacgaaaaagtgaacgcggcagcctggagagagaaaccctcctggtatctcatcacagaaaacgataacgcgctgaacccgttagtacaggcaaattttgcccgagaagcaggcgcacatatcacacgaattcactcagatcatctatccatgatttctcatcccaaagaggttgcagcactgattgtaaatgctgcgcagagtattcactga

SEQ ID NO: 123714 - DNA, 1074 bp, Enterobacter cloacae
gtgtcattaatgacaggtaacatgcgaaataagacattcttcggcactggggttaaaatgcgagttgcgttacttgcgcttccgggcaacatgcgttcggcgctggcagggctggctgatatgttttggctggcgaatcaggtgatcaggctaaaccctacagtgagccctgaactatccagggctgatccattttttgacgtcaggacgattaccgcggatgggcagcccgtcagggacgttcagggacgaatcatcgaaagtgatggctcatttaatgaacctgacaacttcgagctgatcattgccagcggtatgcagttggatgagcaaagatttccggctgacaaagcagctgtatcgaatgcggccgagtggttgaaagttaaatattcagagggaagctgtattgcctcagcatgtgcgggcggttttgtgctgggagaggcgggtttgctcaacggacgggtctgcaccactacgtggtggttatatccaactttcgctgaacgctatccacttgcaaaacccatatggggaaaaaccctggcagaacaagacaatgtgataaccgcgggcggcccgctttcatgggtcgacctggttatatacctcgtacgcaatcatgctggtaatgagctggcaaaattgacagctgacatggccgttgctgacagccagcctttgtcacagcaaatttatgcgcccgcaggttttctcaactcaagacatcctctactgactaaagcagagagtctgcttcgttatcagaaccctgcaatgacggtaaagcaacttgctgcagctctgaatatgacgacccgcacgctgaaccgtaaaatgaaaacgctcatccaggaaagtccgaaagacttcattacgcgggttcgtattgaaactgcatctgtgcttcttgaaagcccaggaaagactatttcacagatcgcaaatatttgcggatatagcgatgaaactgctttccggcgcgcttttagcgccatgatggggatgtcccccggaagtttcagaaagcggcttttgacaacgaacccttcaaattctggctgcgaatga

SEQ ID NO: 123715 - DNA, 636 bp, Enterobacter cloacae
atggaagaggttatttatgttatcgatgatgatgatgcatatcggtcgtttgttgttcagttcttaacagccgcgggctatcagacgtttgacttcagtaatgccgaagaatttttatcctctcccatcgttgatcatccttcatgcttaatccttgaattaaaccttccgcgtatgaatggctttgacgtgatggatgcactcaaagcgcgtggatgcgctataccggtactcattctgacgaagagcggctccatccctgcctgcgttcgggcaatgaaagcaggcgcccgggattttttgaccaaaccggtcgaacctgaacaacttttgcgcgtggtgaatgaggtattgatcgacgcgacaaaccattttctggaacagcaacggttatttgaactgtgcaaaaattaccaggcgttgacgcgacgtgagaaacagatttttgagctggcaattaatggcttgcaaaataaacaaatcgcatcggaactgggcataacagaaattacggtgaaggtacatcgacgcagggtgatggataaaatgcaggttcgtacgttagcggatctggtgcatgctgccggcacgttgcaaatcggtaaatcccgatgtccaccccgcaggctttattga

SEQ ID NO: 123716 - DNA, 1998 bp, Enterobacter cloacae
atgagtgaaaatgatactatcccaaagaagtctacaagccagattaacaaagcggtattcttcacatctgctttgttaattttccttcttgtcgcctttgccgcagtattcccggatctggccgacaaaaaattcaaactcctgcagcaacagatattcaccaatgccagctggttctacattcttgctgtcgccctgattttactgagtgttactttcctcggtctttcgcgttacggtgatatcaaactggggccggatcatgcccagcctgatttcagctaccattcctggtttgcgatgctgttttcggcagggatggggattggcctgatgttctttggcgttgccgaaccggtaatgcattacctttctccgcccgtcggcacccctgaaaccgtagccgcagcgaaagaagccatgcgcctgacgttcttccactggggactgcatgcatgggccatctatgccattgtggcgctgattctggcattcttcagctaccgtcacggtttgcctttaacgctgcgttccgcactctatcccatcatcggcgatcgcatctacggtcctgtcggccatgcagtcgatatttttgcggtgatagggacggtctttggcgttgccacatcgctgggttacggtgttttgcaggttaatgccggtctgaaccatctttttggggtgcccatcaatgaaacggtgcaggtcattctgattgtcgtcatcacggggttagcgacgatttcagtggtgtccggtctggacaagggaatacgtatcctctctgaactcaatctgggtctggctgttttacttctggcgcttgtgctgtgtcttggaccaaccgtacttttactgaaatcttttgtcgaaaataccggcggttatctttcggaattagtgagtaaaacctttaacctttacgcctacgaaccgaaatcaagcaactggcttggtggctggacgctattgtactggggatggtggctttcctggtcgccgtttgtcggtatgttcatcgcgcgcgtatcccgtggcaggacaattcgtgagtttgttacgggcgtgctgtttgttcccgcaggttttaccctcatgtggatgacggtgtttggtaacagcgccatttatctcatcatgaatcagggagcaacagacctggcaaataccgtccagcaggatgtcgcgctggctctgtttaatttccttgaacatttcccgttttcctcagtgttgtcatttattgcaatggcgatggtcattgtcttctttgtcacctcggctgactccggggcaatggttgttgatacgctggcatcgggtggcgtcgctaatacgcctgtatggcagcgaattttctgggcctcgctcatggggattgtggccattgcactgctgattgcgggtgggctaagcgcgctgcaaaccgtgacaatagcgagcgcattaccattctccgtgatcttattgatctcaatatacggactgttaaaagccctgcgtcgggatttgaccaaacgtgaaagtctgagcatggcgacgattgcgccgactgccgcacgtaaccctattccgtggcagagaaggttgcgcaatattgcctatctgccgaaacgttctctggtgaaacggtttatggacgacgttatccagcctgccatgacgttggttcaggaagaactgaacaagcaggggacgttgagtcatatcaatgatgcggctgacgatcgtctccggcttgaagttgatttaggcaatgagctgaactttatttatgaagtgaggctacgtggctataattcgccaacttttgctcttgccgctatggataatgacgagcaacaggcagagcaacaccgctattatcgcgctgaagtatatctgaaagagggcggtcagaactatgatgtgatgggctggaatcaggaacagcttatcaatgacatactggaccagtacgaaaaacatctgcacttcctgcatctggttcgttaa

SEQ ID NO: 123717 - DNA, 348 bp, Enterobacter cloacae
atgttagccactgtacttatcgttattgttgcgttaatccatctctatattctggtgctggagatgttcctgtggaacaccaaaaccgggcaaaaggctttcaatctcacgcccgattttgcgcgtgaaacccgcgtactggctgcgaatcaggggctgtataacggttttctggcggcgggtctgctctggggactctggctcggagagcgcggtgtccctgtgaccgtctttttcctgagctgcgtgctacttgccggaatttttggcgcagcgactgccagccgaaaaatcctctatgttcaggctatgccggctctcgctgccttacttgcgctgcttatctaa

SEQ ID NO: 123718 - DNA, 246 bp, Enterobacter cloacae
atgaacaacgatattccgcttaaatattatgacatcgtcgatgagtattcgacggaaaccgctgagccagtcagtgagtcagagcatgacgcgctggcgtactatttccagctgctgctgacgcggttaacgaacaacgaggaaatcagcgaggaagcccagcaggaaatggccagtgaggcggggatccgctcagcacgcatcgatgatattgcgaatttccttaatcagtgggggaacgagtag

SEQ ID NO: 123719 - DNA, 348 bp, Enterobacter cloacae
atgatgattcagtgcaagcgcgtctatgaacaggcagccccggaggatggttatcgggtgctggtggacagactgtggccgcgaggggtgaaaaaagcagaccttgtgcataatgaatggtgcaaggcgctcacgccttctgacgggttacgtaaggcctttcacagtgaaaccattgatttcgctgccttcagccaggcgtatcaggaagagctggcgcagcataaagacgaaggtttgcgtcttgcaaccctcgccagacagcaaaccttaacccttctctacgccgcgaaaaataccaaacagaatcacgcaatggtcttagccgactggctgcgccatttgtga

SEQ ID NO: 123720 - DNA, 570 bp, Enterobacter cloacae
gtgaaagagacatccacctgggttgccccggttgaatcccttcccgccagcctcaaacctattgccgccatgcagaaaaaacactttggcgcagtgcttaaccccacgcgctggtggggacgtatgccgcgcctgttctggctggtggcgctgtttgtcgggtttctggagcgacgcaacgcccgcctgacgccggtgctgcgctcgctgctgatgacgcgggtatcccagctctgtcagtgtgcattttgcattgatgccaacagcgtgcgcctggccgaacgcgcgggcgcgctggataaagtgcaggccgtaagccagtggcgtgacgccgcgcttttcaatgagcaggagcgcgcggcgctggcctacgcggaggccgtcaccgccacgccgccgcaggtggatgaggcgctcaaacgcgagctcaaacgcttttttaccgatgagacgattagcgaaatgacggcgctgattgcgtttcaaaacctttcggcccgctttaatgccgccctggatatcccggcgcagggactgtgcgacacgtttaaaggaaagccgcatgcttga

SEQ ID NO: 123721 - DNA, 621 bp, Enterobacter cloacae
atgctgaaggtcaacaatctcaccattgcgccgctgttccgtgaggttaacttttatgtccctcgcggtgaaatcgtcaccctgatggggccgtccggcagcgggaaatcgaccctgttctcatggatggttggggcactgtctgacgactttcaggcgcagggcgagctgtggcttgacgatcgccgctgtgacgggctgcctgtcgagcaacgcgggatcggtattctctttcaggacgcactgctgtttgaccagtacagcgtcgggcaaaatctgctgctggcgttaccggcgcgaataaccggacgcgcacgccgggaaagggtgcaacaggccctggattcagccgggctaaatcgccactatgccagcgatccggccacgctgtccggcggggagcgtgccagggtgagcctgctaagggctctgcttgccgagccgcaggcgttgttgctggacgaaccgtttagccgccttgataaatcactgcggtcgtcctttcggacatgggtgtttgatgccctgcgcgcacgcaatatcccggtagtgctggtcacgcatgacgatgaagatattccgccgggtggcgaggtgattgagatttctcgctggcaataa

SEQ ID NO: 123722 - DNA, 1530 bp, Enterobacter cloacae
atggctgcgtcgttacggcacccgctgagcgcactcatctggctggcgatggcggcagtgtatctgccgcttgttcccgccgctgccatgctgttgacgccggcgctgtcggcagaaaactggcaacgcctgtttgacgacccgcagatcccgcaggcgctcgctgccaccctggtatccacgctgattgccactctcggcgccctgtttatcgccctgattttcgtcaccacgctctggcccggtgagcgctggcgtcgtctgtgcacccgtttgccgtggctgctggccgttccgcacgttgctttcgccaccagcgtgttgctgacttttgccgaaggcggtctgttttatcagctctgtacacgctgctccccgatgttggatcgctacgggattgggctggggctaactctcgccgtcaaggagagcgccttcgtgctgtgggcgatatacgcggtgttacctgaaacccggctgggtcgccagaatgtcgtgttgcaaaccctgggatacgggcggttccagcgactgtgctggctggtgatcccggagatcgcgccggcgctgggtgccacaatgctggcggtgctcgcctggtccctctctgttgtggatgtcgccatcatcctggggccggggaatccgcctaccctggcggtactggcctggcagtggctgacccagggcgacgtgcagcagcaaacgaaaggaatgctgctctgcctgctgatgctcgcgctgctggccgtgctttcggcgctggggttcggtatctggaaggcgtggcgtcgcacgttgcctgcgctgacaggggtgcgacacacgttccccctcgcgccgcccgcccgtatgctcagcggaatcctccccgcatgcggcatgctttgcgccggagtgctgctgatgctggcccagtgggatgatgttagcgccgtgcgtgccagtttatcgttcggcctgcttgccagcctgataggcctgatcatgatactgctctggctggaatgggggccgcggcgtggtgcactgtgggtctggctccctctcgcccttcctgcgctgccgttggtttccgggcaatacagggtggcgttatggctgggtatcgacgggcagtacgccgccgtgctctggagtcatctgctgtgggtgttgccgtggatgctgctgatactgcaacccgcctggcggcgcatcgatccgcggcttctcctcacggccagaacgcttggctggcggcggacaaaagtcttctgcctgatcaaatgtcccctgctgttgcgccccgcgctgctggcgtttgcaaccggattttcggtcagcatggcgcaatacatgccaacactctggctcggcgcggggcgtttcagcacccttaccaccgaaaccgtggcgctcagcagcggcggcagcatcccgattctggctaaccgggcgctgtggcttctgctggtgacaggggccgtcttcggcgttgccgcactgttatcccggctcgcaggccattatcgacgaggattacgttaa

SEQ ID NO: 123723 - DNA, 1170 bp, Enterobacter cloacae
atgcgccgtgtgcgtttttgcgcgtttctgaccggtctgctgctgaccactcctctgtgtgccgccgacagctggcacgttatccaagaacaagccaaaggccagaccgtctggtttaacgcctggggaggcgatcaggcggttaaccgctacctcgactgggtcagcggcgagatgaaaacgcactacgctatcaacctcaacattgtccacctggccgatgcggcggatgcggtaaaacggatccagacagaagctgccgccgggcgtaagacccatggctcggtggatcttttgtgggttaacggtgagaatttccgcacgctgaaagaggctaacctgttgcaaaccgggtgggcacagacgctgcctaactggcgctatgtcgacacgggcaaaccggtcacggaagatttcgccctgccaaccgagggcgcagaatctccgtggggtggcgcgcaactcacctttatcgcccgcaaagcgagcatgcccactccgccatcagacccgcagacattactggcctgggcgcagcagcatccgggtaaaatcagctatcctcgtccgcctgattttaccggcaccgcgtttctggaacagttgcttctcacgctcacctcccggcccgatgcgctgaaacgcacgcccgatgacacctttgcacaggttaccgcgccgctctgggactacctcgacaaactccacccgctgctgtggcgagaaggaaaagatttcccgccttcacctgcgcggatggataccctgctcgcccgcggcagtctgagcctgtcgctgacctttaacccggcacatgcgctgcaaaaagtggccagcggtgaactgcctgccgacagctacagctttggttttcacaacgggatgatcggtaacgttcattttgttgccatcccggcgaacgccagcgccagtgcgggggccagggtggttgccaatttcctgctctcacctcaggcgcagatccgcaaagccgacccggctatctggggcgatccgagcgtactgcaggcgaacacgctgcccgcagatgaagcaaaacagcttcaggcccacacgccacaagggcttccgcggctgcttgcggagccacacgcagcctgggttaacgcgctggagcaggaatggctgcgtcgttacggcacccgctga

SEQ ID NO: 123724 - DNA, 684 bp, Enterobacter cloacae
gtgaacattcgaaaaattgtcgtactgtgcgccctgctgggcgcctttatgctgacgtggctcactcttcctccgggcacgctctctcttgaaaccatcaaaacgcatcagcagaccttgctcgcctgcgtcgaacacgccccgcagcaaagtgcgctgatcttttttgcgctctatgtggtggtttccgccctctctatccccggtgccgcgatactgaccctgctgggcggcgcgctatttacgctgtggaaggggacgctgctggtgtcgtttgcctccacgctcggcgccacgctcgcgatgctcgccagccgttatctgctgcgcgactgggttcagcgacggtttgcccaacagatgaaaacggtgaacgccgggatggcgcgtgacggcgcagggtatctattcgccctgcgcatgatgccgttgttcccgttttttctggtcaatctgctgatggggctgacccgcattggggtgcgtcggtactggtgggtcagccagctcgccatgctgcccgcaacggttatcttcctcaacgccggccgcgagctgggaaaaatcacctcgctgcgcgatattctgtcgccgggcatgctgttagcctttacactactggggttattaccgctgatgagccgatggctgttttcccgactcccctcttcgtttaaaaagtga

SEQ ID NO: 123725 - DNA, 966 bp, Enterobacter cloacae
atggaaaatttactggcgctgacgctgtccgacgaaacgccctcacaacgtgagggggagggcccctcattccactggcggtggctggggcgcggcgtgcttgaactgacaccgaccgccaggagtgaactgtcgcttctgctctcaaccggcattcacggcaatgaaacggcgcccgtcgagattgtcgacctgctgctgcgcgcgttgtatcgcggggagatcgcgctgcactgccgtctgctggtggttctgggaaacccgcctgcgctggcgcaaaataaacgctatctggtgagcgacatcaaccgcatgttcggtggccgctggtcgcaattcccacaaagtgatgaaacggcacgggcgcagtggctggagcagatcgtcacctcctttttcaccgacgcggggccatcgcgctggcatctcgatctgcatacggcgatccgcgcctcgtatcacgtgcgttttggcgtgctgccgcagcgtaatcagccctgggaggaagattttctgcgctggctgggggatgcggggctggaagcgctggtcttccatcagtcgccgggggggaccttcacgcactttacctgcgaacgcttcggcgcgctggcctgcacgctggagctgggaaaagcgctgccgtttgggcaaaacgatcttacgcgctttgccccgacgcattttgcgctgcgggcgctgctgggggggacggagccggagcataccagccagcccgtcgagcgttatcgggttgtgcagcagatcacccgccgtagcgaggctttccagctacatatggcggcccacacgctcaattttacgccgtttcgcaagggggcattactggcggaggatggcgacgagcgctatgaggtgcagaaaacaaccgaatatgtgctgttccccaacccgtctgtggcctttggtctgcgggccgggctgatgctggaaaaagtgtcctga

SEQ ID NO: 123726 - DNA, 879 bp, Enterobacter cloacae
gtgagcaggcgtcaatctgccccgcgtctggagtttgaagcggcggctatctatgaatatcccgaacatctccgcccctggcttgaggaattacctaaacagccgggcgtgtacatctttcatggcgaaagcgacactctgccgctctatatcggcaaaagcgtgaatattcgcagccgggtgctgtcccatctgcgcacgccggacgaagccgccatgctccgccagtcgcgacgcatcagctggtatccaacggcaggagaaatgggagcgctcttactggaagcccggctgatcaaagagcaacagccgttgtttaataagcgtctgcgccgcaatcgtcagctctgctcgctgcagataaccgcgggcaaaccgcaggttgtctatgcgcgcgacgtcgatttttcgcacgcaccgaatctgtacggcctgttcgccaacaaacgtgctgcgctacaggcgctgcaaacgctggcggacgagcagcagctttgctacagcctgctggggctggaggccaccactcgtggacgcgcctgtttccgctctgcgctcaaacgctgtgcgggtgcctgctgcggcaaagagagcgtcgaggatcatcacgcccggcttcttggcgggctggcggccatcagcgtgaagtgctggccatgggaaggggccgttgcgctaaaagaggtgggagagacaatgacacagtaccacattgttcataactggttctggctgggggcggtcgataatctgcaggaggccgccaccctgttacgcacacccgccggcttcgaccatgatggctacaaaattctctgtaagcccgtgctgaccggcgagtttgacgtgattgtgcttaatgaccaggcagccagttga

SEQ ID NO: 123727 - DNA, 819 bp, Enterobacter cloacae
atggaaattaaaaccgcacttgaacagcagctgtttaatggcaagaattttcacgtggttatttacaacaagacggagagcgccagtggtctgcaccagcatgactactacgagttcacgattgttctgaccggccgctactatcaggagattaacggcaagcgtgtcctgctggagcgcggtgactttgttttcctgccgatgggatcttatcaccagagcttttacgaatttggcgccacacgtattctgaatgttggcgtcagcagacgtttctttgagaaacactatctgccgctggtgccgttctgctttgtggcgtcacaggtctatcgcgtaaaaaacgaatttatgacctggatcgaaacggtgatcgcctcgctcaacttccgcgacaatgagttcgatgaatttattgaaaccgtgacgttctatgtgatgaaccgccttcgccatcaccgtgaagagcagcaggtgagcgacgacattccgcaatggctgcgcagtaccgtcgagttgatgcacgacaaagggcagttcagcgagaatgctctggaaaatatggtgtcactgtccggaaaatcccaggaatacctgacccgggcgacacagcgttattatcgtaaaacgcctgtgcaaattattaatgaaatccgcattaattttgccaaaaaacagctggaaattaccaactactctgtcaccgatattgcttatgagtccggttacagtagccccagcctgtttattaaaacatttaagaaatttacctcattcacaccaaacagttaccggaagaatttgacggtaattaattag

SEQ ID NO: 123728 - DNA, 2250 bp, Enterobacter cloacae
atgtcgaacaaagataacacacatcaatcacccattcatggcactgaagaatcacagccgggtatggactcccttgcacctgaagatggctctcatcgcccttcaccaggtccctcagcccctggcgagcaaccgaccgcgcccggtagtatgaaatcgccggacaccggcaatgagaaactaaaatcactcgagccacaccgcaaaggcggagaaggctatgcgttgaccaccaatcagggggtgcgcatcgctgacgatcagaattccctgcgcgcgggatcccgcggaccgactctgctggaagacttcatcctgcgggaaaaaattacccactttgaccatgagcgtatcccggagcgtatcgtgcacgcgcgcggttccgccgctcacggctatttccagccctacaagagcctgaaggaaatcaccaaagctgacttcctttcagacccggataagatcacccccgtgtttgtgcgcttttccaccgtgcagggtggcgcaggttcggctgataccgtgcgagatattcgcggctttgccaccaagttttataccgaagagggtatcttcgacctggtcggcaataacaccccggtctttttcattcaggatgcgcataaatttcctgactttgtccatgcggtaaaaccggagccccactgggcgataccgcagggacaaagtgcgcatgacaccttctgggactatgtctccctgcaacccgagacgttacacaacgtgatgtgggcgatgtctgaccgcgggatcccgcgcagctatcgcacgatggaagggtttggcattcataccttccggatgatcaacgccgagggcaaagcgacgtttgtccgtttccactggaaaccggtcgccgggaaagcctcgctggtgtgggatgaagcccagaagctgaccgggcgcgatccggacttccatcgccgcgagctgtgggaatccattgaagcgggcgacttcccggaatatgagctggggttacagctgatcccggaagaggacgaattcaaattcgattttgacctgctggatccgaccaaactgatccccgaggagctggtaccggttcagctggtgggcaaaatggtgcttaaccgcaacccggataacttctttgccgagaacgaacaggcggctttccaccccggtcatatcgtcccgggcctggatttcaccaacgatccgctgctgcaggggcgactgttctcctacaccgatacgcagatcagccgactcggcgggccgaacttccatgaaattccgattaaccgccccacctgtccgtaccacaatttccagcgcgacgggatgcatcgtcaggatatcgataccaacccggccaactatgagcccaactccatcaacgataactggccgcgtgaaacgcctcctggcccgaaacggggtggatttgagtcgtatcaggaacgcgtggatggcaacaaaatccgcgagcgcagcccgtcatttggagagtattacgcccaccctcgcctgttctggaacagccagacaccgattgagcagcagcatattatcggcggcttcagcttcgaactgagcaaggttgtgcggacctacatccgcgagcgcgttgtcgatcagctggcgcacattgatattcaactcgcccaaagcgtggccgataacctcggcattacgctgacggatgagcaacgcaatcttgccccgccgaaagaggtcaacggggtgaaaaaagatccgtcgctcagcctgtacgcggtgccgggaggctcgattaaaggccgggtggtggcgatcctgcttaacgacaaaacccgcgccagcgacgtgctggggatcatgcaggcgctgaaaaccaaaggcgtacacgccaaactgctctactcccgaatgggtgaagtaactgccgatgacgggtcagtgctgccggttgccgccacctttgccggtgcgccatccctgacggtggacgcggtgattgtgccgtgcggcgatattgccagcctgctcagcaacggtgacgcggtctattatctgcttgaagcctataagcatctgaaaccgatcgccctttccggtgatgcgcgacagtttaaagcacgcctgaacgtggccgatcagggtgaagacgggattgtggaaggcgataacgtcgacgacgcgtttatgaccaggttgtttgatctgctagccgcgcaccgcgtctggtcgcgtagcagcaagattgaccagataccggcgtaa

SEQ ID NO: 123729 - DNA, 10017 bp, Enterobacter cloacae
atgaataaatcctgtgcgttgcaaaacgatggttttcacttttctcgtctggctatcgccattcgaaatgcaatccctgctttagtcctggcttcactgccggtttacgccgataccattattgatagtcaaacctcgtcctatatattgtctggcccaggtccgtttgtaatgcctgcacctaacgatattactgttagctcgggtagcgcaatcagcggcgataattcacaaaactggctggtaaccattgatgatggggcgacggtcaacggtggctcatatggcctgaatctggggtccgcatcgcaaggtacggtgttgaatctcagtggtgatgtcaccacaaccggcggtggttccggcggtaatgccgccggggttaagttgaataatggcggtacgctgaatattttgtctaccggttctatcgacagcaacagcgacgggatatttttgacatcgggcggtacggttaataacagtggtgtagtgagcggtgccgatggcggaacgtcagtctatttcagtaatggtactggtagctatgtgggggacagtacttcatccattggcggcgggtacggtattattgtcgactcgggcacctcaacaattagcaacgccggtaaaattgacttactgcataatggcgtttggttccggggtagttcctctggctctgtcgataaccaggcgggtggcataattaattcaaccagcaccagtaattatgggattgatataagcgcatcaggaacggtgactatttccaacgaaggttctattactggtaataccgggatcctgttagggaccagcgggcatactctgacaaacagtggcattattatcggttccgggggaaccgctatttcgctgacggggaataataacgccgtcaccctcgacacagggagtaacatcaccggcaatatcacggcaaccggaaccggtaataccctgacgttgaacgggcagggaacgcttagcagtaacgtcacgggtgtacaaagcattactgtcgcggcagatgtcggccaaagctggatccttagcggctcctcgactacgacgggaatcacgaaccaggcgctgtatgtgcaaagcggcactctgatccttaatggcgcactggacaacggtggtaccggcgggggaaccaccataaacggcgatgcggtcctccagctcggtaataattccgccagcggcagcgtcacggggaatattgttgataacggcacgctacgcttctcccgcgccgatgacattagctttgccaggctcatcagcggcagcgggcgcgtcaaccaggccggaagcggccagaccacgctgaccagcgccaatacctacaccggtggcaccgttgtagatgacggaaccctgaatgccgctgatgttgctgcgctgggtactggtgctgcgacagtgaataccaatggcaccctcatcctctcttttagtaacggcaattttaccaaaagtatcgccaatgcgggtctgcttgatgtcacgggcgcggataatacgctgggaagcgcaatcaccggcgcgggaacgaacagaattagcgcgctggataccacgcttaccggggataatagtgggtttaccggctcgtggaatattatcaatggcgcatctgcgaacgtcggggccgagcaaaatctgggcagcgcggctgtgctgcttgatggcatattgaacatagcgcctgttgccgggggctttacgttcaccaatgcgttgactggcgcaggagagatgaccgttgcattagttagcggtaatcctttcgcctttgcaaatagtgtgggaagtgcttttaccggtacgctacagctgggaagcagcgtcttcacgttatccggcgataataccaccaccctgaccaatgccagcctgcaactggatagcggcaacaccaccactgtagggagcggtacacaaaacatcggcaacctgacgctcaatggcggtaccctgcgttttgcgaacttaccaacgggtataatcaatactggtcaactcgataaaacgtccggaacgatccagatcgatccgactgcggcgacggcggacagtaataacctgctgacggcagatgacggcgtgggggtgcagctcattaccgcggcaacaaacaccggctctgcctctaacctcacgctgaccgatctgtcgggaaatgccattacatcctccacgacgtcacaatccaatatcacgcaaaacagcaatattgttgccgttgcaacatatggcgggttaggcctgaacgacagtaacgggctgggaataggttacaccttaactcggctagatttgcaggcagggcaaaccttaaccctctctggcgacgcgtccaccccatccggcgcggcagatatgaaagcgttgctgagcggcagcggtaatctggcgatcaatgcgaccgatgccattaccctgacaaacgcgggcaatacctataccggcaccacgaccgtgaccggtggcactctgcgcgcgggtgcgttaaacgtgattgataacagcagccaggtcaccttaaacagcggaaccgcgttcgatctgaacggtttcgatcagagcgttaataacctcagcggtgccgggaacgtgaccctgggggcaagtaccctgacggagaataccgcaggcaccgtgacctatggcggcgtaatcagcggcaccggggcagtgacggctgccggaacaggaacctggatcctgacgggggataataactggaccggcggtacaaccattgattctggcgtgttacagctgggggctggcggtaccatgggggggattaccggcgatatcaccaacaacggtgcgctggtggtcaaccgttccagtgccctgacgctgggcggagccattgacgggacggggacgctaacccaaagcggaacgggagagaccacgctgagcggggcaaacagctacagcggcgggacaacggtcagcgcaggcaccctgaatgccgccagtgcgacagcgctgggcacaggcgacgcgacggtcggcagcggtgcgacgctggatctctccttcaccggtggaaccctgacgaacaacatcgccaatgcaggtctgctggcggtcaccggcgcgaatgcgacgctcagcggcagcatcaccggggcgggcgagaaccgcatcagcgccctgaacaccacgctgagcggcgataacaccctctttaccggcaactggaatatcactaacggcgcttcggcgaacgtgaccggcgggcaaaacctgggggatgccgccgttaatctggacggcacgctgaatattgctccggctagcgggggatatacctttaccaacgccctgaccggcgggggcctgatgaccgccaccgtgacaggcggcaacgcctttgcctttgatggcaccgtcggcagcgcctttaccggtacgctgcagctcgggcaaggcacgtttgctctctcgggcgttaacaccaccactctgaccaacgccaccctacagcttgatggcggcaacaccacaacggtggggagcggcacgcaaacacccggcaacctgacgctgaacggcggaaccctgcgctttgcgaatctcgcctccggggtgatcgctactggccagctggggctgacgtccgggacggtgcaaatcgatcccactcaggtcgccagcagcgggggctcgctgttaaccgaggatgatggttccgggctgcagttgattaccgccaccagcaccagcggtgccgcatcgaacctgaccctgacagatctctccggggccgcgctgagcagctcgctggtcaatattgaccagaacggcgcgacggtcgccattggttcctacggctacagcctgaacaataccaatgggctgggcgtcggttacacccttaaccagctcgatctgcagtccggccagacgcttacgctttctggtgacaccgccaccccggccggcgcgtcggacatgaaggcgttaatcagcggcagtggcaatctggcgatcgacgccaccaacgcgctcaccctcaccaatgccggtaacacctataccggtaccaccacggtaacgggcggtacgctgcgcgcaggcgcgcttaatgtgattgatgacagcagtcaggtcacgctgaacaacggcaccactttcgatctgaacggcttcaatcagagcgtgaataatctgaccggcacgggcaacgtcacgctgggtgccagcaccctgacggagaacaccaccggcagcgtcacctacgggggcgcgatcggcggcaccggctcggtcaccaccgcaggcaccgggacgtggatcctcaccgggaataacgcctggaccggcggtacgacgctgggcggtggggtattacagctgggcgcgggcggcaccagcgggtcgattgtcggcaacgtggtgaacaatgcaggactggttattaaccgttcagatgatgtcaccttagcgggggcaataagcggttcagggacactgatccagaacagctctgcgaccggaacgacgacgttaaccggaacgaatagctacaccggggcgaccaccgtgcagcagggcaccctgcagttgggcaacggcgggaccaccggctcgcttgccggcaccagcgcgatcacgctcgacagcggggcggcgctggcctttaaccgcagcaacgccatgacggtcgccaacgcgattaccggcgatggtcgggtcacgcaggtcggcagcggaacgaccgtgatgagcggcaccagtgcctataccggcgggaccacggtggcggcaggaacgttaaacgccgcgaacagcagcgctctgggtagcggggcggcaaccgttgacagcggtgccagcctgctgctctcgttcagtaacggtacgtttgccaatgctgttgccaatggcggattactgaacgttacaggcgcggggaatgcgctcaacagcaccctcaccggggcgggcgagaaccgcatcagtgcgctcaataccacgctcggcggggataacaccctctttaccggcaactggaacattatcagcggcggtgaggcgaacgtggcgggcggacaaaacctcggggacgccgccgttaatctggacggtaccctgaacattgccccggccagcgggaattataccttcaccaataccctgaccggctcagggctgatgaccgccgcgcttgccagcggcagtagctttgcttttgataataccgtcggcagcgcctataccggcacgctccgccttgggcagagcctcttcaacctggcgggtgacaataccgcggcgctgaccaacgcgaccttgcagctggataacaacagcgaaaccacggtgggcgcgggaacgcaaaccatcggcaacctgacgatgaacggcggggcactggtcttgaacggcgaggttccgcccggacagccggatggcgcggtggcggtgggcgacctgacgctaaacagcggtgaaattcgcaccgaagcgccgaccgccggtattcctaacccggcgccaacggggcagaacctgatggaagaggacgatcgggcgatcctgtcccggctggtctccgcttctggcaccgtgaccggtacggcgaataacctgaccctgactgaccatgatggcaacgccatcagcgatccgcagcagtttgcgataacggaaggcggaacggcggtggccaatgccacctataactatgccctcagtaccggcaccagtaacgacggcctgtatatccagtacggtttaaccacgctcgatctgctgagtacgcagacgttacatctgacgtcggatgccggagcaactggggccgcggcaacgctgtcggcgcaggtgaccggcgtcggtaatcttgacgttgatgccagtgcggctggcggccagaccgttaccctcaataacagcagcaacaactacaccgggaccaccagcgtatccggcggaacgctgcgtctgggcagcaatcaggcgctcggtaacaccagcctgcttaccatcaacaccggcgcaaacgccaatattaacggcatgacccagaccattggcgcgctggcgggcgatggcggtctggcgattaacggcggtaacctgaccatcagcaacggaggaacgtttggcggggtgaccagcggcgcgctcggtaatctgacgcttaccggcggcacgctgaccctgacgggggcaaatacctttaccggcctcaccacgattaacagcggcgcggtcatgcaggttggcgcgggcgggacaaccggaagcgttgccgggccgatcgcggataatggcaccctgagctttaatcgcagtgataacgtggccctgacgggggcggtgtccggtagcggtgaactgcaccaggacggtgccggtacgctgtttatcaacagcagcgtcggagtgaccgggccggtggtcatcaatagcggaaccgtaagcatcggcgatggcaccacggacggcagcgtggccggaaatatcgtcaacaacagcgccctgcagttcaaccgcagcgactggcgctacggcggcgtgattagcggggcggggacggtggaacaggtcagcggcagtcagacgacgctgaccgcagccaacacctacagcggcgccactaccgtcagcgcaggaacgttaaacgcggcgaacgttgccgccctgggaaccagcgccgcgacggttaacagtggcgcaacgctggcgctctcgttcgcgaatggcacctttggcaacgcggtggacaataacggcgtgctgaacatcagcggtgccggaaacaccctcaccaccaacatcaccggtacgggaaccaaccgcatcagtgccctgcaaaccacaatagcaggggataacagcgcctttaacggcagctgggatattaccggtagcggtggagcgaccgttaccactcaggaaaacctcggtggctcaccggtgcagttgaacggcattctcaacgtcagcccggccagcggcggctttacgtttatcaacgcgctgaccggcaacggcctgctggccgcgacaatgggaagtatcagcgatgcctttaactttgcggccacggcggggaatgcgtttaacggcattgtggcgctgcgtcgcggtacgatggcgctggaaggtgataacgccagcgcgttagccagcgccacgctgtcgctggggatcggggcaatcgccacgctcaacagcgaccagactatcggaaacctgacgttcaacggcgggctgctggacgtggcgatgagcacgccttcctcggcaaatatcctgacggtgaataacctgaacgtcgattctgccgttacgccgccagacgtgggcgtcgttaatctgcagactacctccctgccaccggggactaaaccagacggcaacttcctcgatcaggataacgaggtggataacggtattcaggtggtgaaagcgacaaccgtcagttcggaaggaacgcatctgaccctgctgctggatggcgcagccccggctgacgagacggatcaggtctctgacggctttggtcatgacgacgtgctggctacctacggctataccgccgtcatgaccgcgggtgcgaatgcccctggcggtccggggctttatgcggggtatatgcttaaggtgctgaacagccagtcaacggcagtgatcgataccaccggagccaccgacagtacgctgggtgcgcagctgaccggcgtgggagatttcgaattccgcgccaactacggcaccctcacgctggcgaataccgcgaacgattatcaggggaatacgcaggtaaccagcggcaccttgctgctcggtgggaacaacaccctcggccagacccgcgccctgaacatagctgacggtgcgacgaccaacctcaacggattcagccagagcattggcgcgctcaacggcgcggcggggagtacgctcgcgctgaacggcggcgcgctgaccgtgaccaacggcgggcagagcgacggggcattaaccgggggcggtaacctcaacctgaccggcggcgagttgatcgttacaaacgctaacgatgcgctgaccgcgaccgtggatatcgacagcggggcaacggcgcgcctcaaaaacgcggccgggctgggcagcggcgcggtcacgctggacggcacgctggtgctggataccgtaaaaggatccctggctaatgccgtccagggggcaggggccatgaacctggtcaacagcagcgacgtgatcctcaccggcaataacgcggactttagcggcgacatcaacattggtactgcgaatcgcctgacggcgcagcagcctgccagcctcggtacgtccactctcatcaataacggcgaactggtgctgaacgccagcgacaactgggcgtttgccaacacgatgagcggcagcggcctgttgaccaaagcgggcgccgggagggttacgctcgccagtgactatgcccatacggggggcacgcacgttgaatcaggtacgctggcgctggataaccgcgcggcggctctctccggcggtggggccgtcacggtggatgagagggccacgctcggcggctacggtaagattgtcgggaatgtcaccagcagagggacggtttccgccggtgatgccattacctcgctgaccggtggtgcagggaatctgaccatccagggggatctcgataacttcaataccgttaacctggcggggaatagcgtgggcaacacgctcaccgtcaccgggaactataccgcccacagtacgctggtgctcaatacggtgctgggcggggataattcgaaaaccgataagctggtggtacaaggcgataccagcggtcataccgacgtttatgtcaataacaaaggcggaaccggcgcgcagaccgtcaatggtattcgcgtcattgaggtggatggggcgtcaaacggggacttcacccttgcgaaccgcgtggtcgccggtgcttatgattatcagctgttaaaaggcacgccaaccagcaatgacggcgactggtatctgcgggttcccgttgagcaaccggtcgtgccgattcgcccggaagcgggggcctatctgggtaaccagagcgcggcgatggacatgttcacccacagcctgcacgaccgtctgggggaaagcctgtttgtcaccggtaacggtcagcagctgaacgcgccgtccgcctggatccgcaccttcggcagccgtaccgacagccgaagcgcgggacagattgggcaggatacctggagtaacggcctgcagcttggtttcgatcttgccagtaacctgcaggtccagaaccgctggcaggtgggtgtcatggcgggctacggctccgcgcggacccgtaaccagagcgacggccagagcaccgtcgcccgcagcaaagtggatggctacagcgtcggcctgtatgggacctggtttgcggatgggcgcccggaagggacgggaccgtacattgatacctggacgcagtatggctggtacaacaacaaggtgaacggggacgatctgccggaacagaaatacgacagcacgacccaggccgtttcggtggaggggggctgggccttcaacgtctataacacttcgctgatgagcttcttcgtgcagcctcaggagcaggttatctacacgcattacgatgcggacgatgtgaaagagaacaacggtacaaaagtgaagatgaacgacggtggtttcagcaaccgtctgggcataaggatctacggctattctgcagacaagaagggacgtcagtggcagccgtttatcgaggcgaactggctctataacggctataccgacgccgtgaaaatggacagcacacgcctggaatccgatacgccgaagcatcgctatgaggtaaaagctggggtagaagcgaaactgagtaaccagtggagcctgtggggcaatatcggtacccagcagggcgccagcgagtaccgtaacgtggagggcggtctcggggtgaaatacacctggtaa

SEQ ID NO: 123730 - DNA, 210 bp, Enterobacter cloacae
atgaaaaaaatcaaaaatactgctgcagccatggtgctttctgcactttcgtttggtgtattcgctgcagatgatgccagtcaggttggaatgactcacgcttctgacgttgaagccgggtcaaacatcgcgccgggcgcgccgtctaccggtcaatcaatgaatgacgcgtttgatgtacataaactggtagcaggtgaatggtcctga

SEQ ID NO: 123731 - DNA, 756 bp, Enterobacter cloacae
atgacgcagctgatgcagctcacggacgttgccgagacggggcgtctggagccggtgacggcggccatccgtgcaggtgaaatcctgcatctggtggggccgaacggggcagggaagagtacgctgctggcgcgcatggcggggctgacagtcgggccaggctcgatcaccttgctcgatagcccccttggtgactggtcggcggtcgcgctggcgcaccggcggagctaccttgttcagcagcaggtcccgccgtttgcgatgccggtctggcactatctgatgctgcatctgcacgataaacagcagaccgcgctgctcaccgaagtggcggcagcgttggggttagaggacaaactttcccggcatgccagccagctttccggtggcgagtggcagcgcgtccgtctggcggcggtgatccttcagatccatccggcgggcaaccctcacgggcgactgttgttgctggacgagccgatgagcggtctggacgtggcgcaacaggcggcgctggacacgctcctcagcgcgctgtgtcaacaaggcattgccgtggtgatgagcagccatgaccttaaccatacgctgcgccatgcgcacagcgtatggcttctggcgcgcgggaagatgattgccagcggcacgcgcgatagcgtccttacgccgccaaatctcgctcgtgcttaccatatgccgttccgcaggctggatatcgaagggcataagatgctgatttctaccgcacacgagtaa

SEQ ID NO: 123732 - DNA, 780 bp, Enterobacter cloacae
atggctgaacgctactgtgcggaatatattgtctttcacgccgggcaacggacgctgatcgacaacgtgtcgctgaccctttcccagggcgaactggtggcgttgattggccccaacggtgccgggaaatcgaccttgttacgcctgcttaccggctatctcaaacccgcgagcggacggtgcagtcttgcaggaacgccgcttgcggcctggccgccggacagactctcccgctaccgggcggtcatgcgccagaatacccagctcggattcgactggccggtagaagcggtgatcgggatggggcgtgcgccgtggacgcgccgccctgaggcgtcggtgattgaggaggtgatggctatctccggctgtttaccgctggcgggcaggcagtttgcggcgctctccggcggggagcagcaacgcgtccaactcgcccgcgcgctggcacagctctggtgcgacggtgcgccgcgcggctggctgtttctggatgaacccacgtccgcgctggatctttaccaccagcagcatctgctgcgcctgctctcttccctgacccgtcgggggcatttgcatgtctgtgtggtgctgcacgatctcaatctggcggcgctgtgggcggatcggatcctgctgttacataacggcaaaatggtcgctcagggggccccggaggcggttctgcaggccgatacgctgacgcgctggtacggcgcgcaggtgcaggttggccgacacccggctcatgctgcacctcaggtatttctcgccccctga

SEQ ID NO: 123733 - DNA, 993 bp, Enterobacter cloacae
atgtcccgacgtgccgtactggcattgtggttgctggccgcgctgctggccgtcatgacgctggcggccagcggtgtgggcgcgttgcgcctgccggtcagcctgctgtggaccggcagcgacgacgcgctgcgtcagatctggctgacaatccgcctgccccgcgtgctgctggcgctggcaatcggcggctcactggcgctggcgggctgtgtgatgcagggactgtttcgtaacccgctggccgatccgggcctgctggggatcagcagcggcgcagcactcgccgttgcgctgtgggtggttattccgctctcgctgcccgcgctggtgatgctgtacgccccgatgctggcggcgtttctcggcgcgctggccgccacattcgtcattttcctgcttagccggcaacgtgacagttccctgtcgcgactgctgctggtggggattgccataaatgccctgtgcggggcggccgtcggcgtgctgtcatggctcagtaatgatgcccagcttcgccagctctcactctggggcatgggcagcctcggccaggcccagtggtcaacgctgctggccgtctgctcactgatggttcccaccgtgctggttatctggcgcctggctggtgccctcaacctgttgcagcttggcgaggaagaggcgcactacctcggggtggaggtggccgttgtacagcggctcctgctgctgtgcagcgccctgctggtggccgccgcggtggccgtcagcggtgtcatcggctttgttggccttgtggtgccacacctggtgcgcatgtggctgggggccgaccaccgggcggtgatccccggctcagtactggccggtgcgttactgttgctggctgccgatacgctggcgcgtaccctggtcgccccggcggaaatgccggtcggtttattgaccagtcttctcggtgcgccgtggttcctatggcttatctttcgtcgcggaggtgcgcatggctga

SEQ ID NO: 123734 - DNA, 822 bp, Enterobacter cloacae
atgaaaaaatggcttgccctgatcagcgccctgccgctgctggcatttgctgcgccgcaggagaaaatcgtcgcgctcggcggcgacgtcaccgagattgtctatgcgctcaacgcggcatcttcgctggtggcacgcgacagcaccagccagtggccacaggcggcgaacacgctgccggacgtgggctatctgcgccagctaaatgccgaaggcattttgtccatgcgccccacgctggtgctggccagtgcacaggcacagccgtctctggcgttaaaacaggtagagcagagtcacgtcagggtgatcaccgttccggcaggcaatgagctcagtgttatcgatgaaaaggttcgggttatcgctgaggcgacacaccgcgaggcagaagggaaaaccctgcgcagctcgctgcgtcaggcgctgtcggcgcttcccgcgtcaccgctcaataaacgggtgctgtttattctcaaccacggcgggatgaccgcgatggccgccgggcaacaaaccgcagcggatgctgccattcgtgtggcagggctgcagaacgcgatgcagggcttcactcgctatcagccgctatctcaggaaggcgttatcgccagtcagcccgacctggtggtgatctcgcaggatggcgtgaacgctctgggtggggcggatgcggtgtggcaactgcccggtctggcgcaaacgccagcgggacgtcaccggcagatgctggccatcgacgatatggcgctgttgggctttagcgtgcgaacgccacaggcgatccagcagttacgccgtaaagcggagcaactgccctga

SEQ ID NO: 123735 - DNA, 183 bp, Enterobacter cloacae
atgtcacgtacggataacactgcggcaacgccgccaaaaacagacacagtatccgcccccgccgagcgtcgcattgacagcaaaaccctgctgggcgatgagggacgggtcattatcgagcatgacggtcaacgctacctgctgcgccagacccatgccggaaaattgatcctcacaaaataa

SEQ ID NO: 123736 - DNA, 630 bp, Enterobacter cloacae
atgtcctccacagaaaaaccccatcgtggttctccctatgcgcaagcgctgattacgcacttacaaccttactctactgtccgtcatctcgatcgcggggagcagctggatctggtggttgatggccggggaatgagttatttgattctggaagggaccgttgccatttaccgacgcagcgacaatctgatgctgtcgaccgcgaaaagcccggcgttatttggagtggctaatattaatgacatcttttttgacgactacctgaaaacggtgaccccctgcaagattggaacgctgaccgcagagcagctccacgtcattattcaggagaaggcgctgtgggggttgatatcaaaccacctgatgtttatgtacaaccggctctataacaccgtcatgccaaagggtgccccgacggcctatgagatgatccgccagcagctgatgttattaatgaatgaagatgaatcttatcgccgggagataaccgcagaacgctacattcgcgataaaacccagctttcccgcagcggcgtgatgcgtatcctggccgatctcaaaacagggggatttattgaaatggaagatggcaggctgattaaaatcaataaacttcccgcccggtactga

SEQ ID NO: 123737 - DNA, 678 bp, Enterobacter cloacae
atgcgttttatcaacacaaccggactggccgtagcgctgtcagcactgacgctgagcacagcgcaggccggagtgattattggcggcacccgtatcattttcgatgggacaaaaaaagaggcgtcaataagcattaataatcctgacgcgacgccttatttaattcagtcatggatagatgtgccggaaggtaattcaggtaaagcgccttttattattacaccaccgttataccgactggatggcgggcaaaaaaacgtcgagcgaattgtgatggcgggtgcactgcctcagcagcaggaaagtttattttggctgaatattaaagcgatcccttcagcatcaaaacagacgaacgccctgcaaatagcagtgaaaacgcgcatcaaactgatctaccggccagaaagtttgcgggcgtctacgccagaagaacaggctaataaattaacctggcaacgcgccgggaatgaaattcaggtcaacaaccccacgcaatatgtcgtcaattttaatgaaattacgctgggggggaaaaagctggacgatgtgacctacgtgttacccggtgcctcagtccggtttgtattacccaatgaggcaaggggaaattcactcacgtttaaaattattaacgactatggcagtcccggcgtattacataaagccagtttgtga

SEQ ID NO: 123738 - DNA, 2541 bp, Enterobacter cloacae
atgacggtaaataacacgatgaaacccgcacgcctggcgatgtttatcgccttagcgtttggcggatcctcaacctcgctctatgccagtgttgcctttaacaccgaattaattgagctggataatccaggcatggataaagccgatttgtcggcctttgaatcaggctcgcaggcagcggggatctaccatgtcgatattattgtcgacgacgcgtttctggagacgggggatattcagtttaccgcgagcaaagccgacaacggcgatgcgtcattgcagccttgtctgagtcttgcgcaattaaaacgctggggggtgaaaacggcattatttcctgcgctcagtgcaggacacggtgaatgcgtcaatcttcaggcgattccccatgcaagtgccgatttccagtttggtgcccagcgtctggtgttgagtattccgcaggccgccatcgatctgccggcaagaggctatgtgccgccggagatgtgggatgaggggataacggcagccatgctcaattacagcctcagcggcgcgaacagccgggcgaaagcgggtgagggggccagtagcaacagccagtatgcgaacctgcgtccggggataaatattggcccgtggcgtctacgcaactacaccacctggtcacgggatggcgcggggaaagatcgatgggacacggtctacagctatctgcaacgtgccgttattcccctgaaagcgcagcttactcttggggacagttccgccccggcggatgtctttgacagcgtgccttttcgcggggttcagctggcctcggatgatgacatgttaccggattccctgaaaggctatgccccagtggtccgcgggatcgcgcgcaccaatgctcaggtggtgattcgccagaatggctatcagatctaccaaagctacgtggcaccgggcgcgtttgaaattaccgatatgtatcccaccggtggcgcgggcgatttagacgtgaccatcaaagaggccgatggcagcgagcagcatttcacgctgccgtatgcctcggtaccggtattgcagcgcgaagggcgactgaaatatgccctcaccggtggacagtatcgcgcctacaacagcagcgtggagaaaaccccgttcgggcagatcgccgcgatttatgggcttcagaagggcatcacgatctatggcggggggcagggtgccagcaaatatcagtcgcttgcggtcggagccggtaaaaacatgggggacttcggcgcgctttctgtcgatgtcacccaggcctggtcaacgccggccaatactgcaaaaacgcaggggcagtcctggcgagcgcgttacagcaagaacgtcattaataccggcaccaacttttcgattgcggggtaccgttattcaacgcgcggctattacggactccaggacgtgctggactcctgggggaacagcggcgcacttcaggacagacggcgtaaccgcctggagctcaccatgagccagacgctgggcggtgaccggggcgcgctgacgctcagcgccgcgcgggaagattactggaacgctgacagacccatgacgtcgtggagtgtcggctacaacaatgactggcacaacatcagctatggcgtgagctggacatacagcaaaaatggcagcccggcgtcgtccggcagtggaaatataaaaacttacgatcacgaccagcttctggcgctgaccgttagcgtaccgctggataaatttctgccgcagacgtgggctaactatggcctgaacgccagcaagaacagtggcacgacgcacagtatcggcatgaacggggtggccctcgacaatagcgccctgagctggaatatccagcagggttacggtacggatggcgtgggctataccggtacgctcaacggcgactataaaggcacgtacggggaagttacggcgggctatgggtacgacaaacatagcgagcgccttagctatggtttgcagggggggatcctcgcgcatgctgatggcgtgacgctgtctcagccgctgggggaaaccaacgcgttaatcaaagccccgggcgcgcacggcgtgaatattcgtaatcattccggcgtgcgaacggatttccggggctatacggtggtgaataacctctccgtataccgcaaaaacgatctcactctcgatccggaaaatatgcctgatgatgtggagctggagatcaacacccgcacggtcacgcctacgcgcggcgcggtggtaaaagccgattatttgtccaaagtcggacgccgggtgctgatgacgttgacgacgcctgagcagttcgtgccgtttggcgcggttgttaccctggcggatgatgacaagagcagctttatcgtgggcgatcgcggccaggtctatttaaccggcctgcgcgaccagggcacggtcctggcaacatggggacatcaacctcaccagcagtgtcgggcagattttagcctgccgaagggagcgcaatacggcggcatcacggacatcagcgtctcgtgtcgccaggagcattaa

SEQ ID NO: 123739 - DNA, 489 bp, Enterobacter cloacae
atgttcctccttgcattcagctggaacgtcattgcagctgatagcgttaatctgggcgtgacgggaaatatcatcgcctcgccctgtgtatttaatggcgggagcgcaaacctggatattaatcttggaaatatacaggcgactaatatggcgacgccgggatcgacatccgatccggtgccgtttaatttgcaatttacccagtgcccggcggggacccgcagcgtcacggtctcgttcaccggcacccccgatccggcggccggtgcggactactacatgaacagcggctcggcgacaaacgtggcgatagccatgcgtgaggccgcaacgggaacgctgaaggggaccgggtccagcataacgcaaaatattgcgccggacagaacggcgaccatggccatgcaggcttcggtaaaatctgtaaccggtggcgcgacgccgggcagtgtcagcgcagttgttgtgatgaccatgcaatacaattaa

SEQ ID NO: 123740 - DNA, 645 bp, Enterobacter cloacae
atgttgaatattctgattcaagagacagaccaattttttcaccatgggctgcagtgtttctttgtggaattctttttgcgtaattttaagcaacagattcatttcgaggcggagcttagccgtgataacgtcagtgccgccgatattatcgttctctcgttttgtatgggggaggcgctggtctgttttcccgaattacaggcgcgccagaaagggattgtgatcggattggtagaagatgaatatcatttttctgccttaccctcctgctttaacgatattatttttatttcacgtcgtgcttctcttgatcggataagccaggtgctgttcattgcctggtaccgcgcagagctggcggggaacagctggaagcaaaaaagctgcgcagagtgtcagcataaaatattatcaccccagcaaaaacgcattatggccaatttttaccggggattatcggtagtgcagatcgcgcatgcgctgaagatcagcgataaaaccgtttttacgcaaaagtatgtaatgatgcaaaagtttaatctgcgaaccgattttgaactgattgcccttattcgccgaatggtgcaaaggaacagttacccaaaccggctcggtgactatctcgcattctctttgatactgtaa

SEQ ID NO: 123741 - DNA, 1218 bp, Enterobacter cloacae
atgcaaattcacaaaaccatcaagccgatttttgtctgtaaatttaagtgtgttgggccagaatgcttaatgtcatgttgtcgtggctggacaatcgctatcgacaagaaaacccatcagaaatacgttctctcctcgcacacagagattgccgccattgccaaaaagaaccttatccttcagagaaagggtaagaacagctactccagagtgaagttaaacgaaaaaggggactgtccttttatcgatgaaaacaagctctgcatggtccaccgcgatctgggggaagaggcgctttcgcatacctgcagcacttacccccggagttcaactcgctaccaggatgagacacggcacacgatgacgctctcctgcccggaggtggtgcggcgggtgctgtttgacccggatgcgatgctgcttcaggagcaggatgagctcgtggcgggctataaaaccaatttgattgggcagcgccagtctgtctcgcagactcaacaggtgatccatcttttcgcctggaatttaatccagtcgccatcccgtaatatagaagaaaatttgatggcgctggcgcagtttattctttgtctccagcacgttaacgtcgatctgcataataaatttgctgaagtggaaaatttctacgaagcgcttctcaatgagttgcaaagcggaaaatcgctgatggattccggtcatctggcgaagtcaaacgcgatgaaatatctggcgttgtccgtaatgggcacaaatgtggcgaaggattcagcccgggatggttttattcttgaagggcatcagcaaattgccgcatacctggatgttgccggtattagcgacgcggcggaactggagacgaaattcgacgcgattaatcagcagtggcacaaattatgtgaggattcctgtttgtcagaaccttacgtgttacgcaattacctgctgtacaaactctacagtagctatttccccggcaaaaacatggcgacgatgatgcgtcagttttatcgtatcgtgctggactttttctatatcaaattcatcctcagcgtgagatcgatgcagggcgaaatcgaccaacaggtggtaatgaaaaccatcgccagcctctccgaaaagaccatgcacaataacaccattgatgcccgcatggacgctgcgattgataaaatcaatggcggcgatgatttatcctgcctgctgttgattggataa

SEQ ID NO: 123742 - DNA, 1221 bp, Enterobacter cloacae
atgagttttcccgtagagaaagtacgggccgatttcccggttctgacccgtgaagtgaatggactgccgctggcctatctcgacagtgcagccagcgcgcaaaaaccgaatcaggtggtggatgcagaagccgaattctaccgccacggttacgccgccgtgcatcgcggtattcataccctgagcgcagaggcgacccagcgtatggagaacgtccgcacccaggtggccgcttttctgaatgcgcgctcgccggaagaactggtgtttgtgcgcggcacgacggaagggatcaaccttgtcgccaacagctggggcagtgcgcaggtccacgcgggcgataacatcatcatcaccgagatggaacaccacgccaatatcgtgccgtggcagatgctctgtgagcgtgtgggtgctgcgctacgggtcatcccgttgcatcaggacggcacgcttcagcttgagcaccttgatgccctgctggacgaccgcacgcggctggtggcgataacccaggtctctaacgtgctgggcaccgaaaacccggtagcagagatcgtcgaaaaagcccaccgggcgggcgcgaaggtcctgattgacggcgctcaggcggtgatgcaccacgcggtggatgtgcaggcgctggactgcgatttttacgtcttctccgggcataagctttatggcccaaccgggatcggcgtgttgtatgtgaaagacgatattttgcaggccatgccgccgtgggaagggggcggctcgatgatcgccaccgtcagcctgtcggaagggaccacctacgcgcgcgcgccgtggcgttttgaggctggtacgcccaataccggcgggattatcgggcttggggctgctctctcttatgtctcctccattggccttgaggccatccaggagtatgagcagatgctgatgcactacgcgctgcaggagcttgccagcgtgcccgagttgaccctgtatggcccggccaaccggcagggcgtgattgcgttcaatctgggaaaacaccatgcctatgacgtgggcagtttcctcgataactatggcgtggccgtgcgtacggggcaccactgtgccatgccgctgatggcattttatcaggtcccggcaatgtgccgcgcgtcgctggtgatgtacaacacaacggaagaggtcgacaggctggtggcggggctaaaacgcattcaccagttgctgggctaa

SEQ ID NO: 123743 - DNA, 126 bp, Enterobacter cloacae
atgagcgtgcagaagaaagtgtgcctgagtgacagcccaacgaaggagaggagaagttgtacgttgttttttgtattccaagcgctgaaaccattcaccagggatttggcgcgcattatacgctga

SEQ ID NO: 123744 - DNA, 1407 bp, Enterobacter cloacae
atgaaacggactgtattcacgcccgcccttttagccaccgcgttactgattgccatgcaggcggcccatgccgggccacaggcgcatgtggtctgcagttactcccacaccctcggcgatgacgccatcatgatgtttggtatgcccaaccaggccatgtggcacgatttctttggcaatacccataccgatgccttttcaacccgggaaaccttgcgccagcacgaagagacgacctgtgataacaaggccgacggctctgcctactgggcgccttctctgagattacccgacggaacggtggtcaaaccggcctatcaaaaaacctattatcaggcctcgaaggttgatgcctatcccttgcacccgttcccggccgggctgtcgctgctcgccggggatcatcacggcagcacgcccaacccccatatcagctttttatgcgcgaacggaaatggctatagcagcaaaatcggcgaggtgtgcgggctacgtaaagctaacgatgccgtccagtttaatattggcattcaatttccgaactgctgggacggcgtgaatctgaagcccgaccacggtctggccaatgcggcgtatgacgttaacggccagtgcccgagcgcgttcacggtaaaaattccaacggttaatatgaatgtggcttacgtgctgcatggtattacccgcctggacacccgtcaggcgcaactgtcgctcgatccggtgatgcagggggctgaacgtgaagaacgctggggtagcctctacacggcgcatgccgatttcatgaacggctggacggacgatgccgcccgctttatgaccgaacgctgcatgaaccgcggtatggattgtggttcaaccgtgccctatggttattctatggcgaaggccaatgtctggctcagcagtcttgaaccgaacatcactcagccttcaccgcaggtgttactggtagaggataactggcagaacggtggacgcacaaaaaacagcgagacgctgagcctggtaaaattccatatcccgccgctgcccgccgggcaggatccgtccttgtttaaataccgcgtccgtattttcggtgggaaggtagaaaacaatggggccgatcagattttcttttatccggccagtaatgactgggatcctgcgaccgtgaagtggtcgtcgcgtccggcctgtaattaccgttccgatgccgtgctttatctgaaccatgttcgtgaataccggatggtcgacgtggataaagccgtgcgtaaggcgctggcggaagggaaaaccgagatctcgtggtatatcggtggcgatcgccaggggaatcattatcagtttgaaccagcctcatcaccagacgggttaatgctcatgctgactggctttaaacatacgccggaggtctga

SEQ ID NO: 123745 - DNA, 1329 bp, Enterobacter cloacae
atgtccaccaacagcatgatgaaacgcgctatcgttctttgggcgatagcgtgcacactcagcggcgtactgctctacgccgaacaaattcgccgtcagttctgggaacgagaccgtgagttctcggcgttattttccgaattaagcgcggtcctgacgcaaaatgaatcggtcttaccgcttctgaatggcgatgaagacattgccgccttgcgcaaaaaattcccccatctgctcgccctggaaaaaacgacgggacgcccactggatgcggcgcgggtggagcctgcccacgagatgcagtactggctttataacccctggcgtcagatccgcgtgcgggtggatctcggcccgattctgaatgcgcatcatccgtttacccatctggggatccgcttcataccgaccggagaagaacggccctctgacgcattctggcactggcaacgcaccttcccgcaacatacgcaaccttttacgcttgaagcggattcccggccggactggtttggcgtctcctggtctgtttaccccttactgtttatcggctgggggatagtgattgcgctggcaagcgtggtgctctggcagcgtaaagcacgtaaagacgccgagcaaagggcgcgctattaccagcacgccaggctcaataccctgggggagatcaccgccggtattgtgcatgagataaaccagccgctgaccgccgtccagacgtggatccagggcgcgcagcgtcagttacagcaggaaaacggccaggccgtgtcgcaggcgctgtcggctgcgctgacgcaaacgcagcgtattagcgcattattaacccgttttcgcgagcacgttgtgaaggagaaagtcaccctgcgggaaaccgatctggcagcatgctggctacaggtggtgaacttacttgagcatgagcgcagggctgagcatatctcggtcagccatgcgtttgcccccggggccaccaccgtgctggccgacccgctctggctggagcaggtgctacataatctgctcagcaatgcgattcaggcccaacaggcgagtcctgctggctgggtaaagattgaaagccacaaaaccgagagcggcattcagattaccgtgacggatggcgggcctggcttcagcccggaggcgttacagaatgccttcatgccgttttacaccggccgggaagagggcattggcctgggaatgaccttaacggaatcattaatgacgcgtatgaatggatcgattacgctgggcaatgtaccgcagggcggggcagagatccggctacaactggcaaacggaaaggaggctacggttggataa

SEQ ID NO: 123746 - DNA, 612 bp, Enterobacter cloacae
ttggataacacaatctggctgattgatgatgatgaatccatcagagagtcgatggcgtttttgctttcgggcatggggtggccggtcaggacgtttgaaagcgttgatgcctttaccgcggcccatgcacgggacgcggagctggtaggctgcatgctgctggatatgcggatgccgggcaaaggcggactcacctggcttgaggaggggagatggccctggcccctgctgccggtgatcatcatgaccgggcacgggaccgtagatgcctgtcgtcgggcatttcgtaacggcgtgtttgagtttttcaccaagccgctggatgccgataagcttattgaaacggtaggattagcctttgaggagagtcagcgccggtttgccggctggcaggaaacctcccgggtgaaagcgcgcttcgcacaattaaccgcgcgggagcatgaggtgctgggggagttgatgaaagggctcagcaacaaagaggtggccgcccggctgaacctttcgccacggacggtggaagcgcaccgcgcggcggcgtttaccaagcttggcgtcggcagtctggttcaggcaatacgcgaatacgataaattgcaatccgtataa

SEQ ID NO: 123747 - DNA, 783 bp, Enterobacter cloacae
atgatgacactctgcaaaacctgtggtactgcgtatgacgccacgccggaaacatgcccgatttgcgaggatgaacgccagtatgttccgcacagcggccaggcgtggattgactttgctaccgtgacttccacccacagcaacaaatggcagcaactggagccacagctgttgagtatcaaaacggtgcctgcctttgcgattaaccagcgcgcgctgcttttacgtaccccacacggcaatattctctgggactgtattgccaacctcgacccggcaaccaaaacgctcattaccgcgctcggcggcatcagcgcgattgcgatctcgcacccacactattacaccaccatgcagacctgggctgcggtatttaatgcaccggtgtacctgcacgccagcgacagagagtgggtcatgcgcggcagtcctgccattcagttctgggaaggggatgcgctggaactatttccgtcggtcaccttgttgcgtctggggggacattttgcaggcggtacggtgctgcactggcaggagggcgaaggcgtattgctggcgggggatattcttcaggtcacgcccggaaaagacgccgtttcgtttatgtggagctacccgaatatgctgccgctgccagcccgcaccgttgagcggattaccggtcttctggaaggcaaaaaatttgcccgcctgtacggtgcctttgagggacaaaacatcccggcaaacgcggatgagattgtgcagcggtcaggccagaaatatattgcttgtctcaggtaa

SEQ ID NO: 123748 - DNA, 1596 bp, Enterobacter cloacae
atgaaaaaaatcgccattatcggctccggccccacagggatttacaccttttacgcgctcctgaagcataaaacgccactggccgtttccattttcgaaaaagccgaggaagcgggcgtgggcatgccctatcgaattgatgaaaactcgcgtctgatgctggcgaatattgccagcattgaaatcccacccgtttttatgacctacctcgactggttaaaagagcagagtgcagcccatctcgcccgctatcacgtcgataaagcttccctgcacgaccggcagtttctgccccggatcctgctgggggaatattttcgcgacagttttctcagggtggtcaaagaggcccgcaggctgggatttcaggtcgatatccatgaatccgccgaggtgacggatatcgccaccgacaaagacggcgttacgctttcggtaaataacagccgcttacctgaacgcttcaaccttgccgtcatcgccaccggccacgtctggcctgatgaggatgaggccacgcgcaccttcttcccaagcccctggtccgggttgatggacgccgatatcccagcctgtcgggtggggattatggggacctcattaagcggactggacgccgccatggcggttgttatgcagcatggcgcctttgttgatgacaaattcgttctggataaaggcagcgaggcgttaaaaatagtcctcatgtcccggacaggcattctgcctgaggccgatttttactgccctattccttacgagccgctgtcggtattaactgaatttgtcgttgagaatgaaatcgccaaagggtctgacggcctgctggatcgtatttttgccctgatggtaaaagagctggaactcgccgacccggcatggtgtgagaaaatcgggctgcgcgccctggatgcggacacccttcgcgatgcctggtttgaggaccgcaaacagcacggtccgtttagctgggcagaagccaatctgaatgaggtcgaacgcaacaaacgtgagcatcgaacggtgccctggcgctacaccgtgcttcggttgcacgaggtggttcaggagatcgtgccgcatcttaatgagcaggaccgggaacgtttcaaacagggactggcgcgggtgtttatcgacaactacgccgccattccaccgcagtctatccgtcggctgcttgcgctgcgcgaggccgggatcatcagcgttgtcgcattaggtgatgattacacgctggatgtcggtcgcgcccagacggcgatcgcgactgaagacaacacctatctctttgacgtgtttattgatgcccgagggcaaaaaccgctgaaaacagaggatctgcctttcccgacactgcgcaaacagctgcaggcgacaggcgacgagatccctgatattggcgaggattacacgcttaaagcaccagaaacggtgcgcgggagaatcgcgtttggcgcgataccgtggctgatgcacgatcatcccttcgttcagggactggcggagtgcgcggagattgccgggtcgatggcgaaagcggcggaaaaacccgcttctgggttacgcaggagattgccgtatttcgatagctga

SEQ ID NO: 123749 - DNA, 261 bp, Enterobacter cloacae
atgtatagctaccatgacgtagaagccatcaaaaccaatcttgaatggattgttaatcaggcaacgcttaaccaagcctcccccgcgcgtgccgaccaaaaagccctctttgatcttctggaactgattcagtcttacgaaatattgttggatttaattaacgaattcggaagcgccgtgattgatgcggagatcgcggaaggcctgagcgtgacagaaaaactcatcgccaaaatcaaaagaagtactcacgccatgtaa

SEQ ID NO: 123750 - DNA, 1527 bp, Enterobacter cloacae
atgagtatgtcatccataccttcgcattccccatccggtaagctctatggctgggttgaaaggatcggcaataaagtgccacaccctttcctgctttttatctggttgatcgtggttttgatggtggcgacagccgtgctgtccgccttaggggtgagcgtgcgcagcccggccgatggcagcatggtaagcgtaaagaacctgctgagcattgaagggttgcactggtttttaccgaatgtgattaaaaacttcagcggtttcgcgccgctgggcgccattctggcgctggtgctgggggccggactggctgagcgcgttggcctgctccccgcgctgatggtgaaaatggcttctcacgtcagcgcacgctacgccagctatatggtgctgtttattgcgtttttcagccacatctcttctgatgccgcgctggtaatcatgccgccgatgggggcgctgatcttccttgccgtcgggcgtcaccccgtggcgggtctgttgtcggcaattgccggtgtgggatgcggtttcactgccaatctgctgatcgtcaccaccgatgtcctgctttcggggattagcaccgaggcggcgaaaacaatcgatgcggccatgcacgtcagcgtgatcgacaactggtactttatggccagttcggtcatcgtcctgacgcttgttggcgggctgattaccgataagatcatcgagccgcggttagggaaatgggaaggccgtagtgacgaaaagctggaaacgctgagcaaagagcaacgctttggcctgcgcgtcgccgggatagtctcgctggtatttatcgcgatggtggcgctgatggtagtgccggagaacggtatcctgcgcgacccggtgaaacataccgtcctgccctcgccgtttattcagggcattgtgccgctgatcattctgtttttctttgtcgtgtcgctcgcatatggcatcgccactggcaaaatccgccgccaggccgatctgccgcagctgatgattgagccgatgaaggagatggcgggctttatcgtgatggtcttcccgctggcccagtttgtcgccatgtttaactggagcaacatgggcaaatttatggccgttggcctgaccgatgcgctggaagccgccgggctaagcggcgtcccggcgtttgtgggtctggcgctgctgtcgtcactgctgtgcatgtttatcgccagcggatccgccatctggtcgattctggcccccattttcgtgccgatgtttatgatgctgggcttccatccggcctttgcgcagatcctgttccgtatcgccgactcctcggtgatcccgctggcgccggtttcgccattcgtaccgctgtttttgggcttcctgcagcgctataaaccggaggcgaagctgggtacctactattcgctggttttaccctatccgcttatctttttaggggtatggctggtgatgctggtggcatggtatcttgtcggcctgccgataggaccgggtatctacccgaggctgaattaa

SEQ ID NO: 123751 - DNA, 1662 bp, Enterobacter cloacae
atgctgaaaaatctgcacgtgattaccggtattatctttgctctcaccatattctgcctgctacaagttgtcacgggagggttgttctactctgccgtcagcaacgatcgccataacttccagaactccggggtgcttaatgcccagcaggagagcctgagcgacagcgttaacaccctcatcaaaacgcgcgttaccgtgacgcgcgtggccatccgctatctgaaaaatcagcgcgatccggcgtcccttgaggcgatcaacaaactgcttggcaccgcgggtaactctctggctaaagcagaagcctataacaaacagtggcaggccctgccgcaggttaacggccagagtgcggcgctaaccgacgagatgctgaaatcctggaaccagatgcacgaagtgatgcgtctgtcgattgagtatctgcgtgccgacaactatcaggcctatggcgatctggatgcgcagcaggcacaggacgatatggaagcggtctataaccgctggcgcgccgaaaacaacacgctgctgaaagccgcggccgaagagaaccagagcagctttacccagatgcaatggacgctggcggctatattcctggccgttatcgccgtgctggtggtgatctggcaggggttacagcacctgctgttaaaaccgctgcaaaccattatgaaccatattcgtaccattgcggcgggcgacctgacgcaggatattaccctctctggccgcaatgagatgggccagctggcggccggtctgcatgagatgcagcaatctctggtcaccacggtcagcgccgtacgcggcagtaccgactccatctacaccggcgcaggcgaaattgccgccgggagcaacgatctttccgcccgtacggaagaacaggccgcctcgctggaagagaccgcggccagcatggaagagctgaccgccacggtgaaacagaactccgacaacgcccgtcaggcgaccctgctggcgaagaacgcgtctgaaacagcggcgcgcggcggtcatgtggtggataacgttgtccgcacgatgacggaaattgccgacagttcgcagcaaatcgcccacatcaccggcgtgattgacagcattgccttccagaccaacattctggcgctgaatgccgcggtagaagccgcacgcgccggggaacagggccgtggctttgcggtggttgccggggaagtacgtaccctggcgagccgcagcgcgcaggcggcaaaagagatcaagggccttatcgagaactctgtcagccgcgtgaataccggctctgaacaggtcagcgaagccggtgcaacgatgaaggaaattgtggcggcggtcacccgcgtgaccgatatcatgggtgagatttcatctgcgtccgatgagcagagtcgcggtattgaacaggtgagcctggccgtttcgcagatggacagcgtcacccagcaaaacgccgcgctggtgcagcagtccgccacggcggcagcggcgctggaagatcagtccgaacagctgcgccaggcggtggcggcatttcgtctgaacggtaaacaacaggccaccgcgccccgtacaacgcatgtgaaaacaccacagctgttgcgcccggccacggcaggcaccgccaccgacagcaactgggaaaccttctga

SEQ ID NO: 123752 - DNA, 1263 bp, Enterobacter cloacae
atgttcgcgctcgttgacgtaaacagtttttacacctcctgcgagacggcgtttcggcccgaccttaaggggaaacccgtggtggtcgtttcaaacaacgatggctgtatcatttcacgttcagcagaagcaaaagcattggggatcggcatggccggtccctacttcaagctgaaggatgagctgagacgccagaaggtacacgtctttagctccaattatgcgctgtatgcggatatgagccgccgggtgatgaccattctcgaagagatggccccgagagtggagatctactcgattgatgaagcctttctggatctgacgggcgtcagccagtgtatgtctctggaggcgttcggtcaggctatccgccagcgcctgtacaaagagaccggcctgctggtcggggtcggtatcgcgcccaccaaaaccttagccaagctggctaaccatgccgccaaaacctggaagaaaaccaacggtgtggtggatttatcgaatatcgatcgtcagcgtaaactgctgtcactggtaccggtcagcgaagtgtggggcgtcgggcgcaggatcagcaaaaaactgaatctgatgggaattgagactgccctgcatctggcggaatgttcaagctgggtgatccgtaaacactttaatgtcgtgctggaaagaaccgcccgcgagttacgcggtgaaccgtgtctggcgctggaagagttttcgccaacaaagcaacaaatcatctgcagccgctccttcggcagccgtatcacccggtatgacgatatgcaccaggcgatctgcgcctatgccgaacgcgccgccgagaagctgcgcgaagagaaacagttttgctgctatatcagcgtctttattcgcaccagcccgcatgcagaggacgaggttttttatggtaaccaggcctccggcaagctgacgatccccaccaacgatacgcgggatattatcagggtagctatcgagtcattgaaccgaatctggaaagagggacatcgctatatgaaagcgggcgtcatgctcagtgactttttcagtcagggcgtggcgcaacttagcctgttcgatgaacacccaccgcggccagacagtacagccctgatgcaggttatcgaccgccttaaccgttcaggccggggatctgtgtggtttgcgggccagggggcggtgaaatcctgggcgatgaagcgggatatgctgtcgccctgctacaccacgcgctattccgatttgccgatcgttaaataa

SEQ ID NO: 123753 - DNA, 435 bp, Enterobacter cloacae
atgcagttgatctctcctttggggcctgatgccacgttattgcttccgttgtttatggagcgggtgccctgtggcttccccagccctgctcaggattatgtcgaggatagccttgatctgaacaagctggtgatcaaacaccccagcgcgacctattttgtcagggtgagcggtgattcgatgatcggcgcaggcatcagccatggtgacctgctggtggttgaccgttcgttaaacgccgttcatggcgatattgtgattgcggcggtcgcgggcgaatttaccgtgaaggagctgcaaacgcatccgcgtcttcagctcatcccccataatcctgattacgcgccggtcttttttgccgcagaagacgaactggagatcttcggcgttgtgacgtttaccctgaaagctaaccgccatgttcgcgctcgttga

SEQ ID NO: 123754 - DNA, 888 bp, Enterobacter cloacae
atgaataataagctcaacgccatttccacctttctgcgcgtcgccgaagcgggctccttttccgctgccgcccgcctggccaggatcaagcagtccgccgtcagccagcagatcgccgcccttgaggaagagctcggtgtggtattgctgcatcgtacaacgcgcaggatgaagctcaccgcgcagggtgagcgttaccggcgggatatgcagcttgtgctggaggccatgcaggaagcagagcgacgcctgaccccggttgagcatcaatatcagggggccgtacatgtgcagttgccgagcggcctgggccagctcgtgttgccgcgcctgctgacgctacagcgcatgaatcctgaattacatctgcaggtttcgcttgatgaccgcatcgccgatctggtcaccgaaggggtggatgtggcgcttcggctgagcgcggagcctccgcaaacccatgccgcacgcgtactggcacgcattgaaacgccgctctttgccgccccgtcattcccgccggtagagcccgtgtacgcgctggcggcgcttccccacgtgcgattcagcggtattccgctggacgctcccttacgcctggtttctgatgacgaaacgattgatattgcagtgaataccgttttccgcgccaataccagcgacgccctgttacaggcgctggaggcaggcatgggtattggcggtatgcagctaccgctcgcggcacgggcgttgcaaaccggcacgctggtgcaggtactccccgcgtggcggttacccgaccgctttctctatgcggtttatccggacgctcgctttattccacacagggtcagaagcgttgtgggggccatagaacagctactgcctgaaataattaagaaaaattaa

SEQ ID NO: 123755 - DNA, 1059 bp, Enterobacter cloacae
atgaatacgacgcagcaacacagggtcgcgctggtcgctggcgccagcgggattgttggcaaccagctggtcaaaacgcttttgcgccatcagtgggaggttattggcctgagccgccaggcggtatctcaccctgaaggtatcgcgatggttaatgttgatttactggatgagcaggacagcgcgcgggcactgtcatcgctcagcgggatcactcatgtgttttacagcgcctgggtcaatgccgcgaactggacagagatggttgaaccgaacgtcaccatgctgcgccatctggtcagtaatctcgaaaacacggccccccttgagacggtcagcctgatgcagggctacaaagtctacggcgcgcatcttggcccgttcaaaaccccggcacgtgaaagcgatcccggcgtaccgggcgcggagtttaatgcggcccagctcaggtggcttagcgattttcaacggggaaaagcgtggcactggagcgccatccggccgggcgtggtgggcagcacggtgccgggtaacgccatgaatcttgccctgagcatcgcgctgtacgcatcgctgtgtaaggcgctgaatttaccactgcgttttcccggcaccgaacagacctggcacagcattgttgatcatacagacggtgaattgctggcagaggcgaccgtgtgggccgccacgtcgccggtagcagagaaccaggcattcaatgtgaaaaacggtgacatctggcgctggagcgagctgtggccacgcattgcacactggtttgaactggagtctgcacccccggtccggctctcatttcagcagctgtttacggactaccgcacggtatggcgcgaactcgccgcagcttgcaggctggtggaaagcgatattttgcagctgaatgacggacagtttgccgacttcgtgtttagctgggattacgatatgtttggcgatggcagcaagctgcgtcgggccggattcacctccatgcgggccaccgacgagatgtttttcagcctgttcgcacagctcagggcggcacgcattattccctga

SEQ ID NO: 123756 - DNA, 447 bp, Enterobacter cloacae
atgcgggaagcaatcagcgttttattaatggctctgccggttattgggttatatctggtgataaggaatggagtgaggtcatttcgccagccaaaacgcatcgtttcagatgcccagggcaagaagaaaatatccactaacccgtggttttttgattgtttttcccgcaaggtttatttttatgatgagcgatatttttatgaaattcagaaggatagaaccactcaggttgaactggccaggatagtaaacattaagccgggatcgacgatggtcaataatcgtcggatctggtcagtaagctatgttgaaaacggaagggaaaaacaggtgcagttttacccgaacgtaacgatgtttaatcataatttctctgcttttttgatagcggtaaaaaacgccaatccacacgccgatattaaagatctttccattttcaatttctga

SEQ ID NO: 123757 - DNA, 3075 bp, Enterobacter cloacae
atgaacatgagaagcacaaaagagacatttaacctctccgcctgggcgcttaaaaatcagcagatggtcagtttctttatgctgctggtgatggcgatgggcgtgttctgttacgagcgcctgccgcgcaacgaagatccggcgtttaccatcaaaacggccgtggtctccgcgcagtggccgggggcatcggtagcggacacgactcgtctgctgacggatacgcttgagaaaaagttacaggagatcccctggcttgattatatcgaaagcgaaacccgggcaggacgcaccgttattcatgtcaacctgcgcgatgatacgccgccgcaaacggtgccggatatctggtaccaggtgcggaagaaaatgcaggatatcgccccgtccctgccagaaggcgttcagggccctgatgtcaacgacgaatttgacgacacgttcggcacaatttatggcttcatccccgaaggctataccctgcgggaggttcgggatcgggtggagacactgcgtcgggagctgatgtccctgccggatatcggcaaaaccaccctgctgggtgaacagcaggaacagatggttctgaccttttccccagcccgtctggcggggatgggtctggatattcagcaggtggcggaggcgctcagggcgcagaatgcagtcgtcccggcgggcatcatacgcacggggcaggagaacatcgcactccacgtcagcggtgcgctcagctcagaggagagtttacgcgcggtcacgctgcatattaacaatcgttatatccccctgactgacattgccaccctcacccggaaaagcgccgaaccgccctcaccggcgttccgggttaacggaaaaccggctatcgggctggcgatttcaatggcgccgacaggcaatatgctgcgctttggcgccgcgttgaatcaaagagtggccgccctcagcgccgggctgccgcacggtatcgagatggtgaaggtcgccgatcaatccgcggtagtcagcgacgcggtgagtggttttatcagggttcttattgaagcggtggttatcgtcctggccgtttcatttgtctctctggggctacgggcggggctggttgtggctgcggcaatcccgctggttctggccatgaccttcgccggaatgatgctggccgggattggcttgcagcgcatctcgctcggggcactgattattgcgctgggtctgctggtggatgacgccatgatcaccgtggaaaccatggtttctcgtctggaagctggcgattcccgtcggcaagcggcaacccgggcgttcaccacgacggcattcccgatgctcaccggcacactggtgatgatcgccggatttattccggtcggctttgcggcatccagcgcgggtgaatactgcttttctctgtttgcggtcgtgctgattgccctgctgtgttcatgggtggtcgcgatcctgttttcaccgctgaccggaacatggctgctgccggagaacgtcaggcatcatgcctccggcccggggcggctcgcacgcggatatcactggctgctgcgtaaggtattgcgccaccgactcaccaccgtgctttgcgcccttgccgcactggttttgtccatatacgggacgacatttatgcagggtgagttttttcccgcttccgacagaccagagctgctggtgagcctgacgcttccggccaacgcctcacagccggaaacgcaaagagagaccgaaaagctggagaaggcgctggcaggcaatagcaatatcgatcattactcaacatacgtgggatcgggcgccatccgtttttatctgccaatggatgtgctgctggagaatgaaaacagtgcccagttggtggtggtcgcgaaaaacctcgccgcccgcgaccgtctgcacgcacagctgaacaagatactggcgacgcaatttagcgacatcatcacacgcgtatcgcccctggagctcggccccccggtcggctggccaatcaaataccgggttagcgggccggactatgtgaaggttcgggcgctggcgaatcacctgacggaagtgattggccagtcaccgctctcacgtgaagtcaaccagaccgccggtgaaccggagagagtgattacccttgaggtgaatcagacggcggcccgggctgcgggcgtgtcgtcagaaagtctggcccggacgctgaatacggtctggtccggcagcgtcgtgacctcaatacgggataatgaccggctggtggatgtggtgctccgcgccagagacagtgaacgtcttaatctggccacactgtcgtcactgaccgttgaggggaacgatggcaaaaaaattccgctcagtgctgtcgcaacgccggtctggggtgtggacgatccggttgtctggcgtcgtcagcgcctgccgtttatcaccgtgcaaactgaccttgcgccgggactcagagccgaggtcgtctccgccgcgctgcgcccggcagtggataaactgcgtgcccgtttgcctgcgggctacagtattgaggaaggcggcgcggttgcggaatccgataaaggaaaccgctctgtctttaccgttcttccggtgacgctggtcattatgttgttattgctgatgcttcagctacgacgctattcccggatgtttctggccctgttcatggccccgtttggcttaccgggcatcgttctggcgatgctgccgggtggaacaccgatggggttcgtcgccctgctaggcgtgatcgcgctggcgggcatgatcattcgtaacgcggtgatcctgctcggcgaagctgacagcaatctggctcaggggatgacgaacgatgccgccattatcgcagccgcagagcaccgggccagacctatctgtctgaccgcctgtgccgccattctgggcatgatccccatctcgcaccaggtattctggggacctatggcgtatgccattatcggggggttgctggtcgcgacgctggtcacactcacggtactgcccgcgtcgttcagtctgttattacagtggggggacggtttacgcaaccggcacagcgtataa

SEQ ID NO: 123758 - DNA, 1149 bp, Enterobacter cloacae
atgtcagacgaattcattctctccctccgccacagcctgcatcatgtatacagcgtggcgcgcaccctttcctggctacactttattcccctggtgatacttgccctggctatcatcccgctaaccggttgcggcgataaacacgaaaacacgccgccccccgtgcgggcggtacgctacagtgtggtgggttcagcgaaaacgctgccagcactggaaagaaccggtgagatccttgcccatgatgagacgacgctgagtttccgtaccgggggcaggatcctcacgcgcgtcgtcgatattggcgaccgggttaccgccgggcaactgctggcgaccctcgacaataccaccggacaaaatcagctcgacgcggccaccgctgactatgagggtgccaaagcctcagcgcagattgccgcgctcaacgtcaacagaatgcaaacgctgatgcccaccggcgctatagcccgcacacaactcgacacagcccgtgcagactggcttgtcgccagcgcgcgtctgaaaagtagcgaggcggcactgcgcaacgcccgggaaagtctgggctggacccgccttctctcgccgaaggaaggtatcattaccgcggtcagcgcctctgcgggccagattctcagcgcaggccagtcggtgctgacgctggcgaccggtgaagcccgcgatgtggtgttcgatattgccgcgcctgatgatatcccctcaccggataaggctgaattccgcgtcgccttgctcagcgacccgacggtcaatgcttcagcggtgttacgcgatatcacgcctcaggccgatcccctgacccgtacctggcgggtcagagccaccctgaacaacccgcccgccgccatggcactgggtgccagcgtcaccgtaaccctgccctccagtgccgcgtgcggttacgtccttcctgcgtcggcactgagtcgttacgcagacaagcccgctgtgtttgtaatcaaccggcaatctcaggcgcaactgcgcgtggttgtgcctgcacgttacacggcctcctccgtcatcatcgcctccggtcttgcgcccggtgacagggtgattacggctggcgtgagcaaattacgctcaggagaacaggtgattgctggggaggagcagccatga

SEQ ID NO: 123759 - DNA, 1197 bp, Enterobacter cloacae
atgataaagacccgtcattcctccctctggcgctggatttgcgcgcgcatcctggcgctggcgattggcagcgtgatcgttatagcagcctgtatgtggctgcgttacgccgtgcagaactactggataatgggcaaaatgcccgcagcggtccggcaggagtttctcacgctcagccagaatccgcagtcaaacccggcccgctttcacgatattgtagacagctggtgggggctcagttactccaccccatctatcgcctcggctgactgggtcaccgtggctctgctggtgctggtgatgatccccttcattgtggtgatgggacttaagcacgctcgtcctctggcgctgcagttcagctgtcttcgtgatgcggccaaagatgtggccgatgggcagtttggccgacaggcagagctggtgaaagatgcgcccgcagaaatgatcagctttgcggctgactttaataccatgaccggacaactggctcgctatgaaaaggagcttcgcgcctcgcacgttgccatggcacatgagctgcgctctcccctgacggcagccattggacgtctgcagggtatgatggacggcgtgtttgacgccaccccggagcagttggggatggtgatgaaacagctccagcacctcaaccggctgaccgatgaattgcaccttctctctttggctgatgcgggaaatcttgtgcttgaagacaggccattccgtctggatgagctgattcaggagcgggcagactggataaccccacaggccgatgcgcataattttacgataacgttgcgtaacccgcgcccatgccccttcagaggcgatgcgttccgtatgggacaggtgtttacgatcctcatggagaattcactccgctacggacgcgagggaggccatctggaggtgaccctgcattatgcccaggggcagtacaccctcgaattcgccgatgacggtccgggtgtatcaaagcactttttaccggacatgtttaagcgatttagccgcgaggaacaatcacgcgcccggcactccggtggcagcggcctcggtttatcaattgcgcaggcgatttgtcaggcgcatgggggaagtattagcgcgtcattaccagaaaccggagggcttctggtgtgcatccagctgccctggcgcgcttgtgacgaggaaaattcccgctcttga

SEQ ID NO: 123760 - DNA, 696 bp, Enterobacter cloacae
atgttgtccagaagagtgctgattattgaagatgatgccgatgcggctggcgtacttgaagcttatttacgccgtgaaaattacgatgtgaccgtcacgggggacgggctggccgggctggagatggcgcaacgctggaaacccgatcttgtcttgctggatgtcatgcttcccggactcaacggaactgaggtgctggccagcctgcgtcgcaaaagcgatgtgcccgttatcatggtgacggctatgggcgatacgcccgatcgcatcggcgcgttgagatacggggctgatgactatgtcgttaaaccctatcatccgggtgaagtcgtggcacgggtgcaggcggtgctgcgccggagcaataaaaacacgcgcgaagaagagatccttcgctggcagacgctggaggtggatgtcacggccattgtggcgagcatcatcaatgatgacaatacgccgcgggttctggatctgaccccaacggaattttcgctactgaccacgctgatgcgttcaccttcgcgtcctttttcccgtcaatatttactggagcactgtttgccggaaagcgaggccctggagcgggtggtggatacccatatttataacctgcgtaaaaaactcgaagccgcgggtctttccggcgtgctggttaacgttcgcggcgtgggttacaggttcagacagccatga

SEQ ID NO: 123761 - DNA, 789 bp, Enterobacter cloacae
atgatagcgagaaaaaaagccctgtatatgaccgttccgtttctgatgacggcagcatccggcgtacacgccgatgaggcacaaacgtcttccgactatttgaccattggggcaggaggacgctatgcgcctcgttattcaggctctgacaagcaggtttggcaaggggtgccggttttacaggggcgcaaaggtgcattctttattgatgcgcagaaaggcattggatatgacctgcaaaatgacagcggcgtgtaccttgaacatacgctgggttacgacctggggagggcggacgaaaacgccagctggcgcgagggagcgaataatctgaaagggatgggagagatcgataccagcctgaataccggactggcggtcggctggcaaatcacttcctggctgagtgtggaaggcaaagcgaccctgcctgtaacggacagtcagggggtaaactaccaggcctctgttacgctgctccctctacaaaccagtcaggacacgattgcttttcagtctgcatccctgtttggcgacagccgttacctcaatatctggtatggcgtcagtcagcagcagagtcagcgctccggttatagccgttattcagcgcccggtggattctacggtatagacagcagcctgacatggagtcatcagttcgatacccattggggcacggtactgagtgccgactacacctggcttggggagcatgcaaataacagcccgatcgtatcgcgacgtaacgaaggcgctgtcaccgccgccatcacctggacattctag

SEQ ID NO: 123762 - DNA, 321 bp, Enterobacter cloacae
atgctttttagcggcctgagctttctgctctacagcgggtttagtcgcttttttgtggtgctttttggcggcctgtgctttctgctcaacagcaggtttagcggcgtcttgttttacggcttttttgtggtgctttttagccgcctgcgctttttgctcagcagcaggtttagcggctttgtgatgtttcttgtggtgtaccgtttttgccggtgcagcggtggttgcagcaggtgcagcggcagctggagcagttgcagtagtctcagcagcgaacgcagcagaagacagacccatagcagcggcaacaaccagagctaa

SEQ ID NO: 123763 - DNA, 1272 bp, Enterobacter cloacae
atgagtaaccaggaatttcatcagcgtagactttctgccaccccgcgcggcgtaggcgtaatgtgtgatttctttgcccgctcggcggagaatgccacgcttaccgacgtggaaggcaacgactatattgatttcgccgccgggatcgcggtactgaataccggccatcgtcatcctgcactggtggccgcagtggaaaaacagcttcaccagttcacccacacggcctaccagattgtgccgtatgaaagctacgtttcattagccgaaaaacttaacgagctggctccggtgcagagcccggccaaaacggcattcttcacaacgggcgcggaagcggtggaaaatgccattaaaatcgcccgggcccacaccggcagaccgggcgtgattgccttcggaggaggctttcacggtcgaacctatatgaccatggcattaaccggcaaggtcgcgccttataagctgggatttggccccttcccggggtcggtttatcacgtgccctatccctcggagctgcacggcatcacgacgcaggatgccatcacggcgatagaacgtctgttcaaagcagacattgaggcgaaacaggtagcggcgattatttttgaacccattcagggtgaaggcggcttcaacgtcgccccgccagagctggtggccgccatccgccgtatctgtgatgaacacgggatcgtgatgattgccgacgaagtacagagcggcttcgcccgtacggggaaactgtttgccatggaacactacgccgacaagcccgacctgatgacgatggcgaaaagcctggcaggcggaatgccgctgtccggcgtggtgggtcgcgccgaaatcatggacgcgccggcgcccggcggtctgggggggacctatgcaggcaacccgctggcggtggccgccgcgcacgcggtgctgaatattatcgacaacgagtcactgtgcgcccgcgcccggcatctgggcgatcgactgaaagccaccctggaagagattcagggcaccttccctgcgctcgtggcgataaggggaagaggatcgatgattgcggcggagttttttgatcccgagagccgtgcaccttcggccgccatcgcgcaggcgatccagcaaaaagcactcgcccagggcctgctgttattgatctgcggccagtacggcaacgtgatccgcttcctttatccgctgaccattccggatgcccagttcacccaggcgctggcgatcttgcaacaggttatgcgtgataaaacctaa

SEQ ID NO: 123764 - DNA, 1281 bp, Enterobacter cloacae
atgaccgaacataccaccagctactacgcggccagcgcgaacgcttacgaacctttcccgacgcttaacgagtcgatcagctgtgacgtgtgcgtagtgggcggcggctataccggcctctcctccgcgctgcatctcaccgaaatgggctacgacgtggtgctccttgaaggggcgcgcatcggcttcggcgccagcggacgcaacggcggccagctggttaactcttacagccgcgatatcgacgtgattgagaaaaactacggacccgatgccgccagagtcctcgggagcatgatgtttgaaggcggggagatcatccgggagcgtatccagcgctatcagatccagtgcgactatcgtccgggcgggctgtttgtggcgctaaaccataagcaacttgagacgctggaggagcaaaaagccaactgggaacgctacggcaacacgcagctggagttgttggacgccagtgccatccgccgggaggtcgacagcgaacgctataccggcgcgctgctggaccgcagcggggggcatattcatccactgaacctggcgatcggcgaagcagacgccattcgcctgaacggcgggcgggtgtatgaacagtccccggtgaccgccattcagcacaccagcccggcggtggtaagcacgcagcatggccaggtgacggcccgctacgtgatcgtcgccgggaatgcctatctgggcgataagatagaaccggaactggcaaaacgcagcatgccctgcggcactcaggttgtgaccaccgccccgctgccggaatcggtcgtccgcacgctgatccccaataactactgcgtggaagattgtaactacctgctggattactaccgccttaccgccgacaaccgcctgctgtacggcggtggtgtcgtctatggcgcgcgcgatccggacgatgtcgagcgcctggtgatgccaaagctgctgaaaaccttcccacagctggccggcgtcaaaatcgactaccgctggacgggcaacttcctgctgaccctgtcgcgcatgccgcagtttggtcgtctggataaaaacatctattacatgcagggctacagcggccacggcgtgacctgcacccacctggccggacggctgatttcggaactgttgcgcggtgacgctgagcgctttgatgcgtttgccaaccttccgcactaccccttcccgggcggtcgcagcctgcggattccattcacggcgatgggtgcggcgtattacagcctgcgcgatcgtcttggcgtatga

SEQ ID NO: 123765 - DNA, 1494 bp, Enterobacter cloacae
atgcattttcagcacctgacttactggcaggataaagcaaaaaacagcgccattgagacccggttatttattaacggtgcctattgtgacgccgccgataatgccacgtttgaaaccgtcaatcccgcgacacaacagacgctggcgaacgtggcccggggcaagcaggcggacgtggaccgtgcagtccaggcggcgcgtgaggtatttgaacgcggtgactggtcgcaggcgtctccggcgcagcgcaaggccgtgctcaataagctcgccgatttgatggaacgccacggcgaagagctggccttactggaaacactggacaccggtaaacccatccgccacagcctgcgcgacgatattcccggcgcggcgcgcgccattcgctggtacgccgaagcggcggataaagtctacggcgaagtggcacctacggggccgggcgaactggcgatgatcgtgcgcgagccgatcggggtggttgcggccatcgttccctggaacttcccgctgctgctggcctgctggaagctgggcccggcactgatcgcgggcaacagcgtggtattgaaaccgtcggagaaatcgccactcaccgccctgcgtttggtcgggctggcgaaagaggcaggcctgccggacggcgtactgaatgtgataagcggttacggccacgaagcgggccaggcgctggcactgcatccagaagtcgaggtgctgacgtttaccggctctacccgtaccggcaagcagctgttgaaggacgcgggagaaagcaacatgaagcgcgtctggctggaggcgggcggcaagagcgccaacattatatttgccgactgtccggacctcgacaaagccgtgagcgcgaccgccgccgggattttttataaccaggggcaagtctgtatcgccggtacccgcctgctactcgaagacagcatcgccgacgactttctggcaaagctaaaagcgcaggcccgtcactggcagccgggcgatccgctcaaccctgacagcacgatgggcatgctcatcgacgctgcacatgccgataccgtccacacgtttattcgcgagggaacccgaaaaggtacgctgctgcttgacgggcgggaacaagcatggccttgtgcagtcggtcccaccatttttgtcgacatcgatcctgcctccccgctgtgccgggaagagattttcgggccggtgctggtcgtcacccgttttaaaaccgaagaagaagccttaacgctggccaacgacagtgaatatgggcttggcgcggcggtatggacccgcgatctttcccgcgcgcaccgcatgagccgccgcctgaaagcaggctcggtcttcgtcaataactataacgacggcgatatgaccgtaccctttggcggctataagcagagcggcaacggtcgcgataagtccctgcacgcgctggaaaaatttaccgaactgaaaaccatctggattgccctggagtctcaatcatga

SEQ ID NO: 123766 - DNA, 558 bp, Enterobacter cloacae
atgagcgatgacggactggcgccagggaaacgtctgtctgagatccgccagcaattgggtctctcgcagcggcgtgccgccgaactgtctgggttaacacacagtgccatcagcaccattgagcaggacaaagtcagtcctgccatcagtacgctgcaaaagctgctgaaagtttatgggctgtcgctctcggaattcttttcggaaccggaaaaacctgatgaaccgcaggtggttattaatcaggaagaccttatcgaaataggcagtcagggggtttcgatgaagctggttcataacggaaatccgaaccgtacgctggcgatgatttttgaaacttaccagccaggaaccacgaccggagagaggatcaaacaccagggtgaggagatcggtacgatactggaaggtgaaatagtgctgaccattaatggccagccttatcacctggttgcggggcaaagctatgccattaataccggcataccgcacagcttcagcaacacctcggcaggcatctgccgcattatcagtgcccacacccccaccacgttctaa

SEQ ID NO: 123767 - DNA, 765 bp, Enterobacter cloacae
atggaaaatataatgaacaagccagttattggcgtggtgatgtgcagaaacaggcttaagggtcatgagacccagaccctgcaagaaaagtacctgaatgccattattaacgcggggggcttacctgttgccttaccgcatgcgctggcagagccagagcttattaccgctctgctgccaaccctggacggaatttacctgccgggcagcccaagtaacgtgcagccgcacctttatggtgaaaacggcgatgagcctgacgccgatcccgggcgagatcttctgagtatggcgctgattgctgccgcgctcgaaaggcgcatccccattttcgccatctgccgggggctgcaggaaatggttgttgccacgggagggacgctgtatcgccgcctgttcgagcagaacgacctgcttgagcaccgggaagatcctgaactgccggttgagctacaatacgccccttctcatgaagttcaggtccaggagggaggactgctgtctcaattaataccaggctgtaacacattttgggtaaactcgttacacgggcaaggtgcacggacgttaggaccacggctccgcgtggaggcccgctcgacggacgggctcgtcgaagcggtcagcgttcatgaccacccttttgccctcggcgtgcaatggcaccccgaatggaacagcagcgagtacgccctgtcacgcatgttgtttgaaggttttatcaccgcctgtcaaagccacattgccgagaagcaacggctttga

SEQ ID NO: 123768 - DNA, 1419 bp, Enterobacter cloacae
atggaaaccaatatcgtagaagttgagaactttgtgcagcacacggatgagaggcggggcagcgcctttacgcaggaagtgaagcgctatttagaaaagtatcctgacacccagtttattgatgtcctcctgaccgacctgaacggctgttttcgtggcaaacgcatcccggttgccggactgaacaaacttgaaaaaggctgctatttcccggcatcggttttcgccatggacattctgggtaacgttgtggaagaggcagggctggggcaggagctgggcgagccggactgtatctgtgtgccggtgccgggcaccctgacaccctccgccgccgacccggaatacattggtcaggtgcagctcaccatggtcgatgaagatggcgctccctttgacgttgagccgcggaacgtactcaaccgactctggcagcagctgcgccagcgcggtctgttccccgtggtagcggtagagctggagttctatttacttgaccgtaaacgcgatgccgacggctatctgcagccaccctgcgcgccgggcaccgacgtgcgtaacacgcagagtcaggtctactcggttgataatctcaaccactttgctgacgtgctgaatgacattgacgaactggcgcagctgcagttgatccccgccgacggggcagtggctgaagcctccccgggccagtttgagattaacctgcaccatacggaaaacgtgctggatgcctgcgatgatgcgctggcgttaaaacgtctcgtcaggcagatggcggaaaaacacaagatgcacgccacgtttatggcaaagccgtatgaagaacatgcgggcagcgggatgcatatccacatcagcatgcaaaacaacagaggcgaaaacgtgttcgcagacgccagcggtgaggattccgcgctgctgaaacgcgcgctggccgggatgatcgatctgatgccagcgtccatggcgctgctggcgccgaacgtcaactcctaccgccgtttccagccgggaatgtacgtgccgacgcaggcgtcatggggacacaataatcgcacggttgccctgcgtatcccctgcggcgatcgccataaccaccgggtcgaataccgggtggcgggagcagacgcgaatccgtatctggtgatggcggcgatttttgccggcattttacacgggctggataacgatttactcctgcaggaagaagttgaaggcaatggtctggagcaggacggattgccgttcccgattcgtcagagcgatgcgctgtgggaatttatgcaaaacgatcaccttcgcgagcggctgggcgaacgtttctgccacgtctatcacgcctgcaaaaatgatgaattactgcagttcgaacgcctgattaccgaaactgaaatcgagtggatgctgaaaaacgcctga

SEQ ID NO: 123769 - DNA, 195 bp, Enterobacter cloacae
atgatgcagatgttcaactatccgcagggcgaagggggccagtcaggcgcctgctgtgagtgcgagcgagagacgctgcgctggtacgatcgcgtatgttctttacaacttccccctttgctaagcaggtttgcgttaaggtcaacgcgattgcaaaccacggtaagcatgggggggatggtttatggcgactaa

SEQ ID NO: 123770 - DNA, 1392 bp, Enterobacter cloacae
atggcgactaacacatctcttgattcgccgggcatggccggaagaacccggctgcgcagttccctcaagctctggcaggtggtgatgatggggctggcttaccttacccccatgaccgtgtttgataccttcggcattgtgtccggtatcagcaatggccacgtgcccgcctcgtatctcctggcgctggcgggtgtcatgtttaccgccatcagctacggcaaactggtacgacagttcccggaagcgggctctgcgtacacctacacgcagaaatcgatcggaccccacctggggtttatggtcggctggtcctcgctgctggactatctcttcctgccgatgatcaacgtgctgctggcgaagatctacctttccgcattgttcccggaagtcccaccgtgggtgtgggtggtagggtttgtgacgatcctgacgctggcgaacctgaagagtgttaatttggtcgccaactttaacaccctgtttgtgctggtgcagatcgctatcatggtggtgtttgtcatactcgtggtgcatggcctgcacaagggggagggcgtgggcaccgtctggtcgttgcagccgtttatcagcgagaacgcacatctgatcccgattattaccggcgcgactatcgtctgcttctctttcctcgggtttgacgcggtcaccacgctgtcggaagagacgccaaacgcggcgcgggttattcccaaagccattttcctgaccgcactgtatggcgggctgatattcattgttgcctcgtttttcatgcaactcttcttcccgacgattgcgcgcttcaagaacccggacgccgcgctgccggaaattgcgctgtacgtgggtggcaagctcttccagtcggtgtttctgtgtaccacgtttgtgaatacgctcgcttcaggcctggcttcacacgccagcgtctcacgcttattgtatgtgatggggcgtgacaacgtctttccggagcgggtgtttggctacgtgcatccgaaatggcgtactccggccctgaacgtcattatggtagggatagtggcgctgtcggccctgtactttgacctcgtgaccgcgacggcgctgatcaactttggcgcgctggtggcgtttacgtttgttaatctctcggtgtacaaccatttctggcggcgtaaggggctgaacaaaacgtggaaagatcggttccactatctcctgctgccactcattggtgccgtaacggtcggcgtgctgtggataaacctcgaagcgacgtccctgacgcttggcctcatctgggcggcactgggggtcctttatctgacatggctgacgcgccgtttccgaaaaccgcctccgcagtttgaagccgctaagatagagcaggcctgggattcctga

SEQ ID NO: 123771 - DNA, 1221 bp, Enterobacter cloacae
gtggttgctgatagtcagccagggcatattgatcagattaagcagaccaacgctggcgcggtatatcgcctgattgatcagcttggtccggtttcgcgtatcgatttgtcgcgcctggcccaactggctcccgccagtattaccaagattgttcgcgaaatgctggaagcccacctggttcaggagacggagattcaggagccggggagccggggtcgtccggcggtcgggctggtggtggagacggaagcgtggcattacctgtcgctgcgcatcagccggggtgagatctttcttgcgctgcgcgatctcagcagcaagctggtggtggaagaccggctggagctgccgcttaacgctgatcaaccgcttcttgaggcgattgtcacgcatatcgatcatttctttattcgtcaccagcagaagcttgaacgcttaacggcgattgccatcaccatgccgggcattattgataccgagaacggcattgtgcaccgcatgccgttttatgaagacgttaaagagatgccgctgggtgaggtcctgaaaaaccataccggcgtaccggtctacattcagcatgacatcagcgcctggactatggcggaggcgctgtttggcgcgtcacgcggggcgcgggatgtcattcaggtggtgatcgaccataacgtcggggcgggcgtcatcaccgacggacgcctgttgcatgcgggcagcagtagcctggtggagatcggccacacgcaggtcgatccctacgggaaacgctgctactgcggcaaccacggctgcctggagaccattgccagcgtggaaagcgtgctggaactggcgcaggtgaggctcagccagtccatgagctcctcgttgcacgggcaacccctgacggtagattccttgtgcacagcggcgcggcagggcgatctgctggctaaggacatcattactggcgtagggaataacgtcgggcgcattctcgccattatggtgaatctgtttaacccgcaaaaaatcctgattggctccccgctcagccaggcggcggatatcctcttcccggcgatctcggcctgcattaatcagcaggcgctgcccgcttacagcaaaaacattgtggtcgaaagcacgcagttttcgaaccagggcaccatggccggtgctgcgctggtgaaagatgcaatgtataacggctccttactgatccgcctgctgcagggctaa

SEQ ID NO: 123772 - DNA, 930 bp, Enterobacter cloacae
atgcaaaccattctgggtgccagcgggcaaattgcccgtgaacttgcccgcgagcttaaacgcggatataccgacaatctgaggctggtcagccgccatccgcagaaagttaacgacaacgataccacattttctgccgatcttctggatgcccggcaggctcatgaggcagtgaaaggcagcgatacggtctatttcactgcaggtttacccccggattcagccctgtgggagcgtcagttccccaccatgctggacaatgtcctgaatgccacccgggccgcgggcgcgagatttgtctattttgacaatacctatatgtatccgcagaacgacgtgccgcaaactgaagagacgccgttcgcgccacaggggcgcaaaggaaaggtacgcgccatgatggcaaacagggtgctggacgaaatggcgcgcggtgatattcccgtccttattggtcgcgcccccgaattctatgggcccgccagaacgcagagtttcaccaacgcgctggtcatcgacagactgaagcgtaataaacgcccgcgcgttccggtacgtgacgataagcttcgcacactcatctggacgccggatgccagccgcgcgctggcgttgctgggcaatactccggacgcgtatggtcaaacctggcatcttccatgctgcgacgaacggctgacgtatcaacagtttgtcacccttgccggtgagattttcggcaagcgtgctgactataccgttatcggcaaactggccttcgccgttgcgggtctgttttctcacaacgcccgggaaatccgcgagctattgccgagatacgaatcagacaacctgtttgattctgccaaatttaagcagcgttttcccgccttcaccgtcaccacttaccggcaagggctggagtctatctggcaaacgtctcagttgtga

SEQ ID NO: 123773 - DNA, 435 bp, Enterobacter cloacae
atgaaaattggcgagctggcgaaaatgacgggcataaccccgtcgcgaattcgcttttatgaggcagaaggtttgctgccaaaacctggccgacaggggaacggctaccgcaaatactcccccgaaacggcggcgctgctgaaaataatcgacaacgcccagcgtaccgggtttacgctggagcaaatccggcgttttctgccgcagccgcaccagccctgggatcatgcggaactggtccagtccctgaagacacgtatttcggagatagaggcgatgcagcagcagcttgaggaaaaccgccaggcgctgctggatctggtcgccagcatcacgaacagacctgacggcatctcctgtgacgacaacatgcaacgcctgctgggacagttgcagaactcagacggtagcccgaacccggcgaacccgcgttga

SEQ ID NO: 123774 - DNA, 624 bp, Enterobacter cloacae
atgatcaccatccttggcaaaaccacctccatcaatgtgcgtaaagtcctctggacctgcgaagaagccggaattgcatatcagcaggaagattacggcagcggatttgcctcgacggaaacggacgccttccgcgccctgaatcccaacgccatggtgccggtgttgatcgacggcgattttgtgctgtgggaatcgaattcaatctgccgctacctggtgcgcaaagccggacgcgatgacctgctgccatcgcagccgcaggcctgcgctagcgtcgagcgctggatggactggcaggcaaccgaattcaacaacgcgtggcgctatgtcttcccggcgctggggcgcaaaaacccggactataacgatcccgcgcggattgccaccgggataaaagagtggaaccactgcatcggcattctggagcagcagttgcagcgcaacggcgcctttactgcgggcgaaacgtttacgcttgcagatgtagtgttggggctgtcggtgaaccgctggaagatgacgccttttgacaaacccgcggtgcctgccattgatgcctggtttgaacgtcttaatcagcgcccggcatttttgcgacacggaaataacggcatggtctga

SEQ ID NO: 123775 - DNA, 456 bp, Enterobacter cloacae
atggctactatcccaaccctgtcttacctgcaatctgacgaaaacattattcagcaacttattacccgaccccttccggttgacgccgacctctttgacgtggcggacaactgcgccgcgctggtgaccgtgctggtcgaaagcgatgatagcgtcattagctctgcactctgcgaacgcctgctgcaagcgcttcatcgactgcgtgaactctgcgataccgatctcccgccgaaccttattgaacagttgattgtgggagagaaaatgacctcctgcgtgccggactgctggcacgacaccgctacccagattgactatgcgctggcacttacccaagccgttaaaggggggacattgcctgcgaacgttgcgaaagagcttactgggctgctgcacgatatgatttggcttctggcggagtttgtgaaggagccgcgaattgtggcgcactga

SEQ ID NO: 123776 - DNA, 522 bp, Enterobacter cloacae
atgattagaattttagggcttatatttttgttacttatgacagggtgttcaacgcctggaaaaccagctttctattatacctggacacagtacaaaaccggtgttgaagtgatgctggtcaatgaaccgcagtacaaagatggttttgatggaattcttcgtattgacgataaaggcaaatacgcagtaatggctatatacaacggtggggatatgtcgagtcacttcggatatgtcaccagggacagtctcgaaagttggataactatgtacactgactttttaaaatgggatccgcaaaatccagcgcagccgacaaaattctctattctggataatctttcgtggacccataaagactacgatgttgagtatcgattcgtgaacggtaaaaagctatttgttatcaataagcacagtactggaaactggtttgtggacttctcagagctctccatggatgaagccaatgtcgcaaagctgactgatgtctatctcgctctgagacagaagctgaaatag

SEQ ID NO: 123777 - DNA, 834 bp, Enterobacter cloacae
atggtatctgcaaaaacgattttaattactggtgtcagcagtggctttggtgaagcgctggcgagggaagctctcgtcctggggcaccgggttatagggactgttcgtaacatcgaagcactacgggctttcgaggcactcgatacgcagcgggcttatggctacctgcttgatgtaacgaacgttgagcgtattgatgaggtggttgaagagattgaatcgactatcggccagattgatgtgttagtgaacaatgctggttacggccatgaaggcattctggaagaatccccgctcgcagagatgcaccgccagttcgacgttaatgtatttggcgcggtggcaatgatcaaagccgtactacccggcatgcgccagcgccgccgcggacacattatcaatatcacctcaatgggcagtttcattaccttaccgggcatcagttattactgtggaagtaaatttgccctggaaggaatttcagagacgttaagtaaagagcttgctccgttcaagatacacgtcactgccgtggctcccggttcattccgaacagactgggccgggcgctcaatggtacgtagtcctcgcagtatccctgactatgacgctttgtttgaccccgttcgtaaaacgcgtaaggaaaaaagtggtaatcaactcggcgatcccgttaaagctgctcacgccatgcttgcattgatcgagagccaaaatcctcctactcatctgttgctaggcagtgatgcattaagtttggtacgacaaaaactcgaagcgttaggtaaggaaattgaacaatgggaaaaactaacccgttcaacggatggctga

SEQ ID NO: 123778 - DNA, 1467 bp, Enterobacter cloacae
atgagtaaattaaaaacactggcactttttactgccctggccctgagtgccaacgtttttgccgagagcgcaccactcactattcagcatcccacgcgtttcgatcagcttaatcaaccctctttagacgtgcagatgccagaggcctacgtgaaggcaatagcgcagcaggcttatatctggggctggccgatggtcaatcagttcaaccgacgcgcgacaattacgaaggcgcccgagcccgcattgaatggcggtatggtgccggttgcaccaatggggcagctcagtatgctgacggattacatcaagcctgaagaaaccttcgtaacctgtccgaatcaggacgtggcttacggtctgggcttctttgagttggataaagaaccggttgtgctacaggtgccagactttggcgaccgcttctgggtttacgccatttatgatgcacgaaccgatcaaattggtaacgtcggtaagccctatggcactaaacctggcttttatttgttagtcggacctgactggaaaggcgaaacgccgaaaggcattaacggcatcatccgctcttcaacggaaatggcaaacgtgataccgcgtatccagatggatgacacggccgaagacagagcggcgattcaggcaccgatcaaagaggtcatgacttatccgttaagtcagtttgacggcaaaatgaaaacctacgactattcgaaattaccgtctatcggtgaaaaagccgatcccaacgcaggtgaaacgaagtgggttatacccgaaaagttcttcgatcagcttgagaatgtgttgaataaagtgccaccgttaccgggtgaagaagccatgtacgcccaataccgtcaccttgtggaaatgggtaagaaaaaccctgaaatccgcaagtggatggatgaaacagcagtcgagacggataaaacggttatcgccgagtttttcaaatggaaacataacggtgtaccggcgggtaatggctggaaccgctcaaaaaataacgctgaatttggggtcgattattacaaccggaccggcacttcaaaatcgaatatgttcgataataagccgaacgaaacgcaatatttctacacggataatgacgctgccggtgcccagctctctggtgcacataactacaccgtcaccttcccgaaaggtcagcttccgccggtgaaaggcttctggtctttaaccctctataacagtaaacaccttttcagccctaacgaactgaatcgctactcgctggggacaaaaaataaaaatctgaaatttaatgatgacggctccctgacgctgtatgtgagcaaaacccggccttcagaggataaactcaataactggttacctgcaccagacggtacattctccctgtacattcgagcgtactggggcgaacaagccattctggatggcacctggcaaccgcctaaaattgaaaccacgaattga

SEQ ID NO: 123779 - DNA, 1479 bp, Enterobacter cloacae
atgaaggttcatgtgatagcctctgcagttttgctggcattgactttttcccaccacgctgttgctgccgatgccccgctctctccattgatgaaacaactgaataacggcaactggctagctcaggacgaggcacaatcgctcagtgatgaactgtattatcaggacgctatccaggcctacattcaaaccttgccccttctgaacaccattgggctacgcgacggttctgaagcggcgtttggtaaaggctataacgttctccccatctggaaagagcgcatggatagccgagcggtggtgccgacgccaaacggggatgtcatctattcaatgagttaccttgatctgaaggaaacgggcccattggtgattaaagccccggcgaacgttatcggtatgtttaccgatttcttccagaaaaccattaccgatgtgggtgccatcggtccggatcgggctcgcggtgggctgtatctgttattaccccctgattatgagggccctgtgccgcagggttattacgcctttaaatcatcgacttacaatgtgtttctcttcttcagaaccatcatgggcaaaggcgacggtaaacctgaccccatcccggcggttaaaaatgccgaaacgacgcgcatttatcccctctgggatgttgagaaagacgtgaagccgatgcagttcccggatgccagcggtaaacgcgtcaatatgatgtatccaaccgatgccagttattggcaaaagctgaaagccttcgtggattatgagccgttaacagcgatccctgaggaaacgcgtagcgcgttgttaagcatcgggattgttaaaggaaagccattcgccccaacggcgaagcagcaggaaatgctcaacaaagcggttacaactgcgccgcgaatgatactggctcgccgacaggtggggcgtgacgatcagcgtcagctctactacaaagaccgccagtgggagaactcctgggccggggcaaccgcagagtggatgcagtacggaacgctggatgccaaccaacgtgcggctttcttccagatcgcctattccagcgccgcagctatggttatgcatacgaccggtgccggctcaaaatatccctatgcggtaaaagataataccggcaagttccttgatggaagcaacacctacaagttgcatttaccaccgaatccaccggcagcgctgttctgggcggtcaccgcctacaatattaccgacggtaccatgcctgaaacggaccagttattaccttctacaaacggctactacaacatcccgaaaaacagcgacggttccattgatctctggttcggcccgaacaagccggatggcgtagacgatgccgcttttatcaaaaccgtgcctaatcgtaatttccttgtggcgttgcgtctctacggcacagaagacggtttttacgatcaaacctgggtaccagacgatctggttcagacaaacaaataa

SEQ ID NO: 123780 - DNA, 1188 bp, Enterobacter cloacae
atgagaaaaacggcgttgttttatctgataacgtttctttcacccgcaacgcaggccagcgcactctatttctatgagattggaaccgaagatgccgcgcttgccggtgcgggccaggctgcacgtgctcaggacgcgtccacaatcgtgaccaacccggcgggcatgacgcggcttcccgatcatatgtttacagggggtttacaggccatggatggtgatatttcctatgacctggataatgcgtctggtcgcaaaagtcccggtaatgtgatgaatttattccccaatgcaagcgccttttattcgcaaaaagtcaatgacagactatatgccggtgtaggtttatatggcaattatggtctgggaattgattttggtaactgggccggcgatcgccttattaaaaaaagtacaatggttgcaatgacattaagtccgtccttggcttataagctcagcgaccgtgtttccgtggggggatccgttaacgtaaattatggattcctttcgctaacgcgtaatgtcgacgataccgacgtaaaagagaaagatcatgactgggtaatgagctaccgtctggggttattaatggcgcttaccgatcaaacgcgtgcgggtatcacctggaacagtaaagcggactatgattttaatattgatgcgaaagcccgtttcccgaatttacccaacgtggaatatgaactcccgatttctgcgcaggtcagggcgcctcaacaaatcatgtttagcctggtgcatgatatatcccaaacgtggtcaataatgggagatcttggatggcaggactggagtcagtttgggagtccacagattacggttgccggacagcaaaccgctcataaaaatcgcctcaaagactcctggcatgccgcgcttgggttgcaatatcgtccgacagaacagtggcgaatcaatgccggggtggcgttcgacagtacggtctatgagtcacaaaatgatgttgcgctttcattacctaccggcgatgagtggcgttttgcgaccggtgcgcagtatcaaatgacaccgcaaagcaatattgggttcgccttatcgtacctacatatgcagtcttcccgcgtccagtcgccagaatacctaaaaggaagctatgacgatccgcacctgtggtttgcgagtgtcaattacagctatcaattttaa

SEQ ID NO: 123781 - DNA, 1959 bp, Enterobacter cloacae
atggagatggacgactggtggtttggctggaagggtttcactcccgaacgcccctgtcctggcaaagttgtgttgatggttggcgcggggatctccattgattccccttcacggctcccaggaggatacgaactcacggaagccctgcttgaccacttgcttgacagcaacgcggctgacgaaattaaaacggtatttggtcaatgtgagcagtggatggggcgaagcctgccacgtctggagcatgttcttgataaagcgtttgaaccttcaaccattgaaggcgtcgagcgtagcggtgccgcccgggaactgctgcgtatcttttcccaacgtcccccaaatgcgaatcatcatctgattgccgattacctgatcaagcaccggggctggtgtatcaccactaattttgatgactgtatcgagcaggctggttgtcatcagatccctgtgcatgtgattgaccccgcgaccaaaaccctggacatcctgcaccgggaatacggtgaagactggggtatcatcaaagtgcacggcacaattgaacacggctgtacaggacttggcgcaacacttgccgacctggagcatgggctacccgaagccttcaaaatacgcctcgaacaggtaacaaatcaggccgatttaatggttgtcgcaggctacagtggtaccgaccatttcgacattaatcactggatccgcgatcgctggaatgggaagcgctcgacgcgattagtctggattgaccaccgccccagcgttgaagaagagttctggcgactcaaagaacatgaaaatcgcgagccgagagtctactggcaatacgctttcggcagtatgaagattcagcacggacccacgttagcattactgtcatccctgctggggacccctcgtaaaacggttaaagataccgaagagaatggcgactggtggcgtacggccctggcagattattactcccctaccaagaaagaaaagtaccttaccggcactcgtctggccagctctatcggtcttggccaactagccgaggaacagctccgttatttgaaacgccaactggaagacgacgatatgttggtgcctttcgaagcagagatttactactcccgtgggtttattgccggggcgttatggttacaaaactatctaaaatcatcgcacgaaaaaaacagaaaagtgaacagcaccgccctgatccgagctgaaggaaaacctgtaaaagcgcttctgttttattttgtgcggtggttaaaaagctcacgcagactctcacttgatgagcaaatagacgcgtttgcctgtctgcttgatatccacgagcggaggcaacaatggcgactctggcaaagtaaaccgtttcgacgtctgggcgaaaagggatgtagcgtattccggcggtatttcatgaagcttgagaacaataaattgccgctgtatctgcatggaaggatgcaaatgcagtccattcgcctgggcacgctgttttacgatgaagaggcgttttcctttggcgatgtctggaatttactctaccgcgagaatagtccgccgagtttttttaccccgtacggccctgcaatcccaggtttctatctgattgaacgcagcactgcgcgtgaagaagaccgcattgccgacctggtgctggcaaatattaattacgtcaataccctcctttccgctctgcggcgtcgctggcctaagggtagcgaaagtgtatttaaggaaagacagcgaagagatggatatgttgattcaggagactatgcggtgacgtatatcgtgcaactgttaaacgacagctcacagatggttagtgctttgaatgcaccgcatttacacatcctgattgccagagcctggatcagggcggacagtattttaggcggtatcgaatactggaaacagcagcggctttatctcggcagtccgcgttcgctaacgacataa

SEQ ID NO: 123782 - DNA, 3603 bp, Enterobacter cloacae
atgttgacgacactcctgattgcaaatcgcggggcgattgcctgccgcattctgcgcaccctgcgcgccatgaacatccgcggcgtggcggtctactccgaagccgatctcagcagcctgcatatccgggaagcggatgaggcgctgagcctgggcgagggcccggcggcgaacacctatctggtgagcaaaaagatcatcgcggccgccagagccagcggtgcgcaggccattcatcctggctacggttttctgtcggaaaacgccgcatttgccgaagcctgcgaagccgcaggcattgcgtttgtcggccccacgccggaacagttgcgtctgtttggcctgaaacatactgcccgtgcgctggcgaaagcgcacggcgtgccgatgctcgaaggcaccgggctgctggctaacgtcgatgaggccgttcacgctgcggcggaagtgggctacccggtaatgctgaaaagcaccgcgggtggcggcgggatcggcatgcgcgtctgttaccacgcggaagagctgcgcgacgccttcgatgccgtggtgcgcctgggcaagaataactttagcgacgcgggcgtgtttatcgaaaaatacattgagcgggcgcgtcacctggaagtccagctgtttggtgacggcaaaggcgaggtgattgccctcggcgtgcgcgactgctcggtacagcggcgtaaccagaaggtgctggaagagacgcccgcgcctaacctgccggacggcatggagaccgcactgtgcgaggcggcgataaaactcggccaggcggtcaactaccgcagcgcgggtaccgtggagtttgtctacgacagcgacgcggcccgcttttacttccttgaagtcaatacccgtctacaggtagagcacggcgtcaccgagcaggtgtggggtgttgatctggttcgctggatgattgacctggcggccggaacgctgccgccgctggcggagctgcgcgccagcctgcaaccacaaggacacgccattcaggcgcgggtctacgccgaagatccgggccgtcagttccagccgtcgccagggctactcaccgaagtggtgttcccggaaaacgatcgtcgcacattgcgcatcgacagctgggtggagtccggctgcgacgtaccgccgttttttgacccgatgctggctaaaatcatcgcctggcagcccacgcgcgaggcggcgatccgcgtcctgcacaccgcgctgggagagacgcgtctctacggcgtggaaaccaaccgcagctatttgcagcagattttaaccttcccgccgttcgcccacggcgagccgtggacccgctgtttagagacgctggactatcaggccttcacccttgaggtgctcagcgccgggacgcaaaccacggtgcaggattatccggggcgcacgggctactgggccgtcggggtgccgccctccgggccgatggacagcctggcgctgcgtctcggcaaccgtctgctgggcaatgaggagggggccgccgcgctggagatcaccctcagcggcccgacgctgaaattcaactgcgacgcgcagctggcggtgaccggcgcagccattgcgctgacgctggacggcgagccgctggcaaacaaccgcgttttccgcgtccgggcgggaagcacgctgcgtatgggcgatattcagggtgacggcgtgcgcagctatctctgcctgcgcggcgggtttgaggtgccggattatctgggcagcaaaagcacctttaccctcgggcagtttggcggtcacgccggacgggcactgcgcacaggtgacgtgctgcatctgtccccattgaccgaacctgtagcggacggggagctgccgcaggccctgcgcaccagcctggatggggtgcgtgagctgcgggtgatttacggtccgcatggtgcgccggagtattttacgccgggctatatggcgaccttttttgccaccgagtgggaggtacattttaactccagccggacgggcgtgcgtctgatcggcccgaaaccggaatgggtacgcgacagcggcggcgaagcggggctgcacccgtcgaacatccacgacaacccgtacgccattggcgcggtggatttcaccggcgatatgccggtgatcctcggccccgacggcccaagtctggggggatttgtctgcccggtcaccgtcatcgaggcggatctacacgcggttggccagctgaaagcgggcgataaagtgcgctttatgccggtggacgtttccactgcccgacggctggcgcaggggcaggcagcgcaaatcgccagcctgacgccgcaggtcatgccgtggcaacctgtcgggctgagctcgccggtggtgctggaggtgggggaggacgataaacggctggtggcgaggttatccggcgatacccatctgctgctggagataggcgaccccgaactggatctggtgttgcgttttcgcggccacgcgctgatgcaggcgctggaaacgcgcgcgctgacggggattatcgacctcacgccggggatccgctccctgcagattcactatcagccggaaacgctgagtctggaagcgctgctggagacggtggccgggctatggcaggacgtatgcgggcagtcgtcgctggacgtgccgtcgcgcgtggtctggctgccgctctcctgggacgatccggcgtgccagaaggctatcgataaatacatgaccaccgtgcgccgggatgcgccatggtgtccgagcaacctggagtttatccgtcgtatcaacgatctggcgaatatcgatgaggtctataaaacggtgttcgatgctcgctatctggtaatggggctgggagatgtctacctgggcgcgccggtcgcgacaccgctcgatccacgccatcgtctggtaaccaccaaatacaacccggcacgcacctggacggcggaaaactcggtgggtattggcggggcctacctttgcgtctacggcatggaggggccgggcgggtatcagtttgtcggacgcacgctacagatgtggaatcgctatcacgccgtggaggattttgacggcaagccctggctactgcgcttcttcgaccagatccgcttttatccggtctctgccgaagagttgctcaccatccgccgggatttcccgctggggcgttatccgctgcgcatcgaacacaccacgctgaagctggcggagtatcagcaattcctggccgacgaggcgccggagattgaggcgttccgcgcgcatcagcaggccgcgtttgacgccgagcgtgagcgctgggccgccaacggtcaggcccattttgacagcagcgaggtgctggtaacggacggcgaagacgcgccgctggcacccggacaggccgggattgacagcccggtgtcgggcaatctgtggcaggtaaacgttgaagttggcaacaccgtgcgcgaaggcgatgtgctggtggtgctggagtccatgaagatggagatcccgctggtcgcaacccaggacggggtggtcagccaggtgcgcgtgcagccgggttcatcggtgcgcgcgggtcagtgtgtggtggtcctggagaaaacagcatga

SEQ ID NO: 123783 - DNA, 1800 bp, Enterobacter cloacae
atgaagcacctttttgatttacgccttgatgttctggcgcaggcataccgttccggtcagctccgtcctcgcgcggttatccttgccctgcgcgagcgcgcgctggcgctgaacccggaatttaacgcctttatttatcttctgacgcccgacgagctggagccgtatctggccgcgctggacggcgtggatccggcatcgttgccgctctatggcgtgccgtttgccattaaagacaatatcgatctggcgggtattgagaccaccgccgcctgtccggcctttgcgtaccgggcagagcaggatgcgacgatagtgtcgcagctgatcgcgctaggggcggtcccgctggggaaaaccaatctcgaccagttcgcgaccggcttaaacggcacgcgctcaccatttggtgcgtgtcgcaacagtgtgcatccggagtatccgtccggaggctcaagcgcgggctcgtcgctggctgtggcgctggggctggcgagctttgccctgggcaccgataccgccgggagcgggcgcgttccggcctctctcaataatctggtcgggctgaaggcgagcaaagggctgatctcgacagcgggggtggtgcccgcctgccgcacgctggactgcgtaacgttcttcaccagcacggcagcggaggccagccaactgctggcgctgacggcgacgaaagacgcgcgcgatgactacagccgtgataacccgtcctggaacggagcgcaggcatttggcgtaccggcagccggttttcgctttggcgtgccggacacgctggagtttctcggctgcgcagagagcgaggcgctgtatcacaccgcaaaggagaggctgatcgcccttggcggcgtgccggtgaccatcgacttttcgccgttcctggcggcagcaaaactgctctatgacggcccgtgggtggccgagcgctaccacgtggcgggcgtgttgattgagcaacagccggacgcggtgctgccggtgatccgcaatgtgctgcaaaaagcgcctgccatgagtgcggtagcggcgtttgaagcgcagtaccagcttcagcgctataaaagcgagtgcgatgccatacttacggggcttgagtgcgtgttaacccccacttatccgcgcccggtgagtctggccgagctggcggaggaaccggtcaaacgcaactctgagcttgggctttacaccaactttatgaacctgcttgattacgctgccgtggcggtcccggcagggtttatggccaacggcttgccttccggcataacgctgtttggccgcgcgtttaccgaccagtatctgctcagcctggccgatgcgttacaacgtcaccaaatgttaaccctgcccggcgggcgcgagatgcaaggggatgcacccgcttcaaccgccaccgatgatcgcctgcacctggtggtgtgcggggcgcacctggacgggctggcgctgaatcatcaactgcgccagcgcggggcgacgtatgtagaagccaccaccagcgccccgcattatcggctctttgccctggcagatggcaaacggccaggcatggtgcgggcaacagaacagggttccgcaatagccgtagaggtgtgggcgctaccgcacagcgaagtgggatcgtttctggccgggatccccgcaccgctggggctgggaaaagtcgaactccaggacgggcgctggctgaccgggtttatctgcgaggaggcaggattagagggagcacaggagattacgcgattcggtggctggcgagcctggcttgctcagcatccgtga

SEQ ID NO: 123784 - DNA, 855 bp, Enterobacter cloacae
atgggaagtggatggcatgaatggccgctggtgatcttcaccgtttttgggcagtgcgtggccggggcgttgctcgtcagcggtctggcatggatgagggagagtgacgaggcggtcaaagcccgcatcgtgcgcagcatgttctttttatggctggtcatgggcgttggctttatcgcatcggtgatgcacctgggctccccgctcagggcgtttaactccctgaaccgtgttggcgcgtcggcgctcagcaacgagatcgcggcaggctcggtcttctttgccgtcggtggcttctggtggctggtgtcggttatcggtaaaatgccgcccgcattgggtaaagtatggatggtggtgagccagatcctggggattgtgtttgtctgggccatgacccgcgtgtatcagatcgatacggttccgacctggtacaccggctacaccacgctggcctttttcctgacgatggcgctgggcggcccgctgtttgccgccctgctgcttcgcgctgctggcaccgccttcagaggcacgtgtgccgcatcggtgagcgtactggcgctgctgctgagcgtggcggtgattgtgctgcagagtaacgaactggcgacgctacacagctccgtacaacaggccagcgccctgctgccggactatggcgcatggcaagttggccgtatcatactggtcgccgccggattaggctgctggctgtgcccgctcatccggcgccaggggccgaaaacccttgcgctctttgcaggcctggcgctagttgtcgtgggtgaactgatcggccgcggtctgttctatggtctgcacatgacggtaggtatggcaattgccggttaa

SEQ ID NO: 123785 - DNA, 207 bp, Enterobacter cloacae
atgacagaaaaagaattacgagagaatcttgtttatttaatgaaaaaatatgttcgggaaagccaacaggaagctttttatgaagacatatcaatgcctgaagtgccagtaaaaggtattttagctgaatttaataaagtcaaaacaagaactgttgatgaagcggatggagttttgatacgtgatatttacttttatttttgttga

SEQ ID NO: 123786 - DNA, 210 bp, Enterobacter cloacae
gtggatattgaagggcaggtgcgctgggaaggggggaacagtgcctggggcaagctgctgcgcgagagcgagacgcagggatcaggatattcccagaacatgcggatgcagggggaactcctgcatcgtgagacagggttgcacgacaatcagtttcggtattttttgacctggccgattactctgaggtacagaaatgaagagagatga

SEQ ID NO: 123787 - DNA, 405 bp, Enterobacter cloacae
atgataaatgataataaacttattgattatgcgcgagaaaaaataccgaatgaatataattcttctttaaataaaaataataatgttcaatgtgcatcatttataaacaatactcaagatgagttgcgaataatgaaagcgcataaaaataatacaaaacttacagggttgaaggtagaaggtcttgatgaattaattattgctcttgaaaattttgatgaagaaactgtcttagtaattaatatccgaactaagttattttcctttaaaatttatttagataaaaataatgctccactgggtgttataatccttaagttaaaaaagaaaaccgacgaagatattcgatttgggcgagatgttcttggcattacgactcctcctcctgacatagaaaatgattag

SEQ ID NO: 123788 - DNA, 246 bp, Enterobacter cloacae
atgaattacgattcatataatgaagtactagattacctcaatgtttttttcaacgaaagagtgaattcatcaatttatttggaaaaactaatgactttgatcgaaggatctcgctctgaaaaaacggtgatgataagagctatttatgaaacatacatgcagtatgtaaaacaaaatagagatggcataaaagttagcgcaggggaaaaagaaatgtggattgacttattgcaccattggcaataa

SEQ ID NO: 123789 - DNA, 483 bp, Enterobacter cloacae
atgattgcattaaatttaaatccgattaccggtgatctgaaatttgatgatctgcctttgggaatggatactgaagaaggcttttgtaagagtggtttataccacgaattaatcaagcgcaaagctgtaaataaaatcatgccgaatcactaccttgttgactcagtagcgtttttcgacaaagaatttcaagttactatacgcccagtgtgctatggatttccttttatgcttcatcttgttgataaaaatagtcaatactataacgcattaaatgactggaatgcgcgaactaatattcatatgcttaatgactcagtgaaaagcttgtctgattggctgaaagaatcattaaacctggaaacgcctgacaccacggaaacagacatgatgagatggcgctttgaatgggggcgggtttccgtctcatatgagataaaatcatttaatcatgggatatatatagtttggaatataacatag

SEQ ID NO: 123790 - DNA, 477 bp, Enterobacter cloacae
atgttagaaatgcattttgatgttaatagtggcttggtggccattgataactacccccttgaattaaaggacttagagacgtttaaaaattcggagttttacaagttattctcgccatttacgacaataggccattattacttctctattgataatatagattggaaagatcaaactttcattttggaactgaggccttcagtgttttctttttccccttcaatattccttacaagtaagaatggaaatttttataaaactttaggagattggaataaaagagccaatttgagtaatttatctgaagaagaacaacgcttgacagcatggattgagagtgaaataacctcgcaccccaaacttaaaattatcactcccccatatggaattcaatgggatcatgaatggggaagaattattgtacagtctaatgaaaaaagcttcgattgtggtatttatatcgaatggaatgtttga

SEQ ID NO: 123791 - DNA, 366 bp, Enterobacter cloacae
atgattgaaaatctcagttgtagtaaagagaatgacctgcttcaatgggcatgtagtgaaagtaacatactggttaatatgccatttttagactatgcaatggtcgactcaacacgccagttagtctttgcgttaagcgagccaaagccattacaaaccgttttgaccatcttcaatgctcagggcgacaaactattttggtctgcacctcctgaaggcgcgactttctattacttaacattcaacctgtcaaaggaagtggtcgttgtctgtagctatccagcaaaaaaaaacggctggcatgattggttttactcctgggatatgacgcgtaacgcgttgtcttgctcaggccctgcatattaa

SEQ ID NO: 123792 - DNA, 1185 bp, Enterobacter cloacae
atgacattaatggctggcaattcgtcgggtgcaaccgaatggctccagcgcgcaaaggcgttgcgtcaggagcagctcagcaaactggcacagctgggcgtactggtgaatggcattagccaactggtgcatatgctacagtgcgagcgcggtgcatcaaacgtctggctctgctcacagggtaagctctatgcccccgaatgcaaagccagccgggcgctggtggatgaaaatctcaccatactgtatggcattctggatagacactccccagtgccgggcagcgccgtgtgtgagcgcatcgccgctgcgttgcagagccttgaatcactccccgccctgcgagaaggagtgaaccaacaaaccgttaccgctccgcaggcgatggagcattactgtcgcatgcttcgccatctgctcagtatcgtgccgcagctcaacgacagcattgacgatccgcaactggcggggcgttttgttgccctctacagcctgatgcagggcaaagagctggcgggacaagagcgggcgctgggggccattggcttcacgcagggtttttttgatgatgtcacccgccagaggctggtggatcgcattgacgggcagcaggcctgttttgagatctttttaagccacagcccggcggatgtgcagagcaccttttcccgggactgccagcccgaccgcgagacggagcaactccggcgtgtggcctgtacccgccagcctgctgcggataatggcgacacggcgctgaactggttcgccctgcaaacgtcgcgtcttgagcacctgcgcaccctggaggagatggttatcgccgacctgatgctggcggttgatgagcgtatccatcatgaccctcaacatccggtaagtgccgatgagaatgacgatccgctcgcgctttatccggacaaacctttgctgccgctggttcgccagcaggctcgtgaaatagaacagctttcccgccagctcgcgacgctgcgcgatacgctggaagagcgcaagaccattgataaagccaaaagcgtgctgatgacccaccacaacatgagtgaggaacaggcgtggacggcgctgcgcaaaatggcgatggacaagaaccagcgcatggtggatatcgcccgcgcgctgcttaccgtgaagcgattgtggcagctaacccctaaggagtag

SEQ ID NO: 123793 - DNA, 3744 bp, Enterobacter cloacae
atgagcaaatttttggaccggtttcgctacttcaaacagaagggtgaaacttttgccgatgggcacggccaggttctggataccaaccgggactgggaagacggttaccgccagcgctggcagcatgacaaagtcgtccgttcaacccacggtgtaaactgcactggctcgtgtagctggaagattttcgttaaaaacggtctggtgacctgggaaatgcagcagaccgactatccgcgcacccgcccggatatgccgaaccatgaaccacgtggctgcccgcgtggtgccagctactcctggtatctctacagtgcgaaccgtcttaaatatcctctgatgcgcaagcgcctgatgaaaatgtggcgtgaagccaaggtgcagcacagcgatccggtagaggcgtgggcatccatcatcgaagacgccgacaaagcgaaaagcttcaagcaggcgcgtggccgcggtggttttgttcgctcctcctggaaagaggtgaatgagctgattgccgcctctaacgtctataccgtcaaaacttacggtcctgaccgcgtggcaggcttctcgccgatcccggcgatgtcgatggtttcttacgcttctggcgcgcgctatctttccctgattgggggaacctgtctgagcttctacgactggtactgcgacctgccgccagcgtctccacagacctggggtgaacagaccgacgtgccagagtccgccgactggtataactccagctacattatcgcctggggctcaaacgtaccgcagacccgtaccccggatgcccacttctttactgaagtgcgttacaaaggcaccaaaaccgttgcggtgaccccggactacgccgaaattgccaagctgtgtgacctgtggctggcgcctaaacagggtactgactccgcgatggcgctggcgatgggccatgtcatgctgcgtgaattccacctcgataaaccaagccagtacttcaccgattacgtgcgtcgttataccgacatgccaatgctggtgatgctggaagagcgtgacggctactacgcagcaggtcgtacgctgcgtgcggcggatctggtggacgcgctgggccaggaaaacaaccctgagtggaaaaccgtcgcgtataacagcaacggtgagctggtggtgccaaacggttcaatcggcttccgctggggtgagaagggcaaatggaaccttgaacaacgtaacggtacaaccggcgaagagaccgagctgcgcctgagcatgctgggcagccaggatgagatcgcagaagtgggcttcccgtactttggcggcgaaggttctgagcacttcaacaaggttgagctacagaacgtgctgatgcacaaactgccggtgaaacgcctgcagctggccgacggctctagcgccctggtgaccaccgtgtatgacctgacgctggccaactacggtctggagcgcggtctgaacgatgaaaactgcgcgaccagctatgacgatgtgaaggcgtacaccccagcctgggcggagcagatcaccggcgtaccgcgtgcgcagatcactcgtatcgcccgtgaattcgcagaaaacgctgacaaaacccacggtcgttcaatgattatcgtcggtgccggtctgaaccactggtatcacctcgatatgaactaccgtggcctgatcaacatgctgatcttctgcggctgtgtcggtcagagcggtggcggctgggcgcactacgtgggccaggaaaaactgcgtccgcagaccggctggcagccgctggcgtttgcccttgactggcagcgtccggcgcgtcatatgaacagcacttcctacttctataaccactccagccagtggcgctatgagacggttaccgcgcaggagctgctgtcgccaatggcagataaatcccgctacagcggtcatctgatcgactttaacgtccgcgctgaacgcatgggctggttgccgtccgcgcctcagctgggcactaacccgctgcgtattgcggaagaggcgaagaaggcaggaatgtcgccggtggattacaccgttaagtctctgaaagacggttcaatccgttttgcggccgagcagccggaaaacggtaaaaaccatccgcgtaacctgttcatctggcgttccaacctgctgggctcgtccggtaaaggccacgagtacatgctgaaatacctgctcggtaccgaaaacggtatccagggtaaagatctcggcaagcagggcggcgtgaagccggaagaggtggagtggaaagacaacggtctcgacggcaagctggatctggtggtgactctcgacttccgtctctccagcacctgcctgtactccgatatcgtgctgcctaccgccacctggtacgaaaaagacgacatgaatacctcggatatgcatccgtttattcatccgctgtctgcggccgttgacccggcgtgggaatcaaaaagcgactgggatatctacaaagacatcgcgaagaaattctctgaagtctgcgtagggcacctgggcaaagagaccgacgtggtgacgctgcctatccagcatgactccgccgctgaactggcgcagccgctggacgtgaaggactggaaaaaaggcgagtgcgacctgatcccgggcgtaacggcaccgcacattattccggtggaacgtgactacccggcgacctacgagcgctttacctctatcggcccgctgatggaaaaaatcggcaacggcgggaaagggattgcctggaacacccagagcgaaatggatctgctgcgcaagctcaattacaccaaagcggacggcccggccaaaggccagccaatgctgaatacggcgattgatgcggcagaaatgatcctgaccctggcaccggaaaccaacggccaggttgccgtgaaggcctggaaagcgctgagtgaattcaccggccgcgaccatacgcatctggcgctcaacaaagaagacgaaaaaatccgcttccgcgatattcaggcgcagccgcgcaaaattatctccagcccgacctggtctggcctggaagatgaacatgtctcttataacgccgggtataccaacgttcacgagctgatcccatggcgtactctgtccggtcgtcagtcgctgtatcaggatcaccagtggatgcgtgacttcggtgaaagcctgctggtttaccgtccaccaatcgacacccgctccgtgaaagcggtgatgggcgcgaaatcgaacggcaacccggagaaggcgctgaacttcctgacgccgcaccagaagtgggggatccactctacttatagcgacaacctgctgatgctgaccttgtcccgcggtggtccgattgtgtggatgagtgaagcggacgccaaagatctgggtattgaagataacgactggatcgaagtgttcaacagcaacggcgccctgacggcgcgtgcggtggtgagccagcgcgtaccggccgggatgaccatgatgtaccacgcgcaggaacgtatcgtgaacctgccgggttcagagatcaccgagcagcgcggcggtattcacaactccgtgacccgtattacgccgaagccgacccacatgatcggtggctatgcacagctggcctacggctttaactactacggtacggtaggttctaaccgcgatgagttcgtggtggtacgtaagatgaaaaatattaactggttagatggcgaaggtaatgaccaggtacaggagagcgtaaaatga

SEQ ID NO: 123794 - DNA, 405 bp, Enterobacter cloacae
atgaaaaaagtagtgatgctggtatgccttgccacagcaataacgggctgtgctcctctcgcgcctgaaggttgtcagaagaaaaccgctctcgactcgtgctcctataagcagtccggtaaagtctccgataaggatatctatggtcaacaggctgccgcgataaagaaagcgctggactcggcgctggccgatccacacgcctggaatggtaagcaatgcaacatgcatctcgactttaccgtcgacgggctactgcagaacctggagataaaaggcggagacaaagcgtattgccaggctttagccgacgcggcaacacgggccaccttcccgcccttcacggacgagcgtgtgtttcaggatatgggttctgcccgctggaacatggaggggcaaccgtag

SEQ ID NO: 123795 - DNA, 435 bp, Enterobacter cloacae
atgtttaattcaattttagtccctgtcgatatctctgaaagtcgtctgaccgaacaggtgattccctatgttcaggcaaacgcagcaatcggtaacggtaaaatccattttctgacggtagtgccttctttcccttactattcatcgcttgggctggcgtattcggttgaaatgccaaagttggcggagattcaggaggaagcccttacgaagctcaaagagatggttaagcagtttaatttacctgccgatcgtgtggagacacacgccatttcaggtgcgcctaaagatgagatcctgaagctggctgacagtatcaacgcagaccttattatcattgcgtcccatcgaccggatatcacaacctaccttttaggttcaaacgcggcggttgtggtacgccatgcaaaatgcccggtgctggttgtacgctag

SEQ ID NO: 123796 - DNA, 987 bp, Enterobacter cloacae
atggaacaacgccgtttttccggcaaaggccactggtaccacgaaacccagtcaaaccacgcgcagacggatgtcctgcctctggtgcccgaagccgctaacgtcgacgatcgttttttgctcgatttagccttaccggatgagattgttactgcctgtgctggctggcttactcctgcccgggcgttatgtcaccggctgtttccactcgatatcgccgtcaaccgtctgcatacgctgagtgcctacgacaggctaagcaccgcgctgacggtggcgcaggcctgcggggttcaaaggctctgtaaccactacgccgcccttctcgccccccttcccggcccggactcctctcgcgaaagtaaccgccgtctggcccagatcacgcagtatgcccgccagcttgccagttcaccggatgtcattgatgataaagcgcagcaccagcttgatgaggtgggtctgacaacgtatgacatcgtgctcatcagccagattattggcttcatcggttttcaggcccgcgtggtagcagtatttcaggcgctgctgggccaccccgtacgctggttgccgggacaccatattcaaccgcacacgctgcccgccaggcccggcgtctggatcgctctactgcctgtcgtggaactgcgctatgccagtgcgcatcaactcgagtcgctttcacgctggcaagccgagcccgcccttcaggcgctgacgcctgtgctctgccacgaacccacgctgctcgatctgacgggagaaatcctgaaccattgccgcaatgaagaccgggccgcgtcgccagcgctcttagcggccgtggagttgttgacacgttcaccggaccgtttcagtgcagcacagtttaacccgctcacggaagaaggacttcccgctggccgggcgattgcactgcttacgcgaagcgcgttagacggctggctggagcgcctgaaagtggcgcttggcaaagcggaataa

SEQ ID NO: 123797 - DNA, 237 bp, Enterobacter cloacae
atgaaagaggaaatgtatcaatacgatgacgatgatatcgactcgattgcctggtccgtcgcatttagcgagtggctgggaatggactcattacaggattgcgttctgaaaaggatctcagagaaggacagggaaaaatatgaaagtaagttagctgaatttcgccatttttttcaatacgcatcaggagaagaatatttttcacgttatctaatacaaaataaaatgcagcgctaa

SEQ ID NO: 123798 - DNA, 2430 bp, Enterobacter cloacae
atgaggattgcacagttattagcaaaaacgttaattgccggaacgttttctctcccatacgtgacggtgtcggccatgatgcccgcggataataatcagtacgacgccatgattatcgaggcgagaaaaggcaatacacaacctgcattaacctggttttcgggtcatcaccagcttgatgaatctcaggttgccgactggatgcagatcgccctctgggcaggcaaaaatgacgaggtcatcgaggtctattcccgtcaccagaattacacgctgccggcgagagccttggccgcactggcggttgcctggcgcaataagcaggagtggaaaaaagcgctacaagtttgggaccgtatctgtgatgaaagcccgtacacggcggagttttgccggggaagagtattgaccctcgccgacagcggtgagtatgacggggcgctgcgcgaaatacgcctgctgcaaaaaagagcgccagacagcaaaaattctctggcggaagcgtatgtacacaggcttgccggccattaccccgaagaattactggccatcacacaggcgatgcgccagtcagcacacccggaaatgttgtttgatgcctggcgtgaggcgctggcaaacaatcagttgccggcagccgaactcaagcatgtgcaggcgcaggggaaacagccacaggccagcgagcgcgcggacgcggcggctgagctagtcaggctggcgttcatgccgacccgcagcgaaaaagagcgctacgttatcgccgatcgggctttatccctttatgacgggatgatcgccgagtggaaaaataagccggagtatgacgcggtataccgccgaatttacgtcgacagactcggggccttgctttcacgcaatcgccacgaagaggtcatcgcgcaatatcagcagatgcaacaggatgacttcgtgctgccggagtatgcccagtactgggtggcgtcggcgtatctcaaaacgggtcagcccgatcgggcgcaggcaatgctctcaaggctgttttatcagacaccccagaaggtcgatgacatttcggaggaggaacgtgccgatctgttttatagccacctggagagtgaaaactaccgccctgcgatgctgctgacgaaacgcgtcgttgataccacgccagccaccgtttatccacgcggatcgtcagtgcccgtgccgaatgataagtggcttgaagggcaacagttccgttcctcgctggcgatgtacgaacaggacctggcccgagcggaatcactgacgcgcaaccttgcgcaggcggcgccgggtaaccagggattgcgtattgatcatgcgcgcgttcttcttgcacgcggactgccacgagccgcagaagagagcctaaagcaggccgaattgcttgaaccgtccagcattgccctggaaaccgaacaggcctatgccgcgctggatcttcaggagtggcaacaggctgaggagctgtcaaaggatgtggtgcaacgcgctcctgacaatgcggcggtaaagcagctcagtagggcgcttgctacccaccagcgtgccgaattacgggtggcaggaacggttggtattgattctgactctcctgacgcaggacgtcacgatgttagcttcaacagcaccctttatagcgctccgctgaactataactggcgaggattcgttggctacggcttttttgacggccgtttccaggagggaaaaggcgtagtgcatgacggactcatggggctggaattgcgttcgcgagacctttgggcggaggctgaagtctcgggccgacgtttcagtggcgatcaaaaaatcggggcccggctttcgacccgtatcgattttaacgatagctggcagttggggctggaaggtgaacgcgtgtcgcgtaatgcgccgatgcgtgccatgaaaaacggcattaccgcgaacagcggtggggtggagatacgctggtatcagcatgaaagtcgacaatacagcgcgcgctatctgaagaccgatttctctgacggaaaccaccggaatgaatatttcctcaacggtcaggaacaggtctggacttcgcctgatgtgagcctgaacctccagccaggcgtctattacggcattaacagccagtcagacgtgccttacttcagtccggaaaaacgtatggacgtgatggccgggatgacactggatcatcggctgtggcgccggtacgaaaacagctggacgcagagattcagtgccggtgcaggaaatgcgtggcagaagagctatggcagcgggctcatcacccaactgggctatggacagcgcgtgtcctggcgcgacgggggagaagcgagtgcgacgatacgctgggataaacgcccctacgacggaaagcaggaacacaatctatctgttgattttaatgtgaaccttcgattctga

SEQ ID NO: 123799 - DNA, 2022 bp, Enterobacter cloacae
atgttacggaaaggatttcaaacattactcatgctgcttggcattatgctcgtagcagcgtgcgtcgacgggcgcgggcctgcctataccagcccggccctgcgcgaaaagttacgtgccgaaatgccatggccggcgaatggcttcgtgacgattgcgtatcatgaagtggaagatggcgaaacggatcagcgttttatgtccgtgcgcacctccgcgctgaaagagcagtttgcctggctacgtgaaaatggctacaagccggttagcctggcgcagatccgtgaggcacaccgcgggggtaagcccttaccggaaaaagcggttttattgtccttcgacgacggcttcagtagcttttatacgcgtgtcttcccgctgcttgttgcctttcagtggcctgctttatgggcaccggttggcaactggattgacacccccgccgggcaaccggtgcagtacggcgatgaaaagatcgcgcgtgaacgctttgcaacctggcagcaggtacaggagctttcccgttctccgctggtggagataggtgcgcatacctggaacagccattttggcaccctggcgaatccgagcggcagcatgctgcctgcatttgcgaatcgtcggtttctcaagagcgatcagcgctacgaaaccgaaaaggagtatcgttcgcgcatacggcaagacgcaaagatgctgataagccactttaagacgcataccggtaaagcccctacggcctgggtgtggccatatggcgcggcgaacgggacggcaattcaggagcttaaggctctcggctttgacatgtttttcacgctggaggatgggctttcaacggccacggagctggattcaattccgaggatcctgataaatggcaaccctacccttgaagagtttgcgcttcaggtgacgggggtgcaggaacaagcgttccagcgcgtgatgcatgtcgatctggactatgtgtttgatcccgatgccgggcagatggaaaaaaatatcgatgccctcattcagagggttaaagatatggggatcaccaccgtttacctgcaggcgtttgccgatccggcgggtgatggtctggtgaaggcggtctacttcccaaaccgttggctgccggtgaaggctgacattttcagtcgcattgcgtggcagcttcgcacccgggcaaacgcggccgtttatgcctggatgccggtcctgagctgggatatgtcggcaaacttaacccgcgtgcatagcctggcggcagacaatgacgaacgtcctcaggtcagtccatcacagtatcggcgtctgtcaccatttgatgctgaggcgaggcagcgcattggtgatatgtatcaagatctggcggcgcatgcctcgtttgacggcattctttttcatgacgacgccgtgctgaccgacacggaggacgccagctctgtagcactggccgcttatgaaaaagcgggttttagccgtgatatcagggcaattcgcgatgacgcgcagcaatttgaggcatggacccggttcaaaaccgaaacactcacccgtttcacccttgaactggcggataaagtaaaagctatccgtggcccgcaaatcaaaacggcgcgtaacctgtatgcgctgccgctgattgaaccgaaaagcgaagcgtggtttgcacagaaccccaatgactttcttacgcattatgactggacggccgtcatggcgatgccctacatggagggtgtgaaggatcgggagagcgacaagtggtttaaggcacttattgcgcgcgcagcggctttatctgacgggaaaaataagatgattatcgagcttcaggctcgggactggcgaccggacgggcaacaccagcgtattgaatcccgcaagattgcggagtggatgcgtattatgcagctctctggaatgaaacattatggctattaccctgatgactttttgaataatcagccgaaaataaatgttattcggccggaattctcaacgaactggtaccctgaagatgaataa

SEQ ID NO: 123800 - DNA, 1326 bp, Enterobacter cloacae
atgaataatcgctatttctcaatcgttattttaattctggtgttgtgtatccctgtcgggttaaccctgctgttttccgcagaggtgatgctgagatatgtctttttctggccgttctttatgtcgatattctggatagcaggcagcgtctttttctggttctatcgcgagcggcactgggagtggggtaaagatgcgtcggtaccgatgattaaagataaccccttaatttcgatcgttatcccttgttttaatgaatcgaaaaatattcaggagaccatcgcggcggctatgtcacagcggtatgacaattttgaagttattgcagtgaatgacggatcgtcggacgacacgggctttcagctaaatatgttggccgagcgttatccccgcctgcgtgttgtgcatttgatggagaaccagggaaaagcgattgcgttgaaaagtggtgccgccgctgcaaaaggggagtttctggtttgcattgacggcgacgcctgtctggatcgtgacgccgcagcctggcttgtcgcgccgatgattgataacccgcgtgtgggggctgtgaccggcaatccgcggatccgcacccgctcaacgttaatcggcaaagtccaggtcggtgaattttcatcgatcattggtcttatcaaacgtacgcaacgggtctatggccaggtgtttaccgtttcaggggtaattgcggcgttccgccggagcgcgctggcggatgtgggttactggagcgatgacatgatcacggaggatattgatatcagctggaaactacagcttcgtcgctggtctgtgttctatgaaccgcgggcgctgtgctggattttaatgccggaaacgctgcgcgggctgtggaaacagcgtttacgttgggcgaaggggggcgcggaggttttcctgaaaaacatgggctccctctggcgctggaaacacaggcatatgtggcccctttttatggaatattgcgcgacgacggcatgggcattcacctgcctggtcagtggggtggtcatcctggcggaggtaatccagaacggatcaacgggcgggctctccatttcatcggtgtcagaaaatgccggagtgctgctttgcagcctgtgtctggtgcaattcctggtgagtatcctgattgagtaccgctatgagcataacgtcgttgccacgctgttctggatcatctggtatccgatcatcttctggcttatcagtttattcaccacgcttgtcgcgttcactgttgtgatgctgaatcctcgtagcacccgtgcgcgttgggtcagtccggatcgcgggattgcaagggggtaa

SEQ ID NO: 123801 - DNA, 396 bp, Enterobacter cloacae
atgaaacactggattatcaattcgcaaaaaagcgtcttccgggagtgtctggaactgatcgtaacctgtcttttgtgggctgtgtttgtgtactttgcctcggggtttatcgctttattcctgaaggggtttacgcaggggaatgacgcttttttgcggctgttcttctatttcatcctggcgatacttaacgcgctggtactggtgctctgggcgatttacaaccgctataagcatcagagaattgcggttcctcctgcccgtgtggcgagtgaggcggaactggcgatgagcttttcactttcccagccggtttatcagcagttccaggctaataaaaagttatacgttgattttgacaaccatggtgacgtggtaaatgtcacctcagagtag

SEQ ID NO: 123802 - DNA, 1347 bp, Enterobacter cloacae
atgaataacattacgttggccgagaaaatgatcatgctttccggtgcatttctgtttgcactgatgatcgcggtaaactctttttgcgtgaatgataatccaggcttcagagtacccatgaccacatatttaatcgtcatgattgcgctgttctttctggataccatcatctttatttttatccagatgcagtatgcgtctgacagaacacacctgtcctcattgattctgagtatggcgtttttaagtggcctggtctatttcattgaaacgattgttattattcaatatcctgaccacgctggtttttctaatgcggtaaaaacaaacgacacggctgtattctattttttcaggcagctgagttttatctttttactggcgctcgccgttcgggtggaaaaaatcacaacacgttcgtcgtcaagacagattaataagttcagcctggcgttaacattatttattccgctggttgtgttcccggttctggcccattatatgagcagctatcatcctgcattgtcattaacgatagcggcagatggtcgtgaccagcatgctcccgtctgggatgtacggtacgttaacgttctgatcacgctctggtcgtttttactctgctatatgacctatgtgacgcgactgtcttcaggcatgtggaacagtattattgtcgtgtgtctctccgccatcatttacaattttttcctgttgctgctcgatacgtataatatgtcactctggtatattagccgtacagtagaggtatttagtaaattatttgttattttcaccttgttatttcaagtgttcagcacgttaaagatttttggcgatcgaattaatcgcgatccgcttacgcagatcttcaaccgtaagtatttttatgaggcgcttcaacggaaccgcatgctcaggacagaaaaaggcacgagcataatgatgctggatatcgacaactttaagtctattaatgatacctggggtcatccggtaggggatcgcgtccttctggcggtggtggatattatcaaagacagtatccgggataaggatatttttgccagactgggcggtgaggagtttggtcttctgctaccgaatactgacgagagcctggcggtatctgttgccgagcgtattcgccataatgtccagcaccggaccggacagggtaacctttacgcgcttcctgcagaggtgacactgagtatcggcgtgtgctcagccattcagagcaaccttaacagcaccgatattattcgtaacgtggatgaggcgctctatgaggcaaagcacaacggtaaaaacagaatcgtaagcagacacgcagaatgtgggtga

SEQ ID NO: 123803 - DNA, 825 bp, Enterobacter cloacae
atgaaagacagcatcagaaggtatattctctcctgggtggaggaaaataactttactattttacatattgatgacctggttgcggatatcggatacagcagacgaaccattgaaacctggtttaaggagcactatcagctctcgttaggagaatatattctcagaagaaggctgagccgtgctgctattatgctaaggatgacgtcgattccggtgacggatattgcttatcttttccattaccaaagtagccagggtttttccagagcctttaaaaaaatgacggggctgacaccctctgagtacagacgtgccagagtgtggaattttgatgttttacagccctcttttttattaagcgaccatcaaactccagaactcgaaatttgtgaactgaatgaaacatttctctatacacatcaaattatcgaacatgatcatctttttgatacctcggtccatgatattactaaaaaaatcaagaaactgcttatcgaaaatcgtcatgagattgatcgcatcacccttgtgcctcgcccacccgaacgcttaggcaaaagccgatcttatcttgttgaggtcttaatctcgtattccttacaaagcgacacgactgcaaaaagagggacgtgcgtagtaaaaggaaaatacgcaaaaatgaccttcagcggtagctgggagggctacagcgcctttaacaaaattgccttcgttaaagcaatggttaaaaagcgtctggcgttgcgcgagggcatttatttaatgcagtttaattcttacagcgatgagcatgttaattttgacgtttttatccccattttataa

SEQ ID NO: 123804 - DNA, 1188 bp, Enterobacter cloacae
ttgctaaccgatacaaaactgagaaaagctcttggcaaaaagagagacaaaatcgaggtcatttcagacgctcacggcttgaatgtcagattgtctacatccggcagtataacattcttttaccgctacagatggaacggaaaagcggctcaattgacgatcggcgattatccgaccatatcattagctcaggcgcgagagcgtagacagcagttcagaatctggcttaaagaggggttcgatccgagacgacagaccgtactggagaaacagaaaagagctgatgcgattaccgtaaaagaagcttttgattactgggaaaagcattactgcgttcctgaaggcctggtaaaaatccacgtgaaccgccgggacttcaacaaccatatcaatcctgtgctggggaatatgatcgtagatcagaccacaaaggcacattggcttagcctgttcgacggtatgggaagaagggtggttacaggacaaatgttagggttgatgcagcgtgtttttcgtttctgctctaacagaggaataatcaaccttaacccaattgagagtctcaggcgatctgatgtggggctcaccgcggcagttaaagaccgaagattgagcgacgaggagatcaaaactgtctggaatgctttgcctgaaatgagggaacgacaacagctgatcatgaagtttctcattctgaccggttgtagaagtacggaaataagaacggcaaagtgggaatggttcgatcttatggaccaaacatggaccattccagcaagtgattataaaacaggtaaatcggtcaggagagcgttgccggatgctgttgtaaagatgatgaaatctcataaagaaacatcattgttaaagcatgttgttacgttgtcacgctataaggggccagaggatgacaggccgcctcttcagcctaacgttgcgttattttctgcccaaataatttccaagacaggaatgaagccgtggtccctccatgaccttcgacgaacagtggcgacgcgactttctgaattaggtgcgccgccacatgttgttgagaaactgcttggccatcatatggcaggtgtcatggcgaggtataacctgcatgactacattgatgatcagcgccattggcttgcggtatggcagaaccatttggagaaactggttggtcatcctctggtttga

SEQ ID NO: 123805 - DNA, 198 bp, Enterobacter cloacae
atgcccactttttcttcccactccaggaggtctgaaagtctccagcgcttcgggcttccatttatcttcggcttcggaaatggttgtgaaaaatatgccggcattctggaaggggtgctccaaaagtacagcgtgctccgcgaaattttgtatcttgataaaacttcactggtgatcaagatatcaacattcgtataa

SEQ ID NO: 123806 - DNA, 240 bp, Enterobacter cloacae
atgcgactgattaatcgcagtaagcaatcccctttggctcgccaggcatgtgatgccgctctcgcgaagcacgtcgaaacttacggtgaattcgccagacagaaaaccaagaccacatacaccgtagtggttgatggaataaaggtaacagtggaagtcgttaaccgccgggccagctacgttgcgacagccatgaatggtgcccgcaggctgcgcaatctgccgggacaatgcaactga

SEQ ID NO: 123807 - DNA, 1110 bp, Enterobacter cloacae
atgtctaatatgctcattgatataaaagcaaaccttgaccgcgaacttgttccggttcagtcattgctgcctgcacatgtcagcttcgaccgattcactaacgccgcagcagtagctctggctgcaaataatgatctgtataacgccgatcgtcagtccgttatcaatgccctgactgcatgtgctaaagacgggcttattccggacaaccgcgaagcggcgatggtggtctacaagaaaaaacaggcagacggcaactggaaattaatcgcccaatatatgccgatgattgatggcgttttaaaacgagctcgtcagtcgggtgaaatatcgattattgcagctcgtgcagtttacgagaaagataagtttcgcgtctggcttgatgacagtggagaacatatccactacgaaccaacattgggtgcccggggcgagatgatcggggctgtcgcatatgcacggatgaaaacaggggaatttcagttcgaatggctgaatcttgacgacattgcaaaagttcgcgccgccagcaaaaacagcgataagggtccgtgggttgactggtatgaatccatggcgcgcaaatctgctgcacaccgtctctgccgccgtctgccaaataactcggaaattatggagatgctcgagcgtggaacggaaatggtctggcagaaggagaaagacattacgccaccagctgctggcgcaccattgatcgagcaggctgatagagggtattccgatcaggaaggaagttttgatgccgaaatcattgccgaagaattccgccagcagatctcatctgcagaagttgcaaatgaggccaaggagataggctccaggattgacgcgttaaaaaatgaactgggcgcaaatcttcatacagagcttaaaaataaagctctcggtcgtttccatcaaatcaacgccaacaacaaaattgcggatctcattaatgggctgccaaaaccaggaagcgaagaagctaaatctgcgtttgcagacgtagagaagaagctggagttcctgaagcctcgccttggcgatgaattgtatcaggggtatctcaccaacctggcggatatgaaaccggaatacgtgaactaa

SEQ ID NO: 123808 - DNA, 3135 bp, Enterobacter cloacae
atggaatttttctatgtagttaaggctacgcagaaatccggcaaagaagacgcagtgatttggttcactgcgaaatcagaagcccgtgccaacctgcagctcgatgttgagctcgaagatgccggtattgaaaccggacgcggtaaggattacgccaaaccggttcgcaccgatttcccggtgtataacgacctcccgaaagaaagcaccgtggattacacatggtgcaagcgctacgcactccaggacgatggacgcacctggctgccaaaggctggtgctgagtcggctggacccgtggacagaactgccgcaccggaaactaccgtaaaagtcgaaactaccgtcgatagtgtcccggttgaaaaccgcactccagcagttcgttatgccgtccacctgaccagcgacaaataccattcacatatcactaaagagcagcaactggctgccagcgaaatgtcactggatgaaggaaacacctatctccagaacctgctgctggcgaagaacgacatccctgaagttgccgaactcagcctgaacgctgagtggaaattggttcaggcgattaagcaggtcttcgtgccagatgaagcgcacgaaactgagattatcgctgcattcatggctgactgggcgagagcagatgccggcgaccgcaatcagttagttgaagagtggagaagcggaaagctttctcttctcaaatcagaaagcaccagcgacaccgatgtgacaaccggtcaggatccagaacctgcaaacggtcttcagattgacgagaatgatgacgaaaccactcgttatccagtcgttcgtatgcccttccgcaagcagctactcgcccagtttaccgccgacgaactgcgccaccacttaacccgcgaagaatacgaaggtatcagcgcgctggagatggacactgacaacagctatgtccagaaccttctgctggcggcagaaaactgcgaagaggttaaggcttacgataccaaagacctttggcggtataccgacgccattcgcaaagtgttcagccaggaaaagcgtcacgaactcgctttagttctccgtttcacccgaatctgggcggcgactgattatattgaccgcggcattctcgttcgcgaatgggcagccggaaacctcatcagcagcgtgcaacgtactgattcaggcactaacgctgatggcggctatattactgaccgcggcgaaggtgcgcatcacacattggacactctcgatcttgagattgcctgtgccctactgcctatggacttccatcacttcgaaattccttcgagcgtgttacgacgcgccaaagaaatcgtggccaagaaagaagagccatggaagtcatggagcgcaatcttacgcaatcaaccaggcatactggcggtgaaccgtgcggcaatcttcaatctgatccgcatcgcaccagaaaacattcatcacacgccagcggctcatcttgagtttgtgaataaaaccatgacggctgagtttaactctgctgtggagttgctgccgctgtctactccggctgttgagaccgaagcacctgttgaacaaccgcaggttgaaaatctcggcagcgccatgttctccatcgatggcctgatgggaggaaataccgccccggtcatcgatatcccctcaaatgaagtcaaaaaaactgaaaacacagcggagaccaccagcgatgtgcagatggaaacggctaagccaaagaaagtcgaaaatactgatccggtacaaccaggcgaaggcgctgatgcagctaatacgcaagcagttaccgtagcgccggaagagcagcagtcagagccagtaatcgaatacccggcttacttcgaaccaggccgctacgaaggcctgccgaatgacgtttaccacgcagcgaacgggctcagcagcacgcagattaaagatgctcgcgtcagccttatgtacttcaatgtacgccacgttgccaaaaccatttcccagcatgataacccggctttcatttttggtcgcgccacacacagttttgtgctggaaccagaaaaattttctgataactacgttctgccagaaaaaatgccggaagacgtggtatccacgacaggagagatggttgcgatcatcaaagaatacaacgcaacgctgcctgctttaatgaccccggatgaacttaaggcatggattgaagaatacaacggcaacctcacgcctccgctttcactgagtgcaggtgccgaggagaccgctaattcatacatgtctctgccggaagaatttcagcggataccagcggaaacaaaaccaaccgctacagcaatgaaagcatgtatcaaagaatacaatgccagcctgaaaccgatgcttaaaaccagcggcactcgtgatcagttgctggatcagatagcaactgtagcacctgagttcgctgaacaggagcgcgcaaagtttatcccttacaacgtcagcggcactaaagagcaactgtccgaaatcgttcgcacgatccgccctgacgtagtctttgccgacgactggcatgcacagcaggaagcggcaaatgcaggtaaagagacgataagcgttgagatgtacgagctgataaaaaatatcaatgatgctcttcagtccaataacgatgccagccgcctgttaaaccatccagccaggcagtctgaggtcagttatttcgggttcgatgaagagaccgggcttgaggtgcgcgttcgtcctgacatagagatccgcctcccttacgaaagcatctgcgctgacctgaaaacggtaagtcttgggtatgtgcgccaggacaaactgaaagaccgacttcatcgtgaaattatcgaccgcgattaccacctaagcgcagcgatgtattgcgatgttgcaggattggataaattcacctggatcttcgtgaacaaagaccccggttaccattgggtagctgtggtggatgcttcccccatgctgctggagctgggtcgcaaagaataccgccgggcactgcgccagattgaagaagccatggagacaggctactggcctgcaccaatcactgaagcctacaccgacgatctgaatgattatgacactcgtcgtcttgaagcactggatgcggaataa

SEQ ID NO: 123809 - DNA, 393 bp, Enterobacter cloacae
atgaaagaaaaaactcatcagattaaccacccacaagttcagcggcttaacgaggttcttgagctcaagaagttgaccaaatcagacatggcccgtatttgtggcgtcagtgctcaatcggtcaataactggttcgtacgcgggacgattggtaaaagctcagcgattaagctggcggatgcgcttggggtgagccttgagtggctgcttggccaagatgttggcgagaaagatggactgaagccggacgaacaacgcctgttggaactttaccgtcagcttcccgaagaagagcaacagaacatgcttcgcatcttcgcgcttcgcctgaaagagctggacgaactatatgataagtatatgaaaggccggattcgttcgcaggatgattga

SEQ ID NO: 123810 - DNA, 228 bp, Enterobacter cloacae
atgaaagcaattgataaagcaattactaaagcaggaactgctacgcgcttagcccaactgctaaccgtaagcgccatgactgttagtcattggcgaaatcgatatcagggcgtcgtcccggcagatcgagttttgcaaatttatggggttaccggcgtaactccgcacgagttgcgcccagatctctacccaaacccaacagacggtttacccaaacaggagccttaa

SEQ ID NO: 123811 - DNA, 552 bp, Enterobacter cloacae
atgcagactgtttcattccaacagagtaacagagcttcctctaattcactgatattccagtgtcatcaaagcgaatcggcagtgaaggatatcgatcatcgcgatatctgctcagcggtacgagcttgggcggcggcagaagggcgcgtagctgtagcacttcaaatccaagaagcggcggaagaacttcaacttgatggcgtggatttctcaggccaggccgatgtctggaacgtgaagctgttccgctggctcgacaacaaagaagactccgcatcgtaccgaaagaacatcgaacagctggtgcccgcgatcatgtccgtattaccgcttcgataccgcgaccgtgtcgttaagaacgactcgtttgcctaccggatggcccggctggaaaaagaggtgagtgaggcgaagcaagctttgatgctcgatgcaccgaaaaaggaaaagctgaaggagttaggagaggggattttcgaaatgttcaggatcgatccggaccttacggcgccactgctggcgatggtcacaaccatgctgggggcaatgtga

SEQ ID NO: 123812 - DNA, 858 bp, Enterobacter cloacae
atggccgacctgtcgaacgggtataccaaggtcgctaacgaaatccaacagctcaagcctcgtctgagaatgtcaggccgggagtggcagtgttttgaggcggtgatctggcttacctacggctggaacaagaaacaggaccgcgttacgaacacggtgatcgctgagcttacagggctgagtgattcgcatgtttctgatgcgctcaaatcgctcgcagaacgcaaaattatcttcagtcaaaagcagggagtgatgaaaactgtcggtataaatactgacctttccgcctgggttttagacaaaccgaaaacgggaaaagtcttcccgaaatcgggaaaagtgttaccgaaaacgggaaaaaccttcccggaaacggtagacacccaagactataacaaaaacaatattaaaatatcctcgtctcggaattctgacgaatcccgaaaccagaaaactcaaaagtttctctctcgccatcctgaagctgccgccgggatatacacccctgcaggtaaatcatggggatccgctgacgacctcaaggccgctcgctggatttacgaaaggcttctcaccgtcaacgcttcgctatccgaaccaaactgggctgaatgggcaaacaccatcaggctgatgcgtgttcaggacaatcgtactcactacgaaatctgcgacctgttccagtgggccaacagggatgaattctggaaagacaatatcctgagcccttcgagtttgcgcaagcagtgggatcaactcacaaccaaacggctgcgcgcaaccggggcggcaaagtcatcgcggggcggcgttgacctgcataacaccgactggattgacggggtgctggaatga

SEQ ID NO: 123813 - DNA, 183 bp, Enterobacter cloacae
atggcagggcatagtgaggaaatggtctgttatgagcgagaagcgggctctaccgtggattttatcaacactcagggattgcttttaaaaattgttatccagttttactgcatgaggtatcccataattgtcctaccgttttactcattttttgtctcttttatctatgacatcaatggttaa

SEQ ID NO: 123814 - DNA, 450 bp, Enterobacter cloacae
atgaagcgtccaaactggtttcaagtttccgataaaggtggcaaggctatagcagcgctccatcattacgccactactggtacaggtttacctgccgagctgatccatttaatttttttaagagtttcccagatcaatggttgtgcacactgcatagatatacatactcgcgatcttatcaagagtggcatgtccgtcgaaaagattgtattggtgcctgtctggcgagaagctacctatttattctcggatatagagcaagctgccctctcatgggcggaagaagttacccgtgttagtgaaacacatgcttccgatgaagcatattccgcagcgctttctgtattcggtgaaaaagatttggttgaacttaccattgttattgccaccatgaatgccattaatcgtatgggtattagttttcgaatgaagccgcttgctaaagcttga

SEQ ID NO: 123815 - DNA, 219 bp, Enterobacter cloacae
atgaaactacgtatcacaagagcaatcggcctcagcaagttctcgccacgttgggttaaggttatctgtttacggttgactaaaaacgatattgagcgctccctcaacgctcttctggccacaatcgatgaatctgaacttacccctgagcaagtcaaagcattaagggaatgcattgacagaattaacatcgcaagggggaagggtatgcaggcgtga

SEQ ID NO: 123816 - DNA, 450 bp, Enterobacter cloacae
atgaaagatattgatgtaggttttacgcacgttgcgtttgttgttagaaatttggaaaaaagtattgatttctatagccgttatgctggcatggaaatcgtacacaggcgagagcctgatcttccggaggtacgtaaagtcgcgtggttaagtgaccgaactcgccctttcgcacttgtccttgtccaggttgatgctgtgactgacacccctctgggtaatttcggtcacttgggagtagcttgttcaagcattgaagaaatcgacaataaggtagcgatggccagaatggaaggcatcttgcgaaaagaaccggttcaggcaggcgaaccggtaggttattatgtcttcttcgctgatcctgatggtaacacacttgaactttcttatggtcagaaagtcgggatcgaggctttccctcaggatgataaagtgcctgcatctcagtaa

SEQ ID NO: 123817 - DNA, 240 bp, Enterobacter cloacae
atgtcgccgcgcagctggttggctttgcggggtgatggaatgaagaagacctggttccaccacaccgactgcagcaccgaacaggccgacgaattggttaagcgttacaaagcgcgcggcgtgagagtagagcgcagccttaatcctgattacgtgacatggactgtcagtgctttccttcctacctcaaatacaccagcgcgcccggatagccgctggcgaaaccggatgtgggggtga

SEQ ID NO: 123818 - DNA, 369 bp, Enterobacter cloacae
gtgaacgtgaagacatatcaaatcactttgccctggccgccgagcaacaaccagtattaccggcacaaccgcgggcgtacgcatattagtgatgatggcgttgcgtaccgttatgcggtcgaaagtgtcattcgaagcgcccgacttaatatccgcacggccgcatcactcaaaatccgtattgaatgtcacatgcccgaccgccggcgccgcgatctggataacctgcagaaggcagcttttgacgctttaaccagggcggggttctggctggatgactgccaggttgtcgactatcgcgttgtgaaaatgcctgtcgttaagggcggaaaattagaactcaccattaccgagctggagaccgcatga

SEQ ID NO: 123819 - DNA, 195 bp, Enterobacter cloacae
atgatgagagaaggctattactggattcaacacaacggcagagtacaggttgcttactttagcaatggtgttacagaagaccttgagacgggacttacttttaatggtatttggcacctgacacagggtgacgacatctgcgataacggagaggccgaggtgattgaaggccctctgcctgtaccatttaaatga

SEQ ID NO: 123820 - DNA, 519 bp, Enterobacter cloacae
gtgaaaattaatccgggtattatcggcgttgtcattattgctggcctttcggtcgccctcgttaagagctgcttggaggccagtaatcttcaaagcgaaaacgacgttctgcgaagtgacaattctctgcaggggcaggttatcgctacccaggcattcaacttcaatcgattcaatcaggttgcagaacatgccaataggctcaactccctgattgacaccagcaccgaagaaaccgtaatcgaataccgggagattctccgccgtgaaaaaacctgtgatctgcctgttcctgctgacattgctggtgggctgctcaaatacgcgcaccgtttacgtgccagcgccatgcacaccgattccaatggacctgacacagccgatgatcgtgccgttgccaccagctccatgacgtactgccaggcagtattgtggattaagccgctattggctgtaattgaaaagggaaacaataatttcgctggcataaggcagatcgagttggaaagaaagaattag

SEQ ID NO: 123821 - DNA, 414 bp, Enterobacter cloacae
atgaaaggtaaagtgattatcgctgctatggctttggtttcgttcagcgctgttgctgaggaagggcagtatctttctgacttcgccagtgcaaaaagcacgtctaagagctactcccaactgataagtcaaaataaactacctgcatgggtaaaaagtggtggcacaagcacaccatcaaccgaagtaacagttgcgggcaaaaagtatattactctgtcagggtgtaaaccacacagttgcccagaacagaatattgctgttctctactcacctgataacggtgatatccatggtgtgttttctgatttcaatgcagaaaagaaccaagagacattgacctggttaaacgtggatccgattgattctgatgcgatgaaaaatgcgcttttcaatcgactgtacggcaattaa

SEQ ID NO: 123822 - DNA, 261 bp, Enterobacter cloacae
atgtataactacgatgacgtacagaaaatcaaggccaatctcgagtggatagtgcatcaagcctcttcccggtctcatttgcgcactgagcatgatcaattagtgatttccgatctaatggaactgattcagacatatgaaactcttcttgaccttgtaagcaaatttggtgcttccgtcttaaactcggaaatcatagcgggtctatcaatcacagaggaattcattgctaaagttaagcggaatgaaggtgcgatgtga

SEQ ID NO: 123823 - DNA, 273 bp, Enterobacter cloacae
gtggcagacctggcgccctatgggcttacgccggatgactacgacgatcaatacatcgacgtctggccagatgtatggccttcattcctggtgttccaggctgtcagtacgcagtggcgcacgggcatgggaggtgcatcaggtcttgattacaacgtgctgccctgggtaatgcgcctgcatcacgtcgaggacgaggcaaccgcgctttcggacatccgaatcatggagagcgccgcactaaaagttatgcataaagagagggcggaatga

SEQ ID NO: 123824 - DNA, 630 bp, Enterobacter cloacae
atggttgcattacttaatgctgagccggtccgcacaattcgattgtacggcgtgctaggtgccacattcgggcgtgaatatcgtttatcagtagcttcaccaaaagaggccatccgcgctctgagcgttatcgtgccgggctttgagcgtttcctgaataccagtaagcaacgaggtttaacttatgcggtattcagcgggaaacgaaacctcttaaacgatgagctcagtatggacaggagcacagaggaaatccgcatcgcgccggtgatcatcggcagtaagcgagccggggtgtttcagacaatcctcggggttgcccttgtcgctgttgctgcgttcgttacgggaggggccgcgatcgggattggtggtaccgctttcgctggtggatggggcgctgtggcggggattggggcatcaatggcgatcggcggcgtagtccagatgctttctccacagacaaccgggctcgccagtaagcaatctgcggataaccaagccagctacgcctttggtggagtaacaaacacgacagcccagggcaacccggtgccactcttgtacggccggcgccgtataggtggcgcgatcatctccgccggtatctatgttgaagatcagcagtaa

SEQ ID NO: 123825 - DNA, 717 bp, Enterobacter cloacae
atgaaaaaaacatctattcttttcctttgtacttccttattttcaggcatggctttggctgagaaccattacatacctctcctctataatttatctactatatttgatttcaatccagttaaaggagctgtcaaatccttagatactgatattgaagaaaatgggaaagtcacttataaaattgccatcagactggataagaatgggtgtgttgaaagcttagatcttgataacgttacgtctggtcataaaaccaatttaaaaaatagcaacggaagtcttgttggtcagagagatggtaagcctttctctatacagatcgatgaaaaatgtaatattttgagtaaaaatgaaaatggtgacgagttgcgatatgatctttactcgaatggtttaattaaagacacctattttttgggtaagaaaatatctgagcatttttatgatgatgattctaatttgatacgttctgagttttatggttctggaaagatcctatctaaaaacgaaatatcttatgttgataaagacaggaagcctcttgattataaaattataaacacatcagtttactcggaaggttatacagcaacgaattcttgtcattatagtgagatgcttgttcctgaaatatgtaaagcgacagtacagaacgctgggaatcctttgccgaaaccagtatttatgactgcaattacgaaagttgaattctactag

SEQ ID NO: 123826 - DNA, 3585 bp, Enterobacter cloacae
atggctacatctaccccgattagaggccgcaagggcggcagctccagttcccgaacccctaccgaacagcctgatgatctgcagtcagtagccaaggcgaaaatccttctcgcgttgggagagggggagtttgctggtggccttactgcgcgcgatatttttctcgatggcaccgcacttgagaacgcagatggttcacagaacttcagcggtgtggcgtgggagtttcggctaggaactcaggcacaaaaatacattcaagggattccgggtaccgaaaacgaaatcagcgtgggaactgaggtatcgagcgctacagcgtggacgcgcacgtttaccaatacgcagctttcagcggttcgcctgcgtctgaaatggccttcgcttttcaagcaggaggacgacggcgatctggtcggttactcggttaattatgcgattgacctgcagacggacggcggcacatggcagacggtactcgataccagcgtgactggcaaaacaacgtcaggttacgagcgcagccaccgtatcgatttacctcaggctggcagcacctggacaatccgactgcgtaagattacgtctgatgccaacagtgcgaagatcggcgacacgatgatgctgcagagctttactgaggtgattgacgccaagttacgctatccaaacacagcgctgctttatatcgaattcgattccagccaatttaacggctctatcccgcagatcgcctgcgagccccgcggccgcgttatccgcgttccggatacttatgaccccgaaacccgcacgtatagcggtacgtgggctgggacatttaaatgggcctggaccgataaccctgcatggattttctacgaccttgtggttagcgaccgtttcggacttggggatcgtcttacaacggccaacatagataaatggacgctttaccaggttgcgcagtattgtgatcaaatggtaccggatggcaaaggcggaagtggtaccgaaccacgttatacctgcaacgtatacattcaggaacgcaacgacgcttatacggtcctgcgtgattttgctgccatcttccgtgggatgacctactggggcgatgaccagattgtggcgctggcggacatgccgagagatgttgattttacatacacgcatgcgaacgttattgatggccgctttacctattccagcagcaccacaaagaaccgttacaccaatgcgctggtgtcctggtctgatcctgataacgcttattctgatgcgatggagcctgcttttgagcaggcgctggttgcgcgttatgggtttaatcagcttgagataactgcgatcggttgtacccgtcagtcggaagcgaaccggaaagggagatgggggatcctcaccaacaacaaagatcgcgttgttactttcaatgtaggggaagatggcaacattccgcagcctggctatgtaatcgctgtagcggaccgaaatctctccgggcgcgacctggggggccgtatctctgcggtgaatggtcgcgtgctgacgctggacagggcgccggatgcttcgtcagccgacaggatgattgtcaatcttccctcgggtgtttcacagtcacgcaccattcagtcgattaagggcaataaggtgaccgttacgaccgcttacagtgaaacgcctgtggctgaggccgtatgggtcattgagtctgatgagctctacgcacagcagtatcgcgttattacggtaactgataataacgacggcacgttcacaatcgtcggtgcaaatcacgatccggataaattcgatcgcattgataccggagcaatcattgaccagcggccggtgagcgtgatcccgccgggcaaccagtcgccgcctgccaacatcgtgatcagctcgttttctgtggtgcagcaaaatatcagcgtcgaaacggtgcgcgtgagctgggaccaggcgcagaacgctatcgcctatgaagcgcaatggcgccgcaacgacgggaactgggttaacgtgccgcgcagctccaccacttcattcgacgtcacggggatttatgccgggcgctacctggtgcgcgtgcgcgcaatcaacgccgctgaaatttcatccggatgggggtattcagaagagaaaacactgacgggtaaagtgggcaatccaccgaagccggtcggcttcattgcttctgaaaacgtggtgttcggtatcgagctgaactggggattcccgtcgaataccgacgacacgctgaagacggaaattcaatacagcctgaccggtaccgaagacgatgcgatgctgctggccgatctgccttacccgcagcgcaaatatcagcagatgggccttaaagcggggcagatattctggtaccgcgcgcagctggtggaccgcagcggcaacgaatcagggtacacagaatgggtgcgcgggcaggccagcatcgatgtttctgatatcaccgatgcaatccttgaggatatgaaaggctccgaaacgttcaaagatctgatcgagaacgcggtggacaccaacgaaaaaattgctggcatggctgacaacatcaaacaggccaacgatgaacttgagcagcaggcgaaggaaatcgcaaaaaatgcccaagacgtcgggaaagttcagaccagcgttaatgaactttcgagcacggtcggtgaagtgtcgtcttccctctcagagcttgagcagaccgtagcaacggcagataccgctcttggccagcgtatagataacatcagcgtgtccatggttggtatggccggaggtgtaaaaaactcagccattgccattatccagagcggactggcgcaggtggccgcacgcaaaacgttgtcagctacggtcgcggggaacagcgcgcagctggctcgtattgatgaggtaatcgtcaacgagaaggaggcaacagcgcgctctctgctgagcctacagacggatgttaacggcaacaaggcatccatcaacagcctgaaccagacattctccgattaccagcaggctatggcaacgcaggtaaacagcattacggcgaccgttaatggtcacacttcagcgataaccactaacgctcaggccattgccaacgtcaacggtgacctgaaggcgatgtacagcatcaaagtcgggatgtccagtaatgggcagtattacgccgcagggatggggattggcgttgagaatacgccatctgggatgcagtcacaggttatcttcctggctgaccgcttcgccgtgactaccatggccggagcacaggtcacacttccgttcgttatccagaatggacaaacctttattcggaatactgtgatcggtgaagggactatcgacaataccaaaatcggcagctacatccagtcgacaacctgggacggcaccgggaacgtaggctggcacatcaacaaatcaggttacgcgacgttcaacaacgtgaccgttcgcggctcgatttacgccacaaatggtaatttttctttcaatggctccggcaacacaacggtgatcaatggcaacggtataaccgttaacattcccggtggtggccgcatcgtacttgggagctggtag

SEQ ID NO: 123827 - DNA, 972 bp, Enterobacter cloacae
atgccttcaggacttctgattgatcttaatgatggcggtaagccaatggaaatcacagcaggattgcgctgcccgtcttatggcggcgcaataacgggcggtgtgggaaagagtactacggccaccgtttcggggtatgttgcaggttcaactgtgctgttcataccttctgaaacagtaataagtgattacgggatattcatgctgcaaagtgtgtccatatccggcgcaacggtgacgcagaaatggagtggtgcatccagcccaggtcttcccaacccggcgcaagtggccttctccggtacgatctggcagatacttcccgtcagtcagtcttcaaatatcggattgctcattgccagcagcacggattttacgtcaattacaaccgcatcaaacgtgggtatgtgcatctataaggcgagggttactgtcgggacatccggatggaatacgccagcaattgccgggtttgatcgcagtaaatatctcgtgtgctgcaaatggaacagcccgtatacgctggactataacggcagccggttaatattcctgaatgatggttctaacaccaatgaccagcctatgaccggaacggtggatgtcgttatttttgcaggaggggtggctccggtaccggcgaatcctggtctcaatatttataacgcggcagggcaatgtacgttctcgacagctaaaaggccgtttgtgtttacggggaataacctaactccctcaacaacagcacagactgttcccggcggaggctacgttccggtggggcgctttgggctgaggatacccagttacagctcgggccagcgtatcaaccattatcactatgggctggttatgcagaacggaaccctgcgggtcggcaggggagcttatgttggctgggccgatcgccagctggcgaaccaaggtgttactcctatctcattaccagtaatacctgacatgtacgtttaa

SEQ ID NO: 123828 - DNA, 1179 bp, Enterobacter cloacae
atgctttataacactggcaccattgccattaacggaaataccgcaaccggcaccggcacaaactggacggcacctgccagccaggttcgcgctggccagacgattattgtcatgtctaacccggtccagatgttccagatttcatccgtgaacagcgcaacgtcccttacggtaacgcctgctgcatcaccggcgctgagcggccagaagtacggcattctggtatcagacaatatctcggtcgacggtctggcgcaggcgatgtcacagctcatcaaagagtatgacgagaatattggcgcatgggagacgtttgctactacctctgctaaccaaactatcaccgttaccatcaacggagcttccgtgaatattccgggcattggtgcacttgccagaaagggggcaaacagcgatatcacggagctgaaaggactcactactgcgctttctattgcgcagggcgggaccggggcaacgaacgcagcagacgttcgcacaaacctcggtttgggaacatcagcaacaaaggacgtcggaatgagctcagggaacgtcttacaggtaggggcttttggattgccaactggtgatgccagagcctttaaaacagacacggctgttgcccctgatggaacaaacttcgacagtctgacagagccaggaacctttcgtttgctcatagacatggctaaatctacctctgggccgatatcaagttggtatggttatgtccaaaattacgtccgtattgctggtgttgccatgacacaattttgcttgccatacgccagcagaaccgatgcgggtagattttttttcagggggtataacaccgatgtatggagtccctggaaggagatcacgacttcagcgatatctgacagagctatgaaaaacatcggcgatgacctcgatctggaagaggcgctgctgaacatctgccggatggagttcaagcacttcacttttaaggatgatgaaacgcagaccccacgacgcggggtgatatcccagcagattgaaacgattgatcccgaatacgttaaagaaataggcggcatactgcatcttgatcagacgccaatgctgctcgatgcgctggctgcaatcaaggccctgacaatccgtgtcagggtattggaagaacaggctggcattgaggtttcagctcagtaa

SEQ ID NO: 123829 - DNA, 672 bp, Enterobacter cloacae
ttggctgtgacgctatctcccaaaccgacgttttatagattgctctcaagcggcctggccgataacgtcacctgttttttttgcagaaataattgggtgaaaaatatgcaaattggatatgtaagggtgtcaacaaatgaccaaaatacggatcttcagcggcaagcgctcgaacgcgcaggatgtgaacaaattttcgaagaaaaaatgagcggaacagtggctaaccggccagcactgaaaaagcttcttaagacgctgaaagagggagatacgcttgttgtctggaagcttgatcgccttgggcgaagcatgaggaacttggtactgatggtcgacgaactacggcagcgcgggatccactttaagagcctcacggacagtatcgatacatccagcccgatggggcgcttcatctttcatatcatgtcagccctggcggaaatggagagggagttgattgtggagcgcacccgggcaggtctggctgcagctcgtgagaaagggcgtatcggtggcaggcgtccgaaacttacccaggaacaatgggaccaggcgggcagactgattgcgaacggcgtggacaggaagcaggtggcgatcatctacgatgtagctgtatgcacactgtataaaaaattccccgtttcaaaatctacactgtctcattga

SEQ ID NO: 123830 - DNA, 1725 bp, Enterobacter cloacae
atgattgaacctttggggctaattaagaattttgcacgcgttcgcacgcgcatattcgtgacgattgcgtttttctcatcggtcataaatatactgatgctggcaccatctatttatatgttgcaggtttacgatcgcgcgctgtcatccgggaataccacaacgctttttatgttgacgctgctggtgttatttatgtttgccgtcatggcactccttgattacgcgcgtggcatcgtcatcatccgattgggtaatcaatttgataatgcgctttcgcctgcactctataccgctgcatgtgaaagtaatctcgttaagcacagcccgaatgccgggcaggctatcagtgacctcaccgttatacgccagtttgttaccggcccggcgttatttgcggtttttgattccatttggtttcccgtttacctcggcgttatttttctttttaacacctggctcggggtgttctcgctttcgggcgcatgtctgctgctggccctggcgtttattaacgaaaaaacgacgcgtcagcttttgaatgaagcgggggggtatgccttgatctcaaatcaccaggctaacagctccttacaatccgctgagacgctgcatgccctggggatgactgataacgttaaggcgcgctggtggcgcggacatcaacagttcgtttattgccagagtgcggccagtgaacgcgctgtattgatgtctgccgtcaccaaaaccgtacgcatggcgcttcagtccctgatgttggggctgggctgttggctggcgattctgggagatatctcgccgggcatgatgatcgcgggctcaattttgctcggaagagcgctgtcaccggtggaacaactcatcagcgtggcgaaaggctaccggtcagctcgtctggcatgggaacgcgtggttcgtctgacgggagactttcccccggcgcaggagagcattcgcctgccagctgcgcagggagtgctcacggtggagaatgtcaccgttttccctccgggaaacccccggcaacccatactgcaaaacatcactctacgggtaaacccgggtgaggtgctgggaattgtgggagccagtgcatcggggaaatcctgtctcgccagagtgttgtgcggtgtctggcctgccggagagggggacgtcaggctggatggggcggatatttatcagtggcagaagcagacgccgggtcccggaatcggctacttgccgcaggacgttacgctttttacgggaaccctcgctgaaaatattgcccagtttggtgagattgattcaacgcaactgatcgccacggcaaagctggccgggatccacgacatgattttgcgtatgcctgacgggtataacaccctgactggcgagcagggtatggccctgtcgggtgggcaaaaacagcgtattggcctggcccgggcgctgtacggcaatccggcactggtgatccttgatgagcccaacgctcacctcgatgaatcgggtgagcaggctttgcagcaggttatccggcagctccggcagcagaaaaaaagcgtcgtcatcatttctcatcgtccgggaatattgccgctgaccagccatttgctcgtcctcgaaggcggaaaaaccaagctttatggcccaacggcacaactcttacagcagtcagctcgcccggtaaataagacacacagcgtccctgctgaacaaggaagagtccatgtataa

SEQ ID NO: 123831 - DNA, 1314 bp, Enterobacter cloacae
atgtataatagcgatgcgcagaagacgccccttgttgacgtcgttccgtttgtccgccttggctgggtagtgttgctggcaggtctgggatctttcttgctctgggcggcactggcgccgctggataaaggtgttgtttccaccggaaccgtggtggtggacggctaccgtaaggccgttcaggcacccacaggcggtgtggtgacaagcatcgccgtcaaagaggggcagacggtacataaaggcgacctgctggtgctgctcagccagcaatcgacgctcgcccaactctccgctgcgcgccagcattatctgacgtcgctcattgctgaaagccgcctgcagtctgagctggcgggcatgcaaacgctgaccttaccccctgagacagaagacgaagccctgcgggatgcgatcaagcccattgtggctcagcaacgccagcttatgcatgcccggcaggaggcgctgaaaaatgcccaggaaaacgacgctcaggccattgcagggctggctcgccagcgcgattcgcttgccagaacctgcgagacgaaagcgcaagggctcgcactgttaaatcgtcaactcaaagacctgaaaccgctaatggaagagggctatttcccccgtaaccgctatctcgatatccaggtgcaatcggcgtctctggcgggcgaggtgggtgaaacccgcagcaaaatcgtagagttagggaatcagatcgcccagctcaaacgcggcatgcggcagcggttgattgacaaccggaaagatattgaaacgcaaattgaccagcttcacctgcaggtcagcgagagcaaaaaacagctgacgctctccggtgtcgatctctccctgacccgcgttgtcgcaccgcaggatggtgtggtaatgaacctcgcgcttgccagcgacagcgcggtggtgagcgcgggcgagcagctactggaaattgtcccgcaggcctcccccctgattatcgactcgcaaattgacgtcgccctgatcgataaagtccataagggcatgcccgttaccctgatgtttaccgccttcaaccagcaaagcacgccgaaaatcccggcccaggtatcgctggtgtcagcggatcgccagaccgatcccaccacccagcagccgtactacaagattcagatcgccgttacgccggaggggatgaaaaagctgaagagcgaggaggttaaaccgggtatgccagtagaggtctttattaaagccggagagcgctcgctgttgagctatctgctgaaacccattgtggatcgtgcatcgcggtcgttcatcgaggagtaa

SEQ ID NO: 123832 - DNA, 1359 bp, Enterobacter cloacae
atgcttaccgcaaaattcatacctgttgtgtatctgctcgcgctgatgacgcccttttcagcaggtgcgctgacactgactcagggctggttcatggcgctggacaacgatccgcaataccgcgctgccgtgaaggatcagcttgccggagaagagtacatccccatcggtcgcgccgggttactgccaaaagtcagcgttagctatcaacgcgcaccgcgtaactggcagcggcagcagtaccagcagacaaatttgttgggggagcgttctgaggtggtgcagcatcaacaatatgacagttattcgggatcggttaccgttgttcagccgctgtttgattacgatgcctatgcggggtatcgcatcggcattatcaaaaaaatgcagtctgatgaacgctaccgaagcagtctgattgatctgcaaaaccgcttcattaccgcctggctggatcttaccgaggcgcatcaacggctccagcttgcggctctgcatcgtcaggggctggaagagcagaaaaagcaggctcagagacagttcgaggccggtgagggcgcagtaacggatgtcaccgagaccgcctctgcgctcagcctggcgattgcggatgaggtggaggcgcgcgatacgctggatacggctaacgttgcgttatcagcgatcgtgggcgtggatctctcgcagacggcagcgctaccgatactcggtgaaaagccgcttaagctgccgctggcatcaggagactatcgatactgggaacaaaaggcggctgcgcataatcccgatattctttctgccggacatagcgtggaagaaaaacgctatgaaattgaacgcagccgcgctggcgcgcttccccgggtacagctttacgcgatgcattcggagaacgattcaagcaacgacaataccattcatcagaaatatcgtaccgacagcataggcctgcgcgtcagcatggatctcttttccgggggcggcgtttcagcgtccctgcgtcaggcagcggcccgctatgagcaggcaaaatatcttcacgatgcacagcggctggcgacctacagcgaaattaaaaaatccttaaataaatgcctccatgcgtcagagcgccttgctgcctatgcttccgcggtggacgccgccaggcgacagattgaagcgacgaaaaaaagcattcaggctggtcagcgcatgaatatcgatttattaaatgcagaacaatctttctataaaaccaaagttgagcttactgcagaaaaacatgctgtcattaaggcatgggtcagtttgctcgcgcagacgggcgaaataaacaatgataacgttatgttacttgattcgtattttgctcaatga

SEQ ID NO: 123833 - DNA, 1734 bp, Enterobacter cloacae
atgcctgtattcgattatcagggcgagaaaaacacgcagcttattaaggatgcactgaccattgaaagtatcaattttggtgcagccacgtatgctgattatacctatacagaagaaaatggctggaaagtattagacgggacaacgcttaactacagcggctgtactaatccctatggtgctttttatggcgaaagtcttcttgaaaccagcgccgaatgcaacgttatgggaaaatatgacgccaatggcaagctggtcaatataggcattagcttctggggaacgggcacttacgccagcgcgccttcacttcagcataccatcaataccgcgatggataccgtcagcgacgtattatctgcactggtcgacggctatgcggataactatgttctcaacgcgtataaaaacctcatgagttcggtggccgcgtttgccacggcaaatggcctgaccggtaatgacatcatcattaccggacatagtcttggcggactggctgttaacagcatggcaaccctgtccgcacagggccagtggggtggtttctttgaagacgcaagctacgtcgcattcgcctctccgactcaaaacctggccgatgacaaagtgcttaatattggttatgagaacgatccggtatttcgtgtgttaacgggtcatagcttgacgctggacagtttatttaaccacgacacgccgcttgaaacctgcaccaacaacatcgtctcctttaatgattactatgccggcctgaccaacgattgtaagatcttttcgatcgcgaatatggcgtcctgggccgggcactccggtcagggctatacggacggtgcattacgaattatggattctgaaatctatgatttcacccatcaaaattccaatatcattgtttctaatctttctgaagcataccgttccacgacctgggtttcggatctcaataaatccgtaacgcatgtggggtcgacatttattattggtaccgaaacaaatgatttattacaaggcgggaagggtaacgattatctctgcggtggtggcggagatgacagttttaaagatcacagcggctacaacgttatttatggcggcgcagggaccaacacctacgtaacggaatgtcatattgccgattttacgtttagccacgatgcagaagggacgctgtactttaaatattccaccggcgatattacacgggcggaagatatccattacgttaacgcagaccacaccttgttcagcctgtttggtattaacatcaaccagaacgcgacatggcaggtcacggattatggcttagaaggtgacagtggctcaatcgcgtatgcgaaaagctattatgccgatacagagaacagcttcactatctcgaccgccagtaatgacagctggttctattcaggagccaatgacagtgagatcagcgtaaacgggaacaataacaatgtggtttccgggtatgccgacgacgccatccaccttaacggcagcgaaaacacgcttctcttctacggtgattttggtcatgacacggtctataacctctccgccagcgacagcctgatctttatggctaaccagaacattgccgataatgacagctatctcaaccacctgtcgtttgaaggtgataatgccttactcacctacggcgacagcagcgtcacgctggtcggtgtgaataccgatatgctttcgcagatgcatattgcggtagcatga

SEQ ID NO: 123834 - DNA, 978 bp, Enterobacter cloacae
atggctgaatataaagacaatttactcggtgaggctaacagctttctcgaagtactggagcaggtttcacgcctcgcccctctcaacaaaccggtgctgattatcggtgagcgcggcacgggcaaggagctgatcgccaaccgactccactatctgtccgggcgctgggatggtccttttatttcgcttaactgcgccgcgctgaatgagaacctgctggataccgagctgttcggccatgaagcgggagcctttaccggggcgcaaaagcgccaccctggccgtttcgagcgtgccgacggcggcaccctgttcctcgacgagctggccaccgcgccaatgctggtacaggaaaaattgttgcgcgtcattgaatatggcgagctggaacgcgtcggcggcagccagccgctacaggttaacgtgcgtctggtctgtgcgacaaatgccaacctgccggaaatggtggctgaggataaatttcgcgccgacctgctcgaccgcctcgcttttgacgtcgtccagcttccaccgctgcgtgaacggcgcagcgatattatgctgctggcggaacagtttgccattcagatgtgccgtgagctgggtctgccgctctttccgggctttagcgataatgcccgggagacgctgcttaactatccctggccggggaatattcgcgagctgaagaacgtcgtcgaacgctctgtctaccgtcacggcagcagcgaaacggaactggacaacattattctcgatccttttcagcgtaacgcgccatctgttaccgcgccggcgcgttcgaacgatgggccctcactcccgctcgatctgcgccagtttcagcataagcaggaacaacagctactggagcagagccttaggaaggcgaaatataaccagaaaggggcagctgaactgttggggctgacctaccaccagttaagagcattgctcaaaaagcaccagatgcgctga

SEQ ID NO: 123835 - DNA, 1686 bp, Enterobacter cloacae
gtgaacgataaaattaaaaatttaatcaatcttgtttacggcgaatcgttttctgaggcgcaccgtgaaacactgtcagggaaaatctccagagctgctgctgttattaccgaaaagcgtaaagccggttgggatgaaaaagatatcgtcctgataacctatgccgatcagttctacaataaaggggagaaagcgctgcctgtttttacccgtttttataacaaatggctttctcgttcattttctcatgtgcatcttttacctttttacccgtggtcctctgatgatggtttttccgttatcgattaccatgacgttgcgcctgaaacgggagcatggcaagacgttgctgaattaaaacaatatgccagtttaatgttcgattttgtttgcaaccatatgtcagcgaaaagccaatggttcgctcattatcttgcgcaaaaaccgggctatgaagatttctttatttccgtggatccgcaaactgatttatctgctgtgacacggcctcgcgcattgcctctcctgacaccttttacacttgatgatggaagcgttcggcatctgtggacgaccttcagcgatgatcagattgacctcaatttcgcctctcctgaggtgttgattgcaatggtggatgtgcttctccattacctgatggaaggggcgcgctatatccgccttgatgcggttggctttatgtggaagatccccggaacaagctgcatccatcttgaacaaacgcaccgtttgattcagctcttccgcgccattacggacgctgtggcaccgggtacggtgatcatcactgagaccaatgtcccgcataaagacaacgtttcttactttggtgacggcaagaatgaagcccagatggtgtatcagttctccttgccaccactggttctgcatgccgttcatcgtcaggatgtacgggcactttgtcagtgggccacatcgctggaactgccgtcaaagcaaaccacctggtttaactttttggcctcgcacgacgggatcggacttaatccgttacgcggaattttaccggaatcggaaattctgtcgctggtggaaacactccagcaggaaggcgcgctggttaactggaaaaataaccctgacggtacgcgcagcccgtatgaaatcaatgtaacctatctggatgcattaagtgctaagaaggatgaagatactctgcgcatcgcccgttttattctggctcatgccgttctgttgagtttcccgggtgtgcctgcaatctatattcagagtattattggctcccgtaatgattatgagggtgtggagcggttagggtataatagagcaataaaccgaaagaaatatcagtccggtgaaattgatcataaactcgacgatattaatagccttcgtcataaagtttattctggattgagtgcgctaatttcgttacgccgtcaggaaaaagcgttccacccggacagtcaggcgcgctttgaaacatccggggagcatgttttgaaaatagttcgcattgccgataacggcgagcgaataacagcgctctttaatttcagtaatgatattcaacacctcccttcaaatagtcagacaggaaaagatttaataaccgggatcaatattaacgatacgacgttgaccctaaatccatggcaggttatgtggattaaagaaaactaa

SEQ ID NO: 123836 - DNA, 2280 bp, Enterobacter cloacae
atgctgaacctgtctgtattaaacgatccggttttttgccctcacagcctcaataaatacgcgtcaattatggcctgcggcaacggctatatgggcatacgtgcggcgcatgaggaaaactacacgcagcagacccggggaatgtatcttgccgggctttatcatcgtgctggtcgtaatgagaccaacgagctgatcaacgtgcctgacatcatcggcatggatatcgaactggacggcatcaatttcaccttgctgtcaggggagattattgactggcagcgggagctggattttgccaatggcgaactgcgtcgtcgcgtagtgtggcgctcgccagacggaaagcgctaccgtgtggaaagccgccgttttgtctcactggatcaactgccgttggtggcaatgcagctctccgtcactccgctggatgccgcatcagacgttatgctgagcacggggattgatgcgacgcaaaccaacagcggccgtcagcatctggatgaaatctcggtcagagtctttgaccaatactacatgcagggcgtgtatgaaacgcaggatcgtgctgcggatgtggtgatatcggcatgctgtcgtctctcaaccaccagcgacagctgctttaccgcgaaaaaccggcgtatcacggttcatcacgccgtgaaggtcgctcagggtgacactgtcacgcttgagaagctggtctgggtgacgcatcgcagcgataaagcgctttcacaggacacgtttgcccgcaatgctctggctgagctcaaaacctgcgcgacaagagggtatgctgcgttagtcgaaagcgcggcgtgcgcctggaaaaaggtctggcatgactgccgggtggacgttacgtcgaccgaacatcaggatcagctggcgctggattacgcggtctggcacctcacggccatgacgcctgcccatgatgaacggagcagtattgcggccaagggcctgaccggggagggctataaaggccacgtgttctgggacaccgaaattttcctgctgcctttccatctctttacccgaccagatgttgcccgtcgtctgctgcgctaccggtggcttaacctgccgggggcccgggaaaaagcacgccggaacggctggccaggcgccttgttcccctgggagagtgccgcgagcggtcaggaagagacgccggaattcgcagcgatcaacatccgcacgggcgttcgtcagaaagtggcctccgcgctggctgaacatcatatcgtggcggatatcgcgtgggccattgtcgcctactggcaggcaacgcacgatgatgcctttatgcgcaatgaaggcctgacgctgctcatggaaaccgcgttgttctggatgggacgcgcgacggaagttggcgaccgtctggagatccatgacgtgatcgggccggatgaatacacggagcacgtaaataacaacgcctacaccaactatctggcgtggcacaacgtcgccagtgcctgccggtttatgtcgatgtttgagcgtgaagatgcgcgttttacggaaaatgcgcaacggttcctgtcgcgcttatggctgcccgaggctaacgccgacggggtcataccgcaggatgacaccttcatgtccaaaccagcgatcgatctgagccgctataaagccaaagcgggcaagcagaccattctgctggattactcgcgcgctgaagttaacgagatgcagatcctcaaacaggccgacgtggtaatgcttaattacctgttgccggaacgctttacgccgcagcagtgcgcggccaacctggcattctatgagccgcgcactattcatgactcatccctgagcaaagccatccacggcattgtgaacgcgcgctgtggtgatacagaaggggcttacgccttctggcgtgatggcattgctatcgatttgggcgacgatccgcacagcagtgatgacggtattcatgctgccgcaacgggtgcgatctggtcaggcgttattcagggatttgccgggctgcagatcgtggacggggagttacatctggcacccaggatgcctgcgcactggcaaaggctggcgtttccgctgcgttggcagaatgcgcagttgcacttcatcgttacgaaagaggcacttacggtgaccagttctgctcccgtcacgctaacgctctggggtaaaaccctccagctttcgggacggcaggtcttgtcttgcaaggattttcttacgtctgttgctgggaccgctaccacggaggggagagatgaaccttaa

SEQ ID NO: 123837 - DNA, 678 bp, Enterobacter cloacae
atgaaccttaatgccgttgtattcgatctggatggggtgatcaccgacaccgctcatctgcacttcctggcctggcgcgctgtcgcgaaggaggtcgggatcaccattgatgaagccttcaatgaaacgctgaaagggattagccgcatggactccctgcagcggatcctgcgtcacggtggcaaagaagacgcgttcgatgaacagcagcgcctggcgcttgcgcgtaaaaaaaacgcgctctatgtccagtcgctggcttcgcttacgcaagcgtcactgctcccgggcattcgtgaggtgctggccgacatacgcgcggcaaacgtcaaaattgggctggcatctgtttcacttaacgctcccggcattttgcaggcgctggggatccacagggcgtttgatttctgtgccgatgcgtcccgtattgcccgctccaaaccggacccggaaatcttccttgccgcctgcgcgggtcttaacgtccgcccggaggaagctatcgggattgaggatgccgcctccggcgttgaggcgatcaacgccgcagggatgttgtcggtgggaataggggcaggcctcaaccatgcgggacttcaacttcattcaacgcgggagctgacctggaaatgcctgacagatttctgggcttcccggacggtactgataaggaattaa

SEQ ID NO: 123838 - DNA, 1011 bp, Enterobacter cloacae
atgtcacccaccatctatgatattgcgcgcgttgctggtgtttctaaatcaaccgtgtccagagtgttgaataaacaaaccaatatttctcctgaagcgcgggagaaagtgctgaaggcgattgaagagctaaattatcaaccaaataaacttgcccgcgccctgacctcatctggctttgacgccattatggtgatttccacccgctcaacaaaaaccactgccggtaatccttttttctccgacgtattgcacgccataaccgccaaggcggaacaggaaggatttgatgttattttgcaaacgtcaaagagcagtgaagatgacctgctaaaatgcgaaagcaaaataaagcagaaaatgattaaaggggtcattatgctgagttcgcccgccaatgaatcctttttctctcggctcgatacctacggtgtgccggtggtcgtaatcggtaaagtcgaaggcgactttcagaatatttactccgtcgataccgacaattttcgtgacagcgagatgctgaccgacacgtttattaaaaacgggcggaaaaaaattgcctgtctgcatgcgccactcgattatcacgtgtctattgatcgtcttgcgggttataaagccagcctggaaaaggcgaatattgctgttaacccgggctggatcattgatggcggttatacccatgagagcgcactttcagcggccattaagttgttgtcttcttccaccccaccggatgcggttttcgccaccgacagcatgaaattgctgagtctttatcgcgctgcggatgagttaaatttgatgctacctgagcaggttgccgtggcgggttacagcgacccgatgctctccctgattctgaggcctgcgccagctggatttgatattcccacccgcaagctgggcgaagagagctgcgacctgcttttcaggcgtatctccggtaaacccgccccgcataaggtgctgattgaaacccacttttcgttcgctgattctcttcgctaa

SEQ ID NO: 123839 - DNA, 1341 bp, Enterobacter cloacae
atgaaaacggaacaaccgttatggggcaggggccagatggtctctccccagcacttccagcaacaggccgcgtatgcggcctggtctgcggaatgcatcgcccggttaggcctctcccatccctggggagtgattgatgccactttcgaaccggatgcactgaaactgggccgcctgcaggctcgtcatctgcacattcgtttccctgacgggacgcttatcgacactgataatgctgacgatctgccaccggtgctggcgcttgagagtggatcacaggatgcggtggtggtgctggccctccccctgctgcgggcgaatggcggcaactgtcttacacctgatgcggtggccgaacgccctgttcgctatcgccagcgctggcgggatatccgcaacgcttttggggacgacacccgccagattgcggtcatgaaacctgagctgacgctgcggtttacctgtcaggacaacagcgattatctgacctgcccggttgcccgcctgcagcaggattcgcagggagcatggttactggatgagacgtttcttccgccactgctggctctgcagggcagtcgctggctgatgacccaactggaacagctgatgagccagctacgtgtacgcctgagtcggctgatggccatgcgccgggaaagtaatgagcggatggccgattttgccgtggcggatgtgtccctgttctggctgctcaatgccctgaacagcgcagaacccgtgctcggacagtttcagcgccacccgcaaagcccgccggagcgtctgtatccggaactggcacgcctggcgggcagtctgctgactttctcgctggagcatcaggtgagtgcgatcccggtctggcagcacgagcaacagaataacgtattcccgccgctgtttgatttactgggtgacctgctggaagccagcctgccgtcgcgggtggtggcgattgagcttgagcatgatgcccggcttcacttctggcaggcccgtctgcatgacccacgtctgcgtgaaggggctgattactacctctcggtgcgttcaacggtaccggtggcacaactgcaggagcagttcccgcgccagtgcaaggtcggcagccccgatcatgtcagaagtatcgtcaattcatcgcgggtcggcgtgcctctgacgccgctgcgccatgtaccggcagccattccgttacgtctggaaaatcagtatttcagtcttgatgtctctcatcctcaggccactgaaatgcttcagggtgggacctgcatgttttacgttccgggcatgctcggcgagcctgaacttgaactctttgcggtgctgagaacatga

SEQ ID NO: 123840 - DNA, 2076 bp, Enterobacter cloacae
atgattattagtcctccatatttaagaccacattcaaagaatgaaagtgatgatgtatgggtaagtaaaatgatgcctgttgatgttaatcgtggatttccgattaatggaaaagaatcttggcacggtggtgtacatataaaacataatgactcgagtcatccaccggaaatgttacgtgcaatagctgatggaactattacatttattagaaagccagatgaaaaagacaagacgaagatagagccattgaattacaatggctatactgacaacggttgcattgttataaagcatgatgctgaaattggttcaggagaaaacgggaaaattactttttactcaatgtatatgcatttgaactttatttccaatgctctttctgtagggggaaagattgcgcgaaaagattcattaggcacaaccggtatgatcgatggtgtgaatgctacgcatatacaaatatactgtgaagacccgtatatagaaaaaatcacaggaagatcacagcctcaccttgatacatctaaaaatggaagggatgatgtgtactttggtgatgttcatttttacatcccaccaggaacttgtttctataatggaacatatataaatggattggctgtagttgaagaaagttcgtcattatatacttctaaatccgaattatttgtaaccatcgaaaccaaaggaaatgaacgtattataaccaccaggcagaagggcatagtcgatggccaatttgatatagttggtgagccgatgaatgatgcaagtggtttgaatgaaaataatatgtatgaatatgctctgaaaggatataaagactcaatctcatcagggtacgaattgctccgattcggtcgtgttttaaactcagaaagtaaacctctttctaaaaaaagctatgcttattggcttaaggttaattatcctggcggaagtggtttcatcaatgtcgcatctgatttcataaaaaaatatagcgatgcagattttcctcattgggtgggctgggttttagtgtccgatgattcagacatgaatagccagtgcaattcacatattgtgctaaattcaaaagatgaatacaaaagtcgattaatatgtagatttccctttgaatgggatcaaaacacattagaacaacgcctgggttggttacaggaaaaaaatgaaacaattgatcctccattggatacaaattcatgggggaaattactagaccatgcacgagctctttgcataagtggagatattccaaaaaatagggtgtggcattttgaaccaacagcatttattaagttattcagaaaatgcaattggctttctgctgaagaattagaaaaaatctatccagataacctctatcctgttagagcattagaaaaaattggggtaactccgagtgaagtcagagagaagtacagaacaatcattaatcgctgtcttgaaaaatacttcgtaataacgccaacaagaaaatcacatttttttggacaaggtgcaattgaatcaggaatgttatctctaatgattgaaggggctgctagcttttcaagaaatcctctccattccagttttgcttccgaagtagatgggtattacaacccaccttctggtagttaccttgactatctgaacggaaggcttggaaacatagaggctggcgatggtccgaaatttagaggcagaggaatgaaacaacttactggccgcgaaaattatagtaagtattggggctacagagggtggattagtttagataaattccccatgagttataaagggtttataaaccaatggtggaagcctgataatttaagtaaagcaccgtctattgataaccctcaacttctttcaatttccccatataactgcattgatgctggagcatggtactggattgcaggatcgcgttctgctggatttcgcccaataaatgcaaaaataattgaatggaatgtttcatatgaacactctaaggttgtaacctatgccattaatggtggttataatggcgaagaactaagatggaaacaaacaactagaatctcacgtatattgatggactaa

SEQ ID NO: 123841 - DNA, 474 bp, Enterobacter cloacae
atgaaactaattatcacaacaatttttggtgtcttgatttccttgaatgcatatgcattagatattacattaaatggtaatgattcaataactatcaatatgaataaccatatcaaaaaattggattttgatactgtcattaatggttatgttgttaaatgcagtggagagaagctaataatttggggaaagcctaaagtaatcaacgaaggtaacccacaggatacaaatgtaattatagtagatctggttcatgggtacacaaggattgaaaagggtgtaggcgaaggtgtctttcatattgattttataaagaataaaagctatgcctacgttgaaactaaccaaggtttatttttaaatctaataaacggaagactgagttcagcaagcccagaatttgaccctacagatgaaagtaactttgagcagtgtaagaagaatagttcatgggaattcaatagatatccttag

SEQ ID NO: 123842 - DNA, 1209 bp, Enterobacter cloacae
atgtcttattccctaaagcatcttcctgaatgttatccacgaccggccacaccaaaaatatcccgctggtttgctgtcctggcggcaatgctggtcatcaatgtgatcctcatgcgaatattcggacgctacatcgataccaggcacttctggttgtttgctataggctcgcctgttgttgtgtggatttttagtttcggttttcgtatgtggctctggtcattacaggacagtaaagcgagtagttttgacaggcgccgggaacagtggattttgcgtgagatccgcagggcacgccgtgcgcttcagatactgaatacaacatttataactgcccatcaggaagacgaacagcgttctgtcgctgttgagatgctcaataatcacagcattataatttctcagcccgactgggaaggtgaaaaaagcaagaggctgagccgtattaccacagagccggaagatactcctgaattggtcgtctcacgtctgttctctgaactcattgctgatctgccagttgaccagtttccggaaaacgcctcgcttgttgtcatcctcgatgtttcgtcatcactgccattccttgctgtcagagatatctggcaggaagcctggcacgagagtggcataacctgtgctgttgagtacatagacagtaatggaccggggatagtcagccactggctggaccaccgtattaaagatgaggcgatgcttttgattatcggtctccagattgatccggtggtttcaaacaatactgctgaagcagccgttgcgctgcttcttggtaaccgtctgacacaggaggcactcgaacctctcgcgttgttacaccggccagacgcttcctctcctggcgaactgagcgaggggatgaacatggccgcctggaacgtcccgctcaaagaaaatatcgttaaaaatttatggcttgccgggctgacgggtgggcagcatgcagaagtgatcgcgtgccagaatgcgcatcctgcgcagtctgtagcgaacgaagccgttatttcactcgacaggtctatgggacatgccggtgccgcagccccctggctgaccatcgcggccgccactgaaatcgcccgacagacacagtccccacagatgattatctgcggtgatacgacacagaatgtgctgtggagcacgctcattaccccgattgcttcccgacaggagatggttccgtga

SEQ ID NO: 123843 - DNA, 1266 bp, Enterobacter cloacae
atgccagcaaaaggtttttatctggttcagggtgacaaaacgacctgcggcggaagaattatcacgggcgcagaagatcacacactgtttggtaaacctgttgccagggagcaggacggcgtgacctgtggtaaatttgtagggctttacaaggtagccggtggcattgataacgataccattcacggcaggcgaatggccggaacactcgacagctacagttcctgtccgtgtaaggcgaagtttattccgtcgatgatggatgatacgtacgagaagagtagcggagcatctacagcagaatcagcagcaggttttgtggcgccggggcaaacttccccggaattgccctcttatctcactggtgaacaaaagccaacgggatttgtatctgattaccctgtgttaaaaaacacacatgatttacctgatgaaaagttaagaatgatgtttaagcaaaataaccaagacatcatgttattaactttacccgaagtgtttgatatattgtcatcctggggggcgtggaaatacggctggattgcgataactgaaagcacaccaggtcaaataattgttaactatggtacaaatataaaggatgtcgtcacaacatccatgttggtggggcagttaggtagttttgggataaaggccacggtatatgtgaatcataaaggcacagaattgattaaaattagtggctaccctggagttaggaaaatattaaatgcgccagttttttccgcaaagaaccctaaggttgtagatataggcataggcaagtatggtctgaagaaatcgatcatagaaggtgcaagattaaccttttatgtggctgcagcatatcgcactatcgattacataatgaatgatgaaacttccttcgctgaatttattggtagtctggcaacagatgcagttaaaattggtatagcatctgctgtcgtttggggggtgggactggttctggtaactccatggatcgttgcaaacttagcaatagttgttgtcgttggcggtgttgctgccattaccttaaatgttcttgatgaaaaatttggtgcgactgacaaagttgtagcctatatagagtcagcacaacaagaatttgcaaacaaagccagagaggctgaacagggattactggatcttggggcgatgtttgctgaacaaatgctaattagaggaaaggatgtgattattgaggaggttcgcaattatattcgtgataatctgacgagtattcaacggagattgtactga

SEQ ID NO: 123844 - DNA, 423 bp, Enterobacter cloacae
atgtttgaagaaaaaatgcgtccttttcttgctatagtaataatccttggcttatgtgcgctgagtatttatcttgggaatagtatatttcagtcatacttctctttcgaagatagcattgtgttctcatggttaagcattgcattaattgccttgcctgttgtgatgattttcccacttacttattttattctgatgatttttaaggggaggggctttgctttaaaaacaatggataattatgtttcttatttgaagtggagttgcattgctatcttaatattaggggtgttattttcctgtttgtaccctaaagaattgctcagcaagggatatgtccgttgtaatggtattccatcaggctggatggcaggaaccgcaacccgctacgttaaagatccgtctatctgcctcataaattga

SEQ ID NO: 123845 - DNA, 492 bp, Enterobacter cloacae
atgagtgcgaaacgcagggtttttggaagccttgttatttgttttttttcatttttttgctctttgtggtttgcaaatgatgcatttagtgaattatttggatttgtaagtaacattgtattttcaccaactattttcgctttactcatggtcctggtaactcttctcttccaatatatatactggtttttggctatgcgacacggagagaaacaggctattattaaatgtaaaaaaacaaacaggctatttattgggctggcaggcgtttttatcgtaagtgttgtcatattttcctgtgcgtatacttcgactcttgagagtaaaggctatgtgaaatgcgccggtcaccctgatggatggatgccgggaatagccaccgaatacgtactaccaccatcagtatgtggagaacatgggttcgtcagaaaaggttcgagcggttatgctcccacaatatccagtcagtcccggggagttgagaatgaataa

SEQ ID NO: 123846 - DNA, 252 bp, Enterobacter cloacae
atgaataaacgtctgttgcttatttgtgcacccgtagctttatttttactggtcagtacagcagttctttccctttcatttatagatgtcaaatacacgtatgaacctgcgttaactggaacacgcctggattatttggttgacgaaacctattacatggcttggttattcttttgtacgtcaaatattgcattctttgctatttatatcgtatctttactggtttttaaacgattaagtaaaaaatgttag

SEQ ID NO: 123847 - DNA, 1755 bp, Enterobacter cloacae
atggacgacttaaccctgcgttattacgacgccgaaatgcgctacctgctggaagcgggcgaagaatttgcccgtgctcaccctgaacaggcagcgatgctcaatcttgataaagcgggcgcgcgcgacccgtacgtggaacgtctgtttgaaggctttgccttcctcatggggcgtcttcgcgagaagcttgatgacgatctgcctgaactgaccgaagggctggtcagcctgctgtggccgcattacctgcgcaccattccctcgatgtcggtggtggagttcacccccgactggcgtgagatgaaagaaccgatgcgtattgacaaaggcttcgaagtaaactcgcgaccgatcggagaaaaaggcacacgttgtcgctacaccacaactcaagagataaccctacagccacttgcactggagcatgcccgcctgtcgactgatccggacgggcgttcggtcatcagcctgcgcttcagctgcagccatctggctgactggagttgtgtcgatctcagccagatcccgttctatttcaatgctgacgcaccactggcctgcgccatgcatgaagcctttaccatgaacactgcgcgcctctggctgcggatgccgggtgacacgaacagaagaccgctggacgggtatttcaccgcactggggtttggtgaagatgacagactgtggccgaaaggggacagcagtttcagcggttaccagttgctgctggagtatttcacctttcgcgagaaattcatgttcacggggctgcgcggactggagagcgtggcctttccggctgaactcccctggtttgaaatcgatgtggtgctggcagaacgctgggagcacgatttcagctttaccgaaaagcatctgcgcctgaactgcgtgccggtgattaacctgtttccgctggaatctgacccactgacgcttaactccttacaaaccgaatacatgctgcgcccgatgcgtgtgcaggatggccataccgagatatacaccgtggattcggtgatgtcatcgagccagcatacctacgtgccgttttcgagcttccgtcacaaaggcggaatgatgcgtcatgaagcaccggaatattactaccacacccgcgtgcgccgggggccatccgggttgcataacacctggctcatcctcggcggtgaagcgtttgataaccatacggtgccggaagatgagagcctgtcgctgacgctcaccggtaccaacggccagctgccacggcgtgcgctgcagagcactgtacttgatacggtgatgagaacgacctcggccaatattgccgtgcgcaacctatgtgcgccaacgctgccctgttatccaccggcgcaggaccgttttcactggcgcgtgctaagtcaccttggcagcgggtttctgtcgatgatggataacgccgatgtgctgcgcgggaccctggcgctgtatgaatggaccgacagcgagatgaaccgccgccgcctggaagccatcctcgacgtgaaacacagtgaaaccgtgcgctttgagcagggctatctggttcgtggcgtgcagattgaagtgacgctggacagccacggctttgccgggcgcggcgacatctgcctgtttggcgagatgctgagccgtttcttcgcgctgtataccgacatttatctgtttaaccgcctgattatcattctgcaaccgacaggagagcgcctggaatgggaagagaagcacagtcgccgcattcccggctga

SEQ ID NO: 123848 - DNA, 1086 bp, Enterobacter cloacae
atgggaagagaagcacagtcgccgcattcccggctgaccccgcggctggaagccgacctgcaccgcatgaatttttatcgtttctgtcagttgctggagaaacgtcatccgggcaggccactgatgggttcaaccagtcatcccgcagatgacccggtacgctttgcaccgcatccggggatggggttcccggccggtgaactgaagtctgtcgaatatgatgaagacgatgacaacacgcctccggttattcgagcgaccttcatggggatgtacggtgtcgattcccccttgccgacggcgtatcttgatgacatcactcagcgccgtgaaggacatgatgcgctgcaggggtttctggatatcttcagccaccgcatcctgacgcagttttaccgcatctggcgtaagtactcttacccggccacctttgagcccggcgggagcgacagcatttcgcagtcgctgctgggcctggtggggctgggtattcccggcaccgcgaaccacattgccacaccggtatcccgttttctggctctgctgggtgtacttcagcaaccggggaaaacccaggaggggatacaggccctggtgagcctgctggcaccggataccaccgtgacggtcagcccgtactgcctgcgtccggtggaggtcagtcagccactgggtttttacggtgatgacgattttctactggatggcaacacgccacttggagatgaagcgatggatgccagcagccagctgctgatcgcgctgtccaccgataacgaacaggaatcacagggatggaaaccggacggtctgctgtatcaggacttcctggtgatgctgcgtgtctaccttggctggcgttttaaggcaaaaatcaccctgacaaccctgacccgcctgctggccgtgccaccgctcggtgaaggatctttctggctcggcatgaatggcgtactgggggcggaggagggagcgtttgcagatgatatcccgcaaacctttacgacggaactgggctattacaccggcctgcaacctgcaacaccacaacaaggaaaccgacgtgttacgtacaagtttgattaa

SEQ ID NO: 123849 - DNA, 456 bp, Enterobacter cloacae
atgccacagggacataacacgccatcgctgtatgaaatgctgactggtaatttttccggtggtctgagcctgcaccaggtcagtgagcagaaccaggtgattttatccgtacttgataacatgcagcgcgtgctcaactgccgcgccggtacgctggcgcacctgccggactatggtctgccggatatgaccaaaattctgcaggggatgccgggtacgacccatgaactgatggggatcttatcgtctgtattgcttaagtacgagccccggcttaagagaatcgatgtggtgttgcttgaacaggctattcccggcgaactgcgctacgccatcgacgcggagctgaagggcatcggtctggtccgttacggtacggaatttatgccggagggcagggtgttaatccgccacctgaaacagcagcagtatcttgatacccgtgccgcactctga

SEQ ID NO: 123850 - DNA, 1317 bp, Enterobacter cloacae
atgacgacacaatccgaacgccacctcaaaaccggcggcgacccgcgtacgcttgcggattacgccgccctgcgtgacgaaatgaacaaactgacccacccggcgcgaccggacatcaactggccgcaggcggaaaagctctgtctgtcgctgtttgagcacaacggggtggaactgcagaccgcggcctggtatacgctcgtccgaacgcatctggccggtctgtacggcatgaacgaaggactggcaatactggacgcgctcctctcccgccagtggggcaatatctggccgcagcctgtgcatgcgcgtatggaaattctcagcgcgctcagcaggcggttacaacagacgatgcgcaccctcacgctgacctgtaccgacctcagtcagttgtaccagacagaagagcacctgaacgcactgggcgacgtattgcagcgtcttgaactgaggcatgccagccagctcgatgctctgcgtacccaggtccataacgcggcggtacggctggaaaacagcgacggcgggcaggaggcgggcggtgctgttctcccggccagctttacgaccccggcagaacacgtcaggtgggtctatgttgcgcagccggagccgctgccggacaggcaggtgatgaccgcgccgcctccggtgaagccctggaagccatttgtcgccggaatggccaccatgctggtgattgccagctcggtggcatggggatggcagacgatgcatacaccagacccggctcaaacgcagctcgatgccactctggcgcctttacctgacgaattatctaaagcgcagttgcaggcgctgcgacaagcgtcaccatcacccatggcagggcttagcaagacgcaaaatcggctagcacagcttagggaactgaaacctgactgggcatggcgctacggcgatagcctggtgcagcaggcgctgatcctttggccgcaagaggcgaaaccgctggcgcaacagtggcagcagcaggttaacgttgcagcacttccgctgccatatctgactggctggcatcagggaatgatccaattacaacaactggcgaaccggcttaacgcacttgatgaacagcggggtaagtacatgacggtcagcgagctgaaatcagcggtatttaccatgatgcaggcatttaacagtgccgtgcctgcagaggaacaactgcgacagctggcagatcttcctgaaaaccagccgtggcctgccgcgcagcagagccagacagaacagcatctgcagcagttgattgctcgttatgccctgatgaaacaaaaaacggcggaatag

SEQ ID NO: 123851 - DNA, 480 bp, Enterobacter cloacae
gtgtcagccagagaacgtttctttaaaaaagtgcaacagagtagcaagaacataacgtcaggtaacacctcagttgaggctgaaatcgttgaattctgcgagcggttagaggggctggcgcagcaaatcattgagtggtttgcgggcaccagcattgaagtcacgttatcacgtcagtatcttcacgatctgagcacattaggttatagcctgagcagcggaatttgccgctatgagatagcgaccatccttctgcagaatggcgagcgtagtgtcagtatcgtgccagaacagctcttccgtgcaggagaaacgggttgtgtaagaatgcgtgttgaagctccgggctttcgtgaggtgttttatctgagtatggcgccggaagcaggctggtttatccggcgcgagtttcagagcattaaagagcgtgctcttttgacggaagaacgcttttttgttgcggtcgatcgtctggcttga

SEQ ID NO: 123852 - DNA, 564 bp, Enterobacter cloacae
atgagcaagaagatcctgatgctggtgggcgattacgccgaagattacgaaaccatggtcccttttcaggccttacagatgattggccatcaggttgacgccgtctgcccggataaagcgaagggtgactatgtcatgaccgctatccatgatttcgacggtgctcagacctatagcgaaaaaccgggtcaccgttttatcctcaatgccgatttttccgccgttaacgagcaggactatgacgccctgctgatccctggcggcagagcgcctgaatacctgcggttaaatgatgacgtactgaagctggtgcaggcatttgatgccgcgcacaaaccgattgcggccgtgtgccatggcccacagctgctggccgccgccgggatcttaaaaggacgaacctgtagcgcctacccggcctgtgcgcctgaagtgcgactcagcggcggcgagtacgccgatatcggtatcgatcaggctcacgttgacggtaacctggtcaccgcgccggcctggcctgctcatccacagtggctggcgaaatttgcgaagttgttggaatag

SEQ ID NO: 123853 - DNA, 219 bp, Enterobacter cloacae
atgaaactggtgtattggataaagccccgctacaatgcccatcttgatgaaaaagactatgggtgggtatcgtctgcaatgggaagaacagaaataatcctcaccataattattttaatgcttattattttcggattctggtttatcttcagcggcgagatctggttagtggcggaatatattgaaaacagcatttaccccactttcgacgcgctgtaa

SEQ ID NO: 123854 - DNA, 1233 bp, Enterobacter cloacae
atgtcgcaaaattattttgatgcgctgaatgtcattaaaacccccgtgtggctgatctcccccgtttctggccatattatttttgcgaatacggccgcggttcaggtgatgggggataaaacgctggatgatctgcgaaaaggcgctttctcagccaatgcgcaagacgtgctgtcgatgtatatccctgagctgaaaacggaccaggagattatcgagatctggacagtctggcgcgacgggcatgaaaccgcgttgagctgtcgtctttcgctgacccaacatgcgccgtacggcgacattatcgtttttgaagggatttcacatccggcaccgaccgggcttaaagcgagccgctccgctacttaccagcgaaaaaagcaaggattctatgctcgcttttttctgacaaacagcgccccgatgttactgatcgaccctgctcgcgacggccaaattgttgatgccaatctcgccgcgcttaatttttatggctactcgcacgaggagatgtgcagcaagcatacctgggagatcaacactctggggcgcgatgtgatcccagtgatgagcgaaatcgccgctctgccgggtgggcataagccactcaactttgtgcaccgccttgccgatggttcaacccgccatgttcagacctatgccggaccaattgagatctacggggataaactgatgttgtgcattatccatgacatcaccgagcaaaaaaggctggagcttgagctggaacatgccgcgttacaggatgccatgacgggcctgctcaaccggcgacagttctatattatcgctgagcaaatgaatcttacgcaccttcctctacagcagcaattcagtttactgctggtggataccgatcactttaagaatatcaatgacgtttttggtcatctgaagggggatgaagtgctcatcgcactttcacgtaccctggaggcctgtagccggaaagaggatttcgtgttccgctggggaggcgaggagtttgtcattctgctgccacgtacctctctcgatactgcaatgcaaatcgccgaaacgatccgggcagcggttgcccgcatctcgatccccggcctgccgcgatttacggtcagcattggcgtggcgcggcacaaccaggatgagagtatcgacgatctctttaaacgggtagatgacgcgctttatcgcgccaagaatgatggccgaaataaagtcctggcggcatga

SEQ ID NO: 123855 - DNA, 2139 bp, Enterobacter cloacae
atgctcaatgtatcgtgggacccagtgttaatagccatctcttatcttgtggcctttatcgcctcgtttgtgtccctggagaatgccgggaaaatcccgctttccagcggaaaggccgctctgttctggcgttttgccggagggcttacgctgggcgtcgggatctggtcgatgcatttcattggtatgttagcgatgaaaatgcccatgatcatgagctacaacctctggttaaccctcgcctcaatgggcgtcgcggtggtggcgtctatgctggcaatgaatattgccgtgacgggcgctcgcctttcgcccttcagactgcttatctctaccttaattctgagcgcaggcgtggtatcaatgcactatgtcggtatggccgcactgatgctggacagccccatcatctgggatcaccccatcatcggtttatccatattaattgccgtaatggcctccggtgccgcgctctggttggcctttcacctgcggcatcagcgaaaagggatctttatcaatcgcattctcgccgctttagttctgggcgctgccatctgtgccatgcactacactggcatgcgggccgctcagttcagtgatatggctcataccctacccggcggtatcagcgaactgggattatcgataggggtgtcggtcaccacgctgtgcctgctcggcatgatgttgattatctcactcattgattcccactggcgtaccaaccggctcacggacaaccttcaggcgctcaatcgacagcttgaactacaggcacggtttgatgcccttaccggccttgctaatcgccaccagatggatctacgcatgcaggattgcctgcgcagcgcgttgcttagcaataaacaatttgccgtgatcttccgcgacgttgatcactttaaacaggttaatgacacctggggacataacgtcggggatgagttgttaatcaccattgcgcagcgcatcacggcgaggcttacccgtgagatgaccctggcaagattggggggcgatgcttttattctgctggttccagaatgtgatgacgacaaactccagtccctcctctcaacgctgctcgacgatgtgcgccgcccgctttccgtatgcgggcatacgctgagtacaacgctcagcgcaggcgtcagtcgttatccgcaggatggcgaaacgctgcatgagttaaagctaaaagcagatgcggcaatgcagtacgttaaaaagcaaggccaaaacgactgggcggtctaccggacagagatgtcgacggcgatcccggctaaccccggttttttgcaggaactcacgcaggcgcttgagcgcgatcagtttgagctgtggtatcaacccacctggcacgctgaagagagaactatccacggctttgaggcgcttcttcgctggcgacatcccgaacaaggcgtgctactgccgaatctgtttttaccttcgcttgaacagacgggattaattattcccgtgggtaactgggcgattgaggccgcatgccgtcagctgcatttctggactgaacaaggttttgcccactggacgttgtcttttaacttatcccctgttcagtttgaacagccggatatctttcagaccatatcgtctctgttgcagaaatataatctttcaccttcccggctcatccttgaggtcacggagagcactgcccttaaaaatctcgaccgcagtatcgaattactgagtgcattcaaccaggccgggatcaccgtctctattgatgattttggcaccggttattctaatctgcttatgctcagcgtgcttccggcaaaagagctcaaaatcgacaaaagctttgtgacgtcaatgctggaaaatgagaaaagccgcaagctggtggagaccattattaatattgcccggaccatggagatgtatgttgttgccgaagggatcgaaacagaagagcaacgagcggtgttaacagagctcgggtgtgattatttgcagggttttctgttcgccagacctttgcctgccgaacagatcccgtggctactgctgcagattaattcacagaaacagattataccaattggtaaaattcattcggaatccgcttttgtttcacaaaaaaatcatgctacacagggttaa

SEQ ID NO: 123856 - DNA, 147 bp, Enterobacter cloacae
atgcaccttacacggtttctgtttattgactttgctcaattaaaagagcgttttgatccgcgtaaaagatggaaaaagcgtaaatttacaaccatttactacgatgcaaccaccatgcaacaccgccaatcaaagcagctaacatga

SEQ ID NO: 123857 - DNA, 183 bp, Enterobacter cloacae
atgaaccatctactcgcgctgcaacgactgcattcacggcagtccgatccggtcccgaccgacccaacgcccatgcccgatcccattccgcgtccgcagcctatgcccgacccgccgcccgatgaagaaccgattaaattgtcgcatcgaaccttgagatctgcgaggatacgcgccatctga

SEQ ID NO: 123858 - DNA, 219 bp, Enterobacter cloacae
atgaagggtggtatttttgcatttttggcattaggtgtcgcgttagcaataacagggtgctcaagtgattatgttatatcgaccaaagatggacatatgatgaccacacatggaaaaccagagcgagataaagacaccggtttaatttcatacaaagatgcagatggcagcattcatcagattcatcaatcggatgtgaaagagattgtagaaaagtaa

SEQ ID NO: 123859 - DNA, 198 bp, Enterobacter cloacae
atggctgttttaaaagtatgtcttttagttgggtgcttcctggcgggttgtgtcttgtatcttcatctttttacgtcaatgaaggaagcatgcataaaagatacggcaggagaagtgtttcacgtgcgtcaggttgaaaatgctactgattgtcagtcttttaactggagcacgtatatacagtgtggctatttttag

SEQ ID NO: 123860 - DNA, 1758 bp, Enterobacter cloacae
atgcaaactgacaaagacctttccacctggctcacgtttcgccgtctttggcctataatatcgccttttaagaaaggactattggttgcggcattagcattaatgataaatgccgcctgcgatccttttatgctgtctttgctaaagccgttaatggatgatggcgtgggcaaaatggaccgctctgtcatgttatggatgccggttgtggttatcggattgatgacgctacgcggtattaccagttttatctccagctattgtgtctcctgggtctcgggcaaagtggtgatggatgtgcgccggaaattgttccgccatttgatgggcatgcctgtgtcgttttttgacaaacagtcaaccgggacgttgctgtcgcgtattacctatgattccgaacaagtcgcatcttcgtcatcaggtacgctgataacggtcatccgtgagggtgcgtcaatcatcggcttgttcgccatgatgttctactatagctggcagctttcaatcatcctgattgtactggcacctgttatatccgtgactattcgtatggtgtccaaacgctttcgcactatcagtaaaagcatgcagaatacgatggggcaggtcacggcgagtgctgagcagatgcttaaaggccataaagaagtattaattttcggcggtcaggacgttgaaacaaaacgctttgataaggtcagcaataagatgcgtttgcagggaatgaaaatgatgtccgcatcgtcaatctccgatcctgttattcagcttattgcctccctggcactcgcgtttgttctttatgctgccagcttcccgagtgttatggcgaccctgacggcgggaacgattagcgtcgttttcacatcgatgattgcattgatgcggcctcttaaatccctgaccaatgtgaacgcacagttccagcgcgggatggccgcttgccagacgctgttcactattcttgattccgaacaggaaaaagatgaaggtcagtgcgtacttgaacgcgctaaagcggacgttgcatttcgcaatgtgacgtttacctatccgggacgtgaggccccagcgctacgcaatatcagcctgaacatacctgccggtaagactgttgcccttgtcggacgttccggctcgggtaaatcaaccatcgccagcctgatgacgcgattttatgatattgatgaaggtgaaattctgctggacggccacgacctgcgagaatatacccttcagtcgcttcgtaaccaggtggcgctggtgtcgcaaaatgtccacctgttcaacgacacggtagccaacaacatcgcctacggtcgtacggagcggtacacccgtgaacagatcgaaaatgccgcgcgtatggcaaatgcgatggactttatcaacaagatggataacggtcttgataccatcatcggtgaaaacggggtactgctttctggtgggcaacggcaacgtatcgctattgcacgcgcactgttgcgggacagtccaatactcatccttgatgaagcaacgtcagccctggatacggaatcggaacgcgctatacagtctgcgctcgaggaactgcaaaagaaccgtacgtcactggtgattgcgcatcgtctgtcgactatcgaaaaagctgacgaaatcattgttgttgaagatggcgttatcgttgaacgcggaagccatgcggaattggtgactcacaatggggtgtacgcacagcttcacaaaatgcaattcggtgcgtcaaacagttaa

SEQ ID NO: 123861 - DNA, 192 bp, Enterobacter cloacae
atgcgcaggatacctgaagtaaccttactggtcttcggcgttgtgggcgggtggcccggcgccattatgggtcaacagatctttcaccataaaacgcaaaagcagccgttcaaaacctggtttttgatgtctgtggtcgtgagcatcttggccacggtggcgctgtatcattttggttttgttgttcgctaa

SEQ ID NO: 123862 - DNA, 450 bp, Enterobacter cloacae
atgaaaataaaatgtattacgctggcagcgctgatgttttattcagcgcctggctggtcgacgtttcaggagcgggaatataatacctggtatataaaaaatgccgttctttatgacatgacgcagacgtcggaaggttttccggtaatggtgagcgtatctcagcccgggaaaaaatccgctaatctggtggtttcatacatcaccgaagggcaatgtggaaaaaatacgctgccgcttaatgtgaatggtaaagtgctgcccgccagctattactgtgttcaggttgggtcgaacagaattgaacatttttcagtggtcgatgcaaacagcgtcaatgccctggtggcgcatctgaattcagatttcacccttctcctgcaaaacgatatcaagatttgggccgcaaatatcaaatcgccgaaatacggtctgacaccgcgtttttaa

SEQ ID NO: 123863 - DNA, 288 bp, Enterobacter cloacae
atgggatttcaatattggttcacggtatgtgcaatttttctgacctgcccctttatgcttgttcagtcgattatctttttgcgacgaggtgtctacactaaaaccttcaagggaacgatgcgaaaggaatatatccacaaagacactaaacctattgaatactggtttaacgttattgctcaaatgatgatgagtgctgcagtacttggtttaggtttctggttattagatgacctacctgcctttcatagttggcacactgaaatccgcgcaatgcttcctttttaa

SEQ ID NO: 123864 - DNA, 756 bp, Enterobacter cloacae
atgaacagtttttactcgcaacatgcgggttgcaccgtccgctggcatgatttgcccggcaccggcgatcccgtcgtcttcatccacggattgggctgcgcctcgtcctatgaatatccccgcgtcgttcgtgaccctcagtttggcgggggcagaacgattctcatcgatttacccggcagcggttacagcgataagcctgagcactacagctacaaaactaccgatcaggcccgcgttgtggctgaactgatggatcatctcaagctcgatgccttctggctgtacggtcacagcatgggcggcagcatcgccattgaagcggcggggctgctggcatcgcgtgttaaagggctgatggtgtcggaacccaattttcatgccgggggtgggatgttcagccgctcgattgccgcacaaacggaacagcagtttctggaacagggatatcaggccatgctctgtgcagaaaaaacggcgtgggccgggtgcctccaaagtaatgcaccttatgctgtctggcgcggcgcatcgagcctggtggcgggcgttgagccagactgggaaacgcaatttctgtcgctgccttgcccggtgacgttgattttcggcgagctctctttgccggatgacgatgtggagcgcctgaagcagaagggcgttgaggtcaaaatcatccctgctgcggggcactccatgtcgtgggaaaacccgtcggcactggcgcagacgttagcggagtgcatgtcggcgtga

SEQ ID NO: 123865 - DNA, 2175 bp, Enterobacter cloacae
atgagtgcaacgatgaccaccacgcaggccttaatcgggtggattaacgagacgcgcctgcacgcccccgtgctggataacgatgccgacgccctgctggcacgtatcaatgcggcgcaggcgcgggagcaggccattgaacaggccctgacccggcggagcagcattggtctgtatggccactcccaaagcgccaaagcgcatctgctgttgtccctgtgcggcaacggtaacgggcggctgaacgttattcccgggcaacgcacgttcgactacttttcacatatcaacccgggacatgccctgaccaacatggcgctgcgcttcagcactgaaagcagagcggtggacgatgaggctttcccgctacgcctgagtctggtcaccgaggccgagctggtgcagctgtttattgcccgcaccaccttacacccgcagatccgcgccgtggataaggccgttatcgagacgcgccttgagaagtggcgcggcctgcgtcagccgcagggtgtaccgggcataacggcgcaggaagtgggcgcgattgcccgcttctggcagagcacggtacctgccgccagacagcaaattgatgatgtgctgtggcatcagtttgcgcaactggtgccatcgcttgacctcaccacccgggccagcgtctggtcgcttttatggggtgagcaacaggaactgacccagcagtggttaaagctcgcccatgttctgcaccagaccagccacgccagcgaacttgccgccccgctcagcctgctggtggataactttggtctgcctggcgaaggcttcctgacccatggcacctttacccttccggacgctcaggagacgctgctgcatcccctgaacaacggcgagatgcttaatgccattagcctgcccgtcgatgtactggcattcctgacgcgtgaactggtactgtctgtcgagagcagcgcgctggataacgtcgatattattgatatcccggtatttgcagacaacagcgccgatccgctaagccaggccaaatgtcagtggctgctggaacactatcgccagcagttgcagccagatgtgctggttatctgcaatgcgaccgcgcagcacgaccagacggcaaaaaaagcaaaggtactgatgaactgggtcaaagagacgcagcctgcggaggaatcagccctgccgggtctggtgtgggcgattacgcctcacgacgcgcgttttaccacccggcaaaatctcgatgaagcggtccagcatctgctgggtaaaccaggcctgcgctggggcacgctgcaggcgctggacagccacagcatgcagcgcgtcatcgagtggctgtcacaggccacgttacctgcccagcgacagaaacgtctcaacacgctgaaaacggcgctgcgccaggagctgtcggctttaatgcacagctatctggcaccgctggttgaggagcctgcagcaagacgaactcaggccgagaacatggttcgtaccctgcaaagcagcgctgcccgccacggcgaattgctcgaagggcttctgcctccgctcaaagcctttgaaacgcttctggccgtccagcaaccgcgcgaggagcaggtcaacggtctgtttacggataccatcgatctgtttgccgataatgcgcaggaaagtgccggcacgttccagacaaaagataaagcgcgcctggcgcataaagtgtggatgaaccatttgcgtcagtggagtcgtaatgacgcagcggccacacgcctgggtcttgagcctgcggtgttacagcaaattgccgaggttctggtggtcgccagctaccgtcttaacctgcctcagcagcttcagcgtattgttgaaaccgacaagagcagcgccgcacagctgcatgcggtgataggtaatttcgttggctggctgggttacgaccagacgcctgttgctgaacgtccggcaagccgcatccgtaaggggcaggcaatctttgttacgcccgtggttagcagcgccgcgccgcgcctgacgcgcctgggggaacagcctgtccatgcggccaccgcatacgtatatgactggctggttgccctctatagccgggcaatagagaacattgattatcagcacccgcatgatgttcagcctgacgcacgtcgggcacttcgggctttaatcatgtag

SEQ ID NO: 123866 - DNA, 540 bp, Enterobacter cloacae
gtgaaaattaatgtaatcggcaccagcggaagtggaaaaaccacgctggcaagacagatcgctgatgagctggctattccttatattgagatggacaggctttactggcgcccaaactggcagggcacagcagatgatgcgtttctggaaaaactggagcatgcattaagcgcttctcaaaactgggtgctcgatggcaactataaccgcacgcgccctgttaaatggcgcaatgtggatctggtcgtctgggtggactatggatttgtccgtacgctgtatcaggccgttatccgggcgatcaagcgggcctggcatcaacacgaactctggccgggaacgggcaataaagagagtttccggcgcgccttcttcagcagagagtccattatcatctggacgattaaaacctggcgcaacaaccgcaggcgttatcaggtcgatatgcaaaacccggactacgcacacatacgctttatccgtattacccgccgcgctcaggcggaaatgctgatttcctccctaaagtcttattcttaa

SEQ ID NO: 123867 - DNA, 774 bp, Enterobacter cloacae
atgcaagcctctcatgaaggacatatttccattaccggcgtcagtaaattctttggtcgccataaagcgctcgataacgtgtcgcttgagatcccaccgggatccgtcacggtgatcctcggaccgtccggctccggtaaatcgaccctgctgcgtaccatcaaccaccttgagcgcgtcgacgaagggtttattcagattgacggggattacatcggctatcgccgtcggggtgacaaactctacgagttaaaagagaaagagatcctcaaacagcgcgtcaatgtgggttatgtgttccagaactttaatctcttcccgcatctcacggtgctggaaaacctgattgaagcgcctgtcgcccataaaaaactgagcaaaaaagaggccgttgagcaggcgtatagcctgctggatgtggtggggctgcgtgataaagcggatgcctggtcgcgccatctctccggcgggcagcagcagcgcatcgccattgcccgcgcgctggcgctgcgtccgcgcgtcatactgtttgatgaacccacctcggcgctagacccggagctggtgggcgaagtgctggatgtcatcaagaaacttgcccgttccggcaccacgctggtggtggtcacccatgagatcggtttcgccagagaagtagcggatcaggtggtgtttatggtcgacggtaaaattgtggagcagggcagcagcgacgaggtgctgaaccggccatcgcacgcgcgaacgcgtcagttcctttcccgagtcctgtaa

SEQ ID NO: 123868 - DNA, 231 bp, Enterobacter cloacae
atgccacatgtagatatcaaatgttttccccgggatttaaacgacgaacaaaaaaacgcgctggcggctgatattgccgaggtgataattcgtcatttcaacagtaaagacagttcagtgtcggtggcgttaaaccaggttaatcctgaagactggaaagcgcaggtctgggacagcgaaattggcccgaagctggattcgttgattaaaaagcccggctattcgatgtaa

SEQ ID NO: 123869 - DNA, 1002 bp, Enterobacter cloacae
atgacaaaattacctcagttctcactcgccttttttcatcctcgttactggctcagctggacaggcattgctgcgctctggtgcattgtgcagctcccgtatccccttttattaagaatcggacacgggcttggtcgtctggccatgcgtttgcttccccgtcgtgtggacatcgctcgccgcaaccttgagctctgttttcccgacatgaaaaaggatgagcgcgaaaagctactgcagcgtaattttgaatcggttggcatgggcgtcatcgaaaccgggatcgcctggttctggcctgactggcgggtgcgtaaatgtttcagcgtcagcggatatgaacatatggaagaggcccgggcgcgcggaaatggcgtggtgctcatcggtatgcattttctcacgcttgaactgggggcgaggatctttggcatgctcaacccgggtgtcggtgtttatcgccctaacaataatgcgctgctggactggctgcagacgcgcggccgtctgcgctcaaataaaaccatgctggatcgctacgacctgaagggcatgatccgcgccctgaagcagaatgacattctctggtatgccccggatcacgactacggcaaaaccaacagcgtgtttgtaccgttctttgcggttcctgatgccgcgacaaccgccggaagttatatgctggtgaagagtgccagaccggcggtgatcccgttcgttccacgcagaaaggcagacggcagcggttacgaactgattattcttgaagatatcggagaaacgctgcagggcggtgataaagcgtcggtagccacgcaaatgaacagggcgattgagcgcgcggtgctgatggcgccggagcaatatatgtggttgcaccgacgcttcaaaacccgtcctgaaggccagccggacagatatgcgcgcaaaaaaagcgtggtcacttccaacagaactgtatctacaggcgacatgcctgaacagtcaggcattcagcactaa

SEQ ID NO: 123870 - DNA, 1686 bp, Enterobacter cloacae
atgtctcgcaaagaaatactgtataccccttatagcggcgccgtattactggaaaacccgttattaaataaagggctcgcatttattaaagaagaacgtgataactttaatctgcacggtttgttgccacacaacgttgaaaccatcgaggaacaaaccgaacgcgcctgggtacaattctgtcattttaaaagcgatatttcccgccatgtttatctgcgtaatatccaggatactaatgagacgctgttttacaacctgctgcgttcgcacctgaaagagacgttacccattatctatacccccacggtaggagaagcgtgcgaacacttctcgactatttatcgccgcgcgcgtgggctgtttatttcctggcccaatcgtcaccgtattgatgaaatgctgcaaagcttctcacgcaacgatattcgcgtcatcgtcgtgaccgacggagagcgtattctgggacttggcgatcagggaattggtgggatgggaatacccattggaaaactctcgttatataccgcctgtggtgggatccacccggcgtctaccctgccgattatgctcgatgtcggtaccaataatcagcagcatctggacgatcccatgtatatgggctggcgtcacccacgcatcagcgacgatcagtacgccgagtttatggacatgtttatcagtaccgtgaagcagcgctggcccaatgtattgctgcagtttgaggatttcgcgcagaaaaacgccaccagactgctgcagcgctaccgcgaccagctgtgctgtttcaacgacgatatccagggtaccgccgccgtgaccgcgggcacgctgattgctgccgcccatgctgccgggacccgtgttcgcgatcagcgcgtggccttcctggggagcggatccgccggttgcggcatcgccgaaaaaatcgtggcgctgatgatggatgacgggctaaccgaagccgaagcccgcagtcgggtctttatggtcgatcgctttggcctgctgactgacgatatgaccaacctcctcgacttccagaaaaacctgctcacggcgcgcgaggcgatccgcgactggcatgttgagtcgaacaatatttcgctgatggacgtggttaaaaacgcgcatccgacggtaatgattggggtctcaggccagccgggcctcttcagcgaagagattgtgaaagagatgcatcgccactgcccgcgtccggtgattatgccgctttctaaccccacatcccgcgcggaggcgcaaccgcaggatctcattgcctggacacagggcgccgcgctcgtcgccaccggcagcccgtttgcgccggtgttctggcagggcgagcagtacgatattgcccagtgtaataacgcctatgtattccccgggctggggctgggtattctggcctgccgtgcacgccgggtcaccgaggagatgctgatggcggcaagccacagcctggccgcgcagtcgccgctggtgacaaccgaaaaaggcgggttattgccgccggtggatcatatagaaacggtgtcacgccatatcgcgtttgccgtcgcccgagcggccattgagcaaggtgttgcgccagccatggaggatgagatgttgctggcgcggattgaagagacctggtggcaagcagattatgcgccgtaccgcagggctgcgctgtag

SEQ ID NO: 123871 - DNA, 1329 bp, Enterobacter cloacae
atgaaagataattctgtaaccacgtctccagtcgcttcacgttttgcttttgggttgagcaatgctgaagttggcgcggtcccgttgatgctgtttgtcgggatcgcggccattgtggccacctccgcgtgggcggggctgctgccgaaaaacatgatcggtggactcgcggtgatcatgacgctcggtttcgcctttgccaaaattggccgacaaatcccgctgctgaaagatattggtggcccggcaatattgtgcctgatgctgccctcggtgctggtctattttggcgtattcgagaaacataccctggatacggttcacctgttgatgaaagaggccaatttactctatttcgtcatcgcctgtctggtggtggggagcattttggggatgaaccgcgtgctgttgattcaggggatgatccgcatgttcgttccgctggtggtgggtaccctgatggccgtgctgaccggcttactcgttggttcgctgtttggctatacgccgtatcacaccttcttcttcatcatcgtaccgattatcggcggagggattggcgaggggattttaccgttgtcgctggcctattcggcgatactgggtcagacacctgacgtctacgtggcgcaactggcacccgccgccgtagtggggaatatctttgccattatttgtgcgggtacgctggcgcgcctcggggcaaaacgtccctcgctttcaggcaatggcatgttaacccgcagcaaagatgacacaagcctgtttgccagcgcgcagagcgtacagcagacggatttccatctgatggggggcgggctgctgatggtgtgtgcgttttttatcgttggcggactgtttgagaagctggtgcatattcccggcccggtattgatgatcctcatcgccgtgctgtgcaaatacttcaaggtgatcccggcctccatggagcagggggcgcacagttgctataaatttgtctccgctgcgctggtctggccgttgatgattggtctcggcatgctgtacgtgccgctcgagagcgtggtgtcggtcttttcggtgggatacgtggtggtgtgcggttcgatcgtcatcgcaatggcgctgagcggctattttattgcgtcgcgcctgaatatgtacccggtggaagcggcgattgtcacctgctgtcatagcgggctgggcgggacaggagatgtggcaattctttccgcgtctaaccgcatgtcgctgatgccgtttgcccagattgcgacccgcattggcggtgcgtcgacggtgattttcgccacgcttctgatgggctggttaatggcgcactga

SEQ ID NO: 123872 - DNA, 2100 bp, Enterobacter cloacae
atgccccgacccatccctctcgaacgttatcgcaacatcggtatttccgcgcatatcgatgccggtaaaacgacaaccaccgaacgcatcctgttttacaccgggatgagccacaagctgggtgaagtacacgatggcgcggcaacaaccgactggatggcgcaggagcaagagcgcgggatcaccattacctccgcggccgtcaactgcttctggccgggtatggacagagggtttgaaccgcaccggatcaatatcatcgacaccccggggcacgtggatttcaccattgaggtggaacgttccatgcgcgtgctggacggtgccgtcatggtgtacgactccgtgggcggcgtgcagccacagtcagagaccgtctggcgtcaggcgaataagtatcatgtgccgcgcctggcgttcgtcaacaaaatggaccgtccgggtgccgatttcttccgcgtcgtacggatgatgcaggaacgcctgaaggcgaatccggtgcctattgtgatccctgtgggcgcggaagagcatttcaccggcgtggtggatctcatcaagatgcgtaccattgtgtgggatgatgccacacaaggcatggtgtttaactatacgccggtaccggacgaattgctgagcaccgcgcaggagtggcgggaaaaaatggtctctgcggcagcagaagccagcgacgcgctgatggataaatacctggagacgggcgaccttgatgaggctgagatcatcaaagggctgcgtattcggaccatctccggtgaaatccagccgatgctgtgcggcagcgcctttaaaaacaaaggggtacagcgcatgctcgatgcggtgattgagctgatgccatccccgctggatgtaccggccatcgacggtgtggacgaaaaagggcagcatgcggagcgtcatccaagtgatgaagagccgttttctgcgctggcgttcaaactgatgagcgatccgtacgtcgggcagttgacctttattcgcgtttactctggcgtgttgagaaaaggcgacgcggtgtataacccggtgaagggcaagaaagagcgtatcggacgcatcgtgctgatgcatgccaacgatcgtcacgaggtggacgagctgcgcgccggtgatattgcggcctgtgtgggtctgaaggatgtgaccaccggggacacgctcaccgatccgaatgcgatcatcacgcttgagcgaatggagttcccggacccggtgatctcccttgccatcgagccaaaaaccaagggcgatcaggagaaaatgggcattgccctgcaacgcctggcggcggaagatccgtctttccgtctgcataccgatgaagagtccggccagacgattatttccggtatgggtgagttacatcttgagattatcgtcgatcgcatgaagcgtgagtttggtgtcgaggcaaacatcggccgtccgcaggtgacctaccgcgagacgctgcgcaaagcggtgaaagatattgaaggcaaatttgtccggcagtccggtggtaaagggcagtacgggcatgtggtcctgagccttgagccgttagagcctggcagtggcttcaagtttgaagatgccacgaagggtggcgtggtgccgcgtgagtatattccctctgtggaaaaagggctgcgcgaagccatgaacagcggcgtgctggcggggtatccggttgtcgatgtaaaagcgaccctgacctttgggtcgtatcacgacgtcgactcctcggaaatggcgttccgcatggcggcgatcctcgggtttaaagagggcgctcgcagagcggatccggtgatccttgagccggtgatgcatgtcgaggtggaaacgccggaagagtatgccggtaatattatgggcgatctctcatcccgtcgtggcatggtgcagggcatggaagagcagtacggcagccagattatccgcgctgacgtgccgctggcagagatgtttggatacgccaccacgctgcgctcgatgtcgcaagggcgcgcgacctacacgatggagttccaccattttgcggaagcaccgcgcaatgtggcggatgagattattgcccggcgtgcgaagtaa

SEQ ID NO: 123873 - DNA, 837 bp, Enterobacter cloacae
atgtccccatttctgactgcctatttcgcccgcatcggctggaaacaaccggctactgatgatatcgacactttgcgcgcgctgcatttacatcacaactgtgcgatcccgtttgagaatatcgatgtcgtactaccgcgcgaaatacagctcgacgatcaaagcctcgtcgacaaactggtgaaggcgcgtcgcggggggtattgctttgaacaaaatggcttgtttgaacgcgtgttgcgtgaagtcgggtttacggtgcgcagcgtgctgggacgtgtggtattagcgaatccaccacaaatgccgccgcgcacgcatcgcctgttgctcgtcgaacttaacggcgaacgctggattgccgacgttgggtttggcggccagacgctgacggcaccgattcgtctgctagccaaccaagagcaggagacgccgcacggtctgtatcgtctgctgagcgaggggaacgactgggtactacaattccgtcaccacgaacactggcagtcgatgtatcactttgacctgacgacacaatatttcagtgattacgtcatggggaatttctggtcggcgcactggccgcagtcccatttccgccatcatctgctgatgtgccgccatctgtctgacggcggcaaactgacgctgaccaacttcaactttactcactggcaaaagggccatgtagaggagcagatccatcttcccgatgctgcggcgttgtatcagttgatgcaggagcgcttcgggctgggcgttgacgatccgaagcacggtttttcactggcagagttgacggcggtgatggctggttttgaaactcacggaaaataa

SEQ ID NO: 123874 - DNA, 714 bp, Enterobacter cloacae
atgaaaccattttttcttacagcattgctgatcggcatgatgagcactttttccacttatgctagcgcgcaggaaacgaccggcacgaatagcaaaaccattcgtgcaatgacaggcgcaacggcgacttcgtctttatccgcctcacaaacggcgttaatcgtggtggatatccaaaacgaatattacgcaggtaaagattttcgtggtcagatggtgatccctgatggcgataaggtactgaagaacagtcaaaagctggttagctatgcccatcaaaaggggatgccggtgtacttcgtgcgccatatagcgccaaaggatagcccgctgtttgccgaagggtctgtttatgccaggttccatcaagacctacagccttctgcacgcgatgccattatcaccaaagcgaccccgagctcttttgttggcaccgatctggatgcgcaattaaagaaaaaagggatcaaaaaggtgatagtcattggcctgatgacgcacatgtgcatttcctctaccgcacgtgacgctgttccgctgggctataacgtgattatccctgaagatgcgacagcaacacgcgatctggatgatggtcagggtggcgtggtggaccacaaagcgctgcaacgtgcggcattagccggtgttgccgatgtgtttgccgagattatgacgaccaaagacgttatggcgctgccagtcacagaataa

SEQ ID NO: 123875 - DNA, 450 bp, Enterobacter cloacae
atggaaatcgttttacgaaataaattcagttcattgggtatgttgctgggaggaattgcactcattctctcaatcgtccagttttcattcggcccgttttctccaaagccgccagcgcttgaagttatggttgctgagaaggtttcggctgtaaaacaagggataattgcggggctaaagggggagcgtcctgctgcccgaacagaaaaaacaacggtcgatatcgaccgcattcttcttaatgccgggattattctcgctgttgtggctctggggctttcgttcatcggagggatgtgcaaggagagccgttgggggatctccggggcacttcttttctcagggctaacgctaacgttccatgctgtgctacttgcattcggattgatcgtcgcggtgctgttgctgctatttattctctctctggtaaccggaggggcagtaagttga

SEQ ID NO: 123876 - DNA, 3741 bp, Enterobacter cloacae
atgagcaaactgctggaccgctttcgttacttcaaaacaaaaggcgacagtttcgccgatgggcacgggcaggtgtatcacaccaaccgggactgggaagacagctaccgccagcgctggcagttcgacaagattgtgcgctctacccacggcgtgaactgtaccggctcctgcagctggaagatttatgtcaaaaacggactggtgacctgggaaacccagcagaccgattacccccgcactcgcccggacctgcctaaccatgagccacgcggttgcccacgcggcgcaagctactcctggtatctctacagcgccaaccgcctcaaatatccgctggtgcgccgcaggctgattgaactctggcgccaggcgctggcgcagcacagcgacccggtactcgcctgggatgccattcaaaacgatccgcaaaaagcgcagagctaccgacaggcacgcggtaaaggcgggtttatccgctcgaactggaaagagctgaaccagctgattgccgccgccaacgtctggaccatcaaaaattatggcccggaccgcgtggccggtttctcgcctattccggcaatgtcgatggtctcttacgctgccggtacccgctatctctctctgctcggcggtacctgcctgagtttctatgactggtattgcgacctgcctcccgcctcgcccatgacctggggcgagcagaccgacgtgccggagtccgccgactggtacaactccagctatatcatcgcctggggctctaacgttccccagacgcgcacccccgacgcccatttctttaccgaggttcgttataaagggaccaaaaccgttgccatcacgccggacttctcagaagttgccaaactgagcgaccagtggctcgcccccaaacaggggaccgacagcgcgctggcgatggccatgggacatgtgatcctcaaagagttccacctcgataacccaagcgactacttcctcaactactgccgccgctacactgacatgccgatgctggttctgctggatgagcaggccgatggtcgtctggtgccgggacgcatgctgcgggcgtccgaccttgtggacgggctgggcgaagccaacaacccggagtggaaaaccgtcgcctttgatattgccggtaatctggtggttcctaacggttccattggcttccgctggggcgaaaaaggcaaatggaacctggaatcgcaggctgcgggtcaggaaacggagttgaccctttccctgctgatcacccacgacagcgtggcggatgtcgccttcccctactttggcggtaatgagaacccgcattttcgcagcgtgaaacaggaaccagtgctgacccgccgcgtgccgagtaaaaccctgacgcttgccgacggcagccagaaacatgtggtcagcgtgtacgatctggtgctcgccaactacggtctcgatcgtggtctggaagacagtaacgcggctgaaaattatggtgagatcaaagcgtatacaccggcctggggcgaacagatcaccggtgtccccgcgtatctgattgaaaaaattgcccgtgagtttgccgacacggcgcacaaaacgcatggacgctcgatgatcattctcggtgccggggtaaaccactggtaccacatggacatgaactaccggggcatgatcaacatgctggtcttctgcggctgcgtaggccaaagcggcggtggctggtcgcactacgtgggccaggagaagctgcgtccgcaaaccggctggctgccgctggccttcgcgctggactggaaccgcccgccgcgccagatgaacagcacctcgttcttttacaaccacgccagccagtggcgctatgagaagctgacggcgcaggagctgctttctccgctggcggatgcatcccgattcaccggtcacctgatcgacttcaacgtccgcgccgagcgtatgggctggctgccgtcggcgccgcagctcaacctcaacccgctgcacatcaaagcccgcgctgaggcagcaggcctgtcgccgcaggagtacaccgttcaggcgttgaaatcgggcgatatccacttcgcctgcgagcagcccgacagcggtaaaaaccacccgcgcaatctgtttgtctggcgctcgaacctgcttggctcctccggcaaaggccacgagtacatgctcaagtatttgctcggcaccgaaagcgggatacaaggggaagatttaggctcgaccgatgacgtgaagcctgaagaggtcgactggcagactaacgccattgagggcaaactcgacctgctggtcacgctcgatttccgtatgtccagcacctgcctgttctctgacatcgtcctgcccaccgccacctggtatgaaaaggacgacatgaacacctccgacatgcatccgtttattcatccgctgtctgccgccgtcgacccggcgtgggaatcgcgcagcgactgggagatttacaaaggcatcgccaaagttttctctgacgtgtgcgtcggccatcttggtacggaaacggacgtcgtgttgcagcctctgcagcacgattccccggcggaactgtcccagccgtttgatattcaggactggcgcaaaggcgaatgcgatttgatccccggcaaaaccgcgccgaacattgcggtcgtcgagcgtaactacccggaaacctgggagcgctttacctccctcggccccttgctggacaagctcggcaacggcgggaaagggatctcgtggaacacgcaaaacgaggtcgagttcctcggcaagctgaactacgtcaagctcgacggtccggcgaaaggccgtccgcgtatcgagacggccattgatgccgccgaagtgatccttgcgctggcaccggaaaccaacggtcaggtggcggtgaaggcgtgggaagcgctgggcgaactgaccggacgcgaccacacccacctggcgctgaataaagaagatgaaaaaatccgcttccgcgatattcaggcgcagccgcgtaaaatcatctccagcccgacctggtccggtctggaaagcgagcatgtctcctacaacgcgggttataccaacgttcacgagctgatcccgtggcgcaccctctccggccgtcagcagctgtatcaggatcacccgtggatgcgcgccttcggcgaaagtctggtggcttaccgtccgccgattgatacccgcagcgtcagcaatatgcgcgagatcccgccgaacggcttcccggaaaaagcgctcaacttcctgacgccgcaccagaaatggggcatccactctacctacagtgaaaacctgctgatgcagactctgtcgcgcggcgggccgattgtctggatcagtgaaaccgacgcgcgtgagctgggcattgaggacaacgactggattgaagccttcaacgccaacggcgccctcaccgcccgcgcggtggtgagccagcgcgtgccgccgggtatgaccatgatgtaccacgcccaggagcgcattcttaacattccgggttccgaggtgaccggacggcgcggcggtattcataactcggtgacccgcgtctgcccgaaaccgacgcacatgattggcggttacgcgcagttggcttacagcttcaactattacggcaccgttggctccaaccgcgacgagttcatcatgatccgcaaaatgaaaaacattaactggctggatggcgaaggtggggatcaggtacaggagacgaaaaaatga

SEQ ID NO: 123877 - DNA, 576 bp, Enterobacter cloacae
atgggttatctgaccagggatgaaagacgggaagagatcttacaggccgccatgcgcgtggcgctggccgagggattttccgccatgacggtgcgccgcatcgcgtccgaagccggtgtcgcaaccgggcaagtgcatcaccatttcacctccggcggtgagttaaaatcgctggcctttatccggctgatccgcgaactgctggatgcggatgtgctcggggaacacgccagctggcgggcacgtttacatgccatgctcggcagcgatgacggcaggtttgaaccctacattcgcctctggcgagaagcacaaatcctcgcaacccgcgacgcagagatcaagggcgcgtatgtgctgacaatggagatgtggcatcaggaaacggttgcccttattgaagctggcaggaatgcaggcgtattccgttccggtgacccggcagcaagtattgcctggcgtttaattggcctggtgtgtggccttgacggcatatatctattaaacatgcctgaaatggatgacgctgcgtttaataatcatcttgataaattaatttctctggagttgttttaa

SEQ ID NO: 123878 - DNA, 537 bp, Enterobacter cloacae
atgattaccacccacgtttttatcgccgtcagtcttgatggctacattgcccgccaggatggcgatatcggctggctactccagcgcgatgatccaacggaagatcatggttatgatgcgttcattgccgacaaagactggattgtgatgggccggggaagctatgagaaagtgctgacctttgaccaatggccctataaccgacccgtgctggtgctctccagtcagctggctgacaccgaggtgcccgaggcgctgaaaggtaaagtgcagctctcccgctgtaccccaaaggaagcgcttgctgagctggcagcgcagaacgcacaccgcgtctatttagatggcggacaggtgatccagtcgtttctgcgcgaaggactggtggccgatatggttatcaccaccgttcctgtcctgatcggctcaggcaagccgctgttcggctcgctgccccgggatatcgatttaatgcttttatccacccgtagcttcccgtcaggtctggtgcaatcgcactatcggctgacgcgataa

SEQ ID NO: 123879 - DNA, 324 bp, Enterobacter cloacae
atgcttaaacaattcaacgtttatcgtaatctttcaccagcaaccagagatatcctgccttactacatgcttattcaggatgactattatgctgatcttacaacacgcgttattgttccacttatgaggaacaatagattaccaatatggcagagtcaccttgcccccagaataaatatagatttcgaaacgctacttatttattcaccaatgataagtaaccttaataatcagaaaattaatagcaaagattttgtgtgtaatttacgcaatgctcgtcatgatgttatagccgccgttgatcgtttattgactaacacatga

SEQ ID NO: 123880 - DNA, 189 bp, Enterobacter cloacae
atgaaacactcagccgtaacgccccaacccttatgcacgcaatcccgtgatttacgacgtcatcatgaaatcgtcccgacttcagtacgtacgccatccgcggaggatcgcgcatttatacaagccatgaatgagtttgtggaaaaacacggaacccttacagacgatgaatttttcagggtattttga

SEQ ID NO: 123881 - DNA, 819 bp, Enterobacter cloacae
atggcaagtaacaagaaaaccagcgtcgctgttgatgtcgttaaaaatgcccctctgaaaacaaaagagtatgaaaaagagcttcgtcgccttcacgttgaactggtcaaactccagcaatgggttgtcgccaaaggattgaaagtctgcatcgtgtttgagggacgcgacggggccggtaaaggcgggaccataaaagcgataaccgaacgcgtcagcccgcgcgtattccgggttgtcgcgctgcctgcgcctacagagaaagagaaaacgcagctttatttccagcgttatgttccgcacctgcccgctgccggtgaaatcgttatttttgaccgcagctggtacaaccgcgcaggcgttgaacgggtgatggggttctgcacgccggaacaggttgaaaagtttcttgatggcgcaccggtgatggaaaaagcgatggtcgatgccgggatcattttgctgaaatactggcttgaagtgacgccgaaagagcaggaacgcaggctacgcgatcgtatcaacgatggccgcaagatctggaaattatcgcctatggatattaaatcgttcaatttatgggatgaatacaccgtagcgcgggatgccatgtttgcctccacggacaccgcctgggcaccgtggtttgtggcgcgctcggaagataaaaaacgcgtgcggttgaatattatctcccatctgctttcgcagatcccgtataaagaacttcacattgaaaaagtggatttgccgaagcgcaaaattggcaaagtcaaaccaacaaaatatcctttccgatatattgcggagaaattctga

SEQ ID NO: 123882 - DNA, 1176 bp, Enterobacter cloacae
atgaaaaagacaattttctcgttagcccttagcacgtttggcctgggcatggctgaatttggcattatgggtgtcctgacggaactggcgcatgataccggtatttccattccctccgccggaaatatgatttcgttttacgcctttggcgtggtgattggcgcgccgattgtggcgctgttttccagtaagttttcgttaaaaaccacgctgctgtttctggttgccctgtgtgcggtgggtaacgcgatgtttaccttttccacatcctatttttggctggcggcagggcgcttaatctcggggttcccgcacggcgcaattttcggcgtgggggcgattatcctctcgaaaatagcgccaccgggtaaggtgacggtggccgtggcggggatgatcgccgggatgaccgtggcgaatctggtgggggttccgtttggaacctggctggggcatacattcaactggcgttatacctttttcctgattgccctgtttgacgcactggtgatcctctcggtgctggtgtgggtaccaaaccttcatgacgcatcagaaataaaactcaccgagcagtttcacttcctgaaaaaaccggaaccgtggctgatcttcgccgccaccatgtttggcaacgctggcgtttttgcgtggttcagttttgtgaagccgtttatggtcaatgtctctggcttctccgaggggttgatgacgatcatcatgatgttgatgggcctcggcatggtgctgggtaacctgctgagcgggaaactatcgggccgtttcagcccgctgcgtattgctgctacgaccgatatggtgattgtcgcctcactgttattgcttttcgcctttggtgaacagaaaaccgcgtcgctggtgatggggttcatctgctgtgccgggctgttcgcactctctgcaccactgcaaattctgctgctgcaaaatgcgaaaggaggggaaatgcttggtgccgcaggcggacagatggcgtttaacctgggcagtgcgattggtgcttattttggcggaatgatgattacgctcggttttagctggagctatgtcacgctaccggcggcgattttatccttccttgcgatgagcgcgctgctggtgtatggctatctgcgcgcccggcgggctcagtctgatgctcgtgcgctggcctga

SEQ ID NO: 123883 - DNA, 852 bp, Enterobacter cloacae
atgaaattcactcaccttgcactgctctccacgcttatcacgcccgtggtgttggctgcgccattaaccattgatacctataatccgcaggacaaagggatgtttgcggtctcctccacgctggtctctggtccaaaagaggccgtgctgtttgacgcccagttcagcgtcaaagatggcgaagcgctggtcgacaaaattcgcaaaagcgggaaaaccctgaacaaaatcgtcattacctctggcgatccggatttctattttggtctgcaaccgctggtgaaagccttcccgaatgccaaagtggtggccacacagcaggtggttgaccatatcaaggccaccaaagacgccaagcttgccttctggggaccgcagatgaaagacggtgcaccaaccgaacttatcgttccgcaggtgctggcatccactaccttcatggtggacggcgagaagattgatatcgagcagccagaaagctacgccgcctatgtctggatcccttcggctaaaactatcctcggtggtaccggtgtcgcctggggtatccacgtctggacggcagacacccagacgccagccagccgcaagcagtggcaacagacgctggaaagcatggcggcacataagcctgaacgcgtgatcccgggtcactatctgggaacaccaccggcaggcagcggtgctatcgactttacccgtgattatctccagcgctttgaacaggcgttgtcagaacataaaacatcgacaggtgtgatcagcgccatgaaaaaacagtatccgggtctggctgaagagagctcactggaattaagcgccaaagtgaatactggcgaaatgaagtggtaa

SEQ ID NO: 123884 - DNA, 423 bp, Enterobacter cloacae
atgctaaaagaacggggttttaaaaaacggtacgcattaggcgttattcttatcgtgatgatttggattatatatatgatcccccggtggatatttcctgtggaatatagcatatataagaaaacagctttaaatgaatccgcaaatatttatattgtgcaaagtgatgctggagcgactacagcattcggttaccattattacctgattgataataaaacgtcagacaatgactttatatctcatctggatgattatactccctttctgaaaacacgagacgcaaacgccttacgtaaagtcgataatgggcagatttatctcaacattacaggcgatatatattatttttcaagtcccgcgcagtatcgtattcaatctaacctataccgcataggtataaatctcgttgccaggccatag

SEQ ID NO: 123885 - DNA, 423 bp, Enterobacter cloacae
atgcgctatccaacgatacccattcatccaacaccgcctgcgtatccaacctccttgctggttccccctggcacatccattgttaacaacatgatgatagcaagattccataaaggcccatcagcactgacttacatctggttctatgggatggtaaggctacatggaccgtgggactataaatcactatcaggacgccagtatgccgattatggtaatttcaattacggtgccgtcggtactgcggcaggcatttctgaacaaatattgttaagaggggctggatgggcgcaaagtcgatcgggtaacggggatccacagaaatttggcacctggtatgaatcagcaccctatggagatgatcctgcggatcaggtctggataagagcaggtattgattatgctaaaagaacggggttttaa

SEQ ID NO: 123886 - DNA, 483 bp, Enterobacter cloacae
atggctataccggcttatttatggatacgagatgatggcaatactgaaataaaaggaagcgtagatgttcaggatcgagaaggcagcattgaaatcaccggtttcacacacagtctgagattacctaccgatgcacttaccggaaaagtaatgggcactcgccaacatgcccctttgttatttcagaaagaaattgactcgtcctccccttacctcatgaaggcagtagcgaccggacaaacacttaagactgcggaatttaagtggtacaagataaacgatgcggggcaggaagttgaatattacaatatgacacttgaaaacgtgaaagtagtctcggtttcaccgctaatgcacgacataaaagatcccaccaaagaaaagcataatcatctggaactggttgagttacggtacgataaaattacgtggaagttttgtgatggaaatttacagtttgctgatagttgggcggagcgttaa

SEQ ID NO: 123887 - DNA, 1485 bp, Enterobacter cloacae
atgtcgaatctgccctggcgtgtcagcgtgcgcctgatggctctcgcaaagaaagtggcgatggtcatagggattatcgtggttgtgctgctggcagtgcgggtatatctctcgcagcaggggccggcgttacatctctggcatacctggcgtgcggatgaaatgagcgtaagcgagctggataaggcgaactttgctgactatctcgaccgggaaaaggccatcttcaccgacctggataacgcggtcacggcaaaaacgaagggggaggagcgtaccgccttaaaccgctactaccgtcagagcctggtgtggcccggaaaatttactccggatgcaaatcgctcgtttgtgctgatgcctgccggtaaaccgcgtggtgcagtagttttactgcacggactcaccgattcgccctatagcgttaagcaccttgccgttgattatcagcagcgcggatttgtggccgtggtgccgcgtctgcccggacacgggacggcaccaggggcgctgacaaacgttgactgggagatgtggctggcggcgacgcgtcttgccgtgcgcgaagcctcccgtctggcgggggataacgttcctttgcatctggtgggctattccaacggcggggcgctggcgatgaaatacaccctggacgcactggagtcgccttcgctgcgaaaacctcagcaactggtgttgttgtcaccgatgatcggcgtcacggcgtttgcccgctttgccggattcgcaggcttaccggcactgttaccggcgtttgcgaaagcggcgtggctgaatatcgcgccggagtataacccttacaaatacaactctttcccggtaaacgcggcgcgtcagtcgtggctgttgacgaaggcgctgcaggagcagattggccgcgctgcacaaaaccacacgctggatcggttgccgccggtactggcctttcagtcggtgatggattccaccgtcagtacccgtgcggttgtcacggggttattcgaccagcttccggccaacggcagcgaactggtggtgtttgatatcaaccaggcggcgagtttccgcccgttattccggccatcgtcgtggacggccctctcagagctgttgccgtctgcgcaaagacgttacagtgtcacgattgttaccaacgccagtgcggagcgtttcgccacggtcgcgaagcacatccccgcaggcagcacagaggagaccgtggagccgctggcgcagcagtatccgccggaggtctattcgctttcgcatgtcgccgtacctttcccgcctgatgacgatctgtatggccggcatcctgccgtgaaaaaccgctatggcatcagcctgggcaccattgcgttgtggggagagacctccgtactgagcgtgggtaaagatgccctgatgcgggtgacctcaaatccgttttacgactacatgaagatgcggatcgacaaccgcatcgggacggaggaaaaagggtga

SEQ ID NO: 123888 - DNA, 894 bp, Enterobacter cloacae
atggataaaatctgggtactcggtgatgcagtggtggatttacttccagagggggacggcaaattgctgcaatgtcccggcggcgcaccggcaaatgtggcggtcggcatcgcccgactgggcggaaaaagtgcctttattggcagggttggcgacgatccgtttggccgctttatgcagaaaacgctggcggatgagcaggttgatgtgcagtggatgcgcctcgatccggctcaccgcacctcaacggtggtggttgatctggacgaacagggcgaacgctcgtttacgtttatggttcggccgagcgccgatctgtttctcgattccaccgatctgccgcctttcagggccaaagagtggctgcacgtctgctccattgcactcagcgcggagccgagtcgctctgccacttttcaggcgatggatgcagttaataaagccggtggttttgtcagcttcgaccccaacattcgccccgacctctggcaggatgagggcgagctccgccgttgcctcgaactggcgctacagcgcgcggacgtggtgaagctctccgttgaagagctgacgtttttgaccggcgaatcccatatcgaaaccggtctggcggcgctgatgcgccattgtccggcccgactggtgctggtgacgctgggtaaagagggggtaatggcctggcatgagggcatcacgacacactatccggccacaccggtagcgtgtgttgataccaccggcgcaggcgatgcgttcgtcgcagggttgctgttcggcctggcctcgtcaggccaggatctggcaacaacccttgcactggcccagcgctgtggtgcactggccacgacggccaaaggggcaatgaccgcgctgccgtaccgtcacaacctgtaa

SEQ ID NO: 123889 - DNA, 1407 bp, Enterobacter cloacae
atgacattaccttcccgctggcctgccgtgctgcaggccgtgatgaaaggccaaccgcgcgcgcgtaccgaccgccactacccgcagtggcacccggcaccggtgacggggctgatgaacgatccgaacggttttatctggttcgccgggcgctaccatctgttttatcagtggaacccgctgggctgcgatcaccgctataaatgctgggggcactggagttcgcatgatctgctgcactggcagcacgagccgatggcgctgatgccagatgaagagtacgaccgcagcggttgctattccggcagcgccgtggacaacaacgggatgctgacgctgtgctataccggcaacgttaaattcgatgacggcagccgcaccgcctggcagtgcctggcggtggaacaaccggacgggacctttaaaaaactggggccggtgctggcgctgccggatggctacaccggccacgtgcgcgacccgaaagtgtggcagcacgacgggcagtggtacatggtgctgggcgcgcaggatgtgcaaaagcggggtaaggtgctgctgttcaggtctgccgatttgcacacgtgggaatcgtgcggagaaatcgccggtcacggcgtcaacggactcacggatgcgggatacatgtgggagtgcccggacctgtttgccctcgacgggacgcacgttctgatctgctgcccgcagggactggcgcgtgagccgcatcgttatctcaacacctatccggcagcctggatgagcggggcgtttgactatcagcgcggcgcatttgagcacggtgcgttacacgaactggatgccggttttgaattctacgccccgcaaacgacgctggcggaagatggccggcggatcctgattggctggatgggtgtgcctgacggggaagagatgctgcagcccacccgggcacagggctggatccatcagatgacctgtccgcgagagctgcgctaccgcgacggcaagctctggcagaacccggtgcgtgagctggaagcgctgcgtgaagaggaactgcactggcagggcaacgcctgcgatgcgccggagcttgatgcctcgcgccttgagttcgagctgagcgctgcctgcgcgaaactggattttgccggtgcgctgcatctcacgatcgatggcaatggcctgcgtctggaacgtgccagcctgcaaacgggtgagaccttaacccgctactggctgggtgaggttcaccatctgcgcgttctgtgcgaccgctccagcgtcgaaattttcatcaaccacggcgaaggggtgatgagcagtcgctattttcctgaccaaccggcccgtgtgcgattcgaaggtgcgtccgacatcacattacgctactggtcgctgcgcggctgcatggtagaatag

SEQ ID NO: 123890 - DNA, 219 bp, Enterobacter cloacae
atgataggcagactgacgaattatatcctctggtaccacactgtctgggtgtttatatttttattagtggtcggcgtggctgctggcgtattttttaatgccatactgcattttcatggggatgacgcattcctgacaggattaattttctttttattcccggcgctactggtatgccttcggctacatcggctatcagcgaaacatcgccaaagataa

SEQ ID NO: 123891 - DNA, 567 bp, Enterobacter cloacae
atgaaaaccggggaggcgggcggatccttgctgatgtcggcggttaatgcctgccgcgcccggctgagagcctttattcgcggaagaaccccggtacgtgacgacgccgacgatattttgcaggagatcacgtatcagctgatgaaggtggaacagccggtcgaaaacgttgccgcgtggctgtttcgcgcggcgcgaaatgagatgaccgaccgggcgcggaaaaagcgtgaagtgtcgctctccggttatttcagcttcacaggcgaggaggatgacgattttccggaagatgagatcgctgaaaccctgttcggcgttccgcataccccggaagaggagtacctcaaaacgctgctgtgggaagagctggggcaggcgctggctgaactgcccgcagcgcagcgcgaggtctttgagaagacggagctgcagggctacagcatcaaattgctggccggggaaaccggggttagcgagcaggcattattatcgcgtaagcataaggccgtgttgttcctgcgcacgcgattgcgggatgtgtatgacgcgctgacaggggggtaa

SEQ ID NO: 123892 - DNA, 372 bp, Enterobacter cloacae
atgcgcaaccgtcagcttctcggtaaatggcttctgataatcacgtgtctggcaatggcaatttgcctggttcagcgtgcggtttatctcaaccattttttacaggggctggatcctcaggtgcaaacgctcatgatggctgacgccccgggtcaggaggctgaacagcccggcccgtcgccgtgtcaacttggcgcacagtctttgctttgcgcccagccgctgttttttgacggtgcgctaccggcgattattatcttcttcgctctgctgcagttatttacccaacggcgcacatttctctccagggagcagcctgtccaggcaccgcctccccgaatacacctcaaaaactgcgttttccgtgaatga

SEQ ID NO: 123893 - DNA, 2031 bp, Enterobacter cloacae
atggttaaccttttcaggggactcgtcctcctgtggctgtcctgcatgggtattgctcatgcggcagatacgggctggctggtgtcaccgcaaaacgatcacgcccgcatccgctttcaggctgagcgggatcacgaccgcatcatcggcctgctcagcgtggagctgcagcccggctggaaaacctactggcgttcgccgggcgagggcggcgtggccccgaaaatcagctggccacagggcgttaaggatacctggtactggccggttccttcccgctttgatatctcgggcctgacgacccagggctaccacgatagcgttacgatccccatcacgatcgccgggacggacgcggatgtgctcgacgccacgcttacgctctcaacctgcagcaacgtctgtctgttgacggactacaagctgcatctggatttccgtgcgccagcggatgcgggctttcgtacggcatttgaagacgcgatgcgttcagtacccggtgcgtcaggcgtgtcgtcagacttcagcgcctggttatcagacggcaagctgatgatgacggccacgacggaaggcgaatgggtcaatcctgggatctattttgacccgctggagggtgacattctgcccggcgaaccggtgattaagcacaccggaaaccggcttcaggtcgcggttccggtcaccgatgagtggggcgataaacccgcgacgcttgcggggaaaacgctgtcgtttgtcgtcaccaatggcgataaagcccagcaaacgcaactgaccgttggcgcagcccccgcagacgcggtgcagagtgcgccagcgggaacagtcaaaatgttggcctttgctctgctgggcgggctgatcctgaacctgatgccctgcgtattgccggtaatgggcatgaagctcagcagcgtcctgcaggcgggtacggacacgcggaaaatccggctgcgtttcctggcgaccagtgcgggtattctgacctcctttatgctgctggccacaatggtaaccgttctgaaactcaccggcgcgtcgctgggctggggcatccagttccagaacccgtggtttattgggctgatggttgccgtgacctttatcttcgcgctgaacctgtttggtgcgtttgagctgtttctgccttccgccgccaccggacggctcgccacaacgggcggaaccggactgacgggcagcttctgcgaaggcgtgtttgccacgctgcttgccacgccgtgttccgcgccgttcctcggtacggccgtggcctttgcgctgggcgcaccgctgcattccctgtggcttatcttcctgatgctcggggtgggcatgagcttgccgtggctgttcgtggcgctgatccccaaaaccgccttgttgctgccaaaacctggccgctggatgaataccctgaaggtgattctgggggtgatgatgctggcctccagcctgtggctggtgacgttgctgagtctgcatctgggcgagatgttcagccacatcctcatgctgcttctgattgtggtcgccattgtggtctatgcccttcgcggtcagacatcatcgccgctgttctgggtggtggtgattgcgctggccgtattcgggggctatcagctgcgcgggatagtgaacgcaacgccggtaaccacggctgagaatagcgaacagacgatcccgtggcagccgctcagtgaagaggcaatcagcgatgctcttgcgcaggggaaacgtgtgtttgtggatatctcggcggactggtgtgtcacctgcaaggtgaatgagcatcgggtgctgaatcagccggaggttatcgccgcgctgcgccagccggatgtggtggcgctacgcggagactggagccagccatcagagacgattgcggcgtttctgaaatcacgcaatcgctacgccatcccgtttaaccaggtgtatggccctggaacgccggagggcgacatcctctcgccattgctggacaaacgcaccctgatgaccaccctgaacaaagcaaaaggctaa

SEQ ID NO: 123894 - DNA, 612 bp, Enterobacter cloacae
atgaaaaaaatccttattacgtttctgctgtttttcgcgtcagcccaggtgatggcggcggacccgatcacgccggatcaggagcaacgcgcccagaagctgatctacgattttctgtttaacgacccggattcgccgcgtatcggtgccaaaaatccaacgctgacgctggtggtgtttacggactacaactgtccatactgcaaaaaattcgatccgtatctggagaagatcgttgagaaacatccgcaggtggccgtggtgtttaagtttttgccgttccgttcggaaagctcgctaaccgccgcgcgcgacgcgttaaccgtctggcgttcacaccctgagcagtttatgaagttcaacgaaaccctgatggcgaaaaaagggtatcacgatgacgccagcattcaggaggcgcaaaagcgcgcgggcgtgaatgttgcaacgccggatgatacgagcctggtcacggtaaaacgcagcctgatcatcgccgaaaaactgggcattcaggggacaccggccacgctgattggcgaagggctgttacccggctgggtgcctttcgaacagtttgatgaaatggtcaccgatgcactgaaaaaccgctaa

SEQ ID NO: 123895 - DNA, 912 bp, Enterobacter cloacae
atgacgccattttcagacctggatattgacctgatattgacgttggatgcactgctcaccgaccggaacatcacgcacgccgccgcacgtctgggggtcagccagcccgcgctgtcagcccgtctttcgcgcctgcgtgccatttttggcgagccgttgtttatcccttccccacatggacgtggggtgttgcccacaccccgagccgaggcgctgaggcctcaggtcgcggccgttctgcgtggcatcagcgcgatgcttgcccccaccgggtttaacccccgcgagagcaatcgcacgttcgtcattgccctgcatgaaaacccggccctgatgcttggggctgaactgctgaatcacatcagacgtgaagcgccggggatccgcctgcgtttcgccctgccggagtgggtgaacctgccccagcagctggaaagcggcgacgttgatatttacatcggcgtgagtgcgggcgcgcacgacggctgggtcagacgcaaactgtttgaagacgcatttgccaccgcccagcgcaaagggcatcctcgcggtacggggccgctggatctggggcagtattgcgccctctctcatctggtggtctcctcccagggcgatccatttaccggctttgtcgaccagacgctggccgggctgggatatcaacgcaacgtggtgatgtccacgcaaagctatgccatggcaccgcctctggtggcggggactgacctgatttgcaccttaccgggacgcatgttgcagcagttcgccaccacgctggatattttcccgcccccgctgccactccagccgatcgccatcagcatgttctggcatcctaaaaacagtcaggacacggcgaacgcctggctgcgcgaacaactgctgctggccgccgggcgtcaaccctga

SEQ ID NO: 123896 - DNA, 741 bp, Enterobacter cloacae
atgaattcaatagctaaggcattactggtggcagtaccgatgttgagcgcaaccgctaccgcggcaaataatgaactgtgtgaaccaaaagcctatgaaatggcgctgcgctaccagcagaagtcagctgaaatcatggcgcttcagttgcagacgtaccgttttgccaccggccgttttgtcgagaaagtgaaagatctgaaaacgccagaaaattacgcggtggtcatggatctggatgaaaccgtgctcgacaacaccccgctgctggtgcgcgacatggaacagtgccatgactacacccaatgggatacctggagcgactgggaaaaacagggaaaacccggcctgatccccggcgcgaaggcgtttcttgagcatgtgaatcaaagcaaggtgcgtatctactacgtctctgaccgcatgcaggaaaataaagcagataccatcaacacgttaaaatcccttggcctgccgcaggtctcggacgacagcgtgcttctggatacggtgagtaaagaagagcgccgccagaacatccttaaaaagcaacagatcattatgttgtttggcgacagcctgccggatttcgccgtgcagtttaaaaacaaaaaatcgagtgagcagcagcgcgagctggttgaggcaagcgcagagcattttggcaatgactggattgtgctgcctaatgccgcttatggctcatggtctaaagccacgccggacagctggaagccgtaa

SEQ ID NO: 123897 - DNA, 1785 bp, Enterobacter cloacae
atggaattcaggacatttcaaaagcagtggggtgctgagtttatttccggtgacgttgtacgttttcgcgtctgggctgagggacaacaacaacttacgctacgtctggcagaacgcgatctgcccatgacggcggtcgggaacggctggttccagattgacgtacctggcgtgacgcatggcaccgagtatcagttcgttttacaggatggcatggcggtacctgaccccgcatcgcgggcgcagaaaggggacgttaatggcccctccgtggtgattgaccccggccgctatcagcccatcaacccagactgggcagggcgaccgtgggaagagacggtgatctacgaactgcatattggcacctttacgccgcagggcaccttccgggcggctctcgacaagctgccgtatctggctgaactcggcatcacccagcttgaagttatgccggtttcacagttcggcggcagccgcggctggggctatgacggcgtattgctgtatgccccgcattccgcctatggcacgccggaggattttcacgcgttcatcgatgcggcgcacggcctgggcctttctgtcgtgctggatatcgtactcaaccatttcggcccggaaggaaactacttacccttgctgtcacccgcgttttttgatgcgcagagaatgacgccgtggggtaacggtatcgcctatgaacgggagccggtcagacactacattcttgacgcgcccctgttctggctgaccgaataccgtctggatggcttacggtttgatgccatcgaccagattaaagatacggcgtcgaaacatattcttcagcagatcgcggaaacgatccgcgaagcgctcccggatcgtcatatccatctcaccaccgaggacagccgtaacgtgattttcctgcatcctcgggatgagaagggagccacgccgctgtttaccgccgagtggaatgatgatttccacaacgccgcccacgtctttgccaccggcgaaacgcatgcctactatcaggattttgccttcgaaccggaaaaaaaattcgccagagcactcgcagaagggtttgtctatcagggtgaggtctctttgcagaccggacactcacgcggggtggaatgccacacccagccgccgaccttctttgtcgattttattcaaaaccacgatcaaaccggtaaccgcgcccagggcgaacggcttataacccttgcgggcgcggataaaacccgcgttctgctcgccgcgctgctgctgtcaccccatatcccgctgctgtttatgggcgaagagtatggcgaaaccaacccgttcctgttctttacggattttcatggcgatctggcgaaagccgtgcgggaagggcgggcaaaagagtttaccggccacagcggacacgatggcgatgtaccggatccgaatgacgagcagacttttgcccgctcaaaactggactggcacaacgtgacgactgcgcagggtaaatcctggctgcgcttcacgcgaagcctgctggtcctgcggcatcgctatcttgtgccgttacttcgccctggcggcaccgttgagggcaaaatcgttaagactgctcccggtatagtggcggtgagctggtctttcccgacggggacattgtcgctggcgctgaatatcggtaataagcccgttgacgttcctgcgctggcaggcgaaacgctctttagctggccggaggccgctgaggtgttagcgccgaacagcattgtcgttcgttttgcagatggagacgcatcatga

SEQ ID NO: 123898 - DNA, 2469 bp, Enterobacter cloacae
atgatcccttgtgccacataccgaatacagttccgcaatggcatgacctttgaccgcgtggtggagctggtgccataccttaaagacctcgggatcagccatctctatgcctcaccgatatttaccgccaccaccggttcaacccacggttatgacgtcaccgatcctaacgaaatcgatcctgccattggcgggcgcgccggtttcgaccgcatgacggcggcactcaggcaggcgggaatggggctcattctggacatcgtccctaaccatatgtcgacctcgctggaaaaccgctggtggcgggacgttatcgcgtttggtcagcaaagccgttacgcgcactattttgatattgactggtcgcgcccgctgacgctgccgttccttggcgacacctttgaggccgagctggagaagggggcaattgctctgaaacgtgacagtgtcaccggtgaggccgcgctggtctactatgacacagcctatccgcttaaccccggaacatgggctgcggagaaaagcatcgaggcgatccacgaggcgcagagctggcggctgatgtcctggcgggaagcgccgaaacagctctcatggcggcgcttttttgaaattaccggcctggtgggcgtcagagtggaagacgagggggtgtttcaggatacgcatcgcctgatcatcgagctcgtgcataccggcattgtcgacgggttgcgcattgaccatatcgacgggctggccgacccgctgggttacctgcagcggttacggcaggcaaccggtcccgactgttatatcacggtggaaaaaattctcgccaaaggggaacaactgcctgtggaatggccggtctccggcaccaccggatatgagtttatcgcctcgctggccgaagtgctggtcgacgataataacctcgggcggcttgaaaaaatccacgacgagacgctgggcgtgacggtcgatcgccatgcggaacttcgcaacgctaaagggctgatgaccgatcgcaattttgagggtgaattcaccacgctgcttaacattgccaccgaccttgcccgatgcaacgacattgacgtgccgcaggacgacatacgctacacgctgcgcgaactgctgattgcgtttccggtctaccgcacctacggcaccaccgacgggttaaccgccccggatgtcgcgctgttgaaccgcgttgttgccagcgtcgacgcaccggaaccggcgttaagcctgttggtgaggatcctcaccggcgacctggacgccagcagccgcgatgcggcctcgctgttcagaacccgcttccagcagcttaccgggccgctgatggcgaaatcggtggaagatacgctctttttccgccataacctcgagctcgccctgaacgaagtgggggccgatcccaccccgcgcgcgttctcgttatcccgctttcaccaggagatgcgcatccgtctggcccgtcagcccgatgcgctgctggggacctccacgcacgacaccaagcgcggggaagacgcgcgggcacgcctctacaccctgacggaagccccggaacagtggggcgaaaatctggcgcgctggcgacagatgaaccagacccaggtgcgttttctcaatgacggtaccgcgccaaacgcggccgatacctggatgatctaccaggcgctggcgggcgtctggcctgcaacgttgtcgcctgacgatagtgaagggctgaagtctctcgaagcgcgtttcctcgggtttattgagaaagcgctgcgcgaggccaaacagcgtaccgactggatcgacagcaatgagagctatgagagcgtggtgctgaattacgtccggcacttgctgtcccctgagaacacgctgttcctgcatgatttctcgtcctccctgcaaccttttatccgcgccgggctgatgaacagcctgagccagacggtgatcaaactgacggcgccgggcgtaccggatatctatcagggaagcgaggcgcttaattttagcctggtcgacccggacaaccggctggagccggatttcgccacgctgaggcaaaacctgagcagcgccgacgcaaagctctttgccgacgaacagcagtggcgaaacggcagggtgaagcagtatgtcaccgccacgctgttacgcgtccggcagcactatttatcgctcttccagtacggcgactggctgccgctgaaggtcagcggcgagcgcgaggaaaacctgattgtctacgcgcgcgtgaaggacggggaggcgctgattgttgccgtaccgcgtctggtttttgctacccccacaaacgaaacgctgtgggccaacacttcggtcgtcatccccgaagagctttccgggaaacgctaccgggatctgtttaccggtgaacgtcgggcgctgcgggagacgctggatttaacgtctgaaacaggaagtttgttagttctgcttacctgcgaataa

SEQ ID NO: 123899 - DNA, 1410 bp, Enterobacter cloacae
atgacgctcttttcaaaccaacccggcgacgaagggttaccgggacatgaacgcgcccgggtgatggctgcggtgatgaccaccacgttgatgggcgtattcgatggcaccatgatcaacattgccctgccatcaatggccagcgcgatgcaggtgcccgcgaatgtcgcagtctggttcgctaacggttacctgctgtctgcggcaatgacgttagccatcttcgccgccctcgccgcgcgcgtcggttaccgcccggtgtttctggcaggactggctacgtttaccctgacctcgctcggctgcgcgctggcaacaacgccggaaatgctgatcgggatgcgtattttgcagggtatcggcggcgcggccacgctgagtattgccccggcgatcctgcgctcggtattcccgggacggctgcttggccgcattctggggttacacgctctgcttatcgccgccagcaccgccattgcgccggtgctgggcggaacaatactcgacgtactgagctggcaatggctgttcgcgatcaacattattcccggtaccgttgccctgctgctggcctggaaagcgctgccgcgggcgacggcctctgatacgtcaccgttcgacgtgcccggtgccctgttgtccgtgatcctgctggggtcgatgatcatggcggcaaacagcgtagagaatagagcgcacgccatcagcaccgtttgctgggcatttgtcgccacggtcagcctcatcgcttttgtctggcatatccgccgtgcccggagccccattctgccgccggtgatattcagcaacggacggtttaccctcgccgcgctaacctcgctggcctcgtttgtgagtcagggcattacctttatcgcgctgccgtttctgtttcagagcgtgtacggctatagcccggcgatctccgctttactgttcaccccctggccgataggtatcgtactcattgcgccgcacgcgggccgttgggcagacacgatctccgccccgttgatctccacgcttggactgatgatttttgtcgttgggttgattttgctggcgacgctgcctgccggcccttctgcctgggatatctgtctcaggagcctggtgtgcggtatcggctttggctgtttccagagtcccaataaccgtgaaatgctctctaacgttgcccgggagtacgccagctatgcttccggggtattgtccatcgtcagaacgttcggccagtgtctcggtgccgccgtggtgggagttttgctggctgcgaccgcagggtcagatcatcaaatgctggatgacggtgccgttcatattgcgctgtggatcgcggtgatcgcgtcaactgcgtcagtattatttagcgttagccgactgcgtcgcgcgcgacaggctacggcataa

SEQ ID NO: 123900 - DNA, 912 bp, Enterobacter cloacae
gtgaccgatcctgatttcaacttgcttgtcgcgctcgacatcctgctggctgaagccagcgtggcgggggcggcgcggcgtcttaacctgagcacctcagccatgagccgcacgctgagcaggcttcgtgaggtcaccggcgatccgattctggtgcgggctggtcgtcagatggtgctgactccgtgggccgaagcgacccgggatcgcgcccgacatgcgctgcatgaggcaagggcggtgctgcagccttcaacggacaccttccgggcagaaaatcttgaacgggtgtttaccgtcagagccaatgatggctttgtggtggcgtttggtccgttgctgattgcggccgttgcggaagcagcgccggatgtctgcatccgctttgccccaaaaccggagaaaacgtcgcgttatctgcgggaggggctggttgacctggaaattggtgtgcagagcaacatggggcccgaaattcgtctgcagcggctctttgaggaccgctttgtaggcgccgtgcgcaaagggcatccactggcggcgctgccagcagtcagccttgaggattatgtcgcctggggtcatgtggtgaccgcgccaaatggctcatcacacggttttgttgatgatgccctggccgcgcgggggatgaaacgcaaaatcgccagcgtggtgcccggttttccgacggccttatccgtggcgctggcgtccgatctgattgcgatggtcccggcattgtatctgctcaatcaaccgatgagcgagaatgtgcacatctttgaactgccgttcaacacccggaccattaccgtatctcagatgtggcacccgcggatggaacaggatccgggccaccggtggctcagagagaaggtgctagcggtgtgccatcagtcgcggcaccgataa

SEQ ID NO: 123901 - DNA, 1458 bp, Enterobacter cloacae
atgcagagtaagcccgccagacgccccttctccctggctctgcgcctgacgttctttatcagcctctccaccattctggcttttttcgcgtttacctggtttatgctccactccgttgaaaagcactttgccgagcaggatatcagcgatctgcaacaaatcagccgcgccatgcaccgcatactgcaatcgcccgcggatccggatgaaaagaaaatcagcaaaataaaagagtcgctggccagctatcgcaacgttgccgtcctgctgctcgatccccgtggcaatgtgctcttcagctcacagggcgaggccatccggccagcggtgaataccgcggatttcagcgcccatcgccgcgcgcaggatgtgtttctttggtcagtggaggacgctggcaaggcgatgcacgccgggtccgacatgaagatggaaacataccggattatcgcctcgtccggcacggcgacattgcagggaaaagaacaacactatgtcatgctgatcggcctctccattaattttcatcttcactacctcgaggcgctgaaaaagaacctgattgccatcgcggtggcgatcagcctgctgattattctgctcattcgcatcgcggtacgtcagggacacctgcccctgcgtaacgtcagcaatgcgataaaaaatatcacctcagagaatctggatgcgaggcttgagccgtcgcgggtgccggttgagctggagcagctggtgatctcgtttaaccacatgattgaaaaaattgaggatgtctttacccgtcaggcaaatttttctgccgatatcgcccatgagatcagaaccccgatcaccaatctggtaacgcaaacggaaattgcgttaagccagaaccgctcgccgaaagagctggaggatgtgctgtactcaagccttgaagagtacaaccggatgacccgaatggtcagcgatatgctgttcctggcccaggcggataataatcagctgatccctgacagggtaacctttgatttgagcgcggaggtgatgaaagtctttgatttcttcgaggcctgggcggaagaacgccatatcacgctgcgttttaacggcacgccctgcctgatagacggcgatccgcagatgttccggagagccatcaataacctgctctccaatgccctgcactatacgccggacggagaaacggtgaccgtgtcggtaagcgaaaaagaaaatgcgtgcgagctgatcgttgccaaccccggcaagccgatccctgaggcgcatttgccccggctgttcgaccgtttttaccgggtggatccgtccagacagcgaaaaggcgaaggcagcgggatcggcctggcgattgtgaaatccatcatcaccgcgcatcacggcaacgtgcgtgtggaatccgatgctgtgacgacccgttttatattatcggtgccgcgactgatggcacaccgctag

SEQ ID NO: 123902 - DNA, 1386 bp, Enterobacter cloacae
atgttcctgctaaaacgactaagcatcactacggtatttatcctgacaggatgcgtctcgctggcccctgaataccagcgcccgacgtcaccggtaccccagcagttttcgctgtcgcgtaacagcctgacgcccgtggagggcatgtatcaggacaccggctggcgcaacttcttcgtcgatccgcaaatcgcgggattgattacagaggccctgaagaacaaccgcgatataaaaatggccgcgctgaaggttgaagaggcccgggcgcagttcaacgtgacggatgcggatcgttatcctcagctgaacgcctcctcgggcatcacttacagcggggggctaaagagtgacaaacccacctcacagcagtacgacgcgggacttgcgcttagctacgaactcgacttttttggcaagctaaagaacatgagcgatgccgaccgacaaaactttttcgccagcgaagaagcccgtcgtgccgtgcatattttgcttgtcgctaatgtgtcccagagctatttcaaccagcagctggcctacaaacagctgcgtatcgcgcgggatacgctgtcaaattatcagcagtcttacgccttcgttgagcaacagctggtgacgggcagtacgaacgtgctggcgctggaacaggcccgggggcagatcgaaagtacccgggcagaaattgccaaaagagagggggagctggcacaggccaataatgccctgcagctggtcctcggaacgtatcgcgcgctacctggcgacggcggaatgaacgccagcgatattgtgccggtaaaactaccaccccatctttcatcggcaatattgctgcagcgcccggatattatggaagcggagtatcagcttaaagcggccgatgcgaatattggcgcggcgcgcgctgcctttttcccgtccatctccctgaccagcgggctttcaacgggcagcacggaattatctggcctcttcacgtccggcagcggcatgtggaacgttattcccaaaatagacattcccatttttaatgcgggcaggaataaagccaacctgaagctggccgaaattcgccagcagcagtcggttgtgaattacgaacaaaaaattcagtccgcctttaaacaggtcgccgacgcgctcgcactgcgggacagcctcagccagcagtttgctgcgcaattgcggtatcttgattcgctaaacatcaccctgcagcgtgccagagggttatatacccgcggtgcggtcagttatatcgaagtattagacgcggaacgcgcgctgttttccacgcagcaaaacattctcgaccttatttatgcccgacaggttaatgaaattaatctcttcaccgcgctgggcggcggttgggtcgaataa

SEQ ID NO: 123903 - DNA, 342 bp, Enterobacter cloacae
atgcgtaattcaatgaaggccgttgtattcggtgcgatctccatgatgttttctgccggcctgctggccgaggttcatcagcacgcagagatgagtgctgccagcgaaggggccacagagcaggttgtctccgggactggcatcgtaaaggacattgatttcacaaacaaaaaggtaacgatcgctcatgaagccatcccggaaattggctggcccgccatgaccatgcgtttcacctttactgacgcagacgaaagtattaaggccgtaaaagtcggcaaccacgtgaaattttcttttgtgcagcagggcaatatctctttactcaagagcattaaatag

SEQ ID NO: 123904 - DNA, 1242 bp, Enterobacter cloacae
atggcatcgttaaaggttaaatatgctgcaatgataatcggcagccttcttgcgggagggctgattgcagtgacggcgtggcagtatatttatgctgccgaaaaaacagaaaataccccgccggaacgaaaggtgcttttctggtatgacccgatgaagcccgacgttaaattcgataaacccggtaaatcgccgtttatggatatggatctggtccctaaatacgcggatgagaatgacgataaaaacggtgccggtatccgtattgatccgacgcaggttcagaacctgggattaaaaacgcaaaaagtgacccgcggcacgctgaattatgcccagaccctcccggccaacgtcagttataacgaatatcagtttgtgattgtgcaggcacgatccgaaggctttgtggagaaagtgtatcccctgacgacaggcgatcgtgtgaagaaaggcacgccgctcatcgatatcaccattccggagtgggtggaagcgcagagtgagttccttctgttgtccggcaccggtggcacgcccacgcagctgaaaggggtgcttgaacggcttcgtctggcaggcatgccggaagcggatattcaaaggttacgctcgacccgcacggtccagacccggtttaccatcaaagcccccattgacggggtgatcaccggctttgacctgcgtaccgggatgaatatttcgaaagataaggttgtggcacagattcaggggatggatccggtgtggatcagcgcggccatacctgaatccatcgcgtatctgctgaaagactcctcgcagtttgacatttcgctcccggcgtacccggatacatcgtttcacgttgaaaaatggaacattttgccaagcgtcgatcctgctacccgtacgctgcaggttcggttgcaggtttccaacaaagacgaacggctcaagccgggcatgaatgcatatctgaagctgaacacccaaagtcaggagatgctgttgatcccctcccaggccgttatcgatacgggtaaagaacagcgggtcatcaccgttgatgcggaagggcggtttgtgccgaagcagatccacgttctgcacgaatcccagcagcagtccgccgtaggatccggcctgaacgaaggggagtcggtggtggttagcggtctgttcatgattgattccgaagccaatattaccggtgcgctggagcgtatgcgtcagcctgaaaagagtcattcaggccattga

SEQ ID NO: 123905 - DNA, 3141 bp, Enterobacter cloacae
atgattgcatggattatccggcgcgctgtcgccaaccgttttctggtgatgatgggggcgctgtttcttagcgtctggggaacatggaccattatcaatacgccggtggatgccttacccgatctgtctgatgttcaggtgattattaaaacgagttaccccggccaggcaccgcaaattgtcgaaaaccaggtgacgtatccgctcaccacgaccatgctgtcggtgccgggtgcgaagaccgtgcgtgggttttcacagtttggtgattcctatgtgtacgttatttttgaagacgggaccgatctctactgggcccgctcgcgcgttctggaatatctcaatcaggttcaggggaagctgcctgctggtgtcagttcggaaattgggccagacgctacgggcgtgggctggatctttgaatatgcgctggtggatcgcaggggtaaacacgacctgtccgaactgcgttccttgcaggactggtttctgaaatttgagctgaaaaccatcccgaacgtggcggaggtggcctcggtcggcggggtggtaaagcagtatcagatccaggtcaatccgctgaaactggcgcaatacggcatcagtctggctgacgtgaagcaggccctgggatcctctaatcaggaagcagggggctcatcggtcgaaatggcggaagcagagtatatggtccgggccagcggctatcttcagagcattgatgatttcaataacatcgtcctgagaaccggcgagaacggagtaccggtttatctgcgtgatgtagctcgcgtacaaaccgggcctgaaatgcggcgcgggatcgccgagcttaacgggcagggagaggtcgcgggcggcgtggtgatcctgcgttcgggtaaaaacgcgcgtgaagtgattaccgcggtaaaagataaactggagacgctgaaggccagcctgccggaaggtgttgagattgttaccacgtacgatcgcagccagctgattgaccgggccattgataacctgagttataaactgctggaagagtttattgtggtggccatcgtctgcgcgctgtttctctggcatgtgcggtctgcgctggtggcgattatctctctgccgctaggcctgtgtattgcctttatcgtcatgcatttccaggggctgaacgccaatattatgtccctgggcgggatcgccattgccgtgggggcgatggtggatgccgccatcgtgatgattgaaaacgcgcataaacggctggaagagtgggatcatcagcaccctggcgagcagattgataacgcgacccgctggaaggtgatcaccaacgcctccgttgaagttggccccgcgctgtttattagcctgctgatcatcaccttatcgttcatccctatttttaccctcgaaggtcaggaagggcgtctgtttggtccgctggcctttaccaaaacgtacgccatggcaggcgcagccgcgctggccattatcgtcattcccattctgatgggcttctggatccgggggaaaattcccgccgagagcagtaacccgctgaaccggctgctgattaaagcctatcatccgttgctgctgcgggtgcttcactggccaaaaacaaccctgctggtggcggccttgtcgatcttcacggttatctggccgctgagtcagatgggcggcgagtttctgccgaagatcaacgaaggcgatctgctgtatatgccatcaacattgccgggcgtttctccggctgaagcggctacgctgttgcagaccacggacaagctcatcaaaaccgttcctgaagtggcgtctgtgtttggcaagaccggtaaggcagagaccgcaacggaccccgcaccgcttgaaatggtggaaaccaccattcagctgaaacccgaggatcagtggcgacccgggatgacgattgacaagattattgaagaactcgataaaaccgtccgtctgcccggtctggctaacctctgggtgccgccgatccgtaaccgcatcgacatgctttctaccgggattaaaagcccaatcggtattaaggtgtcaggcaccgttctgtcggatatcgacgccacggcgcagagcattgaagcggttgccaaaaccgtacccggcgtggtgtctgctctggcagagcggctggaaggcgggcgttacattgatgtggatattaatcgtgaaaaagcatcccgctacggtatgacggtgggggatgtgcagctgtttatctcctccgccattggtggcgagacggtaggggaaacggtcgagggcgtggcccggtacccgatcaatatccgttatcctcaggactaccggaacagcccgcaggcattgaaagagatgccgatcctgaccccgatgaagcagcaaatcacgctgggggatgtggcggacatacgtgtcgtttccggcccgacgatgctgaaaacggaaaatgcccgaccaaccagctggatctatattgatgcccgcggcagggatatggtgtcggtggtcaatgaccttaagacggccatcaaccagaacgtgaagctgagaccgggaaccagcgtgtcattctccggtcagtttgaactgctggaacacgccaataagaaactgaagctgatggtgccgatgacggtaatgattattttcattctgctgtatctggcattccgccgcgttgatgaagccttattaattttgatgagtttgccgttcgccctggtcggggggatctggttcctgtactggcagggcttccatatgtctgtcgccaccggcaccgggtttattgccctggccggggtggccgccgagtttggcgtggtgatgctgatgtatttacgccatgccatcgaagcgaacccggccttatcccgacgggagacgttcaccgcacaagcgttggatgacgccctgtaccatggtgcggttctgcgtgtccgacctaaggcgatgacggtggcggttatcattgcgggtctgctgcccatactctggggaaccggcacggggtcagaagttatgagtcggatcgccgcgccgatgattggcgggatgatcaccgcgccgctgctgtcgctgtttatcattccggcggcgtataagcttatctggctgcgcaggtataaaaagcaataa

SEQ ID NO: 123906 - DNA, 576 bp, Enterobacter cloacae
atgattaaagcactatatcgtcgactaaaccactgtaacgacctggcggtaagaatcagcaaggccaatactgcacaactgcaacagttaaaagcggaactggccgaactgatcgggacacccacgggatgctataccatgggcattccagctgttctcagtacccttggggtgatcgtcagttttgggataccgcagctgtggttgggttacaacgtcagcgccgccctcgggcaacctgaagaaagcgtatttatatgggtggttttgatcgccctgctgttctcaggcatcaatggcatgacgatgtttctgattggcaaaggcctcatgcgtgccgtgcaggtgcatcttacgctggcggttatgagccttgtgttaacgtcagtctatctgctgactgcgctaagcggtgcgagtgttccgggcgtcagtctcatcgcggcgctgataagcatctctatgctgctgctcagcggttactgcatccactctacttctttctataagatgctgctctttaccctgcacaatcgtgcctggcgtaaacttttgcaccagactcgtaaaacgtaa

SEQ ID NO: 123907 - DNA, 312 bp, Enterobacter cloacae
atgagctgcgagcactgccgtgaactctgtgttaagtacgttatccggacgcccgatcagttacgaaaagcaattcgtattgccagaaatgcaatcaacgaagggatgttgtcagaagttctgacaaaggacgactggaatcagtacagcttcagtgagtgcgctgaaaagatgatatggggcgacatcgtcgattaccactttgcgtgcaacttttgcggtacccagttcgtcctgggggcagaaacgtaccatggaagtggaggttactggtcgccagagtttgaaaagccttccgacatcattgactga

SEQ ID NO: 123908 - DNA, 144 bp, Enterobacter cloacae
atgacggctaatgacggccatgaaaagctcaattctcccagattcaatgttggtgcgcataatgtatattatgttaaattcgataaatccttaaatcatatcctgtgcctcagcctctgctcgcacatcataatcagtcaatga

SEQ ID NO: 123909 - DNA, 312 bp, Enterobacter cloacae
atggcgataaccgaagaaaaacttctggcttctggatttacatcctcggacctgcagaagctgcgtaagtacataataaaagatgccctttctctggatatggtgatatccgacttgtccagacgttttaacgcagcattgttgttgaccatattgcttgctgctgtttacctcatagtacttaccatagcgtccagagaaaatgttatatccacaggtgttgctatgttgatcgctttgttcatcatttggtttttccagccaccgcttctttcctataaggcatggaaatttaaaaagaaaatccgctaa

SEQ ID NO: 123910 - DNA, 801 bp, Enterobacter cloacae
atgtatatcgccgtcccccctggacaaaaaagtgtagcgtggtcagaaatggcgcttgatcgcgaagcccgcagattagtgaatatcgccaatataatctcatcaacacacctcaaggatggcctgacgcgcctcagatttgtgaaagaaatccgcgatcttatctctcagcagttggcagcagctcgtagacttaaaacgattgaatcttatacgcactcaacagagatattacgtacagagacggcaaacttactggaacaggacagattaatacgcaccagggccgcacaaatttacgcaaagattgaatttgtgaaggagaataatgaaattgtcggatatgtaatcagcgctgttagtgtagtgttatcaggttttgaaatcgttggcggagtggctctttttggcactatgacacctgtagggatgctcgccggagctacgttagttatggacggtctaaacgggatttccagggaaataaacaatcagcttttagaaaaggaaaattctaagggtgtttttgcagatggtgcgatcgcggcggctcagtttttaggatttcgcgggaatacagggttagctttatataatggtgtcagtctggccgcgaacatctatggtgtgtttgggctaatgagaaaaccagatgcatggcgactttttcactatgtaccacaagattattacagaaaagtcagttcaatgagtcgcccaatgttgacgatgaaaattgtagggtatggactcaaagcaaaaatcatttttgatctgttagcaactgagacgaactcttag

SEQ ID NO: 123911 - DNA, 1368 bp, Enterobacter cloacae
atgaacagcaatctgcttccggtcgacgacgaaccgggcgttccacctccgcatgtcagtttccgtgaagcctttttattctggctgaagctgggattcatcagctttggcgggccggctggtcaaatttcgataatgcatcaggagctggttgaaaaccgacgctggatatccgaacagcgctttttgcatgcactgaattactgtatggtgcttccgggcccggaggcgcaacaactggcgacctatattggctggctgatgcaccgcacctggggcggcgtggttgccgggacactgtttgtgctcccttccctttttatccttattgtcctgtcgtggatttacgtggcatatggccatttgtctgtcgttgccggtctcttttacggcataaaaccggcaattacggcgattgttgtgcaggctgcgcaccgtatcggttcgcgggcgctgcgtaaccgcacgcagtgggcaatcgctgccgccgcgtttgtcgccattttcgccctcaatgtcccttttcccgttattgtcctgtcagccgcaatgatgggttatgtgggtgggcgccttttccccgaccattttggtcagggtaacgcccatgacgccagccgaaaatcctacggtgctgccattattgatgaccatacgccagcggctccgcatacggttttcaaatggtcacgcttgaccctgattatcattgccggtgtttttttatgggcaacgccaatggcgatgctctatctgagccttggctggatgcacccgtttgcccagatgggctggttctttaccaaggcggcgctgctgacctttgggggtgcctatgcggtactgccttatatctaccagggcgcggttggccattatcagtggctcacgccaacgcagatgattgatggtctggctctgggcgaaaccacgccggggccgcttatcatgattgtggcatttgtgggatttgttggtggctatgtgaatatggcatatggcccggatcagcttttcctggcaggtgctgtagcggccgtgctggcgacctggtttacgtttctgccatcgtttctgtttattctggccggtgggccttttattgaaacgacgcacaacaatattaattttaccgcgccactcaccgcaattaccgcagcggtggttggcgtgatcctgaatctggcactcttttttggctaccacgtgctctggccacagggttttgatggcaaaatggactggatagcagcggtcattgcacttgctgccgctatcgcacttttccggttcaaatataaagtcacacatgtaattgccgcatgtgcggtaatcgggttgattttacatcttttcctcagaacatag

SEQ ID NO: 123912 - DNA, 444 bp, Enterobacter cloacae
atggaaattgaactggataaaagttttaaagaacgcgttttgcatgcggttcttttcgaagtgacggccaatgtcatcattgcgctgtcacttgcgtggctgatgaacgtgtcggtgcttcagtcgggttcgttgtccgtgatatctgcacttgccgccacggcatggaattttgtgtttaataaattctttgacgccttgcagaaaaaatatgcgtttcaacgaacatttctcgtgcgtgcaatccatgctgtctgctttgaaacaggacttatcattacattaattcctgtcgcgatggtaatgctgaatttaacagtcacggaggcattttttgtcgagatcggtctggtactgttttttctgccatacacgatgctctttaactggctttatgactacctgcgttggacatttgttgggcggaaacggtccgccatttag

SEQ ID NO: 123913 - DNA, 420 bp, Enterobacter cloacae
atgcgttgtaacttaattaaagcagtatgtcttactttagcggtttctgcagccggaactgccctggcagctcagaaagcgtctcagggcggtattactctttttgctgaaaaacaatcccaaggaagtcaatgggatagcacaactggcgaagcgcagtacatggtcagctacaaggtgacactgaataacgcgtctgataaaagtattgagccgggcaaagacaataaaatgtgtttcttcctgtttgataaaaacggcaaatcatttatgagtaccggtatcgaactggagatgctgaaaaaatacaagccgatggataaccgtacgggaatggtgtatttcagcagttcgaaccctgacgttttgaatatgccatttgtccgtttcggcattggacaggattgcacaaaaggatga

SEQ ID NO: 123914 - DNA, 363 bp, Enterobacter cloacae
atgacacaacagttgattttaatcgcgggcccctggcgcagcgggactgatggcgaccaggccaaaatggatgaaaaccttacccgtctggaaaacgcagcattagccgtatatcagcgtggccacgttccggtgattggtgaatggcttgcgctaccgctggcaaaggccgctggttcaacgtccattggggatgaaatcagtgaagcgatgctctatcccgttgcacaccggcttattgggaaatgcgacgcgatttatcgtattgccggtgcgtctaagggagctgatatggatatcgaggttgcccgtaagctcgggctgaacgtttacacctcattagaaagcatccctcaggcctga

SEQ ID NO: 123915 - DNA, 1296 bp, Enterobacter cloacae
atgaggctctggccacgctcgttactgacgcgactgctgattatcgtgatgctggggctcctgctggccaacgcgctcagcctcacgctggtcatgcttgagcggatgcgcagcgcccgcacggtgatgctcggcaacctggaatatgacgtttccaccagtgtggccatcctcgaccggcttcccgcgagggagcgtccagcctggctggaacgactggcgcgggggaactatcgctacattctgggcaccggtgaaccggggcccgcaccgcatgacaaacgctcgcaggatgccatccgcaccctgacagaggcgctgtcggcaacctggccactgacgtttactgccgtgccggggccggtttcccatattcaggcccaccttacgctgagcgatggttcgccgctgaccattgaccttatcccccgaatgcctccggtcgccagctggctgcctgtagtgcttgtgttgcagctactgcttctggcgttctgctcatggattgccgtgcgtcaggttattcgacccttttctcagtttacccgggcggtggattccctcgacccggcagcaagctcgccaatgaccgagacaggaccagtcgaggtgcaacgggccgcgcacgcctttaatgcgatgcaggcgcgtatccagtcttacctgcgcgagcgtgcgcagatcctggcttccgtatcgcacgaccttcagaccccgataacgcgcatgaagttgcgcgtcgaaatggcggaccagccggaactgcgggacaagttgctcaatgacctggacaatatgacgcgcctggtgcgggaaggaatagcgtatgcccggtcatcagaatcgctggaagagacctcgctcaagctggagttgaatgcctggataaacagcatcgccagtgattaccaggacatcgggaaaaacgtgcagcttcaggcaaccgatgcccgtctgcccgtggtcacgcgtccgcaggcgctacgccgggtgatgaccaatctgctggataatgcgctgaaatttggcgactacgccgtcattacgattcattcagatgcccatcatgtcacgatcgccattcgcgatggcggaccggggataccggacgccgaactggaggcagtattgcagccgttttatcgggtggaaacctcacgaaaccgcgacaccgggggtaccggattagggctggcaatcgccgcccagttgactgcgcagttaggcgggaaattgcatctggcgaaccacgccgagggtgggctggacgtttcgattacgctgccgcgcgggtaa

SEQ ID NO: 123916 - DNA, 441 bp, Enterobacter cloacae
atggctgtcacggtaagacctttaagcgcagacgattacgcccagtggcgaccgctatgggacgggtatacccatttttatgactgctttctcgatgaatcggttaccgcatcgacatgggaaagggcgctctcagcgcattcaccgatgttctgccgcgtagtagagaaagacgaaaagatcattggtttcgcgatgtgcattctccacgaaggcacctggtcaacggcccccgtttgctacctggaagatctgtttgtcgatgccaccgaacgcggtgcgggggccgggaaggcgctcattgatgccctgatagccgaaggcaagcgcgaagggtggtcgaaactgtattgggtgacccgggagaacaacccggcgcgtaaactctatgacaaatacggcgaagctgacgattacgtacgctaccgcctctcgatgtaa

SEQ ID NO: 123917 - DNA, 471 bp, Enterobacter cloacae
atgacgttacgaaaagcgcatccgcaggaagctgaaatactctggaatattcgcaatcaggcgattcgtcacggctgtaaaaccagttacgacgcggacgtcattgcgcgctggacgcccgacgacatgccggagcattaccggcaaatggtcattgaataccctttttacgtggtggaagatgaaaagggcaacattgcggcaactggctatcttgatctggatacccactgtctggaggcgatattcaccttgccggcggcatccggaaaaggcatggcgacccggattatcgaggcgctcaaacaggaggcccatagccgggggttaacccgcctgacgctcgatgcaacgcctaacgcccggtcgttttaccagaagctggggtttgtcacgctgagcgaaaagtatcatcactcgcgcatggcgggcgctgatttacgctgttttgaaatggcgatcaacttgtaa

SEQ ID NO: 123918 - DNA, 588 bp, Enterobacter cloacae
atgtgcttgtggtctcttttaaccggacgtgttttccaggatctcctgcagcatggcaaagagatagaggaggccattgctcgtcgtgatacccgtgttttgaatcattccacccccgagctggaagggtatttttctcgccccctcagcgagcttccgcgtcaaaatccttacccggtagcggcgctgttacctctttttttagtggcgtttgcgttaaaccttctgccttttctcagcgcgttgcagggattgtcacctttacatcatgcactgtgttttttcgtaccatcattaataatgacaggcgcgctcattgtaatcagcgtgcttctggcccgaggggtaacgtcaggattgttggggtttatggcagtgttcatcattctgctggtcataactctcgttcaggttctgcatcttctgttttctcatagcggaaacctttggccactggtcaccgcatccttcgcgctgatactttgtcggatggtaatgaatagcagcggctttgtgctgtttaccctctattgtcgcactcagcgtattgccagagttgcacgtgaaatccggttaaaaagccattaa

SEQ ID NO: 123919 - DNA, 966 bp, Enterobacter cloacae
atgaaaacacctgcaaccccagcaaatgaaatggaacgtctgaactcgctgcgcgagtcaggcctgcttgagatcgacagttccccggcgtttgaccgactgacacgtctggcaaaacgcttcttccaggttcccctggcgatggtcaatcttattgatgaacactcgctgattgtgaagtcggccgatggtcaggcgcctgaaaccgttccgcgtaatatctcgttttgcggccatacgatcctcagcgaagcgccgctggtggttgccgatatgcgtcaggacgatcgatttgccgataacccgctggtggccggtgagcccggcgtaaggttctatgccggttttccactgcgtttacgtgacggggcgagcgtgggatcgctgtgcctgattgattattctcctcgtgaattttccgcagccgatcttgccgtgctgggcgatctgagcgcactggcggaagacgagtttgctgccgtcagcgcggcgacaaccgatgaattaaccggtctgtttaaccgtcggggctttaaccagctgctccggttcacgctctccgtagccagacgtcgggcggagccgttaactctgggctggctggatctggatcgcttcaaagagattaacgatcgctacggacatgaagagggcgacaacgcgctgaaagtgatggcggaactgatgcgcacctctttccgtgaagcggatttgctggttcgctttggcggcgatgagtttgccgtgctgtttgccgataccgacgagcagggggcctggattgccatgcagtatctggccgagcaggttgaacagtacaatgcgcgcaggctgcatccctggtcactccatttttcctgggggctgagcgagttcgatcataacggcaacgatctgcagcagtggatgaaagacgcggatgaaaaaatgtatgccatgaagcagcagcgcaagcgcgcaacatga

SEQ ID NO: 123920 - DNA, 1056 bp, Enterobacter cloacae
atgaatgcagctgacaaactcagtagaccccctcgtgtaccaggaagccggtttgtcaaacgtatgtatctgatgcgtattctcggcacgtttctctgttttattcccatcctctccgtgctgattgaacagaatcgttcaatctggctgatgtgtttgctggcgttgaacgcgtttatctggcctacgcttgcctggtatcgggcgcgaaattcggccatgccgctggtgactgagcatcagaatctggtgctggacgccggggcggggggattctggatcgccatgatggcggttaatccgctgccgtcggtggtcattgccaccatcatgctgaccgaccggctctcggcagggggcgttacgctgatgagaaaggcggccatcaccatgctgggcgtttttctggtgacctggctgacgcagggaatggcggtggatatgtacgtttcgcagcgcaccatgtttgccacgctgccgctgattgcaatttatctgctggcgctgagcatattaacggacagcattgcgctgcgcctgcggatcaagagccgggagcttgagcggatcgcgatgatggatccgctactggatatcgcgaaccgacgtctgctcgaaaagcgcattgaccacgaactgaataaactgcgccagacgtgccgggaatcggccctgatgttcatcgatatcgacaattttaaagacgttaacgatcgttttggtcataaggttggggatgcattgctggcggccgtctcgcaaatactgcatttgtcgacacgcccgaacgatacccccgcacgccttggcggcgatgaatttgtggtgttgctgccggataccacccttgaagaggcgcaagttgtcgccagacgcattatggatgcggctgcaatgaaaaaggaggtggctcaggagacggtgcattgcacgctcagcatcggtatcgcctgtgccacgcgagaaatgataagcgtaaccgactggctacaggccgcggacaacgccctgtaccgcgccaagcgggacggtaagaacagaatattcgcgcactga

SEQ ID NO: 123921 - DNA, 1440 bp, Enterobacter cloacae
atgcgttcagaccccgctgccttcacgctttttcgccctgaatccccactgcgtaatgcggcgggtgtctttattctcaccaccttgttctactttatcggtgcggaattacgtctggtcgaagccttgtcgctgttctggccgctgaatggcgtgatggcgggcgtctttgcccgttatacctatctcaatcgcctgcataactacgcggtgtcgtatgtcgccatgctgatgtacgacgcggtcaccaccaactggggaatggcctcggtggtcatcaacctgtcgaatatggtctttatcgtcgttgtcgcattgctggtggtgcgtgataaacggttgatgaagaaaacccccgatcccattaatgcgctgcggctgttcaattattgtctgttcgccgccttattatgtgcgctgctcggcgcgaccgggtcggtggggatcgacagccataccttctggccgctgtttgccgactggttcagcgagcagttctcaaccggcgtgctcattttaccctgcatgctcacggtcagtatgccgacgcgggcattcaagctgcgtctggagcaacttttaccggtcattgcgctgattgtctcggtgatggcatcggtggtgattggcggggcgggaagccttgcctttccgctgccggcgctaatctggtgtgcggtccgctactccttgcccgcgacctgtctgctgacgtttctgaccggcggtctggagatcgttctggtcgctaactccattatcaatattgccgtgggcacgccgctctctaccccgatgatgttctccgcacggctggggattgccaccatggcgatctgtccggttatggtctccgtcagtatggcggccattaattcgctcatccgtcaggtgtcgttgcgcgcggattatgattttctgacccacgtttattcacgctcagggctctatgaggcgttaaagcgggaagaggcgcagcggcagacacgttttctgaccgtgatgctgctggatatcgattacttcaaaagcatcaatgataactatgggcatgagtgtggcgaccgcgtgctggccgcgtttgcccgcgaggttcagcaggttgtcggagacgacggtatggtggcgcgtatgggcggagaagagttcgcggttgtggtgaacaccggtgacgcgcagcacggctttgcgctggcggaacgtatcagactcaccattgccgctcatccgtttacctggcgccagcaaacgctctatcttaccgtgagtattggtctcgggagcgggaaggcggcgtcgtggcagttgaccgaagtattcaacaggctgatggccgaagcagacgatcatctctatcgttccaaaaaagcggggagaaatcgcaccagtgcgcgtgtgtcagacgatcccattaccccgaccccggagagtgaaacctga

SEQ ID NO: 123922 - DNA, 1080 bp, Enterobacter cloacae
gtggaagaacagagtgtaaccgccatccttacagaggccctgacgacgagggcctctgtcatttctctgcaatggttctgtcattttcgtttcgtagactcgcacgcgtctaacgtcttgttactgaagaaaattatgaacctaacgcaaatttatcgtcgtattgcgcagcgcattatcccccgccagtttggtctgctgaccggtatcttttgtattatcggcctcttttccgccctgcaactctcctcgtcgttcctgctcaatgcctcccttaaggaagcgcaacgcaacgagcagcaaaacctgctggcgtaccagcagcagagcaagctggatctggctcgcgtttccctgctggccgcaagcgatctgcttaaccgctccggcgtctggtttatgcaggataaagagaccggctccgagggcagctggcacagcctgatggacgacgcgcaaaaggcgctggccgtttcgcagcaggcgtggaatgcctggctggcgcttaatccgccaaaagatgacgccctggttaacagctatcagcttttttacggcgcgataaaagagcaggcggaagggctggtgaaaaccaacaccatcgatgcgttttttgccgtgccagcgcaggcgtttcagaccgactttaatgacaactatgcccgctatcagcaagcaagcgagaagcaggcgctcaaagggcgtcagtcgttgattgcgcagctctccggtttgcaaacgctgtttctgcttgcgcctgttctgttgctcgctattgcggttgccgtctggttcgggatgtcccggtgggtgattaccccgttgcggcgcttgattgcgcatatcaaccggctggccgcgggcgatctctccggtaccactcctgacgtgacgcgttttaaccgtgaaattgcccagctcagcgacagtattgccaccatgcagaacgggctacagcagctggtgacccaggtcagcgatgcgaccaccgccaggtggaaaacattggcgcactggcgcagggcaatcaaaagctgtatcaccagtcggcgcgtcaggccaaagagctggaagacgtga

SEQ ID NO: 123923 - DNA, 762 bp, Enterobacter cloacae
atgaagggatataaccggttagagcagataatggattacctcaaagggcacaacctggtcacggtggatcaactggtggcgatcaccgatgcctcaccggcgacgatccgccgcgacctgattaagcttgaccaggagggcgtcatcagccgaacccacggcggcgttactcttaaccggtttattccttcccagccgaccacgtccgaaaaaatgcagcgcagtctggcagaaaaacatgccattgccagcgcggccgcgagctttgtgaaagcgggggatgccattgtgctggatgccggtaccacaatgattgaactcgcgcgtcagctcacgcatctgccgcttcgcgtcatcaccagcgatctgcacattgcgctgtttctctctgagtttaaacagattgaagtgacgatcattggcggccgtatcgatgattcgagccagtcctgtattggtgagcacgggcgtcggctgttgcagaatgtctggcctgatgtggcttttgtcagctgtaatggctgggatattacccgcggtatcacgtcgcctacggaagagaaggccgcgctgaagcgggatttaatagccaatgcaaaacgccgggtgctgctggcagacagctctaagtacggtgcctggtcgctgtttaatgtggcgcacctgaacaccctgacggatatcgtcaccgacagcaggctggatgaagcggcccggaaccagctggaacagcttgagacccgcctgacgctggcgtcatga

SEQ ID NO: 123924 - DNA, 987 bp, Enterobacter cloacae
gtgactaacattattgctgtaaccatgggtgacccggcgggcattggcccggagatcattatcaaatccctcaccgggagcgaattaacgggagccccggttgtcgtggtgggctgtgcccgcacgctcaggcgggtgctggatgatgggatcgtggggcaggctgacatccatatcatcaggcaggtcagcgaagcccgtttcgcacccaacgtgattaacgtgctggacgaaccgctggccgaccctgatgccctgaagcccggcgtggtccaggctcaggcgggggatttagcctatcgctgcgtgaagcgcgcgacggaactggcgatggcgggggacgtaaaagcggttgccacggcgccactgaataaagaagcgctgcatctggccggacatcactaccccgggcataccgagctgctggcccatctgacgaacagcaaagactacgctatggtgctgtacaccgatcggctgaaggtcattcatatcacgacccatattgcgctgcgtaaattccttgatacgctcaatcaggatcgggtaaaaaccgtcatcggcattgcggataccttcctgaaacgggtgggctttagcgcacctcgtattgcggtcgcgggcgtgaacccgcatgcgggagaaaatggcctgtttggcgatgaagagatcacgattgttggcccggccgttgcggcgatgaaggcgcagggggtcaacgtcaccggaccgtgcccgccggatacggtatttatgcaatgccacgaaggaatgtatgacatggtcgttgcgatgtatcacgatcaggggcatattccgctaaaattgctcggcttttacgacggggtgaatatcaccgccggattgccgtttatccgcacctctgcagaccacggaaccgcgttcgatatagcatggaccggtaaagccaggtcggagagcatgacggtgtctattcagttggctatgcaaattacacgggaataa

SEQ ID NO: 123925 - DNA, 1215 bp, Enterobacter cloacae
atgaaagaaaacaacctgttcagagacgtcgttgtcgttgcagatgactttaccggggcaaacgatgcgggtgtcagcctgacgctgagcggtaagaaggtcagcgtggcattccacaccccctttacccagccggtggatgcactggttattaataccgattcccgtgcgctgcgggcagcagaggcggccgaaaaagtggccgtactgggggcggatattgcggatgcgcgctggctcatcaaaaagattgattccacgctgcgcggcaatgtaggggcagaaacaggcgtccttaaggcagtaagcggcaaacggcaggtgattgtggcgccggcgtatcccgcggcagggcggatcacacgtcacggcaggtgtctggtgaacggcattccggtggatgaaaccgaattcgccagcgatccgaaaacgcccgtcccgtctgccacgattgctgacctgtttaccgacgtgagttgtcaatccgtaacggtaaacacgctggcagccgaactggcgcagggaacggagtggctcatcgtcgatgcccagtgtgacgaggatctggacgccattattgccgccgcgctgacctgcccgcagacgccgctgctggtcggatcggccgggttatgtgatgcgctggcacgccatctcgcccccgtgaagcgtcagcagttgctggcggtggtgggatcaatgagtgagatcgctcagcgccagattgcgctggccgctgcagagcctgcggtttcgtcggtatttattgatgttaatgatgtgctgaagggggagacggcgaacgcgctcatgcgcattatgcaggccctgaaggcgggccgtcactgcatcgttcatacctgcccggaccatgaggcgcgacatcaggttgaacggctttgcgcgcagtatcaaatgacccggaccgaactgggtgaaacgatctgcgccttcctgggagagattacccgagaggcactgacggcatgtccgccggatgcgttgtatgtctcaggcggcgatgtggcaatggccgtcgccagtgcgcttgatgcgcaaggatttgaaattacagggcgcgtcgcaggatgcgtcccttacggcaaatttctgggttgtgcctggcaccagccggtaatgaccaaagcagggggcttcggaaaagaagagacgctgcttgaggtgttgcattttatcgaggagaagactgagtga

SEQ ID NO: 123926 - DNA, 1149 bp, Enterobacter cloacae
gtggtaaccctcaatagcaccattattagcggcgcaaatgcgctcgccgccatcaggccattactcaccgataacgcgcagctcttgctggttacggacggcaacattgcgcgtctggaggcggcaaaacagatccgttcaattcttgaagagggcaaccgccgcgtcacggtgattgacacggtgccgcctgaaccctcccaccacgatgtcagccagttgctcgcggggttaaacagcggatcgtttgatgtcgtggtcgggatcggcggcggcagcgtactggatgtggcgaaactgctctccgtgctttgtcacccgctgtcaccggggctggacagcctgctggcaggggtaaaaccggtggcacgcatctcctcacttctgatccccgccaccgccggaaccgggtcagaagccacgccgaacgctatcctggcgataccggagcaaaacacgaaggtcggtattatctctccggtcctgctgcccgattacgtcgccctgctgccggaactgaccaccagcatgcccgcgcatattgcctcctccaccggaatcgatgccctgtgccatctgattgagtgcttcaccgccacggtcgccaacccggtcagcgataacgcggcgttgaccgggctcgctaagctgctgaagaacatcgaaacggcctgcgctgagccgggcaacctgctggcaaagctggaaatgctgtgggcctcttattacggcggggtcgcgattgcgcatgccggcacacacctggttcacgccctgtcttatccgcttggcgggaaatatcatctgccgcacggcgtggccaacgccattcttctggcgccctgcatgagggtggttcgtccccactgcgtgacaaaatttgcgcaggtctgggatctcgtgccaggcgcggacggcagcctgtccgatgacgaaaaatctcacgcgctggtggagtactttgccgcgctggttcgtcggctcaacctgccggacaaccttgagtccctgggcgtgccgcgcgaagacatcgcttccctgagcgatgccgccctgaacgttaaacggttaatgaacaatgccccctgtcaggtgaatcacgacgaggtgcaggcgatttaccggacactgtttcctgaacatgcatag

SEQ ID NO: 123927 - DNA, 885 bp, Enterobacter cloacae
atgcgtaacaacatcaagggcgtgctgacggccatcgtcaccccctttgacgcggaaggcgaactcaaccttcccggcttaacgcggcaggtcgcccggcagctggacgccggaaacggcattttttgcggcggaaccaacggcgagttctttgtcctgaacgaagcggaaaaaatcgcggtcacccggacctgtgtggaaaccgtcgccggacgcgcgcccgtcgtggcgcatattggcgaaatctccacccgcgacaccatccggctgggaaaacagatcgccgcgctgggtgtggatgcggtttccgtcatcaccccttacttcgtgccgctgaaacagtctgaactcatcgcacactacaccgccgtcgctgacgcgctaaccgtaccggtctttctgtacaacattccggcgcggaccggcaacacccttgagcccgccacggtacgggcgctggccgaacaccccaacatttcaggtattaaagacagtgccgggagctatgaaagcctgcgcggtttcctcaacgcggtaagcgacattgacgggttcgacgtgctgaacggaccagattcactgatccatcagggcttcgtcgagggatgttcagcctgtatttccgggctggcaaacgtggcgccagcggcgatcaacgccatctggtcacgctttaacgcgggtgatgttgaaggttcccggcaggcgcaggagcgcgtcacccggctccgcaccgagctgtacagcgtggcgttttcccctgccgcggttaaaaaggccctgcaaatcatgggcgaggatgtcggagagagtcgctatgccgtggcgtttagcgagcagcagtgccaacagatccgccagatagtgacaacgtcacttaactaa

SEQ ID NO: 123928 - DNA, 1413 bp, Enterobacter cloacae
atgaataattttaccgctgaagataccctgatcattgtgggcatagtcattgcctacatcctgttcaccacctggctgaccttccggatccgcagtaaaaactccggggactttatggaaggctcccgcgcgatgccggcgtttattgtcgggatcctgctgatgtccgagtatatcggcgctaaatccaccatcggcaccgcgcaggcggcgttcgaggacgggtttgctgcgtcatggtccgtcatcggggccgcaattggtttcccgctttttggcctgttgctggtaaaacgcatatacaacaccgggaaaatcaccatctcgggtgcgattgctgaaaagtacggtaacagcaccaaaaacattatctccctcatcatgatctacgccctgctgctggtgaatgtggggaattacgtcagcggcgcagcagcgatttctaccgtactgaaagtcaatctgcccgttgccgctttcattacggctatcgtcagtaccttctatttcgccttcggcggcatgaaaggcgtggcgtgggtaaccgtgctgcacagtgcgctgaaatacttcggcattctggccatcatgggttttgcgttatccaaaaccggcggtttcacgccgatgatcgaaaacatgccggacttctactggacctgggatggcaacatcggcgcgtcgaccattttcgcatggctcatcggcaccattggctccatcttctgcacccagtttgtgatccaggccatctcctccaccaaagatgttaaatcggctaaacgctccacctgggtcgcgttcttcttctgcctgccgatcgcgctggccattgcggtgattggcgtggcggcaaaatacctgcatccggagatcgacagcctgtatgcgatgccgattttcctgcaggatatgaacccgtggctggccggtctggtcaccacctctctggtggcgtccatcttcgtcagcgtcagtaccgtggcgctcgccatcgcctccctggtggtaaaagatttctacgtgccgatgcgcaacccgacgcccgagcaggagtttaaagctacccgctggatctccctgctgattggtttcctgccgctgatttttgttctgctggtgcctgaagtgctgaagctgtcgttctttacccgtgccattcgtctgtcgatttccgtcgtggcggtcatcgcattctacgccccgttcttccgcagtacccgcggagccaatgcagggctgatcggcgcctgcgtcgtgacctctgtctggtatctgctgggcgatccgtttggcattaacaatatgtacatcgccctgctgacccctgcggtcatcatggtcatcgaccgtctcattccgggaaaggcacagggtaaagcgccaacccccgttgaaaacaatggagtctga

SEQ ID NO: 123929 - DNA, 1164 bp, Enterobacter cloacae
atgtctgtaaccgtaacccgcgacgggattattcgcccacaacaggatacgcgcgtggaggcggccatgctgccttccgcctgcccacaaaaccacgcggcaaatctgctgccgctgccggatggttcgctgatgtgcgtctggtttggcggtacccaggagggtattgcggatatctctgtgtggggttcgcgcctgtcaccgggaagccagcagtggagtgaggcagaaaaactgtcggatgatgccacgcgctccgaacagaacccggttctgttcctggcacccgataacgtgctgtggctgctgtggaccgcgcaaatgtccggcaaccaggacaccgctattgtgcgctatcgccagtcccgggatctgggtaaaacctgggggggcatcgcgaccctgctcgataaacccggcacctttattcgtcagccgattgtcgtgctggagaacggtaactggctgctgccggtgttttactgccgcacccggccgggtgagaaatgggtcggtaacgatgacatcagcgcggtgaaaatctccgaagacgggggcaaaacctggcgtgatgtcgaggtgccggacagcctgggctgcgtccatatgaatatcaccccgctgcgcaatggcaccctggttgccctgttccgcagccgctgggcggataacatttattacagccagtcaacggacaacggcgaaagctggtccgtgccggaacccacggtattacctaacaacaactcctctatccaggtgacaacgcttgccagtggcgagctggcgctggtgtttaacctcatgagcgccgccggggcgcaggagcgtcgcgcctctctgtacgatgaaattgacgatggcgatggccgtaaagagccggttgtgacccacggtcgaaccgccttctggggtgccccgcgtgcgccgatgaccgtcgccatttcgccggacggaggcaaaagctggccgtggcaacggcatctggacgagggagacggctactgcatgactaacaactctctggagaaactgaaccgtgagttttcctatccgagcattaagcagagcccggatggcagcctgcatatcgcctacacctactttcgtcaggccataaaatacgtgcgggtgacgcccgagtgggtcaaggagtcagcatga

SEQ ID NO: 123930 - DNA, 471 bp, Enterobacter cloacae
atgattattggacatctcgacgccctgccgctggcagggttaccgccggtgttgtatgccctgctgtcccgcccggactgcacgctgcaggcgcttagcgaacgcgatgacggccgctggcagccggacaatgccccctggttttgccagattggtccggcgcagacgcagccgcgcgcggagcggcatacggagtaccatcaccagtgggcggatattcaggttgtgctggcgggagaagaactcatctatgccggcgcgcgccctgttggcaagccggatgacgaagagcgtaaagcggacctgttcattgccagctcatcggcacacagcgtcgggatccgccttggcgcgggtgactttgtggtcttttctcccggagaaccacaccaggcgctgtgcgccagcggcgcgccgatgaccgtgcgcaaagcggtgtttaaagttcctcgttcaatgctggaggtctga

SEQ ID NO: 123931 - DNA, 678 bp, Enterobacter cloacae
atgcgtcacgccgtcgtgaccggagcgagctccggaattggtgaggccatcgttaagcgtttactggcggaaggctggcaggtcaccggactcagccgccgcgccgtgatgccggatacccctggctttacggggttacgcgtggatatcaccgaccctgatgcactgaacagcgccctgcacgccatcgcgacaccgcaggcggtgatccacgccgccgggatgatggccgccgccccactggggcaactggaaagcagggttagcgggtcactgtggcaactgcacgtccaggcctgcgaagccctgtttaaccatttcgcgcccgctatggccgccggtggacgatttgtggcgattggcagcagaacctcccgcggggcggcaggtcgttcacagtatgttgccaccaaggcggcgatgactgggatggtcagaagctgggcggcggaactggccccgcgtgggatcaccgcgaacgtggtcgcgccgggcgccacccaaacgccgatgcttagcgcaccggggcgagaaagttcaccgcctacctgtccgcccatcggccgtcttatcacgccagaagaggtcgcgggactggtgaatttcttgctcagcgatgaagccgccgccatcacgggccaggagatggtgatatgcggcggcgcctcgctcagctag

SEQ ID NO: 123932 - DNA, 1575 bp, Enterobacter cloacae
atgaacgccatgcgcatgatgatcgctattgtatggcttaccggactgctgccagggatggcgcaggcatcggatgccgatcaatttgttgccgccagccgcagccagcaggcggatatgctgacccgctgggctctcgcgccggatgccgcaagactgccgttactgcaggcgctgcaaaacgaaaatctgtttgccgacagccagaaacatgcctttgcgcgacgcaatggcgagatggtggcgctgggagattcccctgctgcagaagggcaaaccaaagccgtacgcctgaccaatcgtctgcgggtgctggccgccacggccaacgctacgcatcagcttatcagtgacaacgtcacgcagcggcgtgccgccgcgcaccagttacagcgggatgcgcagccggaaatgatcggcctcctggaaacgcgggtaagcagtgaaacggacgatgtggcgcgccagtcgctgctgctggcgctggctaatctccagctcgccagcccacaggctgacgtgcgtcttcaggctattgaacggctcgggcaatctgacgacccggacgtgccatcccgactcatgccatatacccagacgcaaaccgaaccggatgcccgcgtgcgtgccgccgccggggagagcctgagccaaatacagcaccgtctgatgtggggcgatctcctcgggcaggcgtttatggggctgtcgctgggctcggtcctgctgctggcggcgctggggctggcgatcacctatgggctgctgggtgtcatcaacatggcgcacggcgagatgctgatgcttggggcgtacgccacgtggatggttcagcagatcatggccagcgtcacgcctcagtggctggcgctgtatccggtcgtcgcgctgcctgtcgccttctgcctgaccgcaggcatcgggatgatccttgaacgcaccgtgatccgccatctctacggtcgtccgctggagacattactcgccacctggggtatcagcctgatgctgattcaactggtacgcatgacgtttggcgcacaaaacctggaggtggcaaacccggcctggctgtccggcggggtgcaggtgtttgccaacctgacgctaccgtggaaccgcattgtggtattgggctttgtgctgatggtgctgttcttcacctggctggtcctgaataaaacccgtctcggcctgaacgtgcgtgcggtaacgcaaaaccgcagcatggcggcctgttgcggggtgccgaccgggcgtgtcgatatgctggcgtttggtctgggctccggcattgccggtttaggcggcgtggcgctctcccagttgggtaacgtcgggccggaactgggccagggttacattatcgactccttcctggtggtggttcttggcggcgttggacaattggcagggagcgtggcggcagcgtttggccttgggatcttcaacaaaattcttgagccgcagatgggggccgtgctgggcaaaatcgtcattctggtggccatcattctgtttattcagaaacgtccgcagggattgtttgcgctgaaagggagggtcactgactga

SEQ ID NO: 123933 - DNA, 363 bp, Enterobacter cloacae
atgaaaaaagtcatgtcaatagcgcttctggtggttgccgttggggctgttgtaggtatgaacgttaactggagtggcgaaccggattatattcagtcagcggaagctcgggtcggttcttatttaaccagcgactacggacgcgtggcgtgtaatagcaagcaaattgatgacgagcgttgggaattagggtgtaccaatccgtcgaaaagtaaaacatttcagtttgctgttttctcagcagataaagcaccgtatggcgtctcgcgtccattctatctggaagcgattaacgatgatgcaaaacagagcgcggaacagggcctgatgcgctacctgcaaattaataccaaagcgggttaa

SEQ ID NO: 123934 - DNA, 1167 bp, Enterobacter cloacae
atgcgccagtcagcccctctttttcccgccattcttgccggctttgttgccgttctggtcggttatgccagctcggccgccatcatctggcaggctgctgccgcggcaggtgccagcgcacagcagatcgccggctggatgaccgcactggggttcggcatggggatcagtacgctcgccctgtcatggtggtataaagccccggtgctcaccgcctggtcaacccccggcgcggcgctgctggctaccagtctgcacgggataacgcttgcagaaaccatcggcattttcattttcgccaatgggctgatcttactctgcggcctgaccggactcttcgcccgcctgatgaaactcattccccattcgcttgccgccgcgatgctggcaggcgtattgctgcgctttggcctgcagacgttcagtcaccttgacggccattttctgctgtgcggcagcatgattgcggcatggctggtcgccaaagcgctggcgccacgctacgccattgtggcgactctgataacagggagcgtggtggcctgggcgggcggtgacgttgtcacaaatcgactcaccctttccctcgtcatgccacagtttattgcaccggcgtttagcctcaccagcctggtcagtatcggcttgccctttttcctcgtgactatggcgtcgcaaaatgcgcccggtgtcgccacgatgaaagcgtcgggctatccgctggcggtatctccgctgatgattgcaactggcgggctggcgctgctgctttcgcccttcggcgtctactccatctgcattgcagccattaccgcagccatttgccagagcccggatgcgcatccggatgccagtaaacgctggctggcagcgatggcggcaggcggtttttacctgctggcgggcgtattcgggggatcccttaccgggctgatggcggccctgccgccgagctggatccagacgctggcaggcctggcgctgctgggcaccatcagcgggagtttgtatcaggcattgcataacgaaacggagcgtgacgcggcgattgtcacgtttctgatgaccgccagcggcgtgacgctgctcgggattggctctgcattctgggggctggtgctgggaggcgtgtgcttcgccgttttatcacgccttcgccgcgcgtag

SEQ ID NO: 123935 - DNA, 549 bp, Enterobacter cloacae
atgaccgcagcaaaattcgaaattatccctgtatcagacgctatcgaacttcgcgccgtcgaagagcgctacaccgccgatctgcacaacctcgttgtcaaaaaccgcacctttctgcaaaccgcgtttgattgggcgcagcacgtgggaacggaagaagacacccgacgtaacgtgcaaagcaaccacatgctacatcagcgcggctacgcgaaaatgtttcttatttttcaggcggacgaactggtgggcgtgctgtcgttcaattccattgagccggttaataaaacgggctacatcggctattggctcgatgaagcgcatcaggggaaggggatcctctcctgcgccttgcaggcatttatgcgctactacgttgagcggggcgagatccgccgttttgtgatcaagtgccgggtggcgaatcagaacagcaacaacgttgcgcgtcgcaacggctttaccctggaagggtgcctgcgggaagcggaatacctcaatggccgttatgacgatgtgaacctttacggcagagttttccccctatag

SEQ ID NO: 123936 - DNA, 324 bp, Enterobacter cloacae
atgtcggttgccgtaaagaatgaaaaggggttcagcatggtcgacgtgttgctggcgatgatgctgctggtggcgatcgtaacggcactgtccggctatcaccgggcgctggcttcccgctttgccctgtttagccagtatcgtcagctctggcacatcgcctggacgcagtcgcagatggatgctggtgcgctgcctgcaggctggcagataaaccggatgcagacaacgcagtctggatgtgtcagcatcacggttacacttatttctcctctgggtcgacgcggtgagatgacgcgtctgcattgcccggttagccagtag

SEQ ID NO: 123937 - DNA, 402 bp, Enterobacter cloacae
gtgagccgccagcatgggattgcctcactgacgctggttctgctgttactggtgttaggcacactgatcctgaccggtcttaaccagcaactcataacatttaccatgctggttggcgacgagagccgcgccatccagcagcaggcagccacgcagtctgcgctggagtgggggcgcgttcagcactggtcgttgcagcctgatgtacagtgcaaacagagacaaacgcaacgtgtttgtttgcgtgtactgaatgagtcgcaggtgttactcatcgctggagatggagagctgttgctctggcgtggcggggagattgtcaacgggcacatacgctttttacctcatggctggagtgatttttgccctctaaaggagcgtgcgttatgtcggttgccgtaa

SEQ ID NO: 123938 - DNA, 564 bp, Enterobacter cloacae
atgccgatgaaccagcacggcttctcactcacagaggtgctgattgcaatggcgatcagcagcattctgctactcagcacgtcgcgttttttaccggagctgcaacgggcagttttgctgcaatccagtgcgcaggagcgtgaagaagagatctggcaacgcctgttcgcgattggcaagcagttacagcgcgcgggatattgcgcgggtaattgtcaggggcagagcctgaccatcggcagggagggaagctgtgtgattgtccgatgggatgcaaacagtaacggcacctgggacacctcagcatcggataacgaaagtacggggtttcgtctggaatcaggcgcgctggaaaccctgcgtggcgcgacggggtgtgaaggaaaaggatgggagaagcttaccgacccggcccggcttatgatccacacatttgtggtacgtaaacatgagcatccgggatttgcgccagcgttatatctccagctgtccgccagcgcggtgaatgataagcacgctgccccttaccaggctcgctatggcgttacggggtttaacttgtga

SEQ ID NO: 123939 - DNA, 495 bp, Enterobacter cloacae
atgttcacggcgtttcgccacactcccggcatgaaaaaagagcacggctttacgcttatcgaaactctggttgccatttcgctggttattatcctcagcgcgacagggctcgccggctgggacaactggcaacagcggcagaggttgtggcaggtcgcctgtcaggtccgcgactatctggtgtttctgcgaaacgatgccaatcgtcacaaccgtgaccacctgatcacgcttcagcaggacgacagaggcgcctgtttgatgagctctgcagtgcagggctgtgagaacaacagcccgtatgtgctcagaccgttgtggcctgacgtcgtgctaagggaggttacgccttcattaggattctacggattaagggacacggcgtgggcagggcggatacgggtacagagcagggcaggagaatggatgattgtcgtctcaaacggagggcgtatcaggatgtgcactgttgcaggggaaaactcatgccgatga

SEQ ID NO: 123940 - DNA, 186 bp, Enterobacter cloacae
atgttgccctctcccacggggcagagggatccccacagaaaaattacgcacggacagttccctctcctcctgggagagggctggggtgagggggaacatacagctctggtggtcattctgagagcagcgttattgcttctgtttatgaatcattgtggatccctcagcctacaggtagagagataa

SEQ ID NO: 123941 - DNA, 477 bp, Enterobacter cloacae
atgactattctgccgctctacgccgcaccgcagtatgcggagcaggtgaccgactggatctggcaggcctttggcgacggtctgccccgggcgtttttccacagtattgttgagcacagtcagacgccgggcgcattaccgctgacctttattgccctggagaacgaacagcttgtaggcaccgtagggctctggcgctgcgatctgatcacccgacaggatctttgcccctggctggcagccctgtatgtggatgacgcggcgcgaggcaaggggctggcggggctgctgcaaaagcatgttatccactatgccgcacaggccgggtatgacacgttgcatctctggtctgcctgccgtgacttctacgaacgttacggctggcagtatatcggcgatgcgctggagtacccggacaaaacggtacatctctatcgctattcgtccggggcttcggcgggtgccccaacagagtga

SEQ ID NO: 123942 - DNA, 612 bp, Enterobacter cloacae
atggaaatgagtattgtggccggtttttgggtggtgtccttcctgctcatcatgacaccgggtgcagactgggcctatgcgatcagcgccgggatcaacgggcggcgcgtagtgccggcggtgatggggctgatgtccgggcatctgctcgccacgctggtcgtagtggcgggcgtgggtgtgttgatggctcaacatccactggcattatcagggctgacaattgcgggggcggtttatctgctgtggctcggcatcacgctgttacgccatcctgctgcgccggaaaacaccgtacagcatgcaggaaactggaaacagtgggcggtgaagggattatgtatcagcgggctcaacccaaaagtcttcttactgtttctggcgttgcttccgcagtttaccgatccaaagggaagctggtcgattgccacgcagatgtcagccttgggtgtgatgcatcttatcacctgcacactagtctatttgctggtgggatatggttcgaaagcggtgctggcgacccgtccgcaggcggcacgtgcggtgagcatggcctcaggggggattatggtggcgatcgcgctgggattgctgctggagcaggtgagataa

SEQ ID NO: 123943 - DNA, 399 bp, Enterobacter cloacae
atgaagaaacggtcattattactgactctgctcagcctcagtttattaaccgcctgcagcgcttctgcgcctgataaggttgaacaaatccatcatctgcagatcccattagttttacccggagaaaaaccgccagaaattccggcatcgcatatcgctgcgctgtatcaggaaaataaagttcagatcgaccgtttaacagcgcagttgaaatcagattatttacaacagactaccgcgaaagatatttttaccgaagatagccctgttcagccggtcttcgcctcgctgactaaacttgagcagctggaaatggttaatcagcagtacctgaaagataaaaacgtcacgggactgcaaaagattaacattgtccttcaacctttagtcaccggttaa

SEQ ID NO: 123944 - DNA, 615 bp, Enterobacter cloacae
atgaaaaagacacttgttgcattaattctggctaacgcttttaccgcaacgtctgcatttgcagcggcagatacaggcacctggtatagcggtgctaaattcggctggtcacactattttgacgccagcaccggatcgaaagcgagcgataataataatggctcgaaccagtataatatcgatcatgataatgtcggtggtggggtatacgcgggttatcagatgactccgtggctggcactggaaggcggttacgattatttaggcaatatgcagatcaaaggcaaacatagcgcgggggcacaaatgaaaagccaggggctgcagatgtccttaaaagccagctatgccgtgactgacagctgggatatctatggtcgtgccggggcgatggcctatcgtgctgagtctgatgtaagtggtcacaatcgttttgaaacaggcgttcgcccgcttgccgcagtcgggacggagtatgcgtttaacaaaaatttagcgggccgtctggaatatcaatgggtaagcaacgtgggtaatgccaaccagattggcgtcagcagcgacgtaagctctgtgactgcaggtctgacatggcgatttggacagcacgattaa

SEQ ID NO: 123945 - DNA, 630 bp, Enterobacter cloacae
atgcatatattgcctcctgttcgccctgaacactccattgaacgcctgacggcggtacttgaacccattgcggaaaaagtgaagctcgcgccgcgtaagcggattacctggaaacataaaggccgccagcaaatgtatctttttcaggaaggagagctttctttgctgcgggcatctgacgggttgctgttagttagcgtttttgagcctcatctgttcggcattgccgagatgatccagccgacgcaaggacatatactacgcgcagaacgggagtctctgattttgcgtgctgatgcagatgaagccgccgcgcgatttcgtgaacagggcgtctgggaggatgtggcagccttgctgtcgtaccatacggcctatctcatttatcgtgatgcccaggttgtgcagcagcgcacctattccgtgattcgcagctatctgcaggagatgatattactgcccgatgaggtgcggatgcgaacaactattctggaatatattcaggatcgtacgcttctttcccgcagcagtattctcaatgtattatctgcacttaagcaaggtaaatatatcgcgttcaaacgtggcggatatttactggaggtagggcatttgccagagtcattttaa

SEQ ID NO: 123946 - DNA, 852 bp, Enterobacter cloacae
atggcgaaattcttcgccacgctgtcacaggagtcagacatgagcgaaaatttaatctggtcaggaaaagttgacgcaaaaaatgccgaagggacaaatacaggagttgccctcaaagcgggagagataattactattctggccagtggttgggccaggaatggaagtgaaaattttgcgcttaccgcaccacaggggcgtattccccgagagggtgaaacgctaacgttacgcaatccttcgcttcaggcacgccttggtaacgaaaattatccggttggtaatcataaataccgctggtcggttccagctgaagggacgttgacgctgttttttgccgatggcaaagaccagtacaaagacaacgccggtgaattcagcgttgaagtgtatcgcgaggcggatatttccgtcgcggcgccagctccgtttgaagatttaaccaactttgagcgcgataactggaataactggcaggccggacctgccgggcacgatctttacctggttgacgccagcacccgcgctgtcgagtttattaccagacctaataaaaaccatgctggtgagatcctcaaaaagacgctgacaggtctgactgccgggcatgaatatacctggacggtgaaaattgcgcgcatcataggaaaatatgaagcgccaaaggtttcgctgcgtgcagatggcaaagacatttccgcccccctggaactgaagcaggcaaatgaatgggtaaccctgagtggaaaattcaaagccacgggcagtcaggctgaactcgcggtagtcagccatgtgtcagccagtatgggaaatgatttccgtatcaaggaactaaaaataaagggttaa

SEQ ID NO: 123947 - DNA, 168 bp, Enterobacter cloacae
atgattattcatcgcatgactatgctaactgagaatgattccagtgaacacctgttagctaaaataatttcaatccataatttatatataaaaatcatagatataaaaaacagtttcaccttacatttgttcacattaaaatttaatcattatgaatcaaaggcataa

SEQ ID NO: 123948 - DNA, 738 bp, Enterobacter cloacae
gtgagtatgttcacccacgccgccattgccagtctcaataatctggagatgatggtctacaactatgtcatcaaaaatcgtgacaaagtgatgtacatgactatccgcgaactggcggacgcggcgggtgtctccaccaccactatcctgcgcttttgccgcaaactcaactgcgaaggctactctgaattccgcgtacgctttaagctctacctagagcagaacgaacctcagcagataaattttggtgccagtgaaattatcagcttctttaaaagcgttaataatgaagagttcgatacattattagatgaagcggtggagataatattatcgtccgagcgaattatctttgtcggcgcagggacctcaggctcgctggcaaaatatggtgcacgcttcttttctaatatcggtaaattcagcaaccatatcgacgatccttatttcccggtgaccaatgatatggccaaaaatgcgctggcgattgtactgtcggtatccggtgaaacggaagagatcctgcgcttcgccagccagttcagcctgcatcactgcaaggtactttccattaccagtcatgagcactcgcggctggcaaaactggccgattttaatctctcctggcatgttccacagacgcgtattgcaggcgtgtatgatatcaccacccaaatccccgttatttatattctggagtcgctcgggcgtaaactggcgaagaaattaacagaataa

SEQ ID NO: 123949 - DNA, 339 bp, Enterobacter cloacae
atggaaaaatcaaaacaactccgcaaacaaatgacgcccgaagagatacgcctctggtatttgctcagaggtcgtcgcttctttgggtataagtttcgccgtcagatgccgattggtgcgtatatcgtggattttgcctgcattaaggcaaagctaattgttgagctggatggggggcaacatcaggataaagaggaatatgactcgcatcgtaccgagtttttaaataccaacggatgggaagtcgtacggttctggaataatgagtttcgcgttaacgaagaggaagtgttgcatatcattcttcaacgactgcagagcctgatgccctcaccctaa

SEQ ID NO: 123950 - DNA, 579 bp, Enterobacter cloacae
gtggcaacttcaatagtgttagtgacacaggatcgctacctcgtcagaggaatgaggatattttttccggatattatcctgctggactcgattgacagaaagatatttgataacagtgcagatgaatattctgtgctgattgacagccgttcaccgctccgtctgtatgattatctgatacgccatccagccagaacgagaaaaacaatcggctgcgtcatgctcgatatgcggcaccgggaggagaatcagctcagcatgaggatgtttatgaatactgcgcttccggtggctgacatggcgtcgttgtttaatctggtgctgaatatgaaaggcaggcgcctgacgaccaaatggctgcttaacttacggttgagtacccatgaagcgattatgctgcggttgctcagggcgggcatgtcgatggaagaggtggcggacgaactgaacacctcgattaaaagcctctaccggacgcgaacggcgctctctgaacgactgggggcggagaattttaacgaggcgtgtttgtttatctttaaaaacaaactgctggatggagatgggaacgatccctga

SEQ ID NO: 123951 - DNA, 2481 bp, Enterobacter cloacae
gtgttgcgcaatggatttatgataaacaaatggcaaatagatatggaaagatcacttcgcttcaatactttattcttttaccgcgttccaaaattattgtgtctgctattactgtttcccattctggttcaggctgccgaatccgtatatgaacaacagattcagcaggcgcgcaatggtaattacacttcgtttctccattacctgcagcgttatcaacaacagcatgctctgacgccagaacaagtggcagactggctgcaggttgcctcctgggcgggacgcgatgatgaggttattgaggtgtggttgcgttatcacgtttatatgtccctgcccgcccggggagtggccgcagccgcgcaatccaggagaaatcaaaagcagtggcaacctgcgctcgcgctctggaagcaggcctgtagccttgcaccggagaacgacgactaccgtatcgggtatatcaaaaccctggccgatgcccgcatggatcggctggccctgcaggaagcgcaaaaacgggtaacagcccaccccagccagataaaccttgagacgctcgcctatgtgtacttacgccagggaaaaagctgggatcgtctattagcggacacccgcgccctgaagagcgcccccgagaatcacgtactgctcagcgcgctcgtcgacgccctgaacgataaccgggtcagtacgcctgccctgcggctgtcacaggggatttctctgccgcccgcacaacggcgccagcttgaacttaacgccgccgccgaacaggtacgccttgccgatgcgcctgggcggacggaaaaagagcgcctgcgtctcgcgcaagccgcactgaatcgctatgacgccctgcttgcccgctggcaacacgaaccgcaggcggcagaagatatcattcgcgcccgcgtcgaccgtcttggcgcgctatatgcgcatggtgattacccgcaggcgatcgctgaatatcgtgcgctgacgtcagctcaccatccagtgccgggctgggcaatcggctgggtgatctctgcgtatcttcaggagcaaaacgccgatgcagccctggcactcctgcaaaagtatcctgactatgcgcgtaacccacaggatgaagaacatcagcttttctatgcatatctggacaccggacagtatcaggccgcccgtcactatcttgcgcagatgacccgcaacgttccctgggctcgctacgattacggctcgccaaccgcccagcccaacgatcaatggcttatcggccagtcgctcacgtttcagtatttgctggcaacccatgccctgccgcaagcagaagccgtggcgcaccgtctggctgccacggcacccggcaaccaggggctacagattgattatgccgccctgcttcaggcccgcggcctgccacgggccgcagagcaaaagctcaaaatggcggaggtactggagccgtcaaatacagagctggagcagcagcaggcttacgtcgcgatggatctgcaggagtggcgacaaatggaacttctgaccgacgacgtgctcgcccgtgcgccacgtgaccgcagcgtccagcgcctggacaggctcagaaatgtgcatcatatgtctgaactgcgtctgaatgcaggcaagggattgcactccgacaacccggtcagcgggacacacgatctgaactgggacgccacgctctatggcccaccagtcgctgataactggcgactgtttggcggcacccgctttgccgagggcaattttgacgaaggcaaaggcaccagccgccatctggtcggcggcgtcgaatggcggtcacgggatatctggcttgaagcagagctctccggcaaccgttatcacggcacccacacgcctggcgctcgcctctccggtcagtacagcctgaacgatcgctggcaatctggcggcagccttgaacgtctgtcacgcaccacgccgttgcgggcgttacgcaatgggatccgtgcagaccgcgcagaaggctgggtgcgctggtatcagaacgagcgtcgtgagtaccagctcagcgccgccatcagccatttttccgaccataaccgccgacaggagtacaccctcaccggcaaggagcggctctggcaaacgccgaccctgacgctggatcttgaaccgggcatctccgccagcgcgaatagccagcgggatacgctctattacaaccccgagcgggatctgtccgcgacggctgcgttgtccgtcgatcatcagctgtaccgctattacgacaccctctggagccagcaactggtcgccggagccggaggatactggcagaaaaatcagtctgctggcgccatcaccctgctcggctacgggcaacgcgttcaatggaacaacgtcgtggataccggcgtgatgttgaactgggataagcgcccttacgacggcaaacgagaaagcaatctcgccgtcactttcgatgcgactttacggttttaa

SEQ ID NO: 123952 - DNA, 1938 bp, Enterobacter cloacae
atgttgaccattcgttttcctgtgggcctgctcatcatcggctggttatgcctcagcgcgagcgtctgcgcccaggccatttcgtttatttcgcccaacgagagacctcagccggaagccagtaaaccctggccgaagaatcactttctcgtgctggcctatcacgatgtggaagatgacgccgccgatcagcgctatctctccgtgcggaccagcgccttaaacgagcagataagctggcttgtgcataacgggtataacgccatcagcgtgcaggatattctggatgcccacgacggtaaaaaaacgctgccgccaaaggcctttctgctcagttttgatgacggctacagcagtttttatacccgcgtctggccgttgatccaggcctggaatgtgccggcgctgtgggcccctgttggcagttgggtggatacgccagcacatcaaaacgtgaattttggcggtttgatgacgccccgggaccgtttcgcgacgtgggatatggtgcgcgagttaagccagtccccgctgattgagatcggctcgcatacctgggcttcgcattacggtataccggccaatccacagggaagccgcgaaccggctattgccagccgcttttacgataacgcgacagggcgttacgaaactgaccagcagttcagccagcgcatcggcgatgacgtgcggaaagtcaccgaaaaaatcgcgcaggtgacgggcaaagcgccgcgtgcctgggtgtggccctacggtgctgccaacggcacgtcgctcgccattgccagacagcagggttatcagctggcctttacccttgaggacgggctggcagatgtgcgtcacctggacaacatcccgcgcctgttaatctccgggaatccctcgcttaaagcctttgccagcagcatcgcacagattcaggagaccgaccctgtgcgcgtgatgcatgtcgatctggactacgtttatgaccccgacccggctcagcagaccaaaaacatcaatacgctgatccagcgggtctacgacatgaaaatcagccatgttttcctgcaggcattttccgatcccctcggcaacggcacgattaacgcgctctacttccccaaccgtcggctgcccgtgcgtgccgatctctttaactttgtcgcctggcaactgcaaacccgcgcgggcgtaaaagtctacgcgtggatgccggttctctcgttcgatctctcccctgcactgccgcgcgtgcagcgtcgcgatcggcaaacgggccaggtacgcgtcgccaccgagccctatacccggctttcgccgtgggatccgcaggttcgccagcaggtgaccgaaatctatgaagatctggcccgctatgccagcttcaatgggatcttgttccatgacgatgcggtgctgacggatcaggatgatgccgggcagcagacaacgcgccagaaaagccagacgctaatcgggtttacccacgccctgagcctggcggtgaagcatatccgcggtccgcagataaaaaccgcgcgcaatatgttcgccctgccgatcctcgacccggcgagcgaggcgtggtttgcgcagaatcttgatgacttcctggcggagtatgactggacggtgccgatggccatgccgctgatggagtccgtcccggcagacgagagcaacgcctggctaacgcgcctggttaagaccgtcgcaactcgccccggcgcgctgaataaaaccatttttgagctgcaggcccgtgactgggcgcagacaccgcaacgcgccgtacccgatagtcgcctggcggagtggatgcgcgtgctccagcttaacggcagcaaacattacggttactaccccgacgatttcatccataaccaacctgatctttcccgtatcaggcctgaattctcttcgtactggtatcctgacaatgactga

SEQ ID NO: 123953 - DNA, 429 bp, Enterobacter cloacae
atgaacgaaaacacgttaatcctgactgaacatcggctggtgccccggctgtttgatgcagcgttaaccctgctggcctggggaggatttctctttttcctctatgccaacctgtggatgcagataaccaacgagagcgactaccgctggggcgtgattattgcctcctttaagacggtgctgatctatttactgatcgccgcgctaaacggctggctgctgatcctgtggtatcaatataatcgccgccgcgcgcatgcaagacgacatcaccgccctgcaacgcttaagcacgacgagctggcccgcagctttaacgtgacgccgcaaatcatctcagagatgagccagtacaatttgctgacggtctatcatgaccagatcggtcgcattattgatttgaaaatcagtcagcaggacgaggaataa

SEQ ID NO: 123954 - DNA, 324 bp, Enterobacter cloacae
atggctatcagtgagaaagacctgcttgaggcgggtttcagcaaaagcgaagtagacaatttacagggccgactcacagcagccggaggcacaatgcagcatctcatcgatgcgctctcacggcgcttccgagtttcggtatgggtcacggtcgcgctggttctggttatgctggtcacccttatcatcggcagcctgacacacattctttccgggggcatgagttcccttgttgtcctgatcatcgcctgggtgacctttccaccagttctgggctggaaagcattccgcctgcaaaagactatttcccggcaggctcgatag

SEQ ID NO: 123955 - DNA, 804 bp, Enterobacter cloacae
atggacactttgcttttacccggccagaacccccgtgcctgggcagaaactatgatcaacctggaggccaggaaactggttaatacggccaatacggtagcggctatgcatcttcaggatggttttatccggattcagtttgtagatgagatcagggcattcatcatggctcaatttgaggccgcacgccgggcaaaaacggatgatgactgtatggcctgtctgcaggcattgcgtgctgagaataccagtctgcttgaacagtcccgtgctcttaaaaccggctatgcaaaactctatgccgaggtgaaggttgtccgggacgagaacaaaattgtgggctacatcatctcggctgttgacgtggtggtagcaggggcggctatctttggcgggatcgtcatgatgtcctccatgacgccggtgggcgtggtggccggtgccgtgattgttgttaacgggcttaacactatttcacgtgaggccgcacacaacctcctcggtgataagcaaacggagggaattttcgctgacggctcgatggaggtcgcagaattcctgggcttcagccggcagcaagggctggggacctataaggctgtcacgctcttcagtgaagtctacggcgcgtatggtctgatgctgaaacccgaagcacaacggctgtggtactggaccaggcccgatttcttcaggaaagtatctgatacgccacgtcccgcgatggcgcttaaaattgcgggatggggtgttaaagccaaagtggcgcttgatttactgactatcgagcctgccgggaaatag

SEQ ID NO: 123956 - DNA, 1803 bp, Enterobacter cloacae
atgtctaaaaaatcaaatccattgtcttcgcgccaggaggtggtggtgtcgttacatgacctgctgggcgcgctggataagtcctttccgcaggattgttcccggttctcgctgggagaaacctgtgcgcattaccccacggagattgcgcagatggaagggctatcccgtgcgctgtgggggctgtttccgctgatggcgggcggcgggggcgagccgtttagtgagaagtacctgaccgccattaagctcggcaccgatccgcagagcccgggctattggggggaaaccggcccgtacgaccagcgtctggtggagatggcggcttacggcctggggctggcgctgctgggggataagctcacccgccgcttcagcgaacgtgaggtaatgaacctgcacgcgtggctcaaccagatcaccaatgcgcagatgccggacagcaactggaactacttcgcgattatggtgcagcttggcttcaaatgtgccgggctgccgtatgatccgcgcgccatcgaccgtcggtttgcgatgatggaggcgtattatctgggtgacggctggtattctgacggtccgggccgcccgaaggattactacatctcaatggcgttccacttctacggcctgatttatgccaccctcagcggtgatgaaaaaagggcggaggtgttacgtgagcgtgcccgtcagtttgccgaagattttatttactggtctgccgccggcggcgcgtcggtaccgtttggccggagcctcacctatcgcttcgcgatggtcgctttctggagcgccgtggccttttccgggctgaatgtcttctcgccgggcatcgtgaagagcattgtgctgcgccatcttcgctggtggcagcggcagccgatgaccgatcgcgacggtattttgaccctcggttttacttatcccaacctggtgatgtgcgaggattataacgcccccggctcgccgtactgggcgctgaaaacgtacctgattctggccttgccggagtcacacccgttctggcaggcagaagagcagccgctcccctcgctggcggaaaaacgcgtgatccacccagcgcagcacatcctgatgcatgcggataactcacagcacgtcacgatgctcactgccggtcagcttgagctgaataactacgtcaacaccgaagccaaatacaccaaatttgcgtactcaagccgctttggcttcaccctcgaacgggggcgctttggcctgaaacaggccgcctgcgactcgatgttactgctggcggagggggataactacttccgcgggcgtcgcgaatgcgcggaggtgcgggtggatgagaactacctctattcacgctggtcaccctggcatgatgtccatgtcgaaacctggcaaattccctttggcgagtggcacgtgcgtctgcaccgcattaacagcgctcgcacccttcaggccgtggagggcggttttgcggtgatgaaaaccgaacaccacattcatgagcgtggctgttacctgacggccagcaacggcagcagcgtgattgtcgatctctccccggtaattgcccgggagccagacagcatcgtcacgccgccgaacagcagcattatgttcccggaatgcgcatccattccgctgttaaaaaccgatctccctcagggagagagctggctctgttgcgccgtcgtggccagcgagaaaccccccgcggcattggcacctgaactgaagatgacccctgaccaggtcgcgatccgcgaacccggaggcgaacgtaagctgtcgttcacattataa

SEQ ID NO: 123957 - DNA, 840 bp, Enterobacter cloacae
atgcacgacacgcccacctccgaccggctggaactgatcaccttaaatgacaccgtcgtgtcattcagccgtctgtttgccaataccgtgcgttaccatcactggcatcagtgtctggagattctgtatgtggaagaaggatttggcgtcgccattgtcgataaccgtcactacaccatgcgccccgggcggctgtttttctttcctccgtttaccctgcataaagtgagggtggatgagcaggcagaagcgatttaccgacgtaccattattcatctcgaccctcacgcggtgctcacagccctgcgcgattttccccacacgcagcagcggctgcagaaactttctgcccgcggcgcgggagcgtgggtcgccgatctggcgcactgtcatcaccatgtcgatcatctgctcggctgttacccgtcgcctttaacccgcgagggaatagccgcgctgttgattggtttattcgccatgctcccggacgataatgcccgtgcgccgggcagtagccttgggctcgccagccaggtgatgttctggctggacgaacattaccaggagaaatttcgcctggacgcactggcagaaacgctggggaaatcccgcagctacgtatcgcgaaaattccatgcggaaacgggcgagaagatccacaactacctgaatacgctaaggctgcgcaaggcctgcgagcgcctgctgcacagcgaggcgagcgtacgcgagattgccacccaggtgggattttccgacgtgacgtggtttatcagcgcgtttaagaagggaattggcgagacgccgttgcagtaccggaagaaccatgctgaccgatga

SEQ ID NO: 123958 - DNA, 576 bp, Enterobacter cloacae
atgtttaacaagactattctggcagttgcgacaactgcattgctttctggtctgtcatttactgctatggcagcagataaccagggctcggggaagatcacgttcaccggtgaagttatcagtgcgccttgctctatcaccccgggagatgaaaatcagacgattgaattaggagaagtcgcggatagcgtgctgaacagcggtaaaaactcgctgccggttgacgtgaatatccacctgcaggattgcatcctctcttctaccaccggacaaaccaccaccacgatcgacaaagtgaaggtcacctttgcctccgccagtaccgattcgaccgacaccagcctgatgaaaaacacgcttgacggcaacatcggcggtgcaacaggtgtgggcgttcgcttgctggatagcggcagcaataaagtcacgctgggtacgccgattgaagtgtcattccctaccacaaatgcctatcaggaactgaacttcaaagcccgcatggaaccggtagctggcagccaggctaccccgggtaacgttcaggcccaggcgaactatatccttgaatataagtaa

SEQ ID NO: 123959 - DNA, 2523 bp, Enterobacter cloacae
atgctaaaacactcagcgcatcaactctcccgcctctctgcttttataaagtattcgctgagtgtcacactttactcagctttattcgtgttgcctgtctccgcggttgaattcaacacagatatgattgacgttgaagaccgaagtaatattgatatttcccagtttgagaaaaaaggccacatcgcgccgggtagctatctcgtccgcattcaggtcaataaaaacacgttgcctcaatccgcaacaatggagtggatcgcaacggaaaacgaaagcggttcgcaaatttgtgtgaatgccgggcagttatccgctttcggactgagcaccgattttatttcgcggctccattattctcagggcggacgttgccttgatctttcggctgttcctgagctgggcttttcccttaataaagggacgatggtgctttccgtcaccgttccccaggcatggatgaaatatcaggcgaagaactggacgccgccggaatattgggatgaaggcattgcgggtgttttacttgattataatctctatggcagccagtacgatccgcacgggggcgacgacagccagaatttcagcgcctacggcacgctcgggtttaacctcggcgcgtggcgtctgcgttcagattatcaatataaccaaaactttcgtcacggtgagtctacaggcagcgacagcagtctggcacgaacctatctctaccgccctctcccttcgctgtcatcaaaagtgacgctggggcaatatgatttaagctcagatatttttgataccttccactttaccggtgcctcactggaaagtgatgaaagtatgctgccgcctgatttacaaggttatgcaccacaaattaacggcatcgcgcagaccaatgccaaagtgaccgtctcccagtctggccgcgttctttatcaaacaaccgtcgcgccgggcccgttcaccatttcagacctgggtgaaacctatcagggacagctggatgtggtggtcgaagaggaagatgggcgcaaaaccaccttccaggtgggttcatcctcaatccccttcctgacccgaaaaggccaggtgcgctataaaacatccatcggtaagcccaccgctacgggccataacgacatcaataacccgcttttctggacaggtgaactctcgtggggctggctgagtgatgtgtcactgtatggcggcaccctgctgacggcggatgattatcaggccatgaccaccggtatcggcttcaacctggattcgttcggctcgatctcttttgatgtgacgggcgccgaggccacgctccatcagggaaaaaatgagacacagcgtgggtacagctatcgcgccaactacgcaaaacgttttgaggcgaccggcagccagatcaccttcgcaggttatcgattctcggataaagaatatgtctcaatgagtgaatatctctcctcccgggacggagatacctcaacgacaaacgaaaaagagagttatgttatctccttcaaccagtaccttgattcgctggcattaaatacctatctcaacgtcacccgtaacacctactgggacaacagcagcaacacaaactactccttttcgctgagccgcaattttgatatcggcaacttaagaggtttatccgcatcgctggcgctaagccgcgtgcgctgggacgacagcgacgaaaaccaggtctatttcgccttcaccctcccgctggagcaaagtcgtagcattatgtacagctaccagcgatcgggcggcgacagcgcgtctcatatggcttcttactatgacgcctccgatcgcaacaatacgtggaatctctcggcctctacgacggaagacgatttgcgcgaaggcgaaccgtcattgcgcggcggataccagcactattctccttacggacgcctcaatctttcaggaagcgttcagcccaatcaataccgttcgatcagcgcgggctggaacggctcgatcaccgccacgcggcatggcgtagccctgcatgattacagcccggccaataacgcccgcatgatgatcgatgccgatggcgttgacggaattgaggtcaacaattcgcacacgcgcactaacgcattcggtattgctgtcgtcccctcactcagcaactacaccacctccacggtgcgcgttaacagcaacacgctgcctgatggcgtggatatagcaacctccgtcattcgcaccacgctgacggaaggtgccattggttacagcaagctgaacgccaccacgggctaccagattgtcggcattattcgacaggaaaacggtcagttccctcctttgggcgtcagtatcgtcgatagcgctacgggtaaagaggtcggtctggttgccgaagaagggttcgtttatctcagcgggattcaggaaaacagtacgttacgtctcacctggtctgacaaagcgtgtgaaatcacgccgccgaaccaaagtaatcttagcggtgacgctatatttttaccttgtaaaacagtgcattaa

SEQ ID NO: 123960 - DNA, 735 bp, Enterobacter cloacae
atgaacatcacgatgatttcaaaaggacttatctgtttccttggcacgtgcagctttgcctgggccaccgtatcgcccgacagaacacgcatcattttcaacgcctcagcaaaaagcgtgtcggtcagactgataaaccagagtaaaaccgatccttatctggctcagtcgtggattgaggataaagagggtaaaaaaacgcgcgagtttatctctcctgttccgccactgttgcgtatcgagccggaggaacaggcgcaggttcgcctgatggcgcagcaaaacctcagccgacttccagccgatcgagagtcgctgttttattacaacatgcgggaaatcccccctaaagccgagcagaagaacgtgatgcaaattgccatgcaaagccgccttaaactgttctggcggccgaaagccattgagctgaaggagggccagtttgttccgctggataaagtggttatatcccgcgcctcgggtacgctgcagtttaaaaacagcagcccctattacatcaccgtgggctatatcggactgaacggtaaaaccttattgccgggcgcagagagcgtaatgattgagccgtttggtcaggccagccagtcactggctaagctgcccgctgaatttcaagtcgggtatatcagcgattatggcggtctggaaatgtttaaggtgagttgtaacgcggtgcaacctgcctgccagagcaaaccggtgaataagggataa

SEQ ID NO: 123961 - DNA, 1062 bp, Enterobacter cloacae
atgaaaaaaatacatctcgcggtgattgcccttttatgtttgttctcatcctccgcatgggcgatggactgttacaaagattcattgggcggtcaaagtctggtcacaacaacgctcccgacgttcacggtcccagccaacgccccagccggacaaaaaatttgggaaagcggcgatttgctggtgacggtatattgcgatcacgccacccgcgacagtacaaaacctgtctcgcaggatccctggagtgaacacgtttatgcctatatcctggacagttttcataacaccgatagcctgatgaccaacaatccctatctggcgtttggcgtaacctataacggtattgactatgacatccccgatatcaaaattgatacgggagcctgccttgataagcaggatgataagtggggtgactacaaggaagcagcctgcaatggcgtcacaattcagaaaaacatcacgtttagcgtgcgctttcgtctctacgtgaagctaaaagcgataccaaaagagcagtttgactatacctttccctccgtcaccgtactgacgtttgacggttcaggcggaatcaacacgcttccaaaagcaaaaaacctgcattacgacattaccgggctgtcaaatattcacttcctggactgcggtgtggatatccggatctaccctgaaaatcagattgtgaattttggccagtttacggagagcgcagtcaacgccaacgccgtcacctcaccgtttagcatttcgacaatccgggatgccactgctggctgttcagaacaatttgacgtgacgaccagcttttacaccaccgatacgctctacgataatacgcatctggacatgggaaatggtttactcatgcgtctcattgataaaaccaatggcgacgtgacgtacaaccagtatcttccttttgcaacctatcaccctgatgatacggagacgacgctgacgcatgactatacggcggagctaacccgtaaacctggtgaagccgttattcctggaccattcagtaaagacattattgtcaaaataaattatcaataa

SEQ ID NO: 123962 - DNA, 558 bp, Enterobacter cloacae
atgcgaaatatttcaaaaacacttttggcggttgctttaggctcttttatctctggcaatgcactggcaagcgatcagggctccggtaaaatcacctttaagggcgttattattgacgcaccatgcaatattgcaccagacagtattgataaagagattgaacttggccagttcaccacggcggtgatgaatgtgaataaaaaatccacggcggtaccggttgatatcaacctggaaaactgccagcttgacgctgcagatgaaaccgcaacgcccgtcaccaaagtggacgtaaccttcagcagcactgcaaccgacgcaaccgataccagcctgatgagcaacacctatgcgggcggcgcgcagaacgtgggcgttcgtttgctggataatgcagagacccctatcacgcttggtacggctcaaactgtcgatctttctgcgggttcaacgacccagacgctgcacttcaaagcgcagatggaagtggtcgatggtaaaacagcaacggcaggccaggtcgaatctaccgcgaattacgtcctgttgtataaataa

SEQ ID NO: 123963 - DNA, 2436 bp, Enterobacter cloacae
atgaaatacagtgcattttcgatcatcattgctggctttcttacgcctcttccactggccgccgttgaatttaatattaacgctatcgataaagatcagcgcggcaatgttgatttatcccagttcaaagataagaaccacgttgcgccgggtcattatttcgttaacgttgcaattaataatacgccactcgctaacggctggcagttagcctggtataaaaaagacgatacaacggaagtctgcattccgtccgatctggcggacatttttggtctggacgataaataccgcagcatgctgacggttaacgcgggctgtgtcgacttttccccgctgccgcaggttcgtttcgagtttattcaggcgacgcaaacgctggaagtcaccctacctcaggcctggctacagtaccgttccaccaactggatgccgcccgcgacctgggacaacggtgtctcaggcgtgctgctggattacaatctgtttgccagccgctatcagccagatgaggggtcaagcagcgataacgtcaatacctacgggaccgctggcgccaacctgggcgcctggcgactgcggggagattatcagtacgcccttaaccgtacggatgggaggtcgcagagcgacggccgcctttctcgcgcctacctttttcgccctctgcctgcacttggctcaaagttcacgctgggtgagtcagattttcagtcggatattttcgacggattttcctacaccggagcctcacttatcagcgacgagcgcatgctcccctggtctctgcgcggctacgcgccacaaatttctggtattgctcagacgaatgccaccgtgaccgccagccaggcagacagaattatctatcaaaccaaagtcccaccgggccctttcgtcatccaggatatcaaccagtccgtacagggaacgttggacgtcaccgtcgccgaagaagacggtcataccagcacctttcaggtttctgctgcctctgtgcctttcctgacgcgaaaaggccaggttcgctataagctggcgggcggtaaaccccgtcaggacagctcgcatcaggtcgaaagcgaggcctttttaagcagcgaattctcctggggcgtcctgtcccggacctccctgtacggtgggatcctgaacagcggtaatgattaccgcgcgctggcggcaggtatcgggcagaacatggatatgctgggcgcgttgtcatttgatgtcacccaggccagcagccagcacgagggggaagcaaagcagacgggatacagttaccgcatcaactacagcaagcgtttcgacaccaccgggagtcagctcacgcttgccagctaccgctactccgacagccgctttctcagctatgcccgctttcttgaaaaagatcagggtaacacggaaacggaaaaacagacgctgagcatcactgccagccagtacattcccgccctgtcgctaaacctttatcttggtatgctgcgccagacctggtgggatagagccccctccaccaccggcacgctcacggcaggatacaacttcgaccttggccgctggaaaaatcttggcgtgacggcctcatggagcaaaacacattatcaggatcaaggcgatgacacgcaggtttacttctctttaagcatccccctcaatccggatcatcgcctcaattacgatctgagaaacagcgacacgacgcgtcaaacgctctcctggtatgactcttcagacagtaacaatacctgggggatatccgctggtaccgagagcgaaaaaactgacgccggggcgcaagtcagcgcgaattatcagcactatgccgggacgggagatctgaacctgtccggaagttacaaggcccatgactaccgttccgtcagcgcgagctggaacggctcgtttaccgcaaccgcccacggggcgtcgcttcatcgccggagctacggcaacgaaccgcgtgtgatggtcagcacggaagggatcggcaatataccgctgaatatgtcccgcgatgccaccaacatgtttggtattggcgtcctgcccgccttttcgagctatatgcccgccagcgtacaggtcaatctgaataacctgccagagggtgtcgatgtcgataaccacgtcattcgctccacctggaccgagggtgcaatcggttatcggctgattgcctcccgtcagggtcaggatgttgccgggatcgtgcgtaccgccagcggcacgccgcctctcggcgcccaggtgcgtgagcaggattcaggcaaagaggtgggcattatcgcccaggacggacatatctggctgggggcggtaaaagctgaacagcactttatcgtcacctggggagacgatcagcagtgtcatttctccctgccagcctctcttgacaacaccacgcagctgatgctgccctgccagtaa

SEQ ID NO: 123964 - DNA, 756 bp, Enterobacter cloacae
atgaaatcatacgtttatttagcagcactcctgttttgtggctccggcgtctcgcaggcggcaattaacctggacaggacgcgcatcgtctttgccgaaagagataaagccagcagcctgactattgaaaaccagagcaaatcgcttccctatcttgccctcgcctgggtggaggatcgggacgggcgcaaagaggacacccattttatggtcctgccgcctattcagcgcattgaacccggcgcctcgtcacaggtgcggatcgtgaaacaggccgcgacgcaacagctgcctgaggatcgggaaacgctattttatttcaatctgcgtgaagtgccacccaaaagcgggagcctgaaagaggagcgcagcgtcatgcaggtggctatgcagagccgcataaagttgttctggcggccggaaagcattcgtaaaaaatcaggtgaagagacggaaatgcagctgtcggtgacgctgtcaggcaaaaccatgcgcctgaaaaacccaacgccctatttcattacgctggcgtggctgagcaataacggaaaaaccatgataccaggcttcgacagtctgatgattagcccgtttgcgaccagtacgctgacgctgagtgaaacagaaggaacgggctacagcataggttatattgatgattatggtgcgctacgcaaggtcaatttgacctgtaccgggtcaacaccatgcacgctaacgccgcgcaaggcagggcaaaatgcgacatctcgctaa

SEQ ID NO: 123965 - DNA, 1059 bp, Enterobacter cloacae
atgcgacatctcgctaagcttttccttttcatgctggtgatgtgtccccttaagcaggcgctggcgctgaactgctaccttggcacacaaaatggtccggtggagcaaaccaaaacggtgtcagaattctccattcccagtacagcaaaagttgggcaaaagatttgggaatccagcgatatcaaaatccccgtgtattgcgacagaaataccgcgtcaaatcatgagaacgaagacgtcttcgcctgggtgaacccttatccgtcggtgtcggatccttactacgagctcggtgtgacctacgagggtgcagattacgatgccatcgggcaaacctacggcgtggatacccgtcagtgtctggacaacaacagcctgagcaaatacacggccgaacagttaaaagcgatgggctgggagaaatacatctgttcggggaatgcgtgggatgtacatacctcacgaacctttgcggcacgcttcaggctgtacgttaagctcaaagcgataccgcctcagggctacgtcagcacgcttggtgattacatcgtcgtgcagtttgacggcaaaggcggcgtaaatgcgcttcctgatgccaaaaacctcaaataccacattaacgggctggaaaacatcagggtactggactgcggagcgacgttcagtatttaccctgaaaatcaggagatcgactttggcaccttcagcgcacgtgacatcgtcaatcagggcacgcgtacgcgaacgttctcggttaaaaccagtaaagtacaggatgcgcagtgttcagacggatttaagatcgactcgtcgttctataccgatagcgagctgacggccagtgatacggcgttgctgattggtaatggcctgaagctgcgcattcttaacggcacacagccctacaccttcaatcagtatgacgagtacgctgattttaccggttcggtgctgcatttcgagaccacgtacaccgctgagctttcacgtgcagagggaaagggtatcgattctggcccttttgaaacggtcgtgctgtttaaaattaactaccactag

SEQ ID NO: 123966 - DNA, 1995 bp, Enterobacter cloacae
atgaaaaaaagcgctttatctctttttatttgtgcagcaatttcattctctgctgcggctgaaactcaggtgcaaaatgaatttgcacaggataatgccacctacaccgcaattgtgctcaagctaaaaccgacgacaggtctgttaaaagccacaaacaataaaattaccttgagcgacgcttccctgacaacaacaaatatgttccgtccgactaacttgcgtagttctactcaatcctctgaattgacggagcttaataaacgctatggttttgaccgttatctgcgcatcgagttaccgaaagataaaagtcaggataaaacatatattaaccatattatcaccgagcttgagcaaaatcagaacgtagagtttgtgtacccggaagccgagccggtatcgctggatgacacggcccttacgccacagttaaagtcctcactgaatgataatttaacgtctgccgccgttccggatttccgcaataagcaggattatctcaaagcgccggatgttaagcgcaccggttattatatggggggcgtcaaccgtgacagtgttgatcgctatgcaggcagtgcgggtgaaggggtaacgattatttcggcggagattgatgcctggaataccagccatgccaacttaccgccgatgagcctcagctctggcaagacgacgtatgttgcaagccatgatcacgacaccgcttcagtggggattatggcggcgaaagatatgggcaccggtattcgcggtttagcctggaaaagccggatgggttatgcggcctccgcgagtaataacctctataatttaatcccccagctaaaagcgggtgatgtggtgcagatcgggatacaagttgcggggggttatccatcgggttgtcagaaggattgctgggtcgcaatggaatcccagaccgcctattacgatattattaaggcgctgaccgacaaaggtgttcacgttattgaggcagcaggtaacgggaatatcaatatggacagcccagggttccggggggagtatgacgtgaatgtccgggactccggggctattctggcgggtgcgttttgtgcaaaagacggtaaaaaagcgtcgttcagctcctatggctcgcgcataaccagttctgcctggggctgctgggatgtggtgaccaccggttatggcgatctgtataaaaacgctggcgttaacgattcctataccgcgacttttgccggaacctcttccgcgaacccgattattgcgggtgtggtagcaagcctgtcaggcatcgccaaagccaacggtattaccgtgacaccgcgtcagatgcgtcagattctggcggagaccggtacgccgctggcgaacggggattcggcaaaagtggggacacagcctgacatggagcgcgcggtagcccgtattatggcgctgaaagacggtaacacccctgtcgctccggccccaaccgctgcggcaggcgcggattacaccatggtctccccgaccactggcgtgagcacctacccgctggatggcagcaagagcctgaatgccaaatcctataactggagcgtgacgaaagggacggaaaccttctcgctggaggcgaacctgaacggcacgctggtgaagagcgtggatagcgcgcatgcctatgccgttattcctgccaacagcgagggagaagcggtcttcacgctgaccacaaccggcgcggatggccggaccgcgacggacagcatgaccattaaggtcactaagcctgcggtacccgcgaaagacgacaccccggaaaaagacgatacgccggtaaaacctgccgcaccggcctataacgccaaaatcgcttacccgaccaaatgcaccaaagtctcttacaacggtaaaatttggttcaaccagtggtatgtcaacccgggtcaggaaaccccgggaaccggcggccagtggggcgcgtggcgcgagcagggttcttccagtaacagctgtaaataa

SEQ ID NO: 123967 - DNA, 708 bp, Enterobacter cloacae
atgaaagggttaatacgacgcatcattatggacattaaaatcgttatcgctgaagaatcctcgttaattcgacgcggcttatcctccatgatgcagtccctctcgttacccgccgttggcatggatcagaggtgcgttctgatcggtgaggcagcggcctccgctgaacttcagtcgcttcttggccagcataatccggatatcgctattcttggctattcgctgacaaccagcctcagccgccctccgctcgggggaatggacgggctgaagctcttgagatggcttaaacagacctatcctgcgcttaatattatcctgctctcgccctatgcaaacgccacgcttatccgtcaggcgctaaaggaaggagtcagagcgtacttatcacgtgatatcaacgagaaaaccttaagccaggcgattaccacggtcctgaaaggcgagatttatatcgaaaaccagctggtgaatatgcttttccgtcatgaaaagacggacgtggagaaactctctccgcgggaaattgacgtgctgcgcctgatatgtaaggggttaaatttgaaggagattgcacagtttatgcatttaagcatcaaaacggtcagcgcacataaggtccgggcgatggaaaagctggacgtacaaaacgattgccagctttactctttgatcatcaagaaccagatgtttgagatcggaatgtaa

SEQ ID NO: 123968 - DNA, 1146 bp, Enterobacter cloacae
atgatcacggaaatgaatatccgggcaggggggaaaatcgcccccgattttatgctcaagcttaatggccgcgatatcacgcaaaattttagccatcgccttatccgcttgaccatgactgacaaccgaggcctggaagccgatcaggtggacattgagctggatgattccgacggtctgttagacctgccggctcgcggtgcgtttattacgctatggctgggctggcaaggtacccctctggagccgaaggggaatttcacggtcgatgatattgaatttcggggggcgccggaccggttaaccattcgggggcgcagcgccgattttcgtggcaagctcaacgttcgccgcgagcagtcatggcatgacaccaccctcggcgcaattgttgataccatcgcgcagcgcaaccagcttagcgccagcgtggcggcggagttttcatccatagccattgcgcatatcgatcagactcaggagtccgatgctgcgtttctctcccgcctggctgaacgcaatggcgcgtttgtcgccgttaaggaagggaaggtgcttttcatgaaagcgggcggcgccgtgacggccagcggcaaaccggttgcgttgaaggtgattgaacgcgccgatggtgataaacacagcttttccattgccgatcgcgaagcatattccggcgtgacggccaaatggctgcaaacgagcgatcctaaacaacaacacccaaaggtcagcatcaatcgtctgccatcggcggcagcgacaggcgcgttacctcatccggatgccgcagccgtatccggcagcacggagcaaacgccgcaggagacgttggttggtgccgccgataacgtctttgagctgaccactatttttgcctccgaagcgcaggcactcagagcggctgaagccaaatggcgtgctttacagcgcggggtagtgaaattttctatccagctggcgctgggaaaagctgacctttttccagaaaccccccttcaggtgaaaggcttcaagcgggcgattgacgagcaagcgtggatcgtcagccgggtcgtacacacccttgacggaagaggctttacgacggaggtgaatcttgaacctgacattaccgacgaaaaattttccatcgaaagcgagtag

SEQ ID NO: 123969 - DNA, 465 bp, Enterobacter cloacae
atgttaatggtgctggggctgtttgtctttgagcgacgaaccttgccgtatcagtcaatgcagttttcaaaggattaccgctgggcctctaacgatcgcatcgggaagcccaaagcctggcagtatctgggtgagggcgatacatcccatacgctctccggaacgctttatcctgaaattaccggagggcgattgtccctgaaagccattgaattgatggcgaatgaggggcgcgcctggccgctgatcgacgggacaggcattattcatggcatgtttgtgattgataaggtgacgcacacccatacggatttttacagcgatggtacggcgcggaaaattgattttacgctttctttgaagcgggttgacgaatctctaatggcgatgtttggcgacctgagaacacaggctgaagagctggtgaccagcgcgcgtaccgaaattggagggctgctgggatga

SEQ ID NO: 123970 - DNA, 2448 bp, Enterobacter cloacae
atgagtaataatgtcagacttcaggcgctgctggatgcagtcgccagggcaagccgaccgctcaaagctatccacaatgccagtctctctcttgagggagagatcggtgaatcgcaggcggcgctgcgtgcgctcgatgagcaggcggcccgcgtcgatggattcagaaaaacaagcagtcagctcaccatgacggggcaggcgcttgccctggcgagacaacaaacggcggcgctggcgcgtgaattgaaaaacacgcaaaaccccacccgtgagcagaacgatgcgctgacggcagcccgccagtctgccgccgccctgaagcttgagtacaacacactgcgccagtccgtccagcgtcagcgcggcgaacttgcgcaggcggggattaatacccggaccctggcagcagatgaacgtcgtttaagaaagagcatcggcgaaaaaacgcagcagctcaacggacaacgagaggcactcgcccgggttaaccagcagcaggagcggctcaatgccgttcagcgtcgctacgaatccggcaaacgtgttgccacgcgtgtgcatcagatcgctggcacaggcgtgagcatggcaaagacgggctttgaccagacgtcccggtttatggcgccgggtatcagtgctgaaaagcagatgtctgctattcaggccagtcttggtctggagaagggggatgccagacttgaggctatacgccagcaggcgcgggacgtcagtgccggtacgggaacctcaacggaggcggtcacccgggcgcagaccgagctggttcgttcaggatatgacgccgatggtgtgcttgcggccacgcttcctgcggttaatctcagccttgcgggaaatgtcgatgccgcaaacgccgccgacatcatcagcaatgcacagaccgcgttcaacctggccaataccgatgctgagcgtgtcgcagacgtgctgacccgcggatttacctcctctcacaccagccttaccgagctgggtgctgccgtggcctctgttgcgccaactgccagcggcgctggcgtgagccttgaagagacgaccgcgctgcttggcattctgatggaaaaggggatgaaagggagcacggctggcgccggggtcagcgctgtgctgagccatctgcagatgcagaacggtcagggttctgccgcgctgagtgaactgaacgtacagacccatgatggacaaggcaatctgctgcctgccgagcagatccttacagccctctccgcatcctttgaaaagagccagctcggtaccgcgcagcagatggcgtacctgaagaccattttcggtcaggaaaacgcgcaaggcgctgcggtactggtctccgccgcgggtaatggaacgctgtctgagaaacgtcagcagctccagggggcaaagggcagtaccgcgcgggtagctgccgttcagtccgataaccttgccggtgatataggcaagcttcaggcggtgtggaacggcctgaagatggatgtatttgataaggcggagggcgccctgcgcaccctgaccaccaccgcgaccgggtggatcagtacgctctctctgtgggtgaatgccaaccccgcactgacgcaaggcctggtcggggttatcgtcggcgcgcaggcgtttgccggcatagtgggcgggttgggcatggtcgttgcgccgatggtgaccggtctgaacctggtcattaccgccgccgggatgttaggcacagccttcagcgtggtcggcggcagcattatggcgatcctgggtgccctcagctggcccatcattgccattggtgcggcgattgcggcgggtgcattactgatttttaaatactgggaacctgtcagcgccttctttaccggagtgatggaagggctttctgtggcttttgctccactgggcgagctgttttctccacttctgcaggcgtttggtttcatctcagaaaagctgggcgggatctggcagtggttcaccgacctgattacgccaatcaaaacgactcaggaaacgctcgacagttgcaaaaacgcgggggtgatgttcggtcagatgctcggggaggcgttgatggcaccgcttaatctgttcaacactctgagcagcaaggcgacctggctactggataaactcggtcttatcaaaacaaagtcggacaacatcgagcccgttgcggctaacgcaggggcggcttcctctgcgccgggcagtgcgtatattccgccgacatcgacctatggtggctatctgaagtatcagccagcgctcgccactggcggacgctcttacgtcgatcagagcaggaacgaatatcacttcacgctgcagggtgacatgacttccggagcggacctcagccgccaaattcaggatgccctggacagcagagagaatcagagagcggcgaaccagcgatcgcgctttatgtatgagtaa

SEQ ID NO: 123971 - DNA, 573 bp, Enterobacter cloacae
atgacatttaagttttcagataaagaccgcacaatccgaatttataacctttgcgcagatacgggagagtttattggtactgatgattgctatataccagctaatacaggtctaccagcttactccaccaatattaagccccccgatgtaccaaaggataaagtcgccgtgttcaatgaaacaacgtgggaactgctcgatgactacagaaatcaagcgctctttagcataaaaacgggtgaacaagtatattttagcaatcttggggctttgcctgcagacgtaacgacaatcacccctgacggaaaatatatgcgctggaatggcgaaggctgggaaaaggacgctgcaatggagcgggccgctgcggtagcttgtgctgaaagtgagaaaaaacggctgatgcaggaagctaccttcgctgttgaaacattaaaggatgctgttgaattgggggaggcgaccgagaatgagatcagcatgttgacggcgtggaaaaaataccgcgtttatcttagccgggtttcaccaaatacagcgcctgaaattgaatggcctgaactaccggtgtga

SEQ ID NO: 123972 - DNA, 468 bp, Enterobacter cloacae
atgcacaaactcaagagcctgcgtcaggcattaattgacgctgtaccacaactgcgcgcaaacccggagcgcttacggatgaccgtcggcagcggtaacatcgatgcgcgtctggcggcctcgctctcgttcgaaaaacaatatgagctgaaggcgaacgtcagcggtttttccggtgacagcgaggggattttcgtcccggtgctggcctggcttcgggaaaaccagccggatatttttaccctcgatgaggggcggaaaaaggggtatctctttcaggttgtcttcaatgacgatgaaacctcagatatcagcttcagcctgcagttaaccgagcggattctggtgtctgagaatgaagggaccttgcttgccacctattctccggagccaccgctgccagaacccgtcacacgtccgatggagttatacgtcaacggtgaactggtcagccggtgggaggcctga

SEQ ID NO: 123973 - DNA, 414 bp, Enterobacter cloacae
atgagaactctcctgctgatgctggctgtgttgatggccattaccctgtggtttcgtcatgacaatctgaacctgtcccgctcctttgccaaagccaaccagatcgccgctgtacaaaaaaacacgattcacgcgctgaaccatcagctggccgtgtcgcaacggatggccagagaaaatgaaaacgcgcaggtcaggctccgcgatgcgcttgccgttaccgctgaggagatggcaaggcgcgaagcggctctcaggagattgatgaatgaaaatgaagcactacgccgctggtatcacgctcagctgcctgatgttgtccgcaggttgcacacccgcgccgcctgcgcctccgccgcacattgtttacaacgcttgcccaaaggtgagcgcctgcccgatgccggcaagtga

SEQ ID NO: 123974 - DNA, 510 bp, Enterobacter cloacae
gtgaactcaatcattaagcgttgcagcgtcgccagcgtccttgccctggcggtgctcatgcctgactttcgattactgcacacctcgcctgaagggctggcgttaattgccaatctcgaaggctgccgtctttcgccctaccgctgtagcgcgggcgtatggacgtcaggcattggccatacggcaggcgttgtaccgacgcaggcgatcaccgagcgtgacgcggcggcgaacctgatcgccgacgttctgacggttgagaaacggcttgccgcatgcgcgccggtggagatgccaccccgggtctatgacgcgctggtcagttttgcctttaacgtgggaaccggtgccgcctgccgttcgacgctggtggcgtttattcatcacaaacagtggccgcaggcctgcgatcagctgacccgctgggtgtatgtcaacgggaagaagaacgccgggcttgaaaaccgtcgggcccgtgaaaaggcctggtgcatgaagggggcgggatga

SEQ ID NO: 123975 - DNA, 204 bp, Enterobacter cloacae
atgaagatctatgcaatgcagggggatacgcttgatgccatctgtgcccgttattacgggcgcacggcaggcgtagtcgaacccgttctgaaagccaatcctggccttgctgagtatggcgttgtcttaccccatggtacggcagtagacatgccagaggtcgatagcgcacccagaaaagaatccgtgaacctatgggactga

SEQ ID NO: 123976 - DNA, 1962 bp, Enterobacter cloacae
ttggctatctcctgtgcttatccgtggaatgcgccacggacggccattgtcagcccctatctcacacactctcaactgcagcgtcgcgatcgtctgttcgcggcgctgctgcaagccagaaaagccctctctttgcagcctgaatgcgtccgttccgaagtgtggcggatggttgacgccatcgaacaacagcagggcacaccgcgagccaatgcgtttctgatccgcttctgtaaaggggtattaccccgcctgcagcgggttgctgagcaatatagccgggtcggcgtgcatgagagcgtctccgcggcggtttttgatggccacttcgacacgccgctgcggcaataccttgcctcgcggatggttgatatggtcgtccgcttcaaccgccttccggatatgtcccgtgcggatatcgatctgctgggggctgacatcgcccgctttattcgcgccgagctggcaaatatggacgatgccggcatgggtgaatatcaaacgctgcatgcctggtatcagcgcgccggtgtcattacccgtcagttcaacgtgctccctccccactgggagcgtgtgttaaaaaccgtcttctgcaaagaggacgttgccccggcggtgatccggatgttttcagaggcctggtggcgcggtcgtctgcgtcggatggcggccgcctggcgggagcatctgcagatcgccatcggtcacgtcagcaaaaagaaatctgcctatgcgagcaaacggtgcatcgccgagtggcgcgagcagaagcgccgtacgcgtgagttcctgaagggactggagcttgaagatgaagagggtaaccgtatcagtctgatcgaaaaatacgatggctcggtggctaaccccgcaatacgtcgctgtgaactgatgacccgcattcgcgggtttgaaaatatctgccatgagctgggctatgcaggcgagttctacaccttaaccgcccccgcgaagtatcacgcgaccgtgcaggccggttaccgtaacggcaagtggaacggcgccagcccggcagacacacaacattacctcaaccggctctgggcgcgtatccgggcgaagctgcaccgggaagggattcgtattttcgggctccgggttgctgaacctcatcacgacggtacgccccactggcatatgctggtgttcatgcagccggaggataccgggcgggttagacgcatcatgaatgactatgcctgcgaagaggatgccttcgagttacaacgcgacagggctaaaaaagcccgttttcacgccgaagccattgacccggagaagggcagcgctaccggctatatcgccaaatacatcgcgaagaatatcgatggctatgcgcttgatggcgaaactgatgatgaaaatggcgaactgttgaaagagaccgcacccgctgtttccgcctgggcggcccgctggcacatccgtcagtttcagtttattggcggtgcgccggtgacggtctaccgggagttgcgccgtctcgccgaccgcgagacggcgcatggcctgagcgtggagtttgccgccgtgcatgacgcggcggacgccggagactgggcggggtatgtgaacgcccagggcgggccgtttgtccgtcgtgacgatctgcaggtacgtacgctctacgaaccgaaggaagaatataaccagtacggcgaggaaaccgtctgtgtccgcggggtctacgatgcggccgttggggccgggtcaccggttttaacccgcctcaaacagtggaagattgtaccgaagcgggccgttgaccttaagggcgccaccgcgccctcttggagttctgtcaataactgtacggcgggtgattttactcatctgcaccgacaccgcgagttgcccccgccctacctggataaggccagttcaatccttgaacgtaccgggcatttaaggcatcaggtcgccggaagtatgcgctaa

SEQ ID NO: 123977 - DNA, 222 bp, Enterobacter cloacae
atggctgattttatcgatctggttcaggagcgtgaactggcagaacgcgagcgccacattaacagcgcgcgccgtcgacctgtgtcgccatcgagttttctctgcgaagcgtgcgatgccccgatccccgaggcacgccgtattgccgtccccggcgtggccatgtgcgttacctgccaggaaatgacggagctgaaaaacaaacactatcggggaggatga

SEQ ID NO: 123978 - DNA, 228 bp, Enterobacter cloacae
atgcgacatagcgaaaaccgcacgtccccgatcgagggagacaaactggtacgtctgctggcgcaggcgaagaccgaggagcgaagagcacgtgcgctcgcggtttcacagcgccttgaggcgctggccagccacatttacaaaaccggcatgagcggtgaagacgtggctgaactgctgtgtcacgaagcggcccgttacgagcgtgaatcccaggagctgcactga

SEQ ID NO: 123979 - DNA, 339 bp, Enterobacter cloacae
atggcgatagaagcagctcaggcaagctttccactcagcgtcggggcgcgtctgtccggacttaaccacgtggctgaactgcgcgccagattctggggcaatagcgagaaagagctgacgcggttttttgcagagctgcgtgataagcgcgatccctgttatgaagagaacacccgcgcgctggctgccatcttcttcctggcgaaattacccgctacccgtcatgcgtgcgagatcggtgaactgacgactgacgagaaaagggcgctgattaccgccatgaaccattttcgtgcagtcgtgagcttatttcccgaacggctgaccatgccgatgtaa

SEQ ID NO: 123980 - DNA, 264 bp, Enterobacter cloacae
atggcttctgaaatcgcaatcatcaaagtgccagcccctgtggtgacgctgcagcaattcgccgcgctggaaggtgtttctgaacgtactgcctaccgctggacgaccggtgataacccccgggtccccattgagccgcgcactatccgcaagggctgcaaaaaagcaggtggccccatccgtatctattacgcgcgctggaaagaggagcagctacgtaaggcgttaggccattcccgcttccagcttgttatcggtgaataa

SEQ ID NO: 123981 - DNA, 1035 bp, Enterobacter cloacae
atggcgatccgtaaaaatcctgccggtggctggctttgcgagatctaccccaacggggcaaagggtaagcgcatcagaaagaaattcgccaccaaaggcgaagcgctggcctttgaacagtacaccgttcaaaacccgtggcaggaggaaaaagaggaccgccgcaccttaaaagcgctgattgacgcctggtatagcgctcacggtattacgttgaaagacggtcttaaacgccagctggcgatgcaccatgcctttgagtgtatgggcgaaccgctcgcgagggatttcgatgcgcagatgttttcccgctaccgggaaaagcggctgaaaggtgaatacgcccgttctgcccgggtaaaagaagtttccccccgcacgcttaaccttgagctggcctacttccgggcggtattcaacgagctgaatcgtctgggggaatggaaaggcgaaaatccgctgaaaaatatgcgccctttccgcacggaagagatggaaatggcctggctgacgcaggagcaaatcgcccggttactgaccgagtgtcggcgtcatgacaacccggatctggaaaacgtggtcaggatttgtctcgccacgggcgcacgctggtctgaagccgaagggctcaaaaaaagccagctgtcgaagtacaaaatcacctatatcaataccaaagggcgaaaaaaccgcaccgtccctgtcagcaaagccctgtatgacgctctgcctgataacaaaaatggccgtttgttcagtgattgctatggtgcgttccgctctgcgctgcaacggacaggtatcgagttacctgccgggcaactgacccacgtgctgcgccatacttttgccagccactttatgatgaatggcgggaatatcctggtcctgcaacgggtgcttgggcatacagacatcaaaatgactatgcgatatgcgcactttgcacctgatcatttagaggatgccgttaagctcaacccgctggcggtgagtggcgataaagtggcggtagaaatggcgaataatgggtaa

SEQ ID NO: 123982 - DNA, 684 bp, Enterobacter cloacae
atgaagatgaaagcacttttaatcgccctgcctgtggcgatgatcccggctaccgttctggcggcaaatacggaagaagggtattacggttcggcaaaatacctgcagattgaacagcgtgcgaaagagatggataccagcgcgcgtccgggtgtcgggcagtttgtgggcggtaaagagaaagagcattttggcggcgcggcgattgccgcaggttaccagttcggtaacggctggcgtaccgaaggtgaatacacctttaaacaaaaaacggagtacaccagcggctccagcacattcgcgaacagctttaaccacctgcagaccgaaactgaacgactgatgctgaatgtctaccgcgattatgaactcggctacggtgtctctgtttacggaaccgcagggcttggcgtgagcaagatcaaagcgggcggctggcagggtaacgccggacgtgaatacgcctcgaccacccaaagcaacctgacctacgcgttaggagcgggcgtaagctacacgccggttgaacgtctgtatgtcgatctgggctatcgctatatcgatatgggcaagatcgaaagcggatataacaatttcactaacgcgcgcggcttaaaagacgagcagatgaaagcgcatcttgtctctaacgaatttacgctgggtatgcgttacgtgttttaa

SEQ ID NO: 123983 - DNA, 2115 bp, Enterobacter cloacae
atgatgcgactccatcttctcttttttatgctgctgttcgccatggcagaaagtcgtgcggtaagccaaaagacgtgggtgatcctcaataacctctataaaggggcgatttcgtttgaggtgtctgcctcagggccttgccttagccagccgctgatggaggagtggggcgtacgtgacgcggtgcttgcgcgtctggtctgggatgccaaagggtgcctgacaccacagtctgcagagcagtttaacctcaaatactggtatcgcccgcaggcgcaactgctgacgcttctgttcccgacagacgccattagcccgcagcagaacggcgtcagcaccagccgctgggatgatggcatcaacgcgctgtttatcaactaccgtctggatgcggataacagccaggcgcagtatgactgggagcgttccggtactgacgccacgctgagcctggacaacggccttaatgtgggcccctggcgtttgcgttatcaaaacaccttctggcgtgaaaaagaggggcaacacggttcgtacaccaatgcgatgtcgctctggcgcagcatcacgccgctgcgttcgcgcgtgaccctgggcgacggcaatacctcttcaaatatgttcgacagcctggcgtttcgcggtgcatcactcgccagtgacgaggcgatgtaccctgatagctggcgaccctattccccgtggatcaacggctatgcccgcacagaggcggaagtcaccattcaccagaacggggtacgtgtttaccgtattcacgtcccgcccgggccgtttaccattcgcgatttttatccaccggacccggacggcaacctggaactgacggtgcaggagagcgacggtacggagcgtacccgcctgctgccctattccagcatgcccaatctggtgcatcacgggctctttagctacgaactggccgccggtcggtataagccttttcacggtatcgacagggacaaggatcgcttctggcagagtacgttctcgtggggagttgccccgcaagtcaccgtgttttccgggctgcagcaaggggagcactatttcagccaggtcgcgggttttggcgctaacctcgggcggtggggggcgttttccgcagatgtcagcgcggctcgttatacgcaagaggcggagacgcaacggggcaaggtgtggcgtctgcgctatgccaaagcgttctttacgaccgaaaccagcctcaccgctcagctccagtggtatccacgtaatgaacattaccggtcgctggaagaaaaaatcacgcgggcggagctgctgagatacggctgggacgatgacgtcacccggcgggcgctgcgcgggcagctggagcttaaccagaatcttggcgaggatgccagcctgagcctgtcgtggcacgggttgaagtcacgtgaacctgacgcaggcagcatggggatgacgctgagcctggatgcgaccttacagaacgtggatgtcagcctgtacggcggttatgaacgctacggtaaaaacccggatgaaaccaccgtgggtttcaacatcagtgtgcctttatccctttgggggacgacgagtaatgtcggctatatcaccgagctcgccagccggggggaagatagtcatggagtaaatgtgtacggttcggcgttgagtgattacagcctgcgttacgatctgcaggcgacgcataacctacaccgcaatgatgagttatctgcgagcctgggctatcagtacaacgcgggcgagctgaacctcagtatggtacgcggcggagcgcgccgtgattatcacgccgacaccagcggcagcattctggtacacgcaggcggcgtgacgctgggccagcaactcggcagcaccgctgcgctggtggacgtgccggactcgcctggcattggcttctataaccagtttggctccacaaccaatgccagaggcgagctgctggtgagttacttaacgccgtggcgagtgaaccgcattacggtcgatagcctgagcttgccgaaaaacaccgcgctggatgtgacggaactggaatcggtgccgaccgatggcgcgattgttctgctgcgttttccccaaccagtaaccgattga

SEQ ID NO: 123984 - DNA, 429 bp, Enterobacter cloacae
atgaaaaaactcgtatccgcgctggccgttattgcctctgttggtatgttcacctccgcccaggcggcagaaagctgctctgccaaagccgcggcactggaaaaagagatccgtatcgcccagcagtacggtaatacctacaaggtcaacggcctgaaaaaagcgctggctgaagtgaaagcgcactgcaccccggcaagcgtacaggctgacgcgcaaaaagaggtgaagaagctggagaagaaactggccgagaagcgcgaagatattgccgaggttcaggccgatctgcgtgaagcgaaagccaaaggcgacagcaagaaagtggcgaaataccagcgcaaactggctgaaaaacagagcgatctgagcagcattcagcaagagctgagccgcgcacgcgccgcgcttgcctccctgcagaaataa

SEQ ID NO: 123985 - DNA, 3189 bp, Enterobacter cloacae
gtgagagccgttacctttatcctgtttttttgtattgcctttaccgtgtgcgccgcgcaaccgggggaatcccttcgcctgctggcgcgtagccatgaaaaggtgatcgagccgggactcagcggtagcgaatggcgctgggtgcgcgaacaccgcaaaatccgtctggcggtctgggagccgatgatgcccccttacgacatcaccaccgggctgaatgattacggtggtatcaatgcggatttcaccgggctggtggcagaaaaccttggcgtggagatcgaggtggtgcgttatcccacctatgacgatgccttgtcagcattgcgggcaggcaaggcggattttatgcctcaggcaggggatagccagcaacaacaggggctgatgctgagtgtgccctacagcgacaacatcccggttgaagtggtgaataccgatgcctcgcccgatgagccggtgaaaaggatcgccgtttcgcctgtctacagcagcagtgacgtgctggcccgttatccgggggctgacattgtgaatttctcctccacgcgacatgcgctggaggcgctggcgtttcgtgaaatcgatctgttcttcagcgatgcgatcaccgcgcgctatctggcgagtcagtccaatttaagcaatctcagtattcgtccggtggcggacacgttcgaggcgtcgggattctcgttcgccgcgatgccaaagatggcggtctggatcgcgatcctcaacaagatgctgacggcgctgccggagaacgcgggggtggagatccaccgtcgctggagcggggggatcccgctctccctgagcgaagagccaccgcgttacacctcgctcgaacataaatggatcaaagaacattcccggatccgcgtcgcggtggcgcaggataacgcccccattgcctttttcaacgagcgcgggcagctgcgcggcatcctggcggatctgctgaccgcgctccgcctgcgtaccgggtttacctttgaaatccgccgttatcccagccagaccaccgccttcagggccattaatcgcggagaggccgagctgattgcaggcgtcacgcaggaggggatctggcaggcggatctcctcaccacccgaacctggttgtataactcctgggttatggttggacgcgcgctcccggggaaggaggcgcttcagccccgcgtggtgagcctgcgcggtgaagcgcctgatgactggcttggccgacaaaatagcggccagacggcgaaggtcgatacctggtggcagggttttaacagcgtgatgaaggataaaaacgacatgatggtggtgccgctgatcattgccaacgcccagctcacccgcaaagaatttgcctcactgaaaattcttgccagcatcgatgccgaaccgttgcgctttgcctttggcgcatcgcggcaggcctggccgctcatcaccattctgaataaagcgctgatcaacatcccgccggaagatctccacgccctgacgcgcggcagcaatacgggcaatgcgtttgcctctgtgtcgacgtcggcgctgtcgataacgtggttggtgacgttcaccgccgccggtctggccttgctggcgctggtggcaggatggatctaccgtcggcggcgcatccaacaggcgcgcatccgcaagctcattcagacgctgcgtgcggcgaaacagcgcgcagagcgagcccgtcggggaaaaagcgcctttctggcgaccatgagccatgaaattcgcacgcccgtcagcgccattatcggcatgctggagctggtgatgaaacgtcccgaccatgccccgcacaacccgcagtcgatacgggtcgcctgggacgcggcgcaatcgctgttgctgcttatcgggaatatcctggatgtggagcgtattgcgtccggccgtctggtgctccgcccggagcgcgcctcgcttcgaaacctgattgaaggaacggtgtcgcagtttgaggggctggcggcgcagaaatcattgaagctgctgctggaaatggataccgccctgaaaggggacgtattgatcgatgtgatgcgttttcgtcagatcgtcaccaacctgctgggtaacgccattaaattcaccgaccacggtcaggtgatgctgcgggcacagccgcaatggcagaacggcgagtttatgctgctggaactgacaatagcagacaccggcgaggggattgatgctgcgacgcaacagcgtctgttccagccttttagtcagggtgagagccgtacccgggcgcagggcagtgggctggggctttatatctgccgccagctcgcggacatgatggacggggatctcacgctgaatagcgtgccgggtgaggggacaacggtcacggtgacgctcaggctgcccgtcatggccgcactgccagagaaagagactaaagcttgtgtgccacccggcaaacgcgcagccttgaccatcatggtggtagacgataatccggtcgggcggatgctgcttacccagcagcttgagtggctggggcatgctgtcacccagcacgacagcccggcaaagctgcttgagagcctggcaatccgacagccggacgtggtgatcaccgactgcaacatgcccgagatgagtggctatgccctgtcgcgcatcatcaatgtacattacccggatgtcacggtgtttggcatgacggcggacgcgcgtgaatccgtgcgggatgaggcgcgggaagcaggcatgcgcgactgtatcttcaagccggtcacgctggttgcgctggaaaatctgcttgcccctctggccccctccggtaaatcgccggttgcttcgtcatattccatctcgctacccccagcactgctggacggtgagcatctggcaacgtttctggatttgcagatgaccgtgctggaggagacgctgggcgatattgcgctgtggcgaaaggaccccggtacacccttgaaggacgcgctgcaccgactgcggggcggtattcaactgctcggtatgacggcgcttgaggcgcgctgtctggagcaggagcgggctgccgacagcggcggcatccgtcagcttgaggaggagattcaggcattaagggccgcattgcagcgctggcgcgagacgggactacaaccgggcgagaccgtcctacagcagaatgaggacgggcgtacagcgtaa

SEQ ID NO: 123986 - DNA, 630 bp, Enterobacter cloacae
atgacaaaaatactgcttgtggatgaccatccggcaatctgctttgcgctcaaggtgctgctggaaaaaaatccggattttatcgtgacgacatcctccggcgagaacctgctggcgctgctgcatcgggaacagccgtcgctgctgatcctcgatctggaactcaaaaacgctgacgggctggatcttctcccgcgtatcaagcaccacttccctgcgctcagggtgctggtttataccaaccagcctgcggggatctacgcactgcgcacgctgaaggccggggcgagcgggtttatcaataaaagcctggcgctggagcgcgtcgagccggtttgccagctgctgctggacggctatcactgtttcccggaagagacgttcacgaaaatcgtcgaggctactgaaatacaacatgatacccgggcgctgctggcgagtttctccgatcgtgaaatcgcggtgctgaactatctgaagcagggcaaaagcaacaaggagattgccgaccggctggcgctcagcaacaaaaccatcagcacctataaggcgcgaatgatgaaaaaaagcggctttgcgcattttgaacaacttttagatcttattgacacttcagagccagagacgtga

SEQ ID NO: 123987 - DNA, 360 bp, Enterobacter cloacae
atgaaaatgaagctttccctgttttgcgcaaatacaggtttaagtaaaaaggacttccccttatggtcagatgtttacgatgcgcttcatcagctcaggacgaatacgggaagcgttaatattgtagatgttgataatcaaaaaacgctcagcatccattcggatggtatgcatttcctgctctcattaattgagggtaaggatgataaaacaaaaatacaaagcatccagactgcttgttttggaaggaaagaaagttctgttccgcctgtttttctgagtcattctcatggcctgacaagtgatttcgagtttgtgactgaggtttccagaacctttttcatcacaggacaggtttag

SEQ ID NO: 123988 - DNA, 729 bp, Enterobacter cloacae
atgtcaaaaaaattactgttaagtgttgctgtagcatcaatgttactgactgcttgctctgcatttaacggcggtagtgaattattgtctgataagaataacagtgatgctttaattaattcaaaaataatagacggagaaacaaatgtctcttctttgtccagtgttattggaaaaaaagatgaatcccgctctgctttaaagaaaacattccctgatgggaagctttcggttgcttcatatacaggatttttgaacggcatgaccggcacttatgcacatagagttctttcagtagtctatgggtctgataatattgtcattaatcatggtatctttgtaaaagatttgcataatcctaataaatataatcttgattatgtaagtgctcgtaatttggcatttacagaattagaaaaaggtagtgataaaacaaaagtaataaatttattaggtaatcctgatggtatgacgttcacggatgagggtaaccttctgcttatctattctaaaacggatgtttccagagatgcctcatcttatatcccagtggttaacatgataagtgggacagagtctggtgtatcagaaaggctctatattgagatgagtaaagatgaaaaagtaaaaaatgttatttcagctactgtgcaaattattcagggaagaggtattggcaatgcggatagttataatgaaaaatacgaaaatattaaaagtaagttctag

SEQ ID NO: 123989 - DNA, 300 bp, Enterobacter cloacae
atggttttatctgatttaagtgtatacctgagactttcattgcagagggctttgttgggaaacgttacccctaatattagagccgttattgctgaattatctggtaaaaacattagcttacttttttattttgaaggtgaagttgatgacgacgatgaagagcttgcatcggtaatagaaacggaaattattgccgattttgatgatgattttactgtaaatacaatagttcagcgtcttgattatccacagaggataaagaatacaaatggtttactggtatatctaagaaaagagtag

SEQ ID NO: 123990 - DNA, 9588 bp, Enterobacter cloacae
atgaaacaggatcaggttcgtttttcacagcgcgcgctgagcgcgttactgagcgtgctgctggcaacgcagccgctgttacccgcggtggcggcatccatcaccccttccggcaatacgcagatggataaggcggctaacggcgtgccggtggtgaacatcgccacgccgaaccagtccggtatttcccataacaaatacaacgactacaacgtcgggaaagaggggctgatcctcaataacgcgaccgggcagcttaaccagactcagcttggcgggcttatccagaataaccccaacctgaaggccgggcaggaagccaaaggcatcatcaacgaagtcaccggcgctaaccgctcaaatttgcagggctataccgaagtggccggcaaggcggcgaacgtcatcgtggcgaatccctacggtatcacctgtaacggctgcggatttatcaacacgccgaatgtgaccctcaccacgggtaaaccggtgcttgatgccagcggtaagctgcaatctcttgatgtaacccagggggcggtcaccatcgagggcgcgggcctcaatggctcgcagagcgatgcggtgtcgatcatctcccgtgcgacggagatcaacgcgcaactgcatgcgaaagatttacgtgtcgttgcaggggcgaaccgcgtagcggcggatggcagcgtcaatgcgttaaaaggtgaaggtacagccccgaaggtcgcggtagacaccggcgcgctgggcggcatgtacgctaacaggatccgtctggtctccagtgaaacgggggtgggcgtaaacctgggcaaccttaacgcgcgacagggggatattgcgctcagcagcgcgggaaaagtggtgctgaaaaacacccttgccagcggtagcaccacggtcagcgcggcggacgtaacgttacgcggggaccataaagcgggtggcaacgtcacggtctccggccagacggcgctgacgcttgaccaggctcacgttgccgccgataacaaccttcagttaacaacccgcggcacgctgacgcaaaacggcggtgcgttcacggcagcaaatgacgctacgcttgccgcgaccaccctgatccagagtgcagatgcccaggcaagcgcgggtcgtcatcttgccgtaaatgctgagaaaaacgcggcgcttaacggttctgttgtggcgggtcagcagctgttggtcaaaggaggcgagctggtgcagcagggaaatctcagtgcttccgagattgccctcaacgcgcagacgctgacgcaggagagccgcagcacaacaaatgccagcgggaacatcacgctcaccacgtctggccacagccaactgaaaggcagcacaaccgccgggcaatctctcgccgtcagcgcgggcagcctcgcgaaccatggcgcattagccgccgtggcggatacccggattaataccggtatattcagcaataccggcaccgttcagggcaacagcctgaccgtctccgggacggatatcaccagctccggcgcgctgaagagcgcctccacgctggatatccgcgcagacaatgccacgctttccggtgagaccggtgcgaaagggaaaaccaccgtaaccgcgagcggcaatctgaacaacagcggcacgcttatcagcgatgacacgctcacgctgaacgcggcgcagatcgacaacagcggtacgctttccggtgtccgggggctcaccacctcagcggagacgttcaccgccagcgcaacgtcagtgacccacagcgacggggatgtggcgctgaacaataccgataccacgcttgcaggtgaaaccagtgccggtggagccgttaccgtgcagggccgcagcctcaacaccacggccacggcacagacacagggcaacagcgtcggcgtggccgtgcaaaacgcaaaacttgaaggaactcaggctgccaaaggcaacatgacgttgaaggctgacatcagtctcaaccatacggggaaatcatcagcttcaggacttaaggttgaaaccggccatctcagcaacggtggaaccctgacggcctccgcgcttgtaatcgacagccctcaggtcattaacggtggtctgatccacgccggacaaacgctgtcgctggttacccgtctgctggataaccgcagcagcggcgtgctgtacagcccgtcggcactgtcactttccctctctgaactgaacaacgccggtattatcaccagcgacgcggcgctttccctctctggttcaaatctgaccaacagcggcgagctgagcgggacttcactggcaattgattacaagacgctgaagaacagcgcggaggggatgctgctggctcaaggggcaaaccgcatcacggcacagtcggtgtccagtgcgggcagcatggtgggcaacaccctgacgctgaatgccgatcgcctggaaagtgccggtctgttacagggcgatagcgcattatcactgaccgccggaatcctgaatttactgacaggctcccgcacgctgacggggggagcgctcggcctttcaggtaccacgctgactaccgcagggcagctccagggacagaatgtcagcatccgctcccacgactggactaaccgcggaagttccctcgcgaccggctcacttgacgtgacgaccgccggaacgctcagcaataccggcgaactgatgagccagggcaacggcacgctgaatgcggtcaataccgttaacagcggcaatatgttgtcggccggtgacctttcgcttaacggaaagacgctgcgcaacagcggtacgcttcaggggaatcgcgtcaccgcgcatcaggacaccatcacgaacagcggaacgctgaccgggattgccgccctgacgctggccgcccgcctggaaatggcggcgccattactgacgctggtgaatgacgcgtcgggatcgttgctgaccgcgggcgagttgtccgtgacaggcggcgatctgcgtaacgcagggcaatggcaggggaaacgggtacttattcatgcgcaggcgcttacgaacggcggtgcgatccaggcagaaaatttactggatgcgcaaatcgacagcacccttaccgggacaacgggcagcaaaatcacctccaatggagaactggcgctctcagcactgacgctggcaaacagcgggcagtggattgcaaaacacctcacgctgggggccagtaccctgaacaacagcggtgagatcactggcgttgatgcgctttcggtcgcccttacgcaactgaataaccaggccggaggaaaactgctcagcgcaggcgcgctgacgcttgatgcggaaaatgcaacgaatgccgggcaaatccaggggaaagcgaccacggttaccgccgggcaactcattaacagcggacggcttcagggagaagcgctgacgctgaatgcctcgggcgcgctgaacaataccgccagcggtgtgctgctgagcgagaatgcgctgacggtatcgacagccacgctgaacaatcagggcacgctacagggcggtggggaatcttcggtgaaggccaccacccgcgtacagaacgacggcaaaatgctctccggtggcaaactcacgctgaccgcaccggaactggcgaacagcagcagcgggctggttcaggcggtaacgttgctgctggatgtggtgaaagcggcaaatagtgggcggatactcgctactgacaacgctgagctacggggaacgacgctgaccaacgacggcatgctgcagggtgcagacctgctggttaattatcaaaaactgagtaacagcggtacggctctcggtacccgttcgcttacggtgaagggcaatgagattacccattccatcagcggtaagttgttcagcgcgggtaacctcacgctcaacagcggcacgctgaaaaacgccgggcagattgtggcgctgggagacgtcacgcttcatctgttaaatgcgcttgagttcagtggaacgctggccgccagcaacaccctgtctctcaccgctcagggggatatcaccaataatggcaccttacagggaaacagcctcgttctgagcacgggtggagtattaaccaacaacggccagttcactgcaggtaagggtgatagcacgttcagcgcgcaacgtattgtgctcaatgcagccggtagcctctcggcaggcggcgacgtggtatttaacagcctgagtgacataaccgtaaatggctttaccggtacggctggcagcctgacgatgaatgctgtgggcaccttgctcaataccgcactgatttatgccgcgaataatatgcagctctttgccgaccgtattcataacgtctacggcgatattctggcagggaatagcctgtggatgcagaaaaatgcggcgggtgcagcgaacagtgaagtggtgaatacgtccgggaatattgagacgcagaagggtgacattacgatcaatacagcccacttattaaatgagcgggatggaagtaattcgaatacacagataactgatttggataacccttcctgggttggcgaatcatcctttgtcgtaagcctggatgatatggaggaaggaagttattcaacagtaaaaaatcgtacggatgtctgggtaggaagctgcatgagttttccaacctatccaggtgcgtgcagcatggatgagcctttctttaccacttcttatcggattaatgatttgggtcaaaccaaacgttttgcgattaaaagaactgaggttgatgtaaccagtactggccatgcagcgcgcatcgcatcagctaataatctcaatattactgctaattatctcgacaatagcggtagcaatatacttgctaatcgcgatattagcctacaaggtgagcagctcaacaaccaaagctaccaggcgagttctgagactgaatatcttgtctacacggcatcaaccattaatgccggtggtgtaacctatattctgactgggcgtgaggccgaatcagaaaataccgctaatgttgtcagagctgtaatacaggcaggcggtaatgtctctgccaccttcaccaacgacatcagcaacactctcgtcaccgccaacacggacggctttagcaatacgattgccgcccctacgctgaccccgctcagcaaccagtccattaccagcggcgagcaggcgcagtcccttgtcgaagcggatgcgcaggacatcaccaccccgcaatggcgtgatgcggtgagtgatgccctgaaagatatctccggcggttcatcgctctccgaccaaaacggcagcagcggtaactatccactgccgtccggcaacaacggctattttgttccctccaccgatcccgatagcccgtatctgattacggtgaacccaaagctcgatgacctcggcaacatggacgacagcctgtttaatggactgtatgacctgcttggcataacacccggtgccacaccgcgtgaaaccaacagcgcgtataccgatcggaaccagttccttggctcgtcctatttcctggacaggctcggcctgaacccggatcgcgactaccggttcctcggcgacgcggcgtttgatacccgttacgtcagtaacgcgattctgaaccaaaccggcagccgctatatcaacggcattggctccgatctcgatcagatgcgctacctgatggacagcgccgcagagcaacaaaaaacgctggggctgaaattcggcgtggcgctcacggctgagcaggttgccgtactcgataaaagcatgctctggtgggagtcagcgaccatcaatggtcagacggtgatgatcccgaaagtctatctgtcgccgaaggatgtcaccgtgcacagcggcagcgtgattagcggcaataacgtccagctggcgggcggtaacgtcattaacagcggcagtacaattgcggcgcagaatgggctctcaatcgacagcagcaacagcctgagcaacctcaacgccgggctgctgaacgcaggtggcgggctgaacctgagcgcgctgggggatatcaataacatcggatccaccatcagcggcaaaacggtagggctggagagcgtcgcgggcagcattaacaacatcacccgcgcacagcagtggaatgtcgatgcgggaaatgtgcatttcagtggcaccgatgtcggcaagacggcctccatcaccgccaccgacgggctgacgatgcgcgccggacaggatatcaacatgaccggcgcaaacgtgtcggcgggtggccgcctgggtatggcggcggggaatgatatcaacatcaccgccaatgagattgcgaccagcgaaggacgcgccgggcgcaaccgcgcgaccacggagacggcgtccgtcacacatcagggcagcaccctgagcgcgggcggtgacctcaccctgcaggcgggtaacgacgtgaatgcccgtgcggcggcgatagcggcggaaggggatgtgggcattcaggccggtcgggatgtgaacctgctggcggaagcgtcgatggaacgctccagcagccaggcgaagaaaaaaaccgccattgacgaatctgttcgtcagcagggtacggagattgccagcggggggaatacggtgatcctcgcagggcgcgacgtaaccgcgcaggcggctgacgtgacagcgcagggcgatattggcgtggcggcaggccgcgacgtaaatctgacgacggcgacggagagcgattaccgctatcgggaacaaactaaaaccagtagcggcttcctgagcaaaaagaccacccacaccatcgaggaagacagcgcgacacgggagaaaggctcgctgctgagcggcgacaatgtgacggtgtcggcgggtaacaacctgcgggtgttaggttctgcggtcgctggcgatggcgatgtggccctttccgcaggcaacaatgtggacatcgtggcggcgaccaacaccgacacggcctggcgctttaaggagaccaaaaagtccggcctgatgggcacgggcggcattggcttcaccatcggcagcagcaagtccacccacgatcttcgcgagcagggtaccacccagagcgagagcttcagcaccgtcggctcgacgggcggcaacgtcagcattacagcgggcaaacaggcgcatatcggtggggcagatatcatcgcacagaaggatatcagcctgaccggtgacagcgtggtgattgagccggggcatgacaaacgcacccgcgatgagaaatttgagcagaagagcagcgggctgacggtggcgctgtccggggcggcggggagtgcggtgaataacgcggtcaccacggcccagagcgcgaagcagagcagcgactcacgtctggcggcactgcagggtacgcaggcggcgctgtcaggcgtacaggccggacaggccgtggcgctggaccaggtgaagggcgactctgacaaacgcaataacaacaccatcggcgtcagcgcgtcgattgggtcacagtcgtccaaatcctcatcgcacatggagagcgaaacgaccacgggcagctccctgagtgcaggcaataacgtcacgataaaagccaccggaagcgacatcaccgtggcgggaagccagattaaggccgggaaggacgtgacgcttgatgcagcacgggacgtcaacctgattgcctcgcaggacacgcagcagacaacgggtaaaaacagcagcagcggtggcagcctgggtgttggagtgggtgtcggttccggtggggcgggcatcagcatctcggcgaacgcaaacagcagcaaggggcacgagaagggcaacggtgtctggcagaacgagaccacggtggatgcgggtaaccgcgtgaccatcaacaccgggcgcgacgcgacgatcgccggggcgcaggtgagcggcgaaaccgtggtggcggatatcgggcgcgacctgacgattgccagcacccaggacagcgatcactacaacagcaagcagaacagcgtcagcggcggtgcgggttacacctttggtgcaggcggtttctccggcagcatcaatgtcagccgcgacaaaatgaccagcgactacgactcggtgcaggagcagagcgggctgtttgcaggcaacggcgggtttgacgtgacggtgggcaaccatacgcagctcgacggcggggtgattgcctccacggcgacggcggataaaaaccgtctcgacacgggcacgctgggcttcagcgatatccacaaccaggcggattttaagacggagcatcagggcgcgggtatcagttcgggcggcagcatcggcaagcagtttgccgggaatatggcgaacgctctgctggccggaggcggtaacagtggtcacgctgaaggcacgacacaggcggcggtgagcgaggggacgctcatcattcgcgataaggagaaccagaagcaggatgtggcggacctgagccgcgatgcggaacatgcgaacggcagcatcagcccgatatttgacaaggagaaggagcagcagcgcctgcaggaagtgcagttgattggtgagattggctcgcaggtggtggatattgcgaacacgcagggggaaataaacgggctgaacgcaggcagaaaagagcttgcagataaagggataaccgagccggacgcggatgccagcgacgccctgaaaaaggcctatcaggatgccctgcgagggaccgatgcatataagaccacgacggcgaaatacgggacgggtagcgacctgcagcggggtatccaggcggcgacggccgcgcttcaggggctggcgggcagcgacctgaaggcagcactggcgggggcatccgcgccggagctggcgtatcgtattggtcacggcatggggatcgataacaatacggcagcgaaaaccattgcgcatgccatcctgggcggtgcggttgcggcgctgcagggaaacagtgccgcagcgggtgcggccggagcggcgaccggtgagcttgcggcgacggcgatagcgggtatgctgtaccctgacgtcgaagatttatcgacgctgaatgaagagcagaagcagacggtcagtgcgctggcaacgatatcagccgggatggctggcgggctggccggggacagtacggcttcagcagctgcgggggcgcaggctgggaagaatgcggttgagaataattcgctgagtaaggacaagctgccggttaatatctatgacattaatccactgaaaccaaatgtgctggacgctgatgggaatcctcttaaaggtggtggtattggtaagtttacgattaataaagggcaacagaacaagcacttaccggggacaaacgagtataaaatagcttccgaagcgggtctaaataaaagcgttcttaccgtagcgcctgattcattgctacccaaactgggaacgggtcagcaggtaggtaatactcctgtaggcgttcctggttctaaggagcgaataaattatggtcaaaatattggaaactatattgaccctgtgacaggagtatccacacctactacaaatggcatagtccactatggtaaaaacggtgtgcatattgttcctgcaagaccttcagaataa

SEQ ID NO: 123991 - DNA, 1674 bp, Enterobacter cloacae
atgacagggaaaacgtcgatactacaggtgctggctggcatggccttgctggcaggtgctgcgcaggcggcccccctgtctccggccgaccgtaatactattcagcagcaacagcagcagctgctggatgaaaaccagcgccagcgtgaagagctggagcgcagcgtggtattaccgcgtcctgttcagcccgacagtgctgcgactccgcaaggtccctgttttgttatctcgcgcattgagctgacgggtaccacccttctttctccgttagccaaagatcgcctggttgcgccgtgggtgaaccagtgtcttgatatggcgcgtctcaacgccctgaccaacgccgtctctgactggtatatcagccgggggtatatcaccagccgcgcatttttaaccgaacaggatctctctggtggcgtactgcatctcgcggtactggaaggcaaactccagcaaatccggcttgaaggggttcccacccgcacgctgagcatgacctttcccggcctcgaagggaaaattcttaacctgcgcgatatcgaacagggcatggagcagcttaatcgcgtgcgccagacgccggttgaaattgaaattttgcccggcgacagacagggctattcaatcgtcaatctgacggcttcgcctgaattcccgctcagcggttcagtgagtttcgataacagcgggcaaaagagtaccggtaccggacaactcaatggcgcgctgtacggcaataacctgctggggctggcggataagtggtttatcagcggcgggcgcagcagtgatttttcgaacagccatgatgctcagaattttgccgccggggtcagcgtgccttatggctacggcttgctggactacagctacagctggagcaactacctcagcaccatcgataataacggctggctctggcgttcgacgggcgacaccgaaacccaccgtctgaatggctcctgggtcctgttccgcaatggcgatatcaaaaccggcgtgtcggcgggcatcacccaccgcatcaaccataactatctcgacgatgttctgctggctaccagcagccgcaaactttcaagtttctccctgggccttaaccacacgcaaaaaattgcctccggcgtggcgaccctgaacccgaccttcactcagggtgtgccgtggtttggcgccgaagatgataacggcaaacatggcgatgtgccgaaagccgagttccgcaaatggagcgtcaacggcagttttcagcgcccggttgctgacgggctgtggtggttgaccagcgtctattttcagtggtcgccggaccggctgtacggcagcgagcgcctgacgctggggggagagacctccgtgcgcggcttcaaagagcagtacctctccggtgataacggcggttactggcgaaatgaactcaattattcgctctttacgctgccgtgggtgggggatgttggcctgttggcagcagttgacggtggctggctgaagaaggacggatttgaccgttacgcctccggcacgctgtggggcgccgcgtttggtctgacgacggctcatcgcggctattcaagccagtttaccgttggcacaccgatggcgtatccggactggctggcaccggatcacctcacgatttactaccgcgtatcagtggctttctaa

SEQ ID NO: 123992 - DNA, 765 bp, Enterobacter cloacae
atggcaaccacccgctatccacaacgcgtgcgtaacgaactgcgttttcgtgaactgaccgtgctccgtgttgagcgcgtaagcgctggttttcagcgcatagttctaggcggcgaagcgctggagggttttagctcccgcggtttcgacgatcacaccaaagtgtttttcccggccccgggaacgacgtttgtgccaccggtggtcaccgacgagggcattgactggggcgacggcgtgcgcccgcaaagccgggattacacgccgctgtacgacgccgcgaagcatgagctggcgctcgatttcttcgtgcatgacggtggcgttgccagccagtgggcgctagaggcgaaagtgggcgacaggctgacgattggtggcccgcgcggttcgctggtggtaccggaggattacgcctggcagctgtatgtgtgcgatgagtccgggatgccggcgttgcgtcgccgcctggaaggcatcgccagcttgccgaaacgcccggaaattcacgcggtggtcaccgtcggggatgaatcatacaaggattatctggcgcacctgagcgcgttcaacattacctgggtgatcggccacagcgagcaggcggtggctgagctgctggcgtcgctgaacgttccggcggaagattactttatctggctgaccggggaagggaaggtggttaaaaacctgagccgactgtttgagactgaggctatcgatcagcagctggtgcgtgccagcgcgtactggcacgcgaaataa

SEQ ID NO: 123993 - DNA, 849 bp, Enterobacter cloacae
atgtttcgtggagtcagcgcatttccgttaacgcccctgaaaaacggcacgtttgatgagcaggcctttacgcatctgctctctcctgtggttgaggcaggcgtggattcactgggcattcttggctcgaccgggagctatgcctatctgaccgttgaagagcgtgcccgggtgacacgctgtgcggtggaacatgccggtaacataccggttatcgtcagcatcggcgcaatgcggctggacgatattctgcgtctggctgacgacgcgcaaacggccggagtctccggcgtgctgatggcacccgtgtcgtaccagcgattaacggatgaggaagtattcaagctctatgaaacggtgacccgccagctctccgtaccgctgtgcatttacgataaccctgccacgaccggttttgcgtttagcgatgaattgctatttgccgtcgcgtctctgccaaatgtaggctccatcaagcttggccgcgtgccggaggatctgtcgcaggtacgtgcccggcttcctgatacggtcacactgggtatcgccggtgactggcgggcagcctcagccttgcaggccgggtttgacgtctggtattcggttctcgcggggttgttcccaaaagcggcgctggcgatagcgcgttcggggaaaagtacagagtcagaacggttagagccgctatgggatctgttccgtcgttacggtagcgtaagggtcatcgcggcagcggcggaaatgaggggaaaagtggtaacacccggcttgccgttcccgttgcaggcaattcagggagagccgcgcgaggcgctttcagcgatccttgcggaattggaactggcctga

SEQ ID NO: 123994 - DNA, 726 bp, Enterobacter cloacae
atgcagtacctacttgacgggatagtgcattataatgatgaatcgcgcattttaaccgataataaacgcgaagttgagctttcactggcgacgtcgcgattattaaatgcacttattgacgccaataattctcaggtcagccgtactgaactccttgaaaaagtctgggaagaacatggtctggttgcttctgataacaacctgaaccgaaacatatctctgttgcgaaaagcatttcttgaattctcgcttgaagacaaaatcgaaacaataccaaagcaaggatttgtactgcactgtcagtgtactcgtgttagtactacacgtagtagcacgtacgaaaaatttaaaaaaatctgttcctcccacaaaggtttttatattagcacaataatattaaccgttttaatggtgagcaccatcactgccttttatttgtaccatttaaacgatagctctatgcataaatataagtcagtcggattatgcgatgtctatactgacgaaaatggcgtcaaacaagagaatattgactcattttttaatacaaatttagggcaaagaatcgcattaaaatgccagcaatatcccaaaaatatctattttgatgacaacagagcgcctttaaaaagcaaggtgtactcaactcacattgccctgtgtggcaaacaaaatacagggaaaggacatgaatgcgaaaacttcgtcaatattaacaacaattaa

SEQ ID NO: 123995 - DNA, 501 bp, Enterobacter cloacae
atgaatgcgaaaacttcgtcaatattaacaacaattaatattgttttatgcctgttgatgcttcccttgcttgcaatgggaatatacaagcttgttggtgtttatgattacctaccgatgaactgtatgtcgacggtacatatcaactatgaagattcaaaaaatgtccagcaagggattaatggaaatatcaaaattgttttccacattaccaacgatggtctcgtcacggtcagcgaatacggcacgttgaactattatggtaaagagtaccttgtcgatcgtacaggaaacatgaccatcgacacagacgtgcaaaacggattccacaaagtcacaaaaggtaaatttcttgctaatccgcaggataatgcaccttctttgctgattgaaaaactcaccaccagccaacctgtcctgcactataagatccagaagcttgaccccaaaacctggagaataagcgatttgcagcgtgccatatttatttgccgaaaatga

SEQ ID NO: 123996 - DNA, 678 bp, Enterobacter cloacae
atgcgcgtgttaatattagatcctaacattataaatcagcattatttgaaaacccaaattgaagaggcaggtattttaactgatgtatcttcgagtattgaggaagtggaaatgtttatgttttcaaataaagctgaactcctgattatggcatctgaaacgctttccactgctgagttacaggcgattcgtaagtggcgacgcgaagggcgcactatccgcatcatgatccttaacagcagcaacgatattgaacacaaggtgaaagcgtttgaaagcggcgctgacgattatgttgtcaagtctagtcatattgaagagattatcatcagaatttgggttttagtacgccggaattatctcacccctacctgccgtattactgcaggtaatttagaactcgacttaaacagtaaagtactcttcatcaacaagcaaaaaattcgactgacccgttttgaatttgaaattatgaagctactggtgaagaacaaaggcaaggcgctgagcaaacgtaaaatcatgaaacatctctaccacgactggatgggtaaagaaaacaataccgtcgaggtgcttattggtcgtctgagaaagaaactagcgccctacaacagcgggcaaatcagaaatcaaagagaagagggttattattacgatctaaacggtgcgatctga

SEQ ID NO: 123997 - DNA, 1440 bp, Enterobacter cloacae
atgaacaaatctacgaccaatacgctatcgctttggtctttaacgacgcttgtcgtcggagcgatgatcggagcgggtatattttcattacctgctgcattcggacgagcaaccggtgggcttggtgcaattattgcctgggtgattgccggtggcggtatgctgatgctggcatttgtattccagaaccttgcgcaaagaaagcctgaactcaatgcgggcgtctttagctacgctaaagccggtttcggcgaatatccgggcttcatttcggcacttggtttttgggcgggtacatgtatcggcaacgtatcctattttattttaattaaatcaacattaggcgcttttttccctgcatttggcgaaggtaatacgctgctggcaatcgctgtctcatcagttgttttatggtcttttcatctcctggtattgcggggtattaaagaagcggcctttatcaataccctggccacctgtgccaagatcatccctatttttgtatttatcgccattctgataatggcattcaaaaaagagatgtttatgcttaatttctggggcggggccgccggagagccacctctcttcagatcaatcttttcccaggtcagaagcaccatgttggtgaccgtattcgtattccttggaatcgaaggggcaagtatttactcgcgttatgcaactaaccggaaagacgttggcctggcgaccgtattcggcttcatcggggtgttgtgcttactgatgttagtcaccatgctttcttatggcgttatgccccaggctgaactgggggccttacggcaaccctcaatggccggtgtcctcgaaagcatagtgggacgttggggcatgattttcatcagcgtggggttaattatctctgtactcggagcctatctttcctggtcattgctcgctgcggaggttatttattccgcggcgttgaaaaagagcatgcctgccgtttttgcacgcgagaatcgctggcgggttccctcttcagccgtatggttgacgaatatcgcgatacagctgttcttaattatcacttttttcagcgattacgcattcctgttagcccttgagctaaccagcgcgatgacgcttatcccttatcttctggttgccgcgtatagcctgaagctggttattacacgagaaacctacgaacagtgcacaaagggatattataaagacctggtgatctctgtcattgccactgcctatgcctttttgatgatttatgccggcggattaacgtatgtgctgctgtccgccgttatttatgcgcctggcacactgctttattacattgctaagcgtgagcaaaacaaaaaaatattctctggtacagaacgaatattatttaccgccatcgtgctcgcggctttggcctgtatttatggaattataaacggaaatattaccatttaa

SEQ ID NO: 123998 - DNA, 1263 bp, Enterobacter cloacae
atgcaagatataccactgggtgttcactccgaggtcggccagttacgcaaagtgatggtgtgcgcccctgggttagcacatagccgtcttacgccgggcaattgcgaccgactgttatttgatgatgtcatgtgggtagagcgtgcccgtcaggatcatctcgattttattaacaaaatgcgcggatgcggtgttgacgttgttgagatgcatgatctgctctccgaaacgttggctaaccgtcaggcacgcaactggctcatcgaacagcagattactgctgatgaaatcccgttgggtttgcttaatgaaacacgctcgttcctggattcgttacccgcagatcggctggctgagtttatgatcggcgggctttcaacctatgatttgctgaacagacacaggggcgataaagaagaacttgaactcgtcggaagagcgacagggctgcgtgaatatttgctcccgccgttgccgaatacgctttatacgcgagataccaccagctggatttataacggggttacgcttaatcccctttactggcaggctcgccgtgaagaaacgttactgaccactgctatctataagttccatccggacttcacccgtcagacgatcactacatggtggggagatccaacgcgttatcacggatccgccacccttgaaggcggcgatgttatgcctattggcaacaagaccgttttaatcggtatgagcgaacgaacgtcctatcaggccattgcccagcttgcatctgccctgttttcgaacccgtttagccatgtcgagcgcgttattattgccgcgatgccgaagctcagagcggcgatgcacctggataccgtattcaccttttgtgacagagatttagtgacgctttatcccgccattgttgatcaaatcgaagtcttttcactgattaaggacgactcccctggcggaatgcgtctggagcattattcagagccgttaacagaggtggtagccagggcactcaatttacgctcgctcagggtcgttgaaaccgaaggcaatgtttacgacaccgagcgtcagcaatgggatagcggaaataacgtggtcgccatgtctccaggtgtcgttatcgcctatgaccgcaataccaaaacaaacgaccgtttgcgtaaagaaggcgttgaggtcattgaaattgttgggagtgaattagggcgtggacgcggtggcggccactgtatgacatgtccattaattcgtgatgccgttgattactcataa

SEQ ID NO: 123999 - DNA, 471 bp, Enterobacter cloacae
atgtttacacgttctgttttaattttggccggtttgctggcattggctggctgtactgaaaaacccgttggttctgcccatcatgcaagtgctgcgctttccggtcaggtgatggcactgtcgcacggcacaatcacaggggtgagatacataacaatccaaaacgacaccggaagcagcgctgccggtacagtcgggggcgcgttgattggcggtgctgccggtaatgctattggtggcggaagcggccgtctgctggcgacggctggcggtaccgttgctggcgcgatggcaggacagtcgatacaacgaggaatggcgcgacataatgcggctgaactctttattcgtcctgataacgggcaagagttcgttaccgtgcagcccgcccgtgaaggtgaatttgtcgtagggcaacgtgtaaatattacctcgcatcgcggtcaggtaacgatctctccagctcaataa

SEQ ID NO: 124000 - DNA, 378 bp, Enterobacter cloacae
gtgacgactcatctattacaattctggaatatggcagccaccctgttttctatattcttttttattgcgtatctgtttgttattttccagatcgttactgatttattccgtgacaatacactcaacggcttctttaaatcgctttggataatgctgttacttttcatcccgctgatcacctctgttttttatctcattctgagaggtaagggaatggccaaaagacaacgtgcttacagactggatgcgaatgccgcagcacaatatagtctttgtaaatccccagcggaacaaatatcagacgccaaaaaactattagaccaggacgttattagccaggaggagttcgaactccttaaaaagaaagccataaattaa

SEQ ID NO: 124001 - DNA, 642 bp, Enterobacter cloacae
atgaaaagcactaccccctgtcagccctgtaaggaaaaaatcgactttatcggcggcttttatcatttatttttgttgatttgctctgttttactctggagcgggttacttctttttgccacacgtgcctatggccagactcatgctgatgaaaatgcagcaagctggggcagcaggattgtttccgatattacgcaaacctggacagattatgatagccacgatatttatcttccttttatcagctggcataaccggttcatgtacgataaagaaaagaccgatcgctataatgaaatgccctggggtgccggagtgggtgtttctcgtcatcacagcaatggcaactggagtgcactgtatggaatggtatttaaagactcacataatgagtggcaaccggtcaccggctatgcatgggagaaaggatggcatccaggccaacaaaaagatttcaggttgggattaggggtgaccgccgggataacggcgcgtaaagatatgggcaactacattcccttaccgattatattcccgcttttttcagcgagttataaaaatgtgaatgtccagttcacctatattcctggcacctataataacggaaacgtactcttcgggtggttacgttacaacctgtag

SEQ ID NO: 124002 - DNA, 546 bp, Enterobacter cloacae
atgtttaaaaaaacactcacagtagtggcaattctttcaactctttctgttggtgctaacgccgctgaaattggcgctcagttaggtacacaacatacggagttaaatgcactaattgcgccagagccgaccggtattttttatactgcaaactgggctaacaattataatgatggccgtaattctggcggtgtcggcctgggttatcaggtgtctctgggtaaagccgacctttacgcaggtgccaaggccatctatatggcgcctaagaaaggtgataatggatttgcggcaccgattggtggcggggttcgtgtccattttagcgatgaggtgtatgcctatggggaagggtataccgcgccacgtggcctgaacaatgccgtcgaaaactatgttgaagttgatgctgggttggcctggcaggtacgagatgaggtgaaactcaaagcgggttaccgtcatattagcgttcatggtaaatccggtacgcctaatcatacgctgcttgatggtgcttacctgggcgccgcacttcaattctaa

SEQ ID NO: 124003 - DNA, 258 bp, Enterobacter cloacae
atgttcccggaagaaaatatcagacgtcccagaaaaccaaactttatccgttatctttttctgttcaaccttttattgctgccccttttcatgattgtggcacgcctggtctggggacaggatttcttttctgtttctcccaatggcgctttgttctggccgggtgctgtctcgcacgttttgttgctgggcggggtttggttgtttttagatgttttgtttatgatttggttttaccttaccaacaaaaaaaactga

SEQ ID NO: 124004 - DNA, 294 bp, Enterobacter cloacae
atgctgttatttatttcatggctttttgcattagttggcagtgaattactgctgttacagatcaattcagtaagcattatcatgcctctcttatatttatctatggggataatgtatttatatcaaaagaataaaataaggaatatgttatggctggatgcaaacttaaaaaaaacacgcatcctcaacctcaaggttctgtttgtggcagcgcttagtattatgttatctatcgtcgcacatatcaatttcgccattaactccttgctgatcatgcaatggttaaaagcatag

SEQ ID NO: 124005 - DNA, 1449 bp, Enterobacter cloacae
atgcgcaagaaaagtattagagtgttgaagcgttgtatttttatccttttgggcttcacgctttgtgcaatgacaggcttgttttattgggtacagcgtagcggcgaactccagccctggcatacttttgtccctaatgaattacgcgaacacgagatcgatcgggccgactgggatgactatatcaatgctgaaaacgccctcttcatggaggtgcataacaatgtcgttatgaagcaaaccgatcaggatacaacgagtttaaatcgttataacccgtcaagcccggtatttccggacacccttcccacagactggaatcgatcctacatcatgcgcccacaggcggaaccgagaggggctgtcgtgttactgcacggacttacggactccccttacagcctgcagcatattgcccggctctatcaaaaagaagggtttgtcgccatcgggatccgtctacctgcccatggaaccgtacccggggcattaacggatgtaaaatggcaggactggctggcagcaacgcgtcttgcggtgcgcgaggcaacaaaaatgacccatgcggatgcgccgctgcatattgttggtttttccaatggtggggcgttggccatgaaatatgccatcgatgcccttgatgatgagagcctgaagaagccacaacaaattgtcctgatttctcccatgataggcataagccgctttgctcggttttcgggaatggccgaatggacagcctttctcccggccttttctcgtgcggcctggttaggtctggtaccagaatttaatccttttaaatataactcttttcccgtgaatggtgcgcggcaggcttatcttctgactgagacattgaaacgggatcttacgcggcgcaagtcatcggctggctggaaagaccttcctcatgtgcttacgtttcagtccgttcttgattccacagtcagtacccgggcagtgctggacgtgctccatcataatctaccggataacggtagcgaactggtgttgtttgatattaatcgtgcggtcaattttcgtgcactgtttcgccactcttcggatcgcgcgctatcacacttactggcaacaccacagcgtacttacacgacgactatcgtcaaaaacgcctcttcagagagtatgaacatggtcgcttcgacgcacttagcgcactcaacaacagcagacgtgcagccccttaatgtgcgctatccgagagatgttttttctctatctcatgtcgccctcccgtttcctgtccatgactctttatatggaagtgaaccctatgaaccgaatcactatggtctgagtctgggtgttttacgcgtcagaggggagcgagcggtgttgctggcagatatggactccttaatgcgtatcacctcgaatccgttctacccctatctgattgaaaggattgctggcgtcataagataa

SEQ ID NO: 124006 - DNA, 384 bp, Enterobacter cloacae
atggttatctcagcgctctccctgcgtcgttgtgcgtacgcactgatcgccctggtgcttatcagcgccatgcttctggtctggagcgcgctttcgcatcaggaatctacgctggccattcgcccggttaatcagggtgtcagcgtaccggatgggttttctgtctggcaccatctggatgccaacgggatccgctttaaaagtatcaccccacaaaatgatgtgttactgatcaagtttgactcccgtgcgcagagcgcggccgcgaaagtggttcttgaccgcacgctgccgcagggatacatcattgcccagcaggacgatgacagccggccagcggcctggctgtcgctgattcgcgatacgtcgcatcgatttggataa

SEQ ID NO: 124007 - DNA, 366 bp, Enterobacter cloacae
atggattggtatttaaacgtactgcgcaactacattggatttggtggccgcgcgcgccgcaaagagtactggatgttcattctggtgaacttcatttttgctctggtgctgagcatcgtggataaaattctgggctgggagtgggcgagtggggaaggcgtccttacatcgatttatgccatctttattcttctgccgtcctgggccgtacagttccgccggcttcacgacacggatcgttccgcctggtggttactgctgctgttaatcccggtagtggggtggattgtgattttaatcttcaactgtcagagcgggacgccgggtgaaaaccgctttggtctggatccgaagatcggcgcgtaa

SEQ ID NO: 124008 - DNA, 411 bp, Enterobacter cloacae
atgatgaaaatgacccgtattgctttggttgctgcgtctctggtggcatgcagtttcacggcgcaggccgcaaatgtggaggctgcacctgcaccatcgcaggatccgctggtacagcacctgaagctcagcaatgaccaggttaagaagattgacgatctccacaaacagctggaacaaaatgtcagcatgatcccgatgaccggcgtgaagaacggcgcactgatcgacatgttccaggcgggtaaatgggatgaaagtacggtgaaaaaccagcttgccgctttcagcaaaattgaggagcaaacccgttattaccgcgtgaaatattacttcgacgtcagccaggtattgacgccagaacagcgtaaacagatcagagccgatatggctaacgcgctggcagagtaa

SEQ ID NO: 124009 - DNA, 921 bp, Enterobacter cloacae
atgaacactattattctaccgaaaacacagcacctcgtggtatttcaggaagtcattaaaagtggctccataggttctgcagcaagacaactgggtctgacgcaacccgccgtcagcaaaattatcagtgacatcgaatcttacttcggtgtggaagtgatggtgcgtaaaaacacgggcgtaaaactgacggcggcgggccaggttctgctctcgtactcagagtcgatcacccgtgagatgaaaaacatggtgagcgagattaacagcctcagttttagcaccgtcatggacgtctcgtttggttatccctcgctgattggcttcacgttcctctctgaaatgatcaaaaaattcaaggaagtgttcccgaaagcgcgggtctccatgtatgaagcacagctctcttctttccttcccgccattcgtgacgggcggctggactttgccatcggcacgctgagtgatgaaatgctgctgcaggatctgcatgtcgagccgctgttcgagtctgaatttgtgctggtggccagcaaatcacgaacgtgcaccgccccgacgatactggcatcgctcacccatgagcagtgggtgatgccgcaaaccgacatgggctactacaaagaacttctgaccaccctgcaagacaaccacatcagtagtgaaaacatcgtccagaccgattccgtcgtcaccatttataaccttgtcctcaatgccgactacctgacggtgatcccccgcgacatgattgcgccgttcggttcagaccagtttattgtactgccagtggaagatgaattaccggtggcacgctatgccgccgtgtggtccaaaaattacagaattaaaaaatcagcgtcagtgttagttgagctggcaaaacaatatgcgtcactgaccagtgaacgacgacgatga

SEQ ID NO: 124010 - DNA, 1134 bp, Enterobacter cloacae
atgagtcagctactgcgcgcgcggcgggtactgaccgaacagggctggctggatgaccaccagcttcgtatcgagaacggcgttatcacggcgattgaacctgtccctgcgggggttaacgcccgcgatgccgggcagctttgtccggcgtacatcgatattcacgttcatggtggcatgggtgtggatgtgatggatgacgcccccgatgcgctggacgttttggctcttcataaagcacgtgaaggcgtcggggcatttttgcccacgacggtcaccgcgccgctggaggcgattcacggcgcactcacgcggatcgcccgacgctgtcagtcaggcggccctggcgcgcagattctgggcagctatctggagggcccgtactttacgccgcagaacaaaggggcgcatccgcctgcactgtttcgtgaactggatatcgccgagctggacgcgttgattgcggtatcgcacaacacgctgaaggtggtggcactggcaccggaaaagcccggcgcgctacaggccattcgccaccttaagcagcggggtatctgtgtgatgctgggccacagtggcgccacgtacgagcaaaccctcgccgcctttgacgccggtgcagacgggctggtgcactgctttaacggtatgacggggctgcatcacagagcgccgggtatggtcggtgccgggctgacggacaaacgggcgtggctggagcttattgccgacggtcatcatgttcatccgggcgccatgcgtatatgcagctgctgtgcgaaggaccgcgtggtgctgattaccgatgccatgcaggcggcaggtatgccggacgggcggtatatgctctgtggcgaagaggtcacaatgcaccacggcgtagtgaaaaccgcctctggcgggctggcgggaagcacgctgtcgctggatgccgccgtcaggcatatggtggaacatgcgggtgtgacagcagaagaggctattcatatggcttcgctgcatcctgcccgcctgctgggcattgatcatcagcttggctccttagcgccagggaaacgcgccaatattattgcgctggatgacggtttacaccttcagcagatctggattcagggccaggctctccccctttag

SEQ ID NO: 124011 - DNA, 1890 bp, Enterobacter cloacae
atgaaaaaaatcctcaccctatccatgcttgccctgtgtgtttcccatggcgcgatagcagcgaattacacccttaataacgacaacattgccctgtcatttgatgacgcgaactcgacggtcgtggtgaaggacaccagggctaatcatccgctgacgccgcaggagctgttctttctgacgctgccggacgagactaaaattcacacggcggattttaaggtcaaacatgtcgaaaaacaggacagtggaattgtcgtcgacttcacccatcctgactttaacgtgacggtgaagttgaacctggtgaagggcaaatacgccagcatcgactacaccatcgccgccgtcgggcagccacgggatgtggcgaaaatcaccttcttcccgaccaaaaagcaggctcaggcaccttatgtagatggggcaattaacagctcgccgattatcgcagactcgttctttatcctgccggataaacccatcgttaacacgtacgcctatgaagcgacgaccaacctcaatgtggagctgaaaacccccattcagccggcaaccccggtcagctacaccacctacttcggtaccttcccggagaccagccaactgcgccgtagcgtaaaccagtttatcgatgccgtgcgtccgcgtccgtataaaccttacttacactacaacagctggatggacgtcggcttctttaccccgtactccgagcaggatgtgctggggcggatggacgaatggaacaaggagtttattgccgggcggggtgtcgcgctggatgctttcctgcttgacgatggctgggatgaccttaccgggcgatggctgttcggcccggctttcagcaaaggttttggcaaggtacgggagaaagcagacagcctgcacagctctgttggcctgtggctctcgccatggggcggatacaacaaaccgcgcgatacgcgcgtctcgcatgcaaaagagtacggtttcgaaacggtagacgggaagctggcgctgtcaggcccgaattattttaaaaattttaatgagcagatcgttaagcttatcaaaaacgagcacattacctcgttcaagctcgacgggatgggcaatgccaattcgcatattaagggcagcccgttcgcctcggattttgacgcctctattgcactgctgcataacatgcgcagcgccaatccgaatctgtttatcaacctgacgaccgggaccaatgccagcccatcctggctgttctacgccgattccatctggcgtcagggagacgacatcaacctgtacggccccggcacaccggtgcagcagtggatgacctatcgcgatgcggagacgtatcgctctattgtgcgtaaaggtccgctattcccgctgaactccctgatgtatcacgggatcgtcagcgcggagaatgcgtattacggtctggagaaggtgcaaacggacagcgattttgctgaccaggtctggagctacttcgccaccggcacccagttgcaggagctgtatatcaccccttcaatgctcaacaaggcgaagtgggataccctggcgcaggctgccaaatggtcccgggataacgccagtgtgctggtggatacccactggattggcggagacccaacggcgcttgagatctacggctgggcgtcgtggaataaagacaaagccatttttggattacgaaacccgtcggataaaccgcaaagctattatctggatttgacgaaagatttcgaaatcccgaccggagacgcgacgccgtttagcctgaaagcggtctatggcagtaacgccacgataccggcagagtataaaaacgcggtggtgattaccctcaaaccgctggaaacgctggtgtttgaggcgatgcctgttcactaa

SEQ ID NO: 124012 - DNA, 552 bp, Enterobacter cloacae
atgaacattcaacgtctggctgcgctattgctgcttgctttaccgtgcctttcttatgctgacgattgtcagctaacgctctctcagccggttgtggattatcatcagatgcggcgtgacagcattgtcaccagccagcagagctggaacaaaatgccggaaaaagacataaatgtcagcgtctattgcccggaaaaacagcagatggcgacgctgttacagggggcttctggtcagaaagggcgttttcagtttggtcagaacggtggtgtggcgataaaggtcagcaacctgacgctggatggtaaaagctacaacgtagggaaaacaacggatcaggtgaattttacgccggatactgataatgggtcatcgctctatatccgcaataacgaggctgtcgtggcggttgaaaacggcagggtacccagcggccagcagatgaactttaccgtcaccattttcccggtactcaatgacagcgcgtttaaccatatttcggatcaaaccgcgctggagaccgatttaacctggcaactgcttaaaaaataa

SEQ ID NO: 124013 - DNA, 2421 bp, Enterobacter cloacae
gtgcgtaaaaaaagccaacttgcactttttgtgcgcgctgtgatttatagcgcaatacctctgatgttgcttgatgctccctccctccacgcgagggaggtgacgtttgatactgatatcctgaaatcacgtggtcttggggccgatctaaaccgctattttgcacaagcgccgcgctttttaccggggacgcattccgtttctgtcaaagtgaacggtaacgatcgcggaacagcggccgtacgcttcagtgaagacgggacgatgtgcgttgataacgacttcctggaatttgcaggtctcatgccggtgcccataaaggcgaatgagacctgccatgatctgcgtagcgattacgctcaggcggtgatcaatcccttgccaaaccaggaagcggtcgagctttatctgccagcggaagcacttaacagcctgagcgctgatgtcaaaaatttccagcatggcggcacggcaggcatgcttaactactcgctcttcagcaccaaaaacgaatacagcggaagtgacagcagcagtaaccgttactcacaggcaagcctggaggcgggcttcaacgcgatggactggtcgctacgcagccgctatatcctgacggatgacaacggcaaccgaaacgcagagagtatttatacctacgcagagcatgtgtttgttcctcaacgcctgaccatgcaggtgggggaaattaacgccatgtcagatgtgttaagcggcgtcccgattaccggtgtgcagttaatgccgaccagcggtctgcagaaagacagttcgggggtgagcgtatccggtattgcccgaacctcgcaggcgcgcgttgaagtgcgtcaaaacggaagactcatttttaacacgttagtaccggcgggcccgttcacgctggatgacgtcccgatggtccgtaacaacgtcgatcttgacgtcaccgttgtggagtccgacggttcgaccaaccgctacattgttcccgccgcatccgtaaaagcccgaaatctttcaaaaccaaacggcctgaccgtttcggcgggccaggtgcgtggtatagacagtgactacagcgatccgctggtgttcaacgtatccgatggctggcgaattttcccctggatgaacctgcttgcctccggcgtggtggccgaagattaccaggccgcgggggcgcgcacagaatttatggttaccgatggctggaacgtctctaccagtatggccgccagcaacgcgcaatttggcgacagtaataacggtatcaaaaacgaactccagagcgattactcgttgactgagaatgtcggcctgtctgccagcgtggcgcattacagcggtgattatcgtgaactcgcagatgccatggatgatgattatcagggctatgacaacagttattcggccaacgtacgttggtccacagaattggccggggcatttagcgcgggcctgagctacaaccaagccgcaggagacggcgaagattcccgctacttgcttctgtcgtgggggaaaaccttcaaatacgcttcaatcaacgtgaactggcaaagcgcagtgggcagcacggatgacgaccaggacgacgatctgctctatatcaacctcagcattccattaggcggttcgcagagcctgagttcgtatatgcgtaagcagggcgacagcaccagctatggtctggcgaacagcgggtcgctgggggagaacaccaactactatatttctgccgatcgtgatgacgaatcacaggaaaacagcttcaacggcaacatcaacactaatcttcactacacccagcttagcgtcgggggcggtaccagcggcgatcatcagcgtaactacaatgcgactctgtctggcggcattgcgatgcacaaagacggtgtgaccttctcaccgtattccatcaaggacacgtttgccatcgccagactcagcgaaccgaaagcgggcgttgagatcaccacgccgcagggcaccgtctggaccgaccgctggggccaggctgtcattcccggcctgactgaatggcgtaactcacgtatcgaagtggatgcgaacaagctaccgcagagcatgaccctggcgaacgggaccaaatatattgctgctgcacatggctcggtaagcgaagtgagctttaaagtattgaacagccgccgcgtgatgttacgtattaagcaggccgacgggaagccgctgacgaaaggtctgtcggtggtggatgataaaaataactacgtggtgacggtggttgatgacggacatgtcttcctgaacgatgccgatcagattagcgcgctttatgccgttgatgatgacaataaccgtctgtgcaaacttgattttacgcttcctgaaaagcacgacgaagacgcgttttacgaagaagttaacggagtatgtcgatga

SEQ ID NO: 124014 - DNA, 708 bp, Enterobacter cloacae
atgacatgctctaaaaaggttttatttaaaacactcgctgccgcagctttattctctgcacagtttggcgtacatgcagccggtatggtgccagaaaccagtctgctggtgattgatgaagcgacccacagtggcaccatcaacgtcaaaaataccgatagccatccgtcgctactgtacaccgacgtggtggatctgccggatgataaaggcctgaaacttgtcaccactcagcccgtggtacgtctcgagcccggtcagactcagcaattgcgcttcatcctgcaaaccagcaaaccgctggacgttgagcactacaagcgtgtgaccttcgaagggatcccgccgaagagcgatgacaataaagtgaaaattggcatcaatattcgtcaggacctgcccgtactgattcgccctgcgaagctggccgtggtaaccgatgcgtggaaattcctcgaatggaccgcgtcaggcacgtccgtcacggtaaaaaacccaagcaaatatgttgtgcgtctggcacagaacgtggttctgcagccttcaggcatcagcggatcgcttgtcaaaacctacattttacccggtgaaaccatgacggtttctatgggcaaatccgtcagtggaaacacgaaagtgaagtttttcccggccagccgctatggggtcgaagtgcccagctttatctcggatctcaataaaaaataa

SEQ ID NO: 124015 - DNA, 672 bp, Enterobacter cloacae
gtgaaaaaaattctattggctacagcattattcctttgcgtaaactctacgtttgccgctgaaaccgcgatattgaaaattaaagggacgctgacagcctcggcctgtactcctgaatttagcaatggcggcgtggtggactatggaaatatccgcttaggtgaattgtcctctacggcggtgaaccagttagggcaacggaatatcgatctcaccattacctgcacggcagcaacaaaagtggcctggaatatgatagacgatcgcgccgactctaacgcaggattaaccgtttctgccggtacatttacgggtggggcacagagtgcgactaaccagacctatggcgttggcaaagcaggcacggtaaatattggctcttatgccatgtttatgaaggtgaatagcgttactgcagacggaaaatctgtcgatccaatatatcagcagaatggctcaatgacctgggctaagagtactgatggttcaagtcagggtgaaaataatcgtaatattaccgtcgcattagcgggaagtattgacccgcttgctttccagacagcaacatttccgctggtaacgtctctggctattcagaataccacaacgctttccattaccgatgatacccggctggatggtcagttgacgatcagcctaaagtatctgtaa

SEQ ID NO: 124016 - DNA, 639 bp, Enterobacter cloacae
atggctgtcgctgccaacaaacgttcggtaatgacgctgttttctggtcctactgacatttatagccatcaggttcgtatcgtgctggccgagaagggtgtcagttttgagatcgagcatgtggaaaaggataacccacctcaggatctgatcgatctcaacccgagccaaagtgtaccaacgctggtggatcgcgagctgaccctgtgggaatcccgtatcattatggaatacctggatgagcgtttcccgcatccaccgctgatgcctgtttaccctgtggcgcgtggcgaaagccgcctgtacatgcagcgtatcgagaaagactggtacacgctgatgaacgtgatcgaaaacggttctgcttcagaagcagacgctgcacgtaaacaactgcgtgaagagctgctggcgattgcccctgtgttcggccagaaaccgttcttcctgagcgatgagttcagcctggtggactgctacctggcaccgctgctgtggcgcctgccgacacttggcgttgaattcagcggcccgggcgcaaaagagctgaaaggctatatgacccgcgtctttgaacgcgactccttcctggcatccttaactgaaccggaacgtgaaatgcgtctcggccgaggctaa

SEQ ID NO: 124017 - DNA, 198 bp, Enterobacter cloacae
atgaaagttaaactaacaaaccccatttccaaaaaaataaaaatagcagaaactttgctaatattcctaacaatattcccaatttgcattaaatcaattctgttcttggcatacattgagaccgaaattgatgagcttaacatcgcaatggcaaatgagaaaagaacagccaagaatagatttattgcatcactttga

SEQ ID NO: 124018 - DNA, 990 bp, Enterobacter cloacae
atgaaaatgttaataaataaaattaaagggaaagttgtttctttaatagggcttgagatgaatgtaatttacgattatcttaagttcaaaaaatactacacaaaggcatcgcaggctgctaatgacaaacaaaagctgcagtcttggatccttcaagataaacatagaattgagaaggcttttacacttcctgaacctagacccggttttgggaaggaggttataccaaggttaattgataatttatctgattataaatctttgttctgcgccgattctgtttattatattggggtaggggcattaaaagcttatattaaatttcatcaggaaaatggctttgagttgccttctttcttcgtaaatcacattagcaaaatacctaatgccgattttgagaatgaaggttgtgagcttgcaggatatagccagtctattgtagctgaaaaatcatcaagttattctttggctaattatattcacgaacgaaaaagctgtcgaaattttgatattagcaaatcacttgaaataaataagaatttgctaaaagatattgttgatttatccataacagcaccttcagtttgtaatcgacagcattggagagtacatttttttaatggtgaattgaaaaacaaagtattaaatttccaaaatggtaatgctggttttcaggataatattccttatatagctgtagttacaagtgatttgcgcgcattttattcacatgacgagcgtaatcagccttatacagatggaggaatattttctatgaatttaatgtatgctatgcaacattatggattatcaacttgcccattaaattggtgtaattctgctcgtgttgaacagcgattcaaaaagctaaagttaatacccgaaaatgaggctataatattagttattgctttcggatatccgaattgtaatgcactatatgcaaaatcaccaaggttgccggtagagaccttctatcaaattcattaa

SEQ ID NO: 124019 - DNA, 873 bp, Enterobacter cloacae
atgtataccctgacctggcaacccccttatgactggcaatggatgtttggctttcttggcgcgcgtgcggtggaggggatcgagacggttaccgaacgctactacgagcgcagtttcacctgccagcggcaccaggggatctttcgcgtcaccccggatctgaacacccacacgctcaacgtcacgctcagcccggggttaatcccggttgcgcagacctgtcttgaacgcatcgcaggtctgttcgatcttgcctgcgatccgcagcaaattcagcaggcgctaggcgacctgggcgctgcgcgaccagggttgcgcttaccgggggcgatggatgcctacgagcagggcgtgagagcgatcctggggcaactggtcagcgtggcgatggcggcgaagctggcctcacgggtggtggccctgtgcggcgaaccggtaaaagatgcgccgggctatctgtgctttcccacacctgaggtgctggctgcggtggatccgctggcgctgaaggccctcggcatgccggtcaaacgggcggagtcgttgattcatctggcccgctccgtggtcgacggcacgtttccgctgttcccgcctgcggatattgaggccgggatgaaagccttacagcagcgtccggggatagggcgctggacggcaaactaccttgccctgcgcggctggcaggcgaaagatgtgttcctgccggatgactacctgattaagcaacgctttgccggcatgacgcctgcgcaaattcgccgctacgcccagcgctggcagccgtggcgctcttacgcccttttgcacatctggtataccgacggctggacgccatcagttgatggcgaaatagctggtgttcagcagtag

SEQ ID NO: 124020 - DNA, 1488 bp, Enterobacter cloacae
atgaacacgaaaaaggtctttctgctcagttacgacatttatcttttctcaggaataaggtcatttctgcctaatctggtactcgttgattctggaacgtttgtttctgattcagacattttaatgccacagtacaacagctgtttgttaatcattgataacagagtgccattttgtataatacaaaaatggctgcaaagaaatagcagccagtttatctatgttaacagtattgttctcacgatgagtgacagtaaatgtatcaatcgaggctgtgaaaatagtgagtctgttaacgctaaagtaagctgtaatagccttatttctgttctaaaaactaaattgatgtcaaatgtgcaggggggcgctccgtcaacattgggctgcgttgatagatttcatttaagtgattttgaacaagagatgatttacgcctctttcactaaaatggggctggaagaattttgcaaggcaaattctttaacgccaaaatcgctctatcgttatcgagataaaataactcatcgcctgagttttgataactttaatgagactataatttatctttccagaaatggttttttggcagaacgatggggggcacatgacaacaagaaaagccaaacaatgacagagggtatatttgatagcaacgaagctaatagattaactctggctttgaaaaatgatgagattgtgccttattttcaacccatcgtcggaattaaaggagagctgtgtggcgttgaggtgctggcgcggtggccttcaggccacaactatgccatttctcaacgtgagttcatcccgctggcggaaattagtggtcaaataaacgatctgacaagttatctgatgaataaggtcgcgagtcatttaaatcacgatattacctggcagggacagtctttttttgtggcgtttaacgtgagcccctcaaatttgagtaaccctgttttttattgggaatgcctcaattttttggaattaacggaatcactgccaataaaattgatgattgagattactgaaaaccagacactggtagtcacgcctgcaataaaagagttaatccgttcgttacgtaaccggggtgtcctctttgctctggatgattttggaacgggatacgccaatctgtgttgtctgaatgaactcgagctggacgtgattaagattgataagatctttatcaaagggatccatgcagaagatcagacgctgccgatgctggaatcgatcattaatctggctggcattctggggttacgtactgttgcagagggcgtggagtatgcctgtcaacgcgaatggcttatcgcccataaggttgatttcctgcaggggtattatttcatgccacctatggcactggctgaatttcatcgctatatgcagcagtatggctccgcagcaatagggtctgcatggaggagaaaaagactaaattcagacccaatgcaagtggagcgttgtcgctcactatag

SEQ ID NO: 124021 - DNA, 474 bp, Enterobacter cloacae
atgaatgcgaaaattatctttattagtatgttcgctgcggtcatggtgatatttctttttttgcttaattgccctcgtattccatcggcttttgtgtgtacggctaaaagccatgtttttctccatactcaaaaagagggggtgagcattgaaggtgaggttttgttagttttgaggatttcctctgcagaggaaggtgctttctcacaagttggggtgctggatgttaacggtaaacattatgctattaatcgctccactaccttgagcttccttagagaagacagtgatggttatttgcgtacgcaacgcattgcggtggtaaaaaatgataacgatgacttgcctgatgaaataaccaacctgctcatgtctaagcaacaactcttttattacaagatcatacatatcaccgataacgtttatggggtcagggatctacggcgcacgctgatggtctgtcgagcaaagtaa

SEQ ID NO: 124022 - DNA, 738 bp, Enterobacter cloacae
atgaaaaaaataattaacggtcaggttttatacgattcagagcagagggtattaagtgtgcaaggtgaaaggattatcctctctgcaccaacctcaaggttactggaactttttattgataataactataagcaagtaaaccgggaactgatcatcgaagaggtctggggaaaacatggcatgataccctcagggcatagcctaaataaaagcgtgagcatattgcgcaaagctttttcatcgttaggcttgaacaatataatcgtcacgatcccgcgcgaagggttcctttttcaggcccgggtcagcagcgtgaatgatgatatcaagagtaaaagaataacgaccacccagttagatattgttgataaggctttgcagtatagacggtggccgcagcttatcctatggtgtgttttcacttttactgtctgtgcagttatggttttttttctcatattaatgtttcgcaataacgatggggttgtacatatattgaaatccggctcgtgtgatttttacaccacagatgataattcatcagtgaagttatcccgatttttgaattcaccaaattggcaaaaacacagttccatttgtgaaggaagagataaagtcatcatattttatgatgacaataacttatcggcaggtaataaactgaaagaatatttctttagcgtgtgtaaaatggagcaaaaaggaacggtgcatgaatgcgaaaattatctttattag

SEQ ID NO: 124023 - DNA, 696 bp, Enterobacter cloacae
atgaccggatggcgtgtggctatgatcgttactggtttggctctcctggcgttatttagcctgcccgcacgcgccttgtatcttgattcaaccatttttgacatggcggcggataaatcctttatcagcaaacgtgtttttaatgacagccacaagcagaatatttacagcatttcggcggtgaaaattgataagcccgggcctggcggggagcgtcgccaggctatcgaagagggcgaattactgtttgcaccgcttaatttctcgcttgcaccggatgcaggagagtttttcaagattttctatcgtggtccgcaggatgacaaggagcgctactaccgtgtgcagtttactgaaatgcccatcacccttttcccggagcgcaacaggggtaaaaagagcgaagcgataccagctatcgcactggaaaccattctggtggttcggccacgaaaaatgaatttgcattatatgctggatgagcagaaaggggttcttgaaaatacaggaaataccttttttaaaatcattgttcaaaaggggtgcaattcgaccgatgatgaagcgaccattcgctatattctaccgggagaaacgtaccgaagccccgaactgaaagcacaaaataaaaaatttatagtggctttgcaaaagtatatccctgttggtagtggatgttttacacatgcctcataa

SEQ ID NO: 124024 - DNA, 1617 bp, Enterobacter cloacae
atgaaaaaaagtgcaaatattattattcctttactcattgtcggtgccttaacaccctttacagcgaaagcgttgtcggcgacatcctccggatctgtcagtaataattttatgtttatcgaaaatgccattgatggtgagtattttattactccttcctcgcttgatccacgtttcagcgggtcgaatacctgggtgaaatatggaacttcccaggtaagtctaggctatttaggctacgtaggttggctggcaccggcgaataactatcaggatatgtggattgataattccccaatcgatggaccgtttagcggtattcgttgctacagtggaacgcagtgcccaacgacagggtatattacgggtcagggaacggacagcaacggtttctaccatgctcaggtcgggtctgtcgccggtgtggtcggcggggcatatgggtttgcctccctgagtgactctgcctacgaatatttccgcaatatggccaccggaagtagcgaaacatatgttttcaatcgctgttatacctcggtcaattatgattacgcggcaggcgagcgctgcaaagatcagtcctcaggacgctggaactacgtaaactacacgttaaccaaacgcggccatctggcactggaatcgaccagcgccttccaggaactgtggatcgccagcgacggcacgccgagtattaccaatgattcaggtgcctgtgagttgggcgtcgtcagtaacgtgagcggtgttatctgcaaaatggtcagctataatcttcagcagacagctaacctgacggcatcattgacgttcagggcgtatgtggattcaacagcgcttggatttacccctgcagcggccaccgtgcggtattccggtaatggctccacatggtataacttcagtgcatcgacggcgtattacaacgtgttcaccaccagcggtgaatatgtgtacctctttttgtcgcagacatttctcaaaaatctggtcaatgcgggcgtcagtattacgaatagccagccgtttacctttgcgtttactaatgctctaacacctgagtcaggttattaccagttcacgccttcgttacagcttaatatcgtacctaaggagtatgggataagtattatttcatctaataatacaacgtctgctagcggtagcggcactattggcgaggatacgccaataagaatggattataccgttactgtttcaggccctcgccaggctgacagcgttaccgcgcaagttattggcgatagcacaacgttaaatgacacgccgtactgcctgtttacgtccgcacaaggtggagtaagtgtgccgataccggcctatcttgagtataacaaccagtcaggtagtgtgactcaggcaagaaatagctgtggtgaagcggccataagcctgaatgatgctctgtggcaacaaacgcccagggacgccaacaacactgatgacgggagttacttcaatacccgtttatcactgctctttccgatggacgattctcgctctgctttaacggtatcaggttctgactgggaaggcgttgtcagcgccagtggggagataaaagtcatggcgaactgggtaggggtgacaaaatga

SEQ ID NO: 124025 - DNA, 2493 bp, Enterobacter cloacae
atgtcatttaaatattttattggagggagtgtatttctctctttagcgttaacaccaggggcagttcattccgcccccgttaaaattggtcattatgtcattcctggtacttttgcgcgctctctggagcaagggatgacagttccggtgtttattcggtatcaagagacggacgaaaaaagccagcaaaaaattgctgatgcggtgatctcattggttgacgggaatattacagtcaaatcgataatggtttctgacttgccaaacaatgctgtgctggcggataaaacgcgcgagatggtagaaaaaataggcaatgtgaaatttaaagacaacaccgctattgcccttacgcctgaagcacgtcttcaactgaacatttcatcgttccacctggagatgatcgtcagcagggacgcgttgaccgaggctgttgtggcgcgcagctccttgttaggtccgtcaagcgttgaccggttaactaacgtgctcaattacagttttggtacctattacaatgattatcaaaacggcaacagttcacgcagctatttaacgctggataatacaacgtcacttcgtgagcaccattttaatattaatggttcggtatatggtattggtgaaagtaatggttccagcaacgtttatcgggcgatgtacgagcgcgattacgaaggttatcgcctggcattaggaatgcttgatacgtggaatgtccagtctattgccagtcttaacgccttaaacggcggaaaaatctacggtgcaagctacggaaataaaggcagcaccgttgtcgaaaatacctccctttcgctgaccccgattacggtctttttaccggcagcaggggaggtgcatgtatttcgtgacggacgcctgctgagcgttcagaactttaacatgggcagctacgaaattgacaccagccgtttcccttacggggtgtacgacgttacggtggatattgtcgtcaatgggcgcacggtcaatacccgcatgagtcgcgtaaataaaatcttctcacgccagcaggcggcggggctgcatgagatctcatggcaggtctttggcggttcgcttgattacgatcgcgtcagttataagcgcaatcattaccgtgacttaggcagtgaacagagctggattggagggggcgcggcttctctgacgctggcggtgctttccggcctgaatatgaagtcaacgctttacggttttgattccaatgcggttaacgaaactgatatcacgttaaatgtgaacgaatacgtgagtgtgggtgcgcaaacgatgctggcaaatgatggaacctggcgaaatgtcagcaatgtgaatgtcagcgcacccggtggatttggctcagtgtgggcctctcgggaagacagcaaaattggtgaccgtttgccggtgcaagaacgcgataactactccattggcggcacgatcaacctgggaagcgttattccacacggaggatcgctaacgctaagccagacggaaaaccgctattcaggcaataagtatcgcaacatagattacagcacaacactttatgccggacggtatgccactgtcggtctgcgggcgggtgtacagcgctacttctataacaacacgaatgatgacggtcgtcaggagcgttatgtcagcctggacttctcgttaccactggcctcctggttaagtgtgggcgcatcgcgcgatcgttacggtgcgacacagggcaatatcagcgctcgtaaacagtttaaagatggcccaatcacctcagcaggcgtttctgcctcgacgcgcctgagcggagagcagaattacggcaacgattattccgttaatggcaatgtcagttacagcacccaatataacgccgggacggtctctgtcactcgttcagcagataactcgactaacatgaacttctcttctctcggggcaatagcctgggctggcggtgatgttggtctgagtaatgagcgacaacgctcggggatcattgttaaaacgggtctggcaggcgatggaaaactggcagcaaaagtcaataaccgcaattacctgttgagcggtaaatcgacctttattgcgctccctccgtatgcgcaatacaaactggaaattatgaacgaccggaactccgaagacagcttcgatattgtttccggacgcaaacacgcgatgaacttgtatccagggaatgtgagcgttgttgcaccggaagtgaaaagtatggtgaccgtatttggtcgcgtccgctatcccgatgggcaactggcggcgaacacagatatccataatcacataggcaaaactcggactgacgggaaaggtgagttcgcgatcgatatcgataaaaagtatcccatcattaccctggtatcagctaatggaagtatctgtgaagccgatttggatctggataaagccaggggggccgcgtgggtgggtgatgttaaatgtgcactgcaatcgacaatggcgaagaggtaa

SEQ ID NO: 124026 - DNA, 675 bp, Enterobacter cloacae
atgaataaatatttaccctttgccatattggcggggatcgctacgtctttttccagttgggcaattaatgtgggtgatatcacgtcgataatgacttccgagcagagttcattatcgaaagaaattatcaacacgacgaattccgcacgctatgtcagcgttacggtgaaacgactctcatcaccgttgcctgatggcaccgaaataagcattaatccaggcgaattactgtctacacccgccagccttattcttccaggcgacgcgaaagatgttttccgctttttctataaagggccagaggatgataaagaacgctattatcgcctgcaatggattgatgaacctgtgagcgaaagcgcagcaacgaaagcgggcaaagccgcgacggcaacggcttcagcggaaattgggactattttagttgtagctccgcgtaatgagcgcttcaactacagtcgtcaggacgatttaatcatcaacacaggcaatgtctctttccgcgtgattgcctatggcgtgtgtaaggatcccactcaggaccaggggcggggatgccgggaacgctattacgttatgcctggaaccaaaataaggcttcaaaaaagcgatgtatcaaacagccgcactcgtattggcatttggcatggcaagcaatttattacagtgaagtaa

SEQ ID NO: 124027 - DNA, 201 bp, Enterobacter cloacae
atggaagactgtcgggaattgtctgaatggcggagagggcaatgtgacaccatgtgcacgggcataagatgctatctcatcgctttgagtgaaagcggcgaagaacagcaacacgttgtgataaatgcgcgaaataaaccgtatcattcgaataccaggatttttatattattcgcggaatattcttatttttataaataa

SEQ ID NO: 124028 - DNA, 243 bp, Enterobacter cloacae
atgtacacctataagatggttcagataccaccaaacatttctatcaaggcaaagaataataaagatggcattgcagcagcgtatttagagcaagaagtgaattcctgggctgccgaagggtgggaattccagcgcgttgatacaatcggtatagaagagcggccagggtgctttggcggaaataaatcaacattgacccactattatgtcattactttcagaaaagaagtgacagatgcttaa

SEQ ID NO: 124029 - DNA, 954 bp, Enterobacter cloacae
atgagtacgttagcccaacgtcttgaaacattacaggccacacgcccggtcacggtgctgggcgcggcggtcatcgatgtgatcgccgacgcgtacgccctgccctggcgcggatgcgatatcgagctgaaacaacaaggggtgaatatcggcggctgtgcgctgaatattgccatcgccctgaagcggctcggcattgcggcgcaaaacgccctgcccgtcggccacggcgtatgggcggagatcatccgtaacgccatggccaggcaggatctgcacagcgccgtggaggccgaagcgggcgataatggctggtgtctggcgctggtagagcctgacggcgaacgcacctttatgtcgtttagcggcgtggagaaccagtggcagccgcactggctggatgggctgaacgtcccgccgggtagcctggtgtatctgtccggctatcagctggcatcgccatcgggcgaactgctcacacgctggctggagtcgctggaaaacgtcaccgcgtttatcgattttggcccccgcattgctgatattcccgacgcgctgatggcgcggatcatggccctgaaacctatcgtgtcgctcaatcgtcaggaggcgcagattgccgctgagcgcgctggcatggacgttgataccttaggcgtgcagtggcagcaccgttatggcgccgcgctaattattcgtcacgacaaagatggcgcagcctggtatgaaggcgacgcatcgggttatgttcctgcgtttcccgccaccgtcgtcgataccattggcgcaggcgacagccatgcgggcggtacgcttgccggtctggcggcaggatggagtctggcggatgccgtgacgctggggaatgccgtggcggcctgggtggtcagccaccgcggcggggattgcgcgccgacgcgcgaggccttactcctcgcacacaaagacgtatag

SEQ ID NO: 124030 - DNA, 828 bp, Enterobacter cloacae
atgaaatgtattaaaaccgccgtatctgtttttattttaacttctgttcctggcacagcagttcttgcctctacctcgccggttacatccagttggggggacgcatatatttccgcaaagaatgagcaatttactgccacacctgttattaccctgccgacgcaacaaacaccggttgcaccacagccagtattattagcccctcacctggacgggcagcatattgagcctggtcaggcgcccacgcctgttctgccgccgcagaaaactcccgtgaaacaaattgcggttgacccaatacaaacctctgttgatggttctgcaacggcgttgaaaaccgcgcaggcaacacatttagacggtcaacacaaccaggtcattaatggtcgtgatggccgtccgggcaaagacggcgtgacgacgattatcacccgtaatgtcactgatacagccgccgttaaacagatcaatacgctgactacgcaaacagccgggcaagcacaggagctcaacgcggcccgacaaatgcttattcagcagcaaaaaagttctaacgcacagtttaaaagccttaaagacgacgtggacgataataaaaaagagtcccgtagtggaatcgccggtgccgttgctatcgcttcaatgccgcaagtcgagcgggatcaaacgtttatggtgagtgcgggtgccgggacttttcatgacgaaagcgccgttgcggtaggcgcgtccttccatgcgggtgaacatgccattgtgaaagcgggtgtcaccaccacaacgaataacgattatgctgtaggggcgggtatagggcttggctggtaa

SEQ ID NO: 124031 - DNA, 495 bp, Enterobacter cloacae
atgaaaaaaacgatatttactgtagtcatactcggcatagcgtattttctcggcggatgtgcaacaaaggcgtcaaggatgcaggagtgtcttaatgaaggcatttctaaagacacctgttatctcgcagaatcacaacgccaggcagcgatcagcaacgcgtcgatgaatgcggcttttgcgaatgcggctcatgcgctgcaacatgcacaaatgacacataagcacagaaaagagcttgctcattcaggatgtacgcaggttgaggaagctaacggcgaatgcactgcaaattcagataaaagtcaatcgcgtgatttaaaacagctctcccgcgaggccgaagcggtaatgaacggtaccatcgatgacggtgcggcattcctgctggggcaaggatggaaaccaaacaacggtaaatggcataaacagggatataccttaacgctggtggttgaaaagggaattgttgtgaacagccagctgtcaaaatga

SEQ ID NO: 124032 - DNA, 1434 bp, Enterobacter cloacae
atgacgtattcaattactaaagcagagcaggaacttcagtccagacgcgaagggctcaacctgcgctggtatccgcgttaccacctcgctgcgcgcgctggctggatgaacgacccaaatggcctggtctggtttgacggctggtatcacgctttttaccagcatcatccgtactccacccagtggggccctatgcactggggccatgcgcgcagcaaggatttagttcactgggaacatctccccgttgcgctggcgccggaagggcctgaagacaaggatggctgtttttccggatcggcggtggtggatggcgatacgctggcgctgatttacaccggacataaattccacggcgatcctgatgatgaggcgaatctctaccaggtgcaatgtctggcgaccagccgtgacggcattcattttgtccggcagggaatgatcgttgataccccgccaggtctgcatcacttccgcgacccgaaagtgtggcgtgaaggggagagctggtacatggttgtcggtgcacgggacggtgagacgggtcaggtgcgtgtatatcgttctgccgatctgcgccagtggcaggatatgggcgtgctggcggtggctgaaaaagagatgggctacatgtgggaatgcccggactttttcatgctcaatggcaaacgcgtgctgatgttttcgcctcaggggatggccgctgaaggattcaaaaaccgtaatcttttccagagcggctatctgttgggcgagtggcagcccgggcagccttttgtgcgggaaggtgagtttgtggagatggatcgcgggcatgatttctatgcgccacaaagtttcctctcgcctgatggtcgccgcatcgttatcggctggctggacatgtgggaatcctcccagccggaacaggaggacggctgggcaggcatgctctctttaccgcgcgaactgacgctcagtgcggataaccgtctgcaaatgcgaccggccagagagagcgaaggcctgcggggagcgtggttcccctggccggttagcacgcttaacaatcagcagatgactctgctggaacgctgcgacgcgatggaggttattctccagtgggattgtgccaatagcagtgccgagcagtacggcatgagtctgggagaggggctgcgcgtctacgtggatgctcaaatgcagcgtctggttcttgagcgaaactatccgcagtatggcctgtgcgggacacgaagcgtcgcgctgaacctggataatacgcttaatctgcgtctgttcttcgacagttcttccgtggaagtttttgtcaatgagggcgacgcgtgtttaagcagccgaatttatcctgaggcagggcgaagggaaataaatttattcgcctggggtggctcagcgttattattcgaagccggagcatggcagctggagtga

SEQ ID NO: 124033 - DNA, 1242 bp, Enterobacter cloacae
atgatgaaaacgcatcactctcacagctatcccttattgagcgcattactgtttttcttttttgtcacctggtcttcttccggctctttgctttccatctggctccaccaggaggtgggcttaaaagcgggcgacaccggcattatctatgccgtgctttctgtctccgcgcttttcgctcaaatctgctatggattcattcaggacaaacttggtctgcgcaagaacctgctctggtttctgaccagcctgctcattctttctggtccggcctttttgctgtttggttatctgctgcagattaacgttttactcggcagtattttcggcgggatttatatcggcctgacgtttaacggtgggataggggtattggagtcctataccgagcgtgtcgcccgccagagccagtttgagttcggcaaggcgaggatgtggggatcgcttggctgggcggtggcaacctttttcgcgggacttctgtttaacattaatccgaagctgaacttcgctgtcgcaagctctgcaggactgctgttttttgttttgctggcgcgtctcagggtctcttccgccccgcacgccatgcaggaagcggtgtcaggcggtaaagtcacgctggaagatgcattgcgtctgctgacgctgccgcggttctgggcgctggtattttttgttatcggcacctgtatttatggcgtttacgaccagcagttcccggtctatttctcctcccagttcccgacgttacaggaaggaaacgccatgtatggctatctcaactccttccaggttttccttgaggcggcgggcatgttctgcgcgccatggctggtgaatcgccttggcgcaaagaatggcctgatttttgcgggaatggtgatggcgatgcgtatggtggcttcggggctggttgaggggccggtactgatctccattaccaagctattgcacgcggtcgaactgcccgttttgctggtctcaatttttaaatacaacagcttacattttgataaacggctctcttccaccctctatctggtgggctttgcctgtaccagttcagtgatcgcctcggtcctgtcgccactggcgggttacagctatgagaaatacggcttcgcccagtcctatctcattatggggctgttagttttcagcaccacgtttatctccatcttcctgttgcgctcgggtaaatcctcttcagacccgctcatgccgcaaccttccaccatctga

SEQ ID NO: 124034 - DNA, 1005 bp, Enterobacter cloacae
atggcttccctgaaggacgtcgcaaagctggctaacgtatcgctgatgaccgtctcacgcgcgcttaacaacccggagcgccttaaaccggaaacgttggcacgcgtacagcaggctattgagcagaccagctacgtacccgatctttccgccaagaaagtacgcggcgcgcatgcctcgccaaaaaccataggcgtgctggcactcgatacggtgacgacacctttctcggtggagattacgctgtccattgaagagacggcccggatgcacggctggaacagtttcgtcatgaatatgtttaccgatgacaacccggaggcaatcgtcgatctgctgctctctcaccgcccggacggcattatttacaccaccatgggattacgtcaggttcctctcccggccaagctccttacccttccctgcgtgctggccaactgcgaaagtatcgatgaagaggtcgccagctatattcctgatgatgaacaggggcagtacgccgccgtacaggcgttactcgccgcaggctatcgacagcccctgtgcctgcatttacccgcagatcatctggccacaacccgacgccgtcacgggctggaacgtgcatgccgtgaagcggggctcgacccggaccgtctggatcatagttatatggcgtttggggacgagcactatcgcgacattccgtcagttctgcaggcgcacattcagaatggtcttccccagttcgactcggttatctgcggcaacgatcgtatcgcattgatggtttaccagaccctgctggcgcaagggattcgcatccctgaagatatcgcggtgatcggctatgacaatatggtgggcattggagaactctttcttccgcctctttcaacggttcaactgccgcattatgaaattggtcgcctcagtgccctgcatattattaacggtgaaacccatcgggaaaccacgcgcgttgaaagtccatttttaatgcggaattccattacgcatctatga

SEQ ID NO: 124035 - DNA, 516 bp, Enterobacter cloacae
atggaaaaccgcaaattcagccaactgcgccgctgggcgcgggaagggatcatactcgtactgctggcgctggccgtgatgtggggtgtggatcagtaccgcaagccgacattacccgccacgtttagcgctactccaatgcagagcattgatggctcagtacatgacattgccgcactcagtcaggaccggccgctgctgatttacgtctgggcgacctggtgcagcatctgccgttataccacgcctgcggtcaataggctggcagaagagggcgggaacgtggtgagtattgccatgcgctctggtgatgacgctaagcttgcgcgctgggtcgaaaagaagcagctgaaaatgccggtgattaatgacgaaaacggtgcgctgtcacagcaatggcaggttagcgtaacgccgacgctggtgctggtctctaaaggcaatgtcgtcagtgcaacaacgggctggacaagctactggggattgaaagtcaggatgtggtgggcagggttataa

SEQ ID NO: 124036 - DNA, 2199 bp, Enterobacter cloacae
atgtcgtcttacacaacagacagttacggtgcggcagcaccggagaatcatgaaatcgatctcattagcctgctcggcgaggtgatcgatcaccgtgcagtcattttatcgataactttcctgttcaccctgctggcggggctgtatgcctttctggccacgcccgtttatcgcgctgatgccttaatccaggtagaaggaaagcaggataacagcctgctcaaaaatttaaggcagtttgggagtgagatgtctcccgatgtcgaacctgaaattcttctgcttaaatcgcggatgatcctgggcgcaaccgtcgatgaattaggcctaacacagcacgtgacgcagcgtacgttcccggtagtgggacgtctgtgggcacggttgcagggccgtaaaccggcgacggttgcccttggctggctgcaacttccccctgtcgaaggcaaacctcgcacccttgtgctcactgtgctggaaaaaggagcataccggctggagggggataacttttatgccgagggcagggaagggaaaccgctggaaaaagccggcgtttcactgttggtggtgaaaatgaatgcgccaacgggcacgcaattcacggtgcaaaacagcacccgtctggaagctatcaatacgctcagcacccaatttagcgtcgttgaatcggcaaagcagagtggggtgctgacgctcacgctgaccggcaaagatcctgagcgcattgcgcatgtgcttgaccggattgccaacaactatctgcagcaaaacattgcgcgccaggaagcacaggatgcccgcagtcttgcatttttgcagaagcaattgcctaaaatcagaagcgaactggatctggctgaagagcggctgaatcagtatcgcaaacagcgtgactcggtggatctctccctggaagcgaaatcggttctcgagcagattgtgaatatcgaaaaccagctcaacgagttgacgtttcgtgaggcggagatttctcagctgttcaagaaagagcacccgaactaccgcgccttgcgtgaaaagcgtcagacgcttgagcaggagaaggtccgccttaatcagcgtgtcgccgccatgccatcgactcagcaggatattttgcgccttagccgggatgtggagtcaggccgcaccatctatttgcagctcctcacccgtcagcaggagctgaacatttcgcgctccagcgccattggtaacgtgcgaattatcgacagtgcggtgacgcaacccgaccccatcaaaccgcgaaagctggtggtcatcgtcttaggcatcctgttggggctgatatgctcaatggggctggtcatggtccgcatggcgctcagacgcggcatcaacacctccgagcaactggaagggcttggcgtacaggtgatggccaccttgccccgttccctgtggctgtggaaaaaaaccaacctgcgtaaaaaacgtgtttttggctcacgctggagacacaagattgtcgatgtccctttcctgccagttgatcggcctgcggatgtttttgtcgaggccgtgcgggggcttcgcaccagcctgcatttcaccttgcaggatgccgctaaccggatcgtgatgatttctggcccaacgcaggactgcggtaaaacccttgtcagcacctcgctggccgcgattgaggcgcaggccgggctcagggtgttattcattgatgcggatatgcgcgaaggctatgtacacaacatcttcgatctgaaaaaccataccgggctttccgacgtgcttgacggaaaatatcatttccaggcggcgattcagcgctatgagaaaggcaacattgatgtactgacctgcgggccggttccgttacgcccctctgaactgctgatgagcgaacgcttcagggcgttaatgacctgggcagatgagcattatgatcttgtgatcctcgataccccgccggtgctggccgtaacggacgcctcagtggctgctccggtggccgccacctcgctgctggtggcccgctatggtaaaaccagcctcaaagagatggagaacagcattaagcgtttgcagcaaacgggggcgcatatcaacggcaccgtgctgaacgatgtggtgaaatcagcagcgctgtattaccgtgcaggctatggccattacgagtatggccaacgcccgacacggcaaccacgcaaggattag

SEQ ID NO: 124037 - DNA, 450 bp, Enterobacter cloacae
atgtttgattccatcttagtggtctgcaccggcaatatttgtcgctcgccgattggcgagcggctgttgcgtcagctgctaccgggaaaacggataacctcggcaggtatctatgggctggagggcagcccggcggatgtcagcgctcaggacgtggccaggcgacatgggatctcacttgagggacatcgcgcgcgcaaactgaccccgcagatcatgcgggaatcggatctgattctggtgatggaacctgcccatcttcgctttatctctgacatggccccggaaattcgcggcaaatcgctgctttttgggcaatggctggggccgcaggacatccccgatccctattgtaaaagtcgtgaagcgttcgattatgttttcggtctgctgggcaaagccagtcaggaatgggctcatcgtttgagtcaacaaggaatgaagcgttaa

SEQ ID NO: 124038 - DNA, 486 bp, Enterobacter cloacae
atgccgacggtaagatctataaagcctataacggagatatcttctatcatcgctgataccgtccatattcggccgtggcaggagagcgatcgtcctttcctgcgcaccctttacctgcatgcccgccgcgaggcgtggccgtggctgaacggtgcagaatggcaactcgaagattttgacgaggcaacccgagacgaagtgatttgggttgccgtacagaacggccatcgtgtgggctttgcgtcagtctggacgaatgataactttctgcacaatctgttcgttgatccgcagtatcagagcctgggcgtaggccgtttgctgctggaacaggtacaaaaaacgtttaccagtacgggggcgttaaagtgcctggtgagaaacgaacgggctatcgcgttttatcagcgtcatggctggcacatcgaggcaacgggggattctccggagggagagtactatctgatgcattaccgattgcgttaa

SEQ ID NO: 124039 - DNA, 555 bp, Enterobacter cloacae
atgtcggctgttgatattttatccgtaaccgaagtggaagtgcgcgatgcccttcccgacgatgtgcatgccatttcggctatttatgcatggcatgtacttcacggacgtgcgtcgtttgaggaaatcccccccaccgtagatgaaatgcgtaagcggttgaaaaacgtgaccgataacggtttgccctggctggtggcgctgtatcgcggcattgtggtgggctattgctacgccacgccataccgtccacgacacgcgtatcgcttcacgctggaagagtcaatctacgtggatgccagcaccaccggacgcggttttggcagtgcactaatggacgcgctgattgaacgctgcgaacaaggtccctggcgtcagatgattgcggttgtgggagatggccataataacgccgggtcattgcggctgcataaaaagcacggttttgaagtggtcggtcagctgcgcagcgtgggctacaaaaaaggcgactggcgggatacggtgattatgcagcgcccgcttaacgacggagactggaccctgccggaatag

SEQ ID NO: 124040 - DNA, 1419 bp, Enterobacter cloacae
atgaaacgttttcttattttatctctgagtgctccctttgccgttattctggccggctgtgcgccgcaacatgccacggtaactccccttaatacccagtcactcacggcgtcggttaatacggtgctgcctcatcagaactggccggaaaatgcatggtggaaagcgtataacgatccgcagcttgataagctaattgccaaagcattaagcgatgcgcccgatatgcagattgcccgtcagcgtattacccttgccgaagcccaggccaaagcagccctggcggccgacggcccgcaaattgatttttcggccgatgctgaacgtcagaaaatgtccgctgaagggctgatggggccctttgccataaccgacccggctgcgggcaccaccggcccctggtataccaacggtacctttggcttgaccgcgggctgggatctggatttgtggggcaaaaatcgcgcccggttggaggccaggataggcaaagtgaatgcgcaaaaagcggagcttgagcagacccgtcaactgcttgccagcagcgtggcgcggctctactgggactggcaaactcaggccgccgtggaggaggtcctcacgcagatcaaatcccaacaggacaatatcatcggtgccgatcgcgagctgtatcagcacgggatcacctcctctgtggaaggtgtcgaaaccgacatcagtgccagcaaaaccgaagagcagatcgcagaggttcacggcaaaatgaaagccatcgaggcgcgtctgaacgcgttgactaatacccccgcgctggcgctcacacggcatgccctaccgacggttgaagcgtcgttaccgtcgacgctgggatatgaactgctggcccgacgaccggatctgcaggcggcgcactggtatatcgaagcgtcaatgagcgaggtcgaagccgccagagcggcgttttatcctgatgtgaatctgatggcgtttttacaacaggatgccctgcacctgagcgatctgttccgttcttcagctcagcaaatgggtgtgaccgccgggctgactctgcccatttttgacagcggcaggctgaacgcgcagctggatattgcccaggcacagaacaatctgtcggtggcgaactacaacaaggcggtggtggatgctgtgaaccaggtggcgcgcacggccagcgaagtggaaatgctgacggcgaaaaatcagcatcagcagcaggtagaaaaagatgcggcgcgcgtggtggcgctggcgcaggcacgttttagcgccggaattattgccggttcgcgcgtcagtgaagccagaattccagcgctgaaggaacatctcgccggattgatgctgcagggcgagtatatcgacgccacgctacagctcacctccgcgctgggtggtggttatcatcatggctaa

SEQ ID NO: 124041 - DNA, 1971 bp, Enterobacter cloacae
atgtttaggttgaatcccttcgtcaggggaggactctgtgcgtccgcaatgtccctggcactgcctgtcatcgctgcggaatccagcgacacactggttgtcacggcgtcagcgactgagcaaaacctgaaggacgcaccggcgagcatcagcgtcatcacccaggaagacctgcagcgtaaacccgttcagaacctgaaagatgtgttgcaggacgtaccgggcgtgcagctcactaatgaaggggacaaccgtaaaggggtaagtattcgcggtctggacagcagctatacgctgatcctgatcgacggtaagcgtgttaactcccgcaacgccgtcttccgccataacgatttcgatctgaactgggttccggtcgatgcgatcgagcggatcgaagtggtgcgcgggccaatgtcctcgctctacggctctgatgcgctgggcggcgtggtgaatatcatcaccaaaaaaatcggtcagaagtggacgggcaccctgagcgccgactccaccattcaggaacaccgcgatcgcggggacaccaacaacggccagttctacaccagcggcccgctggtggacggcgtgctggggctgaaggcctacggcagcgtgtctaagcgtgaaaaagacaaacagcaagaatcgtctaccacaacgagcggtgaaacgccgcgcattgagggcttcaccagccgcgatgccaacgtggaattcgcctggacgccgacggaagatcatgactttaccgcaggctatagtttcgaccgccaggatcgtgattccgattccctcgataaaaatcgccttgagcgccagaactactctctgagccacaacggccgctgggggacaggcaacagcgaactgaaagtttacggcgagaaggtggacaacaaaaacccgggtaacagccataccatcacttccgagagcaacgccgttgatggtaaatacgtgctgccgctgggtgaaatcaatcagctgctgaccttcggcggcgaatggcgtcacgacaaactgaaagatccggtaaacctgaccggcggctccggcagcgcgacctctaccagccagtatgctctcttccttgaagatgaatggcggatatttgaaccgctggcgctgactaccggcatccgtatggacgaccacgacacctacggcgatcactggagtccgcgagcatatctggtctataacgcgaccgataccgtcacggtgaaagggggctgggcaaccgcgtttaaagcgccatccctgctgcaactgagtccggactggatcaccggatcgtgtcgcggtgcctgcgagattgtcggtaacccgaacctgaaaccggaaaccagcgaaagctttgaactcgggctgtactacagcggggaagagggatggttagagggcgtgcaggccagcattaccaccttccagaacaatgttgatgaccgtatcagcatcagccgtacggcgaacgttgaccaggctaagagctacccgaactacgtggggctgaatgctgacggtgaaccgatcttccgctattacaacgtcaacaaggcgcgtattcgtggcgtggaaaccgagctgaagatcccggtggctgaggactggaagctgacgctgaactatacctacaacgacgggcgtgatatcagcaacggcggcaacaaaccgctgtccgaactgccattccataccgccaacggtaccgtggactggaaggcgacgcaggactggtcgttctacgtccagggccactacaccggcgagaaacgtgcgttaaccagcgcagacgcaacgccaggcggctatgtcatctggaatactggcgcggcatggcaggcaacgaaaagcgtgaagctgcgcgcgggcgtgcagaacctgctggataaagatctgagccgcgacgattacagctacacggaagatggccgccgctactttgtgggtgtggattataagttctga

SEQ ID NO: 124042 - DNA, 1590 bp, Enterobacter cloacae
atgacgcagccccttctcagtatcgataatctgtcgattgccttttcgaaacagggtgagacgcgcaccgtggtcagcgatctgtcgctgcagatccagcgtggcgaaacgctggcgctggtgggggaatccggctccggcaagagcgtctcggcactctccattctgcgcctgctcccgtctccgccagtgagctacccgcaaggagatattctgtttcacggcagctcgctgctgcacgccgacgaacagaccctgcggggcgtccgcggcaataaaattgcgatgattttccaggagccgatggtctcactcaatccgctgcatactctggaaaaacagctttacgaggtgctgtccctgcaccggggcatgcgcaaagaggccgcgcgcggggaaatcctcgactgcctcgacagaaccggcatccgcaacgcggcaaaacggctgagcgatttcccgcatcagctttccggcggtgaacgtcaacgtgtgatgattgccatggcgctactgacgcgcccggaactgctgatcgctgatgagcccaccaccgcgctggacgtcacggtgcaggcgcagattttgcaactgctgcgggagctacgtagcgagctgaacatgagtctgctgtttatcacccataacctgagcatagtgaaaaagctggccgacagcgtcgccgtaatgcaaaacggacgctgtgtagagcagaacaccgccgccacactgctgaactcgcctcagcacccctatacgcagcggctgctcgacagtgaacccgctggcgatcctgtgcctcttcagggggacagcgcgccgttgttgaacgtcgaggggctgtctgtctccttccccatccgtaaaggtattctgcgccgcgtggtcgaccagaacgccgtgctgaagaacatccgtttttcactgcgcccgggcgagtcgctgggactggtgggcgagtcgggttcaggcaaaagcaccaccggcctggcactgctgcgtttaattgcctcgcagggcgagatcctgtttgacggcatgccgctgcaccgctggaaccgtcggcagatgctgccggtacgtccccgcatgcaggtggtgtttcaggatcccaactcctcgctcaatccaaggctgagtattttgcagatcatcgaagaaggattgcgcgtccatcagcctactctgacggctctgcaacgtgaaaatgaggtcaggcgtgtgatggcagaggtagggttagatcccgagacgcgccaccgctacccggctgaattttctggcggacagcgccagcgtatcgccattgcccgcgcgctgatcctcaaacctgagctgatcatcctggatgaaccgacctcctcgctggacagaaccgtgcaggcacagatcctgaccctgttgaaagggttacaggaaaagcaccggctggcctatatctttatcagccacgatctacaggtggtgcgggcgttatgccatcaggtgattgtgctacggcagggagaagtggtcgagcaaggtgagtgccagcgcgtatttactgcaccgacgcagagctacacgcgccagctgttatcggcagactag

SEQ ID NO: 124043 - DNA, 594 bp, Enterobacter cloacae
atgtcacgtcttcccggtcgcccgcgtgaatttgacaccgacgccgccatcgacagcgccctgctcgttttccgcgagcgcggctaccatgctacctcaatcaaagagctgagtgacgcgacgggccttacggcgggaagcctgtataaagcctttggcagcaagaatggcctgtttctcgcggcgttcgatcgttacacccggacgcgcagcgccgccctgcgccagcgtaccgaggcggcacgcagcgggcgagataaaatcgcggcggtgttacgtttctacgccgagagcagccacggtccagagggcatacgcggctgtctggtggtcgccagcgcgaccgagctggcggtttttgatgaggcaaccgcgcagtacatcaaagccgccatgcagcgtaccgagcagctgttgctcgaactggttcaggagggccagcgggacggtagcctttcccgcgcgctgcccacggagcaaacggcacgtaatcttttcgcgctgctgcagggttaccgcgtgatcggcaaaaaaggcctgtctgaggacgaaatcaatagcgccgttaacgcggcactcagcctgctcggctga

SEQ ID NO: 124044 - DNA, 873 bp, Enterobacter cloacae
atgaccatgcccatcgccccgcagcaccacttcacgctcatcaatggcatccgcacgcactacgtcaccgccggagaacagcacgcgcagacggttgtcctgctggcaggtttccccgaaagctggtacgcctggcgccatgttatccctttgctggccgagcgttatcatgtcatcgccccggacttacccggacagggtgataccgattgtccgtcagaggggtatgacacccacaccctcgccagccatgttcatgaactgctgacccagcttggcgtgcatcgctactatctggccggtcacgacgtgggagcctgggttgcctggccttatgcggcgatgtacagcgatgaggtgataaagctggcgctgctggacgccggcattccgggtattaccttacccgatgccctccccgtcaccgcggaccgcgcctggcgcacctggcattttgcctttcacgtgattgccgacctgcctgaattcctcatcaggggcaaagagcgcggctatctggagtggtttctgcgtcgcaaagcggcaaatcccctcaccttcagcgaggcggatcttgacgagtatctgcgcatttttacgcgcgaaggtggcttgcgcgcagggctggcttactatcgcgctgccgccctctccgctgcgcaaaaccgggcgcttagcgaacggggtaaactctctgttcctgttctggcactcagtgccgatcagggttcgattcctgatatggcctcgccgctgagggcgtttgcagaacgcgttgacgggcgcgtgatccctcgttgcggccattttcagccagaagagcagcctcaggccgtcgccgacgccctaagcggtttctttagtggggattaa

SEQ ID NO: 124045 - DNA, 1290 bp, Enterobacter cloacae
atgctgcactttgtgatcgcgcgcacggaagcccgccctaatctgcgaattgttatgtcattaccccatgcttctctttcccgtgaagaccaggtcgccacggtgctgcgttcccctcaactgctgctacgcgaaacgctggcaggcgtaattaccgctctggccctcattcctgaggtgatctccttttccgtggtcgcaggcgttgacccaaaggtcagcctgattgcctctgtggtgctgtgtctgaccctttcagcgttcggcggtcgtcgtgcgatggtcacagcagctgcgggctccgtcgcgctggtgattggcccgatggtgcatcagcacggcgtgcagtacatcctgccggcggtcctgatggcagggataatccagattctgttcggcgtgctcggaatggcgcgcctgatgcgctttattccccagtcggtgatgaccggtttcgtaaatgcgctgggattgttaattttcttcgcgcaggttccccatttctggagccgcagcccgctgattgtgggtctgttcgtgctgacgctgctgattgtgctgtgggtgccgcgctttgttaaaagcatcccgtcaccgcttattgcgattgtactgctcaccctgttcaccgtgaccagcggacaggttctcccgactgtgggggatgaaggttctatgagcagtggtttgccagggatgacgcatctgctcgtcccgctgaatatggaaacgctcagcatcatctggccatgcgcgctgagtatcgcttttgtcggcctgctggaatcactgctgacggcaaaactggtggatgaactgaccgcgacgacgtccagcaaacgccgtgaaagtatcggcctcggcgcagggaatattcttgccgggttgtacggcggtatcgcgggctgtgccatgatcggacaaaccatcgtcaacgtggagatgggcaaaggtcgcagtcgcgtctcaacttttgcagcgggcatggtgctgctggtgctggtcaccgccctcagtgaggtgatggcaaaaatccctatggccgttctggccgggatcatggcgattgttgccatcaaaacgtttaactggcacagccttcagcctgccacgttaaaaagtgcgcccattgccgaaacggttgtgatgctgattaccgttgcagcaacggtttcaaccggtaacctggccattggcgtactgggcgggattattgtgatggcattgcttcccgcccggctcaagcgtcggcttaaagaagaaaaatcgttgcaagcccaagaaaaataa

SEQ ID NO: 124046 - DNA, 657 bp, Enterobacter cloacae
atgctcgatctctttgcggatgcagaaccctggcaggagccgctagcgcctggcgcagtgatcctgcgccggtttgcactctcccgggcctcggcgctgctggccgggatccaggacgtcgcggccgtttcgccattccgacatatggtgacgcctggcggctacaccatgtcggtggcgatgaccaactgcggtacggcaggatgggcaaccaacgaacggggctatctctataccccggacgatcccgtcaccggcaagccctggccgcccatgcctgcggtttttcaggcgctctgccatgatgccgccgtcgaggccacctatcccgattttcaaccggatgcctgtcttatcaaccgctatggtgttggggcgaaactctcgctgcatcaggataaagatgaacccgatctgcgtgcgccgatcgtctcggtatccctggggctgcccgccgtgtttcaattcggcgggttacgccgcaacgatcctctccagcgtctgatgctggagcatggggatgtggtggtgtggggcagggagtcgcggctctattaccacggcattcagccactgaagcctggcgtccatccgcagacgggcgagttccgctttaacctgactttccgccagaccgcgccaggcaaacaaaaataa

SEQ ID NO: 124047 - DNA, 1059 bp, Enterobacter cloacae
atgaaaaacccgacctatatgaccgatgaggatcgctggcaggctgtgctggcccgcgatccgcgtgctgacgaacaatttgtctttgccgtccagacgacagggatcgtatgtcgtccgtcctgtcgcgcccgacacgcgctgcgtaaaaatgtccacttttaccccgatgtgcaccatgctgttcaggcagggtttcggccgtgcaagcgctgccgaccggataaacgcgacccgcaggaagagaagctggcaaaagtggagcgcgcctgccgcctgctggagcaggatcccgcgttaacgctggaaatgctggcgcagcaggttgccatgagtcctttccattttcaccgcctgtttaaatccgtaaccgggatgacgccaaaagcctggcagcaggcagcgcgagggcagcgcctgcgcaatgcgctcgcccacggggataaaataaccgatgccgtgctggcggcagggttcccggacagcagcagctactatcgtaaagccaacgacgcgctgggcatgacggcaaagcagtaccgtaaaggggatgtcgcagtgcgctatgccatcagcgagtgtgccttaggccgctgtctggtgggcgaaagcgagcgggggatctgcgcaatattgctgggcgatgatgatgccaaagtcacccaggagattttgtcgctgtttccggacgctgaacgcgcgccgctggaaggcgaatttgcccgacgtattgctcaggttatccataccatcgataaccgtggcgtgccgctggctctgccgctggatattcgcggaaccgctttccagcagcaggtctggcaggccctgcgcaatattccctgcggtgaaacagccagctaccagcaggtggcgcaggcgattggcaaacctggcgcggtacgtgcggtggccgcagcgtgtgccgcaaataaactggcgatcgtcatcccttgtcatcgtgttgtacgccaggacggagcgctttcgggctatcgctgggggacggaacgaaaggcgctattattgaaacgtgagtccaggaatcaggagggataa

SEQ ID NO: 124048 - DNA, 1218 bp, Enterobacter cloacae
atgaaatttgatacggtgatcgtcggcggcgggctggcgggtctgctctgtggcatcaaactcacgaagcagggactgcgctgcgccattatcacccggggccagagcgccctgcacttctcgtcgggctcgctggatctggtggacgaaacgtaccgcgaaaaactgccggcagagcatccttatcacctgactggcgcgcagcacattgaccgctttgccctggagaccgaagcgctgctggctgattgcggcgcacgtatgcaggggagcgccaggcaaaatcacgcgcgcgtcacgccgcttggcaccctgcgttccgcctggctcagcccggaggaggtgcccgttgccccgttcaaggccacgcgcgtgcgggtggtgggcattagcggttttctggattttcagccccatctggcggcggcctcgctcagtcgccagggggtcaacgctgaaacggcagagattgaccttcctgagctggatgtcctgcgcgacaaccccagcgagttccgtgcggtgaatattgcccgtttgctcgataacgaagagaaatggccgctgctgtatgaggcgctcaaaccgcttgcagagggatgcgatgcgctgtttatgcccgcctgctttggcttacaggacaaccggctgtggcgctggctgtccgaccgcctgccctgctcgctcggcctgctgccaacgcttcctccgtcggtgcccggcattcgcctgcatacccagcttcagcgccagtttgtggcccagggaggcgtgtggatggcgggtgatgaagtgaaaaaaatcaccctgactgacggttcggtgagcgaaatctggacccgcaaccacgacgatattccgcttcgtacgcgttacgcggtgctggcaagcggcagtttcttcagcaacggtctgctgagcagccgggacggcattcgcgaggcgattatggggctggacgtccgccagagcgcctctcgcgcggactggtatcagagtgatttctttgccccgcagccgtggcagcagttcggcgtaatcgtggataaccagctgcatccgcaactttcaggaaagtcagtaccgaatctctacgccatcggctcgcttttgggcggatacgatcctatcgcccagggctgcggcggcggcgtctgcgccataacggcgctctatgtggcagagcagatttgccagcgcacggaggctgaacaatga

SEQ ID NO: 124049 - DNA, 1362 bp, Enterobacter cloacae
atgagttttagcgactggccgtggcggcactggcgcgagcagcgtgctgatacaccggctctgcgtctcaacgacgaggtgctgagctggcaacagctctgcacccgcatcgacaatctggccgcagggtttcatcagcagggtgtggaggcgggtgacggcgtgctgttgctcgcccataatcacccgcagaccctgctggcatggctggcgctgctccagtgcggcgcgcgaattcttccggttaatccccagctcccgcatcccctgctggaggtattacttcctcagatgacgctgcgttttgtgctggtgctggacggtcactatgacgggctcgccgcgcttagcgtgcatgctccgtccggcgaataccgcgtggcatggcagcctgagcggctggcctcgatgacgctcacctccggctccaccgggctgccgaaagcggccgttcatacctgcggggcgcatcttgcaagcgctgagggcgtcctcgcgctgatgccctacggcgacgatgacgactggctgctttcgctgccgctgtttcatgtctccgggcaggggattttatggcgctggctgcaggctggcgcgcgcttaaccgtacgcgagaagcagccgctggagcaggccttgcagggatgtacgcatgcctcgctggtgccaacccagctctggcgtctgctcaatacccaccagcggatcgcgctgaaagcggtactgctgggcggggccgccattcccgttgagttgacgcaacaggcgcgcgcgcagggtatttctacgttttgtggctatggcctgacggagtttgcctctaccgtctgcgcgaaagaggctgacggtgagccggacgtgggcagcgcattgccgggcagagaggtgcaggtcgttaacggtgaagtgtggatcaaggcgcaaagcatggcctcaggctactggcgcgacggcgcgttgctgccgctcacgaattcagagggctggtttgccacccgcgatcgcggcgaactgcatgacggtcgcctgacgatcctcggtcggatggataacctctttttcagcggaggcgagggcattcagccggagagtcttgagcggattatcgcgacccatccgcacatcagccaggttttcattgttccgctgaatgacgccgaatttggtcagcgtccggtagcggtggtggagtgtgaaccgggaacggatattacccgcttgccggaatgggtacagggcaaactggcacgatttgaacagcccgtccactggctggtactgcctgcagagttaaaaaatggcgggattaagatctcccgccaggcgttaaaacagtgggtgaatgcccagctgtctggttaa

SEQ ID NO: 124050 - DNA, 777 bp, Enterobacter cloacae
gtgatcctcgcaggcgcgcaacaggccggtaagccaggttacccctggctggtctttttgcatggattttctggcgattgccgcgagtggcagacggtcggcgaggcgctcagcgattatccccggctttatctcgacctgccggggcatggccggtccgccagtattgccgtcacggggttcgacgagatgagtgacgtgcttacccgaacccttgttagttacaacatacttaactactggctggtggggtactcccttggcggccgtattgcgatgtttcatgcctgccaggatcctgcggggctttgcggcatcatcgtggaaggcggacatccgggcctgaagggggtcgcagcacgagaggcaagagcagcatccgaccatctgtgggcgcagcgttttcgcacgcagcctctctcaaacgtctttgccgactggtatcaacagcctgtctttgcctccctgacgggcagccagcgcagggcgctcatcgccctgcgctgtcgcaacgcgggcacaaacctggcgatgatgcttgaggcaacctcgctcgccgtgcaaccagacctgcgtgccgccctcagcgcgcgacatttcccttttgattatctctatggcgaacgtgacgagaagttcgcggccctggccgctgaactgaacgctgttcgccatgtcattccaaacgccggacacaacgcccaccgggaaaatcccggcgcggttagcgcgagtctggctcagatactgcgtcgtcgaataaaggacactctatga

SEQ ID NO: 124051 - DNA, 1296 bp, Enterobacter cloacae
gtgcattcgatttccaacgcgctggaacgtctgcgtactcagcttgcgcaagcgttacccgctacacccggcttacgtcacgtcgacgtctctttcccgttaaacgacgctttcgaccctctcgcctggcttggtgctcagtgcctgtttccccagttttactggcagcagcgtaacggtgatgaagagttggctgcgctgggcgccgtcatccatttttcctccctggctcaggcttcgcagtttttacagcaacagcctgtagcgaacgacacgcggatctgcggcctgaatgccttcaccccggagcagggcagtctctttttaccccgcctgctgtggcgacgttctgccgggaccgccacgttgcgtctgcagctgtggagtgaccgttcccttcaggaggatgccgacgcggcgctggcgttcttacagcagcttcgcgatgcccgcccaatccgcccgctctccgcccaggtagtgcaggagacccatcagccgcaaaaaccggaatggctgcgccttatccgtcaggcgacagagaccattgcgcgcggcgaagtcgaaaaggtggtgctcgcccgggcaaccgatctgcagttcagtcagccggcgaatgccgtggcgctgatggcggccagccgtgccctgaatctgaactgctatcatttctgcatggttttcgatgccagcaacgcgtttcttggctccacacctgaacggctgtggcggcggcgcggcaacctgctgcgtaccgaagcgctggccggtaccgtcgccagccatcccgatgacaagcaggcccgccttctgggcgactggctgatgaacgatgataaaaaccagcgtgaaaacatgctggtggtagaggatatctgccagcggctgcagcaccatacccggacgctggaggtccttccagcacaggttatgcggttgcgcaaagtgcagcatcttcgccgctgcatctggaccgagctcaagcatgcggatgatgagcaatgtctgcatgtgctgcagccgacggctgcggttgccgggttaccgcgccagccagcacgcgaatttatacaccgcgttgaacctttcgaccgggaatggtatgccggatccgccggatatctgtcgccagaacaaagcgagttctgcgtggccctgcgctcggcacgcgtccatgacgccaccgtccgtctttacgccggggcggggatcgtcagcggttccgatccggaacaggaatggcaggagatcgaaaataaagccgcaggcttgcgctctctgctcctgaaggattag

SEQ ID NO: 124052 - DNA, 1323 bp, Enterobacter cloacae
atgagccagaaaaccctgttcaacaagactgcgctggcagtcgcagtggcaatcgtctctacgtccgcctggtcagcgggcttccagttaaacgaattttcttcctctggccttggccgtgcgtattccggggaaggtgcaattgctgatgatgcaggtaacgccagtcgtaaccctgcgctgatcatgatgtttgatcgcccaacgttctcagcgggcgccatctttgttgatccgggtgtggatattacgggccgttccccgagcggagccagcctgaattccgataacatcgcaccaacggcatgggtgccaaacctgcacttcgttgcgccaatcaacgaccagtttggctggggtgcttccgtaacctctaactatggtttagcgaccgagtttaataacgactacgcagcaggagcctatggcggtaagaccgaccttgagactctgaacctgaacctgagcggtgcttaccgtctgaacagtaactggagcttcggcgttggctttgatgccgtttatgctaaagcgaaaatcgaacgttacgcgggcgatctcggcaaaatcgttgcgggctccggcgcactgccgccgcctctggcacaacaggttgcagggatcccggcagacacccagatcgcgtatctgaagggtgacgagtggggctttggctggaacgccggtatcctttatgaactcgataaaaacaaccgttacggtttcacctaccgttccgaagtgaaaatcgactttgacggcgactacaagagcagcctgccttctgcttataaccagatcctcggcaccttcggcctgccaatgggcaccgatggccgtaccactggcggttctctgagtctgcacttaccggaaatgtgggaattgtccggttataaccgcgtggcaccacagtgggcgattcactatagcctgacctacaccagctggagccagttccaggagctgaaagcgaccaacagcaaaggcgacacgctgttctataaagatgaaagcttccgtgatgcctaccgcatcgcactgggtaccacctactatatggatgacaactggacgttccgtaccggtattgccttcgatgatagcccggttccggctgacaaacgttctatctccattccggatcaggaccgcttctggctgagcgccggtgcgacctatgcattcaacaaagatgcctctgtcgatgcgggtgtttcgtatatgcacggtcaaaaagtcagcttcaaggaaggtccgtatgagttctcttccgaaggtaaagcctggctgtatggcctgaacttcaactacgcgttctaa

SEQ ID NO: 124053 - DNA, 267 bp, Enterobacter cloacae
atgagtgaagccagtgttaacatggttttgaagagaattggatatgataaaagagctaccggccatggttttcgccacactatgagtaccattcttcatgagcaaggttttaacacggcctggattgaaacacagctagcgcatgtagataaaaactcgattcgtggtacttataaccatgcccagtatctggatggtcatagggaaatgatgcagtggtatggtaattatattcaaaattgtgaaatgcgtctccataaggaataa

SEQ ID NO: 124054 - DNA, 2661 bp, Enterobacter cloacae
atgaaaatgacatttcagcagggccaacaagtacggcatgaacgctttgggctggggacgattgaactcctgagggaaaataccgcactcattcgtttcgagtcgagttttgaagagcgtcctctttccgagctggaaccagtacgcagcgcacaagatgctttagctgaaggtaattatgacgatctgcgtgaagtccttgcgcgcagtcaggcgcttgcgatccgctccatcaatgatagttggggggtgttctccacttcacgtatcaacctgctgccgcatcagttatgggtatgtcaccgcgtgttacggcaatggccggtacaaaagctgattgctgatgacgtagggttggggaaaaccgttgaggcggggctgatcctttggccgctgctggctaaaaaacgtgtgcagcgtctgttggttttagcacctgcatcgttagtaccgcagtggcaggagcgtttgcggcagatgtttgatattcgtttgtccctctactccgcggaaattgatactgagcgatcagattactggaatacgcatccttgggtggtcgcttcattgccgacactgcgaaaagatattaatggcaggcacgagcgaatgctcaaagcagacgactgggacttgctgatcatcgatgaagcacatcaccttaactcgctagaagattcgggggcgactcagggctatcgatttgtgcagaagcttatcgatcacggtaagttcgcctcgcggctttttttcacagctaccccgcatcgcgggaaaaattacggcttctttgccctgttgaggcttttacgtccagacttgtttgatgtgaataagccatttgaaactcagcagcatcatgttcgggatgttgtgattcgcaataataagcaaaccgttacgaatatggacggtgagcgtttgttcaagaccgtcaacgtgacctcacagacctatcatttttctgaggctgaacagtcattctatgaccggctcacacgatttattctttcagggcaggcctacgcttcgtcgctgagctccgcaaaccagcaggctgtgcaactggtgttaacggcaatgcagaaactggcagcaagttcggtcgcggcaatttatgccgcaataaatgggcgtatcgccaggctcggggaaaatcagaagaagctgcaggcgctgagtgatgaaatgaatgccatcatgagtgattctcaggccccggatctcgatgatgtctacattgcgcttgaaagcgaatatgttgaaatgtctgcttcggttcaacttatgcagaatgagctgcccatgcttgaagagctgcaggtgcttgcggggaatgtggaatcggaaacgaaaatccagaccttgcttcatgtgttggaaaccacgtttcttaatcgcaccgtcgtattctttactgaatataaagcgacacaggctctgctaattaatactctgaatgctcgctttggctatggttgcgtcagctttatcaatggcgaaggacgcctggaagggatttacaataaacagggcgtcaaaacgtcatggagtatggatcgctaccatgccgcggagcaatttaaaagcgggcatgtacgctttattgtttgtactgaagccggtggtgaaggtattgatttgcaggacaactgttattccatgattcatgttgatctgccgtggaatccgatgcgtcttcaccagcgtgtagggcgactcaaccgctatggccaaaaacatcaggttgaagttattactttacgcaaccccgatactgtagagtccagaatttgggatctattaaacagcaaaataaccacagtcatgcgttctttgggcgacgcgatggaggaaccggaagatctgttgcagcttattcttgggatgagtgataaaggttttttcaattcactttttgctgatggcctgacacaaaaaccagaaactctaaatacgtggttcgattccagagcagggaccttcggaggtcagtcggcggtcagcgtagttaaggggctcgttggtcatgctgataaattcgagtatcagaatttacaggaagtccctaagttggatctaaataacatgtatagttttttagaaaacatgctcaaattgaatggtcatcgccttgagaatgagggggggacactttctttcgttacaccgaaagagtggataacccagtttgggattaagaaaaaatataataacatgacgtttgacagagtatctgaagacaaggcacttgaagtgcttggcgttgggcacgttattttaaataatgcgatcgctcaggcagaaaaattcaatgcgtcaacggcggtagctcggggaattactgcacctttgctcatttatattcttcgcgatcaaattactggcgatagtaatgtacattcattcaccgttgtaggtgtattaatgaatgacgaaccgaaaattctggtgaacgacgaccttgtccatcaattatctgttatttatgaagccatgcctaagggatcaccagttgtaaaacttgatagtacctatcaaattgattctgccagtgatcttaaaattgccgagttatcgttagaacaggcaattccttcgttaaatttgccttacgaaaaagtcagttggaaccacacagccacatttatacctcaataa

SEQ ID NO: 124055 - DNA, 7506 bp, Enterobacter cloacae
atggctaaagcgcactctacgccgctcaacgatattgcgattatcgctgcgaatttaaaagaccgttataaaaatggcttccctgttttgaaagaaattgtgcaaaacgcagatgacgcacaggcgtcatcattaatctttggctggagcccaggcattgccggggcagatcaccccttactgggtgaccctgcgcttttctttatcaataacgcaccgctgacactcgacgatgtagaggggatcctctccattggcattggcaccaaaccgggcgacgaaaatgcggtgggaaaatttggccttggaatgaaaagcctgttccatctcggagaagtgttcttttatcaggcttttgactggcataccgcatcggccaagtccgacgtttttaacccctgggacagttacagacctgcctgggccgaagtgagcaagcaggataaaattcgtcttgaggatgaagtccgcgcaattacccaaaacgagggtgaggggtatttcgtcgtctgggttccgctgcgttcagagagcatctatctggcccgccaggatgatgaaaactttattattgtcggcgaagactatggtcatgaagtgccggattttatttccgacccgggactcagggataagctcgccagcctgctgccgctgacgaaaaccttgcagtacattgagttggttgtgaaaaccgggcaggagtatcagcgtcaaatacatatctcgctgcctgaaaaggcaactcgcccgctatttacccggcttgacggggccggtgagtggcaaggtcatattactgttcatggtattggctcgcagagctcccaacaaaaattctatgtcgggcacgaagtcttgttaaacacgcctgagttttctgccctgaaatcacatcgaacctggccattcagctattcacgagaaggtaagaagaccgccgataaagcgctgcctcatgctgcggtagtgatgttggcggaaaaagtgcctgaaggagaggcgacgctgacggtggaatgggcggtgtttttacctttgggtgagcatgacaccgcgcagcatgcgcagaaacagacattccctctttctggtcagtactcgtatcaaataattctgcacggctactttttcatcgatgccgggcgagtgggtattcaaggactggctacgctcaccagccctacgccgttattcaatgccccggactctcctggccaggaacaactggttcaggaatggaaccgctgtcttgctactcagggaacgttgccgctattaccgaaagcacttgcctcgcttatgtcgcttattcacgccggagatgcggaaaaagcggcaatttcggatggtgtgcgtagggctttacgcaacaataatgcctggcttcactgggtaacgttgtaccatctctgggtatgcgaactgacgcgggatggaagtcagtggtgtttagttgatgcgaacactcccgttcgtctgttgcctgccacaccttcaggtgaagcgcatcgcccctgggaagtgctgcccgcgctggaaagcctgggtgtaacgcatagatttatcgatgaaacgcagccgaatatctataacgaatttaaaagtaagtggcagttgtcagagattcaggcgttgctacaggccataccgtcaatggtgtttacagcaccaaagctcacgaactatctcaatcaactgctgaaagcgttgccgattgcgtcggataattattcccgtgacctgatgtcgttgctcaggaaaacgttctctgacgtgccgttggtggagctttcacgaaaccagacggcgatcggtgaattgatggcgctcattcggccgacctggcgttacagaattgccattgaccgtcaggagcaggccctgtgggaaacgcttggccgtacggttatggatacgctgctggtgcccgcttttctcgataacagtaaagagcccgccagtgcctctttaaactgggagaccgtcgggagcctgctgcaggcgatgcaggcgcaggcttctgccagcgatgactttgaaaaactggtgcgggattttatcggcaaactcttcgctcccgatcgactggagttgtaccgccggtttgatacattgaagatctttaaggtttcgcagcccaccggtgcgccataccttgaaacgcgccgtcatctgcttgacttaaaacaaaagcgcagagtcttcaaacgtggaggcagcgccaactttggcgtggggttaagcgcattgttgcagcaggcgctgatcgaaaaagaggtcgtcctgatcaccaatgatattaatcagaccctatttggtggttcagaatattcagaagcgcaggagtgtgacagcgagggtgtgatccatctgcttgagcttcaccctcgtctggatttgccggcaaaacgcattgacttgcttaataaaatggctgcggacggtgacaaattcggccccagagagcggcttgcctatcgctatctgatgcacggtaattcggctgataccggcgagactgaattgtggaaagcgggtaaggcgcatcctgtatgggcaaaaatactttctgatgctaattcacaacagcgtaagtggaccattatttcgccagagattgagcagaacctcgggctgactcccggattcgagaaggcgctcaggcttgatagtgtaacgccggatcatgtgatccagcgcttcaaagaaagccttgaatatctggagtttgatgacttatctgcagaagatgcggaagaagttctgttgcacattgggcgcgctatgggtgaaacaatgtggcggcagatggcgcttcatcgtagggaaggcaaagaggggtacatatcccttgatgagcgttgtttcttacgtggggggcgcattgaactgcccactgaattgaatgacaacgtgacgttcatccagtccgccagccaaccggaagtgcaggagcagcagcgcaaatatctgccaatggtgaatgctgagcatgcaatcatgctggctttatctgagccgaatccgggacaattctgcgattttatcctgcaattgttaatgcagccgacgaatgacgtgtcttcagagagagcgttcaacaacctgcgcagccagaaatggcttttgcaccgtggtgtggcgatagcaccagaaaatattctggatataagcgcgaaagactatccggagatcgcgaagctgactgaagcgacgccgcgcatcgctctgcttgaggatattgttctatcagatgacgctaaccgtgcgctgagtccatgggtcgtgcgaggtaaggctgcgttttacaaagcgctcactgtggcaggtacacttccgctttatgctatcggcagcagcttacgtctcactgacacgattattcttcaggccagtgacagatcttacgcgtttgataactttgacggctggcggcttttaattgagtgcctcaaaggtgctgagtcacttgagggcaatgaggccatcaatgcgctgagttttgcgcatccggtgacagacaagatagtttccagctaccgacgtctcgtcgacagcatgaatccaactcaaggcgttgaattgcgtaaagcgctgttaagctcgctgtgtcatacccattcagaacccgccagcgtactgcgttcaatgcagctcaggacggcagcggatacctgggcgttagccaccgatctctgttatggcgtaacgggcgcagaacgtagtgctgttctacatgatgacgactgggcgtatttgtccccctggctgcaggctaatgacttgtcggtagacagtactgagtccgaagggcatctcagtcatgttgagtattctgccagtgtcttaagggaatactttgcgccctgggaacgttgggttccacgtaaggcaatcgctgcgctgctggctttactggcggggaatcgtaaggttcgtacgctgtgtgagagctatctggggctgcaaagttatgccctgtttgtgaaagaactgtcgcaagacagtaaacctttaactaaccatgaagctcactttgcggggttaacgctcttacagtgcattgagaaatatgcctttgccgtgaaggtttacgaagaaaacacgttgcaggttcattcactgttccaggaacgtttgaccgtggcgctggcaactgatctggatacaatctttgttggtcagcacggctacgctttttataccggtcaggcaccgcaaatcttcattcgccgattttccccagaccagtacacctctcagcagctcctggcaattttaaaacgcagtactagctggctgcaggaaggcatttatctgcagcgagcaaggctggatacgctctggcaatcctttgagcaggccgagcaacttgacgtgaatatcgcgcgagtcactatcctgaacagcatcgttgagcgcctgaaaacgctgggccttaaaaactctcagcttaacgttttaatgagagcctatgagagtgagcttcactctcttgctgaaagcagtgacggcaagtcgctccacagcccgaggctcactgaaattgtctatgacattgcgaatgccatccgggatcgccctgagctgcaggctgaaatattaacagcggtcagaaagcgtatagaggatgctcagtatcagccatcaagcgttccttttgagctgttccagaatgccgatgatgcagtagaagagttgtttaagctggatagcgatgcccgtcatgagcgggggcaccagaaatttatggtgaaagagcaaaacggcgggttgtcgttcttcaactggggtcgagaaataaaccgcttccagagcgtgaaaaatgagcaagtcgagaatgttcatgatggctacaaaaacgatctgaaaaaaatgctggcgctttaccagtcagataaagagcagggcgttaccggcaagttcggtcttggcttcaaaagctgcctgctggtgtctgataatccttacctattgtcggggcggctggcgactaaaatagcgggtggcattgtgcccgagtcctgtgacgctgaaagctataaacaactaaatcaactcactgaaagtgccgcgataaatggcttgtcaccaactcttgtgtatttgccactgcgccagcatatgcaagcggaaatggtgttaaaagattttactctgtatgcaggtttactaagtctttatgcacgtaacttgcgccagattgtcattgatgagcatgaatggcgctgggagcctgctcagtataaacgtattcctggtctgtcattgggcaaggttatgttgccgaacagcaagggtgttcagtcaccagtgcgagtggcggtttaccagaccgaaatcgatgatgaacgctgccatctagttttccaggtcacgcgcaggggcctgagaggttttgacactcatattccgcgattgtggaatttgtctccgttgatgagtgatacccggcagggttttttgattaacgctggatttgaggttgatattggtcggcgccagttggctattgaagctgaacgtaaccggggcatcattcagaaagcaggggcgaaagttcattctctgctggaattgctctggcgtgaaactgagtataactgggaggcgctggttgctgagtgggaactaagcccagaattaactcatagtcagttctgggaaagcatctgggacgtaatgtctacaggcatcagtaacgacgctaccgcgatggaaaatgaaaagttgctacagcaactttacgaaagcgaaaacggcatcatgagcttctatcgctcatatcccgcgctgcccaacggatttaaagagcaggctgccgggctgataaagtggagcgacagagtgcgttgtgcggatgaactggtttctcgtctggcgagttcactgatttatctccctgcgtttcaggcattgcacagtgcacagtgcctggtagcagacacgacgggaggcaaacttaaagtcgaaactaaactgtcgcttgaatcgttattaagtgcgtcattgccggataaacagggcgttgatatccaacatttggttccacgggatgctgagaagctggcagtcgtatttaacgaagagttcgataagcgactaggtgaactgacaggctggcaggataaaattgaggctttcagaaaacagctgacgaacttgcatgtgctgacacaagcaggctctacacgcccgattagccaaattttgctcggtaacactccttgtgccgaaaaaaatgaacggttgatctctgggtttgcccctgccgatgccatcatttcatcatcttattctacgcaggcgtgtgaatttattgtttattgcaagcgcagaagtcagggatatgtttttgaggatttagtcaaatgggcaaagcgcaaagacctggcggctgataatcaaaagcggcaggcattttgtcgttttctgattgaaggcatagaaggtgaaaaactggcgggtatgctgatggaagagataccgccagagtggttgcttgagcttaagctgcgtccaggtgcatttccggcagactggcactggagcaataatgacattgcctctctcctgcagggacggttgctgactaatagcgacagaacaagggcatgggagcgcgagattcgcgagacaccggaagaatacgaaccgttggtgacgcctgctgaggcgatgcaaaaaatacaccgctggtgggaagagaaccagcaggaggagttggcgaaatacaatacccgactctatccggaaggttggtttgactgggaagctttaaaaaatgactctgacgatcagagttcgcgactggcgttattgaaactgctttatcttggctcatgccagaccattggccggactcaggaagagcaacaccgtgccgcgattgagcattttgaggacaaaggctggtgggatacgtttgttaatcctgatgctgcgcagcagtggctggatgtgatggatgaatatctaaacgagtcttttgacggtgataggtatcgtatctggttgcagatattaccgttgtatcgtttttccagacacttagatacctatcgcgaactgctggatatgtcggaagcgttccttgaggatattggggatttactgcgaccggcatccagttccaggctttcgggaaccgggataggtgtcgtaccagaattacgtgcaacgcttggaaccggggtgaacttcattttccgtgaactcgtgcgtaataacgtgtttaccgactctaatattcatcaatattgcttctctgcaccagagcgcgtcagacgtctgttgtgggcgatggagtttgaagaaataaatgttaagcagtcgtctgccagtgattctattctgctgtggacgtttttcagcaaacaccttggtgaggaaaatgcgacctttaatcattgtttcgacataccgctgcgcattttaaccagtgacgagaaaagctcgcttcgcattgaaatatttgggcaggatcccctggagtacgtatga

SEQ ID NO: 124056 - DNA, 1101 bp, Enterobacter cloacae
atgccggttcatcatgcaatctggcggataggggagaatccccagccgctaactatcagcaaactcgccagcgagcaactgctggagaagatgattttaaacgatcccactatcctctctgatcagtggatgatcatcggccatcaggaaaatacgctcgataaagggcgtatcgatctgctggcgattgcgccggatgcctcgctgatcctgattgagctaaagcgcgaccgcacgccgcgcgaagtggttgctcaggcgttggattacgcctcctggggggatgatttaagtgctgagcgtctgtcgcagatttacgatagattttccggtggtggaaacttgggtgacgcattcagacaacgcttcaacgccgagctggaagatgattccatcaacaagtcacatcaaatcattattgtcgcagcggagctggatccctccaccgagcgtatcgtcgactatctgagcaagaacggcatctcgattaacgttctgttctttaaagtgttccagcacggtgacgaacagttcttaagccgcgcctggcttatcgatccgagcgaaacgcaaaccaatgctgctcaggccactgctacaagtgccaatgcgaaggaaccctggaacggtgagttttatgtctcgtttggcgattcaaacagtcgcgtctgggaagaggcgcgccgctacgggtttatcagcgcggggggcggaagctggtacagtcagacgttaaaacagcttcagcctggcaaccgtgtatgggtaaaaatcccggcgaccggttacgtcggcgtcggtattgtacagagcggcgttgagcctgccggtagcttcaccatcaacactgatgacggtgaaaagcgggcgatggatgtgcttaagtacagcgatctctatcaccggaacgcagatgaccccgacaagtctgagtattttgtcccggtgaagtggctggaaacccgcagtgagcaagaggcggtaaacgaggtcggattcttcggcaatcaaaacacagtgtgtaagcccatcacgccgaaatggcgtcacaccgtcgaaaaattaaaactctattttaaaaactgggatattcaagtgtaa

SEQ ID NO: 124057 - DNA, 1380 bp, Enterobacter cloacae
atggaaacctatttacaaaccgtaagggatgagtggattcagttaatcaatgaaacggatcccctcgttcatcaacttactgcgcaactggccagcgatcatgcttctggtctgattacggagttttatcgtgtggtcctggccgaccctcatgcagcggagtttctgaccactgagcaggttgaaaggcagctgcaggaagcgctgcgccgttggcttgttgatgttctctcctgccgggttgaacaggttgatgaacagatgcgggctcagcagcgcgccgccgatgttcacgcccgaataggtatatcagtcgacctggttgagatgggtttccggatcctgaaaaagctgttgttacctcttattaatgccacaccacacccttctgagaccaagttaagcatctatcactacgccattaacagcattgatctggcaatggaggtgatgtcgcgcgcgtatgtcttcagcgagaacaatgcggcaaaagaggacgagaactatcgaatcttctcgctgatggaaaatgcggaagtcgagaaggaacggcagaccgccgcattgctgacgtgggaactgtcgctgctctataaagtgatgctggactccagcatcgacaatagccggccgctcgggcagtccgactttgggctgtggttcagtcataagggacgtcactacttcagtggtattgccgaagcggggcatatctctcgtcttatccaggagttcgacgcggcttttcatgacgttcgtcagacagacgatgcccttcacgacagactgcggcaggtgcaatttttgcggctgacgcgaacgaccttctcgcaaatcgtgaccctgctgcatgagctgtttgatgaggtagcccggcacgaggtgggcgtggatgtgctcacgcgtctgctcaaccgtcgcttcctgccaaccatttttaaacgtgaaattacccaggcaagtcgttctggtacgccgctgtcggtgttgcttattgatgtcgataagttcaagcaaatcaacgatacctgggggcacaacacgggagatgaaatattaagaaaggttgccggggcgttttatgacaacgttcgcacctgtgactatgtcttccgctatggcggagatgagtttttgattgtgctaacggaaatcaccgaagccgataccctgcgcattgccgagcggatccgccgacgcgtggaaaaaattaaggttcattccccgacaggcgagccaataccgttgtcgctttcgattggggcggccatgtttaatggtcatcctgactacgaacgtctgattcaggctgcggatgaggcgttgtatggggcaaaacgacgggggcgaaactgcgtggagttatggaaagcacagtga

SEQ ID NO: 124058 - DNA, 375 bp, Enterobacter cloacae
atgaccacggaagagctggcgaacagcctgggtgttgcccggcaaaccgttaaccgctggattcgccagcagggctggaaaaccgaagggatcaatggcgtgaaagggggacgagcacggctgatccacattgatgctcgggtgaaggagcatatcatgaacctcccggccattcgcaaccgtcaggcggtttaccacctggcagaagcaacgatgccctatggcgatcctgcgtcgtcgaatctgctcgtgcagattgtcgacacgcttgaaaacatgacgcagctggaacaggaacgactgcacgtgttgctaaaacgcgaaggcatcagtggttttcttacgcgcctgggtattgctgaattacacgcataa

SEQ ID NO: 124059 - DNA, 495 bp, Enterobacter cloacae
atgtacctctcaattgtgtctatttaccgttatcgcaatgtaatagcacacatgctctatctttattttgaaagcattatgactgattctgaaaatgggaatgaaaaaaatcgcgttcgcaagacggattcaaacgtaaccggccttgttaaaaacatcccggcaagcaaggcagcgcgtttagcgatagcatgggcgctggcaaaatccctttcggaatccggcttactttcagagatcgtcgtcgaacggcttgcgcgccgtgtacccaatgttgttatggctctgcagctgatgggtacggaccagaagtgcgctcttgctgcccgtcgtctgaaagtgttggatcctaagtattacgccaccctttatgccgcacaactggaaatgctttactacttttttgaaccattcctggctgaaatcattaagaaagtacaaatgggattctacaaggattttgatgcgatctataacgacttaaaggataagtag

SEQ ID NO: 124060 - DNA, 1374 bp, Enterobacter cloacae
atgaaatatacatttcccgataatttctggtggggcagcgcaagctctgctctccagaccgaagggacacgagagggtgaaaccacatgggattactggtttgcccgcgagccgaaccgttttcacaacggcgtggggccgcagcatacctccacgttttatcagcactggaaaacggacattcagctgttaaagcagctgaaccacaacagctttcgcacttctataagctgggcgcgtctgatccccgacggtatcggtgaagtgaatccaaaggcggtcgaattttataaccaggtcattgatgagctgatcgagcagggcattacgccgtttatcaccctgttccatttcgacatgccgatggcgatgcaggagattggcggctgggaaaaccgggaggtggtggacgcttacgcccgctatgcgcagatttgcttcgacctgtttggcgaccgcgtgctgcactggtttaccttcaacgagccgattgtcccggttgaaggcggttatctgtacgatttccactaccccaacgtggtggatttccgtcgggcggccaccgtggcgtatcacaccgtgctggcccacgcgaaggctgtccaggcctaccgcgccagacattacgcaggtgagatcggcatcgtgctcaacctgacgccgtcctacccgcgctcgcaaaacccggcggacgtgaaggcggcgcacattgcggatctaatgttcaaccgcagctttctggacccggttctgcgcggcgaatacccggccgatctggtggcgctgctgaaatcttacgaccagctgcccgcctgtaaaccggaggacagtttcctgatcgcggaagggaaaatcgacctgctcggcattaactattaccagccgcgtcgcgtgaagtgtcgcgacagcgcggtgaacccgcaggcgccgtttatgccggagtggttctttgataactacgagatgccgggccgcaagatgaacccgtaccgtggatgggaaatttacgagccgggtatttacgatattctggttaatctgcgcgacaattacggcaacccacgctgttttatttctgaaaacggaatgggtgtcgaaaatgagcagcgttttattgaaaatggccaaatcaacgatcaataccgcatcgattttatttccggacatttagcctggctgcataaaggtattagcgaagggtgtcactgtcttggttaccatatgtggacgtttattgataactggtcgtggtgtaatgcgtataaaaaccgctatggctttattcagctcgatttaactacgcaacagcgcaccattaaaaagagcggagagtggtttgctgccacctctttacataatagtttcgagaaatag

SEQ ID NO: 124061 - DNA, 3111 bp, Enterobacter cloacae
atgttttcccgtttcttcgtgcgtcgcccggtctttgcctgggtgatcgccatcctcataatgctcgccgggatactggcgatccgcacgctgccggttgcgcagtacccggacgtcgccccgccgtcgatcaagatctccgccacctacaccggtgcctccgcgcagacgctggaaaacagcgtgacgcaggtgatcgagcagcagctcaccgggctggataacctgctctacttcacctccaccagcagttcggacggctcggtgagcattaccgtcacctttgaacaggggaccgacccggacaccgcgcaggtccaggtgcagaacaaagtccagcaggcggaatcacgcctgccgactgaagtacagcagtccgggatcaccgtcgagaaatcgcagagcaacttcctgctgatcatgggggtgtacgacaaaaccgacaccgccagcagctcggatatcgccgactggctggtcagtaatatgcaggatccgctggcgcgtgtggagggcgtcgggagtctgcaggtgtttggtgcggaatacgcgatgcgtatctggctcgacccggcgaagctggcgtcctactcgctgatgccgtcagatgtgcaaagtgcgattgaagcgcaaaacgtgcaggtttccgccggtaaaatcggcgcactgccctcgtcgaacgcccagcaactgaccgccaccgtgcgcgcccagtcgcgtctgcagacggtggatcagttcaaaaatatcatcgtcaagagccagtctaacggcgcggtggtacacatcagcgatgttgcacgcgtggagatgggcagcgaagattacacctccaccgcgaagctgaacggccacccggccgcggggatggcggtgatgctttcaccgggcgctaacgcgctcaataccgccacggcggtgaaagagaaaatcgccgagttcaaaaagtcgatgccggaaggctacgacgtggcctacccgaaagacagcaccgagttcatcaaaatctccgttgaggatgtcattcagactctgttcgaagccattatcctcgtggtcgtggtgatgtacctgttcctgcaaaacatccgcgccacgctgatcccggcgctggccgttccggtggttctgctgggcacctttggcgtactggcgctgttcggctactccatcaacaccctgaccctgtttgcgatggtgctggcgatagggctgctggtggatgatgccatcgtggtggtggaaaacgtcgaacgtattatgcgtgacgaagggctacccgcccgggaagccacggaaaaatcgatgggcgaaatttccggtgcgctggtagcgattgcgctggtgctctctgcggtgttcctgccgatggccttctttggcggctccaccggggtgatttaccgtcagttctcggtcaccattatctcggcgatgctcctttccgtggtggtggcattaaccctgacgcctgcgctgtgcggctcgattctgagccacaccgccccacataagaagggctttttcggcgcgtttaaccgcttctacagcaagaccgagcatggctatcagaacaaggtgctgcgcgccctgcgccgttccggcggcatgctggtcatctacgccctgctctgcggcgcgatggggttcgcgatgctgaaactgccgggcagcttcctgccgacggaagaccagggcgaaatcatggtgcagtacaccctgccagccggcgcaacatcgacacgtaccgccgaagtcagccgccaggtgcgcgaatggttcctcaccaaagagaaagccaacaccaacgttatcttcaccattgagggcttcagctttagcggcagcggccagaacgccgggatggcgtttgtctccctgaaaaactggtccgaacgtaagggggatgaaaacaccgctcaggccattgccctgcgcgccacgcaggagctgagcaccatccgcgatgcgaccatctttgccatgacgccaccggcggtggacggcctgggccagagcaatggctttacctttgagctgatggcgagcggcggcaccgaccgcgacacgctgctcaagctgcgtaaccagttgattggcgaggcgaatcaggatgcctccctgcacgcggttcgcgccaacgatctgccgcagatgccgcagcttcaggtggatatcgacaacaataaagccgtgtcgctggggctctccctgagcgacgtcaccgacaccctctccagcgcatggggcggcacctacgtgaacgattttatcgatcgcggccgcgtgaagaaggtctatatccagggcgacagcgactatcgcgccgtgccgtccgatctcaacaaatggtatgtgcgcggtagcgacagcaccatgaccccgttctccgcctttgccaccacccgctgggagtatggcccggaaagcctggtgcgctacaacggctcggcggcgtatgaaattcagggcgagaacgccagtggcgccagttccggtacggcgatgagcaaaatggagcagctggcgaataatttgccgtccggcagcacctgggcgtggagcgggttgtccttacaggaaaaactggcgagtggccaggccatgagcctgtatgccctctcgatcctggtggtgttcctgtgtctggcggcgctgtatgagagctggtcggtaccgatttccgtcatcctggtgatcccgcttggggtgctgggcgcggcgattgccgcctccctgcgcggcctgaacaatgatgtctacttccaggtggcactgctgaccaccatcggcctgtcgtcgaagaacgccattctgattgttgaatttgccgaggcgaaagtcgccgaaggctactccctgacacgtgcggcgctgcgtgctgcccagacgcgtctgcgccccatcatcatgacctcgctggcgtttattgcaggcgtgacgccgctggcgattgccaccggtgcaggggccaacagccgggtggcgatcggtaccggcattattggtgggacgctggccgccacgctgctggcgatcttcttcgttccgttattctttgtactggtgaaacgtctgttctccggtaaacacagcaaccggaggtcataa

SEQ ID NO: 124062 - DNA, 681 bp, Enterobacter cloacae
atgtacaccgtgcttccctctcccctgctgcatgccatcaccggattgcggtttcagcctttagtcgatttgcattccggccaggcggtggcgcatgaggttctggtggagatccacaacgtgaatcttgacgcactcttcgcttcactgcccacccgcagcgcgctgcaaatttttttctggcaggccaatacgctgctgcagatgccggacaaaggtcagtactggcttaatctcccggcaggccagctgcttgatgctaaagccatcgacctgttgcttgcgctacgtcaccagcagcgcttaacgatagaaattcaggatccgttaaccgtgacccgcatgagtgccgcagagcaacgcggcatccatcacgccctgcttcagcttaaggcggcgggctggaaaatctggctggatgatctgactcaggaactggcagacgactatgcgcgtcttgctctgccggtagatggcatcaagctggaccgctcagagctgagctctcccgcccgctttgacacactggttcacttcgtcagagagaagattgcccgggctgttgtcgtcgaaggcattgaaaccgcgcaggacttacagcgagcctgcgcctcaggagcacggtttggccagggtttcctctggccggaaagccggatagatgccagcgtgacggtgtaa

SEQ ID NO: 124063 - DNA, 612 bp, Enterobacter cloacae
atgaaagaaacaatacatgtggccgttattgatagttgtgagttcacaatgattggcctgcaatatcttggcaaccgtgaacctgacgcgcatcgggatgttattttccatgggttcagcaatattgaagattttctcctcagcgaacgaacctgggacatcgtcatttatgatccactgaatatcggcagttttatgattacgcccaatgaagatattctgcgcattaaagaaaaacagccagcggcgaggatctatatctattcgttatccgtcggttttctgaaatttaagcatgtggatggggtcatcaataagcgcgtgtcgctgggggatatcaaggcgatgtggcaaatcctgatgagccagacgccaaaagcgttaaaccattacaacgtgagcattacgacgcggcagcgccctgcaaggctctccaacgaggaagcgagcgtgctgcgaggctactcatgtaacctgaaaaccaagcaaattgcccgtcagctcggctgcaacgtcaggctggtttatttctacaaaaacaatgccatgaataagctgaaggccgtgcggggcccctcgttctatcagagcattcgctggatcctgaattaa

SEQ ID NO: 124064 - DNA, 633 bp, Enterobacter cloacae
gtgttttatcgggtcaatattctgcaggagatgataagcgatgcgctgcgtaaattactgcctgaatattcgctgcaaatatcaatagtggaatcaacagaacagctctttgatgccattagcgacggtcaggtcgatattgttatggccgagttcagttatctgtttaaccataaatcgtggagcgtacagaccagtaaccggctcaatatgttatgtcatacgcaccacgttaagcgtgtgctttttgtgcctgaattacagtacggattattaaaaagggtgctggagatgaaatacgagctgaccctttccctgcaggacgagcccggcgagctgaaaagagaattacaggcgctgctcagagcagaagaggccaggccgcgtgtctcatcgtatctgaagggaatgatgcgcgctggcgcgcgctcgcgttcggtgctttccgcccgggagtgggaggtgctgcatcttctggtggaaggctacaccgtgaccgaaattgcccagctgcgaagccgctcagccagtaccatcgccacccaaaagcacaatgcgatgaaaaaactcaacctcaccaaccacagcgaactcattaaatacctgcagatggcgggccggatcggaagttaa

SEQ ID NO: 124065 - DNA, 1065 bp, Enterobacter cloacae
atgatacggttactgacctttctgtttctcgcctgcgtcagcggggcaagctatgccacctgttccgggggcagtatttcctatggcccgccgatcagcgtcgatctgtcggataagctgacgcccgccacgccgacctggaccgggagcttcagcacccagtacagcggctcgtttaactgctcaaccggcaacagcgagttttcttacacgccgatcctctcgaccgacagtaagtacgccaccattctgggcttcagcaatgacaaatacagggtgcgggcggagatcaccagcacgcatcccaacaagacgctgagcgcgagcggtaaccatacggcttctgaactgaacacgccgtttaccgtgcgctttacgctggttgatcagagtggtacgaccctctcgggggacacggcgaccatgagcgatgtcttgttcgtcagcgatatgagcggcatgtcgttctgggagatcattacctggccgatcaatcagctggtgaaaatcgtgcagtggctgtttaacggctttaagtggccatacgataaccgggatatgtttggccagccgatgaccatcaaatatgcaccaaagctgaccacctgctctttcgacaacgcggggctgacggttcatttacctacgttgggtatcccacagttgagtgcctctgcccagccagggctgacgccctttacgctcaatatgagctgtcagaatctggggacaaacgggacgtctgaccgggcgattgagatgttcctctccagcacgcaactgctgtcgaccgacagttccgtactggtcgataccagcagcggtgccgcacagggcgtggggctgcggctgattcagcggaataatccgcaacagccggtcgtcttctcgacctctaccaccagccgcggaaatgccacgctgctgttcaacgtggcggcgggcggggcactgagcaagacgttcaccctgcccatggcggcgtcctattatgtctgggcaccggcgaaggtcagtcagggcaaactcaatacgacggcgacgctgaatattatctacccctga

SEQ ID NO: 124066 - DNA, 693 bp, Enterobacter cloacae
atgcgtaagattattatgctggcatctctgctgctcagcgcgggcaacgcatgggccaatattgtgattaatggcacgcgtgttctttatcctgagaataacaaagaggtcattgttcagttaatcaatacgggtgatgcccctgcgctggtgcaatcctggattgatgacggcgatattaactccaccccggaaacggcaaacgttccttttctgttatcgccaccggtggtgaaggtcagcgaacataatggtcagcaattgcggataaaaaagttgccagcgaatttaccgggcgatcgcgaatcggtatttttcctgaacgtactcgacattccgccaaagccggaaaatatacaaaaccagaataccgttcagctggcgattaaatcacgcatcaaaatgttttatcgcccggcctcgttaaccggcacgctggataacgcaacggggaaactgacgctaattgccagcggtaaacagttccgcatcgttaatgacagccctttccatattacggttgccaatatttcccagggcaaaatcaaattactgcaggaatcaccgatggtcgcgccatttggtcaactcaccgtcgcaacaaaaaacgcggtgaaacgcggccaaacctaccagctgatgtatgtggatgatttgggtgcgtataaaacccgcacgctcaccagccagtga

SEQ ID NO: 124067 - DNA, 801 bp, Enterobacter cloacae
atgaagtatcttattgatctcgcaatgctttatgaagtggactccggtgtgatcatgataaatggagaagaggaatcttccattaagttatcaaatcaggcggcacgtttgttatatgaactcatcattaataatggtaaaaccctcgacagggacgacctgattaagaaagtctgggaagaccggggtttttccggctcctcggtcagtcttaatgttgccataagtgaaattagaaaagcttttcggagtttaggacgtgacccgctactgattaagaccattcgtggaaaaggttttagtctggccgcgcatattgaacatcacactgtcaggccgcccgtggccgctccggaaaaaatggtggcggaaaccgtcgatattgtgacgcagcagcgagacccgcctgaaggtttgcgtcgacgggacagcggctttaccaccctgttcgtgatggcgctggtggcaataatgggtattgccgcgctgctgttctatcaaaatatgcgcgttgccgatcgaccgaaggagtccgatatctatcggctgggcaaaattgaccgctgtacggtttatcttattgataagaacatgtatcagccgctgcaggtctatcttaaccgcgctaaagaggcgatcgcccgtcaacatatcgactgcgaacatcaggctgctgatgcctattattcaaaatttaaaaagtcacagctggaaaatgattttttggccgtctgttatctgcaggatggcgccgatagctataaaaattgtatctcttacagaagcctgacagggagttaa

SEQ ID NO: 124068 - DNA, 486 bp, Enterobacter cloacae
atgtcgaagagacagatgggtatattattgggcgtggtactgctgctttccgttatcgtcattgccgtgctttacccgaaaagaactcaggaagtgggatttggctgtcagtctgatacggtttccaggaaaaactattccactggagagtcgaccgccctgtcgttaaccacgctgtttctttttaatggcagcgatattgtcacggtgatccataaaggggtattcacccgcggcgacaaacgttatttgattgaccgaaactatgtccttaacgttgagaaagttgctggcagtgatatttactatattaaaggaaaaaaactgcagaaatctgatgatgacattgccccggatggaattgtcaatgagctgctaatggacagtatcgacttcttttatgttacccgagttaaaggtcatgcctggctaattaaagggttggtattaccaataatgatgtgcgtggctgtacccacatcctga

SEQ ID NO: 124069 - DNA, 678 bp, Enterobacter cloacae
atgtttagcctcaaacccatcttcttctctttattatttatttcctcctccgcgctggcgattaatgttggcaaagtcaccaccattattcctgccgatgcggattccaccgccaaggaattaaaaaacgaagcggacagcgtgcgcattatttccatcagcgcccagcgtatcagcagcccgatggatgaaggcgtggtgattaatccagagcaaaccgacgagctgctgctgacgcccacgcgcatggtcatgcccgccggaaccagcaatatcgtcaaattttactatcacggtaaggccgacgatcgggagcgctattaccgcattaccttcattgatgaaggggtcagcgaagatctcgacaacggcacgcaaaagaatggcaaagggatgacccgcgccgtggtgagcaccattctggtggtccagccccggaagaagaacgtcgatttcgtctacgtggccgggaagatcaccaataagggcaataccgcgtttcgcgtgaacgcgagcggaacttgcctgaaacccaacccggaatcaccgaccacgccgtgcgtcaaaaacttttacctgatgccgggcacctcccgcgcgatcgacgatatcaacgtaacggacagccattttcatctcggaatttgggacctgaaacagttcattcctgttaagtaa

SEQ ID NO: 124070 - DNA, 1599 bp, Enterobacter cloacae
atgaaaaagatattcgctcttaatctgctgctgataagcgcggcggcgcaggcgcagcagatgccctatttcgcgatcaacaacccggacaacaacgggacgggcaacacggcggcgctgttcagtctgaacagcacctccaccgcgtttttacacggctcgcgggagtggcccaccctgagtgcgaaaaccaacaacgggattgccacctatattccggacaacagttttaacggcccggcaggcagcccgctgaccatcaacttcagcgtcactggctccagcgcctcgccgttctttaagggcaccgcgtgttcgtcaagctgtggtaccacgggctataccgcgacgaccagctattccgacacgtccatggtggtgaaaccgccggtcattgagccgggcaccgcttatggccgctgggtgctgggggatccgttctttgattatctgctcaatgctgcacctggcaacgaggtgacgattacttccacgccgcagatctcctctatcggcaaggtcaccaccaccaacacgctgcataaggtcggcacattgaccatgaccaactcgcgggcgctggatctgggcattgacccgatcagcggcgaggtgaccattgtggatggttcaaccggggcgacgtgtactaaatacacccgcaatacggtgtcgggtgtgctttgcgaactgctggaatacacctttgtcggggaagatatcaccggctacaacccggggctggcgctgacctcgtcccgcgtgaacggcgtgctgcaatcgcacatgaacggggggacggggctggcggcggaaatcaccttcgatgagagcaactggtacagcatctccggcggcatcctgagcgacacgcgcgtgctggcgaataccttcctcgcggcgccgcaaaaaaacggcggcaaggcgtacctgaaaatcttcctcccgaaggcgctgattttgagcgtggcgcaggcgggggatggcaacaacatcggcaatatcgtcagcctgtgcctgacgccgggtaacagctcgctggcggcggatttctgcttccagccggggggcgggctggtgattgaccctatccagccaggccttgcgatcgtgccggataacccggattacacgctcgaccctaacggcctgggcggttccgggaaaggcacgattggcgaggggccgatagagatcccctacaccattacctacagcggcgcgcaaaaagatgccgcgattgcggtcacggtgaaggtcaccgggccgacgcagagtctgaacggcgtggactactgtgcctttagcggtaacggcttcacggtgcctgtccccggtaacgtgctgctgggcaaaagccaaacgctgaaggcgcataactgcaaaggcgaggcgctgtccattcccgcacccgccacccatgcggaagagtgggacaagataagctcaggcgtgacggacatgtggctgtggaaaaccccgctggtattgcagtttgtgatgaacaacccggtatcgaaaaccacctatgacggtaatacgtggtttggtgaagtgacggctcagggtcgaattgatgtcagtgcatcctggaattaa

SEQ ID NO: 124071 - DNA, 654 bp, Enterobacter cloacae
atgactggaaaattcctggctattttcgcaataaattgcttcatttccgcaagcgcaaatgctttaattattgaaaatctaaatattgattttctacctgaaaaagaagttgtttttcagccaataaaaaacgataccagcgtacgacagaattatactgtttcgcttattcaggttgatgtcccaaaagaacacgggaaagagactgaaataaaagatggcgaggtgatgttctcgccaaaacagttaactctggagagcggcgagcgggccgggtttaagttttattataccggcccgcacgacagcaaagaacgctattatcgcgttaaattcaccgagacgccgcttcaggcgcgggttgtgatgagcaaaggccaacgcattcagtcggatgtggtggtttcgcttgaggctattttaattgtccgaccatggacaaggcattttgattatacgtttagtaacggggtggtgagtaataccgggaatacctggtttaaatatgtctcttctcagggatgtagctcacaatataatgactcaaaatatcttccaccgggtcaacggctggaaattgataattacgcgcagcccgcaaggcggatgattatttatggaaataaaatcatcccgcttacgcgctgcccgtaa

SEQ ID NO: 124072 - DNA, 750 bp, Enterobacter cloacae
atgatgtttctgccccgtctctacgcccgactttgcgcccggcaggccggacgtacgctgctcgcaagccggatcacgcaaaactacagccagtttatgcgctgcccggaggctgacgtcccgcccgattttctgcgccagaacgccctggagatgagcggctttcattttgtcgagcagatcttcccgcccgcgctgtggcggcgcaacgtgcgtttcgatctccacgcccgggtggcggcatttacccgcgagcaggatttctattctcagccccgcaccctgctgctgggcatgcgctgggccggatttggactgatcgcggatgcgctgctcgccaccgcgccagacgacgtgcgctttcagtttgttacccgccttcccgcgctgcacaagctgatggcggcacacgaggagcggcgggcaggggcgtttttcgccccgcaccggctggtgaccgtgctgctggtggatgagcgcctcccggatgcgccgctgttcatgacccaggcgggcgaccagaaagcgtggttaacggacgtgtcgacgcgctttttaacgcgctacggatacgtgattcgtacgctactgcccggctgttcgctgcactcggcggaatttgcgctggagagccagacctatgcccctgcggagtaccgtcaggccgccaccgccacgctgaacgcgttgcgtaaaacccccacgctctggagtgcatgggacgatctttcagtgatttatcatggatga

SEQ ID NO: 124073 - DNA, 732 bp, Enterobacter cloacae
atgaaacacattctgactgcatccttattcgccttatctgcctctgtctttgcggggtctgccccacactggacgtatgaaggcaagagtggtccggaaaactggggcgagctcagcgacgagtttgccacctgcaagaccgggaaattccagtcgcccatcgatatccgtaacgcctataacgccacgctgccgccgctggagatgaatttccataccgccgccgaaaagctggtgaacaacggccataccctgcaggtgaccgccagcgacgaagatgaattccgtctggacgatcagatctttaccctgcgccagtaccatttccacaccccgagcgaaaaccggatcaacggcaaatccttcccgctggaagcgcactttgttcatgccagcaaagagggcgacgtcgcagtgcttgccgttatgtttgaggtcggcccggagaacagcgcactcaacccgctgctggcgcgccttccgaaggaaaaggaccacgaaatctcgattgataaacacctcgatcttcgtccgctgttcccggctgacctgcactattatcgcttcagcggctcgctgaccaccccaccgtgcaccgaagggctgcgctggctggtgatgaaaaacaccgtcaccctgtcagaaaagcagctggagatgtttaagcaagcgcttgagcacagcaataaccgtccgcttcagccgctgaatggccgcgtgattgttcagtaa

SEQ ID NO: 124074 - DNA, 1014 bp, Enterobacter cloacae
atgatgcgtttattcttgtttattagcggattactgctctgcgccagcgcacaggcgatggaatggaaatcagatatcaccctctccccgcagccgatgacctacagcggcccggcagattcggtggtgccggggagcattatcggctccacctggagcgcctccgtcagcgtacaacaggtgttctggtgtgggtttgtttttcactgcactaaaagcacgctggagccgagcagcagcgcgatctcaagcgggatgacggtcaccgtcgacggggtgaactacaccatttttgaaaccggcgttccaggcgtaggttatatcatcgggctgaaggattttaatgggacaaaatacattcccctgcaaaccggtgtgacgcagagctatccggcagaaggcaccagtacaagcacccaggatctgggctggtcggcaaaggtcaccttcataaaaaccggtgtcgccctgaaatccggcgtgtatcaaattccgactatcaacgccgcggtgctaaccgcctataacaacgaggtcaaaacggcaaaggtcatcattaaccccaccaccatcaccgtgacggcgagcggctgtacggtgggcaccaaaagcgcgaacgtcgatctgggtacgatcgatatccgcacgttgaccaccgtgggcagtacatcgccttcgggtgcgtttaacgtcagcctgacctgtgacgcgaacgtcgcggtgagcgcggtgatgaccgatcagaccacgccgtcaaacacctcgtcggtggtgacgctgaccggcgactccaccgcgtccggcgtaggggtgcagtttttctataacggcaccggcccgctgatgatggggccggacagctcggcggcgggcacaaccaatcagttctttatccagagcaccactgcggcacaaaccctgtcgctgccgttccaggcgcaatacatccgaaccggcgaactggtccccggctcggcgaacgcgctggcaagcattacgttctcgtaccagtag

SEQ ID NO: 124075 - DNA, 516 bp, Enterobacter cloacae
atgtcagtaacgcttcggacgttcagcatcgctttgctgatcttcacgttcccggttcgcagctatgacgtgctggtttccgtcaccgggaatttgatcggcaacacctgcgttgtcgcggcggactctaaagagcaggacgttccgctgggtaccatcgggattaaacaattcccccgtgcaggcgcggtcagcaatatcaaaacgcccttcacgatcaggcttgaagcgtgcgggccaacctttgccggggtcaaaatccgcttcagcggcacgccggataacgacaacccgcagctggtgaaaattgccgacggcggcgccaccggcgtggcggtgcagatcctcgataaagacggcgggctgatccccctcgacacgcaaaccaccgcccggggcacgccgggcgatgacagcgtagagatgaccttctacgctcggctggccgccacgggcgcgccggtgaatgccggagacgtctccgcttttgccacctggaccacggagtatcaatga

SEQ ID NO: 124076 - DNA, 2523 bp, Enterobacter cloacae
gtgaaaagaaaaatcctgtgtgccacggtgatctccctggtaattcggcaggccatggcggctgaaagcgcgttgcaatttaaccctgcgttcctcaacggtgagagcgccaacagcgccgatctcgcctgggtcaacgccgggagcgcattgccgccgggcgatcacaacctcaacgtgtatatcaataacaactatgcgttcaccggcaatgtcacgttccgtaccgctgaaaatacaggggaagccctgccatgcctcacgcctgaacagatcgcggcgctgggcatcgacagccagcaggcgaaaggcggcgcactgccgctcgcgcagcgctgcatttttctgacggaggcgtttgccgatacccggtttgattttgaccagcagacgctctccctcagcttcaccgtaccgcagagcgcgatgcgcaatttgccgcgcgggtatgtcagcccggaaagctgggaagcgggcattcctgccgcgtggctgaactatgtggtaaacggctcgaacaatgactatcagggcgagacgcgcacgcgcgaccagcagctgtttgcgagcctgaacagcggcatcaatctcggcgcgtggcggctgcgtgatttcaccacgtggaccaaagatactaacgaactcacccacgtgcagacctggctgcagcgggatattcccgccctgaacgcgcaggtttacgccggggaaacgtatacctccgcccaggtgttcgacgccgtgggcctgcgcggcattgccctgaaaaccgatgacaatatgctgcctgccagcctgagcggctatgcgccggaagtgcgcggcatcgcccgcagcaacgccacggtgacggttcgccagaacggtaacatcatttatcaaacctcagtgccgccgggggcgtttgtgctgaaagatctctacccgacctcttccgggggcgatctcgcggtcacaatccaggagaacgacggcagccagacgcagtacacgcttccgtatgccagcgtgccaaacctggtgcgtaacggacagctgaaatatgccctgggagcaggaaaatatcgtccgatgggccatcaggatgcgccctctttcgcgcaaggcgagctgttctacggctggcgttatggcctgacgttttacggtggggcgcagtttgccgatcgctataacggtctggccttcgggattgggcagaacctggggcgctttggcgcgtattccatcgacctgacccacgcccgcagccagctggcggacgaccagcactacaccggcgattccgtgcgcctgcgttacagcaagctgctgaatgatatcggcacgcgggttaattttttctcgctgcgctactcaacgaaagggttttataccctgagcgataccacgtacaagggcatggcgggcggatccccaaagcagattgtggaagacgatggcaccgtcaccacccactacgacacggtatataacctgcgcatgtcgcgtaaggccaaaaaccagctgctgctgtcacagccgatggggcaatacggttcgctgtcgctctcgtgggatcagcaaacctactggaacacgtcgaaaaccacgcaaagtttgcagttcgcgtggaatgccacgtttcgtaacgtgtcgcttggcgtcagcgttcagcgcagctctagcctgtatgacgacaaaaaagataacgtgctggcgatgtcactttcggtgccgctgggcaacccggcgctgtcgacccgcgcccgctttaccaccacccatgcggattctaccggcactacggccagtaccggcgtgagtggttatctgccgggccaggagaacctgttttacagcgtcaaccagcgctatagcgcgcagcagcactacggcggcgacgccacgttgcaatacgaaggcgcaaaaggagactacaacctgggctacagctacacccgcgattcccgcaacctcagctacgggatgagcggcggggcggtgctgcatgaagatggtctgacgctgagccagccgctcggcaacaccaacattctggtgaaagccccgggcgccagcgacgttgccgtgcttaaccacaagggtatcaaaaccgacagccggggctacgcggtgatcccctacgccacgccgtaccgcgtgaaccaggtcgcgctggatgtcacaaccgcaggtaatgacgtggagctggagaatgccatcgtcaacaaaacgccgaccgacggcgcgctggttcgcgccacccttgtcacacgccaggggaaaaaagcgatgtttgtcgtgcgccgcggcaacgacgtgctgcccttcggcacgctgatctcactgaacgatgacaaaaccagcggcatcgtcggcgacggcggcagcctgtatttgtcggggttaaccgagcagggcacgttgagtgccgtatgggggcgcaacagcgaccagcgctgcaccatcaactacgcgttgaacaagcagagctataacgcccgtaccgggctctattcacaggaggtggtatgtcagtaa

SEQ ID NO: 124077 - DNA, 678 bp, Enterobacter cloacae
atgcgcgcaaaagcagggatctgtctggctatttcattatgttcatccgccgcatatgcaggcggcgtagggctgggcgccacgcgaatggtctactccagcactactaaccagtccatgctgcaggtcaggaacacgcatcccgacgccacgttcctgatccagtcatggatggaaaacgaaaaagggcaaaaaaccaacgacttcgttattacgccgccactgttcgtcatgaaaccggccagcgaaagcgcggtgaaaatcatgtttaacggtaaagccctgccagaggatcgcgaaacgctctactggatgacggtgaaagccattccacagcagaccaaaagcggttccggcaattcgctgcagtttgcttcggcaaaccgcatcaaggtgttttatcgcccggagagccttgggcaaggcgcaggggacgcctggaaaagcctgaccggagcctatcgcggcggaaaggtcacgctcagcaacccaacgccgtactacctcaccaccatcaacctgaaaatcgatggcatgccggtacagccggtgatggtgccgccgaaatccagcgtaacgctgggcgaaaccttcagccacgccagcagcgtgagctaccagaccattaacgattacggcgcatggacgcccgcgacacgcgcggcattgtcccaataa

SEQ ID NO: 124078 - DNA, 603 bp, Enterobacter cloacae
atggcgaataaaaccggaaataaacgtcatttaacaaccgcactgttgggaggcgatcacttttcacgtcaggggatcgccgcggtattaaaaaacatggttcctgaaatgcaggtaatagcatcaagcgatgattattcattaatggaaaccgtgtttttaaccacccccgttgatgtcatttttttatccggcacggaaaaatatcacgcggaatttgattgcctgaaatatataaaaaacatcaaatcccgccagcctgacgtccttatttgtatgtattccgcgccagccaattcctggctgtggatacgcggcgatatagatgcctatatctcgctgcaggagccactttatcactggcgagccagcttattaaaaatggtcgatagccgatatcgcccaaaaaagaaacccacggcgttatcgctgacgccgggcgaatggcgagtattgaaggatctgcgaaaaggtctggatatgcgttatatcgccgaaacagagcagctttcttaccgccgcgtcagcgcgttaaaaagctcagcgataagaaaacttgggctcagaaataagacagatttgctggtctttttaaccagttag

SEQ ID NO: 124079 - DNA, 792 bp, Enterobacter cloacae
atgcataagtattatatcattaatggcatcgtcgagtttcatcctgcggccagcacattacgcgacctcaataatcctgaacaggtggtggtattaaactcgcctgccggacgttgtttgctgttattgattgaaagagccgggagtattgtcactcaacaggagtgtatggacattgtctggcaacgtcggggaatgatggtgtcgccgaatacctattaccagaatatttctattctgcgtaaggggctgaaaaaagccgggtttgaaaccgatccaatcgtcacgatcccccgtattggcctgacgctggcaagcgatacgcaaattacgattaaagaggcgcagttgccctcggcagagccagaagcaccggtccagaccgttcaggaagaggctggcgtgccgcagcccgtggctcctgtcactcccgttgctccggttgcgaaacgacgcttctggctggggggcgcactgctggcgctgctgttaatcattagcgtgagcgtcatcagctatagccggccgcatgacaactattttgtggacggttaccgcttcacgacaatgatgggagagtgtcggctctattttgcccgcgatatcgagacgccgcaggacagggaaaaagcgctggcctatgctgcgccatttaaagatgaatgcagcagttatccctggatctatatcagtggatatagcctgttgccgcgtgcttcggtgatccgctgcgaccgggcaatgacggaaccaaaccgttgtatgtcagattactttattcaggatcattaa

SEQ ID NO: 124080 - DNA, 483 bp, Enterobacter cloacae
atggctcgttaccgtcaaacgctgttaacgctctgtttgtgcctgctggtgggggcgttagccgctggttattatctgtggcagcgttattacattcacccttttgcctgtcaggtgaactttattcagcaccatcctgaagagacactgaccctgtggctaaattatacggtggacggtaacaacggcacgctcagcatgaacggtcgggtgaagagcgatccgggtaagacctttaatcgtaaaatattctttcaggtagagcgcaaagataatgtctattacatgcgatctgtccgcaatatcaaattccccgatgatgacgtgagcgacagctggctggagcagtacgaaccgttatttttcatctaccccaacgagagtatttatatgcgaattaagaaacagcagaatgataattatttattcattctggggacgttaccgacctatgtgtgccacccctcaaaaacggagggctga

SEQ ID NO: 124081 - DNA, 888 bp, Enterobacter cloacae
atggaggcgttacgtacggcgtcctgtgtacaaaaaaccagacagaaaattgcgttcaaactcagtctgataagcacccgggcggaattgcccatcaccagcagcgccggtattagcgtgcagcctgaagccgcgcatctaactccgggggaatacgactatattgccgtgattggcggaagtctggaggatctggataaggggctcccggacgaccgggcatttcttgcagaggcgcatcacaacgccattccgctgatcggtattggcaccgggagctttatcctggcggaagaggagatcctcaatgaacggcgcgcctcgatccatccttatcatcatgacgtcttcacgcaacggtttccgcaggtttatgccgagcaggggctggattttatcgatgaaggcgatgtgctgacctgcccgggcgggatctcgacgctgacgctaaccacggcgctgattcgcgcccatgcgggcgacgatattgccgccaccacgtcacggcgtttatcgctctcaccgcacgccgttactaccccacggcctgccaatattgcgctgatcccggactcgcggctgcgcagagcggtcatgatcatcgaacagtacctgacacgcccgcttagcgccgccgggctggcccaggacgtcaagctgagcgagcgtcagcttaatcgcctgtttcacgctgagtttggtaaaacggcacgtgaatttatccgcagcgccagactgcgctatgcctgctggctgttgaagaactcgcagcaaagcgtcacggacattgcgcggcggatgggctttagcgactgcgcccattttatccgtcatttccagcttgagtacggctgtacgcctggggtgtggcgcacgtcgcagagctaa

SEQ ID NO: 124082 - DNA, 1038 bp, Enterobacter cloacae
atggcagatcaaaacgtaatccactctccggctggcgaatttattatgtttgccagcgatgatggaactgttcgcatcacatgtcgctttgaacatgaaacgctctggctgtcgcaagcagccatagcggctctttatcaggtcactcctcaagccattacacagcatattaaagctatttacgaagagggtgagcttgaacaaaaagcaacttgtaaggcttacttacaagttcagcaagaaggtcagcgcaaggttaatcgcaacacacttcactatagcctgcccgtcattctcgccatcggctatcgcgtccgctccacgcgagggacacagttccgccagtgggccacccaaacgctgcaggaatatctggtaaaaggcttcgttatggacgacgagcgcctgaaaaacccgcctgtgggatcatccgccgtacctgactatttcgatgaaatgctggaacgcattcgcgatatacgggccagcgaacgccgggtttatctccgtgtgagggagatttttgcattagccgctgactatcagccgtcactcaaagaaaccacgcgattcttccagaccatccagaataaactgcattttgcctgcaccggccttaccgccgctgagttgattcaccagcgtgcggacgccacgcaaccgtatatggggctgaccagctataaaggcgaagaagtccgtaaaagcgatgtcaccacagcaaaaaattatctgtctcaggatgaagtcagcgaactaaatcgtgtcgttaatatgtggctcgactttgctgaagatcaggccaaacgccgcaagcaggtatttttacgagactggcaaaccaaactcgatcagttcctgcaatttaacgaccgggacgttttagaaggcgcaggcaaaatcagcaaaaaagcggcggatgaaaaggcgtgttcagaatacattgagtatgaaaagaagcagcgcctgctgaaagaagccgagggagagaaagatattgtcggcttattaaaatgggataagcaggctaagcgctaa

SEQ ID NO: 124083 - DNA, 294 bp, Enterobacter cloacae
atgcaaaatttctatcatcttgatcagttgattcatggttacttcaatcaggattatgacctcattaatgatggtgaggataaaattgagggaataattgggctatttaaaaagacggcacctggttggttgttaaaagagttagccgaagagattgatactttcattgagtgttacggagacaagctggatgatgagttcaaaagccgatatggatttgatttttcgcccgagctgtgggagacgacctcttacgacttcctgatgacggtgcgcagacttacccttgcttag

SEQ ID NO: 124084 - DNA, 1671 bp, Enterobacter cloacae
atgtggcgatggataagcggcttcatgctgttgtggtgtggttctgcggcggcggtgtgcccggtgtggtctcaggcgagggcggagaaagagattgcgacgttaagtgcgcaaatcaaacgctgggatgacgcctactggcagcagggtatcagcgaagtgaacgatgaagtgtatgaccagctcaacgggcggttaaaacagtggcagcactgttttgggcatgcatcacctgacgcagcacttcccgccgtgacgggacgtatcaaacaccctgtcgcccatacaggggttcataaggtgagcagtaaagaagagcttggccagtggatgcatgcccggcgcaatctctggatacaacccaaagttgacggtgtagcggtaacgctggtgtatcgggggggaacattggctcaggccattagccgtggcgatgggttaaaaggtgaagactggacatcgcaggtgcgtttaataccgtcggtgccacaacatctttccggtgcgctggcaaacagcgtgttacagggggagcttttttggcagcgtgaaaaccacattcagcagcagatgggcggaatgaatgcacgcgcaaaagtcgcaggtgcgatgatgcgccagcaggataacgcgtttttgagagaggttggggtattcatctgggcctggccagacgggccaaaagagatgaaaaccgcactggcggaactgtctgacgcggggtttaccctgacggcgcgctataccttgcccgtagagcatattgaggccgtcgaaaagcagcgctcagcgtggcacaccgcagcattaccctttgccacggacggcattgtggttcgctcggcggatgaactgccgggtgaaaactggctgcctggagagggcagttgggttgttgcatggaaatatccccctgtcgcgcaggttgctgaagtacgggatattcacttcactgtgggccgtacgggtaaaattgccgttgtggcggcgttggagccggtacggctagatgataaacaggtgcagcgggttagcctcgggtccgttggccgctggcaaaggctggatatcgcgccgggcgaccagatccaggtaagcctggccgggcaggggatcccccgattcgacaaagtcgtctggcgagggaccgaccggcaaaaaccagaacctccagtcccgcagtaccattctctcagctgtttttacgcttcaccggaatgtatggagcagttctttgcccggctgacgtggctcagttctaagcaggggctggatattgccggtttaggcgagtcaggctggcggtcgctctggcaggcacatcgctttgaacatattttctcatggctgttgttaacccaggcgcagctgcaaaccacgccggggttttcggctgcacgcggactggcgctctggcatcagtttaatctggtgcgcgagcgtccttttattcgttggatcatggcgatgggtgttccgctggctcaggcgaccctgaaagccgccggagagctatcatggcagatcatgcaccagcgtagcgctatggactggcagaccttgccggggaccggagaagagaaagcgcggcaaatcgttaactggctccacgcgccggaggtggatgtgctggcaaagtggctggctgaacagcacatcaagggattctga

SEQ ID NO: 124085 - DNA, 1071 bp, Enterobacter cloacae
atggagatattatttcaattagctattttttacattttgcttgctcttgcaagcgattggttttttaaagaaacatcaagtcctttaacgtttagacaattaagaaaatttaactttcaatcattttttattgctcaagctaaaatgttttttagctttctaaaacttagtgaagatagcttgtctcggcaaccggtgttttggcttgggactattttacctcttcttgcagcttctataatcgaatttaagattttgcaggtaaacgaaattgaattatcgattcaaaacattaatgtcatttttgaatttagtaagataccgctttatatatcagcactgacacccacacttggtgtatttatatcgaacattcaccgaacaattcagacaaaaaaacaaatagagacggcagaaaagaaaaatatatcagacggttattacgcacatctgaaatatatcacggattgctttaataatttagctcttgctgagaaatcgaattctaagattaaagttcttcaggaaaatccttttattatacttaggcccaatagtttatacaaagctatttttatagagtcaagtattaatggcggttttaaagacaaagtttctgacaaattcatcaaaaatgtcacaatgaaacttagacgtttcaacaaaaaaattgttttaaatgagcttgaatataccaatatactgaatgaacgaaaaataaaggatattcataaaataattactgagtgtaatactggaattaatgagattttaaattgtttttatgcaacctgtaagaaaagctcattaattgaggcggagtacgtcaatgaaaataatgtaaaaagaatgaatattgatttgacgatgcttgaaataggttggggtaaacgcagaatatatgacttcattatatacctttttgacgtcatagatttaaaagtgtcttctcatcctgagcttaaaaaagaaattaatgagttttttgagcttattaaattaagtagctcagtaagaaaaagttatttagcagctcaagcagctcaagcagctcaaggaaaaaagaaatag

SEQ ID NO: 124086 - DNA, 1164 bp, Enterobacter cloacae
atgtcttcaattaatttgcaacgctacctgttctatccttttgtgctctttatgtttttgagcatgattttttgcggtgtctcacgggtaaatatcttattccatatcacgctggctctgtttatcatcactatgattatcaatagtgagacacgcacccgttttatcaacgatcgtgacttccttcctgcactggggatgaccggtgcctttttgctttacttttcactctcaaatttgtgggcggaatcttcacatcttagctcagccatcagccattccttttatttatttattttcctgtgcctttatcgtcagtgtgagttacaggaaagaaaaaaatacatcattggcgcagcctatctcggtatcgtggcactgacgatattaacgctggtttatgtcaataaagagcacatatttcaaaaccgactatcgcgtgcattcccgttctccccggacaatgtcattgatcttgggggatacatggcgctgggtattttgttgagcgccattctggttcgcgaaacacgtaactactggttctatattcccgttcccctgctactggtctgcttgattctgacccaaagccgtgggcctttcctttcgatgattgtcgccgctatcgttgcgtttctgtgtaaaccgaaatggaatttaaagctattagctggctcgctgatcgtattgatagttattggctccatcctttatttcagcggcttcttcgatatattcatcaaacgcgcggaagaatcttcccgtgcaggctctgtccgtttcggcatctggcagcatgcttttgaagtggcgaagcaaaaaatgattttcggctggggtttcaataaagaacttgaattcattaacggctatggtcaacctgttaccacaacgcatagcctttatttagcgactttcctgaagggcggtattgtggggcttctgctacttttgagtatgattctctttgcgggcagacaatgtcttcgccaccttgctgctaatcacaaagcagagattgcggttattgtctttgcgctgatgttctatgttacccagggcatgttcgtaatcagcaatccgcgagaatactgggtgctattctggcttccacttgccattattttcagcaccccggtaaaaactgcgctgcaaaaataa

SEQ ID NO: 124087 - DNA, 906 bp, Enterobacter cloacae
atgggctctttgaccaagcaactgtatcgatatacgcataagcgtaatatgcgacataatgagaatttatggccatttattaaattatctcgcaatgaaaccggtgaaatatgtgatttaaaatataaggggttggatatcaaactgacctccttatcctcacttcaccaccgattcaatggtgagatcctgattgcggcgacaggcccttcaatcaaacatattgattttgcaaaattgccgacatcggtagcgaccgctggcgtgaatggcgcctggcaccttaatcaccagctcaattttagtctttatttcattgtcgacatgacgtttatcgaccgtcaaacggcgcttttgaaacgattaaccggctgtaaaaatgttattttatttactaccgttatggggatcgtcaaacttataaagcgtttctcctacgaaaacattcagtgccagatttgtattattgaagatatttgttatgagacctacaaaccttcaattaaacaggataatctgcgtcaagctttagcggacacaccagaaattgttttctctgatacgcatccgaatattgcttttagtcgtgatgtgcgacatggagtggtggatgctggcaccgtgatatactgggcgcttcagataatttactttctgggattcaagaaaatttatattgccggtcttgatatgaataatttcaaccagccacgtttctatgaaagcaacgatacgatgttgccatcatttcttgaggataaagtgcataatgttgtgatccccgcgctaacgctggcaagcaccattttcaaaaatgataacatttcagttatcaatctctctcctcaaagcgctatccctgactccgtttttcccagaaaggattttagtgatgtcttcaattaa

SEQ ID NO: 124088 - DNA, 1581 bp, Enterobacter cloacae
atgtccacgcacctttcgctgaagctggttgatacaacttcacggtttacctcttttttaaatctggcgatttctcttttaatacttatggctgtaaatattttacatgcccgatataatttggtaattaacagatcgtttgtttttttattgatgttgttgatgctcaagtgcatagacaataaattaatacgcaatgtactggcgattgtacttctcattccagttgcggcagatatttctctccagctatatgcatggagaaatttcgattctgcgtttagttatgggtttgcaatgagcataatccacaccacaccggatgaagcaagttcaatgctcagcgtgtactggcgtgaatgcattatttttatcacactctctgctttttttatttataccgcaaatacgggtgcatggcccgttgcaccgcgatttcgtcgctggcctgccattgtgcttggtgtgacgttgttggctttctatggtcaggcactacagcaccagctcaggaaaagcagcgtcgaaagtctggcgcagcgcgtggttcaggcgacaccagtcagtacggcaaaagttttcatgcaggctattgaagataacgcggtcattgccaatatcggtaacaacattcctgattacaaactcacgctttcggataccggtattgagaactacgtactggttatcggtgagtctgagcgagcggcgaatatgggcatctatggttatcaacgagatactacgccggagctggaaaagcagaaatcgcagctcttgctgttccgtaatgctgtagcgccagcaccggttacgattatggccgttccgttggccatgaccgctgataaagtgaatattcgcgatccgaaaaaatatggtgataatgttattaatattgccaataaagcaggctatgaaacttattggtttagtcatcagggtaaaggcggggcgcataacaacgtcatcaccgggattgccatgaatacgaaaaagcatgaatggctcgaaggcggttacgatgaagatcttctacctctgttgcagaatgcattaaaagccccgggtaaaaaagtgatcgtcttgcatttatacggcagccatgaaccatcctgtacgcgctttccggcaaaccaggcggtgttacatggtaccaatgaggccgatgactgttatgacaactcggtacggtatacagacacattgatgggcaagatgtttagcatgctggccaactcgccttcttcggttatgtatttttccgatcatggtttgattcgtgatccgcaacgcgctgtcgtttattctcacggaaacgtgaaccctccacgagaggctctgcacatccctgtgtttatctggtatgggcaacaggttgataaagccaggcaatacacaggagactattacaccgtctggtctgctgatgatgtgaacacgcttgctgaattgtggttggggatccatcgtcagggtcaacctgtccagtcggtacactcatggcttgccggttacgataagaatgtctcagtactggataccacaggtaagacctattactggagtaatatacgttag

SEQ ID NO: 124089 - DNA, 1098 bp, Enterobacter cloacae
atgaagaaaataattggttatttaaaggaaattaacaggcagcgaaactataaaactaaagaattaaaaagacggctacagttgctttctttatcgcgacaattacaggataagcgacaagaaaaaattgacgtctccagcgttaaaaaaattcttttcccttttgttgatcttggaattggcgatgcggtatgccatacaggaacctggcgtaatctgaaagatgcaggctatcaacttcaggtcattgttgaagaacgaaatcgcgatctcttcgagaagatgactgacattgatgaagtttatgttgtcgatatcaacaatatcaaaaaaatgaaagatatcgagacagatctggtgattagtcattattcatggatgaagagaaaggaattatttaacacacaacttctggcaaaaattcattataaatatgcgattggatttggtggctggctggataaaccctataacttaatgttaccggtgagtcctgagtttcatattacacatccccaaaaaaaaatacttaacgctttaagtattaagcccgcatctcttagctactccttacctgttttacccgagcatgaagtttttattgatgattttctacaacctcatgctggtaaaaagatcgttgtgcttaatcccttcgcgagcgtagccgaacgcagtctttctctgcctcaactggaaaaattggcgattgatattgtgcagcacccggatacacaagttttcatcattggtgaaggaaaaaaactggcagaccttgccttctatgatgagaaaattactgtctgtcgatttaaatcgctttgggatgctatcacgctcataaaaaaagccgatttagtggtctctgttgatacggccattgttcatatcgcctgtgcgtttgataaaaaaattattgccatctatttttcaatgctgctggatcataataaaaactttgaaggcaatactattttctctccagttggcaagaattcagaacaactgatatttgacaagcgccacaataaaataaacattgatgatatctcatcaaaagtattgaataaacttagtaacgatagttctgcgatctaa

SEQ ID NO: 124090 - DNA, 801 bp, Enterobacter cloacae
atgtttaaactaaccgtatgtcttttgacatacaactctgcccgcttgttacataaggtgttaacgccgttaatgagtattgcagatgagtttattgttgttgattctggtagttcagatgagacattagttatccttcaggaatatgccattacaccaatatttcatccgtatgcaatgcacggtgagcagatgaatattgccatttcccggtcatctaacgactgggtgttatgtatggatagtgacgaaatactcgatgaagacactatacactatatcctggcgttaaagtctggagaggagccgcccgctgattgcggatggagcctgtcacgctactggtatgtcttaggcgagcgcacacgaaccatctatccgatttcttctccagatttcccattaagattgttcaaccgccagcatgtcagatttaacaatcgaccagtggatgataaggcgataggtgcggcgcgggtgacacgtatacctggccatgtccggcacgacacattttattccctgcatgaagtgtttaataagctgaatgtctataccacccgagtcgtaaaatatcagacgctcaggccgtcaatcgcacgtggtgtggtgagtgctattggggctttctttaaatggtacttgtttagcggggcatggcggcaggggaaagttggtgtagttacagggctctatgccaccttgtacagttttttaaaatatttcaaagcctggtatcagtatcaggatgaacgtgagtccgctgcacgggagcacacggactctcaccttataaaatag

SEQ ID NO: 124091 - DNA, 591 bp, Enterobacter cloacae
gtgttcctaatgaaaatcaaaaatgtggcgctggcatttgccacggcggggtttctgttatcttctcaggcggtgctggcaagcagtaattcaggcgttaatactagcctgaatacagacgcaggtacacagagcacaggcggtacaatcaacttcaccggcaagattacccttatttcctgtaacattactacggcatcaaaaaccaaaacggtagatcttggggcgtgggcgaaaagctacttcgatgagcacgtcgaaacaacgccgcgtgagttcaaaatcaacgtcgaaaaatgcccggaaacggttaaatctgtggcggtgctgtttgacgggaataaagatgcggttgatgactcgctgttgcaggttacgccaggcacgggtatggcgacgggcgtcggggtgaagctttataacagcgatcgcagcacggttattaagccgggtacggtttcaaaaaccaccgcaccagatgctcaaggcaatgcagaattaacgttctttgccgcactggacaaagatggaacggaaatcaaagcgggtgatgtcaacgctgtgtccaatttcctgatggtttataactga

SEQ ID NO: 124092 - DNA, 672 bp, Enterobacter cloacae
atgaaacgtttgtcgtatattatgctcactgcattaatggttagctctgcgtcagtttccgcaggcgtagtaatggggggaacacggatcgtatacccgcaaaacagtaaggaggtggcattttctgtatctaatatggaaagtgcagttccctatctgattcagtcgtgggttgagaatgacgctgaagggaaaaaccgcgccgcgccatttatcgtcacgccgccactattcaggcttgatccggatcagaccaatacgcttcgtattcagtataccggcgcgccgctgcccgcagatcgtgaatccgtattttggctcgatattaaggccattgcgccaaagccaaaagagagcagcaatgaattacaaattaacgttaaatcgaaatttaaaattttctaccgccctgaaaacctgaaaggcgatgctgcaaccgcctggcaaaaggtgagattctcaacgacgcagaaagggcttgaggccaccaacccgacgccgtactacgtctctttttatcgcctcagcgtctcggggcacaacattgagcaaccgggcatgatcggcccaggcgaaacccgcgaatggcctgtggtagcctccggcagcgttacctggtcggctattaatgattttggcgctattaccgcgacccggtcgcagcctctttaa

SEQ ID NO: 124093 - DNA, 2061 bp, Enterobacter cloacae
atgccttctcgcctgtttcattatgtgccactttcggtgctgctgctcagcataagccgcacaggatgggccgaggattatttcgatcccgccgcgctggagctttcttctgccgaacagaaaacggcggatctgcactatttctccgaaaagggcgggcagatgcccggcacgtggctcgtaacgattgaggttaacggacgcgaggaacggcatcaggagattaccttcgtcaatgagaaaggcagcctgcagcccgtgtttagcgtgccgctgctggagacgctcggggtgaatgtgggggcgatcccggcgctttcccggttgcaggagggagagaccttcacgcatatcgccgattttatcccggcggcgcggacctcctatgattttaaccagcagcgcctgtttctcagcctgccgcaggcggcgatgacgcaccgcagccgtggctatgtgcccccctcgcagtgggatgacggtattccggcggcatttgttgattacagcctcacgggggggcaggctcatcatcaaaacggcgacacgacgtcaagttatctcagcctgcgtaacggcgtaaacctgggaccgtggcggctgcgtaatacgtcggcctggagctacagcaacgcgggcggcaatcgttttcagtcacaaagcagctggctgagcagggatattcgcagcctgaacagccaactgcggatcggcgatgcctggactgccggcgacctgttcgatagcgtggcgtttcgcggggttcagctctcatccagcgagagtatgttacccgacagccagcgcggcttcgcgccgacaattcgcggcgtcgcgcacagctatgccagggtttctgtttcgcaaaatggctatgtgatttatgaaacctgggtagccgccgggccgtttgttattaacgatctgttccccggcgcgcaaagcggcgatttgcaggtgaccatcacggaaagcgacggctcgaaacgcgtatttacccagccttattctgcagtaccgtttatgcggcgccagggcagcctgaaatacagcctcaacgccggacgctttcactccggctccagcgatgcccggtcgccggactttgttgaaggcgcttttttctacggcttgttctccagtatgacggtatacggcggctttcgtaccgcgaataactaccaggccggcgccattggcgtgggcagagggtttggcgcgttcggctcgctgggcgttgacgatacgctggcaaaaagccgtttatctgacggcaaaagcgtaatcgggcaggcgtggcgcgttcagtatcagaaggattttaataccaccggcaccgccttcaatctggcgagctatcgttatgcttcgcgcaacttttatgagtttagcgagctgaatcagtctgacagccagcagttacggctcaataaccgccgtagccgctcgcaaataaccttctcacagacgctggggcagttcggcagccttagcgtttcggcgtggatgcaggattactggcacacctccgggcaggataaaaccatacaccttggctggtacaccagctggcggggcatttcatggggagcggggtatgactataccgactcagcgcgtgagcaacatcccgatcgcaccgtgtcgtttaatatcaatattccgctcggtaactggctgccggacagctcggtgagttacttcatcaataaaaataaccgtgggatgtccacgcagcaggtgtcactcaacggcagcgcgctggcgaaccgcaacctcaactatagcgttcagcagagtaaagccagcgagggacaagccgacagcaccagtctggcgctgcaatacaacggcggttacggcaacgtaagcctcggttatgatcgcagccgaaacggcgataatgccagtctcggccttgccgggggcgttatcgccacgcagtatggcgtcacgctcagccagccgctgggcgatagcgtcgccctgctgcgcgtgcctggcgcggcgaacgttgagccggagggctacagcggcatccataccgacagtcgcggctaa

SEQ ID NO: 124094 - DNA, 1095 bp, Enterobacter cloacae
atgcgtcactttattcaatgggttttctacctcagtctactttctctttttggcatgctgagttttcatgcgcacgctcaggcctcgccctgccacaccacgcgcaatcagtgggttgtccaggtaccctacgccattggatatgctcctggcacagcggactggacgccggtttccgcgccgatacagtctaccggggcggatttttacagctgcgatggcggaaatgacgcctggcgaagtatcggatttgtcgagatggataatcccgtcggcaccgtggtgggggaagacggtgcgtcgcggcacgtctacaaaacccagattgaaggcatcggctacgcgctcgggttccgcgagcagcagtactgtggtgcggatgccgtgcggtatattgacggcaccagcccggtggacggcaacgagtcacgccgtatctgcgacgcctcacagaatcctgcttttgccagcgcctcaacctataagatgcagttctgggtggtgttttacaaaataccgacgtccagcgccatgcctgatgataacgccaactcccaggagcaaaacgtcggatcgctgatattacaggcgggagaaaacaaagccagcgcgaccagcgtcgcgacaccggtgcagatccgtctcgccagcttcacggtcaggcataccagctgttccgttggttcccgcagcattctggtgccgatgggaaccgtaagccagcgtgaatttcacggcacaggctcccgcgccggtggcggacgcttcagcataccggtgacctgtgaaaataacacgacggtgaagatgggcttcttcggcgataccacgccgggcaacgatcgggcgctggcgttaacgaagcagcaggacagcgccagcggcgtcgggatcgaactgctttatggcgacaataccggtgcggttcaggggcaggtggtgccgtggaacaccccgcaggtgtcggcgcttgggcaggtgggagataaccagacgcagaccttctggtttgatgcgcattatattcagacagaagagaacgtgacggcgggaaaagcggatgcgatggccacgtttaacctgatttacaactga

SEQ ID NO: 124095 - DNA, 456 bp, Enterobacter cloacae
atgaaccggttcatcatggcggattcggcaaaatgcatcggctgtcgcacctgcgaagtggcgtgtgtcgtgtcgcatcaggacgccatctcaacagacgcctttacgccccgcattcgggtagtcaaaggggacgctttcaccacggcggtgggttgccatcagtgtgaagatgccccttgcgcgaatgtctgcccaacgcaggcgattcgccgtggcgagggagcctggcaggttgagcaggcgcggtgtattgggtgtaaacgctgtatggtggcgtgcccgtttggggcgatgcaggtgcagtgggcaggagatacgcttcaggcgctgaaatgcgatttatgcgcacaccgcgcggacggaccggcctgtgtggaagcctgtccgacccacgcgctgagctgtgtcgatcccgccagattacgcaccgagcggttgcgtcatctggcgtag

SEQ ID NO: 124096 - DNA, 306 bp, Enterobacter cloacae
atgatgatgaagcgtgtggggtcactctttctgctggtggtactggccggatgcagtacgcctcaggaagcacctgcgcaaaaagcgcagcagggcaaaatgagcccggaacgttcgttgaatatggaacagctgtgtaaagatcaggcggctcaccgctataacctggatacccagaaaattgatgtcaccggctttgagcgttttcagggcagctatgagcttcggggccatacctctcgtaaagagggctttgtctgctcgtttgatgcggacggccagtttttacatctctccatgcgctaa

SEQ ID NO: 124097 - DNA, 1620 bp, Enterobacter cloacae
atggctcattttgcgcagtccccttcttttattttgcatcaggtcacctgtcagtttgcgacgggcgatattctttttggcccgctgaacctctctctggagacatccctgtgtgcgctcgttggtcgtaatggcagcgggaaaacgcgtctgctgcgcatgctggcggggctggatgaacctgccagtggtcatattgagcgttttgcctcacatgtctatgtggcacaacagcaggatatctccccacagacaacgcttgctgaactgcttggttatgacgcgatttttgcagcgcgtaagcgcatcgatcgcggcgattaccagcctgacgatctggagatgctcgacggctactgggatttagcagaacgcctgaacgaggcgtttctccaggcgaaactgccaccgtttgaccccgataaacctgccgccgaattcagcggtggcgagcggatccgtgccctgttgtgcggtgcatttacggctgaggcggatttcctgttgctggatgaacccaccaaccatctggatcgacaaggccgggcgtggttttacgaccagttgagccgttatcagggcggcgtgctggttgcctctcacgatcgtgagctactggcgcaggtgccacgtattcttgagctgagcgcctccgggctgcgcagctacggcggcaattatgcagactataaacagcaacgggatgccgaacagcaggctgcccgcgcggcgctggagcatgcggcaacggagcgcaaacgcacccgcgcgcgaatgcaaaaagagcatgatgacagccagcggcgttcggcgaagaccatacgcacggtcgataccctgaatatcgcgtcgtttgagcgggtcaaatataaagcggcggcaaaagagcgtatcggctcgtggaaaaaacagcacagcgatcaaaacgatgcgctgaatgccgcggtaaacaaggcgcgggaacgggttgaagaagacgccccgatcatgtttaccctgccaggaagccagattgctgagggaaaacaggtgctggtgctggaggaactgcaattgccgcatgtttcacttccaccaatgaactggcggatggacggcccgatgcgcgtggcgctcagggggcccaatggctgcggtaaatcaacgctgttaaaagtcatcctcggtgaaaccgcaccccgtgcaggcagttgtaaggtatcggtgacgtgtgcgtatctcgatcagcacctgtcgcagctggatctgacgcagtcggtgatggcacatcttaatctgagcaatacgccgctggaagaggggacgctgcgcacccgcctggcacagcttcaactgggggcggataaagtctcactgccgctggcagagttgagcggaggtgagcgtctgaaagccgccctggcctgcgtgttgtggcgcgagcatgccacgcagcttttactgcttgatgaaccgaccaaccatctggacctggcatcggtccaggcgattgaagcggcgctggccggtttccccggagcactgctggtggtgtcccatgatgaaagctttctgcaagggttggcgttaacgcatgaactggtgtgggaggagacgggctggcgttgtgaaggcctttaa

SEQ ID NO: 124098 - DNA, 939 bp, Enterobacter cloacae
atgcacaagacactggatgtgatcactatcggtgaagccatggcgatgtttgtcgctaccgagaccggtgagctgagcacggttgagcactttatcaaacgcgtggcaggcgcagagctgaatgtggcaacggggctggcacgcctcggcctgaaaacaggctgggtcagccgcgtgggtgacgacagctttggtcacttcgttcttgattcgctgaaaaaagaggggattgatgccgcaggcgtaacgctcgatggacgcttcccgaccggctttcagcttaaatctaaagtcgaaaatggaaccgatcccatcgtggaatacttccgcaaagggtcggcggcaagccatctctcggtggaagattatcacgccggctactttgcgagtgcacgccatctgcacctgagcggtgtggcagccgcgttgtcggccagctcgtatgagctgctcgatcatgccgcgaccaccatgaaggctcaggggaaaacgatctctttcgatcctaacctgcgcccggtgttgtggaaaagcgaggcggagatggtcgagaagctgaaccgtctggcattccaggcggactgggttctgccgggggtgaaagaaggcgtgatcctcaccggtgaaaatacgccggaagggattgccgatttttacctgaataaaggggtaaaagcggtggtactgaaaaccggtgctgatggcgcatggtttaaaaccgcggatggtgaacagggcgcggtcgcggccgtgaaggttgagaacgtagtcgataccgtcggcgcgggcgatggctttgctgtcggggtcattagcgccctgctggaaggcaaaccgctgccgcaggccatcgcccgaggcaactggatcggctcgctggccattcaggtgcagggcgacagtgaaggattgccgacgcgcgcgcagcttaacgaataa

SEQ ID NO: 124099 - DNA, 447 bp, Enterobacter cloacae
atgatccgcaaatggcaaagtgagaataccgcgtcgcttttgagcctatggcttgaaagtaccacggaagcgcatccgtttattgaggcgagctactggaaagagaacgaagccatggtgcgggacgtttatctgccgtcggccgaaacctgggtctgggaacaggatggcgaacctcacgggtttatcagcgtgatgcagtctcagtttgtcggcgcactatttgtcgcaccggcgtacatcggcaaaggcatcggacgcgcgctgctgaaccacgttcaacagcgcttcccgcatttaagcctggaggtatatcaaaaaaatgtccgggcggtaaatttctaccatgcacagggctttcgcattgaggacagcgcctggcaggatgacacccaacacccgacgtggatcatgagttggcaggcggatcaaacgccgtcagagtaa

SEQ ID NO: 124100 - DNA, 696 bp, Enterobacter cloacae
atgataaaaaaaatcagtggtcgccatgctgtttctggcctggtggggatttcagcctgtctgctttctggtcactcagcatttgcctggcaacaggaatatatcgtttcagacccgcaaagtaatacggcggaacgctatacatgggatgcggatcaccaaccgcgttatgacgatatcctggcggagcgcatccagtcttcgcaaaatgcgccggggctggctctgaatctgccctctggctcgacctccgcgggggcgatgagcgtcggctggaattttccgctggcgggtcatgtcacgaccggcccggtggtggcatggcgttatgacggcaccacgcccatgatgattaatgagtttggtgatagcgtgacaacccaggcgctgaccgatcccctgtggcatgccagcgtgagtacgctaggctggcgcgtggatacgcaatatggcgaacttcgtccctgggcgcagattagctataaccagcagtatggtgaaaaccagtggaaatcccagttcgggatgccgcaaacgcctgccccggctcaaaatggcaactggatggatgtcaccgtaggcaccgatattcctttcacctcgcacatggcggcgtatgcttccttagcgcagggggaggacagcacgacgggagagcagtttttgtacacgctgggcgtaagtgcaaatttctaa

SEQ ID NO: 124101 - DNA, 1692 bp, Enterobacter cloacae
atgaaatacattaaatcgatggcgcaacaaaagctctgctttttgctggcgttgtacatcggcctttttatgaatggcgcagtttttttccgtcggtttgacggttacgcgcaagatttcaccgtctggaaaggaattgcagcggttgtcgaattggtcgctgcagtactggttaccttctttttattacgtattctgacactgtttggtcgccgcgtgtggcgtgtgctggcaacgttcatcgtgctttgctcagccggtgccagctattacatgacgtttatgaacgtcgtcataggatacggcattattgcttccgtcatgacgacagatatagacctttctaaagaagtcgttgggttgcattttatcctctggctggtagcggtaagtgctttgccgctgttgctcatctggagtaaccgctgccggtatacgcttgtgcaccagatccgcacgccaggtaaacgcctcagaagtgttgcactggtactgctggcaggtctcatggtctgggggccgattcgcttgcttgaagtcaagcagagaagtgatgaacgcacctctggcgtggatatgccaagctacggtggtgtagtcgcaaactcttacctgccttctaactggatctctgctctggggttatatgcatgggcgcaggtggacgaatcttctgataacaaatcgcttatgaacccggcgaagaagtttacttatgtagcgccgaaagatatcgacgatacctatgtcgtctttatcattggcgaaacgacgcgctgggatcatatgggtattctaggttatgaccgtgataccacgcctgaattggctcaggagaaaaacctgattgcctatcgcggctactcctgtgataccgccaccaagctctccttacgctgcatgtttgttcgtgaagggggggcgagcgataatccgcagcgtaccttgaaagaacagaatgtgttttctgtgcttcatcaactcgggtttagcgctgacctctacgctatgcaaagcgagatgtggttctacagcaacaccatggcgaagaacatcgcttaccgtgagcaaattggtgcggagccgcgaaatcgtggcaaggctgtcgatgatatgctgctgatcgatgagatgaaaaactctcttaatggcaacccggatggcaagcatatgatcatcctgcataccaaagggtctcactataactatacccagcgttatcctcgcagctttgcgaaatggacgccggaatgtgttggcgttgacaaagactgtaccaaagagcagttaattaactcttacgacaactcagtgttgtatgtggatcattttatcgattcggtgattgaccaggtacgggataagaaagcgatcgtgttctatgcggctgaccatggtgaatccatcaatgattatgagcatctgcacggtacgccacgcaagatggcaccaccagaacagttccgcgtgccgatgatggtgtggatgtctgataaatatctggaagatccagagaaagccaaaatgtttgctcatctgaaacagcaggcagaaattaaggtaccgcgccgtcacgttgagttgtacgacaccatcatggggtgcctgggttatacctctccggacggggggattaacgaaaataacaactggtgcaaactgcctgaaagcagccagaaagccgcgcagtag

SEQ ID NO: 124102 - DNA, 1014 bp, Enterobacter cloacae
atgagtacgcaacaggccaccacgcaacaaccgctgttgcaggctatcgacctgaaaaaacactacccggtgaagaaggggatttttgcccctgagcgcctggtgaaagcgctggacggcgtctcctttaccctcgaacgcggcaaaacgctggcggtggtcggggagtcgggctgcggcaaatcaaccttaggccgtctgctgacgatgattgaaacgcctaccggcggcgagctctattatcagggacaggatctgctcaagcacgatccgcaggcgcagaagctgcgtcgccagaaaatccagattgtgttccagaacccgtacggttcattgaacccgcgcaagaaagtggggcagattctggaagagccgctgctgattaacagtaatctcagcaaagagcagcgtcgtgaaaaagcgctggcgatgatggcgaaagtcggcctgaaaaccgagcattacgatcgctacccgcatatgttctctggcggtcagcgccagcgtatcgccatcgcccgtggcctgatgctcgatccggatgtcgtgattgccgatgaaccggtctcagcgctcgacgtttccgtgcgcgcacaggtgctgaatctgatgatggatctgcagcaggagctggggctgtcttacgtatttatctcccacgacctgtcggtggtagagcatatcgctgatgaagtgatggtgatgtatctggggcgctgcgtggagaaggggacgaaagatcagatctttaataaccctcgccacccatacacccaggcgctgctctctgcgacaccgcgcctgaacccggacgatcgtcgcgagcgtattaagctgaccggtgaactgccaagtccgctgaatccacctccgggatgtgcattcaacgcccgttgcagtcgccgctttggcccttgcacccaactacagccgcagctgaaagattatcgcggtcagctggtggcctgctttgcggtcgatcaggatgaaaacggcgaaaagccgcaggcgtaa

SEQ ID NO: 124103 - DNA, 723 bp, Enterobacter cloacae
atgattgaaattgaaaatcgccgcctcggcaatcatgaaatattacacgctatccctgcgggaaaaagtgcacacccgctgcctgttgtggttttttatcatggctttacttcatcgaagctggtgtacagctactttgcggtggcgctggcgcaggccggttttcgggtagttatgccggatgcgcccgatcacggtgcacgttttaccggtgatgaacaggtgcgactggggcagttctggcagattttgcacggtagccttaccgaatttgccgggctgcgcgatgcgctttaccaggcggggctggtggcgaatcaacggctggcggtggccggcgcatcgatggggggaatgacggcgctcgggatcatggctcgtcaccctgaggtgacctccgtggcgtgcctgatgggctcgggctattttacgtcattgtcaaaaacgctgtttccaccgcaagacgcgacggagattgatgcgttgctggccgaatgggaagtgacccgggcgttaccgcgtctggccgatcgcccgttgctgttgtggcatggtgacgcggatgatgtggtgccccctggcgaaaccttccgtctccagcaggcactacagcgcgaagggctggacggcaacctgacctgcctgtgggaagcgggggttcgccaccgtatcacgccagcggcgctggacgcgacggtggactttttccgccagcatctttaa

SEQ ID NO: 124104 - DNA, 486 bp, Enterobacter cloacae
atggctattcctgcttatttatggctgaaggatgatggtggtgcgttaataaaaggtgctgttgacgtacaagatagagagtcaagtatagagatcaatgggttttcacataatgtatctattccaacagatccattgacaggaaaaattaccggaacaaggaagcactcaagtatcctctttatgaaagaatttgattgttcatctccctatctgttcaaggcggtttgtaccggccaaacgttaataagcgcagagtttaaatggtatcgtattaacgatgcgggtcaggaagttgagtataacaacatgtttcttgaaaacgtaaaaattgtcggagtttctcctgtcatgcatgatacgaaagatgcttcgaaagagaaacataatcaccttgaatgtgttgagatgcgatatgaaaaaataacatggaaacactgtgatgggaatttgctcttttccgatagctggaacgaaagggcataa

SEQ ID NO: 124105 - DNA, 462 bp, Enterobacter cloacae
atgggaatttgctcttttccgatagctggaacgaaagggcataacatgagacgtccagcaatcgctgttaagcctcaacctccttatgatatttcttcattttctccacctggcgtttcattatcaaacaacatgatgattgcgcggttccatcatggcccgtcagcgctgacctacttatggttttataagcaagtaaaagggcatggcccttgggattataaaaacatattaggtaggcaatacgaaaattttggaaattttcatttcggagcggtaggcattgccgccggaattgaacccgagatattattgcgggcagccggacttgctcaaattcttgcagggaccagcgaccctagttttaaaaattatcaagggccggattcacatggggatgatccaaccgatcagacatggattagagcaggaatagactatgctcaacgctctggtttttaa

SEQ ID NO: 124106 - DNA, 408 bp, Enterobacter cloacae
atgctcaacgctctggtttttaaaaagaagtggctatatataatcgtcgtgattattttgttagggtgtggcatatggcgtgtagttgatgaatttctttaccttgaacaagatattatacgccgagagaaagttggtgagttgtcaactttaattattactgaaagtaatgctggagcaaccactccatatgtataccaatattacctatactctgcgaaaaaatcggatgcggatttttttaatgatctaagaagtggctatgaacctttcctggtgactaccgcctcagatgtgtatgtaaaaattgtagataattctatccatcttaaggttagtggtgacatctttaaatttaataacgttgccggctatagttttatatatatggattcatcaccgttctaa

SEQ ID NO: 124107 - DNA, 1143 bp, Enterobacter cloacae
atgagttttagcttaccgggatttaacttgttttacctgtccagggataaccttgaaccagagaagtatgagttgattactcgcccttctgtcacgtgggattacatcagacaggagtatgaattcgatgacaggtatcgtgatcattttcatgtcgaagggctcaggccacgaccaacctgttcgcgtagctacgcttatcaaaacaatcattcaaatggattcaacacagaaaggcggctgagataccttgtcttcagaggtgaagttgtgacgttaaaccgttacggttcccctggagaacttttctatattgatgaagaaggccagcttatctgcaggaattaccatgtgtttgaaatgaacggggctgaacggatcctgagagaatacaggaattctgtcggatgcaggtactaccgttcaggaaagccccgcccaacttcgtttgctttatctttctcaggcggaatatcagcacccgcttctgagccgacataccagacaattaacagcaaggctgcaggacgtctactggcggctggcggtgtttacaatggtaacgttgagggattcaggaaaacagctgagcagttaggtggagatgctgttaaggggtatgatcaggttctgaatgaacaaacggcgggtactgctattgcggcggcttcaattctgttagcgaaacgacctaatagcgagtcttttggagaagtgtataactacttaggtaaagtaagaggagagacaaaactattaaacaatatagaagtgaaagaaataaattatataaaacgtgatccttctgaaactatgttactgaggaaagaatttaataacacagtgaggaagaaatttcttaatcaattatccagttcttcagatgcagctaacgtcttcgaaccttcagatttgttcaaaatgagtaagggtacagtaccagatggctgggaagttcatcataaactaccattggatgatggtggcacaaatgcctttgataacttatcattgattgaaaaagaaccgtttcataaggtgttaacaaatatgcagagaacatcgacaagaggtatgctaccgggagagagcaaagtaactccatgggttatgcctactggttcgatttatccgcttaaataa

SEQ ID NO: 124108 - DNA, 495 bp, Enterobacter cloacae
atgaaatcaaatgtaacagatctactaatagaattaagaaagatgatgaccgatttagaatacccagtacagcaacctattaacacatcatttcttgatagtctaacaaaaggacatagaaatactgcatcaccaatactggatcaaattggaaatgaaacgtgtcttcttttagctaatcaacctgattatactacattcatcaaaacaatggatggatttgagtataatgggctgacaatgtttagtttatcaattccagaaccaatagttaaaaatttgttcattatgaatgagttttatcgtaataatgattatttagatcccgaattacaagaacgattggttattggggaggatggaatgtcattgtttacttatgatacaaaaatcaatttatttgaaattcgtgacaatgcctctacagagtcgatatatggttcctttgataatttcaatgactttttaagtgaaatagttgactctgtaaaataa

SEQ ID NO: 124109 - DNA, 1020 bp, Enterobacter cloacae
atgaagctcctgaacacggcggtgatcggcgccggagcgattcacggttgccacgtgaatgcgctgcgccagctccccaacgttgcgctgcgcgcgctggcagatatcgacagcgtcaaaggactgaagctggcattgggctatcagtgccgcttctatcaggattaccgggagatgctgctggatgatgccatcgatgtggtccatatctgcacgccgcactttgagcataaaagcatgattctggcggccctcaccgccggaaagcatgttttctgcgaaaaaccggtgggcatgaacagcagcgaactggtggatatcacccgcgccgctgaacaggctacgggtctgctcggcgtgtgttatcagaaccggctcaaccccaccagcctgcgcattcgccaggcgctggacgaaggcgagctgggaaaaatgctcagcatcaaagcggtgctgacgtggtcacgctcgggcgcgtactacacccaaagtccgtggcgtgggcgactggctacggaaggaggcagcctgctgatcaaccaggccattcataccctcgacctgatgcagtggttcgccggcggcgtgacgcgtgtgaaaggcgtggtggatagcggtgaactggcggacgtgacggaaggtgaagacagcgcgatggccacgctgcactttgctaacggcgcgcgcggcctgttttacgccagcaactgcaataccactgattccccgcttctgatggagatccactgcgagcagggctcgctgctgctcaacaacaacacgctctggcgcgtgacgccgggcgagcgcgtcaggctcacctgcgacgactccccggacggttcggtcaaaagctactggggactgggccaccagcaggcgatccgccgtttttatcaggctatcacccaccccggttacacggattacaccgatatccgtgaagccgggaaatctctcacccttgtggaggctatttatcgatcatctcaattaaggcaatggatagaaatcaattaa

SEQ ID NO: 124110 - DNA, 360 bp, Enterobacter cloacae
gtgacgaaaaactattcccgagccaataccggcatcgatttaaatcttattcctgtctttattgaagtggtccgctgcggcagcatggcgaaggcctctgtccggctggagatgtcacgcccggccgtgagcctggcgttgaagcgctttagccagctttttgctgaaccgctatttatccgtaaagggttatatcttgaaccgacggaaaaagcgttaaccttaacccaccagctggaaatattactcggtaatattcacgataatattagcgcgattaattcgtccgagaataataccctggtacagaatgtaccagggtcggggaatattatgcgacactctgcgtcgtcagtttaa

SEQ ID NO: 124111 - DNA, 156 bp, Enterobacter cloacae
atgaaacgccaatccccaattatccgggttttgatgattattgctttgacaataatcatcttaacgctggtgacgaggaaaacactgtgcgagatccgttttcgaaacggctcgcttgaagtgacagcgcggatggagtgtcgctccggccagtag

SEQ ID NO: 124112 - DNA, 1455 bp, Enterobacter cloacae
atgaaattatcaaaaattgcccttgcgatggcgaccctgaccgttgcctcatccgctttagcgcacggatatattgagtctcctgccagccgcgcttatatgtgcaagctcggtcaaaacattgactgtggctccgttcagtatgaaccgcagagcgtggagaaaacctccggcttcccgggaggtgcgatgccgccagacggccagcttgccagcgcggggattgcgaattactcccagctggataaacagagcctgaacgcgtggacgaaaagccccatgaccgccggcccgcatgagtttgtctggtatcacaccgcgccgcacaaaaccaccaactggcgttactacatcaccaaacaaaactgggatccgaataaacccctgacccgcgatcagtttgaattaaccccgttctgtaccgtgaatggaaatggccaggcccccgcgatgcgcaaagccatgacctgtaatgtacctgcgcgaacgggttaccaggtgatttatggcgtctgggaaatagcggatacctcaaacagtttctaccaggccattgacgttgattttggtaacggcggcaatgttaccccggatgacggtgccagcatcgaatcagagtggagcaaggtcctcagcggccagattgcaggaaataacctgaacgtcggcgataaggtcattgcccgcttcttcgatgcgcacggtgaagtgacgtccttgcgcacggagataacgatcgccacggccgcgcagggggatgccaaccagtggtcgtacgatctggcgcagaaaattaacaccgcgcaccaggacattcgcgtcggcgtgaaggatgagggcggcgagattagcccggtccatggcgcgaacagcgtcttcgtcaaagagggcagcgccctgcagtccgttgcgatttcatacgaagagcagaaggcagaggtcaatgaaaccatcgccgtcagcaatttgcactacagcaaaatcgagaacggcaatgcgaccgtcaccttccatgtgaatactcacggtaacgtcgatttcgaagcccacgtcatgaaccatcacggggcggaaaaagggtatctgaagcaggagatgaataacgcgaatcaggacgtcaccctgacgctgaccggcgttgaggcgggtcaccacatgctgaagtactacgccaccaataaagacggcacgctgtttgcgcaggatgtgctgaacctgatgctggaagaggaagccgcggcggacaacagcaccggtcagcatgattacatcttcccggataacatcgcgtcgtacaaagcaggcaccgtggtgctgcagcccaaagacggtaagacctaccagtgtaagcctttcccgtacagcggctactgcgtgcagtggagcaagtatgcgacccagtttgagccgggcaccggttcacactggaaagaggcgtgggtgcttaagcactga

SEQ ID NO: 124113 - DNA, 1194 bp, Enterobacter cloacae
gtggacaatgtaatagagatgcagagtgaaaaggctgctcatgtcggctataagcaaacagaaatagggataattccagaagactgggaggttaatccgttagaaaaatacactatgtttgtaggctcaggcaagacaaatacaaaatccaaaggtactttcccattatttggttccactggccaaatcggtagctgttcaaatccagaatatcacggtgatgcaattctaattgctcgcgttggtgccaatgcaggaaaattaagttttgtatcgggtcaatacggtgtttctgataacacaatcatagtaaaattgaaaccacaaaataatatccatttctttaaatattggcttacatataaaaacctaaattcgttagtttttgggtctggtcaaccacttattactggaactcagcttaaagagcttttattaccagcaccatctataaatgaacaaactgccatcgctaatgtactctccgataccgatgagctgattaccgaatttgagaagctaatcgctaaaaaacaggccatcaaaaccgccaccatgcagcaactgctgactggccttactcgcctaccacaattttctaaacatccagatggagctatcaaaggatataaatctggcgagctagggcatattccagaggattgggaagagcgcgaaataggtaagtttgctccattgcaaagaggttttgacctacctgccagtaaaataaatgaaggattatatccagtagtatattcaaacggcatagctaatactcataatcatttccaagttcaaggcccgggtgtggttacaggtagatctggaacattgggcaaagttcaccacattgagtgcaatttctggcctcataatacatcgctttgggttacaagattcattaactcagatccaaaatttgtctactatatttttaaatatatcggttttgaacgctttgcaagtggttcaggggtaccaacattaaatagaaatgatgcccatagttttaaagtggctattccctcgtcattaaaagaacaaaccgctatcgcaaccatcctttcagatatggatactgaactcacagcgctagaacgcaaactagccaagttcctcgatataaaacaaggaatgatgcaacaactcctgaccggccgtatccgtttaccgttggaacagcagccatga

SEQ ID NO: 124114 - DNA, 4131 bp, Enterobacter cloacae
atggctactattcatttaatagcaggtactgaaggggcaaaacgcaatgttgttctgatacacggtctgggtggccattaccgtaaaacctggactgccggaatggataaacgtcagttctggcctgaatggttacagcaggatgatccggatctgcgaatctgggctgtcgaatatgaaaccagtctcctgacctggttgcaacccgacattggcttgaaggatcgggctcagaacatatttaaattgctacttctgcagaatgacatcactcgcggagaagttattttcatcggtcacagtcagggcggattgctgattaaacaaataatccggcttgcctgtgaccgaaaggatgagcctgaggtcagcgtactgctgaatagtatcaccgccgttgcctttcttggcaccccccatcagggttctgatgtctcgagtttaggtaattccttacccgcaagattgctggcatttgcctgcctcggaggacgaccgtcagccatgacggcctatctttaccgtaacaaccccgatttgcgcgaactcaacgtctggtatcgcaactgggaccgcacctttaccggtaagcgtctggtcctcggcgaaagccgaaaattatacgggcttgctaagattgtcaaaccagacagtgccgacccgggaatccaagcagagatggttatggtcgatgctgatcataacgggatctgcaaacctgattcgaggcagaatgaggtgtatcagcatgtgctgaactttgttaagtcggcgaaaatcaccccacagcacttctggctaatgaagcattttggcagtcaggtcagtggctggcgcggataccagaactggtcaggcgctacgcaagacgttgacggacgttatattattgatgataaggtcaagttcagcgatgcgagtatcgatgctggcaggaaaatcacggctgaagagatgctggactcgatcagacaaaagctcgctgtgcccggtgcggtactccgcttggtcggactgtctggggtcgggaagacccgctttgtacaggccctctttgaaacaaacatcggtcgggcagctctctcccccgacactgttttttataccgatgccggaggccaagcgtttccagctccagatgttctactggaaaaactcaaatccacggcacaggaggcggtggttgtcgtcgacaactgtgccccggccttgcataactcactgaacagtgtgttaaacgccgatcctgggcctgcgcgttcccgtcttctgaccgtggagtatgatgttcgggatgatattcctgataacaccgatgttatctcgatggaggccggctccggagaactgattgaggccttaatatctggctatttccctgacatcagccaggctagtcgaagtaccattgcagaattctcgggagggaatgcccgtgttgcactggcgctagctgccaccatcggccggggagagaatatttccagactgaggagcagcgagctgttcagcaggctctttaatcagcggcacgatactagcccggagttgatgcaagctggttcacttctctcgatagtgtattcattccgctttgctaacggggacggatacagtgaagaactgaccgatctggcctgcattgcccaccttcatcatgacagactttatgcctgcgcgcgtgaaattcaacggcggggactggctcaagttaggggagactggatggccattcttccgcaccccattgcaaacggactcgcacagcgagcactggaagacattccagccacacagatcctatcggttctggcccctgataaaaatgaacgtctgttcagatcgtttacacgtcggctgggttatctttcggattcccaggaagcggcagccatggctggtaagatgctggcttctgacggcatatttgacaggatgctcgcccaaggaaaggaccactacactgaaaccttttccctgattgccaatgtcgccccggtagcccaagagcaaacactggagtttattacacgaacaggtgacctggagccagacggctggttctttacgcgtgacaacctggcatttaccgtgattactcgtctgttacgctccctggcttatgaggctcgctattttgagcagtgtgtctggctgctgtgccgctttgccgaaaatgagaagacaaacaaaaacaatgcctccagtaccgaccttctgtgcaccctgtttcatatccatctgtccggcacccatgcaccgttagcaatgcgtcttaacatcatcgaaacactgcttctcgagcaacgcacgggtctggcattgcgtctgttaaatagtctgctgaaaacatcgcattttacctcatttcagggcttcgactttggggctcaggttcgtgactttggatatcttcctcagacgaggagcgactacgagggctggttctgcagggtactggactttctcatcgctacctataccaggcatccggagctatcccgcgatacgtgcgggatagtgcatagctggttcagatcgttatggaaaatcaaacccgcacagcccctacttgtcacgttgattaaaatgctcgtcggcacgccgggtgatgaggcattgtggacgaccatcaaacaggccattcatttcgacgccgagaaacagaccgaagcagaacgggagactctgcagctgctcgaacaactgacccggccggacaccctagcacagaaactcaacatctttattttttcacaacaacagagtttttatggcctcggggaaaaggatgtggacggggaaaatcacacttccggatatgacgttgctctaagagaggcagccaccctcggcaggaacgttgcatcctgctcgccagaccttagggacagcattatctgccgtgccttgcttgaagacagcgagtatagacaaatgatggaattttcgactgcgctgggcgaagagatttcagaccctcatgatttctgcaagaaacttaacccccaggtagcccggctaggcgcagataatattaaaaatgtgtttctctgtggtgcgttaaggggagtttatcgccaggctcccgcactctgtcatgccgttctggatgcttggatgcacatgcctgagatggagaagcactttgcagtaatacaggcgcacataccgatggatgcaaacagcattgagcgagttatgcgccatcttgaggacccgggaaaagatgtgagtggctaccgaatattaaccagtggcatgcggcatgccatgatccccgacagttcactcatcgaactcctacaactgatgtggtgccatcacaatggcccttccactgcgttcgatatcctttcgatgcgagttcatgatgacggtcgcgacggctatgtctgcagtgagcctctgcttgagctcgcgcgtgggtggatctgcgccatcatctatgggcatccggtaccgaccagagatattcccacagataacatctctgcgatcgcgaaacgtgcatttcaggcgtgttctgctgagcaggctcgcgacctgctggcagccattgtccggtcatcagaacgctatactctgcatgattatgactttaccgaggtactcggcctcatctgtcactaccaaccgcaagttattcttgaccgcttatgtcctgcacccggcgtcattgatgaagccttccatgacgttgtttcacagcggtcttacagcaaagcccagcctctgacggtactgccactggcagtcacaatggcttggtgtcagcaggatcctcggacccgctatccatgcctggcaacactgatttctccgtatgaaaaatccggagagcatctcgtgtggaccgccctggccaacgccctgattgcaggagctccttcacccgaaccggtgctatcgggcttggtgcataatgtctctgcagatgacgacttaggctccagagcagtctgtgcagaggataaattggcattactcgctgagcttcgcaacagcggaaatccggagcttgcgcttgcagcctcgcggataatgggcgaagtgcaagaacggttcgacagagaccaacagaggagcgcgagactaaacagaagggatagtgaacggttcgaatattaa

SEQ ID NO: 124115 - DNA, 456 bp, Enterobacter cloacae
atgcttttgctgaattttggtcatatacgccagtacctgtcggatgttggtgatactgtccggatcgctgtaacgtaccggaatgttaatattagcctcgtaatgctctttaaactcacatcggtgataccagccttccctgttagtgatatcactccagtacaaaccggcttgctgtgcccaggaataggtattctgagttttacttccatccagccagaacacgacatgggcatggtagtgatgatcttctgtccattcgataacccagaagaaaccgactactacttcgagttgcaccatacggttcatcagctttctgacatccctttcgagctgccggtgatcccgcaggaaaaacttagcggtatgatcctggtaaaacagatctgttcggagtgcccgcaggcaggaatagcgctctaccagtttgtcgatatggttgttcaggagtga

SEQ ID NO: 124116 - DNA, 594 bp, Enterobacter cloacae
atgaaagattacaagcctcgttatgaagatctttataaatattatcaggtctggttgaccgattttacgaagctgacggtcagatcgggtatgtgtcaccagaatatctaccaccatcataccctgacggttggcagccttaagtttccgggagaggaagaggttattgctattgttccccagtgcctgcaccggattatttatggcagagcagcaaccccactgactgtaaatgatgacctgagcgtcagtttatttaccctagaacacttgctggctcaccatcccatgctggaggggattttgctgtctgagtgcgtgcggttaaaacagcatcctctggcaaataaactcatcagtttgtttcggcagttcagcggtagcgagctgcgtctgaagctggtctggctatgctggtacgatttgatgctgggtaattgccttgatgactggaccgacaaccttaggttcaaaaaagacaaggagatggatatctggatcaatgaccggcaggctgaaaaccctgcgctgaccagtctgatggacgagtatgtctgctttgcatggcggacgacagcggaaccactgaattag

SEQ ID NO: 124117 - DNA, 207 bp, Enterobacter cloacae
atgactacccgcccttcactgaccgaagaccagttcgttgacatggcatttatcactagtctgctgcaaatgacagataagtggatttataagctcattaaggacggaatatttcccaaaccaatcaagctggggcgaagctcccgatggttaaaaagcgaagtcgaaaactggctacaggagcgaatcgaccagtcccgtaaataa

SEQ ID NO: 124118 - DNA, 879 bp, Enterobacter cloacae
atggttaagttaacgggcaatgaccggagtaggatacagcatctggagaaacgactacgggaggcattagataagaatttttatcatcctcctgccggggcaagtgaaaacgactatcgttcatatcagcaaaaagtcactatttatcttcggagtattaacacacccgaaaataatattaacgcctttctttctgaaacagatcgcctttattcagggatgtttccatctgaaagtgatacagagtggtatcgaaatgatccacgggcgagcttatggctggtttgtgaactctatgaggagctgaagaaaaataaagttgagcataatgccgattttttatcaccggaattattacagccaagccataatgtaagagttgatgccatgcgtagatgtattaatgactggcctttatttttcaccacacaaaatgatttcatcaaagacagaggcattgaatgggctaaccttctggatggtcatgatttattcagagatgtaagatcaagtaaagtagatgttggttcatggctgaaagattatcttaaaaataatacatcaataggtttaaatcgaatttgcggtgagtctccagaagaagtcatggcctggtgttataccagttatttcatttggagaaaaaacaacctgcacttacctgattcagttgagttgtttgacaggaaatttaagggcgcgtgggcaacccagaaaaacagaaacaagaagaaagttgagctaaacctgatagctctgaatgtaaatataactcaaaaatcacgcgatattttagctgattactgcacatgcaaaggtgtatcaagagactcggctattgagcatgcaattaaaacggcactcagtaaatttaaatag

SEQ ID NO: 124119 - DNA, 876 bp, Enterobacter cloacae
atgactaaacctcatggccttcaggcccttgaacaaccgctgacgtcgcttcccgatacgcttcgccagctcattcttgaacgtattaagaacctcacccactacgagccggtgattggcatcatgggcaaaagtggtgccggtaaatcctcgctctgtaatgaactcttccggggcgaggtctcccccgttagcgatgtgaacgcctgcacccgtgatgtactgcgcttccggctgcgcagtggtcgtcacagtctggtgattgttgatttaccgggtgtgggagaaaacgggcaacgagaccatgaataccgcgccctgtaccggcgtatgctgccggagttagacctggtgctgtgggtcatcaaggccgacgaccgggcgctgtcggtggacgagcagttctggcacggtgtgatgcaaccttaccggcagcaggtgctgttcgtgctgaatcaggccgacaaaatcgaaccctgccacgaatgggatactcgtaccagcacaccttcatcacagcaaaaggcaaacctaaaggagaaaaaggatgccattactgcgatgtttcgccccagtcatccggtctgtgtggtgtccgccagcactggatggggcattgaggagatggtggcaaccatgatgcgttgtctgcctgaccgcgccaccagcccggtggtgacacaactgcgcgggagactctgcacagagccggtaaagtcgcaggcccgtgacagtttcggtgaagctgtgagccgggttttcgataccgcagaatcatcttcgttcctgtctgtaccactgaaaacggtgattcgtagcgtgcgtgatgcggtggtgtcggtcgcacgggccgtctgggactggatattcttctga

SEQ ID NO: 124120 - DNA, 717 bp, Enterobacter cloacae
atgacgcttcaggagcggcgacatgaccggcttgccgtcaggttgtcgttgattatcagccgcctggtgtccggtgaaactctgtttattcgcaaactggcaactgaattcggggtgtcagagcgcacgttacgtcgtgactttcgggaacgtctgatgtatctcgacctggattattaccaggggcagtgcagtctgcgctcggatattcacagtacgcggcaggaaatagatattctgacctttgctcaccgcacggggctggccggggttttcccgggctttgaccggcgactggtcagcagcctgctggattgtgatgatcgaccctgtctggtatggcatcaggacagacctcatcccccggcaggaaagctctccttctacaggctggtcagagctatttcgggatgtcagcgcatcaccattctgactgaaggggagcgtcatgaggccgttgcaccttaccggctaatcgctctggacggttactggtatctggtcgctgaacataacaggcaattacgtgtcttccggctggatgagattcatctggtaaggccatcccgggaaacatttattcgcagtgagcttctccatcagttgtcggaggataagcattttatctctgccttacctcatttccgttttattcagcagtcgctgaattcattttctccctcagaaagtcgggggcaatccggacaaactgattag

SEQ ID NO: 124121 - DNA, 261 bp, Enterobacter cloacae
atgggatggtttattgttgttcgctcgaaaccttccagagattgtccggggggaatatgggggtggatcactcccagtaaagacgatgtggcaacagggtataccattacgccaggtaaagaattcaatctcaccatgaaggatatgtgcagtcccgatatgaaagtaacgttccgcccgaataaaaaggaccctcgttatgacgatctcgtcgggatttatgccgggaaagaagcgtttcgctacaaacaaataaaataa

SEQ ID NO: 124122 - DNA, 474 bp, Enterobacter cloacae
atgcgactgccttacgtaatatttacattagctatgctggcttctgtatcaacagcacaggctattcccaatatgtggacgagtggttttgggatgggcgtgaccgaatatatcattaccagcccggagaaggtggtgtttaatctgaattgtactggcaatccggatgcgcagaatattctgcaacacggcgttaatctcaacctgcctgatgggacatcagtaagttctcatgacgacgggacggaaataacggtcgtcatggatagcagccagtatccgttaccttcatccctcggctggaggaatggcgataacgcctgggtatcatttattgacgccctgagccaggctgcgaattttgatgtttacgtcaacgataaaaaagtcggcaccttcagtccgggtctgaagaatacgcaaaaagaactgtctgacctcagtgagtgtcggaccacacactacagcgattaa

SEQ ID NO: 124123 - DNA, 444 bp, Enterobacter cloacae
atggatacacacaaccctgagttcgctgagcaggcagcaattactgcctcggtggtccctgacgagctacgcatcggcttctggccgcagcactttggctccatcccacaatggataacccttgaacctcgcattttcgcctggatggaccggctgtgtgtcgattatcacggcggtatctggcgcttttcgacgctcagtaatggaggtgcttttatggctccagagtcagagagcggtgagaagtgggcattgttcaacagcatgaacggcaatggtgcagagcttaccagtgaagctgcagggatggtcgcctgtctgatggcttacaaccaccatgcctgtcgcaccgagtgtgacgcgatgactgaacactattatctcttacgcgactacgcgctgaaccatccggaatgcagcgccattatgcatctaatcgactga

SEQ ID NO: 124124 - DNA, 1974 bp, Enterobacter cloacae
atgagaaagaactggtctttagaagaagattgcaagctactaacacttgtacgtcagcgcttttcggaattagtcagctatgagcgtctgaacgccacgatgtcttttagccagcaactccacgatgcatttgactcacccgatcgcgatgccgcagcattgctgtatcgactcgaacaggcaaaaatcctgggatttgccagccgtcccggaggcggtcccactaaacagttttttcgctgtttgataaacaatgatttggcgctatacgattacagcctcacctttcccactctaagaaaagcattgcatccagataccgttgcggcagcactaaaccacttcacgattagcaatccacacgaacctctatccaatactattaatgaaattgcaacagccttgcatcttgcacctatgcaggtggaaaaaatcctgctcgaaagaggccaaataaccatcaatagttatcgtaagtgtgagcgtgttgaagagaaaactaacaataataatctgcaagatctcatctccagacaaattcctgacataacgctggtcgaagatattaacgcttgccgtgcccaagtgtctcaactttaccacgtgcatgaacgtgatggcgctgaggtcatcttcagttccgatggcacgggattcggcaaaagttatggcgtaattcaagggtatgtcgaatatctggagtgtttcgccaaaaaccaaaagtcagatgatctgtttcccgaaggtggctttaccaacctgctgttcatgtcgccgcaaaaatcacaaatcgacctagatagcagccagaaagacaaaattctggcctctggcggcgaattcatttgcgttctctctcgtaaggatattgccgatctcgactttatggactgggccacgggcctgaaaaatcgcgaccgctatattcagtggtacgaaggggcgaaaggtagcaaatatattggcagcgcaatgcgttcgctcaattaccatgtctcacaaattgatcgctgtgaagagcagttaaaaaagctgacaacaaacggttctcaggataccaactacgaaagagaaattcttgaagagcagctaaaaaactgtcgtcatagtatccgcaatacgattgagtcagcctgtaaattactatttggaccagatagtgaaaaagcttccattaaagagtacattcgacgcgggctccaggcgcgccaagagcgaatgcaaaatgcggagacagcacgaaaaccaagcaagtctgaactaagcgtacacgaagtctacttcgagcttatcaaacaggtattgcctttcgaagtttgccagtaccgcccgtcggtgctattaatgaccgcaaataagttcgacacatcaacttaccgactggcgcctcgtcagcgaggtgaaggcgtgcgttttgagtccgtaggtttcgacttgctgattggcggcaagctgactcccaaagatccacagatcagcaccgttgcggcagctggccataccgggcaggttgcctatcttcgtgatgaacacttcagacgtaatccagactgcccttttcgccagaaaaatattcgctttacggtaatcattgatgaactacatgaagcctacacccgccttgaagaaacatgccatgtaaagctaatcacacaggaaaataatctggcgcatgttatctctgtcgcgggacgtattcacaatgcggtactcagcctggagcgccggaaaaagcccaaagaagcgcaaacgacctttgagcaagagatggtcaaattcatcaccatccttcgagacctactggcgaaaaagtgcgaattatcacccggtacgacgctgggctcgatcctggatatgtttcgcgaccagttaggagcattcgaagttaacggcgacgccgccgaacgcatcatttccattacccggaatgtgttcagttttaaccccaaaatgtacgttaatgaagggggctga

SEQ ID NO: 124125 - DNA, 2724 bp, Enterobacter cloacae
atgcgcaacagcgaaggcgacataacgcgcaccgagctgtattacgaagtcgaaaatgatgccagcgacaccaatcccaccctgcacgatctgttccaattggtctccgtcatcctcgccgcctgttctgatatcaccaaccgacactttaagcgctgggtaaaaaatggtggccaggataactccagcagccagaatacacctttgggccaatttgttgacgcagccaataatgtagctggagtggtgcgacatatcttcgatcgcaccaccgataaaaacttgttgattgatcatttctatacttatctgcaacccaaaaccgtattcacaatgacgccgatagttgaactcaattacgtgaacagtggagccgagcgtacaattattctggcgttcgagatggatctggtacaagagttgcctgaagccatgctgctacgtttattaacgggcacgcacaataaagtgattggacttagcgccaccagtggttttagccacaccaaaaacggtaacttcaatcgtcacttcctggagcgctatagccgtgaccttggctatcgagtcattgaacgtaaaaaaacagatatcgatacgcttagagcactacgtgcgttgagagccagtatccgcaacgtcgacttcagggtgttcgatgataagcagctaaaattgaccgatatctaccaaaattgtgagatctatcgcaggacgtatgacaactttttcgacgcgctgaagaaaccgctggagtacgacctgaaaaatacctataaacgtcgtcagtaccagcgggaactggaagcgttattgcttgccgcctacgagggtaaaaacagcctgattttgtccctttctgggacatttaagcgggcctttatcagcgcctggcgcactcatcaatcagcctggcgtcagcagtacggtatgcactcccggtgcgatgaaaaaacgaataacgataagaaacatgaccagatcctgacctttaccccattcaaagggcgtcataccgttcatttggtctttttcgattcaccactggctaatgtcgaagatattaggcaagaaacctatctccagaacagcaataccgtactggtatttatgagcagctacaaaagtgcaggcaccggcctcaactactttgttaaataccatgacggcgatattaatgatatcaatgcaccacgtctggatgtcgattttgagcgcttagtgctcatcaactcctcgttttacagcgaagtaaaggacaacagcggcaaccttaatacattacctaactacgttaccgtgcttaaacactacgctgatgacgatattaccgtccacaagctggccgatttcaacgtaaatttcgcccacggcgaaaactatcgcctgttaatggccgaacatgatatgagcttattcaaagtcgtcgtgcaggccgtagggcgagtcgagcgtcgcgacactctattgaaaacagaaatctttttaccccgcgatgtgttccgtaatgttgcattccagttcgccgctctcagtgaagatagcggtaacgaggtagtatcagaaagcatgtccttgcttaaccaccgcctcatggaggagtgcgaaaagctgagtcagagccagtcatttagtgatgcagaacagcggtatgcgtttgaacaggctatcgtagaaaatggtcgccgcatcgatgctgttcataagcgagtcctgaaaaccgactggataaatcaggtacgcgccggcaaccttgaatatctcgaattgtgtaatttattccgcgattctgactcctttaccgatcccttgcgttggctggaaaaacttcaggctaattccttgtatgccgccaatcggcaaatgcaatcaatccaccacgccctgtttattgaccgccatcagggcaaccaaactattttactttgccacaaacgcggcccggatggacttgtccacagagattattccgccctgtcggatttcgctggcggcgcaagagagtaccggcctgagcttaccctctttccgcagtatagaaacgatgtcgattttacccccggcaacctggtcggcgagttgattcgtgaatgtgacaacatccaggaaacggcattcaaaaaatgggtacccaaccccaggctagttccgttgctcaaaggcaatgtcggtgaatatctcttcgataaagtgctaaaaagttatggcgttaccccactttctgatcaacaggtgtttgaacgccttgaaccgctagtatatgagttttttgaccgctttattgaagtggggaacgacctgctctgcatcgacgttaaacgctgggcgacgcagttggacgatttaacgcgggcagaagaaacgcttgagaaaagcaataacaagattcgtcagatccgtaatatcaccagccaaaaggaagatacagaggggcagaaacagcttcagactgtgctggcaggccgttatgaacgcattcgatttgtctatctgaacgtcgcctacagccagaaccccaataatctgatgtggcaagataatgtggatcacacgatccactaccttaacctgttgcaaaccgactaccagtactatcagcccaaaaatcgagagagcggacgagctcaggaaaactcgaaactgagcatgacattggacattaacccaatgttactaaccctgctgggtgtagaaaagttgccgactaaaggaaaagtatcatga

SEQ ID NO: 124126 - DNA, 2232 bp, Enterobacter cloacae
atgatccctaatctgaatgaactgacagatactccgattgcccgaaccaatttgatcaagcttgaagaagatcagctgacgaccatccagcgtctattggcccctgtatctaatatctatacgatagactttatggttcagcgcttcactaaagagcgaaaagaaaaatccgctgattactatgcgcgaattcatcaggaggtaaaatcttgcgtgcggcagaagcttgggctggaggccgggcaggaggtaaaatatgaactgcattgcttaccaaattaccatcacgtctcttttttcctggcgcctgcaaccaacccgaacagtcaggctcataggacgttggcagaacgtattgaaacgctttgtcagcaactcaccgctgaaaatcatgacctatctcgcctgattcagggattatttagcctgcatttgaaaatggtaatgctggaaaaagccagtgagcgcttttcggtatcgccgacttacttcaactcaacgctttaccttaacgctcgtctgagtcagcccgtcacacaaaaaaaaggcaccggggtgatggaagcctttgagctcgacatttatgcctcagaatataatgaactcgcttttaccctgcacaaacgaaaattcctggtcgaaccggcggatgagatgcacctatccctggacgataccagcgtgtggtttagcatcgataatcgtcggcttaaagctcggcgcaaacttgatgcccgtgatagcaaactggatttttttcgtgagcgcagcggttatggcgaatgccaggcctatacctataacgtggtcatgaatgctgcctgcgagcggctcagtgaactagagatcccccatcaacctatcccatttcaggctacacacgaggtcaatcagtttgctaccgacctcgatcaacagctggctaatacgctgttggtggttaataacggcgtcgaattcagcgccacgcaagaagcttatttctttgacgcattagccaaccagttccccggttataaactctggccgctggcatcgcttaaacattctcagcaaaccagatttgctgggctgcctgccaatacatctattcttgtactcaatgcggtagatgaagaacgaagcaacagcatccggcagcaagagaatgaatctgttgagtacaatgatttctatgcagcctttgccgacgtccgaaaacaacctgaactcaactgggatatttatacccagcttaagttagatcgtttgcaagggtggttaaatcaacaaccgctgcctgtggttttacagggaatgaacattgatcgaaagttgttggattcgattgattttattaatgaacaattggtaagcaatcctgcgcaatacgaaatcgatcttacgaaacctcacagtcgtctcaagtcagcagttaccttattaaaaagtaaggttcgccgaacaaaaaccgagctatggttcaaagagagcttactcaatcaacatagcataccactgccagaattggcggatgggcactataccgcctatgcagtacgcaaaacaaaaagctatctctccctgcttggatatgttgaactaaaaatagagcgcggccaacttagggtggttgataccgggatcgctgaaggtgaattcgagtatctatctgttgaacatccgtctctgggacgacttaagaaattattcgataaaagcttctatctctacgaccacacagcagatgtgctgcttaccacctataacagctcccgcgtgccgcgcctgattggcccggcgcaatttaatatcgtcgattcatatgcttatcaggaacaagaaaaagcgctggcggagcgtaaaggtgataaatttaacggctatactatcacccgctcagcaaaattggagcaaaacgtactgccctatctgatatcaccgggccgctcgaaatacgactcgttgaccaaaactcaaaagatgaagcatcaccatatttacctgcaaccgcatgataaaggagtgtttgttctggtaagcgatgctcagcctacaaaccctactattgcacggcctaagctggtagaaaatctgctgatatgggatgctcaaggtaaggccgtcgatgtgtttaaccacccgttaactggtgcttacctcaatagcttcaccctagatatgctcaggagcggcgaaagtagtaagagttcgatttttgccaagctttcccgattgatggttgagaactaa

SEQ ID NO: 124127 - DNA, 2826 bp, Enterobacter cloacae
gtggttattcgtgatgcagagtggcgcattcgccgggcggatgacagcggagatggtggttacctgctgacctgtgatggcatttcggagctggtacgcggtaaagaagggctgtttctgacaaagctggagcaaaaagtcgagattcttgatccagcaaaaacaaatttggtggaagatgagtcagccaattaccaggcggctcaattgtacatagagagccagctacgccaacgcgtcccgactgacagcaaagtccattttggacatcaggctgcgatggattccatgccctttcagctcgatcccacgcgcatggcactggcgcagccgcgtcagcggatattaattgctgatgcggtagggctgggtaaaacgctggaagccggtatcctggtttcagagctgattcgccgtggacgtggcaaacgcattctggtgctggcggttaaatccatgcttacgcaattccagaaagaattctggagccgttttgctattccgttgacgcggcttgactccgctggtctacaaaaggtgcgtaaccgcatcccaaccaaccacaatccgttccattatttcgataagaccattatctccatcgataccctgaaacaggacatcgagtatcgccatcacctggaaaacgcctggtgggatattattgttatcgatgaagcgcataatgtcgctgaacgtgggaccagctctttgcgcagcaaactggcaaaattgctcgccgggcgcagcgatacgctgattatgctttcagctacgccgcatgacggtaaggctgaaagttttgccagcctgatgaacatgctcgacccgacggccattgccaatcctaaagagtatgaatacgccgattttgccgacaaaaatctggttgtgcgtcgctttaaaaaagacgtaaaagatcagatggctggcgagtttccggaacgcaatattgtcaaattgatgcgcccggcaaccggagctgaagaagaagcctaccgccgattggttgagagtcagttacgtgacgatgatgatgaagactcgcggtcaaataaaggccgcctgttcaaaattacgctcgaaaaagcgttgttctccagtccaatggcatgtgccagcgtggtggctaaccgcctgaagcggctggagaaccgcaaagaaataaacagtcagagccagattaacgaattagaatcattgctgctggcgctcactaatattgatgccagtcagttcagcaagtatcagttattgctggagaccatccgtaacgatcttcgctggaaagcgaataacacggaagatcgtttggtgatctttaccgagagtatcaaaacgcttgagttccttgagcagcaactgcgttccgatctcaagctgaaagacgatcaaattgccacgttgcgaggcgatcagggcgatacagttctcatggaaaccgtcgaagcgtttggcaaatcccagtctccgctgcgcctgctcatctgctcggatgtcgcgtctgaaggtatcaacctgcaccacctcagccataaaatgattcacttcgatattccatggtcgctgatggtattccagcagcgtaacggacgtattgaccgctatgggcaaaaacaccagccacagatccgttacttgctgactgaagccagtgaaccgcagatcaacggtgatatgcgcgtgctggaagtgctgatcaataaagacgaacaggcgcagaagaatatcggcgacagttccgaatttaccggcaaatttacccaggaagaggaagaagagcaggttgctgaattcatgatgcaggacgatggcgccagcctgttcgacgacctgttgaatagcaatgtcactgaaaattctgaccacgacctgtttagagaaatctgtagcgcagtgtccagcgatgcttcgaccgtgaccgaaagcgacattagtctgtttgctaatgagcaggcatactgcgaaaaagcgctaggctatctcaaggcctgcggccagactgtgcaatacgataccttgcctgataacaccttatcgctggtcgcaccggaggacttgcgccgtcgctttaaccagttaccgccggaaattgcgccggaaaactggcagctttatttaagtcaggacaaaacggttatcacggaggccatttcgcgtgcgcgcggtgagcaacatgcctggcccgatgtacagtatctctggcaaatcaatccggttgtgcagtggttggacgacaaaatccagtccgcctttggtcgccaccaggctccggtgatgcgcctgtcgcacctgtttgagcctgatgaagatcacttcatcctttccgggcttttcccgaaccgtaagtcgcacccgatggtgaacccgtggctggtggtgagctttaaccgcgaaacgttaagcggtagcctgccttttgctgagttcctgaaacgacatccgcaactgagtagcaagctgactaacagtggcggcaaagatcgtaaccatcaacgccagcaggatctgctggaagcggcaatcgcccatgcgcgggatgtgtttgttcacgatcgaaatgcttttgaagagcatatcaatcagcagctcaatgagcatctacataagctagacgttctgcgtgggcgtcagctgaatcaactggagttggattttgccgataataaacaacagctttcagtgaagcagagccgcaaagaacaacgtcagcgcgaaatcgaacacaattttgacagctatttccaatggattgaggacaccatgaccaccgaaaaagagccctacatccaagttattgctgtaatcaccggagcggagggctaa

SEQ ID NO: 124128 - DNA, 4893 bp, Enterobacter cloacae
atggcgctggtcggtatttataacgaaaacgaattttactccaaccattatctgggcgaagtctttaccagcgatatccgcgatgtgttggaatcttggattaaacaggagcgtgttgcgctcgaacaggataaagacccggagcaaggatatcgtgccccgtgggaacagcttaagagtttggcgacaggttttttccgtaaacttactgaacatgagaaacagcgccagatcccacagcgtcttgccgatcagcgcagtcgctggcagccgctgttaaaggcattgggttatgaactcaatccgcatattcagatgctggatgacgatacgcctttgccggtactggctcgttacaacagcaccgacggcagtccgtggctgtggattgttgaagcgcatgatcaggaagaaggaacgctggatccgctggcgctgtcgttactgaccgcgcagttcccggcagataccgataaacataagcgcgacagcctgcgtaaaaaagccaacggtgaatatcgcagctggcaggatctgctctccacggttgtcttcacacaaaatgaaccgccgcgttttgtgctgctgcttggcaaccgccagctgctattgctggatcgtactaagtgggcgcaaaaccgcctgctgcgctttgattttgaagaaattttaagccgtcgtgaaacggatacgttgaaagccacgtcggtattgctacacaaagattcgctgttgccaggcagcggtgcgccgtacctcgattcgctggatgacaattcgcacaagcatgcgtttggcgtgtcggaagatctgaaatatgccctgcgtgagagcattgagctgttgggcaatgaagcgatgcgttatctcatcaacaacgagctggcttattataccgggaaacgtgctattaacccggatgagttgagccgcgaatgcctgcggtatatgtatcgtctgttgttcctgttctatatcgaagcgcgcccggagctgggctatgcgccgatgaccgccaaaacctatctgcagggctacagcctggaaacgctgcgcgatctggagatgatcccgctgaccagcgaagaagatcgcaacgggcgctacttccacgatagcctgaatatgctattcaaactggtgcgtgacggctacaacggcggcgtgaaaatgcagagcgatctggagagcggcgacaggatcactattcacagccatcaattcagcgtaccacgtatggaaagccatctgtttgaagcgaataacacccgtattcttaaccgtgtggtgttccgcaacgaaaccctgcaacaaattattcaggcgatgtcattaagccgcccgggtaaaggacgttttaatcgccgggggcgtatctcctatcgccaattgggtatcaaccagttaggtgcagtgtatgaagcgctgctctcctaccgcggattcttcgccagtgatgacctctacgaggtgaaaaaagccggagaagagtttaacgagctggagacgggctatttcgtcagcaaagacgagatcggcaaataccacgacgacgagaaggtctacgaaaaagacggtagccttcgtattcatcgtaaaggaagttttatctaccgcatggccggacgcgaccgcgaaaaatccgcctcttactacaccccggaagtgttgacccgctcgttagtcaagtatgccctgaaagagctgtttaaagagcaaattgatccgattaccgatccgcatgccaaagccgatgccatcttaaatctcaccgtatgcgaaccggcgatgggcagcgcagcgttccttaacgaagccatcaaccagctggcggaagcgtatctgttccacaaacagcaggcggaaggtcgccgcattcctcaggatcgctacacccaggagctgcaacgggtgaaaatgtacattgccgacaacaacgtattcggcgtggacttgaacccggtggcggtagaactggcggaagtgtcgctgtggctgaatgccatcagcggcgatgcatttgtaccgtggtttggctaccagctgcactgcggcaactcgctggttggcgcgcgccgtcagatgttcaacaagagcgagctgacctacaaaaaagcgaaagatccgagctggctcaacagcgaaccggttgaactggcgatgaatacgccgcgcgaagaaaagcagattttccacttcctgctgccggacagcggcatggccaattacagcgacaaaaccgtcaagcagcgctatccggatgacttcaaagcgatggacagctggcgcaaagagtttactaaaagctttgccccagatgagattgtcgatgtgcagcgcatcagcggcaaagtggaagcgctctggaacacgttccgacagcagttgaaagccgagcgccagaaaactgctgataactatccagtatggcctgcggaaaatacggctcaagtccgctcttctttaagcagcaaagatgaaaccctcagcggccgcctcgaagataacagcacctatcagaaactgcgctgggtgatggactactggtgcgcgctgtggttctggccaatcgacaaagcggatgaactgccggatcgcggtatgtggctgatggagatggagactctactcgatggtattgtcatcacggaaagagttactgaaaccgcagaacaggccaccggtgagctgtttgcctacgagggcatggtgcgtgaagagtcttcgctattttccggcgcaggacgcctgaaaaccgatgtgctgttccgccatttaccacgtctggcgattgttgatgcgctgaagaagcagcaccgtttcttccattgggatctggaattctgcgatctgttcgccgagcgcggcggctttgacctgatgctcggaaacccgccgtggttgaaagtggaatggcaggaagcaggcgtactgggcgactacgagccggagtttgtactgcgtaagctgagcgcttctaaactggcgacgttgcgtattgatacctttaacgctattccggcgctggaagcggcctggcgcagcgagtatgaaggctgtgaagggatgcaaaacttcctcaatgcgcagcagaattaccctgtactacgcggtgtgcagactaacctgtataaatgcttcctgccgcaggcatggcgtttaggatcgcagaatggcgtggcaggtttcctgcatccggaagggatttatgacgatccgaaaggcgggcaattgcgtgcgtcggtgtatccgagactgagggcgcattttcagtttcagaatcagcatatgcttttcccaattggtcacagggttaaattcagcattaatatttatacggcttcatcgaatcaaactgtcggttttatcaatattgctaaccttttctcagccaaaacgatcgagctttgccttgctcatgatggttccggtgaagttggtggcattaaggatgatgaaacaggttcatggaatgaatctggacaccaaagccgtatattaactgtcggaatggagcagcttgctctatttgccagtctttatgatgaagaaggaacgccagctcttgaggctcgacttcctacaattcatgctgaacagcttgtttctgtacttgaaaaatttgcagatcagcccaaacggttaggggatttgcagggacaatatctgtctcttgaaatgtggcatgaaacaaatcaacaaagtgatggcaccattgagcggcatacccaattcccggaggatgctgcacaatggattctatctgggccacatttctatgtcggaacgccgctttataaaacacctcgagagatttgcaccgagaaaggacattatgactgcctagatctgttaacactacccgaagactatctgccacgtactaattatattccagcatgtgattcgcaggaatatgctaaacgtatccctcgtgtcacgtggactgaactgggtgaaaatgaacccagaaaggtgacaaattactatcgtctatttattcgtaaaatgattagccagtcaggagaaagatctttaatttctactttagttccaccagatgtggctcatattcatgggtgcatttcctttaccttaaaagatcatcaggaccttttgagagcttcaatcatttgctcatctttaaccggtgatttctatcttaaatctacaggcgtaggaaactttggattatctcagttcaatagcctaccctatctatctagcagtgctgtttctattattagtggacgttatatggccttagtgagtcttgtaacttcttatcaaggcctttggaaatattgcttcactccagactttaacgttcagaaatggagccgtaatttcccgcaacttccacaagatttctttgctaatctgaccccagagtggcagcgcaactgcgccttacgctccgactacagtcgccgtcaggcgctggtggaaatcgacgtgctagtggcgcagacgttgggactaactctcgaagaactgctcaccatctatcgcgttcagttcccggtaatgcgacaaaatgaagccgatacctggtacgatcaaaacggccgcattatctttaccccaagtaaaggcctggtgggcgttggcctcccgcgcaccgcgcgtagagcggacctgaaaaacggctttgtctttgatgtcgacagccctgaatggaccggcggtgactgcaccgatcaagccatcggctgggatgatgtcaagcatctgcaaaccggtaccgtcagcatcacttttgatgattatacccgcagcgacgaaggcgagcgccgaaccgtcgtctggcaggcaccttttatcaaacctgaccgtgaagatgattacaaagtggcctgggcattctttgcacaagataaggagagcgcctaa

SEQ ID NO: 124129 - DNA, 6342 bp, Enterobacter cloacae
atgctgccttctgttgttagtcggcaggttgccgacagcgttgcttcctttttacgggcagcttttccgcttaacagcccgttgtttaacggtgaagaaaacaataacgtctcgatgctggagcaatttttggcccagccggaaactctgctgaaagggccgtatctttccactcagctgccgtttcgtaaaagtgacttaccgctgaacttcttccctaacctgacgctgccgttcccaccgcatgcgcatcaggggcaggcgttccagcgcctgggtatcgaagtgcctcagccgacgctggtggcgaccgggacgggttccggtaaaacggaatgttttatgttcccgctgcttaaccattgtgctggggtatcagaggccggtgttaaagcgatcatcatttatccaatgaacgccctggcaaccgatcaggccagccgtttcgccaaaaccatcgccagcgatccgcagctgcatggcaaagtgaccgtcggcctgtttgttggcgacagtgaaattgagcccagcaaaaagatgtctgtggataaagtcatcacctgcaaacataccctgcgtgagaacccgccggatatcctgctaaccaactataagatgctggattacctgctgatgcgccccggcgatcagaagctctggcgctataaccagccagggtcactgcgttatctggtggtggatgaactgcatacgtttgatggtgcgcaggggtcagatttggcctgtctggtgcgccgcttaaagcatcatatcggtgtggatgacaagcgttttgcctgtgtgggaacgtcggctaccgtaggtgacgagctgggacaactactcgattatgcgaaaacgatctttgatcagccatttggtgatgacgcggttattcgcgaagatcgctacacggcggcagagtatctgcaaggttataccattgagtacagtcagtatccgggccaggatgtcagagttgcgctggatccgcaaacgtacgccagcccggtagactatctgaacggacaaattccgctgtggttcccggatagttcactgcaattacctgccgatctggacagcgatctcggacgtgaaaagcgtattgagttgggctcattgttacgtcgccacagcatcctgcacgtactccttgaggatttgcagggggggattttgtcggaacagcagtgcctggaaaatctccaggtgatgctggcggaaagcgccgggcatgcaacccgcgtgctgcaaagcattctggcactaattgcccaggcacgcctggaggttccagaaaaacaggaagatcgggaaaagcgcctacaggcgaataaagcacgtcccgttctgccttttgtgcaactacgttctcagctgtggttgcgcgagatgcgccgcctggttgccagcgtgtcaaaaatacctgagcttgtttttgctgatgatgtcgcggtggaagatcgcgaacattaccttcccgttattcactgtcgtgactgccatgcaaccggttggctgagccttcgccacggacaaggtgtacagcttgaaacaggtctggacgaaatctatcgcctttactttgggaaaagtcgttctgttgtgctggccttcccggataataacgataaacctatcagcggtgttcaccagaaactgtgtccttcctgcctgaagctcaataagcaaactaacgtacagtgtggacattgcgggcatacggcactgctgcaagtacttatcccggacatgctgagagagcgcaaggatgaggtggagtttgccaatgaatgcccgtactgtaacagtaaaaaagggctttcaattcttgggtcacgggcagctagcctgtcggcggtaataattcatcagctttatggcagccagttcaacgagcataaaaagctgattacgttttctgactcggtacaggatgccgcacaccgcgccagcttctttaccgcccgaacctggccgttaatggtacgtggacaaatcgccagcgtgttgggtgaaaaagagattttaccgttggatgcctttgcagcacgcgtctgccagcaaacgcgtgaacgttcaccggatgatgctcattttgttgcgaacttcattgcgcccaacatgcagtggttggatcagtaccaggcattggaaaaagagggcaagttagctgagaactcctcattgccagaactggtatccttgcgactcgactgggaggtatacagcgaatttaccctacgcgtgcgaattggccgtactctggaagccacgggatacgctgctgctggagttgatattgcgcgtttcaacccagcgataacggcgcttcatcaacagcttgtcgaagagctgggtgatgaaatggctggggtcagcgttgagcaagtggcacatttggcactcggggtactttggcagcaacgacaggcgggggctattatccatccggcgtttgaaagttatcgacaggacgcggaaacgtataaaatgaccaaggttgatcgcactcgattttatatgcctgcaattggcccagaaaccagaaatcctgcgtatgctacttttgaaaaaatcaaaggcttccatcgcctgattggcgcgaaatccaaccccagctggtatcagcattggatcaaccgaacgctcagcaacggcaataatctgtttatcagcagcctggccgagacggttttacgacgtctgtttgcggcactgaaaatggctgggttggtgaaagattttgatacaaaaggcaaagaagcatgggggctggtaccttcagcgctggtagtgagccgagatgttgttcagctaaactgctcttgctgtcgtgaggttgttcgggcgccggctgatcaggggtggcactggcgaaacgctccatgcctttctctgcgctgcgaaggccgctatcaggaagttgaaaatacagtgacctggcactgggataatatggacatcgctcgtgttcaggggggagagcataccggattactgagccgtgaagatcgtgaggctacggaacaatcgttctaccgcggtaatcagccatggaatatcaacctgctttcggcaacaccgacgctggagatgggtatcgatgtgggtgacctttctacggtattactctgttctgttccacccgcgcaggctaattacttacagcgtattggtcgtgccgggcgtaaagacggcaatgcgcttaacattacggtggctgaggggaacccgcacgatcagttcttctttgaagaacctctggaaatgatgcaagggcaggtacaggctccaggtgtgttcctgaatgcaacggctattttggagcgtcagttggccgcattctgcatggacaactgggtgaaaaccggcgttccggcatctgctatcagcaaaaacgtgaagcagatgctggacgatctggagtttggacacaagtctgggttcccttataacttcctgcgttatgttgatcagcatcatgtgtatattgctcagcagttctcgtctatcttccctgaccttacggaagactcacgtctacagctactatcatatttgcaaggggcacccgggcagcgttctctggttcaacgtatcgaacaagcattaaaactactgttggaggatcgcaaatcgttgcgttcccggattgataagctcaagcgtagtatcgataagctggagagcgatccgcacgatcaaaactttgacagcgatatgcgcgagttggcttcggaacgtcaggcgctgatgacgctggtgaaccagatcaataacaagcagacgcttaatttcctcaccgatgaaggattacttcccaactatgccttcccggaggccggtattacgctgcgctctgtgctgtggcggcgtaaagacggtggggaaacgcgtgagtatcagaatacgacatacgaatacgaacgtccggcttcaacggcgctggctgagcttgccccgttgaataacttctatgcgggtgggcacaaagttgaaatcgaacagattgatctgaaagtgtctgagcctgaaaactggcgtatttgcagccactgtaactacagcgagaatatcgatcagaccggcgatcagcataaatactgtccaaaatgcggcacaccaggttgggctgatgccgggcaaaaaacgacattactgaagcttcgtcaggtttatgcccgctcaagcgcgcgtgacagccagatcagtgatgagagcgatagtcgcgaaccggcattcttccagcgacagctactggtcagcttcgaaaaagaggatgtatcggccgcttatgccattgatgaaggagaaatcccgtttggctttgagtttttgagcaaagtgactctgcgagatatcaactttggcaaaatggcggatgatgccaatgaactgatgatcgcaggagaggcaaagaaacgcaccgggtttaaagtttgcctcggctgcggcatggtgcagcgccctcgcgatcatgaaccacgtcatgacctgagctgtaaatatcgcgctgaacccgaaaaagcgaagtttgaagattatctctacctttatcgccaactggaatctgaggcattgcgtatcctgctgccggtaaccagctacagtaacgatcgcgtggtggaagcctccctgggggcagccattcagcttgggcttaaacattacttcaaaggtaacgtggatcacctgaaaggcgtggtgtatcgcgagcctgaaaatgagggcgaatcctggcgtcagtatctggtgatttacgacaccgtaccagggggaaccggctcactcaaagaattgatgcgtacacctgacaacctgctgaaattacttgagctggcctacaaggcgctagtggaatgcagctgcaaccatgatacgcataaagatggctgctatcgctgtgtttatgcttaccgtgaccgcgggcgtatgaagtatgtatcaagagatcaggcgcgtctcttactggcgaaaatcctgaaggccagtgcttctatacgcgttattgattccatcaaaaacatttcgcttgatgccatgatggggagtgaactggaaaaacggttcatttactgcctgcaggataacaaaaatcttatcgtgagccggagttatgcccatcataacgcaggctggattattaatacccgtacagaaccggcgatgagctggcatctcaaagcacaggttgatttaggggttaaagaaggggtgggcatcctcagtcgaccagattatgtgctctatcctttgatgcagtcagaaaagataaaaccggtagcaatcttcctggatggtttcgcttttcataaagatagcgtgtcggatgatgtccaaaaacggcaggcgattaaagacagcggtaatttttgggtatggacagtgacttgggcagaccttcaagaacaaggtattaaacatgtacagaatgtcatggggcttggtcataacccggagatgaaacagcctaagttttataacctgttccatgatataaactttgcgacgcttgaaggttcattccgggagagaaacagtttcgcactgctactcgattatctctctgatcctggtaataaaactctgctatggcagaaaatggctgctgcttatgcctgggtgtggctggatcctaaaaagtcgcaggataccggagccaaacaaaagtacgcctatgaaatgcaggagaacgctcccgcttatcggttgaatgcacttttgcctgatgaaccatttgtatttggcggtttactggatagctgtagttcatcacaacagttcattgagctggcagctgttgtaccgcaacaagccattaaatcaacgacaagcattgaacaaatgcgaaattggttgaggctgcatatttgctttgacgatcgttattcccaggatgatggctatgaagccggatttaacggtttctggtggatggtgaatttactgcagttcctgccagatatgacattcaccagccgtaaagcggtccatttaccgcagaagcctgaagcggtaaaaatgcagacttcggtggtagtggatattcagcctgacgagagctgggcggatatacttgagtttggtttattgagcgcagaagaaatcgctttgcttcagtcgttatcgcttccggcaccgacagtcggatatgaattacaggatgacgatggcgaaattattgcggaagccgatctcgcctggccattacaaaagcaagccctgattatcgataatcagagctttactgctttattcgaaagtaagggttggcacgttgctttcgggccaattgacgaaaatacattgcagcatctgtccggaggtgacaaatga

SEQ ID NO: 124130 - DNA, 2118 bp, Enterobacter cloacae
atgacgattccagcgccaaaggtggcactttctgatggttttctgggggcttttgcgcggattcctaaagcgcagcaaaaaaaggtccaggaattcatctccaagttccgccaggatccgacgagtaatgggctgaactacgaaaagatccacgatgcacgcagcaataatgtgcattctgtgcgtattgaccaaacctaccgggggatcgtcctgaaacctgagcagggtgctctgtatatgctgatgtgggtggataagcacgacgaagcctacgactgggcgcggcgacatgaatgtgcgattcacccggtaaccggtgcgattcaggtgattgataccagctatatcaaacctacccccgagccgaccgttgttgataaacccaaactctttgctgcttatacggcagagcagatcctcgcgctgggcattcctcctgtgtttattgagcaagtgatggctcttgtagatactgcagggctgaatcagttggaaagtgtgatgcctgcggaagcctgggaacccctacactggctggcagaaggtctggattaccaggaagtgctggaggagtttaacgatcaccgtgatgagcctgttgataccaacgactttattgaggcgatggaacgaagtaaacgtcgtttccatgtcgttgaaaatgaacaggagctactgcaaatgctcaatgcgccactggaaaaatggcgtgtattcctgcacccgagccagcgaaaactggtggagtctccggcaaatggtccggtacgtgtattaggtggtgcaggcacgggaaaaacagttgttgcgatgcatcgtgctcggtggttatcccaacgcctggccgataaacccggtaaaaaagttctgttaacaaccttcactcgtaacctggcggcggatattcgcgccaacctccagcgtttgtgtagtcgtgaggagatggcgcgtattgaagttgttaacattgatgcctggatgagcgagcaactgaaacgccatggatatgatttccgcgtggtgtatgacagcgatgaagggcgacgtaaatgctggaactatgccttgcaacaagtccctgctgaactgggtttaccggaaaacttttattctgaagagtggcaacgtattgttcagccgaatgctgtttacagccgtgaagaatatctgaaggtgagccgtattggtcgtggcacggcgttatcacgtattcagcgtgcgaaaatctggcctgttttcgaagagttccgggcacaaatggcgcgtgccaaactgcgagaaatgggtgatgccatgcatgaggctattattctgtttaaagaaaaacaggtgcaattgccttatagcagtatcgtagtcgatgaagctcaggatataggcgcaccggcctttacccttattcgtagcctggttccagagtctcctaacgatctctttatcgtgggtgatggacatcagcgtatttaccgcaataaagtcgttctgggtcagtgcgggattaacgttcgtgggcgccgtagtaaaaaacttaaaattaactaccggactacagaagagacgcgacagtttgctgtcggattgttaaccggcgttaaggttgacaacctggatggtgaaactgatgccagcaacgattatttatcattgcttcatggtgaaaaacccatgattactcatgcttcagattttaaggaagaagctgagacgattatcaagcaaattcaggcgttgttagccaatgatgttcgttcccaggatatctgcattacttcccgcacgaggcatacgaatgagcgctatgtgtcagctctgaatgaagcgggaattgaaacttttagtttagggaatgatagtggcgacagtgatcaacgggccggtgttcgcattgcaacaatgcaccgcattaaagggctagagttccagtatgtgttccttgcgggtatcaacgatggcgttgtaccggaagtaaaagccataacatctgacgatcctgttgaacagcgtgatgcactatttaatgaacgagcattgctccatgtggcagcaactcgcgcggtaaaaggactgtttgtttcttcgtacggcgtaccaagtacattattaacagtggagtaa

SEQ ID NO: 124131 - DNA, 585 bp, Enterobacter cloacae
atgactcttcactactatcagaaccacgcacaggatttcttcgatggcacggtcaatgttgatatgaccccgctttacgaggcctttacccaacatctgcctcacggtgccagggttctggatgcaggctgcggttctggccgggacgcaaaagcctttcatgagatgggttatctggtggatgcttttgatgcctcttccgcgatggtggagctggcaaggcaacataccgtgttacccgtgcagttaatgacgttttcagagatcgacagtaaagcgcagtacgatgggatctggtgttgtgcctctttgctgcatgtcccctctgctgagttgcctgcggtgatgcagaagcttgcggatgcgcttaagcctggcggcgtctggtatgtgtcctttaagtatggcaacggtgaacgggtgcatggtgaaagacggtttacggatctggatgaagaggggttgcaggagttactaaaggcggttccggagatggaaatagcttcgctgtgggcgactcaggataaccgcccggacagggatgagacatggctgaatgggatattacgaaaaaacgccgcttga

SEQ ID NO: 124132 - DNA, 1014 bp, Enterobacter cloacae
atggaattttatcaggccgatccgacgcttgagaactactggcgtggtgtgatcctctttggaaggaacgtcgcatcttacaaatttgcgctggcgtcagcgttgtatgaagtggataagacgggcagcgatttgattacgctcgaccagcttgccgtaccgttcagccgctatctttgcgagcacctgaagcatgcgccaaaacagatcacctcccgcagcagtcagtttttggaaacctgcctgaagttcaaccgaggtgaaatcacccacgcccagctcattgaagcgacggtgcgcctcggctttaacaacgtgatcgatgcctttcactacgtgaaccagggcgagatcgataaacgttttttccttgatgagcgcaaaacccacaacgggatccgcctgacggacaacttctatttactgggcgaacgcctgcagtataaaaacctcgcttttgaaaccaatgcccgctggaacctggtagaacaggcctggtctatggggatttcacgtaaccttgtgggcgtggagtttgatgaagataatcagttgctgttcacgagggtgaacgcgcggcgcgtagacatcaccagctgtcgcgacagtctgaatggataccagaaaggacgatgtttttactgctttaaacccatcagtctggtaccgggagatgcagaactggcggacgtcgaccactttattccctgggctgcccgccatgaagtgagcaatattaacggcgtatggaacttagtgctggcctgtcgatgttgtaaccgtggcgttgaaggcaaatctgcacgcattcccgagctcaggctcctgcagcggttacacacccgcaatgagtattttattcagagcaaactgccgttacatgagacgattgttctacagacagggcaacgtcctgaagcacggagaagctttcttcagcgtaactggcaggccgcgctggacaaacttatccatacctggaaacccaacgcggaaggcgaggcaacgttttaa

SEQ ID NO: 124133 - DNA, 1002 bp, Enterobacter cloacae
atgaacccgcaaaccatcctcaccggcgaccgcccaaccggcccgctgcaccttggccacttcgtcggatcgctgcgccagcgcgtggcgttgcagcagacgcacaaccagtttgtgctgattgccgacctgcaggggctgaccgacaacggcagcaacccgcagaagatccgcgacaacatccccgaagtgctggccgactatctcgccgccggcatcgacccgaacctgactaccatctgcctgcagtccgccctgcccgccctcgccgagctgacgatgctgtatatgaacatcgtcaccgtcgcccgcgtggagcgtaacccgacggtgaaaaacgagattgcgcagaagggctttgcccgctcgctgccggtcgggtttatggcctaccccatcagccaggcggcggacatcaccgcgtttaaggccgagtgcgtgcccgtcggcgacgaccagctgccgatgattgagcagaccaacgagattgtgcacaagatgaacagtctgttgcccgctccggtgctgcgccactgtaaggcgatgctgagcgacaccagccgcctgcccggcatcgacggcagcgccaagatgtcgaaatcgctgggcaacacgctgcacctttctgccagcgaagagaccattcatcgcgcggtcagcgccatgtacaccgacccgaatcatctgaaggtgagcgacccggggcagattgaggggaacgtggtgtttacgtacctcgacgcgtttcatccggacaaggagaaagtggcggcgatgaaggcgcactatcagttaggcgggcttggggaccgggtttgcaagaacgagctggagggttgtttgcaggagctgattgcgccgatgcgggagcggagggcaatgtacatgcgggacaagggagagttgatggcgatgctgaagcgagggaccgaacgggcgcagggggtgacgcaggcgacgttgagggaggtgaaggttgggctgggggtgccggtgttttga

SEQ ID NO: 124134 - DNA, 822 bp, Enterobacter cloacae
atggcaacgtttaaggcaaaagacggcacgcagatttactacaaagactgcggcgcgggtaaaccggttctcttcagccacggctggccgctggacggcgacatgtgggacagccagctgaactatctggccgaacgcggattccgcgccatcgcctttgaccgtcgcggttttggccgctcggatcagccgtggaacggctacgactacgatacctttgcgtccgatatcaacgacctgattaccactctggatctgcaggacgtgacgctggtgggcttctccatgggcggcggcgacgtgacccgctacatcaataactacggcagcgcgcgcgtggccggtctggcgctgttgggcgcggtcacgccgatcttcggtaaatcagataccttcccgcagggtgtggatcagagcgtgttcgacggcattcgcgacggcctgcgtaaagatcgcgcccagttcatcagcgacttcgccaccccgttctacggcatcaatgccgggcagaccgtctctgccggtgccctgacccagacgcttaacatcgccctgctggcgtcactgaagggcaccatcgactgcgtgaccgcgttcggcgaaaccgacttccgcccggatatggcgaaaatcgatgtgccgacgctggtgatccacggcagtaacgaccagatcgtgccgtttgaaagcaccggcaagctggcggcagagatgatcaaaaacgccacgctgaaggtgtacgacaacgcgccgcacggcttcgcgctgacccaccaggaccagctcaacgaagatctgctggcgtttgtgaagtcgctgtaa

SEQ ID NO: 124135 - DNA, 1872 bp, Enterobacter cloacae
atggttacccttggaaaagccgatctcattctggttaacggccagtttcacaccgtcgatcgcgagaatcctgtggcggaagccgtcgccgtgcgcgacggaaaatttctggaagtgggtaccgtcgccgaggtgatgcaacaccactgcgacggcactaaagtggtggatttaaaaggccacaccgccatccccggcctgaacgactcccacctgcacctcattcgcggcgggctgaactacaacctcgagctgcgctgggaaggcgtgccgtctctggccgatgccctgcggatgctgaaagaacaagccctgcgcacgccatcgccacagtgggtgcgcgtggtgggcggctggagcgagttccagtttgccgaacgccgcatgccaaccctggacgaaattaacgacgccgcgccggacaccccggtctttatcctgcacctctacgaccgcgccctgctcaaccgcgccgcactgaaggtggttggctacaccaaagacacgccaaacccgccgggcggcgagatccagcgcgacgccaacggcaacccgaccgggatgctgatcgcccgtccgaacgccatgatcctctacgccacgctggccaaagggccgaagctgccgctggagcagcaggttaactccacccgccagtttatgcgcgagctgaaccgtctgggactgaccagcgccatcgacgcgggcggcggcttccagaactacccggaagattacgaggtgattgccgagttgcacgagaagaagcagatgaccgtccgcatcgcctacaacctctttacccagcgtccgggccacgagctggaagactttgagaaatggaccgacatgctcacgccgggccagggcagcgacttcttccgccataacggcgcgggcgagatgctggtcttctccgccgccgattttgaagatttcctcgaaccacgccctgacctcgcgccgggcatggaggatgagctggagcgcgtggtgcgccatctggtagagcaccgctggccgttccgcctgcacgccacctacaacgagtccatcagccgcatgctggacgtgttcgaaaaagttaaccgcgatattccgttcaacggcctgcactggttcttcgaccatgcggagactgtcacccaggccaacatcgaccgcatcaaagcgctcggcggcggcattgccgtgcagcaccgcatggccttccagggcgaatactttgccgagcgttacggcattgaagccacccgccatacgccaccggtggcaaaaatgctggagaccggcgtaccggtgggcttaggcaccgatgccacccgcgtggcgagctacaacccgtggaccgccctctactggctggtctctggccgtaccgtcggcgggatgcagatgtacgatcacagcgcccgtctggatcgcgacaccgccctgatgctctggacccagggcagcgcatggttctccagcgaacaaaaccagaaggggcagatcaaagtcggccagctcgccgacctggcagtactgagcaaagactacttccgcgtgccggaagaggagatcaaaggcatcgaatccgtcctgacggtggtcaacggcgatatcgtttacgccgcaggtacctttggcccgctggccccgccagccattccggttctgcccgagtggtccccggtggtgaaggtgccgggccactaccgcagcgcgccgccgcaggccacacgcgtgggtatgaacgccgtccaccactgcagcggcccgtgcggggtgcacagccaccagcatgattttgcccgcacgtcagagataccggtgtcggacgataacgcattctggggggcgctgggctgcagctgctttgcattctga

SEQ ID NO: 124136 - DNA, 5583 bp, Enterobacter cloacae
atgaacgaaaacgagctgcctgcattctggcccgcccagggaaatctccatgatgggcgggtttttgtccttaaagaggatgtcatttttaccgtgctggcgcaggagggcgggatctcctggatgaacgcccgacatcctcattctggcggctcctttatcattgccaccgcggtcagcgacgaagaagaagagcgggccacccggctgctcaaaaatgagtttgcgttgcgcgatcacctgcaggacagctgggccattcgcgccgtggcctccacccagtaccgggggcgttttgcactggtgtatgcgccgttttcgtttgagctgctggcgcgacgcgcgggcagggcgatctcggggatcgcccggtttatcgagctggcgatccagatctgcacgccgctgcgccagatgcacctgcagaacctgatccacggcgatatcaagcccggcaatatctttgttcatcacgattcaacctgccgtctgggcagctttggcctctcatgcagtatctccggggccttttcccagacccggctggccgtctctggcggtacgcccgcctatatgtccccggagcacaccacccgcacacagcgggccgtcgattgccgcagcgatctctacagcctcggcattgtgctttatgagctcctgaccggacgcctgccgtttgagctgggcgagaacgagcagaccaactgggcgcattaccacattgcctctgagccgctctctcccgccgtgttgcgcccggatgtgcccgacatgctgtcgaccatcatcctcaagctgctggagaagcaacccgataaccgctaccagaccgtcgacgggctgattgccgatcttcgacgctgtcaggcgacgttaacctccgaaggcgagatcgttgcctttacgcccggccagcaggaccggacgccggcgatccatctggcggactccctgtttgcggcgcatccgcaggcaaacgacgtcatcgccgcgtttgagcgggtggtgcaaaacattgtgccggagctggtgacgatcggcgggccgtcggggatcggtaaatcctcgattatcgccacggcgttaaaaacgttgcaacagcgcagggtgctgctggcggtgggcaaggtcgatcagttttcgccgacgttaccctacggcgtattaagctcggcgtttcgcaccctgacgctgcacctgctcgggctgcctgcggaagaggtggcgaagtggaaaatccgcctctcgcgcgccctggaaggatatgaagagctggccgtcagcctggtgcccgagctggggctgctgctggagagtaaacctcgcttctcggcagatacattttccattgatgcccgggcccgcttcagccatatggtgctggcgctggttaaaacctttgcctcgcagggctgtccgctggtcttgctgcttgacgatctgcagtggagcgacgccgccagcctgcaaacgttgaagcacctgctggcgacctgcggtgccattccgctattgctggtggtggcgcaccgggacatcgcctcgttgtccgatcccgcgttacagcagcagctcgcgagcctgccggcgtcggcgcaacacgccatcgagattatcccgcagccgctgacggtgaaggcggtagcacgctggctgggcacgctgtttcgcgtgcgcagcgccacaacaaccgacctcgccacgcttatccacgaaaaaaccggcggcaacccgctgttcgtgcatgagtttttccgccgcattgttgatgacgggctggtggtgcataacaagtatcaggacaaatggcagtacgatctgcaggcgatccgcgcccggcattacactgaaaacgtcgtcaccctggtgctggaaaagctcgaagagatgcccgacgagacgcgtcgtctgctgggcagcattgcctgtcttggcggcacgggcgagctggagatgctgtgccgcgtggtcgggatgtcggtggcggaaatccgttatgcgctccacccggcggtgatggcgcagctgattgtgctgacggaaaaagcgtatgcctttacccacgacagggtgcaggaggctgctttcgcactgctggatcagcgtgagaggagccacctgcacctgaccaccgccagcctgctggccgaggccgcgcgtcaggcggcggggaacgaactgctgttccgcgccgtgcaccacgtgacggccgcgctggacagcattcagcctgcgccgcagcgccagatgttccgcgagctcagcctgctggccgcacggcgggcgaagcgcaccggcgattatcattcggccctgagctacattcagaccgccagagcgctgggcaatgccggggcggtgtctgactttatgctcgacatcgaagaggcgggctgtgaatttgcgctcggccacctggagcgaacccgcgagctgtgtgacgcgatcctcggctgccccggcgggctgactgaaaaagcgctggcggctaacctgctggtggaagtctacattcgccagtccgacagccgtctggcgctggaggcggcgctgtgctggctggggatttttggtatccagatcagccactacccggaagacgtcgagtgcgacgaagcctggaaacacttttgcaaccgcgtgggtgaggcgccgcaacagcattttgtccagctctcgcaaatggacaacccgcaaaccgaagcggtgatgaacctgctgtatagcgccagcatttgcgccagttttatctgtccgcgcctgcactttttgctgctttgtcgcatgatgcatctgaccctcgaccacggtatcaccggcgcctccaccacggcgatggcctggtttggggtgttgattggccaacgctacgccgagtatcgccttggtttccagtacggcacgctggcccgcgagctggtaaaccgtcacggctacgatgcctttgaagccaaaaccctgctgccgctcgatcagctcagcgtctggacccagccgctgtcattcaccatcgagtgcgccaaagcctgctttaccgccgccgtcactcacggtgatatgacggtggcctgctttgcggcctgccatcaggtgatcaacttcctctcgcggggcgatcatctggacggggtgctgaccagcatcgatcgcggtctggcctttgtccgtaaaacccacttccaggacatcgaaacgattttgatgctccagcgcggctacgttgagtttctgcgtacgccggtcatcggcacctggagcgccgcgcaggtgctgcctgaagcgatgctgccagcggcgcctgaacaggccccggagcagacctcgaccatgctgttctggtactggctgtaccgtgggatggcgcactttacctgcggggagtatgccgccgcgcaggcggagctggagcaggcgggctggttcgcatggtctgcgccaggccacattcacctgctggattaccatctctacagcgccctgtcgctttccagacagctgacgccggagaccttctcggcgaatcaccgtcgcagcattcacgcccactacgacaaaatcgccctctgggcacggattaatccgggcacgtttgccgacaaagaggcgctgatttacgccgaaatcgtgcgtctggacgggatgaacagcattgcgcttgagcagtatgagaaagcggtgcgcctctcgcgggagggtggttttaatccgctgaacgcgctggcccacgagctggcagggcgctttgcccttgcctgcggctatccgaccgcctcggacgcccacttccgcggggcgatcgccgcctggggccgcgccggtgcacaggcaaaagtgcgccagcttgagcaggatttcccgcatcttctgagctccgcccaggccagcgcctacgacacggtggctttcgcgcagaatgaagtgattcgcgatctgcaaagcgtgatcaaggcgtcacgcgcgctgtctgaagaaattaaccttgagcggttaatcgaaaacctgatgacgctgctgcttgaacgggccggggcgcagcgcggtctgctgctgcgcgtgagcgacaaccatatcccggagatcgaggccagcgcgtggaccagtaccgacggcgtgcgggtgcggatcctgaaagaggtcccgatggcgaccgatatgccgctgtcggtgctggcggcggtgatccgcaccggacaggagatccgcaccggcaagccggaagagttccaccccttcagtcaggatccttatctcgtgacctcgggggcggccgtgatgtgcgtcccgatgttcaaacaggcgcggctggtgggcgtgctctacctggaaaatcgcctgatgccggaggtctttaccgccgagcactcccgcgtggtgagcctgctgggggcgcaggcggcggtctcgctggagacggcgcgcctgtatgccgagctgctggcggaaaacatccagcgtcgtcgcgtggagaaagagctgcgatccagccagacctcgctgatgctgggcgagcagatcagccacaccggcagctggcgctgggagctggagcaggatctgatgtttatctccgaagagtacgcccgaatcctcggcctgcctgaacagcaaaagaagatctccatggcggagtttttgacctttgtgcatcaggatgattacgcccggatcagtaccatcgtcacccaaagcgtacgcgaagggctctccatgcgggcggagttccgcattaaccgtactgatggctcaacccgctatattctcgggattggcgatccggtgggcgtgggcagcgaggtgaacgagtattacggcatcatcaccgacattaccagccagcgggcggcggaagatgcgatgcgggtggcgcaggcggatctggcgcgcgtttcccgggcgaccaccgtcgggcaattgacctcttccattgcccatgagatcaaccagccgctgatgtcgatcgtctccaacgccggggcgagcctgcgctggctcaaccgggagccagcccggctggataaagtgcgtgaagggctggaggagatcgccgctgaaggtgcgcgggcgggggagatcatccgcagcattcagtccctgacgcgcaagcaggatccgaccttctcacgcatcgatctgcactacctggtccaccatatcatcgcgctgtcgcgcagcgagcttgagcagcgacacattagcgtcgattaccttttgcaggcgcatgacagctttatcaccggcgacagcgtgcagatccagcaggtgctgctcaacctggtgatgaacgcggtagaggcgatggccgaggtgaaagatcgctcttgcaccatcaccatcagcaccagcaatgcagaagggagagtgctggtggagatagccgataccggcagcggcatagagcctgagcggctggagaaaatttttgactcgttctattccaccaaagcgcagggcatggggatggggctgaccatcagcgccagcatcattgagcggcactgcgggaaactgagcgcgcgccgccgggagccgcacggcaccgtctttgcttttgcgctgccgcttgcggcacaggaagggtaa

SEQ ID NO: 124137 - DNA, 606 bp, Enterobacter cloacae
gtgtatgtggttgatgacgatgacgccgtcaggcagtccgtgaccgggctactggaatcggcagacctgaacgctatcggcttttcatcggcagaagcatttcttcagcaccgcttcgaggatctgccttcgtgcgtgatcctcgatatgcaaatgcccaccatctccggttttgaggtggctgatgccctcagggacagcgggcgtgagatcccgattattttcctcaccggccacggcaccatcccgatgtcggttcgcgccatcaaaggcggggcctatgagtttctgaccaaaccggttgaatccgccgcgcttatcgacgccattgaatccgcgctccggctggcggaaaacaacgccgtgcgtaataaagagcattacgccctgaagcagcgccatatgtctcttaccccgcgcgaacatgaagtgctccagctggcgataagcggcctgctgaacaagcagatcgccgccgagcttggggtgagcgaaatcacggtgaaagtccatcgccgccgcgtgatggagaagatgcaggtgcgctccgtggcagagctggtcagggtcgtggaacgcctgagcaaaagtctgccaacggagtaa

SEQ ID NO: 124138 - DNA, 771 bp, Enterobacter cloacae
atgctcgattatgcagcttttcctgaacagcgacaagcgcggatccgccagatccttcagaagagcggaagggtggtctgtaccgagctggcgagccagatgaacgtatccgagcacactattcgccgtgatttacatgaacttagcaaagagggctattgcaaaaaggtctacggcggcgcggtgcttcagcttccggatgcgggtaattttttaagccgcgagcagaaaataagtgcagaaaagcacacaatcgcgcagaaagcagcaacgctggttcaggcgggcgggtgcatttttattgacgcggggacaacaaacctggcgctggcgaaagcgctcccggcggatctcaacgtcacggtggtgaccaactccccggccatcgccacggaactgctgcgccatcccctgtgcgaggtgatcatcaccggcgggcagatccagcgggcatccggcgggtcggtgggcgccacggccgcgggtcagatccagggcattatattcgatcaggcctttattggcggctgcgcgatggatccgcagatgggactcaccggctttgactttgccgactgcgaattcaaaaaggcggttatcgcccagagcaaccagaccatcgtggccctgacggcagacaaacttcccggcgtggcgcgctttgtggtggcgacgtgtcaggacattgatgtgctggtggtagaagaggcgctggaacagggcgttgtcgacgcgtttgcggcccaggacattcgcattgtgtgcgcctga

SEQ ID NO: 124139 - DNA, 903 bp, Enterobacter cloacae
atgcatcgttcaggtttgacagagctggaagtggtgatggcggtggtacgacgcggcagctttcgcggtgccgcccaggagctgggtatgtctgccacggcggtgagtaacgccatcgccgggctggagagccgcctcgagacgcgtctttttaaccgcactacccgcagcgtggcgctcaccgacgccgggcagcgttatgtggcgcgcatcggtccggcgctgcaggaaattcgtcaggccggggaagagatccacagcgacaccggcgaacccgcaggcaccctgcgcctgaacgtgccgaacaatattggctccctgtttctggaccagctgctgatcgactttatgatccgctacccgaaaatgcgcgtggaaacggtgagcgaggcgcggatgatcgatatcgtcgccgaaggctacgacgccgggatccgccttgaagaggcggtgccgcaggatatgatcgccgtaccgctgaccggagagatccgccagctcgtgaccgccacaccggactattttgcccgccacggtataccgcaaacgccggaggatctgctgttgcatcaggggatcgggatgcgcatggcccacggggggatctaccgctgggagctggcccgtcggggagtccagtatgcgctggccgtgccgccgcgttttgcgacatccgatctttttgcctcgatccgcgcggtcaaagcagggctggggattggctttttaccggaactctatatccgtgatgagctgaaaagcggggaactggtgagcgtgttaaacgactggacgcagccgtttgccgggctgcgtctttactatccaggccatcgccacgtcccgccggggttgcgggcgctggtggcgatgatccgcgagcgcgggattattccaggttag

SEQ ID NO: 124140 - DNA, 522 bp, Enterobacter cloacae
gtgaataacatgaaaatagggattttttcagatgacgttgagtatgatctaagccatttcgattgcggagaagagagcctaaacacctttctgacggcgcacctgaaacgccagcatcgtgggaaatttttgcggggttacgttcttgtcgcatccggggaaaagccgcgggtgttgggttattacacgctgtccgggagctgctttgaaaaggcgtaccttccttctaaaacccagcagaagcgagtgccttacaaaaatgttcccagcgtcacgctgggccgcctggcgatagataaacgcttccaggggcaaggattgggggagttgctggtcacccatgctctgaaaacggtctacctggcgtcttttgccgtgggtatccacgggatattcgtagaagcgctgaacgacagcgccaaaaacttttatcttaaactggggtttatcgcccttcaggcagagaatgaaaatactctcttcctgccgactaaaaccattgaaagactgtttgcagattaa

SEQ ID NO: 124141 - DNA, 270 bp, Enterobacter cloacae
atgtcagcactaaagaaacagcgcatcgatctacgcttaaccgaagacgacaaaagcctgatcgaagaagcagcggcaatgacgaaccagtcaatttcacaattcatggtaagtacggcctccgagcgcgcagcagaagtgattgaacagcaccgccgcctgatcctcaacgaggcatcctggaaccaggtgatggatgcgatcagtaacccgccaacgccaaatgaacgactgaagcgagcagccaggcgtctccaggatctggagtga

SEQ ID NO: 124142 - DNA, 399 bp, Enterobacter cloacae
atgtatgatgttcatgtgatttttaacgatatgccgggtgaactggcacgctttggtcagctgttgggcagtaaggggattgggctggaaggcggtggtgtattcggcgttgaggcacattttctggtggaagacggcgaaaaagctcgccatgttctgcttgaggccggatttaacctgaaagcggttcgtcggcccattatcagaaaactgaggcaggaacgccccggcgagttgggggagatagctgccgcactggcggctcgcggggtgtctattcttacccagtacagcgaccacgctaatcaccttattctgctgacggataatgataagctggccgcagcaatcaccgaaccctgggcaacctatgttaaagacgagcttaccgccagataa

SEQ ID NO: 124143 - DNA, 696 bp, Enterobacter cloacae
atgttaaagacgagcttaccgccagataacagcgcagcgctggagcaggccattgccgcagtagcagccgcaatggccgatccgtcgcgcgtgaaaatgctttgtgcgctgatggacgggcgggcgtggacggccaccgagctgagtgcggcggcggatgtggcgccgtctaccgccagcgggcaccttgcgcggctgctggacggaaagctcattacctgcctgtcgcaggggcgccatcgctattatcgcctggcagggtatgacgtagcggagctggtggagcagatgatggggctgtcgtggcaccgcatttctccgccggaaaccagcgcgccaaaagccctgcgtgaagcccgcacctgctacgaccatctggcgggcgcggtggcggtgcagatctacgatttcatgcaggccgaaagttggctggagccagacggttcagcattgacgctgtatggccgggagcagtttctgaaactcggtatcccgttaagcacccatccccggcgaaaggcctgttgcgcctgtctggactggagcgagcggcggtttcatctgggcggtgaagccggtgcagcgctgctcatgcatctggaaagcaagggctggatccagcgggtagcggggtatcgggaagtggtgcttacggcttcggggaagggcgccattacccgacattttagccgctaa

SEQ ID NO: 124144 - DNA, 513 bp, Enterobacter cloacae
atgaagtatttgattgcgctaatattcatgtgtttcccgatgactctcctggccaaaagctacactccagcgcagattatccagatgataaacgataaaggcgcaaggtgtgttgtagcagaattgtatgctaatgatagcggtgggtcagaatggtggaatcatgtcattccagagatcggtaaaggaactcaggcatggttagtcgtagcgagtgagcttgaatctggggttgatgccagtacggctgaagatctaaaggcggcactttctgaagccatcccgcataatccagcgggtgttttggcaatcttaaaagacgataaaccgttgctcactattgatcaaatctgcgctttcgctaactttccggagacagaagcagagagcaataagctttttgtcgattcaataagggagatgtttaagattaaaagcacagaaggtaaaagatgtctcgccgttatgatcgaaaccgttgaacactctgttccattcgataaggatatttaa

SEQ ID NO: 124145 - DNA, 1395 bp, Enterobacter cloacae
atggggaataaatggaatactgttcgtcttggtgactactgtataaagattggtagtggagctacgcctaaaggcggtaatagtgtttacactgataccggcaatacgtattttattcgtagtcaaaatgtttataacgatggttttaatactaatggattagttttcattactgatgaagctgcgcttaaacttaaaaatgtagatgttcaagaaaatgatattttattgaatatcactggcgactcagttgcgcgtgtatgtatcgccccaagagctttccttcctgctcgagttaaccaacatgtcgctataattcgccctaaaaataatgcatttgatcctcgttttctaagatattttttatcaagccctcaccaacaagccctgctgttaacgcttgctagtgctggtgcaacgagaaatgcattaacaaaagggatgattgaggacttacaagttcccaaacctcatgtgcatacacaaatatctatcgcaaacgtattagagagtttcgataaaaagatagaaagcaataataaaatcaaccaaaccttggaaaaaatgtcccaaaccctgttcaaatcctggtttgtggatttcgaccctgtgattgataacgcgctggatgcgggaaattcgatcccggaagcgctgcaatctcgcgtcgaacttcgtcagaaagtacgcaatagtgcagactttaaaccacttccggcgaatattcgtacacagttcccggctgagtttgaagaaacagagctgggctgggtgccaaagggttggttgctggagtctgtagcaaaatccataaatatcaatcccagtgtaaaattacccaaaaatacaatcgcaaagtatgttgatatgaaatccttacccacacaaggatactcaatatcagatattattgagaaaccatattcaggtggaacaaaattccaaaaaaacgatatcttattcgctcgaataactccttgtctggaaaatggtaaaacaggatttgtggattttttagatgaaaatgagactgcgtttggctccaccgaatttatagtgatgcgagggactacgaaagtacactatacttatgtggcttgtttagcccgagaaaatcattttaggttacacgcaatacaaaatatggtcggttcatctggccgtcaacgggtgcagaatagctgctttgacagttttttcattgcaataccgacaccttccgtaatgcgtttatttgccggtaaagtcagtagtttttttgataaaatgcattgctgtattgtggaaaataaatcactaaccgccctccgcaacaccctgctccccaaactcatctccggcgagctgtccctggaggatctccccgacctcatcaagcaaaccgaagccgcataa

SEQ ID NO: 124146 - DNA, 744 bp, Enterobacter cloacae
atgacccatacccgacacatccgccagacctttaaccgccttccgggccttgagctgcgcagcacgtggcagagtaccgtggcgtataaacgtcattgtcacccccaactctcgattggcgcgatagtggaaggccagacctgctgccggtgcaatgacacgcagtacatcctccatcccggcgatctcatcgtgatcccggcgcatgtgccgcacagctgcaaccccgtttcgggccagccccgcagctatcatatgctctatatcgacacggattatcccctggcagaacaggtcatacgcgacagcacgttgtttgctctttaccagaacgttgttgagaacatgtcggctaattccctgaacatgctgatttctgcccttccgcgctgcgccagccgcacgggtgaattacgctcaaccagccagcacattcagcaggcgtttcttgccgatttaaccagcccgccgtcactcgacgaccttgcccaccgcttctcgctgcgcaaagagacgctgatccgcaccttcaggcaggacactggcctgacgccgggcagctttctcaacatctcccgcgtggaatacgccaaagcgcggctgcgtgccggggatgatattgccgatgtcggctaccagagcggatttgccgatcagagccattttcataagacctttgtgagctataccgccgccacgccgcgccagtacgccacgggccgatcaatatcggacaataaatag

SEQ ID NO: 124147 - DNA, 546 bp, Enterobacter cloacae
atgaaaaaactgaatatccttctgctgactgcgttgactgctgtatcgggttctgcactcgctctgggtggcagcgttgagcagggtaaaaactttaccaacctcaacctggagatgggtaaatcctcatccggcctgtatgtggaaagcaactggctgaaaaacaccgatgacggtacgcagaccggcggtgtgggtgcaggttataacctgggtcttggcccggtcatgctgaacgcgggtgcaaaagctatctatatcggcccgaaaaaaggcgataacggcgtggcgttcccgatcggtggcggcgtaaacgttgccctgaccgacagcattcatctgtatggtgaaggctacgtggcaccagaagggatgaacaacagcgtgaaaaactacgttgaagccaacggcggcgtaagctggacgccagttacacctgtgaccctgaaagtgggttaccgccacgtgagcgttgatggtaaagacggtcgtccaggccacaccctgattgacggtgcgtatgttggcggtggagtcaccttctga

SEQ ID NO: 124148 - DNA, 519 bp, Enterobacter cloacae
atgcgtgtcggccttaacatcaccgttcgcccaacacgccccggtgacgtcaccgccctgcccgccatagaacgcgcggcgggcgagcgtttccgggattacccggaactcgcctggcttgcagagggcgaggtcatttccgctgagcagcatctcgactacgccgaacgcggactgagctggctggcgctggccaacgaactgccggtcggttttatcctcgcagagacgcacgtttcgtcgctgttcatcgtggagctttcggtgcatctggactggcagggaaaagggatcggccgacggctcatcgcctgtgtcgctgaccaggcccgcaaaagggggctggcatcgctgacgctgacaaccttccgggacgtgccgtggaatgcgccgttctatgcgcggctggggtttgaaatgataatgacgctgacgcctgaactgcgtgaaaaacgcgaagaagagacggcgcacggtttagcgtatgacgctcgctgtgccatgcgcctgcctctgtaa

SEQ ID NO: 124149 - DNA, 483 bp, Enterobacter cloacae
atgaaaaaacagattcttttcagcacacttttaggcgccctgctggtcaccggcatggcccatgccgcgtcatggcaggagtccctctccagcgccgccagcgaactcaccaaagagagcggcagcactcagggcgggctgtcagcctcttccctcaccagcctgctgggcaatagctcccagagtctgagtgccggcaccatgaacaacgcagcaggcatcctggaatactgtgcgaaacaaaaactggcttccgtgaccgatgcgcaaaatgtgaaaaaccaggtgctcggcaagctgggtctggacacccaggagcagaaagccgacaccaactacatggacggcattcagggtctgctgaacgcgcaaaatggtcagcagctgaatctgagcacccttggcaactcatctctggcgaaacaggtgaaaaccaaagcctgcgatctggtgctgaaacaaggcgttaatttcatctcctga

SEQ ID NO: 124150 - DNA, 738 bp, Enterobacter cloacae
atgttgtcattgaatggtaaacatggcgtagttattagcagggtacccgttatgcaaaacgggttaggcagcgttatggcaaaccatttcccagaatttgaattgacttattgtcgttcgctgcaggagttaacgttacttcagcttcgccgggctaatgtcattattgctgatatttcaggtgaatacaggaaaccccggggaacgttagaagaatattacaacttactgaaccaataccgggatattcactggatttttatggtctctcgtcccctttatcccattgcagtggaactgcttatgcgcccggaaagcacgttgctttctgaaatggaaccgattgaaggcgtgattaatgctattcgtgcaggtagcgagcgggcggagcggataagccagacgttattgtctcctgaacccgccgaggcggaaaccgaagacgaaccgtttgttgcgctgacccactctgaacgcaaagtgttacgcctgctaggtaagggctggggaattaaccaaattgctaccttgctcaagaagagcaacaaaacaatcagtgcgcagaaaaacagtgcgatgcgacggttgtcgctgcgcagcaatgccgatatgtacgcctggattaacagtgcacagggaatgagagagctgagtttaatgtcagcctatggagagtatgaggaatggaaaaaaccgatacaccaggacatatcgctgtcatcgaaaattgcacaatga

SEQ ID NO: 124151 - DNA, 687 bp, Enterobacter cloacae
atggaaaaaaccgatacaccaggacatatcgctgtcatcgaaaattgcacaatgagtgccgttgggctgcagcatctttttgcgatgccgatgctcagccattatcgactgcacctcttcagtcagttcgaaagctttaaaaaggcgctgaccaatatctcttttttctccgtgatctattcgctctcggatgcgcgtgaagagcgtcgtaactgcctggcttccctgcgggatctcgctttcacccatagcgatattcagcgaattgtacttgcgtctgatgacatggaagcgcgcctgataagccatctgtcgccttctcgtctgcatggcattgtgagtaaatcggtaccgctgagccacctgcaggaggagctggtggtgctattgagagagacgcatcatatcaatgacaatatgctgaaccactggtatgtcaatcaaaacagattgttaagcccaacggagcgggcgatattgcggtatatgtctttcgggttttccattcctgaaatcgcgacacaacttgaacgcaatattaaaaccatccgcgcgcacaagtttaatgcgatggtgaaactgggggtgaattctgacgtagggctgcttgatgcggcggatattcttactcatcttccggcaagagacatgcgctgttcggtgtcaggctcgccggcatttttataa

SEQ ID NO: 124152 - DNA, 1287 bp, Enterobacter cloacae
atgaccctacccgctattgcgcaagccgtttcaccgtaccgccagctgctggtgggatttagcggtggcctggattctacggtgttgctccatcgcctcaagctctggcgcgatcagcaacctgacgttcagctccgggcgatgcatatccatcatgggctgagtcctcacgccgacgcctgggttgcgcactgtgaagcggtgtgttccgcatgggcgatcccacttgagattaaacgggtggtgctcagagatgaggggctcggtattgaagcgcacgcgcgtaaagcgcgctatgccgcatttaccgcggcattacagcccggtgaagcgctggtcacggcacagcaccttgacgaccagtgcgaaacctttttgctggcgttaaaacggggaagtggcccggcggggctctccgccatgcctgaacgctctgattttgccgggacgcaattattgcgtccgctgcttggcgagtcgcgcgaatcgctggaagcctgggcgcagcaatatcagctgagctggattgaagatgagagcaatcaggacgatggctacgatcgtaatttcctgcgtctgcgtgttttgccgttactgaccgcacgctggccgcactttgcagacgcaacagcacgaagcgccctgctgtgtgccgaacaggagagcctgctggatgaactgctgagtgaagaactggctgaactgatttcggtaaacggggcgttggcgatcgcaccgctggaggcgatgagtccggttcgtcgggccgcgctgctgcgccgttggctggcctctcaccgtgcaacgatgccatcgcgtgccatgctgggacgtatctgggacgaagtcgcccaggcgcgggaggatgcaacgccgtgcgtgcatctgaacggttttgacgtcaggcgctataaaggccagctgtggtgggtgaaatcaatcccctcgcttgcagatgtggtgctcggctggccatcgcctgcgaaaccgctgctgttgccctgggatatgggaagcttgtctctggagacgccaggccatgtgcgtttaccgaaagccgaagaaccggtcaccgtgcgctttaaggccagcggtatgctgcacattgtcggacgtaacggtggaaggaagctcaaaaaaatctggcaggagtgcaatgtgccgccctggttgcgtgataccacgccgttacttttttacggtgaaacgctgattgcggcggcaggggtgttcattacagaagagggctgggcagaatcgggcgtgagtctggagtggaaagcgtaa

SEQ ID NO: 124153 - DNA, 588 bp, Enterobacter cloacae
atgttaaaaaaaacgttattagcttcagctgtaactttgtttgcaatgggttctttttcagcaatagcagacaccgatatcggtttaatcacatttgacggtgcggtaacagacacaacgtgtaatatttccaccgccaatggtgaatcacaaaataatattactattaccttaccagttgttaaaaaatctgatgttgaatcaaccaccgtcgataccggtgtcggctctaagaattttgaactgctgctcaccaactgcccaggaacattaaagactgcttcagcaagctttatgtcaaaaaatatgggtgccattgcaaacggtactattgaacctgacgccaacgtagcaggctcagcaaccaacgttgcacttgccttgtataataatgcccctaccgaatcttctcgtattatggtcggccagcctgctaataatacgcagaaagccaatctcaccgccggttccggcaagctgttctatcgcgttgcatacgttccgggttccaactgggtgaaagacacgaacccagtgcagtcaggtaaagtcagcgccaacgcgtacttcaccatgagctacgaataa

SEQ ID NO: 124154 - DNA, 738 bp, Enterobacter cloacae
atgtacgtgctgaatattaagagcggactaaaagccctgctgctggcctcgatgagcgtgtttgctcttaacgccagtgcagatattgtgatttccggcacccgtgtcatttatcctgaatcggcaaaagacgtaacggtgtcaatggataaccgtggcacccggcctctgctggtacagacctggctcgatgatggaagagataccactaaccctcaggagctgaaacttccttttattgtgacgccgcccgtttcacgtgttgaaccgcaaaaagggcaaaccgtcagaatcacctggctgggtcaggcattgccaaaagataaagagtcgctgttctggtttaacgttctggaagttccgccgaaggctaaggagagcgataaccaaagtatgcttcagcttgctttccgcacccgtattaaactctttttccgtcccactgggttaaaaggggaaccgacagacgcggccaaaaatcttaagtggtcccaaacccgacaagggcaaaaaatcgttttaagtgcgaaaaatgactcgccttattatgtgtcgctggcaagtgcggcgcttatttcaggcggtaaaagttacgagatcgaaacgcattatattgaaccgttctcaagccagacgatgaatgtgaaaaattacacctcatccggaaatagcaaaataacctggcaagccattaatgatttcggtggaattgataagtatgagtatataccgcattga

SEQ ID NO: 124155 - DNA, 2580 bp, Enterobacter cloacae
atgcactttagacgttcgctactatgtttatcgataagtgcggtattgccgttatgtgcatttgctgctgaaaataataacgaagaagacgtgcagtttaacgagcagtttctttataacactggcgcatccattgatatcagtcgtttttcaaaaggcaaccctgttattgccggaacctataaggtgaagatgatcgttaacgggaaaccttccgttaccacggatcttctgtttaaggagaatggcacaccgcgcgccactccctgcatcaccccgaaactactcacgcaggcaaatgtcaccaccgagcaactgaaacaccctgaggaggattctgctgacacctgtgtctctatgccagacgcctatcccggctcgcgtgtggcttacgatccctccacacaggagttagacctttccattcctcaggctttcgtcattcagcgtcctgcgggatttgtcgatccttcactgtgggaagacgggatcccggtggccatgctctcatgggatcttaacggctggcacgcagatatgctggattccagcactgatacggcctatgcaggtctgcgctatggggcaaacctggggccatggcgactccgcgcgcgaggcaacctgaactgggatcaggattccggtacccattacgccagccaggatatctatcttcagcgtgatatcacgccgctgaaagcgcagtttatcgccggcgattcctatacccgtggcgacgccttcgattccattagcctgcgcggggcgcgtttatataacgatgaccgtatgcttccgaatggtatatcgacctatgcgccggtgatccgaggggttgcaaacagcaacgccaaagtcacgatcgcccaaagcggcaatacgatttacgaaacctccgtccccccaggaccgtttgaaatcacggatctcagtacaacaggttacggtagcgatctcatcgtcacggtagaagagacggatgggagcaaacgttccttctcagtcgcctattcttccgtcgcacaaatgcttcgtcctggctactcccgatgggatgtcggcgtgggtgaactgcgtgatgacagcctgcgcgacaaaccaaaggtgggatatgcaacgggctactatggcttaaccaataccttcacggggtatgcgggcctggaatataccgatagcgatttttacgccacattgttgggtattgccatgaataccggagctggcgcattcgctcttgatgtcacgcattcggatgcccggatagacggcttacgacatctcacgggcgaaagttatcgcatctcctacagcaaactcatggaagccacgaatacctctttcaacgtcgccgcctaccggttttcaacgtctgactatctcagcctgaacgatgcggcctcgttgaccaatgagatcaaataccgtgacagggagcgtaacccggaacgtaacaacagcgacgtgtatcagaccttccagcgcatgaaaaaccagatccaggtgaatatcagccaaccgctgaatattgccgatcttgatttgggatcgctgtatgtcaactcaacctggcaggactactggaatgaaagcagttcgtcggcgcaatactcggttggccacagtcattcgctaagctggggaagttatagcctcaccgtgcagcgcacctacaatgagtttggggaaaaagatgacagcgtctatctgaacctcacgattccattcgacacgctgatgggtaacagcaagcgagcgggtggattctcctcactcacgacgggcatcggcagcgatttaaaaggcggtagtagctttaacgccagcgccaatggcaacaccgaagataaccgtttcagttacagcattaccgaaagcaccacgcgttacgacgatacgttaaatcagttaagcgggtacggcagttacaacggcccgcatggaccgctaagcctttccgtctccgcctcagatgacggtacacgacaatattctgccagctatagcggcggaatggttctgcactccggtggcgtaacactcgccccaggcagcatcagcgaaagcgatacgcttgccttaattaaagctgagggggcagaaggcgcccgcgtctctatcggtaacggtgaaatcggcgcctcaggctatgcccttatgccctatctgtccgcctaccgtgaaaacagcgttggtcttgatatcagcgaaatgcactcagacgtggaggtgaaaaatacccgctccaccaccgttccccgtagcggtgccgttgtgctggttaactttgaaaccgatcaggggcgctcagtgttaatggaactgatgcgtgacgatggcgggtttatcccgttaggcgccgatgtgcaaaccgaccagggcgtatccgtgggtagcgtgggtcaggccgggcaagcctggatccgcggaattgaagataaagggacgttaaacatcgtctggggaaatgaacccggcacatcctgtaccgtctcctaccacatcccaccggatgcgaaaaagattggaccgacaacgctgctgacgggccagacctgcctcgtcacagccttataa

SEQ ID NO: 124156 - DNA, 579 bp, Enterobacter cloacae
atgctttttagagcctggaaaaaaacagggttagttattttaagcacggggctaatggcgttgtcgctggaaacacacgccgataatctcgatattacttttaccgcgaatatccgtgacaccacctgcgatatgaaaatcgaaggcggcagcggtgatggcaccagcaacgttatccccattgggactaacggcaaggtgcgcctggattacatcatcctgaaaaatgccaaagccacgaccaactttaaactcaaaatggtctcatgcccgccgagtctggcatcgctgaaaaccaccatcagcggtagcgccagcccgctgacgacggcaattaagaactcactctccggcgacggcagtgcggaaaatattggcgtggcgatttcccgtaccgccaccccgaataccccctttgtcattaattcatccaccgatacacagcgcctcgtctggtcgagcggagagataagtgctggcgaagtttcacttctggcaacgctggtggaaaccgcaaacggccagggcacgaccggcaattttagcggtatcgctacgtttaatttcacctatgaataa

SEQ ID NO: 124157 - DNA, 543 bp, Enterobacter cloacae
atgaaaatgaaaatgacattactggtgcttgcaatgactgccaccctgccttccgttgcgttaagtgcgattacggggacgacgagcgtgcaggcaacgtttacatccaccattgaggccgggacctgtaacgcggagatccaaaacgccagcggagccccgattgacattttgccgtttggcgatgtgtttaagtctgacctggtgagccagagccgacgagaaaccttcaaaatcgccttcacgaactgtgccggggtaaaaaacgccgccattcaggccatgccgggtgcaggcgggtcgtgtaccggtaacgcatatgcagccgggcataacgtcggttttgaaatctggaaaggctctgtcgactcaggctccatattgaactgcgccactgtcccgacgtctgtcatcaacctgtctaacgggacggggaattttgaaatggatgcgcgcatcgtcattgcaaatggtaaaacgatttcggacgtgacgacaggttcggtcaatgcgcccgtgacgtttactgtgacctatcaataa

SEQ ID NO: 124158 - DNA, 636 bp, Enterobacter cloacae
atgtttattcagacaggtagcttaaacaggatgttccagtcccgcttaatcttaagaaatgcgatgtcatggctggccctctgcctggggtttcccgcagcgggttttgcctccagcctggaaatggatatgacggcaaatattatcaacaatacgtgccaggtcagtattccagaaagtggaagcgtaacgctgccaacggtgggaaaaacgtggttttataccgcggagggcaccgatcgacttcaaccagcagaccccgcgggaggaacacgctttatgattgaggttgtggactgcagcggggatgaatcgggagccgggcaagcgctgcactttacctttaaaccgcagtctgcccaaattgatgggatttcaaaacagatattcagtaatgaaacatccgcccttgctggcggcgctgaaaacgtggggattgttattttttctgaatccaataatcaaaacgtcctcgacagcgaggggcagtctgatgtggaggtcaaaatagcgaccccatcagaccaacaaagctatttgaaagcgtataacttttacgcccgctaccaaaattacggcccggtcagcgcaggaaaagtgaccgcgcgcgcattagtcagcgtgacatatcgctaa

SEQ ID NO: 124159 - DNA, 1077 bp, Enterobacter cloacae
atggcacagcgtcctgggataaccgtgtccccacgttttaacggttttatcattttatttatgcttttaaccatgagcgccttttacgcccatgcagattttgaatgtaaatttcgatttggcgacacgcagtccatcggcgactacaatggcgcaaagccgaccctgcaaatcgtggataatgtcgctgttcctacaaaaatcagctcgctatatcgcctggatctgagccccggattaaatagtaaatgcacgttaggaaaacatggcgaaaacattttcaccctggcagacgccagtctgttagtcggcagtattgatgggaaagctttattcaaaaccaatgtaaccggaatagcctatgctctggcttttggcacagtagacaatactgccacggcctatttcgctcccagtacgagctggtttcttgcattacacatgaatgaccaggatgagctgctggataatcgcgcctggcgggccatggtcgaattttaccaacttcccacgtttgccggtattcctgctaacgtagtatctattggcccggttggtggaacaattggaaaaattaccattggagacccggtgggaaccgatccagacgatcatcccaaaccgaccattaccatagccaatatggccttcattacaccaatagaaaaacccacctgcacgctcacggctcccaaaaccgtagacctgggggactatggtgtatccgatatcgagaacgataaaaccataaacgctggtgtggcagtgacagggaattgcaccaacacccgtaaagtcaccgtgaagttgaccaccagtaaaacaaccgggactgatggctcattactcgccaacaccgcatcgtcgaacgcggcaaaaggcgtgggcgtgttactgttgtggccgaacaacaggcagatagtgcctaattcaactagcagctttaccgcacaagagaacactacccttgccctattcagctggttacttacggcccggttagttaagtctggtacagaaaaagtcacctcaggcacgttcagcgccatcggcaccctgcagttcacctacgagtag

SEQ ID NO: 124160 - DNA, 324 bp, Enterobacter cloacae
ttgttcaccagcctgatggcaatgtgtgcgaacagctatgcgctcagtgaaaatgaagcggaagatatggccgatctgacggcggtttttgtattcctgaaaaatgattgtggctaccagaatttacccaacgggcaaattcgtcgcgcactggtcttttttgcccagcagaaccaatgggacctcagcaactacgacagcttcgacatgaaagcgctcggtgaagacagttaccgtgatttaagcggtattggcatcccaacggcaaaaaaatgcaaagcgctggcacgcgattcgcttagcctgctcgcctacgtgaaataa

SEQ ID NO: 124161 - DNA, 621 bp, Enterobacter cloacae
atgaatatacttatttatgatgaattgccgctgttcattcatggcatccgatgccgttgggctgaacttgcgcccgcattacacatcacagcagcacataccgaagatgaggtctggaaaggtttaataaaagtcaggacggatgttgttattctggatgcggattatgaaatagagaaaaaaagagcgttattaacccagttaaaatcgcaggcggacactattttagtgttgatgaatttttcacggctggataatgtcaacccgatttattttctggaatgtggtgcggcagggattttaaccaagaaaatggagtcggaagagttattgcaggcaattgaatgggtgcggcaagggagaatatatttaccggatagttgcctgcgcgaacataaattaatacgcatgcagaattatccatccccgctgtgcacactatcaccccgacaacgtgagattctgcatcttgttgttcagggaaatagcaataagcaaatttgtcgtgtactcgggattgcggaagggacggttaaaaatcaccttcacgccctgtttcgtcaactgggagtcagaaaccgcacggaagcggcgatgatactggcccaaacgactgtttag

SEQ ID NO: 124162 - DNA, 672 bp, Enterobacter cloacae
atgccagatgcaaatgttgatgccggatttattggttcagttattagttcattgccgctagacagtatgatttccgcgccattacaggcaatgattaaagcccaaacccaggcagccaaaagttataccgatttcttattaagcgtctgtattaaagatggcaaagccgtttcggtacagtttgattatgaggagaccctcgtcgatgagaaaggcgtgacgaccggtacgcaaaccaaagtcatgcgcattcctctgctggcggcagtggtgcaccccatcatctgtatcgaagaagggaccatcgacttcgagcttgagatccatcagagcgcagccagcaatgaaagcagcagccaggaaggctccctggagggcaaaatcggctggggtccattctccgttagcgtcaagggcagcgtgagccataagtcggaacagacccgttcgaccgatacccgtgccaaatactccatccacacctccgttaaacgtcagccgatgccggaagcacttagccgcgtggtcgattatctgaccaatgctgctaccaaaccggcacaacgcgctggagatcaacccgctgagctgcctgcaaccaacagttcaggtctgattacaccagcaccagcaccagcaccagccgcgcctgctcaggggggtaacggctaa

SEQ ID NO: 124163 - DNA, 708 bp, Enterobacter cloacae
atgcctgattcacgtcgattctggttcagccgtaaaacgcccggcgatgtaaagcctgaagccagtaccgaacccccggcagataaaccgacgacggtatcgtcagatcccccctctgccgcaactccgtctccttctcccgccggggaggaggagaacgccggaagcaatgacggaggtggcggcgggggcgatgacggaacgccgcccccccctgccggcaacaagggcaaccacgcgatgggattagatgccctggtacaagggctccagcatgccgcctttagcgccaaccagtatatggcccatcagtacgttgccgtgctctcgcagctatttgagcaggccccggacggcagctacaaacccgactatgccgagcttcagctggatgacgggcatcgattgaacgtaccgctggtgacacttgctccaccgcgcaatctgtcaatggagagaatgaagatgcgcctgaccgttcgcggtgatgccacagaagccatcagcacgctgacaggacagggagagcggggtcacttccacgtcacgatggcgccccagccccatgagggcaaaacggacagccagaacattgatattgaaattgattttgtcgctcaggaaccgccggaagcggtgctgcggctgcttgatgaatttatccaccgtatgacccccgtccccgtaaaggagaatagccatgagtaa

SEQ ID NO: 124164 - DNA, 450 bp, Enterobacter cloacae
atgagtaatgccttgaaaacaaccggcaatggcggcattgcccttatcaaacagtacgaaggcctgcgtttaaccacctacaaagacgcagtcggtattccgactatcggttatggtcacgtcgaaaacccggtcccgccaggcggcacgcggaccatcaccgcagaagccgcagaacagctccttcgtgatgacctgcagcgttttgagcacgaggttaacaacatgctgactgtggaggtgacgcagaaccagttcgatgctctggtgagcttcgccttcaatctgggcccggccaatctgaagagttcaaccctgttacgcaaagtgaacagcggagacgttaacggcgccgccgacgaatttctgaaatggaaccatgcgggtggtcaggtcctggcgggcctgacagcacgtcgtaacgctgaaaaaactctttttttatcctga

SEQ ID NO: 124165 - DNA, 972 bp, Enterobacter cloacae
atgacaattcgaattctttcctggcgtgctgactcctttatgcatgaggcagacgacctgcgaagtgcagataacgatcttctgactcacgccaaagagcggatggagtttcgtctgagccaggttattgctgagctcaaagcggtgctggaaactgacaccggtagctgggaccatacctttgtcacgcttccggaatttttctggaatacccgctggagtaatgtgctcagtgaagatgaactcatgcaactcggtgacttctacatggaccatgtcagcgactacgttaacaggctgattgatgccttcccggcccgttccggggatccctcttctgccatcacgtttctggcgggaacatgtgccatcctctaccgcgacgataaagagagtgagaagacgccctgccacgatcccgtttttcacgctgtgaattggttgctgtgcgggcagaatacccgtagcgataaatctctgacgatgtggccaaaacgctacgtttccacaattgatttctttcctcaggtgaacggtcacgcgatcccaggtcatatttcagcccaattgccgaatggtcaaatcattcatattggcagcagcagtgaagtgtcggcagaatcagtgcatgggatcgttatcaccgattacttcaccaatacttatgctgacgataagccatttagcattgatatctgcctagattattttacccagaacggtgttcgcccggcgggctgggaacagcgggtagcggagctgcggagtaaacacagtgacattgatttcctgatagcctgcggaatgccggctggcgatccgccgcaaaaccctggcggcgtacaattccttgtacgcaacgatggtatgccaggcgtttcccaatgtcaggcgtggtcattcagcgccaggggggcgtcacccgttgcggcgaccaacccgaccgctaattttgtgagatttttgctgtag

SEQ ID NO: 124166 - DNA, 1545 bp, Enterobacter cloacae
atgaagttgccctttaaaccacatctgcttgttcttctgtgcagtgccgggctgtttgccgcctcaggcgtcatgtttgtcaaaagtcgggcgacagagcctgtcgcccccgctcccgtcgcacaacaaccggtaacccccgcagcagcgcaacccgcccctgtcgtcgccccagcctatacggccgcgcaaatcgatcagtgggttgctcccatcgcgctctatccggatgccctgctgtcgcaaattttaatggcctcgacctacccggccaacgtcatccaggcggcgcagtggtccaaagacaaccctaaaatggaaggagacgccgctatccaggccgttgccagccagccctgggatcccagcgtaaaatcgttggtcgcgtttcctcaactgatgtcgctgatgggtgaaaacccgccgtgggtacaaaatctgggggatgcatttctcgcacaaccgaaagatgtcatggattccgtccaacgcctgcgcgcgctggcacaaaagaccggcgccttacaatcgacgcctcagcagacggtcaccaccgtgacgaaacctgccccggcgaaatcggccaccagcgaatcgacggcttctaccacgcctgccccgacggtgatcaaaattgaatccgcggatccgcaggtcgtttacgtccccacctataaccccaataccgtctacggtacctggccaaacactgcctatccgccaacctatcttcctccttctccgggagagcagtttacggacagtctggtcaaaggcttaggcttcagcctgggtgtggcgacaacctacgccatcttcagcaacatcgactgggatgatgacgacgactgggaccaccatcatgacgatgactggaatcacggcggctataaccgcaacggtgataacaatatcaatatcaacgttgagaacttcaacaaaatcagtgggcaacgcctgacggatgccaaccgcacctggcagcataacccggcgtatcgggaaggtgtgccctaccccaccagccagcttaataaccgcttccattccactaacacggtaacggggctcagttctacgcagcaaaaaccggttaaccgcgacagccagcgtcaggcggccctgagccagatggagaaatcgacgggtaaaaccttcccgcaaaccgcgcgtccgggaaccagagatgcacagcgccaggcttcaggcgaacagctgaagcagatatcccagcgcaacaactaccgtggctacgacaccagaccgcaaacggcaaagcgaaccacctcgcagcagcgtgataatcaccctgccgtaacccagcggcaggagaaacggatcgcgcagcctgctcagcaacgccatatcccgcagcgaaccagccagcctcgcgcaaatgccttgagcggcaacgacagccgctctgccaactggcaagcccagcagcaacggggggcgcaaagcagacaattggctgcccgtcatcagcagccgcgtcaggcacctgccggacgtgctgaacaccgtgaattccgtcatcgttaa

SEQ ID NO: 124167 - DNA, 792 bp, Enterobacter cloacae
atgaaaacgaatcttgtctgtggaatggtgttgttcatgatgtccgccgctgcgatggcacagcaatccttcagcacgcccgctcaggcgaccgatgcgctggcgcatgccatcagtgaacagaatgaaacggcgatgaacaatctgcttggagagaactggcgcgattttctgccgcctgaaggggtcgatcctgatgctgtcgatcgtttcctccgcgactggaaggtgcggcacaacacggttatcgatggtaatacggcgcatctggtcgtcggaaatcacgactggcagttgcccatcccggttgtcaaaaccgctgccggatggcaattcgatatcaaggagggcgccgaggagatcctgacccgcgagatcgggcgtaacgagcttgccgccatcgaagcattacatgcttatgtggatgcccagcagagctatttcgccatgaatcaaaaatacgcgcagaaaattgtcagctctgaagggaaaaaagatggtctctactggcccgtttcgccgggtgaagcccccagcccgctggggccggccttcagccccaaagagcccggtgcaggctatcacggctatcggttccgtatcctgcctgatgagaaaggctttgcgatggtggcatggcccgtcagctatggccagaccggcgtcatgagctttgtgataaaccaggatgacaaagtgtaccaggccgatctcggcaatgactctgagcagaaagcccaggcgttaaccgcctataacccggataaaacctggcagcctgtggctccataa

SEQ ID NO: 124168 - DNA, 1398 bp, Enterobacter cloacae
atgagcaatgaacaagtaacgtctggatataaaacgttaaaagtaatgggtgccagaacacaatgcggacaaggttatacgaaaaacgctgttcataaattggttgcccttgatcaggacaccttacagcctgttgttgtagactggagttatgaagatgaacccactgttcgtttcaccggtgcgatttttaccgatacacgaccgaataaacgcctgcttgcggtttctgatgtatatcgccagggggaaattatcaatatcagtaattttggtggggcagggtttgctttagccgtaatcaaaaatgacgggacggtagttgcgtggggaaagccaacgtgtggtggaatgtctcctacaagcgatcgtaatcataacgtcaatgctatttacggtggaatggatgtttcggcggccgttaatgttaatgggcaggtgtttacctggtccgttgatgacaataatccgttacctgagaatattgccgcactaaatgatattgttgatattaaagttgctcaatatggtgacgataatggtaattatacctatctggcattgagagcaaataatcaggtcgtccagtggacggatggtaagtctcatgatgatttcccacaggacattgcagagcgcaaagattttgttgctatacaaacgaatgaatatgcctttgctgcgataacatcaagtggtcatgtaataacatgggggcaggcgtcttatggtggtgaacttccggagcatttaaagagtgttaatgatgttgccacactatatgctaatgaaggtgctttcgttgcgctgagaaactctggaagcatttttgcatggggtaacacttattatggtggccaaattccagaaagcattgccagcttaaccgacattgcctcaatacacgctactagccattcattcattgctttaagagagaatggtagtgttgttttttgggggtatggtcgatatctgcgtgaattacctgaagaaattgcaagcctgacaaatattattgatgtccaaggggctgtaaacggcagttatgcatttttaacggccgaaggtaaagtttattgttggggggaagtattaatatacgatataaaaatgccagaggatttaactgatgttgtttccctgactgcatcatgtgattcgtttgcagcactccgccgtgacggcaccgttgttgcttggggaatgcctggaggtggggatacaacctcagtaaaagatgagctgtataatatccgcgcaatctacgcaagcggatacagtttatgcgcgctaagagatgacggtcatatttttgaatggggtgcagaggattctccatcgtttacaaaaatgcctgcagatatacagggacaggtaacctatagctttaactaa

SEQ ID NO: 124169 - DNA, 162 bp, Enterobacter cloacae
atgagtaggggcttttttattaggcttgagaattttaacggattaaatttcaaaatatcatttaatattaatgtcctgttccggatggttattattcttgcgctggctattttatatcgtgaatactctcttttaattaatgagccaaagagagaagtttag

SEQ ID NO: 124170 - DNA, 1185 bp, Enterobacter cloacae
atgagtgttaatcatctctggcgctggcgggcgctatccagtgaaggcgaatctctgtgtggggtgctgtgggcgccagatcgcgaaacggccttcgtcaggctgatgcgtaaagagttacacccactttcgctcacccgatgctcgctgacgcaccgctggcaaccccatcattgctatgagatgtttcgccagcttgccacgctgttgcaggctggcctgacgttatcgcaaagtctgcaaatgctggccgagcagcatcctgtcaaacactggcaggcgctgctggaaaacatgaatgatgatctgagcgagggatgcgccttttcagaggcgctgaagcgatggcctgcggtatttagcccactgtatgtctcgatggtaaaaacaggggagctaacggggaagctggaaacgtgctgccgccagctcgctcagcagcaacaatcccagcagcaactcacggcaaaagtgaagaaggcgttgcgctatccgacgatcatcctggcgctggccgttctggtcgttctggccatggtcaccctggtcttgccggagttcgcggccatctacaaaacgtttaatactcccctgccgctgctgacacagatggtcatgggcctgtcggcgtttatccagacatacgccatcgccctgttcgtgctgctgcttattcccgtggccatcgcctgggcgctgcgacgggatccgcgctggcaacgtatcctgatgcatattcccgtgacgggaaggctggcaagagggcaaaaactggggcagatctttaccgtactgtcactcacccagcaggcgggcatcccctttttacagggattacagagcgcggaagagactgttgatagccggtactggcaaggtatattgcgcagcgttcgtggggacattgaacaaggctttaccgtctggtcttcatttcagaaagcggccgtttttaccccgctgtgcattcaactcatacgcaccggagaagtctctgggtcactcgacattatgctggaaaaccttgcccgccatcatacggagcaaacctttcaactggcagataatctggccgcgcttctggagccagtgctgctgattgtgacgggggtgattatcggtacgctggtggtggcgatgtatctgcccattttccatctcggggatgcaatgagcgcgggataa

SEQ ID NO: 124171 - DNA, 1938 bp, Enterobacter cloacae
gtggaaaaagccaaacgggtggtctggcgtctgctggcggccagcgtatgcgtaatggcggtaagccaggcggtgcatgccgattcactggatgaacaacgtaaccgctacgcccagattaaacaggcgtgggacaacaaacagatggatactgtgcaggcgttgatgccgacgctgaaagactatcctctctatccctatctggagtatcgccagattactgacgatctcatgaatcaacccacggttaccgtgaataacttcattcaggcgaatccgaccctgccgcccgcccggaacctgcagtctcgttttgtaaacgagctggcgcgtcgtgaagactggcgcggtctgctggcgttcagcccggaaaaaccgaacaccacggaagcccagtgtaactattactatgcaaaatgggccaccggtcagcaggaggaggcctgggccggggcaaaagagctgtggctgaccgggaaaagccagccgaacgcttgtgattcgctctttggtgcctggcgtgcttccggtaaacaggatccgctggcttaccttgaacgtatccgtctggcgatgaaagccggaaacacgcgtctggtgatggctctggcgggacaaatgccgtcggattaccagaccatttccacggccgtgatgtcgctggcaaacgatcccaacagcgttctgacctttgcccgcagcacgggagcgaccgattttacccgacagatggcggcggtggcctttgccagcgtggcgcgtgacgatgtcgaaaacgcgcggctgatgatcccgcagctggtgcaggcacagcagctcaatgaagagcaaacccaggaactgcgcgacatcgtggcgtggagactgatgggctcggacgtaaccgacgaacaggcccgctggcgggacgatgccattatgcgctccaactccacgtcgctggtggaacgtcgcgtgcgcatggcgctggggacgggcgatcgtaaaggcctcaatacctggcttgcgcgtctgccgatggaagccaaagagaaagacgaatggcgctactggcaggcggatctgctgatggagcggggacgcgatgacgaagccaaagagatcctccacgcgctgatgcagcagaggggcttctacccgatggtggccgcgcagcgtctgggtgaggagtacaccttccgcattgataaagcgccgggtaacgccagcccggcgttgacccaggggccggaaatggcgcgcgtgcgcgagctgatgtactggaatatggacaacaccgcccgtagcgagtgggcgaatctggtcaccagccgcactacggatgagaaagcccagcttgcccgttacgcctttgataaccactggtgggatctgagcgttcaggcgacgatcgctggcaagctgtgggatcatctcgaagaacgtttcccgctggcctacaaagatctgttcgatcgctacaccagcggtaaagatattccgcaaagctacgccatggcgattgcccgtcaggagagcgcctggaacccaaaagtccgttccccggtaggggccagcggcctgatgcagattatgccgggcacggcgacgcatacggtgaagatgtttaatatcccgggatacagcagtccatcacagctgctggatccggataccaacatcaatattggtaccagctatctgcagtacgtctatcagcagtttggtaacaaccgcattttcgcctctgcggcgtataacgcaggcccagggcgcgtgcgtacctggctgggtaacagcgccggacgcatcgacgccgtggcgtttgtcgagagtattccgttctcagaaacgcgcggctacgtgaagaacgtgctggcgtatgatgcctattaccgttacttcatggggcaaaaagataccctgatgagcgatgcggagtggcagagacgttactga

SEQ ID NO: 124172 - DNA, 882 bp, Enterobacter cloacae
atgaacagcaatgcttttcctgtaattgtcatgactcgaaatgaaggggtatttctatctcgttgtatcgaatcaatgattgctaatgttagtatagatatacaaatttatattgtcgacaataactcttgtgatgaagaccatttaactttactggccgcattagaaaaaaaatataaaagcattctgactgttattagaaataaaagtaatagatgggttttaggcctcaataaaactttaaaaacaatccgactaaaccataccagtccgtacttttttattactgatggcgatatcgattttacgatatgtaaagcccgcccgtgctggttaacatatcttatagagcagatggataaaaatattgttgttggcaaaattggctattcattggattggaattacttatcaaagcaagataatctaaaagaaatccttgcacaggaaatgtcgctatataatgaaaaaaggaagattaacgatttatatattgctcaggtagatactacggcgacaatatttaggtgggattggtcaattgagggtaacggaaatattttccctgatcatatgcgatatctccgccccgaattgtactcgtgtaggacgactaaaagtcttgtcgtagaacatcttggttggatgaattataaaagtaatgcgttaagtacagaaaatatcgatagtaaagttatgtgctttactattgttggtgcttctttaaaaaaagagatattatctcaagcaagtctttcggcgagagttttcttttatctgttaaacaggccttttcagattctatggatattgcgacgatatttattcctctttaaatatatttcaagcaaagggcgcaggctttttgatggtcaaaagtga

SEQ ID NO: 124173 - DNA, 1098 bp, Enterobacter cloacae
atgtaccttttttccaatagtttaataacacttttttttctattgcacatcgtggttttatttattggagtagcaattgcttatactaattcaaagcgttttgatatcgttggtatagtaatcgtcgggcttgtatatattgcgctaaattacacaagaactggtttgggagtcgatgaacctgtttatttagaagcttataaagattatatacaattaggtatactccattttgaatattcctttaatgctgtgtactatttgctatcattagcagatgtcgaacctttatattttaatagaatactttcaactctttttatattaatctctattgttgtaattttagaatgcgttgcaaaaccctatcaaacactggggttggtgtttttcttatttttttctatcactcttgattttgttttcaatgcttataggcaaggttttgcttttttattcgtggcattatctttgcattatttttcagacaatcggaaaaaaaaatcagcacttatgtttctcattgggcttggttttcattggtcatccattgtcgttgctattgctattttagtgcatagatttatctcacttcggttagcaagaagattaaatgttgtagttttgttgctaacatcggtagctgccgtcgtgccgttaaaaattattccatttgttagtgctgttcttcttgcgggaagttttgggtcaccttatgctctgaaagttattcattacttagattcccctatagcttatttttatgatttgaatatgctggggcgtttgccattaatgatagccgtaataacaacattgatatatgtgtttatatataggaatataatcccagtattattttataaagtcatgattatattaatgttgtattgccttttatttctcgagatgtcatacagtttcaggaattattactgggtgcttcctttcttacctttactcatggccaatatgccatgcttcgtaaaaaataataacgaaagaaaatcagcgcttgttatagcattattatttcatttgatcttatcgattacaggatattatacgtcaggaatcatgccaatgatttttcaatga

SEQ ID NO: 124174 - DNA, 951 bp, Enterobacter cloacae
atgcttaaatcaaatagattttttaaaatagccgttttgctttcaacctataacggaatgaattatattcgcgaacagctcgcgtctttatatgacctatatgtagatgattgttcaatagatatacatattcgggacgatggttcatcagatgagacggtaaaattaattaaagatttcatggttaataaaccaaatatttttctttatgaagaaagtaatattggagtaataaatagctttcttagtcttgttaagaaaattgatggctatgacttttatgcattctgcgatcaagatgatcattgggagccgttgaagttgatggccggtattgtaaaaatgcggcaagtgagtttatctcttccaatgatttactgtactgcatatgattatgtagatagtcaattaagctatattgggcgtttcgtttctgcaagtgatttttcgatttcaaatttattaattgaaaattgtgctcccggttgtacaatgcttttcaattcttccttgcgtgatagattcaataatataaatattcctgaaattgaaaaacgcgttgttatgcatgactggctttttttattgcttgcagcttattatggtcaaataatctatgatcggaactcctacttacaatacagacaacatgctaacaatgtaattggaaagaagagtggggttgtttcaataattaagtcaaaagttaaacagttcaaacgtgagatcaaaagacctcagcatcttttatattcacaaatagaattgctttccgaaattacagcagacgatccatcaagtgaaatgcatcgtctaagttattcttttataaactcgcaagatacctttttttcaaggctaaaatacatttgtaaaagtgaaattaagcgagtgaaaaagctagatgatataatctttaaggttttgtacatcttcggatattacaaataa

SEQ ID NO: 124175 - DNA, 1131 bp, Enterobacter cloacae
atggacaatcaacgaaaaattcacatagcattagtcgcaaatacgttatggtcggtatacaactttcgcaaaggactaattaatagttttatcgaaaatggatatgttgttactgttatcgctccaatagatgattacgcaaaaaaattgcaagcgttagggtgtaacgttgtagatgtacttattgcatcacaggggaaaaatccttttgttgatctaatgttaattctaaaattaagaaaaatatactctcagataaaccctgattttatttttcattatacaattaagccgaatatctatgggtcaattgccgcatggctttgtaataaaaaatcaattgcagttacaactgggctaggattcgtttttaataaaagttctttttttaccaagattatttccaagttgtattcattttcatttctttttccaaaagaagtttggtttttaaatgaggatgataaaactgtttttatttcaaagaatattgttaaggaaagcaaagcatatgttctggatggtgaaggggtcgatgtaaattatttctctcctgagccgtatgcaaatcactcagatgaagacattacatttttgctagtagcgcgaatgttatgggataaaggggtagggatttatgttgaggccgcacggaagataaaggttcaatatccccatgcgagatttcaactgctaggggcatgtgatgttgagaacccgagtgcgatccccaaagaggtgattgaatcttggaaagaagaaggtgttatagaatatttgggcgtcacaaatgatgtccggcaaattgtttgtcaagctgactgcgttgtgctgccttcctattatcgtgagggtatacctcgaacgttaatggaggcagcctctatggctaagccgcttataacaacggataatgtcggttgcaggaatgtcattgttgacggcgtgacaggttttttgtgtcaggtaaaaaatgtagacagtttagctgatgctatgcgcaatatcattcagcttacccctgatgcgagaagcgaaatgggagcgaaaggaagagaattcatgcttcgacgctttgatgagaaaataatcatttctgattattataaagctattgaaaaatatatttaa

SEQ ID NO: 124176 - DNA, 1920 bp, Enterobacter cloacae
gtggtcttaaaaaggaaacaacctaatgcaggttatcgcccagatattgatggaatccgtgcgattgccgttttatccgttattttttatcatttcgcgattccgggtttctctggaggatttactggagttgatgttttttttgttattagtggttatttaattacaaatgggatagtaaaaggaattgatagtaataaatttacgttaagtgattttttcctccgtcgaaccagaagacttgttcctgcgttgttaatcaccataacagcaacatttattgcttcttttttcattctggcaccaaaggacttagcctctctttctggttcggtggtttatgctctggcgggtatttcaaatatatatttttggatgcaatcagattattttgataatttctcatcacttaagcctttattgcacacttggtcattgagcgtagagttgcaattttacttagtttggcccttttatcttattgcattgtgtaaattcacgaggaataattattttcgcgctgcgggtatattgctgttcattattttgtttagtgttttggctatctggtttattaatgttgattctagcggtgctttttatttgacaccctttcgtatgcatgaatttgcaattggggctgttggggtatttatttctaatgtggtaaaaaataaaagcttaaattcatttttttattttattggtatactgcttgttctatactcaatatttttttttaatgtccactctatagtttttccggggatttatgcattggttccatgtgttgggacattgctaatgataatttctggaagaaaaactgaaatatcctttgtactatctcatcgcatcccgaattacattggggaaataagctattctttatatttggttcattggccagtctatgtcttatgtagttatgtctttatatttacaccagatttaacccaaatagtttggatgcttattcttaccattgttctgagcaatgttatttatttctgtatagaaaaaccattccgtaatccgcatgaaacaaaattaagtggttcggcattttcactggcatgtgccttggtcgggttggttgtccttgtgccttctgctagtagttgggctaataatggttgggaatggcgtcttcctgaagaaattcgcatgattaatcagattgacaagaaagatgcatttgactatacatgggttgagcaacgcatattggctaagaaaaaaggctttgaggaaaatagcaataaaaaaaagatattagttattggtgattcccaatcagccgatctcatcaacattatgcttgaatccggtctggttgataaagaagatgtggttgcgagaactatttattttgattgcggtactaattttgttaaagacgaagagtcaaataaatttttctcaacattaaatgccaggacaattgcaaagccagaattaataccaatttgtaaagctcagatgaaaaatgcaatgaatgaagaattgttgcgtcaggctgatatggtatatatagctttttattatcaaccaaatctggttgagtatgttatagatggtgtcgaaaaattgcgatcgttaactgatgcgaagatatatctactgggacgtaaaaatcttcagaagggaagtgttgaaattgttaattctttcaaccgcctggttggcatagaacgatttgcaaccaaattccgagacaaagaaactgatattattaacaccaaacttgcaggcacagccggtgtaaaatttatcaacatgatggactatatttgtcccgataaagatacatgcgtagctgttacggataaaaataagcctatattttatgatccagcccatttaacgagatttggtgcgcaatacttgacagagaaaataatgcccgatttggagtaa

SEQ ID NO: 124177 - DNA, 333 bp, Enterobacter cloacae
atggactctttgtttgtctacggtacgttacgcccgggccattcaaatgcacatattctcgaaagcatcggcggtgaatggcaggccggttttgtcaccgggacattttatgcgcgtggctggggcgctgcggcagattttccgggtatcgtgctgcacgccgatggcccacgcgttgagggttatctgtttatctccagtaaccttgaggcacactggccgatgctggacgaatttgaagacggctacgatcgggtcgaggtcatggtgaccaccgccgaaggtgaccaagttaaggcctggatctatcagcttcagccgcgctctgcgtaa

SEQ ID NO: 124178 - DNA, 441 bp, Enterobacter cloacae
atgtttgtttcacccagtgatgaaaggcatgacattgtggaatcaaaaagacttattacttccggcagcagctgggaggaggctttcggtttctcgcgagcggtagaagcagacggttggctatatatatcaaaaacgggacctcttaattctggtggtgagattgaatctgatgatatctcactgcaaatggaatgtgttcttaataagatcaaggggatacttgaatcgaatgggtatgcgttagacgatgtaatacaaagcaggctgtatctgactgaaattgatgaatggcagcaggtggcccgtattcatgggtgctatttccgtgattccagacctgcatttacgttattgcatgtattaccctttcccgaggaaaaaatgaaagtagcaattgatattgtggcaaaaaaaagacagggggcaattaatgagtga

SEQ ID NO: 124179 - DNA, 1191 bp, Enterobacter cloacae
atgagtgatatcgcacaagaaaatgcggtttcgccgttgtttatctggtttgccagtattgcggccggcaccgccatggcgaataactatattctccagcccgtattacctgctatcgcgacatcgttgcagttgcccctgttttataccggcttcattgcggcgagcatgcaaataggttatatgctgggaatactctttcttgttccgctgggagacagcgttaaccgtaaaaaactgatcgtttgtcagtttttcctcctctcgcttgcgctgttcgccgcttccctgacccgccaaccgttgctcctttttagcgcgggaatagtgacgggcgcgatggcgacaagcgcagtgcagctgaatgcgcttggatttcacattacgccaaaaggcgccacggtcggcctgatcacgatgggcatctcggcagggatcctgctcgcaaggctagtgggcggcagtctggccgatgcgcttggctggcgaggaatgctggccatcttcgccaccgttatggcctccatggcgttactggccatcaggtgtttgcccgatgttaagcccgcaagggagacggggtatctgagcgtcatggcgaaattgccgggtttactgcgtaacgcgcggctgattgaatctgctttaaccggaggagcatggttttttgtctttagcctgttatgggtgaccatcatgcttcatctgcaaagaccgcctttgcatctgccggcgggaaccgccggattatttggcctggcgggtatcgtcggtcttgtactggcgaattatgcgggaaaactggctgaccgcttcgggtgtcgcagcgtgatttttggcggaatggtattcgtggttgcgggaataaccgtcctgtttctctttcctgcgtccttaccggggcttacgctgggcattatcttattcgatttagggtgttttgccgcgcaggtggctaaccagacgcgagttctcggcttacacccggataaaagaagcagcctctatgcgctttatatgttcttttattatgcaatgggagcagcaggatccgtaaccggtccgtgggtgtatgaaaggtgggactggcagggcatctgtttagtgagcgtcgtgatggtaattattgcgatgatgaccaccgcaataggtcattttaacgaaaatagcgtcgcccacgtttcgaactga

SEQ ID NO: 124180 - DNA, 1251 bp, Enterobacter cloacae
atgtttattattcagctttccgtgatcgttttagcctgctatgtcgtgggcaaacttatggagcagattggtcaggcgcaggtcattggtcatattgctgcaggcgttttattaggaccgacgttctttcccggaataatgtctctgttctcatttcaaacatctttatttagccaggagtcgctgaccaccatagataagcttgcgaatctgggcatgattttgctcatgtttgacattgggttgtcgcattttcatggtaataaccatggttgccgtaagcaaactatcgctgcattaaaaatagcggtattaggcatgctgcttccttttatcggtggtgtattagcggggaattcggtgcatgccgaactggcgccacaaaccgatcgtcttttttttaatgtctttatgggaacggcattggcggtatccgctctgccggtgattgtgcggatcattgaagacttaaagatgcttcacctggctatcattcctcccgtcatcaccgccgctattcttaccgatgtgacaggctggggaattttggctttggacagcgtatttgctgcggttgaaggaaaatccgattcgctgtggtcttatttatcggtcgtgacggtaaccctgatactttattggctggtgacctgcaaagtcgtggtcccactgctcattaggtatgcgcacaagcctgatatgaggtttccagcgattattttttggattttgatcagcgcgtggggagcggattatcttcacctgcacagtggtttcggtgcattgctggcgggcagtatgctcgcgcggatacccgggttagccaagcaatggcacgggagtatgaatggcttcatgcactatcttttactgcccgtgttgtttgtcagtgccggtctgaaaacgcatttcgacttcagtatggcatcgcaggatattgcctggattgtcgggttcaccttactggcatttattaccaaattcagtggtgctctgctcggggcgcgtatttcaggctattcactgcgtgaagcctccatgattggcgcgcttatgaacacgcgtggtctgatggaactggtcgtgctgtctattgggctcgaattgcacctaatttcgcaacgggtctactcgattatggtcatcgtggcgctcgtggtgacagcaactacgccgccaatattacgttggttaaataaagaatcctcttctgttgtagtcaataaaacgcttgaaaacattaaagggtaa

SEQ ID NO: 124181 - DNA, 264 bp, Enterobacter cloacae
atgaaactggatatgcctgtgattgtcgatcgtattaaagaaattatcgctgaacgtatcggtctggacgtcgagcgcgaagatattgctgacgagaccggtctcgcctcaatggtaggaatggattctattggatttgtagaattacgctttcagtgcgaggaagagtttaatattaaagttgaagataaagagttttcacccgcgaatttttattcgtgccaaaccctttcgcgtttcattatgaataagcttggagcctga

SEQ ID NO: 124182 - DNA, 1446 bp, Enterobacter cloacae
atgctaacgcgagcaaaagaatgtgccgcatttgttccctatgagccagccggattattttctccggtgctggcaacgtctgcggtggggaccagcggcactgagggagagagttatcaatactatgtcgattactggcagcggcagagtttagaacccggtcgggtagtgctgatagcgatgccgaactgcccggatttgatgtacatgttctttgccgtcctcaacagcggctttgtgccggcgctgatcccgccgctcacgccagcagaacggatcctgcagatgcttgaggactttgctgcaggggcgctggtgcgaatgccggttcagcaagggcgctggcaggagctgggggtgagcgcggccgaaagcttagggcgctggcaggtgggaaaatgccgtcatggcggccccgtacagacacaaccggggcaggtcgtgattgccacgtccgggacgtcatcgtcgttcagcagcgggtgtgttcatcattttgattctctgcgccgtaacgcgctgcgccatgccaaaagcatcggtatgagcgccagtgacagggtattgatcagtttgccgatgtgctattccaccgcgctggttgcacagatggttgctgccctggagacaggctgtgaaatggtgatcagtggacctccgttttctgtcccccattatctggatgatttacagcgatacggcgttaccctcagctcgctcactcccgtattgctgcgtcagctaaatgcctgggaaaccacgcttccaccgggtttgaaaaaactgacgatcgggggcgatctggctgcgccgcaagaggtggaagctttcttgctccggcagccatggcttgagttatatctaacttatggcatcagcgaggccggaccgcgggtgtcgacgtgcccggctcatctgctggggagaggatattatgcgtcagccggacgtcctattgaccagacggaagttcgcatcctgccaggtgcagacgggcaggacgggcagggggagttgctgatttgttctgatacgttgcttgtaaagcgtatcggtcggggtaaccgacaaacgtttattgagcttgatggcaaacgctggctccgcaccggggatattttcttccaggacgctgatgggttcctgtttttcaaaggcagaatcagtgatttcattgttatcagggatgagaaggtcaatatcggtgccgttaaacagctgtgccgggaaattaaaggggtgatgacctgcaaaacccaaatcgttaatgatggcgatcaaatcgcggggttcgatattttcttgacctgcgatgaatcagtaatcaatgaaaccaactgccagcagcacagcgccagcctgctgaaaaagctcaaacgccacgaacggccgcgaaatataaactttgtttattgtggtgcggcctctttaacacaatataagtaa

SEQ ID NO: 124183 - DNA, 684 bp, Enterobacter cloacae
atgaatgatgaacttcgggaactggcacgggcggtcattgaaaaatatcacttaatgaacctcgatgatattttgcgtgaagtgccaaaaacaatgtgccatgtccttcaggagtctgacgtgtttgaaacatggccagcggatatcgttcgcctcaagttccctgaggaacactgggattattatatttcacgttacgagcattttcgcgacgaggtcatacgtaacctgacgcctcaagattatcttattgaaatgctcggacaaacacagcgcttaccttgcttctgctcggaaatggccgatgtctcggcgatactgtatagccagatgattaataaaccggtgtattcattacgaaatatctttgttaattacctttatttaccccgtccgtggcattgtattaatgcggtggttgaggatgagcggattcggtattttgatatttctgcttatgcccaagtgctggaccgtaaaagaaggaaagtggttaagcctgccgagttggagggatttgatgcgacagatatcgcattcgattttattgaaggtccacgctggctacaaaaagagccttatcaacggaaaatagaattaactgcaggcgaaatcaaagataatttttatccttctccgcttgaggataagccctttaacgaatttttacgcacgttcaactga

SEQ ID NO: 124184 - DNA, 1116 bp, Enterobacter cloacae
atgactactacaacgtatgtcgcaaatgttgtcggcatgggatggacaactgcgtctggcgatcgtatcgaggatgtttttcagaccttactggaaagccagaccggtattgcgccagcgccatcggagcgaagtctgcgttccgatctggccgctatgctgccgggcgaatggccagcagaaatgcgtgaaaaactgatcgcgctgacaaaacgtactgccctccaggcgcttgaagattcgggggcaggagaacccgtgccggaggagcgacgctttttgattgtgggtaccagccttggattccgtctcgacagcgaggcgttttgccgggagcctctcgacggttgggttaacgaggtggcggcgtcgcttgggatggaagggatcgccctctctaccgcctgctcttcgggctcagacgcccttcttctgggggcgcatttaattgcgacggggcaagcggacctgtgcgtatgcggcggggcggatattcttactgattcaaaacgtctggcccatagcgcgctgggtacgctctccctttctaccctgaaatcgttcgatgccacacacgaggggacgatactcggagaaggggccggttttctggtgctgcaaagggaaggcgggtctgcgccacgcgtgctggcaaggcttgtcggcgcgggggcctctaacgatgcggcggggttgaccgcgccggatgagcaaggcaatggcatccgcctggcattgcagcgtgccctgacgcaggcgggacttgagcctggcgatattgcgcttattaatgcgcacggttcgggtaccttgaccaacgatcgggttgaaagcaatgcctacaacctgtttttcacccatcgtccctgggtcttcgctacaaagggtaattttggccatacgctgggggctacaggggcgctggaagccatcgcgctcattcacagcctcaatgcgggcacgatccccccggtctatgagctgaaaaagccgattgatggcctgcgctttaatttacccgctgcacggcctcagcccttaaagggaaaaacgggtatgagcatgacgattgggtttggtggttttaatacttgcctgatatttaccgtaatgtaa

SEQ ID NO: 124185 - DNA, 501 bp, Enterobacter cloacae
atggggcagctaatgaaaatcgtttcttcaagtaccgcaagctcattaatctggtccgatttagatgagaccttgcgccgggggttaaaaacagcagacccgttgtcattaaatgtgctgttcactgtcgatgaaatttatcaacagcatcaggcattgctggatatgcatcatgagagtgtcgggtttattcagtttggtacggcattccctttaaataccagtgagaaaattattaatgacatggcgataaaatcgcgcgtctcgccggtcgattttattaatgccaatgtgggagcgcccgtttccatttgctgtacacgctatcgctttcagggacccacaatggtactgacgatgccgcagcgtaccggcaaagagattgccatgtccctggcgagggaatggttaacgcagcaagcgacatatctttttctgattcaggccgatcacgcgcgtgaaaatgaaattgaaataacaacacagttagtcactcagtaa

SEQ ID NO: 124186 - DNA, 1692 bp, Enterobacter cloacae
atgaaacaaagtcattatgatgtggccatcatcgggagtggtattgctggaaccatgctcggcgctattctggcaaaacagaaattaaacgtggtgattattgatgcaggtacccatcctcgctttgcagtgggggaatcgatggtgccggaaagtgctgtgcttttgaaaattcttgcccgccagtacaatattcctgagctggcatggccgggggagattcacgcgctgatggagaatattggcacgtcgagcgcaggaattaaactggcattcagctttgcatggaacgggaagaataaagcgcataatccgcaggacgttgtgtcgacaccggtactgtctccggaagcacatctgttccgccaggatattgatgcctattacctggcgctggctgcgcgtctcggtgcagacattcgccagcaaacccgcatccagtctattgaagaaaccggcgacgggatgctgctggatctgggtaaagagcagattaaggtcaagtacgtcgtggatgctgcagggtttcgctcaccggttgccgataagttcggtctgcgcgaaggtgcacgtgagatgcagagccgtacccgttcgttgttcacacacatgacgggagtcaaactgtatgaagacgtcattgcctcaacggacgtgaccggttcgccgaccccgctctcacagagtacgctgcatcacatgtttgaaggcggctggctctggattattcctttcaacaaccacccctattcgaccaataccttatgcagcgtcggcctgcagtttgatatcgataaacatggtcctgcaggagacccggaagaagagtttacccgttttctcgacgagcacccctccgttgcccgccactttgagagcgcagcccgggtacgtgaatggaccgttgcacctcgcctgaattacaccagccgcgaaagcgtaggggagcgttactgtcttttaggccatgcggttggctttgtcgatccgctgttctcgcgcgggttggttaatacgttcgaatcgattctgcgcgtcgcgcctaaaattgttcatgccgtcagacaggatgactggtcaaaagagcgtttcgccagctatcaggattacagcctggaagtggtaaaagttaacgacaggctggtggcaaattcattcaccgcatttgatagcttcccgctgtggaatgcgtggttccgtatctggattagcggcagctacattggcgtcttgcgtctgcgtaaaatcctgagcgactaccagcagcacggcgatgacgagcggctcgaaaaggaatttgaaagcgcaacctatcccggccacctttccattgagagcccatactatgaggctatttttgataaggcctgcgaaacaatggaagcctatcgcgccggtaaccttcctgaaaaagaggtaattgctacgcttcatgcgctttttgctgacaaccgcgagcatttccccatcgatttctcagatttcacaaatcgctacctctcccgggcaacggaggaatttgccgattccctgttctactgggctcataatgcccccggcggcattggccacttgttcgatcgcggagataaaccggtccgattcgatttcctcgatccttaccgctatggcgatcgtcagcagttaaaccagcatgctgatgccatgttgcagcaggcgcgtcatcaataa

SEQ ID NO: 124187 - DNA, 1326 bp, Enterobacter cloacae
atggatactgtagtcgagcagcttttacagcgacgggagtgcgccgtagcccgtggcataaaccagatgcacccggtgtacattcagcgagcggaaaatgcggtgatatatgacgtcaataatcgacgctatatcgatttttccggcggcattgccgcactgaataccgggcatctccatcctaaagtcattgcggcagtagagcggcagctgcatcagtttacccacagttgttttgccgccaccccttatgaatcgtatatcgcggtgtgcgaacgtattaacgccttaatgccgggagattttgaccggcgcagttttcttctgacgacggggtctgaagcggtggaaagcgcgcttaaggttgcccgtgcggccacgcggcgaagcggggtgattgtcttcagcggtgcctatcacgggcgtacgtttataacgcttgcgatgaatggcaaaattgcgccctacagccaggggatgggtattatgcctggcccgatctttcgggcaccttttccgcagggcgaaacggaacgtgatattgctcaggcgctggctggcctcagggcgatattaacgagcgacattgcgccgcaggatgtggccgccatcgtcatcgaacccgttcagggagagggcggattttatgtcgtgcctcctgcgtttatgcgtggtctgcgtgaactctgcgaccgggaaggtatcgtgttaatcgctgatgaagtccagtctggcgcgggccgcacgggaacattctttgctatcgaacaaaccggcgttgacgctgatttaatcgtgttcggtaaatctgttgccggcggacttccgctgtccggcgttgtcggtcgcgagtcgcttatcaaccaggtggcaccgggcggccttggtggaacctgggcaggcaatccgctttcctgcgcggcggcgctggcggtacttgacctctttgaggagaaggatctgctgggcgcagcccgccgtctgggtcagcgtctgcgaaaagccctggagtccattgtcagcccgctggcgattggctatgagatacgcggagtcggggccatgattgcgctggagcttttttctctggagaacggagagcgaacgccggcgaccgggcttatcgatcggttagtcaaaagctgtacccgtgaaggcctaattcttcttaaatgtggcaaacaggcgaatgccatccgctttttaatgcccctgacgattgaagacagcgttctggatgaagggttgacaatttttgctggcgcgctgcaacagcagatcgcgtattcaggtttagcagaggtgaaacgatatggcgcagtttga

SEQ ID NO: 124188 - DNA, 495 bp, Enterobacter cloacae
atggcgcagtttgatagccgagccttacggaacgtatttggtcaattcgccactggcgtgtgtgtcgtgactatgatggataaagataacaatttccatgggttaaccatcagtagctttaacaccgtttccctggaacccccactggtactttggagcctgcgaaagcaatcctggtatgctcagcattttctgaaaacagaagcctttgcgataaatgttctgtcgggccatcagcatcaggttagcgatatttttgccagcgcaggcagcgataaatttcatcgtgtagaccaccgggtcagtagctataaactgcctttaattgacggcgcacttgcgcaccttgaatgcaaaatgtggcgtcaagtagacggtggcgatcactggatctttatcggtgaagtggtggactcgttacatactgaaggtgagccgctcatcttcttcaacggtcgctatgcgaccaccgccggtctgtcgattccagcctaa

SEQ ID NO: 124189 - DNA, 894 bp, Enterobacter cloacae
atgtcggattttccacctatcgcaagtttgcgtagttttgaagctgtggctcgccttggcagcgtaacgcttgcggcgaaagagcttcatgtgacccattctgccatcagccagcagattaaagtgctggaggaaatggtgggtgtgaagctgtttatccgtcatggccgaggggtacagatcaacgaagagggacggctctacgcgttacaggtacgcgaggcgctgaaccatatcgcagatgctacccggctcgtgcaggtgaaaccgagaatactggaactgacgctggcgatggtgccatcttttggttgtcactggctgttgccgcgtctggaacggtttcgggaaaaatatccgcacatcacgctgcgactccaggccagcctgacgatcaccagcatgcagcaggaaggaatagatattgcgatacgcatggggaaagggaactgggaaggaagcgactgccattatcttttttctgatgagctgattgttgttgcgtcgcccggttataacggcggtgtcctcccggcgacgccggctgaggtggcgaaaagccagatcatattctctatggagtcgtggaaaacctggtgtttcaatgcggggctggaaaaagatattgtgcccggcggcttatgcattaacgattcaaacttagttcttgaggctgtccggctcgggaaaggcattgcgctggagcgtcgttctctggttcaggatgccatcacccggggagaactcgtccagcttacccctttcactgcgccgtatccctggccttactggctggtgacatcgcagttaacggaggcgaaaccggaggtggctctcttcgccgaatggctggatgaggaagtggcgacctggcgtcagctcacggagtcctga

SEQ ID NO: 124190 - DNA, 348 bp, Enterobacter cloacae
ttgtcctcacgcaccggtaagattgatcctctggtactgcgcagtgagagtgaacgtattgaaatcacgggcagctatgtactcgctgtggatgatggcaatgcttacctcgaagccgggttagcgggattaggcgtgatcgcgctgccagtctatatggcggcagcgcatcaagctcgtggtgccttgattccgctatttgaacactggcgtcttgctccaatgcccctgtacctggcgtttccgccgaatcgccatgtcaacgccagactgcgcgtttttattgattggatcgttgaattgatgcagcagcatgtcaccaacgccaacatagccgtgaagctatag

SEQ ID NO: 124191 - DNA, 603 bp, Enterobacter cloacae
atggatcgtttcgatgcgatgcgcgcctttgctcgcgtggtagaggcaggtagcttcacaaaggctgcccaaacgcttcatatgagcaaaaccacggtgacgcagcttattcagcagttggaagcgcgcctgcgcgtcagattgctccatcgcaccacccgcaagctcagcgtcactcccgatggcgcggtctactacgaacgcgtcatccgcctgctggcggacatggaagatgctgaaaacagtctgtccagtgcggcaattacgcccaggggacggctacgggtggatgtgcccagtccgctggcccgcctcatcctggtgccggcgctaccggctttccacgcacgctaccctgacattcagttcgacatgggcgtgagcgaccgggtggtggacctgattggcgacaacgtggattgcgtgctacgcggcggcgagatcaccgatcagtccctgattgcacgccatattggagatttgcaaatcggcgtctacgccgcccccagttatctggaacgccttggcccccccttcgcacccgcgagaactggaaaacaccgaccatcgcagagtagggttcttgtcctcacgcaccggtaa

SEQ ID NO: 124192 - DNA, 390 bp, Enterobacter cloacae
atgacagcacgcgaagcagtttttccctcaggacgccaggtgctctatgagcgcaatcgctattcacccgccatcaaatctaacggtttcctgtttgtttcggggcaggttggtagccgtgaggatggttcgcctgagcccgatctaaaagcgcaggtcaggctggcattcaataatcttaatgctgtcctcgcggctgcgggctgcacgttcgatgacgtggttgacgttaccctttttgtcgtcgatcccgagtcaaacctcgacgctatctggagtatcctgccagaatattggggggaagcgacttacccaacgttgaccgggatcggtgtgacatggctgtacggattccagtttgagattaaggtgattgccaggctgccctga

SEQ ID NO: 124193 - DNA, 792 bp, Enterobacter cloacae
atgcgcatatttgtacgttcaggtctgaccgggctggtaatactggcgaccagcgcaggcgcgctggcccaggaggtgacggtcatgatttcaggcggttttaaggccgcgctggaaaaactcgccccccagtatgaagcccggacgggcgaccatatcgtgctgatcccggggccgtcgatgggacagacgccgcaggcgatccccaaccggctggcgcgcggtgaaaaagcagacgtggtgattatggtgggtgatgcactggcgcacctggcgaatgaccggatggtcaaagaaggctcgcgcgttgaactggcggattcgcccatcggcgtggtggtgaaagccggctcgccggtaccggatatcgcgaccgatagcgcgctcaaacagactctgcttaaggccagcaccatcgcctattccgacagcgccagcggccggtatgtgcaaacagagctcttcaaaaagctggggattgaagcacaggtagagggcaaagcgcataaggtggagcgcataccggtcgcctccgaggtggcaaaagggaaatacgccgtgggtttccagcaggtcagcgagttgttacccgtgcccggcgtaacctttgtcggcaaactgccggataacctgcagtacatcacccgttttgccggcgcggtcaccgctcacgcggagcatccttccgaaggtaaagcgctgctggattacctcgcatcagcaaacgcgcaggagaccatcaccgccaccgggatgatccccgtcactccgccgcgcgataacgcgcagtaa

SEQ ID NO: 124194 - DNA, 1299 bp, Enterobacter cloacae
atgatttcctcaaccccacctgcaaccgttcgcgcaagagcgggcgcgatacttcgcgtcacctcgggcaatttccttgagcaattcgacttcttcctgttcgggttctatgccacctacatcgcgcataccttcttcccggcgagcagtgagtttgcctcgctgatgatgaccttcgccgtctttggcgctggcttcttaatgcgccccattggcgcgattgtcctcggggcttacatcgacaaggtgggtcgccgtaaagggttaatcaccaccctgtcgattatggcggccggaaccttcctgattgtgctgatcccctcttatgagagcatcggcctgtgggcgccactgctggtgctggctggacgcttgctgcagggcttttccgccggggcggagcttggcggggtgtcggtctacctggctgaaattgccacgccgggtcgcaaaggcttctttaccagctggcaatccggcagccagcaggtggcgattatggtggccgccgcaatgggctttgcgctgaacgcgatgctggaagagagcgccatccgtgaatggggctggcggatcccgttcctgttcggctgcctgattgtgccgtttatcttcttcctgcgccgcaagctggaagagaccgaagagtttcgcacccgccgtcacacgctggcgatgcgtcaggtctttaccaccctgctggcgaactggccggttgtggtcgcgggcatgctgatggtcgccatgaccaccaccgcgttctacctgatcaccgtctatgcgcctaccttcggcaaaaaagtgttaatgctcagcgcctccgacagcctgctggtgacgctgctggtggccatctccaactttatctggctgccggtgggcggagccctgtcggaccgcttcggccgtaaaccggtgctggttgccatgacgctgctggcgctggcaaccagctatccggccctgacgctgctggcgcaggcaccgagcttctccatgatgctgagcgtattgctgtggctctccttcctctatggcctctataacggcgcgatgatcccggcgctgacggagatcatgccggttgaagtgcgtgttgccggtttctcactggcgtatagccttgctaccgcgatcttcggcgggtttacaccggtcatttcaacggccctgattgagtacaccggcgataaagcctccccgggctactggatgagcttcgcggcgatctgcgcgttgctggcaacgctttatctctaccgtcgcagcgcgatgagtctgcaagtacagagaggataa

SEQ ID NO: 124195 - DNA, 864 bp, Enterobacter cloacae
atgagcattatgcttaccggttcggtcaaggaaagacggcacgccagcacgatgaatatcgatagattgtccacgctggacatgctgaaagtcattcaccaggatgatgcacttatctccgctgcaatcaccccttttttacccattattgcccgtgtggtggataacgctgccgcgaccctgagccacggggggcgtctggttatggttggcgcggggccgtccggctgtgtggcgaaacaggcggcggatgagtatgccccgggtaaaaccccggtgattgccatcacggcggacgacgatgcgacaagctacgagcgcggcgttgccgacctgcaggcgattaactttggcgagcacgatatgatgctggcggtcaccgtaagcggaaaaacgccgtgggtctggggcgccatgcggcatgcgtggtcgctcggttcaccggtggcggtgattaccgataatgcgcaaagcgaagcggcgcagctggcaagtatggtgattgcgccagagctgggcccggatgtggttgccgggtatctgaataccaaagcggccattgcgcagaaaatgatcctctctatggtgaccaccgggctggccgtccgcaccgggcgggtttacagcaacctgcgcgtggatctggaggcgagcagcacccagtgggctgaacggcaaatcgcgatagtgatggaagcggggggatgcacccgagcggtagcaaaagccgcgctggagagctgtaaccataactgcaaaacggcggtgctgatggtgctgaccgggctggatgcctggaaagcgcatgagttgcttgcgcagaataacgggtttattcgggtggcgttgcaggaagcgccgtaa

SEQ ID NO: 124196 - DNA, 1074 bp, Enterobacter cloacae
atgaaaagaaaagtattggccattcttgtacccgcgttattaatggctggcgcagcaaatgccgctgagatttatcacaaagacggtaataaacttgatttctatggaaagatggttggtgaacgcatctggtccaacactgatgaaagcaacagtgaaaatgaagatacgtcatatgcccgttttggcgtaaaaggcgaaacgcaaattaatagtcaactgaccggttacggccagtttgaatacaacattgaagccagcaagcctgaaggtgagcaggacgaaagtacacgtctggcctttgcaggtctgaaattcgcagactacggttcattcgattatggccgcaattacggcgtggcttatgacggcgcggcgtataccgatatgctggttgaatggggtggcgactcatgggctgccacagataactttatgactcagcgtaccaatggcgttgcgacctaccgtaacaccgatttcttcggtatggttgaaggtcttaactttgctgttcagtaccagggtaaaaacgataaccgcaatgaattcaaagcaaatggtgatggttacagcatgtctgtgaattataaccttgatggctttggtttcgttggcgtctacggtaaatccgatcgtaccgatgagcaatctgctgacggttatggcgatacggcggaagtttggtctctgtctgctaaatatgatgcaaacaacgtttatgctgcggtaatgtacggtgaaacccgtaatatgactaaagttggatataacgccttcgccaataagacccaaaacgttgaagccgttgttcagtatcaattcgactttggtctgcgtccatccctgggctatgtatattcacagggtaaagatctatatgcccgtaatggctataaaggcgttgacgctgaccgcgtaaattatattgaagtgggtacctggtactacttcaataaaaacatgaacgtttatactgcctataaatttaacctgctggacgaagaagacggtgccatcactggcaacgcaactgacgatcagttcgcgatgggtattgtttaccagttctaa

SEQ ID NO: 124197 - DNA, 270 bp, Enterobacter cloacae
atggaacgaaaaatcgaacgcagcctgggaggcaaactggccctgtgggtgttttatgctttttgcggttactttgtctgggcgatggcccggtatgtttgggtcatcagtaaaataccgtcgctgccgaatgcagcagtggaaggggatttgggttcgaccagcggcaaatggcttggggcattgctggggtttctggtgctgggcacggtcggcctgatcctgggcgggattgcgtggtacacccgtccccgtcaggacaactcgtga

SEQ ID NO: 124198 - DNA, 702 bp, Enterobacter cloacae
atggaacttacgcagtggcagcaacgttttgagcgctggctcggggaaaaccacaccaccgacgacaccgcgcatgatatttcgcactttcgtcgcgtctggatgacggcgcaaaaaatcctggctaaccaggcggtcgagccgctggtgatcctgaccgcctgctatttccacgatattgtcagcctgccgaaaaaccatcctgaacgcggccagtcatcccagctggcagcgcgtaaaacgcgtgagatcctgcatcgcgacttcccggactttccccccgcgcattatgacgccgtggcgcatgctattgaggcgcacagcttcagcgccgggatcgcgccgcagagtctggaagcgaaaattgtgcaggatgctgaccggctggaagcgttaggggcgattggcctggcgcgcgtgtttgccgtttcgggggcgctgggcgtgccgctttttgacgcacgcgatccctttgctgatgcgcgaacccttgatgaccgggcgtttgccctcgaccattttcagaccaagctgctgcgcctgcctgatacaatgcaaacagaaatggggcgcgagctggcacgccacaacgccgattttctcatccagtttatggcaaaactgagtgccgaattacagggtgactgcctggggctggatagccaggtactgagccgcttccgccgcagtttgcaccgttga

SEQ ID NO: 124199 - DNA, 1416 bp, Enterobacter cloacae
gtgagtgagcccgcacctgagcaggctgagaaatcaacggcaacggtgcaggcgctgctgcgccagctgctggatatctatgatgccaaaaccctcgccagccagctcatggcacacggtgagggtcactggagcccggcaatcattaagagacttatcaccagcgagcgggcagggcatcgcctgagcgacggcgagtttcgttatctgcaaacattgcttccgcgtccttccgccgcccatccccactatgccttccgctttatcgatctgtttgccggtatcgggggcattcgacacggatttgaagccatcggcggacagtgcgtcttcaccagcgagtggaacaaacacgcggtccgcacctataaagccaactggtattgtgacccggacgcgcatcagttcaacgcggatatccgcgatgtcacgctgagccataaaagcggcgtgagcgatgaagaggcggcagagcatattcggcagaacatcccggcgcatgacgtactgctggcgggcttcccgtgtcagccattctcgcttgccggggtatcgaagaaaaatgccctcggacgtgcccacggttttgcctgcgatactcagggaaccctgttttttgatgtcgcccgtattatcgatgcccgccgtccggccatttttgtgctggaaaacgtcaagaatttaaagagtcatgacggcggtaaaaccttccgcattattatgcagacgctggatgagctgggctacgacgtggcggactcccaggatatgggtgccgatgatccgaaaatcattgacgggaaacatttcctgccccagcaccgggaacgtattgtgttggtcgggttccgccgcgatctcaacctgaaaggtgattttaccctgcgggatatcccgtcgctctatccggcgcgccgtccgtccgtcgccgatcttctggagcccgccgtcgacgcgaaatttatcctcaccccggtgctgtggaagtacctctatcgctatgccaaaaagcatcaggcaaaaggcaacggttttggttttggcctggtcaacccgaacgatccgcactgtgtcacccgcaccctgtccgcgcgctattacaaagacggtgcggagatcctgatcgaccgtggctgggacaaagtgctgggcgagaaagactttgataaccctgagaaccagcgtcatcgtccacgtcgcttaaccccacgcgagtgcgcgcggctgatggggtttgagacgccgcaggggtacagcttccgcattccggtctctgatacgcaggcctaccgacagtttggcaactcggtggtggtgcccgcctttgcggcggtggcgaaactgctgtcctcacgcattaaacaggcggttgccctgcgccagagtgaggccgtcaatgacggatgtgcacaataa

SEQ ID NO: 124200 - DNA, 1701 bp, Enterobacter cloacae
gtgcagcgtgatacttttgttgtaagacgaacttttctgcaatggctgcataagcgtagcaatccaggtgcgattgttaatctctgttttctggtggtactggttttttcgaccctcctcacctggcgtgaagtggtggtgctggaagatgcctatatctcaagccagcgcaaccatctggaaacggtggccacgtcgctggacagacagcttcagttcagcgtggacaaactgcttttttttcgccagagcatgcgcgatgcgctccagacgccgctggcgtttgacgtcctgcgtgcagcggtgacacgcttcaatgcagaccggtctcgtcctttctggcagctggctgtggataaaaaacgtacgctgcccatcaacggcgtgtcggatgcctttgttgaaaagaccacgctgcttaatcgcgacgatgaatttctcgataatgaagtgtctgctgcgcttgaagtgggctatttgctcaggctggcctcaccggtcatgcgcagcgaagaacgggtggtctatgtctcccgcgccgggttttacctctccacagatacacaggcacagagcgccgatatcatcccgcgttattaccatctggtgacccagccctggtttacgcagcaaacggaacgtaacaaccgtgcgcgggcggtgttgtggtttatcacttcgccgtcaacctggacgggcaacgagcgcatgatcaccgccagcgtacccatctattttgaccattactggtacggcgtggtggcgatggatttttctctcaataccatgaaacggatgctggccgacgcgacggatgaccacgccgagggcgaatatcagctgtatgatacccggctcaatatgattgcctcttctgaagcgtccacaagcgaggccaaccattttgatgagcgtgaaacggcacagattgcgcatgctattgagaacaataccggcggcgggatccggctcggcagccgttttgtcagctgggagcggctcgaccattttgacggggttatcctgcgggtgcataccctgcatgaaggggtaaaaggcgacttcggcagcatcagtatcgtgctggcgctcctgtgggcgctcttcaccgccatgctgctgatctcctggctggtgatccgccggatggtcagcaacatgtacacgctccagcactcgttgcagtggcaggcctggcacgatccgctcacccgcctccataaccgtggggcgctgttcgagcgggcaaaagcgctggccgcgcaatgtcaggcgcagtcgctgccgttctcggtggtgcagatcgatctcgataattttaaaagcatcaacgaccgtttcggccatcaggccggagataaggtgctgtctcatgcggcggggctgattgccagcgccctgcgtaagaacgacgttgccgggcgcgtgggcggggaagagttttgcgtggtcctgccgggtatcgggctggaggaggcgagagcggtggcggaacgcattcgctcacgcatcgacagcaaagagatcctggtgaaaaagagcacgacgttgcgtatcagcgcgtccatgggggtcagctgcgcgcaggagaaggggaattacgacttcgaacaactgcagtcgattgcggatgcccggctgtacctggcaaaacagcgcggccgcaaccaggtggtgtgggacgatcacgacagaaagtga

SEQ ID NO: 124201 - DNA, 831 bp, Enterobacter cloacae
atgaaacgctattcgcaatcgggagctgcacggccttccctgcaggacaccctgctggttttttccgacctggatggttcgttgctggatattcatacctacgcctggcagccggcaatgccctggctggataagctgcaggattttcaggtaccgctcattctgtgcagcagcaaaaccgcagcggagatgcaggatattcagcaggatctgggcctcgaggggttaccttttattgccgaaaacggcgcggtcatccagcccgatgtccgttgggaaaaggcgcagcgccatactatgggaatgcttcaccgcgacattcgcccgttcattgagcaaatccgcctgcaggcagggtataaattcaccacctttgacgatgtcgatgaccgggtgatcggcgaatggacggggctgagccgctatcgttccacgcttgcgcgtaaacatgaagcctctgtcacgctcatctggcgcgacaccgatgagaaaatggtgcagtttgaagaggagctggcgcagcgcggtctgaaatgcctgcagggtgcccgcttctggcacattctggacgcctgctgcggtaaggacgtggcggtgaactggctcattgcgcagtatcgcgaacaggaaggcatcatgcccacgacgctcgggctgggcgatggtccgaatgatgcgcccctgctcgacagcgtcgacttcgcggtggtgatcaagggcattaaccgccagggcatcacgctgcgcgacgataaccctgcccgggtgtatcacacgcagcaagcaggaccggcgggctggcatgaagggctggatcactttctgtcgtga

SEQ ID NO: 124202 - DNA, 1236 bp, Enterobacter cloacae
atgatcacactgcaacaactgctgatgaccgacagcgacctgtcaggcggcatgcaaacggggaaaggcaccgacggtgcgcaagactttctttctctgctggcgggcgcgttaacggacgccagcggtcagggcaaagatgcgccgctgacgctggccgacctgaaggcggctggcagcaagctgtcaaaggtcgcgaaggacgccgggggagagtccaccctgcaggcgaaaattgccgatctgctcgcgcgtcaatccacgcaggctggcgatgaaacggcgcagacgacgccgctacaaacgctggtctccgggctgatgcctgccgctaagggcgatgccctgaagacgttgaccacggcgaatagtgccgataacagcaaaaccgaactgagcgaagaagagctggcgggcttaagcgcgctgatggccatgctgccgcaccagcagacctccacgccggtcacggcgaaaggcgcgggcagtgagggactcaaagaaacgtcagccctgaccgccacgacgcttacgcaaaacggcacgtctgcacacgcactgggcagcgccctgacgggcaaggataacgcgcagccgtctttcgccgggcaggcgcaaaacgttgatccgtccctgccggccaacgcaccggcgacgccagcgctcgccgtcgcggccgagaaacaggatcttgccagcgcgtcttcgtcttcaacaccaaccgccaccctggcgccgattgtctccagccacgccaccgcgcagcctgccgcaaccgttgccaccgcaccggtgttgagtcagccgctcggtacccacgaatggcaacagaacctgagccagcacatcacgctgtttgcgaagcaaggacagcaaaccgcagagttgcgcctgaacccggaagatctgggccaggtgcacatttcgctgaagctggataatgaccaggcgcagctgcagatggtctctgcgcacggccacgtgcgtgccgcactggaagccgccctgccggtactgcgtacgtcactggcggaaaacggcattcagcttacgcagagtagcgtcagcagcgagagctttgccgggcagcagcagtcttcgtcccagcagcaacagcaggcgtcgcgttccggccaacatggcggatttactgaagagagcgatgagttgctgccgaccccggcagccctgcaatccgctgcgagcggcaaccgcgccgtagacatcttcgcctaa

SEQ ID NO: 124203 - DNA, 375 bp, Enterobacter cloacae
atgaataatccagcgtccgctcttgataactggcaggccctctataacctcagccttaccatgttaaaacatgctcgttccggtctctgggacgagctcattacccttgagatatcttatgttcaactggtagagaatatctccaaaaaccctatttcggaggcacatccgtcccagattgagcaggcacgttttctactcgagaaggttctgcaaaacgagaccgagctcaaaatgctgcttgccacacgcatggacgaactgcgcagcctcattgatcaaaccggtaaacagcaatccatcacatcaacctatggaaagctgtcagggaatattctttatccagaaagtttgacccgcgacacacaattatga

SEQ ID NO: 124204 - DNA, 411 bp, Enterobacter cloacae
atgtatgcacaaaatggcgcccgagcttatcagcaggtcgggctggaaagcgcggtgctgagtgccagtccgcatcaacttgtcgtaatgctgtttgacggggcactgagtgcccttgtccgcgcccgtcttttcctggacgaaggtaaaatcaccgaaaaaggcgaagccttatcgaaggcgatcaatattatcgataacgggttaaaagccggtctgaatatggagatcgacagtgaactgccgggcaaccttgccgcgctgtacgagtacatggtcagacgtttgttgcatgcaaatctgcgtaacgacgtggaggcgattgtagaggtcgaagcgctgctcaataacattgcggatgcgtggaaacaaattggtcccaatggtccttcttctcaggatatctattga

SEQ ID NO: 124205 - DNA, 1452 bp, Enterobacter cloacae
atggcgagtagctcaatcactctctcttcaggcgcgactattacgagtctgggcgtaggttcaggtctggatctggcaacactgtataacaacctcgaaacggctgaaaaaaccaagctgaacaccatcaccaatcagcagacatcctataatgcccagctgagcgcgttcagtaagctgcaaagtgcaatgacgtcgctgaataccgccactgcagccctgggaaaaacggacacctggaacgcggcgtctattggctcaaccaacaccgccttcagcgccacgaccacggccggtgcagcggttggttcctatagcgtacaggttaaatcgctggcgaaagctcaggtattaacctctgccgtccagaccagtgccaccgcgcagctgggagcgactaccggtaccacgcgcaccatcaccatcagtcagccaggcaccaccaaaccgctgaccgtcgatcttgctgacggcgacactagcctgaacggtattgccagcgcgattaacaaagctaacggcaacgtcacggcaacggtagtgaagtcgaaggacaacgagtacaccctgatgctgtcctcgaaaaccaccggcacggccaatgacatgacggtgacggtaaccggtgacgacaccttaaaaggcattatcagctacgactcatccacgaataccggcgcgatgaatcagcaaaccgcgtcacaaaatgcgttggttaccatcaacgacatcgacattgagcgttcgaccaacacaattaatgacgcgctgccgggcgtaaccctcaccctgaaggcagaaagcaccaagagcgaaaatttagatgttacccgctctaccgatgccaccaaaaaagccgtcacggattgggttaccgcctacaactccctgcagtcgaccatcgccagcatcaccaagtatgtgaaagtggaagccggtgccgatcagtccgccagcaacggtgcgctgctgggtgacaacaccgtgcgttctgtacagtcacagctgcgcgatatgttgaccgtggtccagtctggctcctacgcgatcatggcccagctcggtatcacccaggatcctaccgtgggcgctgacggctcaatgggtaacctgaaaatcgacgatgccaaactgacaaaagcgctcaccgacagcccggaagcggtgcaggcctactttattggcgatggcaaaacaaccggtctggccacgcagatgggcaataccctgaccgccatgctgagcacgaccaccggtaaagaagggatcatcaaaagcgcgactgacggtatcaacagcacgttgaaaaccctggataagcgctacgacgcaatggaagcgagcatcgaagccacgatggcccgttataaagcacagttcaacagtcttgataccatgatgagtaaactgaataacacggccacctacctgaaacagcagttcagttcttag

SEQ ID NO: 124206 - DNA, 837 bp, Enterobacter cloacae
atggcagttatcaatactaacctgttgtccctgaccactcagaacaacctgaacaaatctcagtcttctctgggcactgctatcgagcgtctgtcctctggtctgcgtatcaacagcgcgaaagatgacgctgctggccaggcgattgctaaccgcatgacctcccaggttaaaggtatgacccaggcggcgcgtaacgccaacgacggtatctccctggttcagactgctgaaggtaacctgaacgaaatcaacaccaacttacagcgtattcgtgagctgtctgttcaggctgctaccgacactaacggttcttctgacctgacttctatcaacactgaaatcaaacagcgtctggctgaaatcgaccgtatcgcgggcgcagctaacttcaacggtaagaaactgctggacggttccgtatctaccgcgctgaaaattcaggttggtgcaggtacttcttctaacgacaccatctccatcgacagcaacgcgctgatcaacgccacctctggtaccctgagcgctggcctgagcactgctatctctgataacgcctctgcacaggctgttatctctgctgctgacgctgcaatcgcgaaaatcgataccgcgcgttctaacatgggtgcgattcagaaccgtttcgaatctaccatcaacaacctgaacaactctatcaacaacctgtctgctgctcagtcccgtatccaggacgctgactacgctaccgaagtttccaacatgtctcgcgcgcagatcctgcagcaggctggtacttctgtactgtctcaggcaaaccaggttccacaggcaatgctgtctctgctgcgttaa

SEQ ID NO: 124207 - DNA, 1419 bp, Enterobacter cloacae
atgaacaagttcgagcgtacacgatcgctgcatcagttttaccgtgacgaattttcacggttaattttcctgccggaaacggatgcattgcctgcgcatatcgttaccgaaatcctgcattataaaaattccgatattgccacgctcgaaccccagatcatggaagccatgaccgatctggatgcagacaaagaactcgccgtgaagcgcatgctgtgcgcgattgctgctgcaaacgccgcgtttgattttaaaaatgaagggaagcccacgccattttcaaaagagatgagcgacaccattaccggctgggtggtagaggcgcttcaacacgacaacagcattaatctactggtggcgggtattcaggtcttcttccgcattaacgaaattgacgccgccttattcctgatttcgaactactacgcggtggtgagtccatccccaaccgtgatgaaaatattgttgttggtttgtctgatggaagatgattttaatcagatgcagacgcttatccagcagctgaccgccaatcctgaacatattggtgaagacgcgttaacgatgctgatgatcgtcacgggcattcataagctgggtggctgtcccgaatcgttcatcgatttttccgccctgaaaatgcctgattatgagcctgatttttcgcactacgagtggctacttccggcggaagaaaacggaaaaaccacggttctggtggcgtgcgacaaacgttattacttcgatcatgccctgacgctgttagggtctgtctaccacaccaacggcgatgggcttaacgttcacctgcatctttataacccggatgatgagacaaaggcgcacgttaatgccctgcaccagcgttttccgggcatggtgatatccgcgacggccgaaaccattacgcctgtttttggtatcaacgtctggtatgcctcaagacgctttgtcttccttagctatgcgctgagcgtattcacgtcaccgatcatggtgcttgatgcggattgtctggtgcgtaagaactggtcggatattgagccacatctcccgaagagtgagattgtcctctcttacagcaacggcgcgccgccgtgggagcaggtgcctgcgggctttgtctatacggtccctggcacgctttcgcgtaaatacctttcgcttgtcgccacctttattgactggaacttacgccgcggtaatgcggagtggttccttgatcaggtcgcgctgtcggtctcactggatgcccttccggcgatagaacagatggccattcatcgcgagccgctggagaaactgatcgacattcgctacaccgacgacacgttcagctggaccgtgaccacgcaaaaatcaggcggcgaagcgtaccagaactataaagctgcgatgcaacaaacctattttggctaa

SEQ ID NO: 124208 - DNA, 3336 bp, Enterobacter cloacae
atgttgtatccagataatcgattcacgctatccagtctgcaggctgccgctgctctgtatcagtttcctgccggggcgcctgaaaatgcgcgcgtcctggatttaggctgcggacagggagatgtgttgttatccgctgcgctggcctggccggattgtgtcgggatagggattgatagtaacgaagaggctgtttcagcggggcagaggcaggcgcagcgtctgggtatcgccaatatcgaactggttgcggcgggtcttaacgatgtgttgagcgtgtcgccgggtgagttcgattacattctgatccgcggggactttattcctgctggcatgccagagcgtgacgcgctgttgcagtggtgtcgtcgtcatttggcggcgcgcggcatgattgccattcatcaaacctttaccccgcctgagtccgcggcgcaatatgtccaggatgcgctggctttccatgcacgtctggcgggccggccagaagagcaggtggcgtttgctcgcggcatgctcagctatctggccatgactcagccggaaggtgagatcaaacaccatgtgctcacgatggagcacgttgacgacgccactcttagtgagatgctggcaagcgccacccatacctccgggcagtttattcacttcaacgatagcctttccgcctgcgggttacgctacgtgggagatgcgctgccgcagtacgaaacgggtgaaagcgttagcgagcaaattcatcagctgcacgctctggtctcatccggacagacgtcgattgccgcgcagcaatatctcgattttgccgtcaaccgtcgcgagcgcgtcagcctgctttcccgtgatgatgccgtcaacgcggcggcgctggattttacccgcttaaacgcgctgcactgggccggtgatttcaggcgttaccgcaacgaacggggtgagattgttaatgctcacaccaacgcggaagggaagtttttctcaacgcttaataccacgaccctgcacattctcgatctgcttggcggcgcatggccgctgagcctgtcgtttgaacagctggtgttcaacacccgtcttcctgaaaaggaggaggatgtcgcccagcaggtacttgagtcactgaaagatctgtttctcaatcaaattccgggactctactgggcaggttcaccggggccatacaatgttcaaccggaacgtgaacttgccttcatttcacctcttcaggcaggcgatgacgccgacgtcacgtttaatctgtggggcgcgcgcgtcactcttagtcaggaagagcgtgaatttgcacttgcaggcatggatgtcaatcaggccaaaagcagcgaacttttttcggcactgaaagcgaaaggtctgttgaaaggctcccctgaagcgtggcgcagagcacagcagcattatttacgcccgggggatgtcgactatctcaaacgtagcatcgatacgctgttgctgcttaacgtcgggtcgcagcagggcggtttactggctgacggacagataatggcaggggagaaggatgaacaggatcctgctatcgatctcatctacaaaaacgtcaacgccctgattgctgcggggctggctaaagacgcgcgcgattatatccgcggacagattgaaaacgatccccataacctgcatatgcttcgctgctattcccgcgccagcctgctgatgggggactgggatgaggccctatcggcactcggtcaactgatgagccgctactctgccgggcaggatatctggttcgacctggccacggtgctgcagaaaaagggggagttgcattattcagcccgcatccttcaggcgctgctgcggttgaataaaaataacgcgtcattctggaatacgctggcggtggtgtatcactcgcgccgcaacatggccatggctgaacgctgtgccagagagtctttgcgctataacgccacgaacccgctgcatctcgcgatgatgggcatcattctgagtgataaccagaaactgacggaagcacgctatttccttgagaaatcgctcgagtttgcgccgggtgattttgactgtttcaccagcctgctgtttgttctgacccacgatttttccgtctcgccggaggtgctcttcgagcgccatcttgcttatggcgagctggtgagcgcatgggcgaaaaaattcgacctggcgctgccgtggcagggtagcaaggatcctgagcggccgctgcgcgtcggctttgtctctggcgatttccgcaaccacccggtaagccgcttcctgcggccgttctgggatggtatggaccgggaacagttctccctctacggctatagcacgctcgataaagatgatgccgtcacggagcacttccgtaacacctcgacgaagtggttatccgttaccgatctcaataacgttgagctggcaaaacagatccacagtgacgggatcgatattctttttgacctttcgggccataccaccggaacgcggttacctgcgtttgcctttaagcctgcgccagtgcaaatcacctggctgggctacccgggcacaaccgggatgacgcagatggattaccgcattatcagtaccgggtttgacagaaatgcggcgatagacgcgcagttcacggagaagctgattgcgatcccgcttgataatttcttcgagccggatgcgtccagtcctgacgtcaatacgctgccagccctgacgaacggctggtttacctacggtagctttaaccgtcctaaaaaattgaacgatcgggtcttcgcgctgtgggcgcgcattctccagcataacgccacgtcaaggctgctgattggttttatggatgatgacgcgatgatcgcccgctaccgcaagaagctcaatgcgctgggcgtggcggatgaacagctgatcttccgtaaaaccacgggaatggaggcctacctgcagatgcatcacgaggtggacatgctccttgactccttcccgtacaacggaggcaccaccaccagccatggcatctggatgggcgtcccgacgctcaccctggcaggggcgacctatcctgcacgtcaggggctcgagattatgcatatctacgggctggatgaatttgttgcggaaagtcagcaggactatttcgataaagccgtgcgctggcaaacccaactggaaacccttaacgccttgcgccagaacatgcggagcacgatcccgacgcaggggcagagcaatgtggcgattcctttccagcaggccctacgtcaggcctggcgtaaatggtgtgctgacgaagcacctcacagtttccgggtaacaggtactgaggattaa

SEQ ID NO: 124209 - DNA, 1155 bp, Enterobacter cloacae
atgaaaaatgtctacgttaccagtccacttcttccgccacttgaggagtttatcccttacctggagaccttgtgggaaagtaaaattttgaccaacagcgggcaattccatcagcaactggaagaggcgctggcggcctatcttggcgtaaagcatgtctgcctgttctctaacggcacgctcgcgctgctgacggcgctgcagacattgcgtattacgggcgaagtgatcaccacgccatactcctttgtcgccacctctcacagcctgctgtggaatgatttaacgccggtgtttgccgatattgaccctgtcacgtttaatatcgatccggatcgcattgaagaactgattacgcctaaaacaacggccatcatgccggttcactgctacggtattccgtgcgatatggaacgcatccagaagattgccgatacctatgggctgaaggtgatttacgatgcggcccactgtttcggcgtcaaacaggataacgccagcattctcaattatggcgatctctccgtgctgagcttccacgccacgaaggtatttaataccttcgaagggggcgccattatttgccacgacgccaaaaccaaacagcgcatcgattatcttaaaaactttggctttgccgatgaaaccatcgtgatggcgccgggtattaacgccaagatgaatgaagtgcaggcggccatgggactgctgcaattaaagtatattgacggtgcgctgcaggagcgcgcggtgatttatcagcgttacgttgaactgctcgatgccgcgcttccggcgctggaatacattaaaccggccagtaatattgaatggaattactcttacttccctgtacttattcgcgcagattcggcggtcagccgggatgcgatttatgcggaattacgtaagcataatatctatgcccgccgttatttctatccgcttatcagcgccttcccgatgtatcgtcacttcccgacggcgaatgtacaacatctcccggttgccgatgaaatttctcatgcggtgctttgcctgcctatctatcccggactgccggtggccgatcagcgtcgtattattgagattattcagggcttgtttatcgatgctgctcatgcggctgagcctgcgctggtggtcaatggatag

SEQ ID NO: 124210 - DNA, 699 bp, Enterobacter cloacae
atgaagctggcgatcatgcaaccctattttttcccgtattgcggctattttcagctcatggcggccgttgatgctttcgtggtgtatgacaacatcaaatacacgaaaaaagggtggattaaccgtaaccgtattcaggttcgcggtgcggagtcgttaatctcgctgccgctaaaaaaagactcggactttctggatatcagggagcggcagctctcagccgcatttgaccgcaacaagctgtgcaatcagataatcggggcgtatcgccacgccccctcattttcagcggtaatgccggttgttgaggagattattcagaacccggacgaaaacctttttaattatctgtggcaggggctgaaccggctgcgggactattttggcttctcctgcgagctgattgtctcgtcctcattaccggcgaatcacgcgttaaagtctcaggatcgcgtcatcgatatttgtcaggtgatgaacgcccgtacgtatattaatcccccggggggcatggcgctctattcccgggaggattttgtcgaccgcgggcttgagctgaaatttatccagccgcagccgtggcactacccgcattctgacgcggcgtttattccgtggctgtcgattattgacgtcatgatgtttaaccctcgcaatgaggtggttcgtcgcctccagcatggttatgagttaatttaa

SEQ ID NO: 124211 - DNA, 963 bp, Enterobacter cloacae
atgtttacatggaaaaaattgggtaaggtctttaccccgcaggaagtgacccatctcccctggcttaaagagtttgcgcaggctcctgcgacgctgatctttgatgatttcgtacgcgtctatttctcctgccgtccacccgccgatgaacagggaaaatatgtcagctactctgcctgggtcgatttggcacgtgacgatctcttccacgtgttgcgcgtcgcccgcgaaccgattctcccgttgggcggatacggagagttcgacgaatttggaacctatcccgtctccgtaatgcgcgataacgatgtggtaaaagcctggtatgcaggctggacccgctgcgaatcggtgccgtttaacgtggcaattggcatggcggtgagccatgaccagggggaaacctttgttaaagcgggcccgggaccggctattggctactcaccggatgagccgtttgtgatgagtgggccaaaaattcgcagattcaataaccagtggcagcttttttatatcgccgggcgcaaatggaagtgggtggatggccgcgcagagccggtctacaagatccgcatggcgacctctgacgatggcatcaactggacgaagctgaataaagatctgatccccagccgtatcgaagaggacgaggcgcaggccagcccggatgtcttttacgccaatggcaaataccatatgttcttttgctaccgctacagcgcccattatcgcggaaagcagaacggttaccgcatcggctacgcgtggagtctggatatgatcacgtggcatcgggatgacagtaaagctggcattgatgtgtctgcctccgggtgggatgccgagatgatcagctacccacacgtatttgaactggatggcactatttacatggcttatctgggggatcaggtgggccgctatggctttggcctggcacaactggagggcaaattatgctaa

SEQ ID NO: 124212 - DNA, 966 bp, Enterobacter cloacae
atgctaaccctgaactggcgtaagcacggacttatctattcgccgtcgcagtttcctcctctggcaaatggggtggggtttgcccagtctccgcaagcgctggtgtttgatgactttgtccgtatctatttctccacgcgtgagcaagaaaagcactcagcaaagttcatcagccgcgtctgctatgtggatatggataaatctctgcgggaggtgcttcgcatcagtcccgagccggtgcttgctcctgctgaactgggcacattcgacgagcacggtattttcccctgcaacgttttacgtcacgacggcaaaatcatggcctggacaaccgggtggaaccgtcgcgtttcggtctcggttgatacggccattggtctggcagtaagcacagacaatggcgaacacttcacccgtgtcggtaccgggccggtgatgggcccctcattgcacgagccacacttagtgggtgatgcctttgtcatccatacccgtgaacgtttccacatgtggtacatctttggcacgggctggaaaaagcgcacgccggaatcggtgccggatcgcatttataaaattgcccatgcggaatcagacgatggcatcaactggcagcgtgacagccagcaaatcattccttcggtgttgggggaagacgaatgtcaggcgctgccgacggtgattgaaatcaatggccggtatcatatggtcttttgcttccgggagtgtttcgacttccgtactgggcaggggcgcggttatcgtctgggctatgcctggtctgatgatttacaccactggcatcgtgatgatagccagatggcgtcgctcgcgtccgtggatgactgggacagcgaaatgcagtgctatccccatcttttccgctgcgatgaaaaagtctatttgctttataacggtaatgcgtttggcaaagcgggcttcggccttgcggaactggtgttatga

SEQ ID NO: 124213 - DNA, 453 bp, Enterobacter cloacae
atgaatcgctgggtgttttgtcaaaaccgcgcctctcgtgaggagatagtcgaacattttaaccggtgtgacccgctatttattgcgtcaatcagcgaaagaatagcgttacaggactatgcccaaaaaatagtggcgcgggcatggcgaagcgaagcctggcaaaacaacacgctcaccggactggtggctgcctattataacgcgcagcgtcagcagggatttattacgaatgtttccgttttgccggacgctcagcattgcggcatgggtagtcagctgttaattcaaagcattgcacatttacactcccagggtgtgactgaaattaatcttgaagtcgataagaataacgtgtcggcacaacgtttatatctaaagcatggttttacctttggaatagcaaacggttcaaagataaccatgactttacagagagagaaaacaacatga

SEQ ID NO: 124214 - DNA, 738 bp, Enterobacter cloacae
atgacccttcgtgattacaatctggaaatcaaggatactgccgatcatcagtacgcctataactttgattttgatgtgatgcacccttttatgattcgtgcgttcacaccgttctttaagccgggtaatttacttgaactgggtagttttaaaggtgatttcaccgcacgcctggctgaaaaatttaacgccatcacctgcgtggaagcttccgaagaggcgatgaccatcgcccgtgagcgcctgggaaaaaatgtctcgtttgtccattcccgctttgaggatgttcaacttcctgagcgttatgacaatattgttctcacccatgtgctggagcatattgacgatcccgttaacctcttaaaacgcattaatgatgaatggctaacggatgacggacacctttttctggtgtgtcccaatgcgcatgccgcttcccgacagattgcggtcaaaatgggattaatctcgcataatagtgcggtgacggaggccgagtttctccatggccatcgttgcacttattctctggatacgcttgagagagatgcccgtcttgccggactgaatgtggtttatcgcacaggtatttttttcaaagcgctggctaatttccagtgggataaacttttacagacggatatcatctcgacgcaatatcttgagggctgctacgagttaggccatcaataccctgatttatgttcaagcatattcttgctgtgtaaaaaaggctga

SEQ ID NO: 124215 - DNA, 246 bp, Enterobacter cloacae
atgaaacccgttcactcagtgcttatctggcttgccgaattgagcttcttaagcattctttactgtatattctgttacttcacgcctgatttggagctatatgactggtatgtagaaaagtatgggtttgttatcgaagaggattttctggattactacacattaattctctatttgatagcgattgcagtaactactgcatgtatatggctgatcgccatcatacgaacaagagatattgattag

SEQ ID NO: 124216 - DNA, 480 bp, Enterobacter cloacae
atgatccgttgctattttcatatgaataatgggcagctatcgtcactaagttgtcctggtgtgggttttttcgccgcctattcaggcaataaagggaagcacagaaacaacccagattctatagcaatcgccaaaagggggcctcttcctccgggtaattattacattgttgtaagatctcggggtaatcttaaaaaccgtaccagcaattggatgaaatcaattcgaagcggatcggaccgtgacttatggtttgcactcttgcgtgaagatgaacggattgatgacactacttttataaataaagttgagcgaggatcatttcgtctacacccggcaggaagcagtggcaacagtgatgggtgtataacgcttgtctctctcaatgattatatggtgctttggagagcgcttgtcagaaccccatcaacgatgatcacccctcaactacgtgcatttggcactatacaggtctactga

SEQ ID NO: 124217 - DNA, 483 bp, Enterobacter cloacae
atggctatacccgcatatctttggcttaaagatgacggcggtgcaaacattacaggttctgtagatgttcagcaccgtgaaggtagtattgaagttcttggatttggacatggtttgcaccttcctactgatagcgcaaccggaaaaatcacaggtacacgagttcactccgcattaaattttgaaaaagaattcgattcatcaagcccatatctttataaagctgtggcgcatgggcaaacgttacaatcagcggaatttaagtggtacagaattaacgacgctgggcaggaagttgaatacttcaatatgtatcttgaaggggtaaaggtagtgtctgtatgccccgtcatgcacgatgtgaaagatcctacgactgaaaagcacaaccatcttgaaagcatatctttgcgttatgaacgcataacctggaagcactgcgacggcaatattatttttactgattcttgggcagacagatga

SEQ ID NO: 124218 - DNA, 504 bp, Enterobacter cloacae
atgactacccaaacgatgatgcaaaaactcaatgcgcagatgaacctggagttctatgcgtcgaatctgcacctccatttgagcgagtggtgttctgagaaccgtctcaacggtaccgccactttttttcgtacccaggcacaaagtaacgtcacccatatgatgcgcgtctttaactttttgaaaggcgcaggggcaaatcctatcgtcaaagccccggatgcaattaatgggcactactcctcgctggaggagttattcaggaaaacacttgaagagtatgagcaacgctgcgccacgctgaataaactggcggatgaagccagggctcagcatgacagcgcaacactgcagttcttgcgcgatatggacaaagagcagcagcaggacggcattttactgaaggcactggcggatgagctccgcaacgcgcagcagtccgggttatgtcctgaacagaccgaccgtcacctgctcgatctggtgacagtacagcaccactaa

SEQ ID NO: 124219 - DNA, 804 bp, Enterobacter cloacae
gtggctgacttgttaaccgcaccgcctgtactgcccggacactatgctttctttttcgatctcgacggcacgctcgccgggataaaaccgcaccccgaccaggtggttatcccggaggcggtattacaggatttgcatcagctctcgcaaatgaatgagggagcactggcattgatatcagggcgctcaatggccgagctggatctgctcgccagtccttaccactttccgctggccggtgtacacggagcggagcgccgcgacatccatgatcacacgcacatcgtttcactccccgatgcattaatcgaaaagctgcaggcgcagctcgctgctgcactggctgaactgccgggcacggagctggaagccaaagggatggcctttgccttgcactatcgccaggcaccgcagcatgaagaggccgtgcttgcgctcgccgccagggtcgcgcaggcgcatcctgagctggcgctgcagccgggtaaatgcgtcgtggagcttaaaccgaaagggatcaataaaggggctgcgatcgccgcgtttatggcaacgccgcctttccagggccggacgcccgtttttcttggggatgacctgaccgatgaggccgggtttcgtgtagtgaatcaggccggagggatctccgtgaaggttgggcctggtgacactgaagccgaatggcgtctggcaaatgtgaccagcgtctggcagtggatatctgacatcgctaaccagcaacaacaacaaatagcgcaaaacaaagggggaaaccattatgggtcgcttagtcgtcgtctctaa

SEQ ID NO: 124220 - DNA, 762 bp, Enterobacter cloacae
atgacggcatatttcaggcgcatatgtctgggaagtttgctgggggtgatggctctggcggcaggccaggtgcaggccgccgcgaccattctgttatggcctatcgatccgtggctggcggctgatgccaaagccacggagctgtggatccagaatcaaggaaacagcccaaccaccatgcaggtacgcattgtgcgctggaagcaggagggcgggttcgaacgttacagtgcccagcaggatgtggtggccagcccgccaattgtcaccatcgcagcgggcagcaagcagcttattcgtcttatcaaacaggggacggttccggtgggggtcgagcaggcctaccgcattattgtcgatgaaattcctcagccggacaacaaagccgaaccggctattggtctcaaactgcagatgcgttattccattcccctttttgtctatgggcaggggatcccgacaagcaaagagggggcgcaccatgcgtttgtggatacgcacaacctcagctggcgggtaaaaaatgagggcggacagcctcacctggaggttaacaaccggggcgatgtacacgtcaggctcagtcaggtttcgctggtgcagggcgggcagaaacgtcctgttgctgagggattgctgggctacgtgctggcgggcagtacccgcagctgggccatcccggccggaattcggcagccagaccagatgcgcgcgcagattaacgccagggatgaacaatggcagtcgacgcccgtcaactga

SEQ ID NO: 124221 - DNA, 1059 bp, Enterobacter cloacae
atggcaatatttcatcctctggaatgttacttactggaacgatttagttctccagaacactttgcggccacccgcgatgcaattattgcatttattggtgctcacgaagcggcataccggcgctatcagcaggacctgccggcacggatccgcaaagaaccgctgtggaaacagggagatgtggtgtggggaagccgggtgttgcctaatatccggcctgcccgtgaacgctacatacaggcgtatattttgcgcactcaaaatgatccgcaagcatttaatgtcgggcattcaatgaatagttataaccgggggatcagtgaatgctggaacggctggatgacaggggaagagcaaaagaaaatttccagggcagaaagtgacgcatactggctggataaagtcctgacgatgacagtcgacgggaagtggagtgagggagatttaacatattttcagggtgatttatatcagcttgctgaacttccaaagcgtataccgcgttatgaactggatttgagcgttcgtgttgataaaggcgaacgtcctgttattaccgggatttatttgccggacgtcgaacaggcacccgcccagttgctttaccccggtgttgagtatggtaacccacccacttgtcgtcaggggataaaacgtaaaggcactttaaaccggattacaggaaaatataattataattggctggaaactcgttgggcagaaaccggctggacgttaatccgtcgggtggaaggtgaatatctggacgtgccgccggaaggttttttccccaataaaacaccggacgagttatacagctggccggaacgggaaaaagactatattacccgtgaaggcgaatatatcagtgcttggtcgggagagttgagtcctcattccggcgactggtcggtgtttaccggtagcgagatgaaatacgcttctgtcggacaggggcaggcgttgccttacctcacgggtgctaaggattcgccgcagcgcgtctgctggacgctgataaaacgtgacgacaatggctcagtgttcagggcgagataa

SEQ ID NO: 124222 - DNA, 1059 bp, Enterobacter cloacae
atggcagtacttcacccgctggaatgctatctgctggaaaagttcagttccccggcacactttgccgccacccgcgatgcaattattgcatttattgatgctcacgaagcggcataccggcgctatcagcaggacctgccggcacggattcgcaaagaaccgctgtggaaacagggagatgtggtgtggggaagtcgggtgttgcctaatatccggcctgcccgtgaacgctacatacaggcgtatattttgcgcactcaaaatgatccgcaagcatttaatgtcgggcattcaatgaatagttataaccgggggatcagtgaatgctggaacggctggatgacaggggaagagcaaaagaaaatttccagggcagaaagtgacgcatactggctggataaagtcctgacgatgacagtcgacgggaagtggagtgagggagatttaacatattttcagggtgatttatatcagcttgctgaacttccaaagcgtataccgcgttatgaactggatttgagcgttcgggttgataaaggcgaacgtcctgttattaccggaatttatttgccggatgtcgaacaggcgcccgcccagttgctttatcccggggtaaaatacggtaacccacccacctgtcgtcaggggataaaacgcagtgaatgggtggatgaaaaaacaggaaagcgtgattataactgggatgaaacccgctgggcagaaactggctggacgttaatccgtcgggtggaaggtgaatatctggacgtgccgctggaaggttttttccccaacggcacaccggaagaactctataattggccggagcgggaaaaggattatatcacccgcgaggaggaatatatcagcgcctggtcgggagagttgagtccacattccggtgactggtcggtgtttaccggtagcgagatgaaatacgtttctgtaggacaggggcaggcgttgccttatctgaccggtgccaatgattcgctgcagcgcgtctgctggacgctgataaaacgtgacgataatggttctgtgtttaggacgaaataa

SEQ ID NO: 124223 - DNA, 1452 bp, Enterobacter cloacae
atggatcaggatcttcagaatgcgctggcattttatcagcctgcgccggatggctggttttcgggcttatcccggaaaatggaagcagcaggggtatgggtatgggaaactattcagggtgactttaacgataatcagactaccggacaggtggtgacggggacacttatatcaatgatccctttagtggatcagatttgtgatattcgtgatctggtagctaacactaaaaagattaaagaggacaacaacaatatctggttgtgggtggcattagtactgacactacttggactcttcccgacacttggttccctcctaaaaggaggagtgaaagttttgttattgtcagggcgaaaaggttttctaaaagcaacgactaatgaaagtctgattgcggcatctattgagaagagtatcagcttgttggatgattttctggcgatacccgcagtacgctatacgcttaaatcgaagaaaatttacaatgcctaccactatcttgagcagcagttacgggcgctgaaaagtacacttgcggtagccccattactgaaggcatttgatgaactattatctgcaactcgtagtctgctggatacggtaatgtcatgggggccggaatcactgcaccgtccgatagcagatctctgggatatgctgatggaggtgcgcgggcaggcggatagaatgctggcgaaagcgctggggccggtaagcgactatctggaaaaactggctaaccgcctgaggattgaaggcgataacctttatcgtgcgcgggtaggagataatacccatgttttagggaattatcaaaagcgggctaataaagaaattcagttttttgagaatgaaaaaccagtatgggtagataagggtattgaggcgcaatatcctgcattggaaaaattacgtgatagagacttgaataaaattgcagataaatggcctgatattcgctatgttgaaaatagcaggtccccgctgaatggtaaattcaatacctttgatacttctatgcgtgctgctgaaattgttcctggcgagaaaatttatcgtattcttgatcctgcctccggcgataatagtatttgctggatgcgggaagatgtatttaattcgctgaaatcgaaaagcgactggcgacgccgtcttgcggtatggaaaagctggaatgagaatggtgaatacatagtgtacacggttcctccaggcgagaacctaaaagtttgggccggtcgtgcgggcactcaggtgaatgatgttaataaagcatattctctggaaggtggagcggaacagatagtagtcaatccgagtgagttaaagaaagagtttaccagcaagcgtatgaagaccggttggggatatcaggatgaaccgtcagatttgactgaaccctatcttggtttacccgatctagaaaacaaacataaatggtttgaataa

SEQ ID NO: 124224 - DNA, 585 bp, Enterobacter cloacae
gtgaaaaaactcaccgataagcaaaaatcccgtctctgggagcagcagcgtaacgtcaattttcaggccagttgtctccttgaaaagggtcatggtccttcagatccccagattgagacgctggaacttgggccttcagcgcctgggttgccccatctgtgccttattcaccgccatctgtatcgtagagagatgaaacgggcaggtgaataccgtacggacgatattttcaaaggggacattcctttttgccatttcgaatacattgagaagatgggcaatgaattgatgtcggcactggaaagcgaccggtacctggtgggtcttcagaaagaggagtttatcgagcggataagccattactattgtgaaatcaatatgctgcatccttttgccagcggtaatggcattgcgcagcgtgttttctttgaacagctggcgatccatgcgggttacctgctggactggcgcgatatcgatcctgagcagtgggtcgcggctaaccagagcggcgcaacgggagatttgtccgccctgaacgctatctttgccaaagtagtgagcgaagcgcgggaatctgagtag

SEQ ID NO: 124225 - DNA, 462 bp, Enterobacter cloacae
gtgaacagaatatttgaacgctggtgtgagagccgtcgccggtaccggctcctgtgcggtgggctgggcgttgccttgttgtggggaaccgcatggggcctgttcctgaggccgcttaattcacagcttgctgcgcttcagaagcaaatggccgacgccgtacagcgccatgcgacgctctggcctgtcgccagcaacgcgccgcgccggacacctgagcctgacgcacgcccggtggtgcgcttttccccgctggattttcagactgatggcgcaacgctggtgcactggaactcctttccgggcggtggagagctggcgctggatgccgagtggccagcaatcctgatggttttcgcccggctggcgcagcaagatgtccggattgccgcctttacgcttgcgcctcagggcgcggcgttacgtctgcgagtgcagctggagcaagaccatgcgaaatag

SEQ ID NO: 124226 - DNA, 489 bp, Enterobacter cloacae
atgagcatgaccaatcttcttccgtggcgacaacaacgacgcgcgcgccgcgtgcggttctggggagggctgtctgcggccacctgtattctgacgctggcaacggttttcagtctgagcatgcacgcccacctgaaactgcacgccctacaggctgaactggcgggcatgcagaccgtgcagcgcgcgctgtcttctcgtctacctcttgccacacccgctcccacgcgccagccacagcgtatggcgtggcacccggtgctggcgtcactctccgatgccattccggcgcaggcctggttcactgagcttcgttaccaaccgccctctttgatgattaacggctatgcctcagcactgcccgccctgtcggtaatgggtgatgctctgcgacaaatagcgggttttaccccagggtcagcaggggagatacggcaggataatcacgggcgctggatgttcacttttcagctcacaggccaggggtaa

SEQ ID NO: 124227 - DNA, 777 bp, Enterobacter cloacae
atggctttcaaaacatggcaaacgggcgttcatattcaacaagatagggtgctgattgtcgcgctggttcgtgagcgtctcagctggtgtctgcgccgctggtgggcgataccgctgacggaaggcatcatcctcgacgggaaaatttgtcagccagaacaattgcttgacgcattacgcggctggcggcgtacgttgccgcatcagcaccgggtgtttctctcatttccggcggcgcgtaccctgcaaagatcgttgccccgcccggctatcaccctgcgcgacagcgaacagctctcctggctaggggctgcgctctcgcgtgagctggagatgtcccctgatgcgttgtgcttcgattacacacaggacacgttcagcaacacatttcatgtcaccgctgcgcaaaacaaagaggttgaaacactactgacgctcgcgaaaacgctgcatttacggctggtgacgattaccccggatgccagcgcgctggcaaattttcttcctgcggtggcaccggcgcagtgtgtcgcgtggcgagacgaacatcagtggttgtgggcaatgcgccaccagtgggggcgccgcttcgctaccgaggccaaaagcgtggctgaactggcggcactgctggctctcgcgccggacgatatcgcgctctttgatagccagcgcgacccgtgggagatcgtctctcgctgtcagcccccgctgccggagtgcggtgccgattataccgtcgcgctggcgctggccatgagcgaggtgcctgaatga

SEQ ID NO: 124228 - DNA, 1749 bp, Enterobacter cloacae
atggaaaacagtgaaacgttatccccttcaacgcgcctggccatcgtgctggtgggcgctctacaggggctgatttgctacgggattagcgagtacatcgcgtatgcgaaattgccatccgatacggtgtggtctttgtgcgtgatgcctgcaacggtggcgatgaccgccactgtcgcgctttccgtgacgtcattcagaaaaccgttactctggctggcgctcgcgatcgttggcgctgttgtcgccggtatgggcgcctggcttaagtggagcgtgtccgggcttgaacactgggaaattaaagaggccgtgcttgtctggggctttcatcttctgttgatgatgctattgatgttgccatggctgcaaaggtgtctgtcgcctgcgacgacggcctcgttctacagtgatttttacgataagcactggcacaacgcgctgactatactcactatttttatctccaacggcctcttctggctggtgcttttcctctgggctgaactcttcaaactcattggcattcagttttttgatcgccttttcttccagtctgactggtttatttcagtggcgattggcgtggtttctgccagtgtcgccgtgctggcgcgtatgcaggtgcgcttgatgcgcgcattacagaacctgcttaccctgatcgccaccggcctgttgcctctgatggcggccttagcgctgctgttcattggcgcattgcccgtgatgggctttgaggccatttccgcacggatatccgcggcgggcctgctgaccgccttagcgctactgctcctttttctggtgacgattgtctggcatccgcagcgtcagacgctaccttactatgcgcttctcatcgggatggttcgtctcgccatcgctatcgttcccgcctatccggtgttagcagggtgggcgttatggctgcgcatttcgcaatatggctggtcgccggagcgtctgtatggcgtgctcattacgctggtggcgctggtctgggcggtaggattttgcataagcgttgtcttctgtcgccgccaggcacaaaagctgcaggcgtccgttatcccgctaacggggttacttgcgcttattctcctgatcctgattcatacgccggtgcttgatccgtggcgtatcagcgttgaaagccatatggcgcgctaccacgacggacgcatcaacgcggatcaggtcagcctgtatatgctcagcaacagcgggcgtaagggacgcgaagccatgcagacgctgcaatacgatcggcagtttatggctgagccaaagcgccagcgtgagctgtacggccttctcagcggaaaccgggacggagcagggaagatgacagccgggatgcttgagaagcagttcacactcgcaccgggtacgtctcgccccgacaaggggttatggcaggcgatgctgaataacctgtaccgatttgattcctgcagtcgcgagcggaaaacctgcttactgatgtcgctggatctgaatggcgacggcaagcctgaagcagtgatttatcagtttagcgaccgcacgattgtggtgtacacgcaaaccggtaccggctggaagctggcaggcgatacctggaaaatgcctgatggtttatcacgggaagagctggaacgcgcagtgcagcaggggaaggtgaaacccgttgtgaagccgtgggcagatattgagatcttcggtgaacgcgtagagataaactacgataatgcactggtgcgttaa

SEQ ID NO: 124229 - DNA, 783 bp, Enterobacter cloacae
atgaagacgctgtggtggcagaccgtagggacgggaaatcgccatcttgtgctgctgcacggatggggactgaatgcggaagtatggcattgcgtaaatgaggaacttgcctcgcatttcacgctgcatctggtggatttacccggttttggccgcagccgcggctatggggcgatgtcgcttgacgaaatggcgcagcaggttctggccgccgcaccgcaacaggctatctggctcggctggagtctgggcgggctggtggcaagtgaggttgcattaacgaatcctgaacgcgtgcaggcgctggtaacggtggcctcgtcgccgaacttcagtgcgcaggaggagtggccgggtattaagccggacgtactgagcaacttccagcggcagttgagcgaagattaccagcgaacggtagaacgcttcctggccctgcagacgatggggacagagagcgcccgtaaggatgctcgtctgctgaagcagaccgtgctgtcgctgccgatgccggatgtggaggtactgaacgggggactcgaattactgaaaacggtcgacctgcgtgagccactgaccgcgctggcggtgccgcacctgcgcatttatggttatctggatgggctggttccacgcaaagtggtgccactgctggatgaactgtggccagagagtcaatcgctgacaatcgccaaagcggcccatgcgccgtttatctcgcatcctgccgagttttgttcagcgttgatcgccttcagtcacgaagtgcccaccactccctga

SEQ ID NO: 124230 - DNA, 684 bp, Enterobacter cloacae
atgctaacagtgcccggcttgtgctggctatgtcgaatgccacttgcgctgagcgcgtggggagtctgttccgtctgcacgcgttcgctggcaagccgcatcacgacctgcccgcagtgcggtttaccggcgtacagtccacagtttccctgcggtcgctgcctgaaaaagccaccaccgtggagcgccctggtggcggtcgatgattacgtcccaccgttaagcaggcttatccacgcgctgaagttttccggccagattgcgctggctcgccctctcgcccgcctcttattgctggcggtgttgcaggcacggcgcacgcgcgcgctgccgaaagtggatatggtgctgaatgtgcccttataccggcgccgtcactggcgacgcggctacaaccagagcgacctgctctgtcgcccgctcgcccggtggctcggctgtcagtacccagccgctgcgctgacgcgccgccatgccactgccattcagcatcagctgagcgcccggcttcgcaaaaggaacctcaaaaacgcctttcgccttgaattcgccgtcaaagggctccatatcgcgattgtggatgatgtcgtcaccacaggcagtaccgttgctgaactttcccgactgcttttgcaaagcggcgccgcgtcggttcaggtatggtgtctgtgccgtaccttgtag

SEQ ID NO: 124231 - DNA, 489 bp, Enterobacter cloacae
atgagtgagatagtgatacgccatgcggaaccgggagatgccgaagccttacgccagaactacatgcatccaggggtatattacgacacgctacagctacctcatccttcccttgagtactggcaagaacgtcttattgtaaaacccgggcaaagacggctggtcgcctgcattgatgagcaaatcgttggcgatctgatgcttcaggtggaaaccagcccgcgacgcagccatgtggccacgttcggtatcagcgttgcggcgcacgctcaagggcgcggcgtcgggagcgtgctcatgcgcgagatgatcaacctgtgcgataactggctgcgcatcgaacgtatcgagttaacggtttttgccgataacccttccgcactggcgctgtaccggaagtttggctttgaaatcgaaggcaccggcagaaaattcgccctgcgcaacggcgagtatgtggatgcgtattatatggcgcgaatgaagtag

SEQ ID NO: 124232 - DNA, 723 bp, Enterobacter cloacae
atgaaatttaccctcaccattatcgactggcaggccagagcgccaggactcagcgatgccggcgcatggcaggcatggtcgcgccagtctgacgccatcgatcccgccgcgccgcttgcaaaactgaccgacctgccgatgatgaccgcccgccgcctcaattcgggcagtaagctggcggtggatattggtcttgcgatgctgcgcaaacatcgtatcaatgccgtggtctacagcagccgccatggcgagctggaacgcaactaccgtattctgcaagcgctggcgacggagcaacccgtctcccccaccgattttgcaatgtctgttcataacgccgcggtcggcaatcttacgatcactgcaggtcagccgattgtctcatcctcggtctccgccgggatggacaccttccagcaaagtttgtgcgaagtgttgagtctgcttcacgcgggctattcccgcgttttgctggtggattttgacggcgtcctgcccgcgttttatcacgccgggctcccgccgcagatgcccgtctggccttacgcccttgcgctggtgattgaagccggggacgcgctctgctgtgaaacccatcgcgaaagcacaggggaagagcccgcgctgccgcaaagccttcagttcctgcgacattacctgagcgacgcgcggcaatttgccctggcgggcgagcgtttgcagtggcagtggacgcgccaatga

SEQ ID NO: 124233 - DNA, 597 bp, Enterobacter cloacae
ttgtggaacaactccagcgcgacgcctgacgtgcctgccattccgctcatcccgatactgacgggcctgatgctgctggcctggccgtttttgattggctatggccttgcaagccaccatttgcaatggatattgcccctgatggcgctggtgttgctgctgcgtgtctggcagacgcgccagcagcgcggccccttgcgctacgttttcctgagcgtgacgctggccggggcagtgctgtgcgtggcgagccttttccacgctcacctgtgggtgctgttttatccggtggtcgttaatctggtgatgctggtggtctttgggggctcgctgtggacatccatgccgatagtggaacggctggcgcggatacgggagccccagctgtctcctgccggggttcgttacacgcgtaaagtgacgaaagtctggtgcagcttttttatcggcaatggcgcagtcgcgctgtttaccgtgctgtacgccgacctgcgcctgtggacgctgtggaacgggatgctttcctacatcctgatgggaacgttaatggcgggtgaatggctggtgcgacaacgggtaataaaaaacgatggataa

SEQ ID NO: 124234 - DNA, 1350 bp, Enterobacter cloacae
atggataaaccgcttcctctgagccagtggctaaacgccccgcgtcctgatgagacgcctgtcgcctggcttgacgatcgtatctggacgctgggcgatctgcgccacgatgttacgcagctggtcgacgcgctgcgtcaggaagagggtgagcgctgggcgctctgttttgaaaacggctatctttttatcgtcgccctgctggcggcgcttcatgcgggtaaaacccccgtgctccccgggcacagccggggggcgcagcttaacgaacagcgggccatgttcagcggcgtcctgagcgacaccacgctcgagttttcagggcgactgcggttggtcaccgccactgcgccgacaaacacccccttttcccccttgcctgccattgacgagacgcgcgttatcgagctctttacctctggctccaccggcacgccgcagcgggtgattaagccggtgatcggcctggatcgggaagcccgtctgctcgccgatcggtttggcgaacggctgacaggctgtcacgtcgtggcctccgtggtgttgcatcatctgtatggcctgacgtttcgtgttgtcttacccatggcgcttggcctgccgctgcacgcctccctgctgcagtacgcggaacaactgtcagcgctgccgcaggacaaacggtacctctttatcagcagcccggcattcctcaagcggctcgacacctcgcttgtgccgcctccggttgccctgctgatctcagccgggggcgaactgccctggcgcgacatcatcccttgtcatgactggctgaacgtctggcctgatgaaatttacggcagcaccgaaacgggcgttatggcctggcgtcaccgtctggatgagacaacgctctggcagccgtttcccggcgtaacgttccacggcgatcgggtgatgtcgccactgatccgcgaggctgaaggagtcgtgctggatgatatcctgcatttcgcggctgacgggcagttcaacatcatcagacgccgtggccgggtagtcaaaattgaagataaacgcatttcgctcgatgagattgagcagcggttactggcgctggacggcatctgcgacgccgccgcgctggcggtcactcgccgtgggcgtcaggccattggcgtgctgctggtgctcagtgacgcggcgcgcttgcacagagacaacgggggtaaaaatgcccaggaatccacgtggcgtcgcgcccttcgcccctgccttgaaccggttgccgtgccccgctactggcgcattgtcgatgaaatcccggtcaacagtatgaacaagcgtgtgactgcacagctacaggagttatttcatgaagattcatga

SEQ ID NO: 124235 - DNA, 354 bp, Enterobacter cloacae
atgaagattcatgaaatcgatcgccaccagactcatccggagcatctggagataacgctttatcttgatcctgacctgctctggtttaagggacattttgctgtccagcccctgctccctggcgttgcacaactcgactgggtgatgcattacgctaccaccctgatggcaccaggctaccgttttcacagcattcagaatgtgaagtttgcggccccgctgttgccggacaacacggtgacgctgatccttgactggcaccttgcccgtcagatgctcagcttcagctaccagcgccatgcgggcagtgaacgccataccgccagcagcgggaagattcgcctatgtcagtaa

SEQ ID NO: 124236 - DNA, 582 bp, Enterobacter cloacae
atgatgaacgctttttaccgcgccgccgcgctggctgcgacgctgctgctggcaggctgcagccattcgaccgatactgaagaaactcgaccgctggcctggcttcagccgggcacgcaggtgacgctgccaccgccgggcattacgccagccatccgttctcagcagctgctgaccggccggtttaacggtcagactcagtcgctgctggttctgctgaacgctgacgggcaaaaagtgacgcttgccgggctctcgtcggtggggatccgcctgtttctcgcgacctatgacaacaccgggatccataccgagcagtcggtcgttatgccccagctaccgcccgccagccaggtgctggcggatgtgatgctcagccactggccgctcagcgcctggcagcctcagttgccgaagggctggacgctaaaggatactggcacccgacgcgaactgcgtaaccctgacggcaagctggtcaccgagattgtctacctgcaacgcaacggtaagcgcgagccgatcagcattgcgcagcacgtctttaaataccacatcaccattcaatatctgggtgactga

SEQ ID NO: 124237 - DNA, 474 bp, Enterobacter cloacae
atgagttatttatcccccgccgactacctgcctcacgacgcaccgatgatgctgctggagcgcgttgagcgtgtcaccgacagcagcgcggtgtgcagcgtcacggtcgacgggcacggtgtgcttgcgccgttcctgaacgttgacggcgatctgccgggctggtttgcgctggaactgatggcccagaccgtgggcgtctggtctgaatggcaccgtctgcaaaaaggcctgccccacagcccgctgggcatggtgctgggcgctcgcgagctggtgtgcagcacgggccgctttgctgcaggcactacgttaaccattaccattgagcgcctgatgcaggacgaacgctttggcagctttgaatgcacaatccagacggataacgccccccttgccacgggccgtgtgaatacgttccagcccagcgaggacgaattaacctcacttttctctcagggagcttcatcatga

SEQ ID NO: 124238 - DNA, 618 bp, Enterobacter cloacae
atgtaccagtttatactgggaaaaatctccaccctttgcgcggacccgctggcgtcaacgctcgcagatatggcacctcagggtgcgcgaaaccgttcctggctggcaggcaggacgctgctcgcccggacattatccccgtctccgctgcccgacattgtgtacggtgaacaggggaaacccgcctttgcgaaagatcaccggctctggtttaacctgagccacagcggggacgacattgccctgctggtgagcgatgaaggtgaagtaggctgcgatatcgaagtgatacgcccgcgtgaaaactggcaggcactggcgaacgcggttttcagcgtggcggaacatgcagagctggaacgcgaagcgcaggaagcgaagctcccggctttctgggggatctggacgcgtaaagaggcgattgtgaagcaacgaggcggcagcgcctggcagattgtcagcatcgacagtacctctgaggcccactcggtcagccagcttcagtttggctcgctgagtctcgccgtctgcacgcccactccgttcacccttacccccggggcgatttttcaccacgagatgtccggggcaggaatatcaccagcacgcccagcataa

SEQ ID NO: 124239 - DNA, 405 bp, Enterobacter cloacae
gtgaaaggggcgtgctgggcgttatgcagcgtggcgttagtcagtgccgcgcagttgctgctgcgcagcgccatgcaggcgcttccgcccgtcggcgaggcgctggcatttttcagggctctctggcatttttcgtccggtaccggcgcgctgctgctggggctgatgggctatgtggcctctatgggctgctggtatctggcgctgcatcgcatggcgctcagcaaagcgtacgccttgctgagcctcagttatattctggtgtggggcgcggcgatcctgctgcccggctggggcgagtcgttctcgtggcaggggctggcgggtgtcgggttgattatgctgggcgtgctggtgatattcctgccccggacatctcgtggtgaaaaatcgccccgggggtaa

SEQ ID NO: 124240 - DNA, 339 bp, Enterobacter cloacae
atgatgacctggctttggctggtgctggcaagcctgctgacctgcgcgggacagctctgtcagaaacaagcgacccgtccggcgaaaaccgggcggcgtggtgcccatattgtgctgtggctggggctcgccttgctggcgctgggctgcggcatgctggtctggctggtggtattgcagcgtcttcccgtcggggtcgcctatcccatgctgagccttaattttgtctgggtgacgctggcagcgaaggggctctggcatgagaaggtggcccgacatcactggctgggcgtagggttgattatgatcgggattgttttgctgggaggaagcctgtga

SEQ ID NO: 124241 - DNA, 954 bp, Enterobacter cloacae
atggcaaataagaaggtagtcctggtaaccgggagcgacctggcagagcaggccatggcgatattgcacgactttgaggtggtgtttgcgggtcgtcagcctacggaggatgagctgattgcactgtgtgaacagcataatccggtggcaatactggtacgttacggcaagattagcgcgaaaatcatggatgcagcaccagccctgcaggttatttccaagcacggaagcgggatcgatgtgatagaccaggcggcagcggctgagcgtaatatcgtcgtccgctctgcaccgggagctaacgcggcggcggtggctgaacacacctgggcattaattctcgcctgcgccaaatcggtggtgtcgctggatacgcgactgcgccaagggcactgggataaagccacgcataaatccatcgaactggaaggactcacgctgggactgatcgggctgggggctattggctcacgggtagcacagatcggtcacgtctttagtatgcgggttcttgcttacgatccctatgctcaatcaatgccttccatatgcgagcgtactgatactctgaccgacctactttcccgttccgatgtgatttctttgcattgtccgctcaccgacgataatcggggcatgatcaatacgaaaacgctcgcatacgttaagccaaacgctattctggtgaatacggcacgcggcggcttgattgacgatgggtcattgctcgcggcgctagagaatcgaaccttgcacagcgcggggctggacagctttaccagcgaaccactgaccgctccgcacctctggcagggggtcgagaacgtcattatctctccgcatattggcggcgtcagcgcagcatcgtatatcaaaatgggcaccgcggcggccagcaatattgtagacgttgtgagtgaagctgaagaaacaacgcttaccgcgagccgctaa

SEQ ID NO: 124242 - DNA, 342 bp, Enterobacter cloacae
atgacgaccattcagacatcaacccaccctattcaaaccagtaacagtggtgggagtgcttccagtggcaacgatattgctgcccaaatcagccgcattacggagcaaatcaccaaactgactcaacagctaaaagagctgccagagagtgccggcagcccggaagagaagaaaaaacagcaggagctcattcaggcacagcttaaagtgctgcagacacagcttgcacaactattgcgccagcaggcggaagaggcccagaagaaacaagatcagaagcagggcaaagtggaaggggtaaacaacccatcagatgtcaatcagatcgatatttacatctaa

SEQ ID NO: 124243 - DNA, 1974 bp, Enterobacter cloacae
atggtggcgtttgaccaactgattagccagcttgagcgcaccggccagcgtcggctggtggtgctcagcggtgatgcgcagtggtccctggcgcaggccggggcgctgcgtgatacgctttccggggattgggtgtggctggatgaaaacccttccagggagataagcgggctgctggggcgcgagttccggcatgctgtttttgatgcccgcgccgggtttgatgtctcagcctttgccgccctgagcggaacgctgcgtgccgggagcctgctggtgctgttggcccccccgcttgcggtgtgggcaggcacgcccgacagtgattccctgcgctggagcgacagcgcggaacccattcccacgccgaatttcattcgccacttttgtcagacgattacccacgatcccgatgcaatcgtctggcagcaaaaccagccgttaacccttcctccgtttcctgatgcctctgactggcaacccgctaacggtgcaccccagcgcgagcaggcggagatcctgcacgcacttcgtgcaatgccgaaaggcgttgcggctgttaccgccccgcgcgggaggggaaaatcggcgcttgccggcatgctgctgaacagcattgagggcagagcagttgtcaccgcaccggcaaagggagcaacggaggtcatcgcacggtttgcgggtgaacattttcactttatggcaccggatgtgctgctggcctcctcacaccatgccgactggctgattgtcgatgaggcggcggccatacccggccctgtgctggagaagctggttgcgcgctttccacgggtactgttaaccacgacggtacaagggtatgaaggaaccggaagagggtttttgcttaaattctgcgcgcagttcagcgccctgcagcgttataccttatccacccccgttcgctgggctgcgggatgtccgcttgagcgggtggtcgccagcgcgctgctgtttgacgacactctcatcgaccagcagccgaaaggagaggtgcaactgagctctctggcccccgacgcatgggagcacacgcctgcactcgccgcgagtgtctacgagctgctttgtgcggcccattaccgtacctcgccgctggatctgcgccgtatgatggacgcccccggtcagcacgttgccgtcgcgcaaacggacccggtcattgcgggcgcgctgtggctggtagacgaaggcgggttaagcccggcgctaagtcgcgcagtatgggcgggttttcgtcgaccgcgcggcaaccttgtcgcgcagtctctggccgcgcatggcggcacgcctctggcagcaacgctgaaaggtcgacggatcacgcgcatcgctgttcaccctcaccggcaacgggaagggatcggccgggcgcttatccgcgaggcctgcggggaggattatctctcggtgagctttggttttaccgacgcgctgtggcatttctggcagcagtgcggctttgagctggtacggataggcagccaccgcgaagccagcagcggctgctataccgcaatggcattattgccgcaaagtgaggcggggcatcgtctgtgtgaacaggcccggctgcgcctgcatcgcgatgcgcgcgtcttatcattgtggaatggcgaaaagatccaggtggcagatgagtgggaagctacccttaatagtgacgactggctggagctggcaggctttgcctttgcacaccggccctttgctacgtccgttgccgcattgacgcgtttgctgctcaccgtggatctgccgcttccggccctgcgcggtaaaattgaggcacgaagagaggacactgcgctcagtgctgaactgtcgctcaccgggcgaaaagcggtgctggcaagattacgcgctgaaacggcgcaggcccttgaatgtcttgataatgcacgcagtcagcagctcaaaagcgacattttgcaatggcaattttttcaatga

SEQ ID NO: 124244 - DNA, 570 bp, Enterobacter cloacae
ttgacaacctcatcacaacattacctggttatcactgcgctgggtgctgacaggccgggtatcgtgaacaccattacccgccacgtgagcagctgcggctgtaatatcgaggacagccgtctggcgatgctgggcgaagagttcacgtttattatgctgctgtccgggacatggaacgccatcacgcttatcgaatctacactgccgctgaaaggcgcggaactggatttgctgatcgtgatgaaacgcaccaatgcgcgtccgcgtccggccatgcctgccaccgtctgggtacaggttgaagttcctgattcccctcatctgattgagcgttttaccgcgctgtttgacagccatcagatgaacattgccgagctggtttcccgcacacaaccggctgatgagagtgccgttcctaccctctttattcaaatcaccgcccacagtcctgcatcacaggatgcgtcaaatatcgagcaagcgttcaaagccctctgtacagaattacacgcgcaaggcagtataagcgtcgtaaattattcgcagcatgaacaggatggagttgagtaa

SEQ ID NO: 124245 - DNA, 1422 bp, Enterobacter cloacae
atgatgacgtatcagctgataaccgccctttctgacgtaaagccacacggccacctcatcgcccgcagcacgtctacgctgttgccggacacgccactgattgcggaaatgcgcgggcaagatgccgttgccgacacccgttttggctgtgcgccttttgcacgcatcacgctggtgccagatgctctctggcaggatagccttaccgaaggattgcttacggcactccgtccgctgctggccacgtccgtcagtaccgacgtggtcctggatgtcacccacattgacgacgttgtgctgcaacaggtcctgcgttttctttttaatcagtcgcacaggcttagcgatctgcagctgaagaaagcggacgatgtcactttgcgcgttgagcacgttaccgccctctgcctgccagaacagcaggcgcggctggacgttatcttccgccagcagctcgccattagccgtggaatggtcgccgcacgccgtctggccgatatcccctccgaccgctgcacgccgcagtttatggtgcaggaggcgcaaacattgtgcgcggccttccctgccctgcgctgtgaagtgctggatgaaaagcagatcgttgagcagggtctggggctgcttcacgccgttggcaaaggcgcctcctgcccgccacgactgctggctattcactatgacggtgtttctgacggtccggtgcgctgctatgtaggtaaaggcattaccttcgataccggcggcctgtggctcaaggatggcgcgggcatgtacaccatgaaatatgacatgtgcggggcagcgaacgtgctggggctgatgctgaccgttgcagagctggcgctccccgtgcgcctcatgggcgtgctggcgctggcagaaaacgccatcggcccggacgccatgcagcctggcacggtagccagagcctgcaacggcaccacggttgaaatcaacaataccgatgccgaaggccgactggtgctggcagacgctatcgcctgggccagccagcgccatccgcaggcgcgctacattatcgatatggcaacgctgacgggtgcggtggtcaaagcgctgggatatgagctgagcgggttgatgacccaggacgagccactgcgccaggcgctgacgcaggcaggaaaacagagcggagatgaagtgtggtccctgccgctggatgcgcggctgaaaaagcagaccgacagcgccatcgccgatctatgcaatacgccgcccaacaatgcggcgatcagtgcctcggcagcgtggctgctgcatcacttctgcccgccgacaatcccgtgggcgcatctggatattagcggtacggcgctgtggcgtgagggtggcagaagcgtggcctcagggaggccgattccgctgctggtggagcacctgatgggggatctctag

SEQ ID NO: 124246 - DNA, 894 bp, Enterobacter cloacae
atgaacatcgccgcatttgatatcggtggcaccgcgttaaaaatgggcattgcgacagcgcagggagagctactgcaaacggataagaccgccatcaggaacagcgacggtgacgctattcttgcgcagatgctgaactgggtaacggcccatcccgggcttaaggggatcgccatcagcgcgccggggtatgttaatccgcataccggttttattgagatgggcggggccattcgccgcttcgaccagttcgcaatgaaaggctggcttgaggcgcaaacgggtttaccggtcactgtcgagaatgacgctaactgcgtgctgctggcggagcgctggcagggcaaggcgaaggatatcgataactttctggtactgaccatcggcaccgggatcggcggggcgattttctgcaacggcaggctggttcacggggcgcgttttcgcgccggagagttcggctacatgctcacggaaagggcagactcaagacgtgttgcccgccactccatgaatgaaaactgtacgttacgcacgcttcgcaagcgctatgccgactttcacggtctgacgcttgagagcgtcaccggcgaggccatttttgatggctatgacgcaggcgacaccgtatgccgccgcctggtggatgattttcttaacggcattgcgacagggttctacaacctggcgaatgtgttcgacccgcagaccatcttcattggcggcggtatcacggagcggcccgggtttatggatctgcttcgcacccatcttgcgtggtttggcatcgcggatatcgccgatgtcgtcagccacggcaaccgggccggtcttgtcggcgcggtttaccacttcagacagcagtatccgtcagcaatcagcaacatcgaatga

SEQ ID NO: 124247 - DNA, 1539 bp, Enterobacter cloacae
atgccgataaatgataagaccccacgaccacaggaattcgccgcggtcgaccttggttctaacagtttccacatggtcatcgcccgtgaggtggatggcgcgctgcagatcatcggtcgtctgaagcagcgcgtacacctggcagatggtcttgatgaacgcagcatgctcagcgaagaggcgatggagcgcggcctgaactgcctgtcgctgtttgccgaacgcctgcagggcttctcaccctccagcgtctgcattgtgggaacgcataccctgcgccaggcgctgaatgcccctgaattcctcaagcgtgcagaaaaagtgatcccctatcccattgagatcatctccggtaacgaagaggcgcgtctgatttttatgggcgttgagcacacgcagccggaaaaaggccgcaagttggtgattgatatcggcggcggctccacagagctggtcattggcgaagactttgaaccgcgtctggtggaaagccgccgtatgggctgcgtcagttttgcgcagatgtatttcccgggcggtgcgatttcgcgggaaaacttccagcgggcgcgcatggctgccgttcagaagctggaaaatctggcctggcagtaccgtatccagggctggaacgtcgcgctgggggcctcgggcaccatcaaagctgcccatgaagtgctgctggcgatgggtgaaaaagacggttttatcacccctgagcgcctgacgttgctgaccgaagaggtgctgaaacataaaagtttcgacgcgttaagcctgccgggtctttccgacgagcgtaaagcggtgtttgtaccggggctggctatcctgtgcggcgtattcgatgccctggccattaaggagctgcgtctctctgacggcgcgctgcgtgaaggcgtgctgtatgagatggaaggccgcttccgccatcaggatattcgcagccgtaccgcgcaaagcctggcaaaccagtacaacatcgaccgcgaacaggcgaagcgggtgctggaaacgaccgttcagatgtacgatcagtggcaggagcagaatccgaagcttgcccatccgcagcttgccgccctgctgaaatgggccgcgatgctgcacgaagtggggctgaacattaaccacagcggcatgcaccgtcattccgcctacattctgcaaaacagcgatttgccgggcttcaaccaggagcagcaaaccatgatggcgacgctggtgcgctatcatcgcaaagccattaagctcgacgatctgccgcgcttcacgctgttcaagaaaaagcagttcctgccgctgattcagctactgcgtctgggcgtgctgctgaataaccagcgtcaggccacgaccacgccgcccacgctgaaactcaaaacggatgaccatcactggacgctgagcttcccgcacgactggtttagccagaatgcgctggttctgctggatctggaaaaagagcagcagtactgggaagcggtcaccggctggctgctcaaaatcgaagaagagagcgccgacgtcgcggcgtaa

SEQ ID NO: 124248 - DNA, 891 bp, Enterobacter cloacae
atgacgacgctcaatctgggacatcttgcgaccttccgtctggtgatccagcgcggcagcttttcggctgcagcggatctgctcggtatttcccagcccgccgttagtctgcaaatacgtcagctggaacagtttctgcaaacgcggctggtagaacgaaccgggcgtggcatcaaggctacacctgccggacaggctctgctgctccacgaagagcgtattcagcaggcggtagatgaagcggttcgttccgtgagtgagttcagccaagacgtgagcggcaccgtgacgcttggcactggcgcaacggcctgtatccatcttttaccgccattgttgcagcagttacgcagcgactacccactcctgaaagtgggggtaaccacgggcaacaccctcgacattgtcagggcgatagaagaaaaccgtctcgatctggggctggtgaccctgccggtcagtggtaaaagtctggacgtcgtgacggtgatggacgaagagtttgtttttattgcctcgcttatgcagcaggagcgattttcgcgtttaacccctgaggcgttgcaccttcagccgctgattgcctttgaatccggcagtggcacccgcgcgctgatagatggctggtttgcggcatgtgggttagcgattgcgccggtgatgcagcttggcagcattgaggccatcaaacggatggttcgcgcggggttgggttatagcattgtaccgcgaatggcggttgaacatgccgctgaccgcgaagggctaagcgtcatgtcgcttgaacccgtattgcagcggcagctggctgttgtgatgcgtcaggataagatcctcagcaaaggcatcgcggccattattcggataatacaaaaaccaccggtgaattag

SEQ ID NO: 124249 - DNA, 1230 bp, Enterobacter cloacae
atggaaacacctgcacttccccgccgcctcgccctcaccgccggatgtaatcaacttatcaactgggggatctctttttatatgcccggcacttttgccctcgccattatcgccgacaggggatggacatcgccccagctctatctcggcctgacgctggcgatgctggtgatggccgccgtctccccttttgtcgcccgtctgctggcacgctttggcgggcaaaacgtggtaatgagtggaacgctgctgatcgccgtaagctgcgcggggatggcatacacccagacccttcccggctggtacagcgcctggctggtgaccggtatcgggatgcgcctgtcgctctacgatgcgttattcgccgcgctggtaaacctgtatggacagcaggcgcgaaaaacgatctcacgcattacgctggcaggtgggctggcgtctgctgttttttggccgctgggagacacgctgctgaaggtgatgagctggcagcatgcgctgcaaatttacgctctttttggactgctgagcgcggtatgcattcgaaccctcccccaacagcgtctggcgattacccgcagcgtaaatgcccccattccggccggtgaacggcgtaacggctggctttacgcaacgtttatcgccctcattacgttcgtctctaacggcacatccacccacctgccggagtttatcgccagcgtcggcctgccgatcgccctcggcatgctgtggggactcggccagacgggggcgcgcgcaatcgaggtcatggcgggagcccgctcaaccccactctcccttacacgctttaccgccctcgcgatgccgctctgctttcttcttgggctaagcagtaccctgtatgcctggtgtgctgccggatttgtgctgggctatggcgccatcaacgggctggtgacaatcgtcaaagccacgctaccgctggcgctgttcagcgctgaaagctatgcccggcgcactggtttgcttctgatccctgcacaactgatggcagcagcgtcgccgtttgcatacgcatggcttaacaaaacgctggggatcgcgggcgctatgtgggtgtctaccgggttaacgctggtaattgccgggctggcgatcgccattgtacgccgttcgggcacgcagaatgtatcacactgtatcgagaacgccccgcagacaagtcggtacaaaaagccgcccgcagcaaacatctctgatacataa

SEQ ID NO: 124250 - DNA, 744 bp, Enterobacter cloacae
atgaaaacattatcgatactgacggcgggtctgctggcgatgtcggccagcgcctttgcgcagagtgaaaccagcgtggtgctggtgcatggcgcctttgccgacggcagcagctggaacaaggtgatttcccttttgcagaaacgccacaccgaagtcatagccgtccagctgccgctgacctcactaaaagatgacgtagcagccacccggcgcgccatcgctcgtgcacacggggacgtggtactggtaggtcactcctggggcggcaccgtgattagcgaggccggcaacgatgcgcgggtgaaatcactggtgtatgtggcggcgttcgcgccggacgccggtcagtcaacggcagagctggcgaatagctacccggcgccaccggggagcgcgggtatcgcgaaaaccgcggacggctttttatacctgccgcctgcgtcggtcagtaaggacttcgcaccggatgtgaaaccgggtgaacaacagatcatcgccgccacacaggggccaataaagggcgatgcgtttggcgaaaaggtcactcgcgcggcgtggcacgcgaagccgagctggtatgtggtaagcaagaacgaccggatgatcaatcctgagcttgaacgcgcgatggcgaaggccatccacgcgaacaccaccgaggtcgcggcaagccacgtgtcgatggtgagccagccggaagccattgcccgcacgattgagcaggcgaggcagatgcactga

SEQ ID NO: 124251 - DNA, 276 bp, Enterobacter cloacae
gtggttatcagaaaacttgcccttagttcccttagaatgattatattcatcgggatattcgctattgtgtcatggttagatgttggttacttaactgaacatccattaataagtaacgaaacagctattagaatttcctatttgtttagcaacaacccagcgcccgaagatatttactacagttatgattatgcattaattgtatttaacgttcttatctctctcttcttatacattgtaacaatgaagttagttaaattaacatggagtaaataa

SEQ ID NO: 124252 - DNA, 1134 bp, Enterobacter cloacae
atgaacaggcagacttcgctgagcataaccgggttttcaatcatcgcggtgacctatggtatggcaaggttttcgtggggcctgatgctgcctgatatccgtcaggctatccctttcaccccgcaggtggcggggtttatagcctcctgtagttatgcggcgtattgcatgtcgatatttatggcctcataccttattgcgcgcgttgggcctcgtttgcccgccttgctggcggccatcgccgctgccgcggggttgttcattctcgcgacttcggcacattcaacgatgctggcgataggtttatttattgccgggctgagctcgggtctggcctcaccggcccttgccggggcggttaatgacaggatcgcccctgaccgtcagctccatgtgaataccaccatcaatgccggaacgagcggtgggatcattctctcggtgcccgttctgtttttcatgcccgggggctggcgggcagcctgtgttgtgttcgccattatggcgctgctgtgcctgccggctttgtggcggtatctgccgtcatctgcggcgaaatcccgtgagtcaacgccaaaggtgctatctatcgtacgcaaacccggcatgtttcggctgctggggattgcctttatcagcggtatggccagcgccgcatggtggagctttggcccggaaatacttatgcgtcacacggagctggatagcgcagcgaccaatattctctggctgataagcggcggggcggggattattgccatatttaccggaagtatggcaaggcgtatcggcatgcggggggtctatcgtttatcccagatcttcatggccatttctctggcggttctgacagtaagccacggtttctcctggtggcttattccggcagtggccatgagcggcgcggggtatgtgattttgtccggggtattgttggtgaagggggcagagatcgcacatccttcacctgcggctggagtcagcctggcctttctgatgctggcaggtgggcaggttgtgggggctatcctttttggcctgcttctggggttaacgagcgcagtggctgcgctggcgattttttcaggcatgtcctggctgatgctagccgtcacgccagagagccatcgctga

SEQ ID NO: 124253 - DNA, 738 bp, Enterobacter cloacae
atgaagctatgtctggtgagtatgtcacacgtctttttccgcgccatacgcgcggtgttttcccgtaaaacgttgcgcctgagtctgccttgtttattgctggcggggtgtgtttcccatgtgccaaaaagtgccattagcgataaacaggaagataaatggccagagaatcagcttgcagattttctctcaacccgctgcgacgacatctggaacctgtcggggcatgacgtcgaaaccaatcctctgttctggctacgcggaatagactgcgcgcagcgtctggctccggttgaagcccgctcaaaagcggcgatgctggacgacgatacctggcaggacgccttcaagcgcggaatattgcttggagatgccaaaattacccctgtcgaacgacgcacgaacgtcacgcggctcgacacctttgtggcatatcttcccgctcaggtacgccctgtttatcagctctggcgcgatgggcagacattacaacttcagctgtctgaagagcgctcccgttacagcaagctgcaacagtcaaccgacagcgagctggataccctgcgtcagcagcaacaacatttgcgtacgcaactggataccacgacccgtaagctggagaacctgaccgatatcgaaagacagctctcgtcgcgtaaatatcagcctgggagttcatccgctgtaccggacagcgatacaccgaaacaagaggatgtgaagcatgacgagccgtaa

SEQ ID NO: 124254 - DNA, 1461 bp, Enterobacter cloacae
atgaatattcctggcgatgaactgtataacttgctgaatacggcgctgaaaaaccgcggacaagagacgctgcagcgcacgctttatctttcattgcgggagtacatattgtccggcaggttacagtccggtagtcgcctgtctggttccagaacgctggccgggcatctctccctttcccgaaacaccgttaatggggcactggaacagctcaccctcgaagggtatctgttgcgtagccgccagggaacgcgggtggcaccgctggcggcccgtcagctcgcgcaggatttaccggcacctgcggttgcgcttgccgggcgggttagcgcactgcctgcccctgtaccgcgtagcacgccggttctggcctttacgccggggacaccggccatcaactattttcccttgccgctctggcggcgcctgtacgatcgcgtgttgcgggaggagggaagtgccctgttgggctacggcgatcccgccggggaacctgctttgcgggcggccattgcccgccaccttgcgctttcccgcgggattgactgcgacgccagccagattgtgatcaccgaaggcgcactggaaggtgtgaacctctgcaccctgctattgagtgagccgggcgatgttgcctgggtggaagatcccggctatgccggcgcaaaaagcgcctttgtgaaagcgggtttagccataacgggaataccggttgatggagagggcatgtgctgggaaggaacagaggcgccgtccccttcgcttatttttacttcaccttcacatcagtttccctacggaagtgtcctcagcgcgcggcggcgtctggcgttactggatgtggcgcgacaacataacgcctggattatcgaggatgattacgacagtgagtttcgttatagcggtgagccggtaccggcgatgctgggaatgattaaccatgcgcccgttgtttatctgggaacattcagcaaaacgttattcccgtcgctcagaatggggtttatggttttccccccggcgctggcgaaagcggcacgcccggccatcggttcgttattgcgcggtgggcatcgcgccgagcagcgtaccctggcgctgttcattgaagagggtcactatgcccgccatttggcagccatgcgtcgtctctatcgtaaacgctaccggcagctgcgtgaagctctgaatgcggagcttcatgtaccacaccggattctggcgggggaagggggcatgcatctgacggtggcgattgacggaatcgacgacaggcaactggtggaacaggccagggcgtatcagctggctccagcggcattgagcgggtattaccttgatacaaaacaggggcagagcggtctggtattaggctacgggaacacatccgcttcactgtatgcgtcggctatccgacgcatacagatactgatcacgcaacagcagggcgggaaagggtaa

SEQ ID NO: 124255 - DNA, 1578 bp, Enterobacter cloacae
atgaaaacccgacatctggtcagcctggtgactggcatactgatcttttctgtgctgataccgatttgcctcagtatctggctggcgcatcgccaggcggaagaaaaatttgtcgatgcgctggacagctatgcctcacgcgtgctgttgcgtacggacagggttgttgggcaggccaaggaagcgctcacgcagctgcagacctttaaaggccctccgtgtagccatttgcatttacgggaaatgcgccggatcgccttctcgtggctctatgttcaggaagtgatctacaccgataaccttaaaccgctgtgctcgtcgctggaacaggtcagcaaagcgaccgcgttcccgccgcccatgcgcattacggaagatggctatagcgcgtggcttacgaggccaaatgaactcggtttcaaccgcaacatggccgtgctggggcaaggacattatcttgtactggtcgatcccgcctcgctggtggatgtgatccccttcgccgatatttctatcgatgccgccctggtagcgaacgcaacacatctcgtgttctccagcagcagcaaactggatccgcatatccgcgacatgattaaagatcaggagatggtcagtgttgagtacaacggtgcaatgtacgtcatgaagcccgtaccggagttgggaataaacgttgttgcatgggctgcgctgaaaccgctggcggaaacctggcaccggcaactccttttctggctgccgtttggcatgctgataagcctgcttgccgccctgtttgttctgcggatattgcgtcgcatccagtcgccgcgtaaccgcctgcttgatgccatcaataaccgtgaattcgaggtttactaccagcctattgtggcgctctgtagcgggaaaatagtgggcgcagaggcgctaacgcgttggcctcagcctgacgggagtagcctgtcgcctgacagtttcgtcccgctggcggaacaaacggggcttatctcgcgcctcacgcatctggtgatcgaaaaagtgttcgaggatatgggcaactggctgcatctccatgccgatcagcatatctccgtcaacctcgcgcctgcagatttaacctccggcaagctgccgccgcttctgagccagctactcaataaatggcaagtccgcccggaacagatagcgcttgaattaaccgaacgcggctttgccgatcccaaaatcagcgcaccggccatcgccgcttttcgccgttcgggccacgccatttacatcgatgattttggcacgggctattccagcctgagctatctgcaggatctggacgtcgacacgctgaaaattgataagtcgttcgtggatgcgctggagtacaaaaacgtaacgccacacattatagaaatggcgaaatcactgaagctggcgatggttgctgagggagtggaaaccgcagggcagctcgcctggctgcaccgtcacggcgtgcaatacgggcaaggctggtactacagtaaggcgctgccaaaagcggaatttatggcatgggcagaaaataaccttaacgccccatctacttcagataagatttga

SEQ ID NO: 124256 - DNA, 3093 bp, Enterobacter cloacae
atgtccaatactgtctcactgactctcagcgcacttctggcccgtcgggactgggaaaatcccggcgtcacccagtggaaccggctggcggcgcatgcgccatttcacagctggcgtaatgaacacgccgccagagaggacgcggcatccatcagccgacgttctctgaatggggagtggcgatttagcttcttttctgcacctgagcaggttccgcaggcatggacaggcgaagattgcccggatgccgttgcgatgccggtgccgtcaaactggcagatgcaggggtttgatacacctgtttacaccaacgtcacctatcccattcccgtcaatccgccctttgttccggcagagaatccggtcggttgttactcgctcacatttgaagtggaggacgcgtggctcgagggcgggcaaacccgcattatctttgatggcgtgaactcggcgtttcatctctggtgcaacggtcagtgggtggggtattcccaggacagccgtctgccggccgaattcgatctctcgggcgtgttgcgtgctggccagaaccgcctggccgtgatggttttgcgctggtgcgacggaagctatctggaagatcaggacatgtggcgcatgagcgggattttccgcgatgtgtcgctgctgcataagccggagacgtacatcgcggattatcaggtggtcaccgacctcaatgcggagctggatcgcgccgtgctgaaggtggatgtcgccctggcgggcgctcactttacggagtgcgaggtggcaataacgctctggcgcaacggtgaacgctgtgccagcgccacccgacagccaggctcggccattgtggatgaacgcggcaactgggccgagcggttgacggtggcgctcccggttgcgtcacccgccttatggagtgctgagaccccagcgctttatcggctgacgatcgcactgctggacccgcagggtgaggtgctggagattgaagcctgtgatgtgggtttccgccgtgttgaaatcagcaatggcctgctgaagctcaacggcaagccactgctgatccgcggggtcaaccggcatgaacatcacccggaaaacggccaggtgatggacgaagcgacgatgcgtcgcgatatcgaaatcatgaagcaacacaacttcaacgccgtacgctgctcgcactatccgaaccatcctctgtggtaccggctttgcgatcgctacggcctgtatgtggttgacgaggccaatatcgaaacccacggcatggtgccgatgagtcgtctcgctgacgatccccgctggctgcccgccatgagcgagcgcgtgacccgcatggtgcaacgcgatcgtaatcatccgtccattatcatctggtcgctgggcaatgagtctggtcacggtgcaaaccacgacgcgctgtatcgctggctaaaaaccgccgatccgacgcgcccggttcaatatgaaggcggtggggcgaacacggcggcgaccgatattatttgtccgatgtatgcccgtgttgatcaggatcagccgttcccggcggtgccgaaatggtccattaaaaaatggatcgggttgccggatgaaacccgaccgctgatcctctgcgaatacgcccacgcaatgggcaacagctttggcggcttcgccagatactggcaggcgtttcgtagccatccacgtctgcagggaggatttgtctgggactgggtcgaccaggcgctgacgaagaaagatgaaaatggcaccccgttctgggcctacggcggcgattttggtgatacacccaatgaccgtcagttctgccttaacgggctggtattccccgatcgcacgccgcacccggcactgtatgaggctcagcgcgcgcagcagttctttacctttacgcgggtaagcacttctccgctggtggtggacgtgcaaagcgattacctgttccgtcatacggataacgagctgctcagatggtcggtgacccgtgacggaacggtgctggctaagggggaggttacgctctccatcgcgcctcaggagactcagcgtctggacatctcgctgcccgcgctgacggcggagccgggcgaggtctggctgaatgtcgaggtgtaccagctgaaggcaacgccgtggtcaccggaaaaccatcgctgcgcgtgggatcaatggccgctcccggcaccgttgtttatcgccccgcccgcaccggtgggtgtgccgccggtactgacgcaaaccgatgagatgctgaccctgacgcaccagcagcagcgatggatagttgaccgtacctcaggacacctgacgcagtggctgaacaatggcgttgaaacgctgctctcgccgctgacggataactttacccgcgcgccgctggacaatgatatcggggtcagcgaggccacgcgtatcgatccaaatgcatgggtggagcgctggaaggcggcggggatgtacgacgtcaccccgcggttgctgcgttgtgaaggagagcagcatgcccgcgaggcggtagtcacgacgctgcatgcctgggaacatctcggcaaagcgctgttcctgagccgtaaagtctggcgagtggatgatcagggtgtgctgcacggtgaggttgaagtagaggttgcgtctgatattccggagcctgcgcgtattggcctgagcatgcatcttgcccggccgccggaagccgttcactggctggggctggggccgcatgaaaactacccggacagaaagctggcagcacagcaggggcgctggacgttgccgctgcaggcaatgcatacgccgtacatcttcccgacggaaaacggcttgcggtgcgatacccgtgaactggtgctggggacgcatcagttgaacgggcagttccatttctctgtgagccgctacagccagcaacagctgcgtgagacaacccatcaccatctgctgcgtgacgagccggggtattggctcaatcttgatgcgttccatatgggcgtgggtggagatgactcctggagccccagcgtctcgccggaattcatcctgcaaaatcgtcagcttcgctatcgctttagctggcgtcagaacctcaactga

SEQ ID NO: 124257 - DNA, 1071 bp, Enterobacter cloacae
atgaaagccattactctctatgatgttgccctccttgcgggggtgtcttatcaaaccgtttcccgtgtgattaacgacgcggagcatgtttctgcccggacacgggaaaaggtgcagcaggccatggcggagctgcactatgttcctaaccgtggcgcgcagcagctggcgggcaagcgcacccgtacgctgggactgatcactaccgatctggcgctgcatgcgccttcgcaaattgtctctgcggtcaaatcccgggcggtagaaaagggggcgagcgtactgatctcaatggtggaacatccgcaacagtgccaggccgcgcttcaggagctgctggcgcagcgcgtggaagccctgctggtgaacgtgccgcttgacgatccccatgccgaacaactcaaggcactggcgtcgcccgtgccggtgctgtttctggatgtctctccgtcggcagcggtcaacagtctggtttttaatgcggaacagggcgctcgtctgggcgttgaacatttgctgtcgctcgggcatcagcgtattgcattgctgagcgggccggaaagctctgtttccgctcgtgcccgtctggcggcatggaaagccgcgctggaggaagccggccttgaggcggcggcggtggcctacggcgactggagcgcagcctgcggttatgagaaggggcatgcgctgttgtctgctgcaacgttaccggatgccattctggtggctaacgatcaaatggcgctgggggtgatgcgggcctgcgcggaaaaaggggtgacgatcccgggccagatatcgatagtggggtttgacgataccgccgacagcgcctggttttcacctccgcttaccaccatccgtcaggcatttcgcgaggcaggtgaacaaagtgtggagtggctgctggctcccgcccgccatgaagcctgctggcaggttcagttgcccgtcacgttgattagccgacaatccagtgcccgtcgcaccccgcagcaggccgatcgtgaggatcttgcgcagcagctcagaagcctggccctgctggcagagcaacttgcccgccagtaa

SEQ ID NO: 124258 - DNA, 1701 bp, Enterobacter cloacae
atgcgccagctcaaccgcctcaaacagtatcaacgcctgtggcaaccctccgaaggggcaccgcagcaggtcaccattgcggagctcgccagccgctgtttttgcagcgagcggcatgttcgcaccctgctgcgtcaggcgcaggaggctggctggctgaactggcatgcgcagtctggtcgcggcaagcgcggcgagctcaggttttatgtcagcccggaatcactgcgcaatacgatgatggaagaagcgctgaagcatgggcagcagcataacgccctggagctggcccagcttgcgccggaagagttgcgggagttgctgcatccctttttgggcggacagtggcaaaacgatacgccgacgctgcgcattccctattaccgctcactggatgcgctacagcctggctttttacccggccgggcggagcagcacctggcaggccaggttttctccgggctgacgcgctttaacggcaacaacagcgaaccaacgggcgatcttgcccatcactgggaagtcacggatggcggcctgcgctggcatttttatatacgctcgaccctgcactggcataacggcgacaaaattgagacagcgcagttgcagcggagcctgaaggccctgcttatgctgccagccctgcgcaaactgttccagagcgtattagacatcgaggtcactcacccgcagtgcctgacgtttaccctgcatcaaccggactactggttgccccatcgtctggcgacctactgtagccgtctggcccaccctgaccagcccatgacgggcagcggccctttcaggctgagcgtatttgattccgagctggtgcgtctggaaagccacgagcagtaccatcttagccacccgctgatcaaggcgattgaatactggatcacgccgacgctatttgattacggactggggaccagttgtcgtcatccggtgcagattgccattggcgagcctgatgaactggagagcctgcggctggtaagtaacagcaccagcctgggcttctgttatctcaccctgaaacagagcgaccggatgagtgaactgcaggctcgacggctaattaatatcatccatctctcaacgctgctgcatacgctcccgctgaacgaagggttgattacaccaacagaagagctgcttccaggcctgcctattccccggtggccggatttaacgcacgttcctttaccggcagcgttaaccctcgtttaccatttgcccgttgagttacacaccatggcaaaccagctaaaacagtaccttgcgcagcagggctgcgaactgaccgttatctttcacgatgcgaagacgtgggacgggtgtccgcagcttgccgatgcggacatgatgatgggagacaggctgattggcgaagcgccggagtacacgcttgaacagtggcttcggtgcgataccctctggccgcatctgctaagcgcgccgcaagttgcgcatctgcaggccacgctggatgccgtacagactcaggccgatgagcaggcaagacacgctggcctgagggccatctttacccggctgatggataatgcggtgctgacgccgctgtttaactaccagtatcaaatcagcgcaccaccgggggtaaacggaatacgactgaatacccgtggctggtttgatttcacagaagcctggcttccagccccccggtcgtga

SEQ ID NO: 124259 - DNA, 381 bp, Enterobacter cloacae
atgaaatgtggaatcaaagcactgctaatcacactggctattgccactaccggaatgagcgcaggcgcactggcggcgccccccgcagccaaaacgcagtctgtacagagcaaaactgaccccgctgcacaagcatctgcccaaaccaaagccgctgaacctggcaaaagcacagaggacgacggtacacgcgtcagcatcaatacggcctcggctgaagatctcgcccgcgtgatgaacggcgtagggctcaaaaaagcgcaggctatcgtcagctaccgtgaagagtacggcccgtttaaaacggttgacgacctcaggcaggttccggggatgggcagttcactggttgagcgcaacctctcacacctgacgttgtaa

SEQ ID NO: 124260 - DNA, 1104 bp, Enterobacter cloacae
atgatgaacgacgaaaacttttacaataaagagcgtatcggggaagagtggcttcaaaacctttctcaggatgacgcgcaccgtaccggcatacgctttgcccggcgcgtccggctggggcggattgtgggtctggcggcgatgttttttcctgttgccggcgttctggtcacgcattttctgcccggcggctggtggttattactggtgagctgggtttttatctggccgcatcttgcctggcagttcacctgccgttcatctcaaccttatcaatgtgaaatcttcaatctgaagatcgacgctatttttaccggcatctggattggcctgatgggcgtgaacgctctgccatcggctgcgctggttatgatgatgggcatgaatatgatgggatccggcggctgtcgcctgtttctcgcaggcattgccataaccacgttatccgctgtcgtgacgctgaagctaaccggaaatgttgtggtgctctcttccggatcgctggagtggtggctgacgctgccggtcttgatgatctacccaatactctttgcctgggtgagccatcagacggccattcgcctggcggaaaataagcgaagacttgagctgatgagtacccgcgatggcatgacgggcgtttataaccggcgccactgggaaacgttgctgcggatggagtatgaaaagtgccgacgggatcattgtcaaaccacgatcctgcttatcgatatcgatcacttcaagagcatcaatgatacctggggacatgatgtgggcgatgaagcgatcattgctatcactcgtcaactgcagatgacgctgcgggccggggattatattggccgtttcggtggcgatgagttcgcgatcatcatgtccgggaccccggcagaaagtgcaattgcggcgatgtcccgcgtccacgagcggcttaaaaaactgtcgttaccctgcgccccgaacgaacggcttcgcatcagcgtgggggttgcgccatggggaacacagtttgcccactaccgcgaatggttaaaagcggcagatatcgcgctttataaagccaaaaatgccggacgcggacgtaccgaggtggccgcctga

SEQ ID NO: 124261 - DNA, 684 bp, Enterobacter cloacae
gtgaaaggcaaaacgttgctgatcgttttcattctggtggcagtcgcaacggtgggttaccgctggttgccgtctcactacaacccttttacgccgctctcgcttgacgacccgccaggcccaatcactcagtacaaactgcggcgccttacccccgaggcgtgtaccagcctgttatcgcaggccaatcagaaggcccttattcgcacacagcctgtcgccgacagcgccggagcatgcccccttcacaacgtggtgcgcgtgcgtgacttcggaccagtcagcctgaacagcagctttcttgccagctgcccgctggcgctgagttctgcactgtttgtcagccagcaggcccggccactcaccagaacctggaccggaagcgagctggtgcgcattgagcacctgggcagctacgcctgtcgcaatatttaccaccgccctgatgcaagacgcagcgaacatgccacggcagaggcgctggatatcagcgcgtttcggctggcgaacggtgaacgggtcaccattctgcacggctggagatcgaccaaaacgcagccgtggctgcaggcgctgctgacggcgagctgcggctactacgggaacggcctggggccggagtataacgcggcgcacgccaaccatttccatctgggaatgcgcggctttggactctgccgctaa

SEQ ID NO: 124262 - DNA, 909 bp, Enterobacter cloacae
atgaaatatctgccaaaactcggccatcttcaggcctttcgtcaggtggcgcgcagcggcagtatccgttcggccgcacgggaactgggcgtttcgcagcccggattgagccgtacattgcgtgagcttgagcaaactttaggcacccaacttttattgcgcagcaaagaggggattacccttaccgaggcgggaatggcgttttcccaacgggcggagtgggtgcttgaagagctgcggcgtgcggcggatgaagtggagcagattaaccattttactcacgggcgtctgacggtggggttctcttcgcttattgcgctgaccgtctttcccgatgtggccgaggcgttcaagaaaacgctgccccaggtcttgctgacggtgaaggaggggcagctctcctcgctcctgcctggcgtacgaaacggtgaaatagatatggctatcggctcggtggatccgatggcgccgccggaaggggtgatgatcgaaccgctgtttacctcgccgttttgcatcatcgcacgcaaggggcacccactggcagaagcccgcgatctgatggcgctgcgtcaggctaaatggctactgccggagtcatccatgggctactaccagcagctacaaaatgagctcagccatttttatcgacaggtggatatcaccccgctgcgcaccgattccgtcatcacggggctgaatatggtgcttaacgcggactatctgacggtggtcgcgcgggcaatgtgtcagccgctacagcttgatgacaagctggtggcgttgcccatcacccaactgccgtcggcgcagtattgcgcggtgtggtcgcagaagtcggcgatgaccaccaatgcgcgccagtttttgattcgcctgcgcgaagcatgcagagggtttagctggtag

SEQ ID NO: 124263 - DNA, 1188 bp, Enterobacter cloacae
atgaaaagccagtcacagatgatttttttactttttatcggctatgtcgtggtctacatcgataaaaccgtaatgggttttgccctgctgccgatcgaaaaagagttcgggcttaccaccgcgcagctgggctatatcaccgggatcttctttctcgcctactctctctttcaggtgcctgctggctggctaaacgaccgaatcggctacaaaaccatgctgatcctttctctgtgtgcactggggatcttcgccctctgctttggcgcgctgggtatgagcgtaggcctgctgctggtgtttcgctttctctccggcgtggggcattccggctatccctgctcctgcgcgaaagcggtggtcagcaattttacgctggaaaaacgcaccttcgcccagtcggtactgctctcctccgccgggctggcgatgaccgtcgggccgattgtggccgtctcggcgctggaacacctgggctggcacgcctcctttgtggcattagggatcgttgcctgcgccatcgccctgctgatcgccttgcgcgtgccgtatcagaaacccgcgccacgccaggccgcgcacaggcaacacgaggcgctgtggcgtaaccctacggtgctgctgctgtttttctcggtgttttgcatcaatatcccaagctatggcctgttggcctggctgcctaaattctttgtccagagcatgggcatgccgattgaggtgtccggttatatcgtggcggctggcggcgcggggatctggctttcgtcgttgtgcaccggctggctggtcggaaaatacttccaccaccgcgagccacaggtgattttgatctgcgcactggtgagcgctgctgccattctcggcatcttccacaccgccacggcggtgagtgccagcatcctgctgtttgtgggggagatcttcctgatggccacctttgtgaccgcgtttaccctgccaatgaaacgcctgccggagaacatcatgggctcggccatcgggctgataaacaccggagggacgctggggggcttcgtttcaccggttgttattggctatctcgttggaaaaagccacagttatgaaagcgcatttattttcttgtcactggcaatggtgtgcgcgggcgtggcgatagtgccattgataaaaaaacctgtgccctcactgccggtgactgactga

SEQ ID NO: 124264 - DNA, 1182 bp, Enterobacter cloacae
atgaaaagtagcactgaaaaccttatccgcgacgttcacgacgaggtgatccgctggcgcaggcatattcatgccaacccggatctctcatttcaggaaaagccgaccgcagattttatcgcccgtgaactggctaatctgccggagttgacgattagccgcccgctggagaacagcgtggtggcggtattacagggtgaaaaacccggcccgatgtgggcactgcgtgctgatatcgacgccctgccgctgcaggaagagagcggtgaagcattcagctcaaccaaacccggcgtaatgcacgcctgcggtcacgatgcccacaccgccatgctgatgggcgcggcgaaagtgctttgccacctgcgcagccagctgtgcggcagcatcaagtttatcttccagcctgccgaagaagtgccgccgggcggcgcgcgcgaactggtggagaaaggcgtggttgacgatgtcgagaagatcttcggtctgcacgttttcccgaccagtcctaccggtaacattacgctgaaagaaggggtctatgtcgcctccagcgataattttgatatcacgattttcggccggggcggacatggctcaatgccgcagttctgcatcgacccggtggtaatcggcgctgaagttgtcaccgcgctgcaaaacgtggtggcgcgtaatctcgacccgattaacgccccggtgctgaccatcgcgaccttccaggccggtgacagctataacgtgattccggacagcgcccgcctggccggaacggtgcgtactcataatcagcaggtacgcgagcaggtaccgcagctggtgcagcgtattgtcgagggcgtcgtcagtgcccacggcgcgcgctgtgagatccgctggcagcagggttacgccgttggcaacaaccatgccggcaccaatgccgtcgccaaagcggcgattgcagcgcacttcgaagaaggaacgctgcagcttgccgatcgggccctgttcggaagcgaggatttctcctcctatcaggagaaagtcccgggaacgtttctgttcatcggctgcggcaacgaggaaaaaggcgcggtctggaacgtccacaatccacactttcgcatcgacgaggctgcgctggcggtgggcgtgaaaacgcacgttgcgctggtgagcccgctgtttgaggagatttga

SEQ ID NO: 124265 - DNA, 1785 bp, Enterobacter cloacae
gtgcgaatcgcgacgataacaaactgggcctacggtgccacggtctgcctgaccctcgcttccggcatcatcatgctgatggcgtccaatgctgacacccttgagcgtcaggccgttgaacagcggcagaaatttgatgcgctcacggaagatatcgaaaccgatatctgggcgcagtctgatttagcccgcctgtacgtgattaaaaaagatccgcagatcctcagggaatacaaccagtcagagaacaagctgaagagtaccgaactccggctggaaaaactgcaggatgtcggcgcgtcagacgatgagctgtccctgctgcatgaagggataaaaatcgtcgatgaactacaggacgaacagcaggtcgccctcacccatacggcgcagggagaagatgcgcaggccatcgccctgctctacggtgcgccctatgagcaggagctggaacgcgcccagaatcagatcgatcacttccgccagatactcgacaagcgggtgatcgcttccgttcaggaggcaaccaaaaaatcgaaaacgctgcggacaatctctgaaatgatggttggcctgaccgccctgctgttcctgtttgtgcttggctttatcttaaaacggcgcgtgctgcgcccggtggtacgcctgagcgatgtggtgcatcgcctggcgtcgcaggactatgccgtagaaacacccaatttcaaccagatcgatgagattggcgatatggcgcaggcgattcgtatctttcgtgaaaatggccttgcgcggcagcgtctggaaaaagagcgcgacgccgactgggccatccgcgagctgctggcgcgcatgacccagcggctgcaagggtgtgagaactttgcggacgtgattaacgtagcggagctgttcgcccccaatatcgcgccgggaattgccgggcggctctatatcctcgaccgcgatccgtggcagatgcgctgcgtcgcgcagtggctttcgccgccaggagaggatacgccttttcatcccgatgagtgctgggcggtcagacgtgggcaaagccatcctccggtgaatggcgagccggatatcgcctgctaccatctgccggcgtcgcacacacatacgtcgctctgcgttcctatgattgcccagggcgaagccattgggttgctctccttccagaacatcaccgcggaaaatgccccttcccgcgcctatctggaactgatggctgaagcgctcggtctggcgctggccaaccaacgtctgcgcgatgccctgctggaaaaagccctcttcgatccgctcaccggcttgcgtaaccgtcatcatctggaagataccctgcgcacccaaatggcgcaggcggtgcgcaatgaagagccggtaagctgcctgatgatcgacatcgaccacttcaaaagcatcaatgaccgctttggtcatgaagcgggcgatcaggtcatcaaaagcgtggccaccatcatacaacgcgccgtacacgacagcggactggcattccgctatggtggcgaagagtttctggtgctgctttccggcgtcgatgaagaggcggcgcaggcgtgcgccaaagagatttataacggcgtgcatgaactgtcgctgcgctatgggctttcagagattggcccggtggatgtgtcgattggcgtcgccagctatccgcagcacgctcagagcgataacctgctgcgcgctgccgacgtggccttataccgggcgaaagagctgggccgttcgcgtattgtgagctttgggatgctggaagcgggctga

SEQ ID NO: 124266 - DNA, 510 bp, Enterobacter cloacae
atgaaaaaagagacttataccttttggctcccactcatcgtgggcggtatagcactgctatctggttttgtggtctggtcagttaacgtttatcgcgtgacataccttacgatccgcggggagcagtatctggccggaggggcgttgctgctggcgttggtgccgatggttatttttatcagaaagggacgactgaaaggcaagcgtgttgctggcgcgataaaactatacctcggcttcttcatttgcagcctgccggttgccatgttcgtgatttttacaacggcctggctactggagggagactattcctcatggagcaaaccttaccggtatgaatccagtacccgccacagttgctcgggggcagaagtctacgagccggagttaaaaaaagagatccgcatctgtaacccgaagggtaacgtttattccaactctaccctgtacgtggaaaagcggagtaatgcgctggggattgtggtgctctgggcgatcacgcgcgcctga

SEQ ID NO: 124267 - DNA, 1215 bp, Enterobacter cloacae
atgttcattcgcacccgtagtctgtccgccattgcgctggcggcgctgatcgctttcccgagtctcgccagtgcggcgacgctccagccccttgaacgctggcgcagctatgctggcgtgagctgggatacctctcagaatgggcaaacgccgacgcggttttccggctcggttaacgcgcccattgccggtatccattttgatgcaaagggccgggcctttgtcagtacgccccggctggtttctgccgccgcccccgccacgctgagcattctggatacgactgttcagtccggccctgcccgcctgacggcgtttccgtcacgcgaggggaacgcggtaaacaccgatcccgcgcagaacctgcgcaacgtgcttggcttttatattgatcgtcaaaatggctggctatgggcgctggacatggggtttgtcgcaggcgaaacggagtcgcccgtgggctcgcagaaactggtcgtactggatctcaacacgggccgcacccttaaacgtatcgccctggatggcgtggcggaccgcaaagccagcttcctgaacgatgtggttgtcgatgagaaacgccgcgtcgcctatatctccgacagcggctcgcggagcgcaccggaaaaccgcgtgggccttatcgtcgtagatttcaccaccggcacggcgcgacgcgtgctcgaccgtcaccctgcgctacagattgagccgggcgtcaaggtggtttcacacggtgcggaggtctggccgggtaaacccttattgattggcatcaacggtattgcgctctccccggatgcgggcacgctctactggacggtcacaacgggaacccatgcctgggcagtgcccacggcattgctgaggcaggcaggatcaaccgatgcgcagattgccgccagtatccaggatcttggcgtggtgggcggtaacaccgacggtcttgtaaccaatgcaaagggcaacctctatatcacggatgttacccgcaacggcattgtccggtttgatccgaagcaccacgctatgtcgcttatcgccgccagcgaagacgtttactggccagacacaccggcaatccgtccggacggggatttgatctttacctcgagtcgcctcaatgaccacttcgcgggagccgttaaacccggagaggaacgctatgatttgtggcgtttgcctctcggtgcatcacataatacgggcgaataa

SEQ ID NO: 124268 - DNA, 672 bp, Enterobacter cloacae
atgaaagttcgtcttctagcgattgtatctgcatccttaattcttgcgggctgtgctggctcggtaaaacccgacaccgtgaaagcggcaaatggcagcgcaattgatatttatagcgtatcagcactgccggaactgaatgacaaccgtatcgccgacaacacgctgcgcgaagtgaccccgacgcatgccgcagccggtatggggcttgccgttctcggcgcgttaaccggtaacattaactccggtgactttgataaagagaactataaagggacagcgatcgaaaccctgcaaaacccgacgaacagctggtttgttcctaaagcgaaacaaaatatcagcaagtggctgaacgaaaaaggcaatggccacgtttacaagcagccgctctatattggtaaagcaacctgggcgctgatctataaagacgccaccgcgaccacgcctctctatcagctgaaatacaaagtcctcttctataagcgcccggaaagcggaaatatgttctctgcatttactgtagcggaatgcgcccctacgccagttgaagcgccactgagcgagtggagtgcaaataattaccaaaaagtgaccagccaaactgaaagctacatgaaaagctgcctgcttgagctggataaccagctgccgcgtttgctgaagctgtaa

SEQ ID NO: 124269 - DNA, 744 bp, Enterobacter cloacae
atgaatacagctcttgctgtatcaggttttcacataaaagatgctctgacacgcatacgttttcaggataacgtgcgggcatttgggaaatatcaactggcaaccatcaggaatagcgcgaccgagcaggagtgtcagttgtgtatccagaacattcgcgtggagaataataatctaaagattcaggacagaatgctcaggacaggggagtctgttctcacggcatctgtccggatctatgaagagaatggtaagtacttcggatatgtcatcgattttgtcggtgtggtcatttccggtttgcagattgccggaggtattggcgttattgcttcatccgttccagtcggaaatatgattgggattatagccggtgcaacgctggtactgaatggtgtatcttcggcagcagaaagtgtccagaagttggcgggaaaagcctctccagtcaattttatgcgtgatgggtttgaaggttcggcggaattcctgggatttgatcgcaaagtaggtttacttgcttatcagatggtagatctcagtacgtcctattatggaatgttcaaacttaccctgaagccagatgcctggcgtctgtatcgatatttagccccagacttcatgagacaggtaaacactatgagccgaactgccctggcgattaaaggtatcggggcaacgttgaagggagcaaaaataggacatacgctttatcagttgcagcgtgatgaaaaaattcagtga

SEQ ID NO: 124270 - DNA, 342 bp, Enterobacter cloacae
atgaagaaaggcgagcatgtggccagtgaactgacagaaaaagacctgctgaacaatggtttctcacataagcagttatctcgtctgaaagaagtcttgagcagggatgaaaatgccagcgaaacgctttcgacattagtggatgatctgagcaagcgattttatggcggggttatttgtctgattctaatcctggcacctctgattttcctgcctgtcttctatacgccctctctactgttatattacttacctgttgcagtttttggcgttattgctgtttggtatctgatacctcttggcctttcatggaaagcgcataaaattatgaaaggccgataa

SEQ ID NO: 124271 - DNA, 810 bp, Enterobacter cloacae
atggatattgcgctgcttaacaggggatggaacagaacctggtcagatacgatggtgaatctggaagcccgaaaggtgatcgaaactgcaaatcgacagtcagcttactatttacaagatggtctaacacgtatcaagtttgttgaagaaataaaacaggtcgtagaaaaagagttcgcgacagcacggcgggcgaaaaccgatgaagaatgcattgagtgcctcaaaaatctgcgtgctgaaaaagagaatcttcttgagcaagagcgcttgttaaggacgaggtctgctcagctttatgcgaaggtcgagtttgtcagggaaaataacaagatagtcggatatgttatttcagctgtaaatgtggtgctttcagggatggttttctttggtggttttatgatgttatccactatggggccaattggtatgctggctggggcagtcctgattgccgatggtatgaacggattaacgaaagaagtgctcaacgttgatcagccagcaggacataaaccctcgcaaggtatcattgctgactccgcgatgcataccgcccaatttatgggatttaatcctaacacgggcctggctctctataatggtgttactcttggagccagtgtgtacagcattttaggactcgctcgaaaaactggagcctggagattattccgctggcttccacacgattactatcgcaaagtcagcacaatgagcactcctacgctaacaatgaagattgtcggttatggtgttaaagcaaaagtgattttcgacctggtgacaacagaaaatggaaccagttaa

SEQ ID NO: 124272 - DNA, 1473 bp, Enterobacter cloacae
atgattttagatatagattatgaatctcaaacaataccgttacgcttaactgtcaatagtgctgaaaatatatttgatgtagattcactaacgttgattattggaaaaaatggctcagggaaaactgaattattacgtagtattgtgagagaactaactaactctgatttcaatgagtttggtaatgaatgtaagttaagatttgcatctggcaatgagcaagaaaaacttgattggggatgtgtatattataccccagttcctttccaacaaaaatttagttacagagatagatttgaaaatgcttccttaatagatagcagtaaaaataaacttgagaatctgcataaacataataatatttttaaagaacttggcattgattataacctcactgcaatatcacgagttagcacaaaaccaattataaataacataatcacaactgtaattgaatacatctcatcaaagaagaacataaatctcagttttttctataaatttaaatccttcgagaaattattaaatcttcggaaaaacagagcggagctattaaatgatgttggaaggtatatagattcactcaataaatgtaaatcagatcttcaggatgagataataaattggttaaattccaatgctaccacatgtaaaatactttcatttttcatatccattaatagcatggaaaaaagcaccaaccaaaccaataatagacgagcgctgtgcttattcattctaacttttggcgtaggtgaagagacaaaaaaaataagaaaaccatccaattacaaaaaatttatcgtagactacaacaacattcttaaatttctaaaaaaaaatgatggcgatttttcatatgattggggaaacaattttatcatttatctaaaaaatcactcaataattaagcaaatagaaaggcatgaaataaaacgccactttaaaataaattatgccagcatgagttctggtgaactcgcagtaatgaaccagttcacctcaataacaactaaattgaacgctttatcaaaaaagaatataaagaaaattctcgtcctcattgatgagggagatgcatttttgcatttagaatggcaaagaatgtatatatttcatataaataaacttttaagcgaaattaaaaaagagaataacattgaaataatccaagtcattatgactagccattccccattactagcaacagatgtcccaaggcaatttgtattttctctggataaagagacatctccaagttttacatttgcgtcccctatgcatatgcttttcagtgaatcttttggcacttctaccatcggtgaattcgcaacaacaaaaataaatgaaatatataataatttcgcaagcagaaatgtttcgcaaaaggacattaaaatcttggaatatatagatagtgatatactaagaagagaatttaaaagacgatttaacattggaggtgaaaaatga

SEQ ID NO: 124273 - DNA, 909 bp, Enterobacter cloacae
atgatcatttctgtaccaaggaactgggaaagcagtgaagcagaacacagagaatacctcagaactatacttagagagtattataatcaggttgatgacatggtcggcccaccaagttatacatattattttttaaagcgcgttcatagactcattctttcacgttcattaactcattaccaaaaaagcatctctcttctagaaaatgcaataaaacaaaaaaataataaagagttcaaagattgtatttttagagaaataaaaaaagtggtcgattatgagtcattttgcgataaatccaaaaaatacaatgcatacacattgtgttcaaaatcaaaattacgaacatgcccgtactgcaatcactcatattctataacaacatatgagacaggccgtggatttcgaccatcactagatcatttttacgataaagcccgttatccacatttaggtttatctctttataatttagttccttcttgttcaagttgtaattcaagtttaaaaaatactaaagatttcttcaaagatgatcatctccacccttttttcgatgatgaagaaattcagtttagaattaaatctgggaacataataaacccaatggatattatcagaactcccattacatctctaaagatagaaactttatacaaaagtataaaggcaaaaaattccgactctgtatttttaataaatgaacgctatcaatacttcatttatgaggcatataatttcgccttggcaaaattggattttgatgaacaaataaaaaacaagaatctattcatcacaagagaaatgaaagagaaaacatctttacgtttcgacattgataattataaacatgagatgctaggaaagttgtataaggatatttatatacagtttacgcttaagctttga

SEQ ID NO: 124274 - DNA, 1875 bp, Enterobacter cloacae
atggttaactatgattcgatgcgagcatatatggccacccatattatcaatttattccccagcttggtcaggggggaactattatctgattctacgttatcggaagagatcggtcttgcgactgatgccaccgttagttttggtgacaaagatatagccttttccagaagtgctctctttaaagctatccgcagtgtttttgaaaataccgaggaagaattttatttggaggatgttaatggcaactcttggtctttacgtcatcatccgggggaacgtcctacattttctttaagcaagggagacgagcgattacttaataacagtttttggccgctttgcaatgatgtggacaaaagatttagcctatttgagaaagaagcgaaagatagattgctttcgaaagacgagttggagcgttggggggcagtgctttcggtactaacaatcagtgatgatgacgtatcggatttgttacttgatttggaacagtcaccaagacacattgaggcattattgaggcaggagtttcaaggggcgctgaataaaatttctaccctagttcccgataatattcgctattacgaaaggctagtggggaaatattgcgggagtaaaaatattgatgaatattgtaaggtcgagctaaaagagtattttgacagcagaataaaaagtggagtaattgataatgattttttgatatgtattcacaagtctatatcagcagttgtttctaatagtcttgttgacgaggtttcgtatcagtcaacagcaaaccgggcaatcgaaacctgccatccaatacttttaatatcatgccttgaagtaggcataatgaaattcaaggattcatcagccgcgattattaaaaagctgtttgaaggcatatcttcggcaaaaacgttagataacctgcgtctattttgctcaatggcagtttttgtagatggtgaactggcgcgattacagatattccaaggagtaccaccattctacagacgtcttgcttcattcgcccagtcagccttaatcgttaaagtagggcttgaagagggcgttgcttttgacaaagtggaacagtgggcttttcaacaaagggggctttactttttctgccagagcattgtcgatctgatagaagagccaagatggttaccaatgtacttaaccgctgagcaattcattaatgaactgtacgggcgggcaaataacatatgtcaagaggccaatacgagtcaagttgttgagtacttaaaaaaggagcttatgcttggttcacgattgaatttgcattcgttcttacctgggccgttggaaggtaactctgcaccagcagttgtgccggatgcaatctcgaatttgcttgctaaacatattagcggtgaggcttcatttgaatcctataaggttttgatgaattcagcacccttctggaaaattggtgatgaatatttggaaagagcagtttcactactcgaaagtgcacagcacaagttggctgcggttaacgacaaggattctgtctaccaggtgttaaacggactggctcaggttgcatgtatgaccagaagtaaaaagcttgctgcatcggtaaccatcttaagccgtctctatcgggactatattgatgtggattctgagcccgaaaactatctggcaataggtttcgtggcgggggcagcctttgaggataaaaatggctgggcagaatatataggacaatggtgcaccgaattggcgtatctgccaatcagcgaagactctgttgagagaatggaacggatgcttgaaaggctttgcattctggagccctatttatattacacctgttcaaaagcactcgatatctttaggatgctaagtagaaaataa

SEQ ID NO: 124275 - DNA, 4101 bp, Enterobacter cloacae
atgaaaattgattgggatgttgtactgaaaaacataaagtttttagttgtgctgtttagaccttcattagcgaaagcactaagtctaccattgttgttggctggtgtcggtatactaaatactcctttatggctggatattttaaattggtttttgagccatcaggaaatttttccagaatatagtgggccaatatcaactccaatgtttttaaccgggtgggttttaattgggttaagcctatcgatttatttgatagaagtatggcttcaaattaaatcaaagcgccaagaaagtgaaaagaagctactggatatcgttaaagatcatccaaaacaaacagcagatatgatagttgataaaatgaggggggccggttttggagcccagcatcttcaagatgaaaggatagaagagcttaccagcgaaattacctttctgcgattttttggttcatttcctaaggaagaaaaagcgactgttttagcagaaagcattattgatggagagttgtccggtggtaccccccaagtaaaggctaaggcgttagcgatagttgcaagatatttgtgctacggagaaaaagccgatctagcgaaaaaatggttatcacactctaaaaaattgtgtcaaacagaggaggcggtcattgcacaggcctttattgatgctacagaatctaacaaaacagatacggcatctggtttgcttaaagttggtaatccttcaaattatactgctttttttatgattaaaaaaacagtggacggtaacaaagcagctttaagctggctcgaaagtacaggattagacattcacgatgttgataatgatggaaaagtcgttttgctttctgttttgttaacagagcatcaatgggaaaaggctttcgatgtagtgcaaaagatagatgatgaatccttatctatttcaccagcattagcgcagcttgctgcgtttacgtttttggtaaatgcaattaaggcagttgagctccgtgagagcgtattggcttatatccccttagcagcagatcgctttccgctggcagatgattctgaatctatagtacttagaaatcgagctgcagcgctatttaaagtttgttcggttcgtgcacgatatcttggcgctgaagatgttgcggatgtgtcggatcagtatgtactgtggatacaacttagaaatagtgaaactcacgaacaggcaatggctgaacttcagagctacttcgtaaggtataatcaaaaaacacttgagtatttgccattggcatttgcttttggagttgatattgattttgagtctattgagcaggaagtaaatagacagacagcactaagtccagcgaataacgcaattctcggtttggctcgttttatattggctcagacgcaaaaaccaatttcggcagcagtggattatatcagccgccatagaaatcaaatggaaaggagtgttaattccattgctatcagtatgttagaaatagaagcattagcgaagtcagggttagttgatgatgcacaacaacttttagacaaggctggagattcgggggcgtctgatgccgaagttaggaatttgcaaaatattatcgattcagccaagggtgcagatcctgtagcattagcaataagccaatatcaacaaagtgaagctacaagtgatcttgctcatttggttaatttgttagaaaggaacaatcgaggagaccgatactacttatattgccgggagctttttgatcgcacttgccaggaatctgatgctatcagagtctgtaatgccgcctcttcgcttgggaaattttctgagcttcatcgatttctgtcagataggatggatctcgtcaagataagcgagggattgcaggctcactgggcttggtctttatttagaaaaggcgacctaagcggcgctcaacaacagattgtgctgttgaggcaatctaaatcacaactgtctgatcttaaagcacttgaaatcaatttggccatattcggtggtaactgggaatctcttagcgtttttgtagaggatagttggaatagccgtgaggaattgaaggttgatgatcttttgcacgctgcccagctggcgaaggcggttttacccggtcgggcaaggcaaatagtagagtactgtactggcaaacacactgaagaccctaaggtgttagcggcatcatacattacggcgaccatgatgggctgggaggacaatcaagaaacatccgcatggctcaataaggcgatggctctttccaatgataatggcccattgcatagggcttcatttgacgacttaaaagagatgatgtccgaggcccgggagcaaaatgaaagagtttataaggcctattatgatggtgattcgcccatttttacagtggcggagatattaaacaggactatgtctgacttttatctagtccaacctcaggaaaacaaaagcgcgaaagatatacgtcggaaaaatttggtcccaatattttatggggtaaggcctgtgcaggttattgttggtaagacgattgccatcgatgcctccagtgccttggttatggaaaatataggggtgctacattatttattagattgcttcgagagcgttgttatccctcactcgttcatgcgctggttgtttgaagaaaagcaaaaagttgcttttcaccaaccgagccagatcgaaaaggcaaagtattttgagcgaatggtatctaacggcagaatttccgtttttcatcctaaaacgatcaataatccggggttggccctggatgttggtgatgaacttgcttatatgcttgaggaggcacacgctagccctaacaatgagttgcaggcactggtggtgtgctccaaccctgtgtataaggtaggtggctctttcagggaggtggaagcagatctttcttcatttcaccacagtctgatttcatgtacgcaattaattaaaaaactcgaaagtctggctgtaataacggaagctcagtgtgttaaagccttaaactacctgcgccaacacgagaaagagtggcctacagatattgaagtagcaaatggtgcaagattgtatctagattcactgtcaattacctatttgatgacacttgaaatgctcgacaagctcagtgatgccggattcgacttgtatgtatttaagggggagcgtgataggtatagatcgctggtaaactacgattcaatcatcgaacaggcagattcgaaaatagaaaacataaggaaattattatctaatgggctcacatccgggaaagtactccttgctgaaatgccgctaaatcgagagcaattaaccgcgtctaagaataattatgctaggccaacagaggaactttttgaggcgcttaaaatatgtgatacagctttgatcgatgatcgatttatgaacaggcatcaaaatattacatttgatggaagaaccgcacctatttatacatcattagattttattgagacgctacaccataaagggcttatttctcaagaacagaagcttgatgccagaacatcacttcgggaatttgggtttgagtttgtaggcatttctgctgaagaacttgaatatcatctaaatcactcggtcgtttcaaatggtgagttaaaaccaactaaacagctaaggctgataagagaaaatctgcttttgatcaggattagtggtctggttcagctcccgcgagatgcgcagtggctacacgaaacgatgaaactgattgcagaaaccataatggctcagtggtcggctgatatcccacttgaactgagccgtgctagatcctgctggctttatgagctgatgggctatcgggagtgggctcaggcccaccaaattaggggcgaaggagggatggcctatatgggtgagattttaagggtgaattccatgttgatcgcaccggagtctttatctaatgagcaaaaggaaggctacaaagcatggttagatgagtttgttctggggccgctgagggatatcgatctttggagttttaaaaaagtgattcactctatgaagcaacaggttaaaaacatttctaagcaatcaatattggaggaagagctgaatggttaa

SEQ ID NO: 124276 - DNA, 477 bp, Enterobacter cloacae
atggttaagcgcttcagacgcatgtctgacagtgacatcaaaacaatcgttgctgatttgaatcgatgggcgctgggcgagtttggatcaaaactcaaatgggcagtgcttgaagaacgctttggctttagtcgccagtcgctccaggccaaatctgagatcaaagctgcctatggcaatgccaaacgagtactgtcgggcggtttgttgaaaaccaaggagcaggcgaccaaagaggctgaattgcttcagatagagatggatcgccttaaggcagaattagaggcctataagcgaaaagaaagctatggccaccgccgctggcagcaaattgcttttcacgtgcggcagaagggtattcagatggagagcgtggataaagccccgccagaagaggcttgtctgccttctaatactgaaactgcgaaaattctctggccgtttgacaaagaaattccaccttcagggagagtttag

SEQ ID NO: 124277 - DNA, 348 bp, Enterobacter cloacae
atgaaaaccactattataaacggctcggaagtgtctagattacccgtggcgattcacttctctcaaataccctgtgagcgtcatttgcaatgttcggcggactgcaaagacaacatttgggtaaaagacgataagggccgactagacgagcagaagcgccagtatgctcttaccgcgctggcacgaaaaaatgatgaaatgcagatgagcggtagcaagccgaaaaagagtgctgactggcttgctcacaacgataaaaaactcaaaacattgtccactcaactggccaacaacggggtggagcactttgatcacgaacaatatttaaacgaggtagtatatggttaa

SEQ ID NO: 124278 - DNA, 231 bp, Enterobacter cloacae
atgagctgtcgcggtaactgccacgataatgcggttgcagaaatcttttaccaattgctgaagcgtgaacggataaagaaaaagatctacggaacgcgggaagaagctcgcagcgatatttttgattacatcgaaatgttttataacagtaagcgtcgacatggttctagcgatcagatgtcactgacagactatgaaaaccactattataaacggctcggaagtgtctag

SEQ ID NO: 124279 - DNA, 279 bp, Enterobacter cloacae
atgagcggtaagtgttatcccgaagagtttaaaattgaagcagtcaaacaggttgttgatcgtggttattgtgtttccaatgttgcaacatgtcttgatatcatcacccacagcctttatggctggataaagaagtacggtccggattcttccaataataaagaacagtcagatgctcaggccgagatccgccgtctccagaaagagctgaagcgggttaacgacgaaggggacatattaaaaaaagccgcggcgtacttcgcaaagctgtccgactga

SEQ ID NO: 124280 - DNA, 864 bp, Enterobacter cloacae
atgagaaaaatactcgcgctctctctgctgctcgtgacgggaacgagcttcgctggcccacagatcgttgcccaccggggcggaacagccgacgcaccagaaaacacagtacaagcgatcaaactggccttagagaatcaggctcaggcagtctggataaccgtgcagctcagtaaagatggcgttccggtcctgtatcgtccttctgatttaaaagcgctgacgaacaaaacaggcaaaatctcggactacacgcttgtggagttatcggcagttgacgctggctggagctggggcggtgaaacccatccctggcgtggcaaaggggtgacgatccccaccctgaaaagcgtactggaaacctggccacaaacccggttttatattgatatcaaatcacctgatgccgatccggccacgatgggaaaagcgcttcttgcggtgcttaatgagacccagagtctggggcgggtgagggtttattctactgaggaccgttatcttgcctcgcttccggcagcaatcccacgctttgttacccgaagtgaaacgcgctccaggctggtaacggtatcgctgagccatcagtgcctgccaccagagcagacgatgcaggagtactggtacgcgctagagctgaacagaaccgttgacgtggttgagaaatttacccttggtgaaggggtgtcccgctcaaccctcacctgggataaagaatccatggactgtttccgctcgcagggcaacagtcacgttatcttgctgggcgtgaacaccgccgaagattataaaaaggcagaggcgctgaaggcggatgcggtgatggtcgactcgcccgccgccgcaaaagcgtgggctaaataa

SEQ ID NO: 124281 - DNA, 378 bp, Enterobacter cloacae
atgaaaatgacgaaactggcaactctcttcctgacggcaaccctcaccctggcaagcggcagcgttcttgcggctgaaacgagctcatcgggtaacggcgatgctaacgcggctgcgtcagcaggccaggtggcccctgatgccaaacagaatgtcgccccgaacaatgtcgataacagccaaattaataacgggaacacgaataccggcggcacgatgctgcaccctgatggtaccgactccggcaccatgaatcatgacaatatgagcaaggatgaggttcacaaaaacacgatgtgtaaagacggccgttgcccggacgcgaatgacaaagtgggcgatgatgccaataccaaaacggatggtacaacccagtaa

SEQ ID NO: 124282 - DNA, 1221 bp, Enterobacter cloacae
atgctgcaacttcatcctgacgatgtgatatggcgaaatgtgcgactggcgacaatggttcctggtgaagaatcttatggcctgcaagcgcatcatgcccttgtggtgcgcggtcaaacccttctggccgtcattcctgaagcagagctcccttccgggcatgataagagcgtcgatctcggtggacgcctggtcacgccgggtcttatcgactgccatacccacctggtgtttggcggcaatcgcgcggcggagtgggagcagcgtctcaacggtgtctcctatcagaccatcagcgcacaggggggcggaattaacgccaccgtctcggcaacccgcgacagttcgccggaaaatttgcttacactggcgcagcagcggctggagcggttaatgaatgaaggggtgaccaccctggaaatcaaatccggctacggtcttaacgccgcggctgaagaaaaaatgctgcaggtcgcacgccagctcagcctgagtaatccggttgagatcagcccaaccctgctggcggcacatgcggttccggcggaataccgccacgatccagacgcgtacctcacactggtgtgcgagcagatcatgcccgaactgtggcaaaaagggctgttcgaagcggtggatgttttttgtgaaaacgtcggcttcacgccagcacaaaccgagcggcttttcctggccgcccgcgcacggggtattccggtgaaagggcacgtggagcaactttctaacctgggcggtgcggcgctggtcagccgatttaaagggttatctgccgatcatatcgaatacctggatgagaagggtgttcaggccatggcgcaaagcggcacggttgcggtactgctgcccggcgcgttctattttcttcaggagcgtcagcgtccaccggttgaacagctccgggcgcagggcgtaccgatggcggtcgccacggattacaaccccggcaccagcccgttcgcgagcattcatctggccatgaacatggcctgcgtacagtttggcctgacgcctgaagaggcctgggctggcgtcacgcggcacgccgcgcaggcgctggggcgtggaacaacgcacgggcagttaaaggccggttttatggctgattttatcgtctgggatgcagaccatccggtagaaatggtttacgagccgggacgcaatccgctgtatcaacgcattttccggggggaggcagtatga

SEQ ID NO: 124283 - DNA, 936 bp, Enterobacter cloacae
atgagttggcagcccgttgcagagaccgtctggcaggggcgcgacgacagcgccgaggccagcaacgcaaaacgtatttttcagaccatacgccagccgtctcaatttaccccggtttcatccgcgattgcgctgataggctttgcctgtgatgaaggagtaaggcgtaatcagggcaggcagggtgcggcgcaggctcccgacgtgctgcgtaaggcgctggcgaacatggcaacgcattccggccacgaacggctggtggacatggggtcggtttacgttgaggatgaccaactggaagagggccaacaggcactgagcgatgccgtggtcacctgtcagcaggctggcatgcgtacgctggtgttgggcggcggacacgagaccgcctgggcccacggccgtggtattcttgaggcgttcccgaatgagcgcgtggcggtcatcaacctggatgcgcatcttgatttgcgcaaggccgaacgggccacctccggcaccccgtttcgtcagctggcgaactactgtgctgaccacgcgcgggaatttcagtacgcctgttttggcgtcagccgcgcggcgaacacccaggcgctgtttgacgaggctgaacggcttaacgtcacgctggtggacgatctgcatttccaccgggatgcgctatcagccctggaacaggtgctcgcgcaggccgatcgtgtttacctcaccattgatctggacgttctgcccgcagccgagatgcccgccgtgtcagcccccgcggcgttaggcgtgcctgcgcgggatctcctgcccgcgatcgagcgcatttgccgtagcggaaaactgcaggccgccgatctggtagaatttaaccctcactacgatcgggacggacagggggcgaagcttgccgcccgtctggcctggcaaattgctcactggtgggcataa

SEQ ID NO: 124284 - DNA, 1158 bp, Enterobacter cloacae
atgacctggcaggctcgtattcaatccgcgctggaagagcgccgggcgcgggacgcttttcgcgttcgcagggtagtggaaaacggtgcaggccgttttctgacccacgcccgacggcagtactgtaatttttccagcaatgattatctcggcctgagccagcatccggcgattgtccgcgcctggcagcagggggcggaacactacggcgtgggcagcggggggtcggggcacgtcagcggctattcgacagcgcatcaggcgctggaagagacgcttgccgactggctgggctatccgcgcgcgctgctgttcatctccggctttgccgccaatcaggcggtgattgccgcgctgatgggcaaggacgatcgtatcgccgcggaccgcttaagccacgcctctttgctggaggcggcgagtctcagcccggcacagctgcggcgctttgcccacaacgatgcgctttcgctcgccacgctgctggataaaccctgtgccggacaacagctggtggtgacggaaggggtgtttagcatggatggcgacagcgcgccgcttcttgcgctgtctaacgttgcgaaacagcaaaacgcctggctgctggtggatgatgcccacggtattggcgtgatgggtgaggacggtcgcggtagcgccagtcagcagggcgtgaagccggaactgctgatcgtcacctttggcaaaggcgttggcgtgagcggggccgccgtgctgtgcagcgagtccgtcgccgattatctgctgcagttcgcccgacatctgatttacagcaccagtatgccgcctgcgcaggcggtggcgctctctgcctcgctggaggtgatccgcggtgaagagggggctgaacggcgcgcgcgtctggcagaacatattcagcgtttccgtcagggtctggatcggcttcctttccaaagcaccgattcgcagagcgccatccagcccgttatcgtgggggaaaacaaccgtgcgctcgcgctggcacagacgctgcgcgaacggggaatgtgggtcacggccatccgtccgcccaccgtgccgccgggtacggcgcgtctgcgtttgacgctgacggcggcgcacaaagcggaagatatcgatgcgctgctggaggctctccatgtcgccagtcaataa

SEQ ID NO: 124285 - DNA, 756 bp, Enterobacter cloacae
atgtcgccagtcaataaacaggccattgcggcggcgtttggccgggctgcacgcagttattcgcagcatgatgagcttcagcgtcagagcgctcaggggctgcttgagctactcggtgcgcgtcgtttcccgtacgtactggatgccggatgcggccccggcggcaacagccgctactggcgcgacgccggaagccacgtcaccgcactcgatctctctgagcagatgctggacgaggcgcgacagcaacaggcggctgaccgctatctgactggcgatattgagtcgcttccgctgccggatgcgcagttcgatctggtgtggagtcacctggcggtacagtggtgcagtagcctttcgcaggcgttaaacgagctgtatcgcgtggcgcgtccgggcggaaaggtggcctttaccaccctgctggaaagctcgctgcccgagctgaacctggcgtggaaagcggtagacgaacagccgcacgccaaccgctttttagcgtatgaacaggtgacggacgcgctgacgggctggcgctttcgcagccaggtgcagaccatcacgctgaactttagcgatgcgttcagcgccatgcgctcgctgaagggcattggcgctacgcatctgcatgacgggcgcgagagaaaaccgctcacgcgcgggcagttgcagcgtctggagctggcctggccgcagcggcggggcactttcccgctctcttatcaactctttcatgggattatcgaacgtgactga

SEQ ID NO: 124286 - DNA, 723 bp, Enterobacter cloacae
atgttgagtctgcgtgcagtcaatcagttttacggaaaccaacatacgctatggaatgtcgatttggatttaccgcagggcttatgcacaggggtgattggcctgcccggcatgggaaaaaccaccctcatcaactgcatcaccggcgcgttaccggtgcagagcggaaccatcgtctggcacgaagccggtgccccgccctgtgatttactgcgtcaggcaccggatcaacgcgcgctgccggggattggctacgtgccacaggaccgacggattttttcgcaactgaccattgaggaaaacttgcacatcgccatgcgggcgacaggggcaacggacacgcgtgcaaaaagcgatgtctatgacctgttcccgcagctgtgggcgctgcgacaaattcgggcgaacgggctctccccggacgatcagtatcagctggcgctggctaacgcgctggtcaaccgaccgcgggtattgattctggatgagccgctgcagggcgcagggtacagctttgctcagaagctgggccatctgctggcgaggcttaatcgtgagctggggatgacggtgttattagccgagcagcagctgtcgtttatccgtcgggtagcggatcgtttctgtatgctgtatcgcgggcgtaacgtggcccagggccacgttaccgagctgggtgacgagcttattgcccactggatgtcgcgggaagcaaggcactga

SEQ ID NO: 124287 - DNA, 990 bp, Enterobacter cloacae
atggcttcacaacttactgatgctttcgcgcgtaagttttactacttacgtctgtcgattaccgatgtgtgcaacttccgttgcacctactgtctgcccgacggctacaaaccgggcagcgtcaccaataacggctttctctccgtggatgaagttcgccgcgttacgcgcgcgttctcggcactcggcacggaaaaagtgcgtctgaccggcggagaaccttcgctgcgccgtgacttccccgacattattgccgccgtgcgtgaaaacgaacgcatccgccagattgcggtgaccaccaatggctaccgcatggcgcgcgatgtcgcaacctggcgtgatgcgggcttaacggccattaacgtcagcgtggacagcctggatgcccgtcagtttcatgccattaccggccaggataaatttcagcaggtgatggacggtattgatgccgcgtttaccgccgggttcgataaagtcaaagtcaacaccgtactgatgcgtgatgtaaaccatcatcagctggacaccttcctggcgtggatcaaatcccgccccattcaactgcggtttattgaactcatggagacgggcgagggcagcgagctgttccgccgccaccacatctccggcatggtgttgcgcgatgagctgcttaaacgcggctggatccaccagatccgccagcgcagcgacggcccggcgcaggtcttttgtcacccggattacgaaggggagattgggcttatcatgccttacgagaaagatttctgcgccagctgtaaccgcctgcgcgtctcctcggtgggcaaactgcatctgtgtctgttcggggatggcggcgttaaccttcgcgatctgctggaagacgatgcgcaacaggccgcgctggaagcgcgtatttctgaggcgctgacgcataaaaaacagacccacttcctgcatcagggcaacaccggcattactcagaacctgtcatacattggcgggtaa

SEQ ID NO: 124288 - DNA, 486 bp, Enterobacter cloacae
atgccgttggctgaacggattacaaatgctgctgtattcgaagatgtgtatcgcttcctgatgaatggttcggggcggctggatctgcgccgcgctgacgtggcagctgtccttgtcttcttatggaattatcaataccgccgcagtgcggtgacaggtaagctgctgcgccttgcatcagccgtgctggatcattgccatagcaccgggcgcgtgcgtactgtggggcatcgttctgctaatactgctgagggaggccgcttcgttgggccaacatgcggtgttagcgttacgaatctaagggctatggttgctcgggtctgcggtaaaggtacagcagtaaatatacctaagcatctgaaaggaatgagggaaaatgtaaaatccttctttttgccggaaaaaagaaagcaccgaagatatgatcgttcggtgctttatgttccgcctaaatatccgttcagctttaagtcacgtgaggcttaa

SEQ ID NO: 124289 - DNA, 1122 bp, Enterobacter cloacae
atggctattggtcactacttattcaggggtgataaaacggtttgcggtggtcggattattgaaggatgtatcgatcatcagtttttctctagagacatggcttgtgaagggcatcaagtgacatgtgggaaacatgcaggcagattccgcatagtgggagggcttgaaaacgatgaaatacatggtaaaaggattgccggaacactgcacagccgtagctcttgcccctgcaaatcacgttttatcccttctatcttcgacacttacgaattttctacagagccagcgaaagctaacaccgcccaatctcacatcgttgagtttcccgttctccctggcccgattgcagatcctaaaattgatagctttgctgacacctgcgagccagaagataacccgttattgaatggtgtttacatctggactgaaaccactgacgcaggacacgcctttgtatccgtacatcagaataactcgatctacgtatacacctatgggcgatttggtcgaagaggtccagctaactttacaggcgatggaatactcaacttctttaccggagaggatgctcgtagctactaccgtgaagaactttataaagttaatgctcgggtattcaagattgatgatgcatccgaagctgagacacgctcattgtttgaaaacctttggaactcaggagcaaagccaatccctacagagaaaatgggtgaaagaaccaaactcagggggagagtaattgacgtctatgatctgactggtagcaactgtacaacgcatactgttcaggtaattcgtaaatcaggctcaaacgttttcgaaacaagctacacatcgactacaacgcaattaccgattgaaagcgaggaagactttgcagtgcctttgtctctacaaaattatcttattcgcaaaagcagtagcttaagttcgatgcaagtaactgaagttaccaacgaattcaaagaacagtatccaaacatagacaattacactgctggtgaagaaaacgctatggagaaaagccttgcaatgggagcctcaaaattaggttcagcttctggttattctggcggtacggttggtggcgtcttgggggggtcatatgaccttgacgagtag

SEQ ID NO: 124290 - DNA, 237 bp, Enterobacter cloacae
atgcctaaaatcagggataagggggcaaggctagatcactccagcctttggcggttatctcactttcttgaaaatgagcagaatcaacacggtagtaacaacgtaaccgaagagcgaaacatgaatcagtctgtcgtaatactgatcaaattcagcaaccacagcattacaggcttcaatcgtgatcgtcttttcgttgagtatgtctgtgtattttctcgttatcccataatctaa

SEQ ID NO: 124291 - DNA, 501 bp, Enterobacter cloacae
atgaaaacgttatcccttttgctcgctctgacgagcctctctgcgggcgcgaccgacgtcacgctcaatatcgaagggaatatttacgacacaacctgccgggtagacagcgccagccagaacatggtggtggatctgggacaggccgtcgccagtgattttaaggatatcggcgacaccggcccgtggaaaaacttcgatttaaagctcaccaattgtccgcccacgctgacggttgccaccatcagcgttgacggcccccgcgatacggaacacccctttaaattcgccaatagtggcaccgccaaaggggtggcattagagctggccgaccgtctggattacatcgtgcttgcccccgaagcccgcttcagcgtggtgattgacgccggtacccacaccgccgattttcctatggcggcacgctattacgctaccgccctgcctgtgacggcgggtaccttcaacagcgttgttcaggccacctttacttaccagtag

SEQ ID NO: 124292 - DNA, 990 bp, Enterobacter cloacae
atgaacatgtgtagatatgtcttcgcactgctggttttactcacgagcgcgtgtctggtgccgcatgcccaggcggcaacctcctgtgacagcgccgatctgccttatacccttgatgcgggcaccctttctgttcccacaacactcgatattggcggcgtcatcccgggttcagcaaagacccataccgttaacggcagctgtaccggcacgatgacgaatcacaccctaatttcctgctattacggaacgggaacggaagtgcctggcatgccgggcgtgtataccaccaatgttgacggcatcggcattgagcttctgaacagcagcgggcagatcgttcgcggcaaagggtactcatgcgatacaaccgccacgcccattgggacggtcagcagcgacagcggacaaacattttctttcagctacacccagcggttaatcaaaacggcatcacatatcggcagcggtaccctttcgctcgcgcaggatccctatggattcggggtttttaactctgtggggatttctggtgcacgtaataccagccactattccgccacggtcagcgaaagaacggcgacctgttctattgatccgctaaatctgacggtgaccctcggcaatttcccggtgtcgcaatttacccacgtgggcagctatacggcctggaagtatttcaacatcaccgccacctgtaccgaagaggtcaatcttacggcctcggtaaccagtgcaaatggcatcaacagccagtatgcagatgtcctgaacctgacgcccggcagcgacagcgccacgggcgtgggggtgagaatgctgcttgacggtgtcgatcttaaatacgactacccaatcccggtcggtggaagagccgagccaggcgttccggatgtgatccccttcgcggtgcagtattaccagacggacgccagcgtcacggcggggaaagccaatacgattgccaccatcgatcttgaataccagtaa

SEQ ID NO: 124293 - DNA, 2544 bp, Enterobacter cloacae
atgagctgggactactccaccgaaccacccaaacagcacggacgctcaatgcttattgcattgggctgcacgctgttgggtgtttgcgtgcaaaaagtgctggccgatgattatttcaacccggcgctactggatattgataacccaggacagggtaaaaccgacctcagtatttatgagattggtcccggtcaggctcccggtaaatatcacgttgacgtttacgtcaacaataataaagtggcaagcaaagagattgagttcacgctgaagaaagacgccagcggtaaatcaaccctgcagccgtgtcttagcgccgcccagctaaaaagcttcggtattaatatcgaaaaattcgggcaggacgataaggcgcagtgtattgacctgagcgtgatcccctccgccagcgcaacgtttcatgttaatccgcagcagttgctgttaagcattccccagaccgcgattacccaggtaccgcgtgattacgtcgacccgcaggagtatgacgagggaattaacgccctgctgctcaattacagcttcaccgccgggaacaaccgcggcaaaggtgaaaacggtagcgatcagcgcagcgagtttcttaacctgcgtccgggtcttaacctcggggcgtggcgttttcgtaactactccacctggagcaaaaccagcggtgacggtgacgcagagagccagttttcttcggtctatacctacgcccagcgcgatattatcgcccttggcgggaacgtcacattcggccaaagctcttccccttccgatgtgtttgacagcatctcttacaccggggcgcagatcgcctcggatgacgacatgctcccggacagcatgaagggctttgcgccggtgatccgcggtacggcgcacagtaacgcccaggttatcgttcgccagaatggttacgtcatttaccagaactatgtcgctcccggcgcgttcgagattaacgatctctaccccaccggcggaagcggcgatttgaacgtcaccgtgaaagagacggacggcagcgaacagcactttgtggtgccttatgcgtcagtgccggtgttgcagcgtgaaggccgctttaaatacagcctcaccgcggggcgctatcgcagctatgacaacgacgtcgaaaaaaccccgtttatgcagggtacggcaatctacggattgccttacggctttacagtctacggcggcgtgcaggcaagccagtattacgatgcgctggcgctgggggtcggcaagaatatcggcgatctcggggccttttcggtggatgtcaccgacgccaaatcagagatgcaggatcaggatcccacccgcgggcgctcctggcgcatccgctacagcaaagatttcgccaccaccggtacccatttttccattgctggctatcgctataacagcaaggggttctacaccctgcaggacacgctggattcccatacccgtaatgacgactgggaaacgccggacacgcgccgcagccgcgaggaggcgactgtcgaccagtccctgggcggggcgtttggttccctgacgttaagcctggtcaaagagaactactggaattcaagccaggggatgacctcactgaacctcggctacaacaactcctggcacggcatcagctacggtctcagttacggactggataaaaacacgcgtgacagcggggatgataataatgagaaaaccagcgagcagacgatcgcgtttaacgtctccgttccgctcgatcgctggctcagcaacacctgggtgaactacaacctgaacagcacgaagcacgaaacaacccaaagcgtgggtctgaacggcacggcgctggccggtaataacctcagttggggggttcagcagggccatagtcagagcagcggggacagcaccagtctgaatgccgattataaaggcacctacggcgaagtgagcgccgggtattcccaggataaccagcaacaacagctcaatgtcggtcttcagggcagcatgatcgcccatgcgcacggcatcacccttggtcagccgatgggggagaccgctgcgctgatcgaagcgccgggcgcagacgacaccaacgtcaccaatcagacaggcattaacaccgattttcgcggctatgccattgtgccgtacgtttcgccataccgtcacaacaccctcgcgctgaacaccgaaaccttgccggaaaatgccgatatcgaccaggccgccaaaacagtgacgccaacgcgcggcgccatcgtgcgagcacattatgaaacccacgtaggcagtcgggtgttgatgacactaaaacgcgcggatggtcgcccgatcccctttggcgcaacggcatctcaggcccatgaggacggtgaatttatcgtaggcgacggcgggcaggtgtacctcaccggtatgcacgagactggtacggttaacgtcagctgggggaaaaccgccgacagccattgcacggcaacttatcacctgcccaccaaagccgacggccctgttcttaacgttacggcgcagtgtgtatga

SEQ ID NO: 124294 - DNA, 675 bp, Enterobacter cloacae
atgcgaaaatatcttctggcctcctcttttttatttattgcctccgttgcccatgcgggtattaccattggcggcacgcgcgtggtctacccagaaagtaaaaaagaatcctctattgggatcaccaacccggacaatctcgattatctggtgcagtcatgggtcgagacggaagataacgcacgtgagaaagcgccgttcctgatcacgccgccgctgtttcgccttgatgcgaagcaagagaacgttctgcgcatcatcagaaccgggggaaacttacctgccgatcgcgaatcgctgttctggttgaatattaaatccatcccctcttctgcgcgcaatgagagcgttaatacgctgcagattgcgattaaaacccgcattaaactgctttatcgcccgtcaggtattaccggaaaaccggaagatgtcgccacgcaattatcctggcacacccggggaaaccagctgattgtcgaaaaccccacgccgttttatatgaatttccaggaaataactctcgacggtaaaaaagtcgataaagccacctatgccggtccaaaaagtgaaacccatttcgcgacaccaggaaatattacagcacacacagtgagctggaaaatcatcaatgattacggcggtattagccagtcctatagcgcacagattaaataa

SEQ ID NO: 124295 - DNA, 534 bp, Enterobacter cloacae
atgaaaaaaatgattattgcggggatcgccgccgggatggcgtgtgcttccgtttctgtatttgcgtccagtggtgaaggtcaaattaatttcacaggtgagattattgattctgcatgtactgtggtaaacggtttaagcaatccgcttaatgtttcattaggtaaggtttctaaatctgcatttaccggaagtggttcgacgacctcgacaacccgctttagtattcagttaaaagattgtcctgaaacggttaccagcgcctcggtgacattcggcgggacgcctgacagtaacaacaaagatattcttgctgtgacatcaggaaccggttcggcgtcaggagtgggtgttcagttgctggataaaacagaaaatccactgagtttatatacggcctctgctgcatatacgctcacgccaggtaccacaacaaacgatctgcagtttggtgcacgttatatccagaccggaggaacggtgtctgccggactggcgaatgccgcgtctaccttcactatcgtttacaactaa

SEQ ID NO: 124296 - DNA, 909 bp, Enterobacter cloacae
atgacttccaagccgggattacacccgcgaaatcgccaccgcagccgctatgacatgaaggcgttatgccagagctgccctccgctgcaggactacatcgtgcagaccccagccggtgagccttcggtcaactttgccgacccgcaggcggtaaaaatgctgaataaagccctgctggcgcatttttacggcgttacgcactgggatatcccggaaggctttctctgcccgcccgtgccggggcgtgccgattatctccactatcttgccgatcttctggctgacgatcgtggcggcgttattcctcagcaggccacggttctggatattgggaccggcgcgaacctgatttatccgctcatcggcgtgcatgaatatcactggcgctttaccgggagcgaaattggcgctgaggcgtttgccagcgcgcaggcgatcattaatgccaatcctggcttaagtcggtctattcgcttacgccgtcagaaagatgccgcctctattttcaacggcattatccacaagaacgagcactacgacgccaccctctgcaacccgccattccatgattcagcggctgccgcccgcgccgggagcgaacgtaagcgtcgcaatctgggtcaggctgaagatggcgcgctcaacttcggcggccagcagcaggagctgtggtgcgaagggggcgaggtggcgtttatcctgcgcatgatcgcggaaagtaaacagtttgcccgccaggtgaaatggtttaccaccctggtttcgcgcggcgataacctgccgccgctctaccgcgcgctgaccgaagccggtgccgtgaaggtggtgaaaaaagagatggcgcagggacaaaaacagagccgctttatcgcctggacgtttatggacgataacaaacgtcgcaaatag

SEQ ID NO: 124297 - DNA, 729 bp, Enterobacter cloacae
atgacccgcatatcccctcgttcagaattgtctaagttacagacaaataagacaaaacaactttaccgcctgcctgtgcgcttttatggttatcagcttttagtgctgatcgcccttggcgtggtgtttacctggctttctcgtggcgaaacgcttgataaatggatcactggcttttggtatgacgcggcaacacaccgtttcccgctgcagaaaaacccgctgctggatctgctgaaccaccggctggcgaagtacatcgctattgccatagcggtgggtgcgttgttttacggtgcctggaagcgcaatgcgagactggtcactgccgcactgctgatggggcttggcacgctggtggttggcgtgctgaaaagcctgagccatcacagttgcccgtgggatctggtggagtatggcggtaaggccgtctcttaccccctgttcagttccgctccggcagacagcggtcctggtcgctgcttccccggcggccatgcgtccagcggctttatggtgatgggtctgttctttgccttctggcgcgagcgtccgcgtctcgcctggagctttgtggccttcggcgtggtgttaggtctggcgatgggctttggtcaggtcatgcgcggggcgcattttttctctcacaacctgtgggctgggtggtgggtctggttttcccaggtagcggtctacggcctcgtttctgcctggtttgctaaagagtaa

SEQ ID NO: 124298 - DNA, 270 bp, Enterobacter cloacae
atgaaagacctgctacagcaaggacataaacttcgttcaaaggcaaaagaattagcgatatctgttcttcaaaaacatccagacggaaacaagaatggtaagggcgtaaaacaagccgatgtgtttcgactttgtggcctggattggggtaattacccaaaagccctgagtacacagcaacagtactgggttgtagccctactgcgcgaattagaagctgatggattagtagagcaagtggaagataaaggcccctggcgattgaagtaa

SEQ ID NO: 124299 - DNA, 507 bp, Enterobacter cloacae
atggtttttagtgagattgccgttctatcatgtcaaatagtggcgtctttgctgatgggatgtgattatttcatgccgtccaaatggagaggtaagatcaatcaatcgctttctgaatatttctcccgtttaagggataatgttgacagagatatctccatgagatttaaagaaatattcgcacaattacaaataatattcttttgtttatctctgctagcaattgccgttgcaatatattactttagagtttttttgtttgaaaacttaacacccatgctatatctgtgcatcacaataatttcaattttatgcgccgccatagctttacattatatcataggtcatacagtaaaattgctcgtcactttaggcattgggggaatattattcagaagcatctctgtcttcttgcttaaaacagaaaaaggtccacttgccggaacaggatttcttatgttgcttgtatcattcataatgcgttacatgaatatcactcacatctaa

SEQ ID NO: 124300 - DNA, 600 bp, Enterobacter cloacae
atgttcgttttttatcccgagagaatctacagcagaacggaagtgatgagcaaaccatcaccagttccgccagtaaatggcatctacttctggtggtttaaggaaattcctccaggtgtaccgacagaggggtgcgttacctctgacggctacacgctgttgtatgtaggtatctcacccgaccagcgagggaaacctaacagccgttcgaacttaaggaaacgcatcaacacgcactatagcggcaatgccgctggctcaacgctcaggcgcacgctgggtgtgttattgagtagttcaagtggctttccgctgcgccgtgtgggatctggatccagaatgacatttactcatcctggcgagcagtggcttgatgtctggatggaaaagaatgccagggttcactggatacctgtcgaagcgccctgggagattgaggataaactgatcgcatctattccccttccattaaacattcaggggaatgctcatgaatttaaaattacgctttcggaaatgcggaggctggctgctgccgaggcaagattgatggagattgctgatgaaaggggtttcaaaaggagattagcagtacagtga

SEQ ID NO: 124301 - DNA, 384 bp, Enterobacter cloacae
ttgaacattaaaggaaaatgggcaggggcgataagctgtttcttactgttcaccgttgtctgtatgtcattagcgtttaatgttaagggggcattcagagcctccgggcatccggaactgggactgctctttttcattctgcctggcgtggccgcgagttttctctcgcgcgaaggtgaggttgttaagccgctgttaggggcaatgctggcggcaccgctgtgtctggtgctgatgcggttgcttttcgtgtccacgcgaagcctctggcaggagctggcctggctgctgagcggcgtattctggtgcgcgctcggtgcgctgtttttcctgtttcttcgcactctgatacggcatcaacggttacataataaaaaagaatga

SEQ ID NO: 124302 - DNA, 1134 bp, Enterobacter cloacae
gtgaatgacgcgatcccccgcccgcaggcgaaagtccgtaaagcgctgaccccgctacttgaaattcgtaacctcaccaaatctttcgatggccagcatgccgtggacgacgtcagcctgactatctacaaaggcgaaatatttgcccttctcggggcgtctggttgcggtaaatcaaccttgctgcgcatgctggccgggtttgaacaacctaccgccgggcagattgtgctggatggcgtggatctctccagcgtaccgccgtatcagcgtccgattaacatgatgttccagtcttacgcactgttcccgcatatgacggtggagcagaacatcgcgtttggcctgaagcaggacaagctgccaaaagccgaaatcaccgcgcgtgtggcggagatgctgagtctggtgcacatgcaggagttcgcgaagcgtaaaccgcaccagctttctggtggtcagcgtcagcgcgtggcactggcccgaagcctggcgaaacgcccgaaactgctgctgcttgatgagccgatgggtgctctggataaaaaactgcgcgaccgtatgcagctcgaagtggtggatatcctcgaacgcgtgggcgtgacctgcgtgatggtcacccacgaccaggaagaggccatgaccatggccgggcgtatcgcgatcatgaaccgcggtaagttcgtgcagattggcgagccggaagagatttatgaacacccgactacccgctacagcgcggagttcatcggctcggtgaatgtttttgaagggctgctgaaagcgcgtgaagaagacgggctgatcatcgaatcgccggggctgcagcatccgctgaaggtcgacccggataactccgtggtagacaacgtaccagtctatatcgccctgcgaccggagaaaatcatgctctgtgaagatcctccggccgatggctttaactttgccgtgggcgaagtggtgcacattgcctatctgggcgatctctctatctaccacgtccgtctgaagagcggacagatgctcagcgcccagctgcaaaacgaacatcgctaccgtaaaggactgccgacctggggcgacgaagtgcgtctgtgctgggatgcggacagttgtgtcgtgctgacggtataa

SEQ ID NO: 124303 - DNA, 1131 bp, Enterobacter cloacae
atgcagtgcgcactctatgacgccggacgctgtcgctcctgtcagtggatagaacagccggtctctcaacaactcaccgccaaaatggccgacctgcaacagctgctggctgaacatgcggtgggcgagtggtgcgcccccgtcagcggcccggagcagggttttcgtaataaagccaaaatggtggtcagcggcagcgtagaaaaaccgctgctgggcatgctgcatcgcgacggcacgccggaagatctcaccggttgcccgctttatcctgcctcgtttgagccggtcttcgcggcgctcaaaccgtttattgcccgcgcggggttaacgccttataacgtcgcccgtaagcgcggcgagctgaaatatctcctcctgaccgagagccagatggacggcggtatgatgctgcgtttcgtgctgggctcgcacgccaagctggaacaactgcgcgcggcgctgccgtggctgcaggagcagcttccgcagctgaaggtcattaccgccaatattcagccggtgcatatggcgattatggagggggagacagagatcttcttcaccgggcagcatgcgctggcggaaacgttcaacaacgtgccgctgtggatccgcccgcaaagtttcttccagaccaacccgacggtggcgagtgcgttatatgccaccgcccgcgactgggtaagggcgttaaacatccatcatatgtgggatctgttctgcggtgtcgggggctttggtctgcactgcgccacgcctgagatgcagctgaccgggattgagatcgccgccgaagcgattgcctgcgcgaaacagtctgccgctgagctcggattaaccaatctgcacttccaggcgctggactccacgcagttcgcgaccggccagggcaacgtaccggagctggtgctggtcaacccgccgcgccggggcattggcaaggcgctgtgcgactatctgagccagatggcgccggattacattatttattccagctgcaacgcccgtaccatggcgacagatatcgctcacctgtcgggctaccgcattgaacgcgttcagcttttcgatatgttcccgcataccgcgcattatgaagtgttgacgttgttggtgaaaacgcgctaa

SEQ ID NO: 124304 - DNA, 450 bp, Enterobacter cloacae
atgtctattgtctcgtctttttcagacacgcttctcacgcttcctgttaatcacaataccgatttcaccgaactggccgactactgccagcgctactgcgacgcgctggtagaagaaaccgatcctggcagaaaactcgcgctctgtggccgcctcgctgcctgtcttgccttactccgcccgatgctactggagcctgtaccggaacatttgtatgaacgattaacggtggatgttttcccggaaagcgaacctgcattcaacgcagaggctgatcaactgtgccgttactgtgaggagattacgcaactcttaattgggggagtacttgcgccggagtcagcccgcgtaatgggcgatctgctctttgagctgacaggctattttgccgaccagttgaaagcgccacgctggctaaaaacagaggcgggagtcgcattactggggtaa

SEQ ID NO: 124305 - DNA, 624 bp, Enterobacter cloacae
atgttaagcatttttggtaaaaaaacacgtccccatcatgaaatggaagccattatttctgcaacggccgggtatgaagaaaaaacgttaagaaaatggcaaaaaatatcaacctgtaactccgataatattcacattatcgtcagcggagaagtcgagttccgccgcagttctgatgacttatgtatgtttacgctacagggacaatgtatctttggtctctccgctattttctacaactctacgcatatgcagggcgtggtacgcagtaataccgtggttcgtaccatacataaagatcaattccagcagttaatgacccaacacgggctgtggcctgaactgactaaagtgctggcatggtatatctgtttgctcagtaaacgtgatgatgttttggttgcccgcagcgcatattccgtcgtccgtgaattcctgattgaaattaacgaactgattgttgatcatcagcgagatattaatatttatgattatattcaggaatacaccaacctggcacgcagtaccattattaaaattctctcagacctgaaaaaaggtcaatatattgtggtcgaaaaagggcgactgattagcctgacctccctgccggaaaaatattaa

SEQ ID NO: 124306 - DNA, 627 bp, Enterobacter cloacae
atgtctaccatctgcctcgctgcccagcgcagctataccaccggggaaccggtctggttctcatggcgtttgccgtcattcagtaaaattatcagcgtgctgacgctctggtgtctggggctgtgcgcgctgatcgtcgcaggcctctatgcgcacgtgtactggaacctgcgccacccggcaccggtgataaaaaaggtgagcgtcgcgaagccagacaccaccctttctgatatgcattacgtgtatgtcaccaaaccgttcccgcacccgcagccaaagccgcagtcggtaaaagtgcaggaagatttaccgccgatggacaatatgcccattaatagcgacgaaaatgactggcagcaggcacctgatggcgcattgccggacagccccgtcacgcatgatacctcgcgcgataccttacccggcaccgaagcgcacgaacaggcgatgaaacacgcgcaggcaacgcagccggatgaagacaattcattaaaaacgttatttatgcaggcgctaaaacagcagcaggatgatatggcgaagggaaaaatgcccgcaccaccagttgacgaaacgcaaaatgcgtctccttcgataataaaaggagacgcgggaggggattaa

SEQ ID NO: 124307 - DNA, 1554 bp, Enterobacter cloacae
atgtatcagagccattttaaattcagtaccccgccgttcagaaatatcacccgcaagtcgggcgattttctggtgccttatcatcaggatgtgtttaatcttctgaaagagaaaagccagcaggcagggatcaccgggctcttttaccacgacagcgaactgctggggcagttcagcgatgccctcaaagccagcagcaagtcggtgctctgcattaatgccttcccaaagctgagcgccagtagcctgctcttcaaactcaacccggtagcgaaagagaagaacaagctccaggcggttgacgctattattcgcctgtggcgcgatgcgaagtcgacccacaaggtgctggtcatttcccaggcccaggcgatgaaggccagcggctatgacgtgctgggcatactgcttacccgtgcgcaggaactggatgttcgcctgtcgattgtgctgatgggcacggccgaccaggaagtgatgctgaaagcctctgccctgcaggaatatgtgctgacctgccacaccctgcgcaacctgacctgccgcgagttcctgagctacgttgacgcccagtgccacgagcacggcgcggatgtctctccgctgacgcccgctcgcgtgaaaaaaatccacgccctgaccaaaggcaacatcagcaagctgaacgaactggctcatctttccatgctggccgcctggaccgaacgggcgccaaacgttggaccgcgtcatttgcgtctcgccaccggtgaagcgctgccagcgcctaagcgtggtaaaacgctggcctccatcgggttgttcgcgtccgtcctgttcaccgcctgcggctggatgatgacctcgtccattacggcaaaactgccggtggcgctgccggtaccggccagttggaaacagcaggtaaaaacgccagacgcgccggtactgccggttatcgaacaggaggtggtgaatcagcccgatgccatgcaccagctttatgccatgtggggctatgacgcctctgccgacgatgccctgtgccagaatgccgcaaaagtgaacctgatgtgcaaacagggtaatgcctccctggacacgctggcgaatgacggttacccctgggtgagcgagattaaaacgggcgatcacattaattacgccgtcgtggcgcgtgccgggaaaaattccctcgatctgctgatgaacaaccgcacctggcaggtgagccgcacgtggtataaccagcacgcaacgggcaattacacccttctgcaccgcctgaccccgtcaggcaaagacgaaatcaccgccgccagcgacagtaaagatcttgagtggctggatcagcagctgagcgtggcgctgggcgaaagcgaaacgcacgataaaaactggacggcggagctgatgaagcgcacccgcgaattccaggaaaaaatgcacctccgcgtcgacggtattccgggtgaagacaccctgatgcagctgatgcgcgaaacccataccacgccgagcgtgttgatccagacaacccaggctaacccgactacgcaagagaagcacgcataa

SEQ ID NO: 124308 - DNA, 774 bp, Enterobacter cloacae
atgaggaacgcattcctttccaggctaatgacgccctgcataatgctagtcatgctaattttttgcagccagcagggttatgtcgtttttaaagattataaaaaggttacgaataagttagcgaatgctgataaggcgccgctaaaaccgcgtaacagtgacaaaacgttcggtctttttacggctgcggtccgtcaggccgacgttccggcggcggtaaaagcgccgttgtctgcagaaattgaaggcattatccgcagcgatgagtcgtggctgtcgttcgccgtgattaagacccccgccgggcagcagagctaccgggaaggggaaccgctggtggggttcgatgacgcatatgtggatgaaattaataaagataacgtggttgttcagtatgaaggcacgaagcaaacgctcgccctcaaacagccgccttattttaagggcgatgcaggcaatagcccggtgacgaaatcgaaaaaagatgccggcgcggacagtctgcatctcgatgattatctggtgttaaagccgttaatcgataaaggccaactggaaggctttaacattaatccacgcaatgcttcgcctttttacagtgaaacaggactgaaacagggtgatgtagtggtgaaagtgaatgacgtcgatatgacgaaagaagcgcaggcgaaaaatattatcgccaactggtcgaaaatgaaagaagcggaggtcgtcgtcagacggcacgctcaccttgaaaatattcgggttaatgttctaaacaattaa

SEQ ID NO: 124309 - DNA, 486 bp, Enterobacter cloacae
atgaataagcaacgtgggtttaccttactggaaattattctggcgctggtgatatttgcctcctgcgccatgatggtggtgtcgacaatcccctcgcgcagcggcgcggatattttcggtcagcagttaaaagccctcgttgaatatggttcagaccgtgcggtaatggacggaaatatcgttgggctggtgatcaccacctcagaatatcagctggtgacctgggccgaaaaagagggcgaacgacactgggaacccttaaccgccgggcgcattgtcacccacggccagttcccggaagagatgcacgtgtcgctgtcaccgcagcgcattgctgccacaaccgacgccacaccgcagattgtctttttgccggacggggagataagccgcttcacgctgtccctgcagagtttcgataaaaagcagcgctttcgcgtggtgtcgcagggggcatcaccggtttcggtagagaacgatgactaa

SEQ ID NO: 124310 - DNA, 375 bp, Enterobacter cloacae
atgactaaacgcaaagaacaggggatgaccctgctggaagtgatggtcgctctggtcatcttctccaccgccgcgctggcgctgatgaactccgtctcgctgaacgtgcgctttacccatggcctggccgattcgctgcaggcgagctgggtggcggaaaaccagctggcggaagcaaagctgagcaacacgccgttcccggatgccctgcagacagggacagaaatcatgggggggcgaagctggatctggcgcaagcagcgggtgaaaaccgccgaaaatcgctttgccgatgaagtgcaggtgtacgccgaggatgatgaagacaaaccggtgttgagcctgcagataccggaacccggagaggtgaaatga

SEQ ID NO: 124311 - DNA, 672 bp, Enterobacter cloacae
atgagcaagcacattcagcgtcagcagggctttacgctgctggagattatgattgcgctgaccatcttcgcggttatcagcacgcttgcctggaaaattctggacggggcgatgcgcacctcgaacgccaccgacgtggcggcgactcaactcaaccagcttcagcgcgcctataacctgctggagcgggatttctttcagcttcaggcacgcgcgccacgcaacgagcctgacgtatttgtccagcacgacgatgcgctggagttgaccacgctgaacggcgtgagcggtcaggtccagctggagcgcgtgcgctggcggcttgaggacaaaaaactgtggcgcgatatctggccggttatcgacagccctgccgatgtgaagccggaagaggtgccgatcctcagcgatgtcaaagagatgacgtggcgcttctggaaagagggctggcagaacaaatggatcgacacggcgcatcagccggacggcgtagaacttctgctgaccatggagaatggcgatacctggcgctgggtatttaccacgccgggtgatatgccggtcgccccggcggcatcaacagaacaaacgcctgcgccatcgggggatgcggccacgccagcgcagccacaaccgcagccggtgcccgctccgtcaggagagaacaaatga

SEQ ID NO: 124312 - DNA, 1017 bp, Enterobacter cloacae
atgagcggaaaatcggttcgaaaacagcgcggtgtcgcgctgctggtggtgctaattttgctggtcatgatgtcggcgctggcggccaaaatcagccagcagttctgccgcaatctgcagaaaacccgttatcaggtaagccagcagcagctgcgctgggccattcagagccagcaaaaaaccattgaaggtctgcttcagacctacgccagcggtgacagccaggggctgtcgcccaaaggggagtggacagagccggtggagacagagggtgaacactacaccgtggtgagccagattgaggatgcccagacctgctttaacgtcaataacctgctggcggccgatccgaccgccgcggtacagaccgcaggggcgctgccggaaaaaccggtcaaagcgcgcatcgttgagcagcttctgaccgacagcggcatttccgccggtgacgcagaagagatttaccagcaactaatggactatctcgacggtgataccacaacggcaaaagaggggctggagacagatgcctgggccggcgttgagcccgcgcggctgcctgcgaatcagatgatgcgcaccccgggcgagctaaagctgctgcccgcgtttccggtggcggcctacggcaaagtcagtaaagtgctgtgcgccttacccgacaccgccagcaaggtggatgtcaacaccctgaccgaagaacaggcaccgctcctggcagccctgtttatcggctcgctgagcgaggacgaggccgcccgtctgatcgcctcccgcccggaagagggctgggagtcgatggaggcattccagaaagagcttgagacaaattatccgcagaccaaagacgccctcaagcaggttcaggcgtttcttgcggtaaacagtcactatttccgggtcaacagtaccggcaataccgatgatttaacgctgcgcgtcgtcagccagcttcatgttgataatgaagccgggaaggtgattacctggcaacgtcgctaccgaatggttgaataa

SEQ ID NO: 124313 - DNA, 1080 bp, Enterobacter cloacae
atgtggtgcgagtccggtagcgaccaggtggaacagcgtcagggcggggcgtcactggcggcgcttgccggtcacgcgttagccgcacgcgtctgcctgctactgccggccagcgaaatgatcttccgtcgcttcacgttgcccaaaaaaggcagcgttgagttctcctggctggctgaagagacgctgattggcgatgtggacacgcttcactggacggtgctcaacaagaaggggcgggaagtggacgcggtggccattgatgcggcgcgtctgcagtactggctggaccgctgtgccgatgccgggctaacggtggtgcaggtgctgcccgatgcgatccttctgccggtaaccgaaggcggcagcacgctggtctccaccgacagcggctactggatgcgctattcgccgtttggcgcctgtgaaaccgacgccgccctgttgccgctgctgttgagccagcagtgcgccggtaacctcgtctgctacggcgatgcgccagcggacgtgcaggtggatgagcaacgggcctggcagcatccgctggtgctgatccagccgcagtggaaaagctgcaaagcaaacctgttgcacggcgtttttagcgccacgggtgcacagaccggtttccgttatgcgaaaccggcccttgccgccatggcggtgctgagtatcgggttgctggttggccctcgtatcggcatggcctggatgctctctaaccaggaaaacctggcccagcagcagatggtggaattggcccagcactatttccccacgctgcgccagaccaccaacctgaagtaccacttcgggcagaacatcaagaaagagaagaaagggatctttcttcaactggacgcactggagcagatcaagcaatcgctcccggcggtcgaactgagtgaagtgggatacgacgacacccagaatcagctcacgctgaacatccgttcgatggatcccacggcgttgcaggcgttggtcaataaggcgagtgataccttcgactttacgctgcagccggtctccagtgaagcgccttataccgctatcatcacagggaaatataaatga

SEQ ID NO: 124314 - DNA, 486 bp, Enterobacter cloacae
atgaaagagaaaattggacaattaaaagcacgctatttgcgttacagcccgcgcgaacgaacgctgattaaactctgtggttcggcgctctgttgcgccattatctggtacggtgtaatgaccccgctggataatattattaaaaatgagaaaagcacgctgcaaaaacagaaacagaccctgaactggatgcgtgcagaaattaataaaaatcaccttcaggcgaaagtattaaaaaccagtaacccgagaagcgtggtggaagagagcgccaaagagatccacgttgcgctgagtaatatccagcaggacgggcaaaccctgacgtttaatattgatcgggtcaacgtctatgagcttaaaaactggcttcgggaggtgaatttaaccaccggggttcgtctggagaaaatggatctcacgccggttgatcaccttagcgatgtaaaggcccagattaagctctcctgggcgaaagtggcatga

SEQ ID NO: 124315 - DNA, 798 bp, Enterobacter cloacae
atgaactcgctgacgctgcttcagggcagccagatgtccgccctttgcctgctcagcggcacgcttggcggcattatcggcagctttctgggggtggtggtcgaacgcattcccccgctcattaaagaggaggagggcgccggaaacctgctgtttccggcctcccactgtcccgcatgctcccacacgctcgcctggtgggaaaatatcccggttctgagctggtgttgcctgcgtggtcgctgccgctgctgccagaccgcgatcccgctgcgtctgctgttgcttgaactttccagcgccctgttttttgccctgacggcggcgtacgccccgtctgcggccgcattgatgtcgctatgggtgctctggtgtggactgctgccgctggcgacgatagacgcaaaacacatgctgctgccggactgcctgacgcagccgctgctgtgggcgggcctgctgaatcatgcgctttttcataccttaccgttgtcggatgccctgtttggcgcagcggcgggctacctgtcgctgtggcttctctactgggcctttcgcctgacaacaggacgcgagggattgggctacggtgattttaagctgctggctgcgctgggcgcgtggtgcggctggcaggcgttaccttcgttattgctcgcggcggcattaagcggtatcgcattgtattttgttttttataaagcggttaaagaaaatagcgttattccgtttggccctctgttgtcactcgccggtttggttatttttattctgcagaccttgcaattcatattctga

SEQ ID NO: 124316 - DNA, 2703 bp, Enterobacter cloacae
atgaaatttatgaagccaacctatctggcactctttgtcgcagccgtttccggctctgcgttcgccgcagcgccaggtacgccttcaatcagcagcggtaacgataaatttgccatcgttgaagtggaccaggccgtagtggactacggtaatcttgttaaggttcataacgacggtgtcgacgtaaaagtcgagtggaacgtctggagcggcgacgcgccgacctccggtaaagtgctgctggatggcaagaccgtctggtccggtgctgccggtgcatccggttctgccacctttaaagtgaaaaaaggcggtcgctaccaggagcaggttgaactctgtaacaacagcggctgtaccaaaagcgcaagcaagctgatcatcgtggcggatactgacggtagccatctcctgccgctgaatgcacctctgcaggaaaacaacaaaaccttcgcaaaacataccgataaagtggttgccgcctacttccctgaatggggcgtttatggccgtaacttcccggtcgataaaatccctgccgctaacctgaaccacatcctgtacggcttcattccaatctgtggcggcgacggcatcaacgacggtctgaaaactgttgaaaatggcaacagcttcgccaacctgcagaaagcctgtgctggccgtcctgactacaccgtggcgatccacgacccgtgggctgcgctgcaaaaaccacagtctggcgtgtctaactgggacgacccgtacaaaggtaacttcggccagctgatggcgctgaaaaaagcccatcctgacctgaaaattctgccatccattggcggctggaccatgtccgatccgttctatcacatgaacgattccgcgatccgtgcacgtttcgtggcctctgttaaagacttcctgaaaacctggaaattcttcgacggcgtggatatcgactgggaattcccgggcggcggcggtgtgaacgaatcactgggtaacccgcagcaggataaggcaacctatactgccgtgattcgcgatctgcgtaccatgctgaacgaactgtccgctgaaaccggacgcacctatgaactgaccagcgccatcggtgccggtaaagataagattgaagacgtggattacaccacggcgcagcagtatctcgatcacatcttcctgatgagctacgacttctacggcgcgtggagcatgaccgatctgggccaccaggctgcgctgcatgcaccagcatggcgtccggacaccaactacaccaccgaaaatggcgttaacgcgctgctggagcagggcgtacagccaggcaaaatcgtggtgggtaccggcatgtacggtcgtggctggactggcgttcacggctataccggcaacaacccgttcaccggtacggcgactgacggcgtgaaaggcacctgggaaccaggcgttgttgactatcgtcagattgtgaacgagtacaaaggcaagccaggctgggaatatggctatgacgcagatgctgaagcgccatacgtcttcaacaaatccaccggcgagctgatctcttatgaagatgcccgttccgcaaccgcaaaaggtaagtacgttctggcgaaaaacctgggcggcctgttcgcgtggtctatcgactccgataacggcgatatcctgaacgcgatgaacgaaagcctgctgggcagctccacgccagatccggtagtgaccaaccatgcaccggttgcttctgcggcggatcagaccgtgaccggccctgcgaccgtgactctggatggctctgcctccaccgatcctgatggcgatgcgctgacctacaaatggacccagatttctggcccaagcgttaccctgaccaacagcactaaagcgaaagcgaccttctccgttggcgctgtgaccagcaaccagaccctggcattccgtctgaccgtgaccgatccaaaaggcctgagcagcaccgctgacgttcaggttgtgaacaaagcgccgaaagccaaccaggcccctgtggttaaccagatgcagaacgtcactctggaagccggtcagacctacgccctgaacgtgcaggcagcggatccagacggtgatgcactgacctacgcctggagcgtaccatctgatatgcacgcgaccggtactgatacctccagcgtacagatcaccgcgccggacgttacaactgactctacctacaccctgagcgttgtcgtaagcgacggcaaaaccagcgtacagtctaacgtacaggttaccgtaacgccgaaagccaccccggttgtgcctgatgaagacaataccccgtctgacgaaggcaacacgccatccgatgaaggtaacaccccatctgatgaaggcactgcaaccggcagctgcgataacccggtagatgccaatgccagcaaatacgcggcatgggaatccagcaaaatctacaacaacggcgacatggtcagctccgataatctggtatggaaagcgaagtactggactcagggcaacaaacctggctttaacgccgatgcatgggaactggtcagccaggtgaaaatgaactggcgctccgacatggtctacaacggtggtgacaagacaacctatcaaggtttcgagtaccgcgcgaaatggtggacaaaaggtgacaaaccaggcaacagcgatgtatgggtgaaagaaggcgcgtcagcagactgcaaataa

SEQ ID NO: 124317 - DNA, 453 bp, Enterobacter cloacae
atgaaaaggtttctgtttttgttattgatattaagtcatagcgcatttgcaaattgctggaataaagcggcgcattattatcatattgatccgtttttactttatgccatcgcgaatgtggaatcgggaatgaacccgtacgccattggcatcaatcatgacggaacgcgcgatgtcggattaatgcaaatcaacagctcgcactttcctgaacttgaacgcaaaggcattaatgaaaaccgtctgatgacagagccctgcacctccattatggtcggcgcctctatattgtcaggcatgattaaggtttatggatacaactgggaagcggtaggtgcgtataacgccgggcttaaaaaagaaaattaccctaagcgcatggtctatgcccataaggtctggaaaaagtatcagcagttaaaattagccgcccgcgacagaaccaactggtga

SEQ ID NO: 124318 - DNA, 1842 bp, Enterobacter cloacae
atgaataaaaggacattactgagcgtgcttattgccggtgcctgcgtagcgccggtgattgctcaggccaccatgctgaaggcggaaagcagtgtgccttacaccatgaaagccagcgatctggctaaaaaggaaaaagagctcaccgatttcccactgatgaaatccgtgaaggataccatccgtacgctggacaacgctcaggtcgagcagattgagccaggccgtgcagccaacccggtaaacgtgaaacgcgttgaagggatccttaaagagagcgactgggaatacctgttcccgctgcgcgcgaaggattacagctacagtaacttcctgaaagccgtgggtaaattcccggcgctgtgtgatacctacaacgatggccgcgacagcgaagctatctgccgtaaagagctggcaaccatgtttgctcacttcgcacaggaaaccggcggccacgaaagctggcgtccggagccggaatggcgtcaggcactggtctatgtgcgtgagatgggctggagcgaaggccagaagggcggctataacggggagtgtaacccggacgtctggcagggtcagacctggccgtgcggtaaagacaaagatggcgacttcctgagctactttggccgcggcgctaagcagttgtcctacaactacaactacggtccattctctgaagcaatgtacggcgatgtccgcacgctgctcgacaaacctgagctggtggccgacacctggctgaacctggcgagcgccatcttcttcttcgcctatccacagccgccaaaaccaagcatgcttcaggttatcgacggcacctggcagccgaacgaccacgataaagccaacggccttgtccctggctttggcgtgaccacccagatcatcaacggcggcgtagagtgcggtggcccgactgaaattgctcagtctcagaaccgtatcaaatactacaaagagttcgctaactacctgaaagtccctgtaccggctgacgaagtgcttggctgtgccaacatgaagcagttcgatgaaggtggcgcaggcgccctgaagatctactgggaacaggactggggatggagcgcggataccccagatggcaagacctacgcttgccagctggtgggttaccagacgccattcagcgcgttcaaagacggcgactacaccaagtgtgtacagaagttctttaacgtgaacatcgttaacgacgacggttccgcggtcgtgccggatgaaacaccgactcctgctccagccccgtctgaagatgagacgccagcgccgacaccaacaccggatgaaaccccggcacctgtgccagacgacatcccggcggtggtaaaccatgcgccagtagcgcagattgccggtccgatcggtgcggttgaagccggtgcgcaggtctccctgagcgcagaaggctctaccgacgaagatggcaacaagctgacctacacctggcgttcccaggacggccagaccgttaccggcgacgataaagcggtagtgaccttcaacgcgcctgaagccgcgacggcgcagcagtatgaaatcagcctgaccgtcagcgacggcgagctgagcagcaccaccacatacctgctgaacgtaaaagccaaagcagccaccccgtctcaggacgaaggcacttccggctcttacccggcgtggagcgcgaacagcaagtacagcgcaggcgatatcgtgaacaaccacggtaaactgttccagtgcaaaccgttcccgtacagcggctggtgtaacaatgcaccaatgtactatgaaccaggcgcaggtctggcatggtctgaggcctggacggctctgtaa

SEQ ID NO: 124319 - DNA, 426 bp, Enterobacter cloacae
atgaacaaaaacaattttaattcagtaatgacacttgaagaacagcttgttgtcatcgtagataaatacatatcaagactgtacctgtcgcacgctaaaagtttctctcatcaactctacctaatatttgtcggttatcatttaaaatacttttaccccagaagacaatatacgcggtcaaatcgtaatatagataacattatgacgatgtttagttctgtgtataaatctctgacgagtggtttattaaggcaattaaataataaagaagctgttcttcgtgagttaaactctctcgttgactatattgataataatcaagaacgagcagaagaaatctatgctacggtcagagcacaatatgaaatgaaaataatcgagaaagagttgactcatgaggttcgcgtaagaaccgttaggctgtag

SEQ ID NO: 124320 - DNA, 273 bp, Enterobacter cloacae
atgaaaaacgaaacaataaagtgcccgttctgctttacacaaagtcatcatggtgtgcgaatttgcaaaggctgtcatgcaaagatcgcttacggtgaaagcccgctcagtgtggcattcctgtttcaattcgtcgcatttggtctcgcgtggttagcattttcgtggaccggcagcactcttgtatcagtcattacgtttttcgtaagtatcattattcttatctataaaatcaaaaaaaagtatgcagacagagttgtttttatacggtga

SEQ ID NO: 124321 - DNA, 1062 bp, Enterobacter cloacae
atgctgggtgattcagccgttgaactgattgctgaatttgatggcaccaaacagcttaggccagatattcagaaggccgtttggcacaactcgcttcgcctgcctgatggtgaatcacttacgactgaacaatggtccagcatcgcagatgactacatgaagagaatggggttcagtgatactcacctccgttgctatgtcctacatgacgattctgccggtcagcacatacacattatcgcaagcaggatcgacctcaatggaggaaagctttaccttggtaggaatgagaacctcataagtaccagcataatcagtgaactcgaattcgctcatggtctgacagtgaccaggacagcctcttcaattgcaccaaagcaactgaagcggaagagaatatctcgaaacgaacagatgctatcagaacgaactggtgttccctgccccaagaagtcccttcaacagatcatagataaaagtttggcagattcaccggaccttttaacttttatcaggaggctggaagaagctgaagtatcctggaaggccaatattgcctctaccggtaaaatgaacggcttctcattctcttaccgcgatatagctttcaaagcttcgcagttaggtaagggttactcttgggctaatcttcaaaaacaacttaactacaatcctgaccacttagaagctatacgagcgaccaagaaggctatccctgctcctgctcctgctcctgctcctgctcctgctcctgctcctgctcctgctcctgcaacagtgttgaaaaccactgagagaaaggaaagtatcgttgaaaaaattgcagaactggaattacggttcagagaagacaaacgaaacgaaatcgtaggaaagattcttcaaaaaaatgcagtacaacggcaaaagcatctccgcttcgtaaagtggcttgcttccttaaagcaatgcattgagcttctgagagtctatggaaagagcattcttcacaacaaccctgcgggattctcaaaagtatatgcaactcaacatctaacccagaaaagaaaaatccgtttatag

SEQ ID NO: 124322 - DNA, 384 bp, Enterobacter cloacae
atgggtaaaataataacattgttgtatacaaataatttcaagcctattggcgataataaatctcaatcattgcgaatacactgtgtcagtgtacgattaaataaagaggagttagagcttctcaatgcaagccgtggtgataaacgcaaaggtgaatggcttcgcatggcatcacttcaaaagcttcctccagccattcctgcaatcaacttagaagtttggcaatcattgaccaccatatcccaaaagttaaacaagctgataaatcatctggacactaaaagcagtaatagtgagttaacgaaaacagagatcttcgctgtcaaaaagcagattaaagagcttcgctcatgtcttacagcttctgatccgtccgtaaggtag

SEQ ID NO: 124323 - DNA, 294 bp, Enterobacter cloacae
atgaatgggattaaaagagaagaccttaatatgatatcggatattgagaataaggcttttcttgataaaccttctgtaataccatatattgcattatctgacattgacaaaaaagttgaatcgagaatcaatgagaatagtatttaccctttccatgctttaatagttcatggtagcaaagatagtgggttactttattgttatgttgaactttttagtacttttcagtatatagcaatattaagttatgattattctggggatgatatttacaacgattatttttttcactaa

SEQ ID NO: 124324 - DNA, 681 bp, Enterobacter cloacae
ttgtctagtatctatggcgcattaatcactggatgtgttggatttttcggcgcaattattgcgatagtaagcataaaaatgcagagaaaaacctctcgtgagaaaaatgcattagaatttgatgttttttatcagactgattctgaagttcgcacccattgggctacggtagctgactatcttattgagaacaagataaaaaatgatttatctaagattgataagaaaagtgatgtttttgtatcaattatttttatactaaatacttgggaaagagcttctaacgcgattagatataatattttcgacgaggattatttatataatgtcttaggcagtagtgctattcgaatctatgatgaattgaaaatctttattgaatcccggcagaagaaaaatgaactggcattagcaaattttgagtggctagtaatccgttggagatttaggaaaaaacttaatggcaaaaatgaaattaatgcaagaaatgttttaaggatctctagggactttacccctatactcaaaagagatagtttacactcttatgaaaaagcaaaattgttggatgctgataaatatactttgaaaataaaacatccttttagtgttaaaaaatatcttctcaaaaaacctgagacaatggttttagatagagagacaaagaaagaagatgattaa

SEQ ID NO: 124325 - DNA, 816 bp, Enterobacter cloacae
atgttctggataattaacgataatattaaattttgtccagagaaaaacttacttgtctctatgacccgaccggagttgagcgtcattctgaccacgccagccagtcgttgtctggttcttctgcttgagtccgccccggaagtggttaatcaaagggatttcttcactaaagtttggggtgaagacggaatgttagttccggccaataccctttatcagaatatctccattatccggcgtgggttgcgcacgacgggagagactgacgacacgctggttgccacggtacccagaaaagggttccagattaaaaaagaagttaaggtcagccgaattgaaaacgacgtaacagaatcagaaagcgcgatagcagaagcccagcctgtcagcggctcgaaagaggtgattgcggaaactgctgccgttcaggtgaaagataagaccccgcgtcatcactatcgtcgctatcttccactgctttttatggccctctcttttgggctgggctattttattcttcatctggcggtccatgactattccagaaaagacttttttaaagactacaccataagcagtacggaaaatggctgccattttttctcacgaaacgatgatattaaaagcaggggtaacttcacgcgttataagcaaattatcatgcgaacagggctcgattgtaaaaaatacccctgggcctacttctcttcatccagcacggctccggcactttctgtactcatttgcagaaaaccgtatgagcaagaagaagatgcaggatgcgttacgctttattttagggggtacaatcagtga

SEQ ID NO: 124326 - DNA, 480 bp, Enterobacter cloacae
gtgactaaaaagtctactgccatcctgtgtctcgtcctgtttgccgttggggcgctgacgtcctggctttatcattatcacttagaaaaaaaacaaaatacggaagcctgttcagtttctgttgttgtttaccatgaagatgcccgcgcaaacctgacgctggattttatgtacaccatgcaaaagcagaccggggtcatcgcgctaagcgggacatattttaaaaatgagaaggcgatagcctctatccgccgggatgtgtcttatatctggaccgaaaacaaagactctttccagtttacctccgtgaagatccatgaggttaatgaagactccctgccggataatgtgctcggcgacgtgttgcctgatttctttatttatccgaaccataaattgaactataccattctgaaacaagggcccagagggtttctatttaccgtcggtaagcgtcctattttcttctgctctcgctga

SEQ ID NO: 124327 - DNA, 246 bp, Enterobacter cloacae
atgcaagagatcaccacgaccaaacactatcgccacttaaaagtcggttatttcagaaagcgtcacgaagaccggaagaccaaaatcccgcgacgttacagcgtacatgcggcgttgagcttaaaaggcgactggctggagcaggcagggtttactacccactctcaggtcagggtgggggttgaacaggggaaaattgtcatcgaactactgaaagaagatctcagcgagagcagaagaaaatag

SEQ ID NO: 124328 - DNA, 2217 bp, Enterobacter cloacae
atgggcggtaacggcgtacagttgcgggtgcgtggcaaggtgcagggcgtgggctttcggcccttcgtctggcaactggctcaggcgctgcagttgaccggcgatgtctgcaacgacggagagggcgtgctggtgcgcctcgcgggtaatggggggcatttcaccgcgaggctgcgccaggactgcccgccgctggcgcgcatcgagagtatcgacacgcagccgttccactggtcaacgctgccggagacattcaccattcgccacagcgcgggcggagcaatggacacccagattgtaccggatgccgccacctgtcccgcgtgccttgcggagatgaacgatccgcacgagcgccgctatcgttacccgtttattaactgcacccactgcggcccgcgttttaccattatccgcgccatgccgtatgatcgcccggccacggccatggcgccattcccgctctgctcgccgtgcgaaacggaataccgcaaccctgcggaccgacgttttcacgcccagcccgtggcgtgcccggactgcggccctgagcttgagtggcgtgcggccgatcgggttgtcacccgcgagctggcgctgaacgcggcggtgcagatgctgaaaaacggtggcattgtggctatcaaagggctgggcggatttcatctggcctgcgacgcgcttaacccgcaggcggtggcaatgctgcgggcacgtaagcagcgtccggggaaaccgctggcggtgatgatccccagcgccgacggccttccgcagccggtgcaaacacggctgcgctcgcctgccgcgcccatcgtgctgatccctaaagcctggctgccgagctttccggacgacatcgcgccgggcctggatagcctcggtgtgatgctcccggccaatccgctgcaccatttgctgatgcaggagacgcaacgcccgctggtgatgacctccggcaacctcagcggcagaccgcctgccatcagtaatccccaggcgctggaacagctcgcagagatcgctgacggttttctgctccataaccgcgacatcctgcagcggatggacgattccgtactggatcaggacggggccatgctgcgtcgggcgcgtggattcgtgccggatgccatcacgttacccgccggttttagctctgttccctctattctggcgaccggtgccgacatgaagaataccttctgtctggtgcgcggtaaccaggcggtgctgagccagcattttggcgatctcagtgacgacggtgtcgaggcccagtggcgttcagcactgtcattgatgcagcagatctacgcctttcagccagagcggctggtgtgcgatgcccatcctggctatcacgcccggcactgggcacaggagcaggcgctgccggtcgataccgtactgcatcatcacgcgcatgccgcggcctgccttgccgaaaacggctggccgctcgacggtggcgacgccatcgccctgacgctggacgggatcggcatgggcgagcacggcgcgctgtggggcggggagtgtctgcgggtgaactaccttgagtgcgagcatctgggcggcctgcccgccgtggcgatgccgggcggcgatctcgcggccatgcagccctggcgaaatctgctggcacactgcctggcgtttgttcctgactggcaacgctacccggaaacccgcgccgtacgttcgcaaaactggccgcttttagcgaccgccgttcagcgcggccttaacgcgccgctggcgtcgtcctgcgggcggttgtttgatgcggtggcctgtgctctgggtattgaaacacaacgctatgaaggcgaagccgcctgcaggctggaggcgctggccgcgcagtgcccgggtgttgagcacccggtgacgcttcaggttgaaaaccttgcgttcttctggcggcagtggctggcctggcaggcgcaaccctgtgagcgcgcgtgggcctttcacgacgcgctggcaaaagggctggcggcgttagcccgacaccatgcccgacgcctgtcgctctctaccgtctgtttcagcggcggcgtgttgcataaccgcctgctgcgggcgcgtctgcgggtacacctctctgatttcacgcttctttttccccatcatctgcctgcgggtgacggggctatctccttcgggcaggcggtggttgccgcagcccggtcatgttcaaaaaggatgtaa

SEQ ID NO: 124329 - DNA, 1542 bp, Enterobacter cloacae
atgcccacaaaaatcgtgattaaaaagaacacgtattttgactccgtctcattaatgtccgtttccaccaaagccaataaattgccaggcgttgagcaggcgtttgtggcgatggcgacggaaatgaataaaggcgtactaaaaaatctcgggctgttaacgccggaattagaggatgcgaaaaacggcgatctgatgatcgtcattaaaggcgacgcggccaatgatgaaaccctggcggcgattgaagcgttattcacccgaaaagagagcgcgggcacccatgaagcacgctacgcgactctggccagcgcgaaagtccaccgtcccgacagcaacctggcggtgatttcagtaaacggcatgtttgcggcacgcgaagcgcgcaaggcgcttgaaaacgatctcaacgtgatgctcttttccgataacgtatccctcgacgatgagctggcgctcaagcagctggcgcaccagaaagggctgctgatgatggggccagactgcggcaccgctattatcaacggcgcaggactgtgcttcgccaacgccgtacgccgcgggtcgataggcattgtcggggcgtccggcaccggtagccaggagctgagcgtgcgcattcatgaatttggcggcggggtatcgcagctgattggcaccggcgggcgcgatctcagtgaaaaaatcggtggtctgatgatgctcgacgccatcgacatgctggaggccgacgatgccacccaggtcatcgcgctgatctccaaaccgccagcgccagcggtggcagaaaaggtgttggcgcgtgcccgggcctgtcgcaaaccggtcatcgcctgcttccttggacgcaacgaaccgcccgccgatgaagacggtctgcagttcgcccgcggcaccaaagaggcggccctgaaggccgtgctgctcaccggtatcaacaaagcgtcccttaacctgcatccgctcaactggcccctgattgaagaggtgcgcgcccgtctcactccgcagcagaaatacattcgcggtctgttctgtggcggcaccctgtgtgatgaagcgatgttcgccgcgcttgagaagtacgacgacgtctacagcaacattcagcccgatccggcgaaacgcctgcgcgacattaacgtcagccaggctcacaccttcctcgattttggggatgacgatttcaccaacggcaaaccgcacccgatgatcgacccgaccaaccgcatcagccgcctgctgcaggaggcgcgcgatccggaagtgggcgtaattgtgatggacttcgtgctgggctttggcgcgcatgaggatccggtcggcgtgatgctcgatgccattaaagaggcgcaggcgattgcgaaagccgataaccgtccgctggagatcctcggctacgtgttgggcaccgaccaggatccccagtcgctggcgcagcagtgtcagcttttgaccgatgccggcgtgatctgggccagcagcagtactaacaccggattactggcacgcgaatttgtctgcaaaggggagaacgcctga

SEQ ID NO: 124330 - DNA, 531 bp, Enterobacter cloacae
atggtgatctccatgtttgaatttctgctcggtgtcgttacgcacacacccgcctgggtgtgggtgctgtttatcttccttatctcccgcggcattaaagcccgcaagccggccaccgtgacgctggagcggcttgctatcattccgggcatttttcttatctgggatatttacgatctggtggtctatcgcacgctgactcctgcgactgttgcattgtggacggcggggatccttgccggtgcggcactggggtacttcatgattaagcaggcggctatcacccgagctgaggcaccgcgtagcctccaccgtcaggcagactacaccgcgctgccgtttatgatgctggcgttcgcggtgaagtatgtgctgggcgtgatgagcgccatctctccccatacaatgcagcaacccgccatgagcgcgctggcaattatctcaggcggggtatttgcgggcgtgtttatcggaaaatttgcgcgttatgttgaggtatataaccgtagcgtaccgcgcccggcggagtga

SEQ ID NO: 124331 - DNA, 420 bp, Enterobacter cloacae
atgagcataatcacatccctgatagccgacaccgacaatgccgcgcagcgcgaaaagatggcgtgcctgttaacccgcttattcaacggcgatatcgatccggcagaggtctttacgcccgattaccagcaggttacggacggtcacacgcttgattaccggggatttatccagcacctgagccacgtcagctcgcagactcgcacgatcgccttcaccgtggcggagatagcctgtcatgacgaacttctggctgaccggcatatcgtgacggtcacgtatcctggcggtcgtcaggcagagatcgaggtttacctgtttgccgcgctgcgtgaagggaaaatctggcggatccatgaagtcacgcgggccctcagcggcgatgcttcagatcgcacgctggcccatgcgacagagtaa

SEQ ID NO: 124332 - DNA, 438 bp, Enterobacter cloacae
atgaccaccagtaacgcacttttcacgacccctttcgactgcaacaccgacttcatcgatcttgccgacaattgccaacgctattgcgaagcgctggtggaagagaccaatcccgcgagaaaaatagccctctgcggtcgtcttgcctcgacttttgccctgctccgcccaatgctgctggagcctatccctgagcacttacaggaacgtctcaccgtcgatcggtttcccgaacgtgagcctgtattcaacaccgaatccgaccagctctgccgctactgcgaggaaattacccaactgttgatgactggcgcgctcacgcccggatccgcacgcgtgatgggggatttgctctttgaactcactggatattttgccgaccagctaaaagccccgcgctggttgaggacggaggctggaatcgcgttgctgggttga

SEQ ID NO: 124333 - DNA, 450 bp, Enterobacter cloacae
atggataccgtcgaggcgcttaatggaacctacttctataaaggaatttgcaacatatcggctggtgaactgtttttctggattttgttagataaaattgaagagcagtttggcggcatagaggatgcactaacattgagttgtatcattttaggattgccgatattaaagaccagaaataagccctacggaacaacagcaggaacatctatagcatcaaaatatttacgtcaatatctcaatgtagagttacctgtaagattaccgacgttaactgaagtgagcattgccactttaaaacctaagtatgtgacaaatttgggggcctttgtcgggagaagcctaccagtgattggctggacattggtagccagcgatttggctcaaatatgctataagacacttaaaatgtataacacgattgctcataagaaagaccggatatggtaa

SEQ ID NO: 124334 - DNA, 327 bp, Enterobacter cloacae
atggtaactgaacaagaggttttggctttttttcagaatgaattgcccgttatgggtacatttaccggcaagctcatacctttgcagttagatgatattttacaagactatgcagaggatgatgatttagccatctgtatggataaattcagcgaacgattcaatattgatataacgctgatgaattacaatgcctattacccatggtttcacacatggttttttcgaaaatggtttacggataaacccgtaaagcaaatttctaagcctttaacggtgaggatgttcgccgaatctgcgaaagcgggaagatggttatatgattaa

SEQ ID NO: 124335 - DNA, 486 bp, Enterobacter cloacae
atggctgtaccggtccatttatggctaaaagatgatgcagggaatctgattaagggatcatctgacgtagaacatagagaagggagtattgaattacgtggtttgacacataatttaagtatcccggttgatgggacaacaggaagactcaccggaacacgtcagcacgctcctttcctgtttgaaaaagaaattgacagcgcatccccctatctttatcgggctgttgcaacagggcaaactctcaaatctgcagaggtaaagtggtaccacattaatgatgcagggcaggaagttgaatacttcaatattttactggaaagtgtaaaagttgtttctattacgccaattatgcacgatacacgtaactgtccgggaacagggcacatggaaagcattcaactgcgctacgagaaaatcacatggcgttatgttgatggaaatattcaatactccgatgcctggaatgagcgagctacggtttga

SEQ ID NO: 124336 - DNA, 10641 bp, Enterobacter cloacae
atgagccaaatctctgttatatcgaaacttacgggtgtggaaaccaccacggaaggcactcaggttacgctgagccattcctctatcgttgagcttaaggtagagcgagccaatgtcgctgacttcgcccgcaacggtaacgatctggtgatcacgctacactccggcgaggtgattaccgttaaaaatttcttcgtcaccgatgcgcaaggggcgagccagctggtactgcaggacagtgagggggcgctgtggtggattcaggaccccgccggggcggccacctatgaatctattgcctccactgacgtcctgcttgccgcatccggaagtgatgcaggcggcgcggccatctggccatgggtactgggtggcattgtcgccgcgggtggcatcgcggcggcggcaagcaccggcggtggcggcggtggggatgacgatgatgacaacggcagcaaccccggcacgccgacaaacccttccgatccggataccactccgccgaatgcgccgtccggcctgcagttctcgccggatggtaaaaccgtctccggtaccgccgaaccgggcagtaccatcacgctgaaagacgccgacggcaacgtcatcggcaccggtaaaaccggcagcgacggtaaattcaccatcgacctggggacgccgctgactaacggcgaacaaattaccgccaccgcgacggattcctccgggaataccagcccgggcacgaccgtaaccgctccggacaccaccgcgccggatgccccggacatcctgctggtaaatgacgatgccggcgacaaagcgggaccgctggaaaacggccagcgcaccgatgatgcccgcccgaccttcagcggtatcggcgagccaggcagcaccatcactctctacgataacggcaagcagattggcaccaccacggtggatgctaaaggtagctggagctttacccccaccaccgatctcgccaacggcagccacaccattaccacaaccgcgaccgatgcggcaggcaataccagcccggcatccgctgccgtcagttttgttgtcgatacggttgcgcccggcgcgcccaccattagcagcgcaacggacgatattgatcccggcaaaggaacggtaagcagcggaggcagcactaacgatccgcgtcctcagctctcggggaccgccgaaccaggctccaccgtaaccatctatgacggctctgtcgctattggcacggcggtcaccggcagcaacggcacgtggaccttcacgccatcggtcaatctgggtgaaagcacccaccagttcaccgttcaggcaaccgatgccgctggcaacaccggacccgcctctccggtattcaccctcaccgtggatctcacccctccggcaacgcccacggcgattgtactgagcgatgagaccggggccattaaaggcgcaattaccgcaggccagttcactgactcctctgaaccactgctggcgggacggggagagcctggcggcacaatccaggtctatgacaacggtgtgctgattgggcaaaccaccgtgctgccaaacggcacctggagtctcaggccagacaacccgctcgcggaaggtccgcactcgatcaccatcaaacaaaccgatgcagcgggcaaccagagcgcagaatcccagccggtgaactttaccgtcgataccacgccaccggcgctgcctgttattgccattaacccggtgggaacccaggttaccggcaccgccgagccaggcagcaaaatcgtcatcaccaacagcaacggcgacgtgattggccgcgccaccactgacggcaacggtaactttgttgcgaccctttcgcctgcacaaacagacggcgagcagctttcggtggtagccactgacgcggcgggcaaccagagtccggcggcgtccctcacagcaccggacacgacacccgatatcctctctgtggtggatgatcaacccggcgtcacaggccccatcagccagaatgggatcaccaatgaccgcacccctaccctgaacggcacggcggagccaggctcgaccatcaccatccatagcggcggcgacgtcctcggcacggtcgttgttccatcatctggccagtggacctttacgccatccaccccgctggcagaaggtgcccatgtactgacggcgacatcaagcaacggtaacgtttcaaacgcctggaccattaccattgacggaacggcgcctgatgcgcccgccatcacccagcttgtcgataatgtccctgggggcaccggcccggtgggtgccaacgacaccaccaatgacgcaacgccgacgctcaacggtaccggtgaacccggctcaacgatcaccatccgtctggatggcgtcgatattggcaccgcggtggtcggtagcagcggcgcgtggacctttacgcccaccacgccggttggcgacggcacgcataccctgaccgcgatcgccaccgacgtcgccggtaacaccagcccggtatccggtggatttacctttaccgttgataccaccccaccgccggtcgcgacgctggcaaccgtcaccgacgacgccggagacgttaaaggcccgctcagcagcggcgataccacggatgacacccagccgttacttcaggggagcgccccggacggcacggtcatcaccgtgtatgacggcaccacgctgctcggtaccgcaacgctcgacggcagcggcggctggagctttacccctaccacgccgctcaccgacggcccgcattcgctgacgatccatgccacagatgccgccgggaatacctcgatttctgatccgttcgagctggtgattgataccgtcgcaccggccacaccggacacgccagccatcaccgtaaacccggatggctcagcacccacgtcgctgaacccgggggaaaccacccgtgataccacgccgacgctgagcggtaccggtaatccaggcgatacggtgacgatttacaacggcaccgacaaaatcggtgacgccgtggtggacggcgacggcaactggagctggacgccatccaccgacctgcccaacggcacctatgacattaccctgaccgtcaccaacaaggacggcgcgggcaacgaaagcgccccgtcccagccggtgactatcaccatcgacaccgacgcgcctgccgcgcccgcggtcccggtcattaccgacagcgtcagccaaataaccggcccggttgccgatggcgaaaccatcaacgatccgcgtccggtactgagtggcaccggtacgccaaacgatgtgattaccatttacgatagcgttgatggcggcacgccaaccgccgtgggtaccgtcacggtagacggcaacggcaactggagctggcgtcctgaaagcgctattgacgagggcagccacgaatttaccgctaccgccaccgacgaggcgggtaacgtctctgacccttctacggggatcaccatcaccgtcgataccctcgcaccgaataccccggtgattggcgccatcgccggtgagccgaatggcggtgttactaccgataccacgccaactgtcggtggaacaggtgtgacgggtgaaacggtaatcgtctacaacaatggcgtcgagcttggacgcgtggttgtggctaacggcgaatggtcattcaccctgcccacgcagacggatggcccgctgaacatcaccgttgcggcagtcgacgctgcgggtaacgtcagcgcactcagcccggtctttaccgtcaccgtcgataccactgcacctgagatcccgctgatcaacagcgttgaagacagccagctcaccaacgggacgctctatacccgcgacggtacgccaacactcaacggcaccggcgagccgggctccaccgtgattgtcagcgtggacggtacgccatccacagtcctggtcaccgtccagccggacggtacctggagctggaccgccgacaccacactggcggaaggcccacacagcttcaccgtctcgtcggtcgacccggcaggtaacgcttcaggaagctctgcgccgcttgccgtcacggtggataccgtgcttccggcagcgccggacaatatcagcgtggccgcacaggggacgccgctgaccggtaccggcgaagagggcgccaccattatcgttacagacgccagcggtaacgtgatcggtaccggggtggtctccggcggcaacttctccgtggcgctcagcccggcccagcaggacggcgcggcgctgaccatcaccgccacggatgccgcagggaatctcagccctgaagcctcctataccgtcaccggtacgcagccgaacctcccggacgtgcccgtcattacggtcatcaacgacgatacgaccccggtcacgggcgatgtgaaagacaaaaccaccaacgacacgacgccgacccttgtcgggacggcagagccaggcagcataatcactgtctatcaggatggcgtgcaggttctgctgccaaccgtgaccgccgatgcaaacggcaactggagctatacgccagctctgccgctgggtgaaggagcgcacacctttgaggtcaccgccacgctgaatggcgaaaccagcggacgttcgccggtggcgaccgtcactgttgatctcaccgcccctgacgcgcctgccattggcgcggttattgatgatgtcggtccgggcaccggtccactcacggacgggcagaccaccaatgacaaccgcccaaccctgaccggtagcggcacggcgggcgataccatatccatttacagcaacggtaccctgctgggcaccaccgtggtcggccagacgggtaactggagcttcacgccatccgcgctggcggagggaagcaacgagctgaccatccgtgagaccgatccggcgggcaaccagagtgcgccatcggcaggcttcactattgtggttgacaccagctccaccacaccggtgattgttaacgtcaccgatgatgtcggcaacaccgccacgaccgtggtcagcggcaataccaccaacgacgcaacgcctaccctctccggtacggcggaagcgaacagcgtggtgacgatctttgatggcaatacgcagattggcatcgtcacggcggacggtaccggcgcgtggagctttacgcctgagaccgccctcgtcgaagggccacacagcttcaccgtcaaggccaccgatccgcagggtaacgtcagcctgtcgtcaaacgcctggagcgtggtggttgacctgacggcgccaacggtccccgtgctggaaaccgtcagcgacaacgtggcgggcgggattgtcggtaatctcaccaccggccaggtcaccaatgacaccacgccaacgttcagcgggacaggcgccgtcggcagtaccatccacatcctgaacaatggcgtggagatcggtaccgcaccggtagacagcaacggcaactggagctttacccctaatccggcgctgggagatggcagctataacattcgcatcaacgccagcgatgccgccggtaacgtctcagccaactcgccggtcttcgtcttcacggttgataccgcaggtccttccgcgccggtggtcaccagcgtgattgacgatgtcggtccggtcaccgggacgctcaccagcggcaacagcaccaacgacacaaaacccaccttcaacggcacgggcgaagtcggttccacggtgcacatcattgttgatggcagcgagattggcaccgcggtcgtcaatgctcaggggaactggaccttcaccccgggtaccgcgctcaccgaagggccacatgccatcaccttcaacgccaccgatgcggcaggcaataccggcagcacgtcggcaccgattaacctgacggtggatacctccgcaccgacagcgccgtccattttgaccgcgagcgataacgtgggcagcgttcagacaccgctctcctccgggcagagcacggacgacaccaccccaacccttagcggcacagccgcggccaacgcgaccatcactgtctatcaggacggccagcaggtcggcaccgcccaggctgacggcagcggcgcgtggagctttaccccgtccacagcgctggcgaatggtagccacacctggtccgtcacggccaccgatgcggcgggcaacgtcagccccgcatcgcctgactttacgctggtggtggataccactgcgcctaacgcgccggttatcagccaggcggttgatgacgtgggcacgatcaccggccctgtcagctccggacaaagcaccgacgacaccattccgcgtctcgtcggtaccagcgagccgtttgccacggtgaacatttatgaaggaacgacgctggtgggcaccggtaccgcggatgccagcggaaactggagcattctgctgaccaccacgctggcaaccggtccacatagttttacggctcaggcgacggatgcggcaggtaacaccagcgcgccgtcagcgaccttcaacctgaccatcgacaccacgccgcctgcgcagccggtgcttagcagcattgtggatgacgtcgggaatgccgccacgcctgtcgccaatggcggattgaccaacgacgcgcagccaaccctcaccggcacggcggaagcgggcgcgacggtgaaaatcttcgataacggcgtgcagattggcagcgttgtcgccaccggcggtaactggagctttacgccatccccggcgctcagcgatggtcagcacagcctgacgtttaccgccaccgatgcggcgggcaacgccagcgcacccaccagcgggtatgtgatcaacgtggatgccaccgcgccagccgcaccggttatcagcgcgattgtagacgacgtgggcagcgttaccgggccggtgacgggcaataacccgaccaacgacacccgaccagcgttgagcggtaccgccgaagccaatgcgacggtgcgtatctacgacggtagcacgctggttggcacggtcaccgccgatgccaacggcaactggacgctggcgcagaccaccaccacgctgacggaaggttcgcacagcttcaccgccaccgccaccgatgccgcgggcaataccagcgcgccatcaaccgtgaccacaatcctggtggacctgacggcaccgggcgcaccgaccagcctgcaggtgatcgctaacggaacccaggtcaccggtaccgcggaagcgggcagcaccgtcaccatcaccagcggtaacggcacggtgctcggtaccgcgacggcagacggtaacggcaactttagcgctaccctcaccacggcgcagaccaacggtgaagccctgctggtctacgcgaccgataaggccggtaacgctggcgtcagcgcctcggtagttgcgccatcaaccaacattccaaacgcaccggttatcgccaacattgacgataacgtcggtagcgttaccggagggctgaccaacggtaaaaccaccgatgacaccacgccaaccctgagcggcaccgcacagccgaacgccaccgtcacgctgtataacaacggcgtgtcgatgggtacggtagtggcggatgccagcggtaactggagttttacgaccccggcattaagcgagggatcacacgcctttaccgccacggcgaccaactcagccggtaccagcccgatctcgctctcgacaaccgttatcgtcgacgtgacggcgccaaacgcgcctgccgggacctttaacgctgacggcagcgtattgaccggtacggcggaagcgggcagcaccgtcaccatccgcctcgcggacgggtcaacggtgaccaccaccgcagacagcaatggcgcctacagctacaccttcctcaacaagcagaccgaaggccagacgctgcagatcacagccaccgatgcggcgggtaacacctcgcagccgggctcggtccttgcgccggtggtgccgctctctgccagcaataacgttgaagagctggatctcagtaccaccgccaccgtcaccaacagccagtacagcgactatggcttcctgctggtgggcgccgtaggcaacgtgctgaccctgctgggcaacgatacagcccaggttgagttcaacgtgggcagcggcggcagtgcggatattgtggtcaatgccaacgccacgggggcggtgctttcgctgctcaacaccctggagctggtggtgcagcgtttcgataccgtcaacaacacctggaccaccgtcgtggataccggacaaccgcagttcgccgacctgctgacccttggggccaccggcgtgtcgctgaacctgaccgggctcgctgatggccagtatcgcgtgctgagctacaacaccaacctgctggcaaccggctcgtacaccagcctggatgtggcggtgaaagagaccagcgccgggaccgtaacgggcgacaccagcctggacggtaacgtgatcctggataccgatcctaccgcaggcagcgataacgccccggcaggtacgaccgtctccgccgtgaccaacgcgctgggggtcaccaccagcgttaacgccgacggcacggtgattcaggggcagtacggtacgttgaccattaaccgcgacggtagctacacctacaacctcaccgacaccagtgccgcggtgattggccgcacggagagcttcacctacaccattacccataacggtgtcagcgcgtcggcgaaccttgtgctgtcgctcggttcgggcagcgtggcgaatggcattgtcgccgtagacgacgcggcttccctgaccttcgacaccaccgtccaggccatcgataacggcacatcgtcgcaaagcggctttaccctggtggggatcaatctcggcaacacgctggggctgaacctgctggacgatatgaccaacccgatcatctacaccgtggaggaaggtacaacccgcaccatgacgattcaggcctccgtggggggcgttgccctggcatcggtgttcgacctgtacgtctataagttcaacaacgcgacccagaccttcgagcagatgcgcgttgagccgggctggctgcgtgcgccgctgctgggcggcacctcctcgcagctgacgctgaacctgcctgccggggagtatctgttcctgctcaatacggcggcagggatcaccgcgctgacggcctacaccctgagcgtgctgcaggatcatgtctacagcgtctccagcatcggggagagcaccacgggggatgtgctggcaaacgatccggtgccggatggcacggtggtgacggaagtgaacggtgtggcggttaacagcagtggaacaaccgacattcagggagaatacggcacgctgaccattgattcgtccggccagtacacctacaccctgaatagcggcgtgggtgcggaccatatcagcacgccggacaccttcgtctataccattacggcaccaaacggcgcgaaagatacgggctcgctcaacattaccccaaccgcgcgggcaatggatgcggtgaacgatgtcagcaccgagatgagtgtcacgtcggtacaccatacctcggcttactctgacaccaccgtcggcagcgccagctggaccacctcgttgctaggtaccaccacgggcagcggaagcgggacctttgtggtggatccgaacaccgccctgcatagcgcgtcgctgcactttgacgtcgcgtcgctgctggcgctgggcgggctgacggtgaactggacgatcagtgatgccaacggtgttatccgcaccggctccttcagcggcggctcgctgctgggcggcagtatcgacgtgcccctgactgggctggatctgaacgccgggacctatacgctgagctataccggcagcgtaccggggctgagcgtgggcaatatcaccatcaccccgagcgtgaacggtaccacctactcgctgacccagttcgactccaccagcggccacaccgttgacggcaatatcttcgacggtacggattccgccggggcgatggatcagctgcagtcggtcgatacccgcgtgaccattaccggcttcgacggcaccaccaccacgctggatccttacaccggcagtacgctggtcaacgtcacgggtcattacggcacgctgtcgattggcgcagacggccactacacctacaccctcaacagcggggtgtcgctctcaaccatcacgtcgaaggaggtcttcaactacaccctcaccgatgccaacggcaatacggacactgccacgctgaccatcaatatggcgccgcagttcgtcagttctgagcataacgatgtcattaccggcaccgcgtacggcgatacgctgatttatcaggtgctgaacagcaccgcaggcaacgctaccgcgggtaacgtcagcagtaccgccggcgatcactggaccaacttctcgctggcccagggagacaaaattgacatcggcgatctgctggtgggctggaacggcagtgcgtcaacgctcggtaattacctgcatgtgacgaacagcaatggcagtaccgtgatcgccatcgaccgtgacggtacaggaagcacctataccaataccacgctcgtgacgcttgataacgtccagaccacctacgacgagttagttaaccagcaacacatcgtgacctga

SEQ ID NO: 124337 - DNA, 1419 bp, Enterobacter cloacae
gtgagtgaatgcatagtttcaggtacacagtggggggcacaaaaccccatccgcgaggacgatcttgcggcaaggatcgatgccttaccggcttccgccggactttggcgattcatcgccttgctgtcccttggcggtttttttgagctttacgatctgtttcagacaggctacatcagcgccggtctcattgctgatggcatcttccacaccggccagcagggcgtgttcggtatggccgaccaggccgcgtttgcgtccgcaacctttctggggctttttatcggtgccagcctgctcagcccctatgctgatcgcattggccgacgcgcgacctttatgtatgccctgctctggtacgggctgttctccctcgtcatggcgtttcagcatcaggcagaatgggtgatcttttttcgttttatggtaggcatcggcctcggcgttgaactggtcaccattgatacctatctgacagaatgggtacctgctcaccttcgcacccgcgcctttgctttcgcctttttcattcagtttctctcggttcctgccgtcgcgctgatgtcatggtggctggtgccgcagatgtggtttggcctgagcggatggcggttcgtggtgatcgctggcgcgctggcgtccatcattatctggctggtacgcaaggggctgccggaatctccgcgctggctgctgcagcaaaagcgctttcatgaggtgagaaccgtcatgcaggagatggagaagcgctgcggcagcggcgaacaggcggatttccctctccgcgccgggcagcacaacgaacagggttcactcaagggcaggtttaaagatatctggtctccgcgctaccgtggccgggttgcgatgctggtggtgatgaatatctttcaggcgattggcttttttggcttcggaaactggctgcccgccctgctgtccggcagcgggacatcggtcacgcacagtttgttatacgcctttttcatcacgctggcctatcctctcggcgcgcttatctgcagccgctatgccgatcgaatggaaaataaatggcaaatcgtcttgtcctgtctgaccacggtcatctttggttcgctgtttgcgtttcagagcaacccactgctgctcattgcctgcggcttttttattacctggtccaatgcctggctgacttacagttaccactcctatcagtcagagattttccccacccgaatccgggcgcgagcggtcggcttttgttactcctttagccgtttatccaccgtcttcagcagtataattatcggtctgatattgcaatttagcggctcaacggcggtcattgcctttattgtgatcagtatgctgattgttatgctcaccattggtatttttggtcccaacacgcgcggtatcgacctggaaaatatttaa

SEQ ID NO: 124338 - DNA, 915 bp, Enterobacter cloacae
atggaaaaaatcgagaatttaattccgatggtggttttcgcgcgtgtcgtcgaaaccctgagcttcaccgaggccgcactctctttgggaatgtcgaagtcatcagttagccgggatatttcaacgctggaaaaacgtattggtgcaatgctgcttaagcgcaccacccggaaaatagagattacggagctggggctgagctactatcagcactgcttcaaaatattgaatgaactgcgcgccgcagaacgctttatacgggattattatgaggaaccagcggggacaataaaaatacttgccccggtgacgttcggaaaagagtatgttgtgccagcattaaatgcgtacttagaacgaaatattatggccaatgtcgatcttgatttatcggataaagcggtggatatcaaagagagccagtacgatctctctatcattgtggcgcaggacacgccaacccatgagcacaccaaatttttatgctccatccagtgggggctttatgccacccctgactgtatcgcccggatgcgtcctgtcctgacgccgggcgatctcccggcccacaactacattctgtttcgcggtgtggcgcgtacggtttcgctgccgttcagaaaagagaaacagaaggtcaatattgatgtccatagccgcttcagaagcaacaacagcgtggcgctgatcagcatggcgctttccggcctcggcattgcttacttgcccaattacattgcgcgagaaagcctcgccaccgggaaactggtccggcttttacccggctggcagatggatgaatataaagtgtggctactgtccaaaaataaaaacacgatgacctcaggcattaaacgctttagcgacgaacttcagcagctgatcgccggggccgaggtcaaagcaggctactga

SEQ ID NO: 124339 - DNA, 594 bp, Enterobacter cloacae
atgtcatttatagacaaggccattaccgtattgcgtaatagcgggatcatcctgatccctaccgatacccactttgccctggcagccgatccttacagcccggatgccgtggaaaaactgacgctgttaaaaagatcgccctgtaccagagagatgacgttttgcttctgcgaactggcggacatatgggaatgggtggatgtcagcccgtggcaaagaagcaaaattgaaatgctcagccgggcctgctggcccggcacccttaaaatcagcctgcgaaagaaacagcgcgccgattttcttcccggcgcaggcgatattctcccggtcgtctgcgtgaaaaacagtcagatgcgaaccatcatcagccgcttaggcaggcccctggtggtgatcccggcagggtatccgcaggatgagggcgatcttgtcagttttacgctcgcccgggaagacatgggagactgtgtcgatctggttgtcccgtccaactgcaaaaaccccagccgtaccgccaccacgcatatctctttgctggatgacaaagtctcgatcctgcgtcatggcgagctggatatcagtagcctgctttga

SEQ ID NO: 124340 - DNA, 780 bp, Enterobacter cloacae
atgatgaataagaaagtcgcgtggaatggtcaggttcagccggaagcgattaacgtattatcggctgaaggcggaatgattgtttgccctacgaaagtgggttatatcattatgacctcagataaagaggggctggagagaaaattcgaagccaaacagcgaaaccgtaataaacccggcgtggtattgtgcggcagtatggaacagctgaaatcgctggcggagatgaacccggaaatcgaggcattttatcaggcccactgggatgcagacgtattactgggctgtattttaccgtggcgagaagatgccatcgccagattacccgataacggccttaaagagctgatgatggacggcagaaaaaccagctgcttcgtgattaaatttggcaaacccggcgaaatgattgctaaagagctgtgggaaaatcatcagaaattctcttttgccagctcggcgaatccgtcaggaaaaggcaaccgcggcatggtggaattcattggggaacgcatcgaatcgcgtgcagacttaattatttgtgccaacgagtacgttaagtctattcagcctgatgaaacccaggagagtcgctatgaacaaggcgtgatggtgtccatggtggacagcgaagggaaactggtccctgaacagggtagtaccagaaaagtaactccttgcccggtattaattcgcaaaggtctcgacgtgaataaaattattaatttcatgtccgcccagtttaatacctgggactatcgccacggcgattactattaa

SEQ ID NO: 124341 - DNA, 477 bp, Enterobacter cloacae
atgaaagtatctattgcaggtttaagtgactacgcttttctctccaaagcgaacgaatatcataattttggggggaatggcgataatgtctcgcccgccttgtcctgggagaatgtcccgcagggaaccaaaagttttgccgtaaccgcgtacgatcctgatgcgccaacgggcagcggtttctggcactgggtggcgtataacattcctgccagcctgaccgggcttgcggcaggcgcgggaaacccggcgaacacacccgacatcaaacacgccaactccgattttggtgcgcctggctacggcggttgctgcccgccagagggcgatattccgcaccgctatatcttcaccctgcacgccctgagctgcgatgacctgggcgtgacgccggatctgccaaacgcggtgatacgtttcctcatcaacatgcatacccttgagaaagccagcgtcgtcacgctgtataagcgttaa

SEQ ID NO: 124342 - DNA, 1227 bp, Enterobacter cloacae
gtgattaaccgattcagagcggttttcgcccggcatagcctgctcaaatggggcgtggcgggtggcgtgctggtggccattgttctgctgttttttgcgggaatgggggtctccagcaaggaggcctttatcaatggccgaatatccacggtgctctccccgctgccgggacagctggtgctggcgaagaacatcgcgccgggacaggcggtccgggcccggcaatcgctgggaaatgtggtcaccacgcaggcgaacgaccagatccccggcctggtggcccagcgcagcgcgctggagatccagcttgctgaactcgacaagcaaatttcggggatcgatcaacgactgcaggtttatcagcagcagcggcagcagtacctcgccgagagcaggatgcagcagcagttaggtgagaaacaatcggctgccacgtttgtacaactgaaggaggagctgagcgcaattacggcgcaaactgccttctcccgacagcagcttcagcgctatgaaaatctctaccagcagcgtttcatcagccgcatggagtatgaagagcgtaagaacaacacccgggtgttgcaggccagccaggaggcgaaagcagccgagctgcgtcagcgtttactggacgtgaatgccgccaaatccggccttcagctgacagggccaagaacgctggatgcgccacagcagaatcagcgcgatatgtcgctcacaatcgagaatatgcagcaggagaagctacagctgattgcccgcaagcaggcaacgacgcaaagcattcaggaagtcgctgcgctccttcactcccgtcagcaggcggcgctcaacagcagcacggacggcgtgatctgggacgtgacggaggagagtggtgcgagcgttcagaacggcaccccgattgtgcgcattctggattgccgcacccgctgggtagaggcgttttttgatgaggctgacgccggcagtctgcgcccggggatggcggtaacggtgcgtctgaccaccgcatccgccacgcgctggaaaggaacgataagaaccctccgcgcagggagtggacgcgtggcggtcggggagagggacgtacagcccccgcctgaaatcgcgcgccggcagttgcccgtgaaagtgctgactgcacatatcgatatcgactggaaagacgtgccggatcccgccagtttctgcctcgcgggccgtagcgtaaccgtcaacatttaa

SEQ ID NO: 124343 - DNA, 606 bp, Enterobacter cloacae
atgcagcatatacataatacggtcgccgccctgaagcgcggcgaggtggttctggtccccacggacacgaattacgccctggcggcagacccgtggaatattgacgcctgccagaaaatttacgatctcaaaaaacgcgaacgacagaaaccgctgacgcttttcgtcgcggaaccggcgcaggcatgggattacatcgccgtcgataaggtccagcaccgcgctgcgctcgacaaactgattggtgccatgcccggcgcgctgaatgtggtggttccggcatcggacaatgtgccgcagaacccgtatctgaagccggaatccatctctctggtgtgcaatcatcagagcgtgttgcgagaggtgattgcgctgtttggccgcccgctggggatgagttctgccaatctttccggcgtggagtctgactacctgatcgacattgatgccgcccgccagacgtttggcgaccgtgtgggctatattctgcccgcagcccagcgtccggtgacaacggtctccagcaccatcgtctcgttactggagaaggagattaaaatccttcgtgcgggagatatggatattatggcgatgctggcgtcatga

SEQ ID NO: 124344 - DNA, 1227 bp, Enterobacter cloacae
atgacgacgcgccggttacatcccgggtctggcaaccatggcctgttcctggcctaccgtattatttcccgttgctatttccatcttcccgtcttgctgctctatttctggacaatagacatggggatgtaccggattattttcctgctggcgctgtatggattgaccagcaccttcagcagcggcatacccggctggctactgcgcttcttgtcatccagacagacggtgattgcaggcgaactgatgaaggcgctgggaatggcgctgatgctctggagcacccggcaaagtgaggttaacctctctctgctggtggtgtcgcagctgcttggcggcgcgggatttaccattgcgctgaccacggatgctgccctgctgcgccagctcaccgcaggcgatcagcaccggtttatgcagatccagaccacgtcgcaaagcgggatgtttattgccaccctgatcgccggatcgctggggagtattctgtttgactacaacccccagtggccgtttatcgccgccattgtggtgagcgttatctccgccggatgcgtggcgttgattcgtgtgcaggaggcagagcccgaaactgcccggcctgttgagcgggtctctttttcgcccagaggggaccagctcttctggatactgttctattccatttcacgcgcttttacgctggcgccgttcatcggctttatcccgttctactttattatggtgaacgtcgacccgctgcttttcggtgccgtgctgagctgctttacactctcgtcctggggggcgatcaaaatagccgggccgtttatcgcacggtttggggtaacggcgttactggcgacgacaagcctttttatgacggcggcgctggggctttttgccagcaatgaatggcttgcagcgagaggcatggactattttgtctccgggctgctggcgctggtgctgctggggtttggctccgggacgatccggcccgtcacgcttgctaacctcgatctctctgccaataccccggatgaacgtatgcgcgtgttcgggcgcatggagcgtgatttcgggctggccaatgcttttttactggccgttggggcgtggctgctggtgagccgggacttttccacgctgatgctgatcttctgcctgatctatattctggtgatatgcatatctgcactgctttacttaaagaatttgcgcagcggggagcacagttccacctga

SEQ ID NO: 124345 - DNA, 1356 bp, Enterobacter cloacae
atgaatattcacgaaactgatgattatgcgtcggtaaatataaagccggggatgacgttaaccgaaaaaataatcgccagagccagcaagagatcgcatgtttcaccgggtgaagtgcttttcgtgaatgttgatgtattaatgtcccacgatccctgcacgcctggcgtcgccagcgtatttaaaaaagaatttggtgaagaggcaaaagtctggaacccggatcgctttattatgatccctgaccactttgtttattccgccgacccgcaggcgaatcaaaatattcgggtaatgcgggaattcgcaaaagcgcaaaatattacccatttttatgatgtgggcaccccggactataaaggcgtgtgtcatatcggcctggcggaagggggacacacccggccgggagaggtgttgttggggaccgattctcacaccgtgaccgccggggcctttggcaccttcgccattggcgtggggatcaccgacggggcgtacgccctgggtacgggggagatcccgttgatggttcccgccaccataaaagtgaattactacggtaaaaaagcgaaaagcgttcaggcgaaagatttaattctggtgttaatgaaagagctgggcgtggaaggggcgacctataatgccatcgaatttaccggcaacgtcatcgatgaattatcggtcgaagagcgaatgacgatgtgcaatatggttgtggagtgcggggctaaaaacggcattatggtgccaaaccaggccacgctggattacctggcgaccagaaccaccgtcccgtattccgtggtgacgcctgatgaaaatgcgcattacgtccgcacgattgatattgacgtctcggcattaaccagcgtgattgcgcggccacactccccggataatgtggtggcagtggcacagctggaaaatattgccatttcgcaagcctatattggctcctgcacgggcggtaaaacggatgattttatcgctgctgcggaaatactgtggcagcgcaaggtggccatcccaacctacgccgttcccgcgaccaaagaggtttttcataatctgatcaccacccaggtcaagggccgatccgtgtatgaaattctgacccgggctggcgttaaattatcttctgaacccggctgcgcggcttgctgtggcgggccagcggacacctttgggagagtcagggatccgataagcgtgatctccaccaccaaccgtaactttgtggggcggatgggaaataaaggcgcgatgatttatctggcctctccttatgcagtggctgctgcggcagtgacaggttttattactaatccagaacggtacttaactaatgactattaa

SEQ ID NO: 124346 - DNA, 540 bp, Enterobacter cloacae
atgactattaataacgtaatgcgcggtacagtttatgtgttaggcgacaatatcgataccgaccagatattaacggctgaatatttgaaaattaacccggcctctgccgaggggcgtgaagagctggcaacgcttgccatgtgcggactgccggaaggggcgctgccgtttatcaatccgcagacgcagcgagcagggtatgactttattgtggccgggaaaaatttcggctgtggctcatcgcgcgagcatgcggtggtggctctgggggcatccggcgtgaaggccgtcgtcgcccagtcgttcgcccgcatatttttccgcaactgtgtatccacggggcaaatcatgcccgtcacgctgaatgaaggctgtgatatccgtgcgctgaaaacgggggataccattgaaatcgatttagacgctcatcagattggtactgctgatgggattctgaaaaccgctccggtaggggaacttgcgaacattgtcgccgccggtggcttgttcgcttacgcaaggcaaacaggaaagatttaa

SEQ ID NO: 124347 - DNA, 1011 bp, Enterobacter cloacae
atgatcacccagctagagtttaacgatcttcaaaaagatgagctatcaaaacttatcagccgtgtcaccatcagcccttatacagactacaaactcttcaagcagtccatcaccgaactcattgaaaatggtctggtgcccactttttttgttcaggcctgcgagcgcgtcaggcaagagcgcaaggatcaaggcattaacgcgcatttattaaaaaacgtaccactcgacaccatcattcctgaatttgatcagtccaatcccgttaacgataagtacgctaaaaagctcacctttgtaggagaggccctgctggagctgttcgctcagctcaccgactcaccgttactggcctaccgtacgcgcaacaacggtgattttttccatgatgtttatgccgacaaaaaatacagcaacacacaaacgcaaaaaacggacggcgaactttattaccacaacgatcgcaccgctcacccggtacgtgctgattttctcagtttattaggcatgcgttgcagcgaagaaaacctgatttttaccggctacctggacggtaaagcgattctggataatttaaaggctgaatcccaggagtggttacgcaagccactttttattaccccttttgatgaatactctcgcgactcgaacgccagccagattgattctgagctgcatccgatcctggagaatattcatactttccgttactacgacacacgcacaacgtattctccggatgcgccagcagaggcgatcaaagcattaattgaccttaaggtggccatcaccaaagcggcaaaaggccgcgttgctattaacaaaggcgacctgttctccttcgccaatcaggactctttacacaaccgggaaatcatccaggtgagagatccctactctgcggaaaaacgctggctgctgaaaacatacagcttccgtaatcccgaggtgatgaatatgtatcacaactacttcgatgccgatctgccggggtttgtggtcgccgagtaa

SEQ ID NO: 124348 - DNA, 411 bp, Enterobacter cloacae
ttgaagccattatttaacagaatactcaccttaactgacgcagaactgctcgcccgcgtccccgtctggcacgccttatcagaactttttaccgggcgcgaactccaggagtatgactatcaatggatggcagaggtgctgaaaaaatccggattaaaccgggaagagatcttcagaattgtggatgaggaagtcgcccctgctctacaggctaacctgctttacaacccaacgccggtgatggacggttggtcagaaaaagacatcaaacggcttgtgacagcgtatttgaacagaaagccgacaattatcgaacgcatcattccggcccgggtacttttaaaacaacggcgcaaacacatcagcaaggaacttaacaggctatccgctgagcttgataaaggcatgtaa

SEQ ID NO: 124349 - DNA, 492 bp, Enterobacter cloacae
atggaaacatacccgaaattaatgatgcagcaggttcaatcactctctctgatattaacccgcgaagcgaacgagctaacccaggctcagtgtgacgtcatgctcaatggcgaaagcatgggtattctcgttcccgggcacatactggaagctgcggttcaggttaatgaccagcgttatatcctgtttctgacagacgacgtcattttcgaggaatcgttgaccattgcccttatcgacgtgcatgacgggcttaaagaaattgttcgtttaggtaatgaatactcgacaggaagttttgctgacctccagatcactgacgatagcgtgaatttcaggtttattggggattatatctgggcagtggagatatcagattcacctcgcttgcacctcccttttatttccgacccgaaaggtgttaaacggaagtcaggcctgaaaaaatacatagcgatttctgccactcccacgccggaaaacataagttga

SEQ ID NO: 124350 - DNA, 801 bp, Enterobacter cloacae
atggatatttcgcttcttacaggacaacggactaacgcatggtcagcgaccatgattaatcttgaagctagaaaactcattaacacagcaaacatggtagcggctagccacctcaaagatgggctcaccagaattcagttcatggaagacattaagtctttcatcactgagcaattttctcttgcccgcaaagcgaagtctgaggaagaagggatttcctacataaaaaatctaagggcagagaatgaaaatcttcttgaacaggatcggctactcaggacgaaagctgcacagatttatgccaaagttgaattcatcaaggaaaacaacaaaatcgttggctatgtgatctccgctgtgcagattgtttttgcaggtttacaagccgcaggtggattgatccttgctagttcaatgacacctgtcggggtcttgttgggtgccacattagtgattgatgcggcaaataccgtatccagagaagtaaataatcaattactgaacaaacctgggtcacaagggtttgttgctgacacagcgatgtcagtagcggagtttatgggatttcgcagtgaaacaggtctggcagcctataaaacggtaagtcttgctgcaaatgcgtacagcgtattcggtttacttcgaaaaccaggctcctggcgcctgttttattttatgcgctcagatttttacagaaaaatggactcaatgagtcggccaaaactaactatgaaaatcatcggatatggcataaacgcaaaaatcgttttcgacttactgactattgataatccttcctaa

SEQ ID NO: 124351 - DNA, 300 bp, Enterobacter cloacae
atgcaggcgcacggcgcggagtacgccgccgcccttgtccccgagctgatgaattattccgggcagcattccgccattcagcgctgtgccatgcagcactcagtcgactatcttcgtgaggcgttacaggtctggctggccgccggtgaaaaaattaattattcggtgcaggataatggcattttaacgaccatcggattcaggctagacgcggcttcgtgggatgataatcgtgaaaaattcacacctgtacagagcctgaattacccccgccgacgcgcagaactggccgcgcaatag

SEQ ID NO: 124352 - DNA, 1770 bp, Enterobacter cloacae
atggacgaattaaacattggtaaagtcacacaagtaaaaggaaccactgtcaaggcaaaaataaaccatgacttgtaccaatcaacttattttcacaatgggaaaatactgcgcggtatatccataaatgaatttgttttagttcgcaaaggctatcaggatattgtaggtaagatcatcggtgaggaaattgttgagaattttaacattagaatcgatgacattgaacagaaaaggtacgaaagatttgttgagcttaatattctcggttatttttttgaagataagttttactctggtataaaatatcttccaatgataaatgatagactgtatttaatttcggatgataaaatatctgagatatacagctttagtaaaagtactaaaaccccactaatcaatattggtaaatccatgttggaagaattaccaataaacatcccaataaacggtgtttttaattctcatatcggaatttttggaaatacagggagcggaaaatcgaatactttagcaaaattgtatcaatcacttatcaatcgaattgataacaccgaactgtttagtagcaaatcaaattttgtcttaatagatttcaatggtgagtatggaacacttgagagttcctttccagatctgtgccattcaacaaaacttagcaccaaaaaaggtggtgataaaattcatttcggagaaaaagaattttgggatgacgagctattatcagtgttattttcagcaactgagaaaacacaaaagccatttttaacccatttaataaagagcaaattgaaatatgatgacgatcttagtgagtatctaaaaagaaccattgaaataatgtttggtccaaaccatcataaagaaactgttaatttacttaaaagcctaatatcttattttgatgaggatgcccaacaaaaaataagagatgaactatctttattcacttggcattcaggtcaagataaatatacacatcctgctagttggcttgataacatagcagacgttctgcaacatactcaaacaatttacaacagcaacttccatgttaccagtgtatttgacgaaattgccatacgtgcaactctacaactaataaactctgtttccaggaactatgttcaatatgaacacatatacccactaataaataaaataatagcaatgagttcatccctagcaaaagtcatagaaataaatgaaaatcaaaaaaatcataaacccatatctataatatcccttaaagaatgcaatcaatccatcaaaaaaaccattccaatgatgattgcaaaatgttcttttttagaacacaaatcctctgaaagtacaaaagaaagtttccatttaataatagatgaagctcacaatattctttctgagagctctgtaagagaggctgagacatggaaagactaccgactcgaattatttgaggaaataataaaggaaggtaggaaatttggttattttgttactatttctagccagcgaccatttgatatatcaccaacaattgtatcacagctgcataattattttatacatcgtttggtaaatgaaaatgatctttaccttcttaaaaataccttaagtaccttggatgcagcttccagaacgctcataccaacacttcctcctggtgcatgtataatttcaggcaccgcattccatactccactgcttgtacagatcgatagacttgatgaagaaagtgctccacaaagtgacacgcttgatcttgagaatttatgggatctttaa

SEQ ID NO: 124353 - DNA, 1116 bp, Enterobacter cloacae
atgagcacgagagaatttccatgcaaagcatcaaacatttatgacaaaaacataaacttcctatttggctcaggagcttcagcatcgtatatacctaccttgtggattgcagaaaatactacttatgagactttattaactcatgaagattgcaaggacgttagggatttcatcttatgttcctattttaacaaaattattagaaagacattttgcatagagccaacttcagaaaacaaaaaatatagttcaacgttaactagctatacaaatttccttgatgaacttgtaaccttattagagaaaaaaggatccaatcaaataaggagagcaaatattttcacaactaattatgatcttttctttgaaacagcagcagataatgcattaaccaagaaagcgttccatttcaatgatggtgctttaggttttaaaaatagaagattaaatattagtaattttcatattactacttggcatcaaggtacgcatgacatgtacaaacatgaactgccaactgttaatttaattaagatgcatggttcagtctcatggaaaagagatgagaatgaaacgataagtattaattatccaattacttcacctgcaataataaaattagagacagaaaagaccatagatgatttagtaaatactctaaataacaccaatgatgatcttgttgactacttagatttaaatattaatgacctgaattcacttgatgaatttaaatcgtattataactcactcgcaatcgttaacccaacaaaagagaaattttcagaaacggtatttcagcaacattactatcaaagtttaagattattaagttatgaactagagaagccacaaacagtattaatttgtttcggattttcatttcaagatgaacacatccttgaaataattaaaagatctttgagcaatcctactttgaaaatctttgtgttttgctataacactcaaagtaagcacgatataaacatcaccgtaaacgattctagaataacctacatttacccgaaagaagatgatcataaaatatcttttgatactttcattgatagagttttcaaatcagaaacaggagattgggtcacatggacgaattaa

SEQ ID NO: 124354 - DNA, 639 bp, Enterobacter cloacae
atgatttatgcggttcacactggtttgattgatgccaacccagcatcagttattgggatggcctttgagaaacccaaaaaacaaaatatgccaacgatacggccagaagaagtgtcaaaactcatgcgccctttagtgatgtcgaacctctctgtttcgacccgctgcctgattgtgacccttgtgcgcccttctgaggcctacgatgctcgttggactgagatagacctcgatgcaaaactctggactattccagccgaacggatgaaaactaagcgggagcatatagttcctctatctcttcaggctttagagattcttgatgtgatgaagcctatcagtgctcatcgtgaacatgtttttccgagtcggaatgacccaaatcaaccaatgaatagccagacagcaaatgctgctttaaaacggattggatatgggggtaaattagtaggacatggtttgcgctcaatagcgagtactacaatgaatgaagctggtttgaactcagatgtaattgaagcagcacttgctcacattgagaaaaacgaggttcggagagcatttaatcgctcaacttaccttgaaaaaagaaagaagcttatgagttggtggggtaatttcatagtgaatagcaaataa

SEQ ID NO: 124355 - DNA, 1194 bp, Enterobacter cloacae
atggaaaccgaatatatacatgatgattttaatgatttatttgaaagtcttgtaagaacagaagatttaaaacttcctttcactgttaagacagatattataaatgatttcaagaataaatgtgaaatttattttaatgccttaaatgattatatagaagataatgacaatgaattatctcggagattgagatctaaactggatagaataacaagaatatactttggcgttgtgagttctttggaatattttttgtcaggtgatatcaaatcctcatatgatactttcgacagaacattttctgaacgatacacagctaactatatccaaaaaatatcgatccccttagagaatatttgcaattcttcaaggcctttattcagggttagaaaatctgatacagcagtaaaaaatagaaatgaaatctttcatataccattctctaagaggcacctggtaaacgctcaaagatactcggttgctggcctaccctgtttatatttaggctcatccctatatgtatgctggcttgaaatggataaacctgattttgataagttatatatatcctcttttatatccagtgaagagagttccaaaatattagatttcacctcggaaattctctactcacgtttctatggtaagactgataatgacaaaatgtcatatatcacaaagatgtcatacatttgtttaatgccactcatttacgcttgtagttttgcaaagattaatggcagcacctcattcactcaggaatatataattccaaatttattaatgcaatggattagccgcagaaataaatcaaacattgtcggaattgcatacagatcgacaagaatgattaaaacaaaccatggagaaaaatctattaacgttgttcttcctcctaaagttacatatcagcaaaccataacaaaagatttttgtcctaagctagtaaaaatgttcaagctaactccccccgtttcatggcaggtactaaaaactttagattactcctttgaaccaagtgaagatgatggtgttaagtctgcctcaagattcttaagaacgaaagaacgtatatcaggtatgcaaagttttgatgacaacattgtcaatctctatcctttgactgatttttataggttagagaagtgtatggacaaccttcttgaatacgattcaatcaaagataagaaatga

SEQ ID NO: 124356 - DNA, 1029 bp, Enterobacter cloacae
atgacgatcagaaagcagccgaacggaaaatggttgtgcgagtgttacccgaacgggcgtgacggcaagcgcgtgcgcaagcaatttgcgacaaaaggcgaggctgtagcattcgaaaacttcaccatggatgaagtgaacaaaaagccgtggctgggtgaaaaggaagatcggcggcgtttgtcagaattgattgagcagtggcactctctttacggccagacgctcgcagaccccaagcgcctaatggcgaaactgaaaattatctgcaatggcctgggcgatcccgtcgcctctgagttaaccgccggtgactttacaaaatatcgcgaagcacggttaaaaggtgaagtacgtaacgaagacggcgcgctgatgtcgccagtaaagccccgcacggtaaacctggaacagcgtaacttatcatccgtttttggcaccctgaaaaagctgggccactggtcagcgcctaacccgcttgccggtctaccaacattcaaaatcgcagagggggaactggcgtttcttgcccaagacgaaattaaacgcctgcttgatgcctgcgctgattctcaaagccccagcctgttaatgatcgcaaaggtatgcctcgccaccggcgcgcggtggagtgaagccgaaaacctgcagggccaccagttatctaaataccggatcacctataccaaaaccaaaggtaagaaaaaccgaaccgtaccgatatctcaggatctgtatgacgagctgcccaaaaatagaggtaagctattcacgccctgcagaaaagcttttgagcgcgcagtaaaaagagctggtatcgacttgcctgaaggccaatgtactcacgtgctgcgtcatacattcgccagccattttatgatgaatggcggaaacatactggtattgcgcgatattctgggtcatgccgatataaaaatgacaatgatttatgctcactttgctcctgatcatttggaagatgcagttacgaaaaatccgttatattcattaaattattctaaaggataa

SEQ ID NO: 124357 - DNA, 633 bp, Enterobacter cloacae
atgagtttaatcaaggcgggaaatgatagtggtggccgtgatgcaatcaacaggcttattaaggcctacaatttcagctcacgccagcagctctgcgaacatctggacgtatcgaaaagcactatggctaacagatacttaagagatagtttccccgccgaatgggtaattcaatgcgcccttgaaacaggaatttcccttctttggttggctaccggtcagggagatatgtatgcgagtgagaacgaagaaaagaatctcaaaaacgaaacttccgtcacggtaagaccactttctaaaatcgtggctcccagtatcaaacatgctgaactgaagaacggcgaactgcatccgagtgatgaaatccttctcgatagcagactgctggatggtgaatcgtccaactctctttttgtaaaaacagctagtgatagctttgttgtggatacctctgtgaaacaaatcagcaatggttattggctggtagacatcgacggcgttaaaagcttggttaagattgctcgcattcctggcaataaaattgtggttcatcaggatgaagcatcctttgagtgcgccgtagatgatgttgaggtagtaggccgcgcagtaaaagtcattaagagcatctaa

SEQ ID NO: 124358 - DNA, 243 bp, Enterobacter cloacae
atgagcacagatatttcaattcgtgtaccaaaagagatggctacgcctgcggaatttgccgaatgggaaggcatttcacgcggttctgtgtatcaaaaaattcaccatggccagcttgctaagtacatggttaagaaagaaaaaaataagggccgtgtaagcctgcgttacttaatgtacaaaaccgatcaggtccgtgagtctcttggtcattccaacttccgcgtcattgttggtcagtaa

SEQ ID NO: 124359 - DNA, 201 bp, Enterobacter cloacae
atgctgactaatgaaccgtcattcgcatcgctattagttaaacaaagccagggtatgcactgcggccatggctggattatcgggaaagatggcaagcgctggcacccgtcccgctctcaggatgaactgctggcagggctgaccactaccaaacgggggaaaccatggctattgaaggcgctgcggcgactgttccattaa

SEQ ID NO: 124360 - DNA, 342 bp, Enterobacter cloacae
atggctattgaaggcgctgcggcgactgttccattaagcccgggtcaacgtatggaagggctgaaccgaatagcggaattaagggcgaatgtgtttggtctgaatattgagccagagcttgaaaggtttattaaagatatgcgcgaccgccgcgatataaaccataaacaaaatgagcgggcactggcagccatattctttatggcaaaaattccggcagaacgtcacggcgtcaatattagtgatctgactactgacgaaaagcgggaactggttagagcaatgaatcattttcgtgcagtggtgagcttatttcccaaacggctaaccatgccgaattaa

SEQ ID NO: 124361 - DNA, 228 bp, Enterobacter cloacae
atggctgactctatggatctcgtacagcagcgggtggaagaacagctgcagcgccacatccacaatgcccgtatccgaaaggttggggcttcttcactggagtgtgaaagctgcggaatagtcattcccgaagaacgccgggccgccatgccgggctgtgatctctgcgttacctgtcaggaaatcgcagagcttaaaggtaaacactacaacggaggcgctgtatga

SEQ ID NO: 124362 - DNA, 858 bp, Enterobacter cloacae
atgagcaccatcctgaaatgggcgggaaataaaaccgctattatgccggaactgattaagcaccttcctagtggcccacgactggttgaacctttcgcgggttcctgtgctgtgatgatggcgacagactatccccattatattgtcgcggatattaatgctgacctgattaatatgtatcaggtaattaaagatgaagtagaacacttcattgctatctcaaaggctctctttgcctgcaacaacttttctgaacagtattatgttattcgtgaagagtttaatcatttgcattccttagacttaatctggaaggctgcttatttcctttttctaaatcgccattgttaccgtgggttgtgccgttataaccgggcagggcatttcaacgtaccttacggcaactataaagctccctattttcccgaagcagaaattcgcacttttgcggaaaaggcccagcgtgcaacgttcatttgtgccagctatgacgaaacattggcgttattggtgcctggggatgtaatttattgcgatccgccttatgacggtactttcagtgcctatcacactgccggttttactgaggacgatcagtatcagctggcctctattcttgagcgccgtgcatcagaaggccatccggtcatcgtttcgaacagcgacactttcctgactcgttccctgtatcgcaatttcactcataaccgcattaacgtaaaacgcagcattggtattgctgcaggcgaagggaaaaccgcagacgaactgattgctgtactcaaaccgaaagtatgggctggctttgatccagccggcggccctgattactcggtcgtgcatgaggtgcgcgcgtga

SEQ ID NO: 124363 - DNA, 189 bp, Enterobacter cloacae
atgcaggattaccttttggagtcattgaaacttcagcgcattgattttttcttaaagctggtagcggcaagcgattgcagcgacgaagaaaagcggctggctatccagtgggtttctgagctgactgacgagctgatggccaaaatacgcaaccatgaatatagccgcacaatggacgctaccagttag

SEQ ID NO: 124364 - DNA, 591 bp, Enterobacter cloacae
atgactatgcctagttattcccctttttttaaaactgtatatgatgaacaatccccagttggacatcttggtcgtgggacgcactactctattttgagtgctgtccagtggaagtcttctctttattcaaatcattccagcccgaaaatccatacattcgccattttatgggatgaagaccatgatgaaagggttttaaatgtccttgaagttgcttacatgtctaaccttatgcctgccgttaaatttgtaggtgaacgcaaaggttcgctttttgtaatcttcgatagcaacttgaaaagcttaggtaaaaccattcttgaacctatgtttaaagagtggtatcgcatctgccaagctggatatgctgacgatgtgtggagttttgagtacggatttgatgacgatcctgcattaacaggaattatcaatgataggaatgagaaagttaatttgtacttagccaatattgctaatttatggcctcttggccagagtgactatattcctgttaatttgttggatagcaataaaccagtgtcgcctccttttttgccaaatagtggtaaatcactgtttaacaaatcttag

SEQ ID NO: 124365 - DNA, 177 bp, Enterobacter cloacae
atgtcatgcacctgcatgaaaaccgctacaagaagcggccaggcgtggcggggctacgagcgcgcggttttggggttaatcgtggttttggcgcttaaatgtcgggcgggcatggtcatttttggggagctggtcgtgcgcgcctgcgccgtggtgaggcgctgcgtttcatcgtga

SEQ ID NO: 124366 - DNA, 447 bp, Enterobacter cloacae
gtggatgacctgcagagggtggatgactggctggcggccctgctggcgaatctggaaccggcagcccgcaaccgtatgatgcgacaactggcgcaggagctgcgccggtcgcaacagcaaaatatcaggctgcagcgcaatccagacggcactgcctttgagccgcgccgggtgacggccataagtaaaaaggggcgcataaagcgccagatgttcgccaaattgcgcaccactaaatacctgaaaaccgcagccactgcggactcttccagcgtgtattttgatggaaaggtccagcgtattgcccgggtacaccattacggattgcgtgaccgtgtaaataaaacaagtttaatcgttaaatatccaaggcgtgctttgttgggattttcagagcaaacgaaagaaatgcttgttttgaatataatgaatgggtttttaaaataa

SEQ ID NO: 124367 - DNA, 1776 bp, Enterobacter cloacae
atgccgaatgaaaatctggatattgattcacggactacagagcagttatatgattggtttttgaagggcaatttaatagtcaatagacgttatcaaagaaaactggtgtggtctttagaagaaaaaacctccttaatatcgtctatgttacaacaatatcccataccattattgctattcgttaccattaatgaacaaagagaaatactggatggaatgcaaagattagaagcaatcatgagtttcattgagcagcgatttacattaaatggagaatactttgatttagactctattgccttaaccaaagaactaaaggacaatggtactttaactcagaaaaatccaaaactctctcgtgaatcgtctgcaactatcgcacgttacagatttgcaatttcagaatatagttcaacagatgctaatattgatgaagtattcagacgcataaattcaaatggtaaaatcttatccaagcaagaactacgcagcgcaggcactgttagtaacttttctgaattagtcagatccatatccactgctataagaggtgatacgagtcactccgatatcatgaacctcaagcaaatgcataaaatttcaattagcaatgatagattagagtacggtgtgaatattgataaccatttttatatcaaacatcatattttaaccaggcggagcattcgtgattcagctgatgaagaactgatcgctaatatccttgcatatattagtcttgaagaaaaacccacatccggttcaacttctctcgacacattttatggacaaggaaactcctcacacgctcagggccttagacaacaattagaagcttatatacaaacaaataatgcaaattctttaaaacagaacttcattgcagtgtatgaattaatcactactttatacgatgggaaaaacgaaactttcagaagccatattttaggtgatgaaaactcttctcaggaatgtcctaggtattatcaagctgtttttttagcaatttacgatctgatttttaataaaaacatgcaattatctgataaggatggtcttttcgaacaactaaaaaacactgggaatagtgtgattattgttaccgatggtggtcgctgggctgcaagcacaagagaaaaaagtgtcaatgaccttattgcaatgataacccgatatttccagccggcacctcaaagatatgtcaatcacgcatggataactgaaatccgcaacctattaacaaactctcgaactgaacaacccagctatgattttaaacagggtttctttaacctatctggtaaacatgatttcgacgatggatgcttaaaaggaatactgcaaacatgcattgcaataaacaacatcggtaaaagcgccaaaggctatattttagttggcatcgctgaaaataaagccacagcagataggattcgacaactttatggcgtgagtcctatcgaattcaacggcttttatataaatgggattgaccatgaagcaatgaattcatctggaagcattgatgattacttcatgttaataaaacaaaaaatccaagaatacaattttacagaaacccttaagcaacaactccttaaaaatattgaattttgttcttacagcggattacacatacttaagatagaaattcaaagcacaggggaagtttgtgattttgaaaaccaattttatattagacaaggctcatcaactgaaccactcacggatgcacaacaaatctcagcccttttcaaaacttatatgaacagctag

SEQ ID NO: 124368 - DNA, 372 bp, Enterobacter cloacae
atgggtttatccgcttcccgcgcggtatgcgcgctggcttttctcttctcttccgttacagcgaccccggtgctggcgcatgcgcacctccagcagcaaatcccggcagccgatagccaggtagcagctcctcaggcgcttaccctgaatttttccgaaggcattgaacccggattcagcggtgtcgtggtgaaggatgcacaggggaacgtggttaaaaccggtgatatacagcgtgacgagcagaataaggcccagttccatgttccgcttgagcagacgctggtgaccggcacgtaccaggttgactggcatgtggtctcggtagatggtcacaaaaccaaaggcagctatcgcttcagcgtgaaataa

SEQ ID NO: 124369 - DNA, 870 bp, Enterobacter cloacae
atgctggccttcatctacgtggggttgcgctttatccatttcggcgcgctgatgctgatttttggtaatgcgctgtatagcgtctggttcgcgccgtcttctttgtaccgtctgatgtcctgtcgttttcaggtgcagcagcagattgcggcgctggtcagtctgttgtcggcgctcctgatgttcatgatccaggcggggctcatgggcaacggctggggagacgtgtttaacccgaacgtctggcagagcgtgctggtaacgcagtttggtagcgtgtggctgtggcaaattatcctgggcgtaattgcggcctgtgtcgcctggcttgcgcctcagaaaggatcgcgactcttgctgctcgccatggggcaatttgtcctgctggcaggcgtagggcatgcggcaatgaacgacggtgcagcgggggcgttgcagcgtatcaatcacgctctgcatctgctctgtgccgccacctgggttggcggcctcctgccgctgctgtattgcatgcatctggcgaaagggcgctggcgggttgcggcaatttacaccatgatgcgcttctctcgcgtggggcattatgccgtagcgggggtcgtgcttaccggcgcgatcaatgggctctttattctgggcattacgctgccctggcagacgggctacgtgcaacttttgttgttcaaatgtgcgctggtggcattgatggtggtaattgcgctggtgaatcggtattttctggtgccacggtttggtgcccacatcgggcgcgaacaacagatttttatcaggatgacacaggcagaggtggtgctgggggcgttggtgctggcaacggtcagcctgttcgcgacctgggaacccttttga

SEQ ID NO: 124370 - DNA, 942 bp, Enterobacter cloacae
gtgtccaatactcacctgcataacgatgtgctctatccgcatcgtacacatattatttccgacctggtcaacggaagatgcgttccgggccccatctggaaaaagcgtgagtatcggctgaaattcctgttacgcacgcttctgttctggtcctctacccgacgcatgcttgaggcactctctggccgggatgactttgatcggttactggccgcgcaaatcacgttacccagtaaaacccaccgccagtacttgatgcgcagcctgaatgccggcgaccgtgctgacgcgatcgtcagccactaccactggattgatggtctgaaagatcccttactcgcccatgcgctgaccagccctcaggagcaacctgtcgtgcagttcagggctaaaaatgaggtgctctataccgtcaacgcctcctccgctcacaaagccgagcgcgaaggtgaaagcacactgtggctgcgcgatgacgagaataccttactcgcaagtctgaccttcactgttgcgcacagcgcgggacaacgggtactggtgatcggcggtcttcaggggcctcgccgtggcgtcacgcgcgatgtgataaaacaggctacccgcgcctgccacggtctgttcccaaaacgcgtactgatggaagtgattttccagctggtcgcacagtcaaacatccgcgccatctatgccgtcagtgatgagggccatgttttccgcgcgttgcgttatcgcctgagcaaaggccgtcatttccacgccagctacgatgagttttgggaaaccctggacggtaagaaacgctcgaccttctgctggcagttgccacttgagatggcgcgcaaatccctggacgagattgccagtaagaaacgggcagaatatcgccgccgctttgagctgcttgatgaaattaaaacggccattaacgcccgcttttaa

SEQ ID NO: 124371 - DNA, 990 bp, Enterobacter cloacae
gtggtctggaaaaatccctggtatgacgcctccctgaagcatcacacgccgaacggttttcagaatacctgtcccgttgggcatcagcccggcgaccttgagcgctggcgtaaagcgcgtaaagaagccggtttgcccaaacctcctgcgctcggttatgacgactttatccgccagtggtggcagcctgtgtcgcttaatcaacctcatgaagatggggtatggtggctggggcatgcgagtatgctgctgcaaatggacggcaatactcttctcaccgacccggtgttttcccgacgcgcctctcccgtaccgttcctgggccccctgcgcagaacgcctcccgctctctctgtggaacaactcacgcagcttgatgcagtggttatctctcacaatcattacgatcaccttgatgacgcgaccattcgccgtatcctgaagcgctttcccgacgtcagtttcttcgtgccgttaggacttgcacagtggtttcgccgccggggagcaaggcgcatcgttgagctggactggtggcagagtatcacctggcaggggataaccctgaccgccgttccggcacagcactggagcatgcgaacattctggaaccgcaatcgctctctgtggtgtggctgggtctttgagggacgacaccgccgtttctggtttagcggcgatacgggttactctccggagctgcttttgatcccggaacgattgggcaaaatcgacgccgccgcgttgcccattggcgcctatgcaccaagatggttcatggcggtacaccatatggatccgcaatctgccatcgcactatggcagcagctgggaagtcccttagcctttcccattcactggggggtgtttgaactggcgcatgaatcactggatgaacctgtcagagagttaactgacgcgcttgttaatttagcaccggttaataattccttcaggatactgaaaattggtgaatatttatccttgtaa

SEQ ID NO: 124372 - DNA, 816 bp, Enterobacter cloacae
atgcccttcagttgccccctttgtcacgcgcgcctgacgcgttctgagaaaagttatgcgtgtccgcagggacatcagtttgatatggcgaaagaggggtatgtgaatcttctgccggtgcagcataaacgctcccgcgatccgggcgacagcgcagagatgatgcaggcgcgacgtgcctttctggatgccggacattacaagccgctaagagagagtgtcgctcagctgctggaccacacgctgacgcagagtgcctccgctctgctggatatcggctgtggtgaagggtattacaccgcaaggtttgccgagattgccgccgggaagggcgcgcagacgacgggtctggacgtgtcgaaagcggcgattcgcgcagcggcaaaacgctacgcgggggtgatgttctgcgtggcctcaagccaccggctgccgtttgaagatgccagcatggatgccgttgtgcgtatttatgctccctgtaaggcagaagagctggctcgggtggtaaaacccggcgggtgggtgataaccgtcacgccaggaccacgtcatctgatggagctgaaagggctgatttatgacgaggttcgcctgcatgctccccattcagaacaactggctggttttgtgctcaggcaggaagaaacagtagcgtatgagatggatttgaaaggggatgaagccgtggcgttactgcaaatgaccccgtttgcctggcgggcaaaaccggctgtccgggagacgctggctgcacaggccacgtttcgctgccagacggatttcagcatccactgctggcagcgcgaaggttaa

SEQ ID NO: 124373 - DNA, 1599 bp, Enterobacter cloacae
atgcaaaccgcacaaacgatcattaaaaactatcgccgaaaacgcgttatcgtctgcgtgacggttgcgctccttacgctcatcctgacgttgggcattcgatttatttcacagcgcaatgttaatcaacaacgcattgtcgatttcgccagccataccgttcgctcacttgaaaacgtcctgctttccctggataaccgccgaccggagttgttggatcttgtcggccagccgtgcccgcaggcgcatctgactctgcgtaagcaggccgccattttacagaccgtccgctcgattaccctgattaaagaggggatcctctactgctccagtatttttggcagtcgcgccgtcccggttcatgaattatttcccgaactgccgtcaggtctgccaaaactgattttatcgaccgataagtggctgcttaaaggcagccctattcttatccagtggcacccgacgtcacaacgcggtgaagagggggtgatggaggtgatcaatatcgatctcatcaccagaatgatccttgagccgccccgcccgcttatcactgacgtggcgttaaccgtgggagatcgctctttacgctacggtcaaggtattaccgacgcgctgaagtttaatgaggctgactcgcgaatagaggaagtctctacacgctttccatttaccatcacggtcagtgggccgggtcctggcgcgctggcacttaaaagcctgccggcacagctgccgctggggttaatgctgagcctggttctggggtatctggcctggctggccacagcaaaccggatgagcttcacgtgggagatcgatatggggattgcggcgcgggaatttgagctgttctgtcagccgctggtgaatgcccgtacgcaggagtgtatcggcgtagaaattcttctgcgctggaacaacccgcgtcagggttggatctccccggaagtgttcatccctctggcagaagaacataacctgattgttcccctgacccgctacgtgattgccgagacggttcgccagataggctacttcccctcccacccgggctttcacatcggtattaacgtggcggccagccacttccgtcacgccgtgctacttcaggatctgaaccgctactggttcagtgcaaacccgagccagcggctggttatcgaactcaccgagcgtgacgcgctggtcgatgcagattatcgcatcgtgcgcgagctgcatcgcaaaggggtcaaactggctatcgacgattttggtaccggcaacagttcgctctcctggcttgaaaagcttcatcctgacgtactgaaaatcgaccagtcctttaccaccgccattggaaccgatgccgtgaactcaacggtgacagatatcattattgcgctgggtcagcggctgaatattgagctggttgcggaaggggtcgaaacggaggagcaggcgcgctatttacgccgacacggtgttcatactctgcaggggtatttctatgcgcggccgatgccgctgcgggattttccacaatggctggcggagagttcacctccgccagcgcatcataacgggcacatcgtgcccttaatgccgttgcgttaa

SEQ ID NO: 124374 - DNA, 1359 bp, Enterobacter cloacae
atgtcagtgagtgaaaaaattccggtccgggaaaaaataggctacagccttggagatgccgcgagtcatattgtttttgactcctcggtcgccattctggcgtattactacacggatatttatggcttacccccggccgtaatgggaaccatgtttcttttggtccgcttattagatgccattaccgaccccgttatgggagcgattgccgatgcaacatccactcgctggggacgttttcgtccctggctgctggcgatatgcgttccttttgcggtgagttgcgtgctggtatattccatacctgattttactgaaaccgggaaaatttattatgccgttggcgcgtatatatttatgaccctgatgtataccgccataaatatcccgtattgttctctgggggcggcgctgacgtccgatccgcgtgaaaacctctcgttgcagtcctggcgctttgccattacgccaattggcggggcgctcggcaccgcgttgattctgcccctggcggactatctctaccccggcgacagggcgaccggcatccaggtggcgatggcgctttttggcgcaatcggctgcgtgatgtttatcatttgttttgtcaccaccaaagagcgcgtccagccgatcaaagaggagaatctgaacatcgcccgggacgttaaaatcctctttcgtaacgatcagtggcgcattctctcgatctacaactttatgatgctggtggcggtggtgatccgcggtggtgcagtggtctattacgtgaacactgttctcaacaagggggctgacgtcatctcgttctttatgctgggcgggatgctggcctcgatgtttggttcggttctggcgcagccgttcggtacccgtttttgcaaggttaaactctcgttctggatcaatattctcaacgctgcgttaggcgtggcctgcttctggctgccgctggagttctgggtcattccactgattgcccatgtgctcattcagattgtccagggcggtaacggcgcgttgcagtggtcaatgatcactgatgcaaataattacggtgaatggaaaacccaacgtcgtattacaggtatgaatgttgcggccaatattttcgtgattaagttgggtgtcgccgtcggtggtgccattctggggtgggtgctggcctggtttaattaccagtcgaacagtacagtacagtcagaatccgccattcagggcgttattttattgttcacgttaatcccatcactcttttatttactcaccgcattctcgatcaaattttataaattaactgaaaacgtcatgaatggcgtggtgagtgatttaaacaaaggcgaattcgctaactcttaa

SEQ ID NO: 124375 - DNA, 1380 bp, Enterobacter cloacae
atgaaagtgaaataccttgcactgctcgtcagtgcgttttgttctaccgcagcaatggcagcaaatgatacccaacgtctggaagataaactggcgcaactggaggcgcgcctcgaaaaggccgaaacaagggcagcaaaggcagaagcacaaattcaggttcttgagcaacagcagcatcccgtggtagctgcaaatcctgtggtggttgaatccacagagcctgcgacagcgcagacggcacctaagcttactttatccggctacggtgatattaaattttatggtgacgttgaatttaatatggatgcggccagcaagaccggcagtttaacgtccatgaaaacgacagccaataaagactgggcacccggtaaccatgaacgctgggatattaacgggcgtttgctgctggggtttgacggctataagcgaatggaaaacggcaattttgccggtttctccgtacagccgctggcggacttaacgggcaaaatgaacctggatgacgcggtcttcttctttggcacggaaaacgactggaaggtaaaagttggccgctttgaagcctatgacatgttcccgctaaaccaggataccttcgttgaatattccggcaacaccgctaacgatctctacggcgatggttatggctatatctatatgatgaaagaggggcgggggcgtagcgacagcggcggtaacttcctgctgagtaaaaccctgggcaactggtatctcgaggttaacacgctgctggaagacggcagctcgctgtttgttgaccagcagtatcatggcatggacctggataacgataaaaacgtcgcctacgtccgtccggtgattgcctggcaggaaggaaacttctcgaccgccatcgcgatggagagcaacctcgtcaacaatgcctacggctaccacgatgcgtccggaagatgggtcgaccagtctgaccgcaccggctatggctttaccatgacctggaacgggcaaaaaaccgatccggatgacggtatcgtggcgaacctgaataccgcctacatggatgctaccgacgagacggatttcaccgcgggcgtgaatgccttatggcgcaatgttgagctgggctatatctacgcgcataaccagatcgataatttcaacaccgccaactttaatgcggattgtgatggcgactgctgggtgaccgatcccggtgattatgatattcacaccattcatgcgtcgtacctgatcccgaacgtcatgaagatgaagaatttcaatatctatcttggcgcgtatgcttcgtgggttgaagcacatccgaatgacggcgatgaccgtaacgacgatcgctatggcgggcgcgtgcgcttcaaatactacttctga

SEQ ID NO: 124376 - DNA, 480 bp, Enterobacter cloacae
atgtctacaccagcatatatatggtttacagatgagaataacgcccctgttacaggtgaatgtttaatgcccacaaggttgggctctaccgaactaaaatcatttaaccactcggtctggataccgacctgttccaacacgggtaaattaacaggaacacgacttcatgtccccatcacctttgaaaaagaaatcgatcgcatcacaccctatctctttcgtgccgtctgtacaggtaaaaccttcaaaacggcattaatcaaaatgtataaaattaatgacgccggtatcgagcgtgaatacttcaacatcattctggaaaacgtcaaggtaacaaggatatcgccagtcttgcatccgctagggattgcaagtgcccaccttgaagaagttgaaatacgttatgaatcaattgaatggaaatattgtgacgggaacatcatgttcaaagacacctggaatgagagagcgactgcgtag

SEQ ID NO: 124377 - DNA, 207 bp, Enterobacter cloacae
atgaggagggccataaagaagatttttaaacttcttctggaagacttgaagaatgatttaaaagcatataccgcgatttttgttgttgtgattctatcaatgataccagcaaccttaattgaagacgatcaaacagcaatgcttattgttggggctatagtagtaatcgttttttatatagcctatttctacgaacctaaaggatga

SEQ ID NO: 124378 - DNA, 705 bp, Enterobacter cloacae
atgtattacagtaaatcgattatcgaaaaaatagggtccgataaagaacttgcattaaggcttgatcgtgccgtagctggggtgaaagatggagccctagaatatctacataatcttggcgatgcgacaacgcgtttactctattatacgtcttgcttcactgaaaattattttgatgtatgcaaaaatttggtttccgaagataaaaggttcatgcttggcattgcagagctagttaaacacagggatttaatatttcgcatggttaagttatacattgaaacaatacttaaaaacagaagcgaaaatgaaaagaagaccatactcgaaaaagtcatacccttcacaacacactattcagttaaacaagcatccaaattgagtttaatttatgctgtcgcaaaatatatatgctatagcaatcaaatgaatgctgcagtgcagagcgcattgatgaaaaaagttgctggaagaacgggaggtgcatttttagtgcttaacgcttacgcattggtccaacgagcggcagacagcgccaataatctcaaaaaattctttccattattttatcatgcattatatatggagaaacttgaaatgatgtacttcctcatcgaaccagtaataatgaaagctggttacctgaatatttacgcaacatcagatcatgatattaccaatgcttttataaaaatggctaaataa

SEQ ID NO: 124379 - DNA, 972 bp, Enterobacter cloacae
atgggtaaacgaagctccctctatttacatccgcagcaacgcgaccaaattcatcatctcgcctcggggtttctctggcgaaccgaactgcccacgtggctgttgatcgccaccatttatggcggctggttctcgacgctggcgttctggcacaccctcggtctgctgcctgccacgctgttgctgattgggtttaccgcctggtatatgtcccttcagcatgaattgatccacggccatcccacgcgtttcgtgtggctgaaccagctctttggcacgctgccgctggcggtctggtatccgtatggcctgtaccgggattctcatctgtcccaccatcgtcacgaccatctcaccattccggtggatgacccggagtcatactactttacgcaggcgagctgggcgcgattgtcgtcctggaagaagcgggtgatccacgcccgaaacacctttaccgggcgactgttgctggcgccgctgctggatattctccagacgctgggcagcgcggtggcggcgtttcgccatctgcaactgcgggcgatggtgatgtggcttgtgcatatagcgttattggcgctgctttttacctggatgatgcacaacggtttctctccgctctggtttgtgctggcggtaagctacccggcgctggcgctgacaaaagtacgctcttttctggaacatcgcgcggcggacgacccgctggcgcgttcggtgattaacgaagcaggcttgttctggcgcgtgctgtttttaaatcttaactaccattcagtacatcacgatttacccggcgtgccctggtacgggcttaagacgatctacctgcaaaaccagcaggcgtaccgggagcgtaaccacgggtttctggtcagagggtatggcgaatggatgcgacggttctggaaaacgtcggtggacgtcaccgtacatccctggcgtcaacaggaggaaggagatgagtaa

SEQ ID NO: 124380 - DNA, 756 bp, Enterobacter cloacae
atgagtaaccggctggcgtttccgatgtatgcggtggatagtaccgatactcttgccctgtggcgggccgtccagcgtctgctggtggcgcgtggtctgccggtggagaagcttattcccggcaggcctgagcctgatctgctggcacactggcagcagcctaatcttatcctgagccagacctgcggctacccgctgatgacacaactgccggaggtgcaggtcgtcggctgttttcaataccgggtaccgggctgcgaagggataaattactgcagttttctggtggtacgtgatgaggataaacaccgcacgctggctgattttcgcggacggcgggtggtatgtaacgcgcccgattcccagtctggctacaatgcgctgcgcaaacgcgtgccgtcacgtgcgttaaacgcctggttctcacaggttatctttagcggcagccatcgccagtcgctgatcgaagtaaaacgtggggaaggggatatcgcggcgatcgactgcgtgacgtatgcgctgttgcagcggcatgaaccgaccctgctggcggggctaactgtgattgaccagacgccccttacgccaggactgccgctgatcaccgcgtccggcaccacccccgaaacgcttcatgccatccgtgatgcgctaaccacgctggtgagcgccccggaataccggggcgtgtgtgatgcgctgtttatcggcgggtttagcgtcgtggcgcgtgaggcctggtctgtgttgctctag

SEQ ID NO: 124381 - DNA, 603 bp, Enterobacter cloacae
ttggaagataaaaacataccaaagcaaagtgatgataacacttcaaataagtcagagattctcaaggagtatgaaagtaaaaaaagttttcaagctttaattgttaggcggcttattgaaacaattcccgttattctaataattgctgtaatcatactgcttattacatcttcaatccgaaatccgggactgtatgtgataaatgaagaaaccctgaatttaattaatgtaacttacaatgccataattactttacttatcccatgttttttcggtggatttggtgctctcgcaagattgatgttgtctggggtacgtttactagataagatttatttgataatgggttcagcattgatggcctcattttcatggattggtataaagagcggtgtgttagtttcaatcattactccacatttatctgggcaaaatatcgatatgaaaagtgtggctgaatctgcccattctttttatacactagctcttgtcgcaatttttgtagggatgttctcaacgaacttgtatttatttgttaatgaaaaagtagaacagctagtgcggaagaataagaattcaagttcggattcaacggagcgctaa

SEQ ID NO: 124382 - DNA, 2289 bp, Enterobacter cloacae
atgaataacaaacgacgtgccgttcccggcatcagaccttacgacggccctgcaggcggctggggagcattaaaagcgacggcaattgccgtgcgaacacagatggatgccctggatgctcccgccacgctgttgcgcaccaaccagcctgacggcttcgactgcccgggctgcgcgtggccagacaaagagcataaatccacgttccagttctgcgagaacggggcaaaagccgtcacctgggaagccaccagcaaacgggtgactcctgagttcctcgctcataacaccgttacgtcgttactggcaaaatctgactttgagctggaaggatacgggcgcctgacccatcccctgcgctatgaccgggcaagtgacaccttccgccccgttgagtgggaggatgccttcgaacgcatcggcgaggttctgcgtgggcttgaaccagaccaggtggagttttatacctccggccgcgcctccaacgaagcggcctggctgttccagctttttgcccgtgagtacggaaccaataattttcccgactgctccaacatgtgtcacgaagccaccagcgtcggtttaccgcgctccattggtatcgggaaaggcaccgtctcgctggacgattttgacaagacggagctggtgatctccatcgggcataatcccggcaccaaccatccgcgtatgatgggcaccctgcatgaactggctcgccgcggcgtgccgatcatcgtcctgaacccgctgcgcgagcgcgcgctggaacggtttgccgatccccagagcgtgattgagatggcaacctacagctctaccgacatcgcctctacctactttcaggttaaagccggtggcgatgccgccgcgctaaaaggcatcgccaaacacctgctgcaaatggaagccgggcgtggcaacgtgctcgaccacgcgtttatcgctgaacacacacagggctttgaagactttgcggcagacattgcgcaaacgagctgggacgccattgagcgcgagtccgggctgagccaggcggcgctgaaacaggtcgccgatgcctacgcgaaatcgaatgccaccatcattacctacggcatgggcattacgcagcataataaagggacttccaacgtccgcctgatcgccgatgtgctgctgctgcgcggcaatataggcaagtccggtgcggggatctgtccgctgcgcggccactctaacgttcagggaaaccgtaccgtcgggataagcgagaaaccaaccccggcatttctgaaccgacttaaggaggtgtttggctttgagccgccctctcaccatggccacgacgcagtgcaggcaacccaggccatgattgacggtcgtgccagagcgcttatctgcctcggcggcaactttgcggtggcgatgcccgatcacgaaaacggcttcccggcgatgagtaagctggatctgagcgtgcacgttggcaccaagctgaaccgtacgcacctgctggtgggtaaagagaccttcattctcccctgccttggccgcacggaactggatatgcaggccagcggacgtcagtccattaccgttgaagattccatgtcgatggttcatgcctcctcaggcaagctgaaacccgcctctcctctgcttcgcgccgaaccggctattgtggccggcatggcgaaagcgaccctgaagacaacccgcgtggactggatgcacctggttgcggattacgatcgcattcgcgatctgattgagcagaccattccgggctttgaggactataacgcgcggatccgggtacccggtggattccgtatgccgctgccgcccacgaaacgtatctggccgacggcgacaggcaaagcgatgttctcggtatttgaaggggtcaatgaagatgccagcggtgaaggcgataacgtcctgcgtctgatcacgctgcgcagtcacgaccagtacaacaccacgatttacgctctcgacgaccgctaccggggcgtctttggccgtcgcgacgtgctgtttatgaatgaagcggatatggcgcagtcaggactggagcacggcgaccgggtggatatcgaaaccgccctcccgggcagcgctcagcgtctggaggatatcactgtggtggcatatgccatcgccccgggctcggtcggggcctactatcctgaggctaacgtactggttccgctcgactatctggataaagagagcggcacgccgtcgtataaatcggtgcccgtccgcctcaccctgcgctcgaaagagatccgaattgcataa

SEQ ID NO: 124383 - DNA, 354 bp, Enterobacter cloacae
atgaaaaagccattgctctttgtcttagccttcgttgcctccgccgcaaatgcccagacgttgcctgatatcagtactttttctcaacaacaaatcttcgaaaactgggtgcagaatcgatgcatcggtaagattgcggacagtaaaagcctgaaagaagatgctgacgccagcgccgcggcatggctggaagcaagcaatctgcctgctgagaattttgaaaaagctgatgaggtgattgtttctttactgaaacagaaggtaggtggtaccgagccaggtcattatcagatattgaagtgcaccttgatcgctaatagtgacgctattcggccactcaaatcctcaaagtag

SEQ ID NO: 124384 - DNA, 804 bp, Enterobacter cloacae
atggaagtgtacgatcttagaagccaaagacttcatccaaaggaattcgaaaagattgtctctcctgtgtatgcacggagcgatgtaggtcgtgaatttgtcgtggttcgtggagtatctaatccatttcacagcatagacggcctgagtatacgacatcgcttcgaatttaaccctaatgcggtattcgatccgctatatgctcagaacctgaataagattgagcgattaattgactcaggggaagtggttttaattgctcaacgccaacgtacaaaatccacttacccttttttcatcgctgaatcgggtgatttattttgtgttgatccggcgatgtacaactcggcttttgtaaattacatcatcgagcgctatcgccataatgttgctctgttcggaaaaccgtctccaacgagagatacgtttgttcccgccacggctcaatatgggcctggatattggaagacggtagacaatgattatcatggcacaaaaaatgttgtgattatggcgataaaccgactgacaagtatgggggatgaggggcgagtttttggatctgacggcaaagattatatgaatacgtcacgtgataaaatccaacattggacgcctttgcctgctgatttagatagtgtttctcgtgccttaatatcggaaaagtctgtaatcaggcgatatggtgaagcacgatcgatttatcaaaagtatcaggaaggggatgatgcctgggctgtaagtggtaaatcatggcaatggataccgggagtcagagaagaagattatgaatttaaaaaataa

SEQ ID NO: 124385 - DNA, 465 bp, Enterobacter cloacae
atgaatttaaaaaataaattatggtgtttctggggatgtatggatgtcctggcagtcatgctttattttgtgaatacaattcggcagggtagaattccatttatttctgatatcgtggcgtttagtggcctttccagcgatgttgcaagcggtggttatagcgttctggtatttcttttttttattttggatttagttctcttactttcgctatttgcttctgcctggttcttctttaaaagaaaaacatatgcgattaagtttgcgattatccaagaggttttgcggcttatttctttcagatgttcagtaacgctattccctttgttagtaactgtgtctggaatatcaagtatttggctgaatttagggttgtttgttttatctgagtgtctgaaattatattctatgctctatttgatgagcaacaggaaaacagaacgtagtttaaatggctcgcgttga

SEQ ID NO: 124386 - DNA, 1101 bp, Enterobacter cloacae
atgatcgatctacattctgatttgaatacgatattgaaatacgtcgataagtatcgtaattacttacccgctagcgatcctgttacccagcagaggatgcaatataattatgataataaaccattagactcatgctcgaacagttatgtacaaaaaaaatgggactcgacaccgtcttgtcatattccatccgaacaatcacgggatcgtgcaataggtgcgcttattggtcttgctgttggagatgctgttggtactacgctcgagtttttacctcgtgacattgctcatgtaaatgatatggaaggcggtgggccatttcgacttcacgcaggtgaatggacggatgatacatccatggcattatgtcttgctgaaacgcttcttgaaaaaggtgatgcagatacaacctacttccggagtaaacttctggattggtatcagcatggttataatagttctaatggtgtttgctttgatataggcaatatgacgcgttatgctttggagcaatattcaaagtttggagcgggctggaacgctaatactgcacccgaagctgcaggcaatgcttctattattagactggcgccggtctcaattttttttagaaattcaataaaaaaagcattctacgaagctaaaaaacagagtattgctacacatggtgccgcggagtcaataaatagtgcacagtatttaagctatttactcgtacttatgattaacggtcgcaacaaagagtttacttttgcgccacacatcctgccgctacagccgcgagtcatgatcgtcaacgccggtgagtataagcaaaaaacacgcgaccagatacgttcaagtggttatgttatcgacacacttgaggccgcaatgtggtccgtatggaatactgataatttccgtgatgccattctactggcggccaatcttgccgatgatgcggatagcgttgcggcgacggcgggacaaatagcaggcgcgttgtatggttattccggtattccgctggagtggagaaacaaacttgtacaacacgaacgtatcacaaaaattgcaggtgaattgtttgaaagggcacctgaaggtattttcgtataa

SEQ ID NO: 124387 - DNA, 435 bp, Enterobacter cloacae
atgcattggttcttctttattctctttatgatttggacgctagcactcgtctggaatggaaaggatttgtataataaaaaacagtggatcctgacaggggggatgttcgtcctggtgttactggtggctgttgttattggttttttgttgaaatggcttgcccagtcaatttcattattttcccttgctacggccaaacaatattcgattatgttttctatgtcttttctgtgcgtatgggggttaaagttcactgtagtgttgctatgcacgattttttccgggataacgaaggggcataaaaggtacaacgcggagaattatgaagaaatgttgtctgtgatgcgtgccgtctctccaggattagttattgttgctaaggccataatttcactgggaggtttccttatgttttcgggtttatggcttaagtaa

SEQ ID NO: 124388 - DNA, 1923 bp, Enterobacter cloacae
atgctcaaccgaattaccgcccagctcccggtcgaggggctgcttttctggaaactctccggccgcgaggcgatgtccgagtcgttcgccctgacgctgaccctgctcggcacggatgcgcgtatcgaccgcagcaaactgctgggccagccggtcacggtgaccatcccgacccagaacctgcttaccccgcgctacatcaacggcaaagtcacgcgcgtggcggtgagcgccgttgagctgacgggcacgcgctatgcggtgtatcagctgacggtggagccggacctgtggccgatgaagcgcgaccgtaacctgcgtatcttccaggggcagacggtgccgcagattgtgaaaaccctgctgggcgagcatcaggtcaacgtggaagataagctcaccggcagctaccgggtgtgggactactgcgtccagtatcaggagtcgagcctggacttcatcagccgcctgatggagctggagggaatagcgtattacttcagccacgaggccgacaaacacaccctggtgctcaccgatgccgccacgcagcatcagccattcagcggttacgaggtcatcccctatcaccagacgccgtccggcggcagcacggacgaagagggcatcagccagtgggcgctggaggacagcgtcacgccgggcatttacagcctcgacgactacgacttccgcaagccgaacgcgtggctgttccaggcgcagcagaacccggcctcgccgaaaccgggcagcatcgacgtgtacgactggcctgggcgctttgtggagaccgggcatgcggagtcctacgcccgcattcgccaggagcgctggcaggtggagcatcagcagattcaggccacggccacggcggcgggtattgcgccgggccacaccttcaccctgaccaacgcaccgttcttcagcgataacggtgactatctggtgacggcggccgggtatcatctggaagagaaccgctatgccagcggcgaaggggagaccattcaccgtatcgatttcacggttatcccggcgtcggtgtcgttccgtccggcgcagtccacggcgtggccgcgcacctacggcccgcagacggcgaaggttgtcgggccgcagggagagagcatctggacggacaaatatggtcgcgtgaaggtgaaattccactgggaccgtctggcaaaaggggacgacaccagctcctgctgggtgcgtgtgtcgagcgcctgggcgggccagggctacggtggggtgcagatcccgcgcgtgggcgatgaggtggtggtggactttatcaacggtgacccggaccgtccgattatcaccgggcgcgtgtacaacgatgccagcatgccaccgtgggcgctgccggcagcggcgacgcagatgggctttatgagccgcacgaaagatggctccgtggataacgccaacgccctgcggtttgaggacaaggcgggtgcggagcaggtgtggatccaggccgagcgaaatatggataccagcatcaagaatgacgaaacacatagcgttggcggcgagcgtagccattacgtaaagaaaaacgaactgcatcgcgtggaagcgaatcagatccaggcggtaaaaggcggaaccgagatcctgaccggcaaaggaaagctggatgcggcggtggagcagtatgtcgttgcctccggcaccaaactgcggctggtgtcaggtgaaagtgcgattgaacttaacgctaacggcaaaattagcctgatcggtaaagagtttaacttcttcgttgaaggggatggtcatatcaccacgggcggtaagctgcatctcaatacgtcaggcgctaagccaggcacaacggcgccgggcacggggcacaaaggagatattgatgcggcggttcaggcgaaattcacgaccaagggtgattaa

SEQ ID NO: 124389 - DNA, 534 bp, Enterobacter cloacae
atgcggcggttcaggcgaaattcacgaccaagggtgattaaggctggagcggtgcttgtcgcgttattagcgatgggcatgccagaaggacacgcaacgaaaaaagatctctggatgttcattgcagagatgagtgcttcacttagaacgctatccaacaccagtgttaatgatctgccgttgcagtttacgctgacgaaagataatgaatacattcacttctatcatgccggtgatgtcaggctggcagaggatatgcgcattaccgggattgatttacgggtaagcaaagagcgcgacggcatggcaccgttattgaatttttccccgtcaggtcagtgcatcacactcgatgccgttaaaaagcattatccggagctagtgttaacggattatccccgaggccgctccggaaatgaagtgaccagctataccgcgccagaagatatgaatggacaaaaggctagtttcagtttctccgtaaataaacctgattgtctggactcggttgtcattagcgcgggcagtgattaa

SEQ ID NO: 124390 - DNA, 582 bp, Enterobacter cloacae
ttgtcattagcgcgggcagtgattaacgtgaaaaattacattttaatatttcttcgttttaccgcgatattttcctctctgaactgctatgtggtgtatgcacatgatatgccgctggttttagttaaccaggattttactgtgcagatggaagatgagactgtcacattgggcgaaagatggacagatgatgttgcgcgtaaaattgaggtaccgatagaaggtaattttgtcggtgaggttccttttgacggaacccactatagattctaccagcatcaaaaggcagggtttgacatatatgtttccaatctctggtgggataaggtcgaacggaatgttgacgattatatcgtatcgcaaattacccttaccgccggggagggcaaaacaccgcgcggtattcatgtagggtcaacagccagggaactcagtaatgcatatggcaagggtcagatggaaaatgatgccggggaacaatggtgtttttatcaattgggtaacaagcttctctcgttcgggattaaagacagcaaggttgtgacaataacaatgaattacgataatggtgcccaagagtaa

SEQ ID NO: 124391 - DNA, 1077 bp, Enterobacter cloacae
atggccaggaaaaatttagcatgcgcattgttcaccgcgctattactgggctcagttgaaacttcagccgcgcttgatctatcgcaatacaataggctcgataccgtaggccacatcgttaacgacagcgaagtgaatgagacgctcaggaagacgctgggcagcgattacgagacgtttattagcaattttgatgtctttggcgaaccccattcaacctcaggcggaggcctgtttgttgaaggctggcgtaacgatctttatctggagaatgcgtcagctttggtcgttgaacctgacggcaaaatctatacggcctgggtcgttcctgagtcagacgttattcattgtcagtcatctgatcatcgtcaggtggtgaatgctgatattcagcaatgggctgccagattcaaagcgatgcattttgcaacgaacagccaggcaaaattaacgtttgatggggtgtgggcaggcacgttcggcactgactcgacgctaaccctgcgtttaacggaatcaggcgaccgtatctccgggtcatattgctatatctctcagagaggaaaccgcatcgattgtcccgcagaggatgaacacaatctaagcggtgctatcacgggcaatcgtgcgaacgttaagttcgactcctcgtttggcggtgtggatggacgagcagttctggaaattaacggaagcaaaatgacgtggcgtttagtcacgcctcctcaaaaaggtcatgattatgctccgctgcgttatacgctaaataaagcggctcccgttcataacgttgaaaccagaaagctggataccgataagttcactatttctctggtaaataactgcgggcgtttcgagagtgagtgtggccagatgtattatcttggcgttcgcaaaagtgataacagtacgatctccttaaaggggaaaacgcttcaggatcccacaggtaaaataaccggctcaacctataagaatggggacgttacctataccgtgacctatgcaccactgaaactggttgtcagcaaaggcggccatattttggttgagcagtcgggccactggcttgaataa

SEQ ID NO: 124392 - DNA, 1002 bp, Enterobacter cloacae
atgttacatactgcgaataaaatgactgtcattgaaatctctgagcctggcgggccagaggttttaacgcccgttcagacaacgattccggtgccaaaggctggggaaattttggttcgcgtcaaggccgcaggtgttaatcgtcctgacgtcattcaacgccagggtcattaccctatgcctgacgacgtaacccctattcctggtcttgaggtcgctggaacggtttcatcaattggagaaggcgtcacgggcgtaaagattggtgaccgagtctgtgctctgacgaatggcggtggttatggtgagtattgcatcgtgccggaaagccagacactgccggtgccagacagcatgtcaatgatagcagcggcggcacttcctgagactctgttcaccgtctgggcaaacttgttcaagattggtggcgcaacacagggtcagagtgttctgattcatgggggaacaagtggtatcggcacaaccgcgttgatgctatgccgcgaaatcggtatcgaggcatatgcgacggctggatcagatgataaatgcgatgtgatcgcagagcttggcgctacgccagtcaactaccggacaactgatttttctgatttcattttgaagcaaacggatggccgtggcgttgatatcattctcgatataatgggtgcatcctatttctcccgaaatatgaggagtttaggaatggatggccggctggtaatcattggcttccttggcggagctttcgcagatcaagtggatctgcaagaactcgcgttgaagcgagcggttgtcacgggttcaacgatgcgagcacgaacttcggtcgaaaaagccgaaattgccaatgacttgcttaaaaatatctggccgattctcaatgcaggtcgttgccatcccatgattcacagcacattcccgttacgcgaagcagcacgcgcgcatgcattgatggagtccggcaagcatgttgggaaaattgttcttacggtgaattag

SEQ ID NO: 124393 - DNA, 576 bp, Enterobacter cloacae
atgacccagggcaccttggtggatgccaccatcattcaagcccccagctctaccaaaaacaaacacaacagccgtgatgaagacatgcaccagaccaagaaaggtaaccagtggtacttcggcatgaaagcgcacattggcgtggacgccaaaagtggcctgacccacagtctggtgaccacggcggctaacgagcacgacctcaatcaggttggcaagttactgcatggcgatgaagaatttatctcagccgatgctggttatcagggggccgaaaagcgcgatgagctcagcgatgtcagcgcagactggcttatcgccaagcgtcccggcaaagtgaatgcattgaagcaacacccgcgcaagaacaagctggccatccgttacgaatacctgaaagcgagtatccgagcgaaggttgagcatccatttcggatagtaaaatgtcagtttggtttcgtcaaagccaggtacaaggggctggctaaaaatgacagtcaactggcgatgttattcaccctggcgaacctggttcgagttgaccaattgatacgggcacaggcgagatctacctga

SEQ ID NO: 124394 - DNA, 705 bp, Enterobacter cloacae
atgaacccattcaaaggccggcattttcagcgtgacatcattctgtgggccgtacgctggtactgcaaatacggcatcagttaccgtgagctgcaggagatgctggctgaacgcggagtgaatgtcgatcactccacgatttaccgctgggttcagcgttatgcgcctgaaatggaaaaacggctgcgctggtactggcgtaacccttccgatctttgcccgtggcacatggatgaaacctacgtgaaggtcaatggccgctgggcgtatctgtaccgggccgtcgacagccggggccgcactgtcgatttttatctctcctcccgtcgtaacagcaaagctgcataccggtttctgggtaaaaccctcaacaacgtgaagaagtggcagatcccgcgattcatcaacacggataaagcgcccgcctatggtcgcgcgcttgctctgctcaaacgcgaaggccggtgcccgtctgacgttgaacaccgacagattaagtaccggaacaacgtgattgaatgcgatcatggcaaactgaaacggataatcggcgccacgctgggatttaaatccatgaagacggcttacgccaccatcaaaggtattgaggtgatgcgtgcactacgcaaaggccaggcctcagcattttattatggtgatcccctgggcgaaatgcgcctggtaagcagagtttttgaaatgtaa

SEQ ID NO: 124395 - DNA, 441 bp, Enterobacter cloacae
atgtcagtcgtaaattccagcgtcgatttgcctgctgaggtctcaaaggaccgtttcgccaggggatctgctacattcgccgcagtcaccggcattcccacggaggcataccttgatggatttaaggatagctcgcctgattttggtcgctatgtgattgagtgggtcttcggcgatgtatacagccgcaccgatttggattggaaaacccgggaactcgttatcatcgcagccggcgcggcgttgggcgcaacgggaattgatgtcatcaaatttcatgtccccactgcggtacgcgcgggtgcaacccgagaccagattttcggcgttcttacccaggtagcgattgttgcaggtgttcccacagcaatcgccgcaatttcggcggcggcacaagtcttggggccacactctcaggtcgctgatggtgccaaggcatga

SEQ ID NO: 124396 - DNA, 174 bp, Enterobacter cloacae
atgaatatcaggtccgaggatcagctcagcggattagcgataagcctaatggctgtcgcgtccgcattgactgtggcaaacgtgtacttcaaccagtccatgttgcccgtgacgtgctcccctgattgttaccagtcagaggtagagtccggctcctacatgatggttagttga

SEQ ID NO: 124397 - DNA, 891 bp, Enterobacter cloacae
atggtaacgcccggcgctaagcgggaagccgtcgctcatgctcgtgaacaccacgggctgagcgagcgtcgggcgtgcaacctggtcggtgtgagccggcgggtgatccggtatcgatcgtcgcggccggacgatggtccgctgcggcagcgtcttcgcgaactggcggcggagcgtcgccggttcggctatcggcgtctgggctatctgctggcgcgcgagggcattacgcccaaccacaagaagctgttgcgggtatatcgcgaagagaacctgcgggtacgccgccgcggtggccgcaagcgcgccttgggcactagggcaccgatggtgctgccggatggaccgaaccagcgctggtcgctcgacttcgtctccgataccctgacctgcagccggcggttccgcatcctgtgcgtggtcgacgactacacgcgggaatgcctggcgctggtggcggacacgtcgctctcgggcgtgcgggtcgcgcgggagctgacgcggctgatcggcatgcgcggcaagccgcatacagttgtcagcgacaacggcaccgagctgacctcgtcggccatcctgcgttggtcgcaggagcggcgggtcgagtggcactacatcgccccgggcaagccaatgcagaacggcttcgtcgagagcttcaacgggcgcttgcgcgacgaatgcctcaacgagacgctgttcacgtcgctgccgcatgcccggttcgtgcttgatgcctggcggcatgactacaaccacgtaaggccgcactcgaaattgggcgggagaacccccgccgagaaagccggtaaacctgtctgggagcatgcccccagacaggttgccatcacctcaactaaccatcatgtaggagccggactctacctctga

SEQ ID NO: 124398 - DNA, 267 bp, Enterobacter cloacae
atgaagcggagcaggttcagcgaagagcagatcattgcgatcttgaaggagcaggaggctgggatggcgacggcggacgtgtgccgccgccatgggatcagctcggcgacgttctacaaatggaagtcgaagtatggcggcctggaggtgtccgaggcacggcgactgcgcgcactcgaggacgagaacgcgaagctgaagaagctgctggccgaggcgatgctggacaacgtggtgctgaaggatctagccacaaaaaaatggtaa

SEQ ID NO: 124399 - DNA, 705 bp, Enterobacter cloacae; identical to SEQ ID NO: 124394

SEQ ID NO: 124400 - DNA, 2886 bp, Enterobacter cloacae; identical to SEQ ID NO: 25667

SEQ ID NO: 124401 - DNA, 615 bp, Enterobacter cloacae; identical to SEQ ID NO: 100706

SEQ ID NO: 124402 - DNA, 858 bp, Enterobacter cloacae
atgaaaatgacgaagccaaaaccggtaagccggatgaaaagaccgtttattagtgagcttgcagagctgggtttatcgggtgaaattctttcaattcgaactgacggcatgcaggggacgctcatacccgatcttaccgcaggggtgagtgaagcaggccgtgtgaaaaccggcaactgggtaatctctgacaagagaaccttcgaccatgtcgttctgtgtgttgaaagacaagatgagaaccatgatgtgtacgtaggtaaattcatccagttacatgtagccgctaataagagccttaagatcgtcgaaatgggcgatgtgaaactggtggccataaccagctcgattcctaccacttttaatggtgggataaagagatacaaaggggttacgtatgtgtcactttcacaaacagctcaaaccactatcgacttcccgaagcgtatctacaaagagggccaggaatgtacttctgtcaccagtcctgaccaaggtcctttcgcccgggatgttaggttgaattgctacgggcgatgtgttgtcaccggcgtaaggtccccctggcgtactgaggccgcgcacttaacgccacgtcatgaagaaggcattcccgacgtaacgaacggaattttacttcgccgtgatatccatacactgttcgacaatgaccattgcgccataaaccctgacactatgaaaatttacttcagccgggaggcccgggagttggatgatgatctcctgaaatggcatgggaatgagatagagacgacacgcatgcaggttccggttaacatcgaaaaccttcggatacgatggcaaaaatttaaggctaaggatcgtcagcgtaaataa

SEQ ID NO: 124403 - DNA, 174 bp, Enterobacter cloacae
atggccatgatgagcgtggtggaagatattgccgatccgaaagaattagctctacatcaaaaagaagttagacgtcttggggctagttatctttccgacagcggtgtttcatgggcttcaaaaactgtttcaccatttacagcctggtgtaactttaaccgtttagaaagttaa

SEQ ID NO: 124404 - DNA, 372 bp, Enterobacter cloacae
atgagtatctctaagcaaccggaatatgacatggccaaagtacaagggctctttgttggataccgaaaatttgctgttgatcgccagtggcttcggcagcaggaagaacaacgttatcgggatcgccagcgacaatttgatgaatggtccagaaaatgggtcactgtaaccaggctcaaagagactcgtttatggactgacggagccatcaggcgatggctgggtgaacctcagcagcagggtaaatataaagttttccccgttgaagcggttttggctgctgagaagttgaatgagtttcagctctggcttaaaccccggctggaaaagaaacgtgcccagcatcaccactttttaattccatttctgtaa

SEQ ID NO: 124405 - DNA, 282 bp, Enterobacter cloacae
atgagccagcactggtatgaggtgaaaagcaatcagggaattgttcaggtgatgttaggctgggatccacctttgcagtggtttcatatgtgcattgattatgacattaatgcagcagaagacccactctatactaatctggctgaacctgatccctactacgttactccagaatatctgcaatttgtactcgaacgcttcgaaataacggatattgtaataaagcccgatacctctgggctttacgaagaattattaatggatcagcttttagaccgataa

SEQ ID NO: 124406 - DNA, 207 bp, Enterobacter cloacae
atgttcgcagaaatcaaagataattattcgttaggtggatacaggaaagttgccattaccagctttcgacgagtcgaaaataaaaaccttatttacagtgacagggaatacgagctgacgcttgccaatggaacaataattaaaaacgtacttaaaaaagaagagtgggaactgttagaaagcaattcaattaaggttatattataa

SEQ ID NO: 124407 - DNA, 279 bp, Enterobacter cloacae
atgaaaaaagtaagcaacgctgtatgccctcaatgttcagacaccataaatgtctggtttgaccttaacgtagaggtcaggtatgccgtgaaacccgacggtagcctttccagacctgctatcgtaacggacaccacgggggagtcgcgttttggccttagatgcaccagttgtgactggtcagtacatggcgaagatgatgaaatcgacaactacgatagtatcattagtcggggcgcagaaagggccgagaaagttcagttgtctttaaaacgttaa

SEQ ID NO: 124408 - DNA, 513 bp, Enterobacter cloacae
atggcaacgataaacgttcggattgacgatgcaatcaaaatgactgctgatgaggttttaaaaaacctcgatgtcagtcagacacaggcgatcactgcgttctatcagtacatcgctgaaaacaaaaagcttccctttactgcactcatgagttttaaaactcaggatgatcttttaaagacgttcaacgatattttatccgaagcccttgccattgccttaaacttacaggtatggattaataaatcagatattattgatggcaaaataattcagaaatattatcgcagacttgacagttattatagcagtgctaaagagcagctaaatttccttgaaagcagaacaaaagcagctcaggttttaaatgcgcttaataaaattttgactgtaattgtcgatttcagtaattttggatacggatatgagcaagtaaaaatttctcatccagaaaaaaaagaattcgaatcttctcttttcgattttgaaaacaggcttaaggatagcctttaa

SEQ ID NO: 124409 - DNA, 2457 bp, Enterobacter cloacae; identical to SEQ ID NO: 105688

SEQ ID NO: 124410 - DNA, 1089 bp, Enterobacter cloacae; identical to SEQ ID NO: 105689

SEQ ID NO: 124411 - DNA, 2421 bp, Enterobacter cloacae
atgaaacatctcgcttttattactgctgtagccggactcggtatgtctgttcaggccccagctcagatatatgaatcggcctttaaagacacgaacggtattgagatccacgccccgtcttctcgtcttatgcttaatccggcatcaccggtaactttgacacttatttcaggtcttgatcgtttcgttaatgtcaaagtcacgaaagacactggaactgtcattcttaatactacgactacacggacgggtgtatcagaccgactaacagctgctgacggtagtgagttctacggcaaaaaagtaactttgcctgctttgggtgaaggcaaatttgtcgttcagataaacgtgttagatctcaatcagaagcctgtagcgacctataactataactggctaattgatgtcacccctccagcggcaaatgctcttaccgctaatactggttctggctctaccgctggtgacgtgtggaagcttggattagaggcaacggggcagtatgacttcacctcttcgggcgtaagtgatgcaaatggtattgataagggcctaatatatatttacaggcaggacggtagcctctacagcactacacagatgcagtatgacgtatccggccaaaagatgtaccacacttactctaagaattcagttaagggaaccggaataccagacagcaacctggatgaagactttactgcaaaagttgttatcttcgataacgcaggtaatagccgaacgctgccaactcaaaaatttcgctacgacaacacgctgggtgagatgacactgtgggccgttcatgatccaaatacgtcttccagcgtcgtacccggggtttctaattatccggcttacaaagccggtatggtcgttaacgaaaaccctattcgattagtctaccggatcccaaaatctaactaccgtgcttattcagaaggtgggcttcagttcatcaatcaatattccgcccccaaagagatagctgtagacagcacttatgcttatgttgaaatgactcttccctatggctcaattaatggggatatggctcgtatggcgaactttggccagtggggagggtattatccgtcatacagcctcgttctaaacccatctgcaaaccaaacgcctgcatttgcgggtacctgggtagatttcctcgatgataaggggaactgggttaagtggaaggattttgagagtgtggcttcatcacgactgccaattaaaatttcccgacttcgttttaacgttgaagcccggccctttgcacaagagatcggcggtaaggcgacctgcaccattccggcaggaaaaacctcgtgtgaagcgcctgagacgtttgatatggccttgggtacccagggctacaataggatcctttacttcgttcgcagcatcagcaatcccattttgcggtctgagcaatggattatgacacgctggaacaataaacaactgccggtaataaactcgatatcatatgacgagactaacaagcagctggatgtactggcgtcacttgaaggcgatggtaactggttcgactcggtctcattgagggaattttatctttccgataagaacaccggtacccggatgtcacccacaggcgtaatcaaatctcgtatctcaggtaactacacgattgcttatgatttatcccgtcagtctgaaggaaaatacaacgttgaggtcaacatcagggacttcttccagaaccagaccaataaaactttcggagaaattgctctggataacactcctccgacagtggccataacattcgacggaaagccggtaaaagacgatacggtagtgtacggcctggagaacctcaggatcgctctggcagataatctgacaaccccgaggataacccgtcttcagctcgtaggtggccccacagctgataacgttgagcttacgtggtcaccggcaggcaaagatacatacatgcctgagtatccgaggctgttcccaaatttcgaaccatctgaaaattattcaattagcgtaacagttgccgatagtcagtcgaataccaaaacctatactcagaagttcagttatctaccgaataaccttgtgcagttacataatctacgcacattatcggtcagttcgcctctcaaaacgacagatggcgtaccccttgcgtacctgtccactaacgttctgcgtaagacaaatggagaaattgctaaaggggtccagaacgcaacgctgactgtgcggaaggatgcagccttcggtattaaatttaacggggcacaggcggctccaggtgagtcagttgaggtgcaaatagatatgggccagggggataatcttctgttacccgtttatccttccgaaaatgggaaagttggcacctcagaattcatgattcagatcgacgagttgaagtaa

SEQ ID NO: 124412 - DNA, 942 bp, Enterobacter cloacae
atgaccaatctggcggctgcgaatcaggtctttatcactcgtctggccgatcgtcagactggcatagaatatctgaattcaccgactgataacgctgaggggtccagtttatggctgcgccaggtgggaggtcatacccggtcccgcgctgatgtacttcgcacgcggagtaaccgctacgtcgctcagatggggggagaagttctgaccggtaacttcagtaatgttgaccgctgggctgtgggtctaatggccggatatgcaaaccagagcagcacgactacttctgtacgaagccgctataataaccgcacaacatccagtctgcgcggctacagcgtcggtttatacggcacctggatggagaatgccaaagacaataccggtctttatcttgattcatggatccagtacagctggttccgtaattctgtgaatgaatcagggcaggcatctgacagttactcttctaaaggtttcagcgcttctgcggaaggcggatacgcttataaaatgtttgaaggtaaacgcacagatttttatatccagccccagatgcagttaatctggtcagatgtttctgctgatgcccgatacgcaccaaacggaatttatgttcaggatgaagggcaaggaaacattcagagccgcatcggtatcaaagcttatctgcagggacacagtaagatcgatgataattctggtcgcgaatttaagccctatatcgaaactaactggattcataacacggagcgctatggcgttcgtatggacgggagccagcttacacaggatggcatgaaagatatcgctgaagtaaaaaccggtattgaagcgagactggcctcttcaacaagcctgtggggtggcattggtgttcaaattggtgaaaaaggctacagcgacacgcagggccacctggggatccgctatcagttttga

SEQ ID NO: 124413 - DNA, 537 bp, Enterobacter cloacae
atgaatatggaacatgttgcttattctgaaccaaaatgctggcctgaaaatgatatttattttaaagcgggagtctcatttttacaggagaaattgaacgctgatggtaatcggcgagcgtattcatttctgcatctgaacggttatacagtcagaagctttttactggattaccacccagataaagagaggagcactgtaataatctgtagcactcgcatgctcccgcttgcgaatttctggatggctaatcatcatagtgtttgcgcagtttttgatgctaaaacaaacattcaaaccctggttaaaatgctcagaattctaccttcatataaaccgaaccctgacgttatagaatatccccccaaaattaccgataaagatataatcatacttcgtcattatcttacttcaggaagcatggattctattcaacaccggtattccaggtcttataccactgttcagcaatggaaaacaaaactcgccaggaaattcagcatccgcaagctggaatatcttaccctgcaacgctaa

SEQ ID NO: 124414 - DNA, 954 bp, Enterobacter cloacae
atggcagccataaatataaagatagatgatgtactcaaggatggcggagatgacgttctgcgggagcatggtctgaacacaacgcaggctattacacttttctggcagtatctcgtccagcaccgcaggctgcctttcatcgctgagaccagacttttcacagcaaccgatcttaccctggccattgccacccagtatggcgatgcgctcaaccagctgcataaaatccaggacatgctcaggtccggcgcgacagaattcgctgaacttgccgccgctaaactggagctctcccgtcaggctgcagccattcagcagaatggctggcgactggagtccctgccggaggacaatgatttatctgccccagcacggcggatgctaccccgcattcactaccacctgaccggatgtgactttgcattgtctgacttaccgtcctgccccccgatcccggtccggatggttaacgggtttggcgctgcactacagcaatacgaaacggagttttccaggctgcaggcggtactgcgtgattcaggcctgctggcacgccctgagccgctgcgtgaatttgtttaccgggacgacaacgtcatgatatcggtcatacagcagcatgattatcagcacggggcatggattgtgcggatgcaggccaaaaccctggaacatgaaaatgccctggaagatgccggcctgacgttccccgaactggagggcagggtgtttctgcccgggagcgtgtacggaaaagcggtacgcaattcgcagaccggaaaatatgagatgggattccggtttctctccggcgtcacagagtttcatatgtactccagcgggcacgaggaggacaggaatccaacctcagcggatcaggtggcggccagcctcgccgtaactgtggacacttatcttgtaacgttgctccatgaaatggccggcaaaaattaa

SEQ ID NO: 124415 - DNA, 594 bp, Enterobacter cloacae
atgaataataaccacggtattcctgaccatcttttcaccgtaaagaattctgataatacatacagctggaccctgggaacacgtatgggccagtttctctctgagatagaaacgctctatggtgcccgggacaccacatggactcttctgggctttgagtttaaagaaggaaggcctgatatccgcttttccggctacccggtccggcgtcagattattatccggctgggtgagaaagcctttaagtctgcttcgcaggctatatatcaacttgctcatgagtgcattcacctgctggcgccggtagtgggtggagatgcgccagttttagaggaaggactggcaaccatgtactcagaagacaaagtcagagcgttgtatccttcctcccaggatgcgatccgtacccgttcgcaaaactatattgatgccgcagccagggtccgggagttacttcagcttgagccggacgccatccgcaagcttcgtgctgtggagccggactttttcagaatgacggaacacacgtttgctgatgccggtcttgaccagatcccgcaaccactgatggctgagctgctacggactttttaa

SEQ ID NO: 124416 - DNA, 867 bp, Enterobacter cloacae
atgcattacctgcatacccgtactgccgatgacgtgcttaatacacttaaagaatatcgtgatgacctccacgaacattcgctgcgaaaaccgcactggccgttgctggacaggcttatttcccgtgaaacagaaatgatgccggtatgggaaaacattgcacagcagcggctcagctggcagcagtgccacaccctgctggagcagattttttttgcgggagcgtatggcactcaggatcataacagccggctgaaagctgactaccgcaggctgaccgagctgaatgagaaaatcgccgcgcaggcggcagcgttgtctgcactgctgacagagcagggccagatactcaatcgtaacgccttttcactggagcgtacgacgcacattgtagatctgattgagatggcctcagagcagaacgggcactatcgttcgtatttgcgtgatcctctcgacgccttgcgcagccagtatgacggcaaatactggccctctcttgaacagatccttaacgtcgccgccagggaaattccagaagccgaatttttacaccggagcgaggaagctattgtcgacggcagaggggaagccgtgccggactacttgcgggtgctgtttgaaggcattgaaacagcccggagcagctgctggaaactcccggcccgctttaccctcaccgacgccagtctggcaatactggttacggtatcgctcgataccgataacatcagtaatgagcgggtaaaaatgatacgcaccaggctgtataaagcggggtttccgggggcatgggcaacccctcgcaggacctctgcgcagcggccagctgcctgcggggagggtagtaaacactgcatccggtga

SEQ ID NO: 124417 - DNA, 246 bp, Enterobacter cloacae
atgaatgctgatcacacggactacggctggcttttcagggaaccggctgaagaaactgacggcgatatccttattgatctggaacatctgcctccggagcttaaacaggccgctctccagattttactgaatcagattgaccgcgatacggcagagaaacagctggcagaagtcatacagcaactcgggtttgatatcaccgcagcagaactgtcagcgtatctttttaaaccgggccatggctga

SEQ ID NO: 124418 - DNA, 528 bp, Enterobacter cloacae
atgaacgccggcgagctatatacaggccagcactggagcagggcagttgccgctgcggcgcgtagtggtgctgagatgtggattttatccgcaggcctggggctacttcatgtctctgatcccgtggtcccgtatgaagcgacgttctccacgatgccgttctgccatcgcactcactgggaacggctgacaacgcgtccaccttcggagcgacggtgtacctccctgaagacgctgatgcaggcaaggtctgacgatcggtttgtggtggccgcctctccggtgtacctgcgcgccgttgaagcagacctgcttgcaggaagggacgcgctacgtacgcctgaacagctgcaggtcgtcacctcaaaaggctaccggggtagcctgaaggacagtgtccggtatacgagcgcagacatgatgaaagagctgaataccaacatgaccggactgaatgtcagttatgccctgcagctcattggtaatgaaaaactgaacagcggtacagcagttgaggtgtatgtatga

SEQ ID NO: 124419 - DNA, 495 bp, Enterobacter cloacae
atgatccggcagctcagtgtcatggtcctgctcgtggtgaccttttcggccagcgcagatatcagcggccggatcgttcgcgtgctggacggggataccgttgaggttcttgaaacggggaaccgtctgacgcgcgttcgtcttgccggcatcgatgcgccggaaaagagccagccttttggccagcgctccagacaggaactcacatcaatggtggcgcagcgtaacgtaaccatcacgggcgaagaaacggatcgctacgggcggcggatgggcaccgtgtggcttggcgcaacggatgtgaatgccgcgcagatccgcaaagggctggcctgggtataccggtaccacggaaaaccggcccggactgactacgcacagctggaagccgaagcccgccggcagggtgccggactctggtcagttccgggccagacagaaccctggcgctggcggagccagcatcaggacagaggttttgtcagaccccgatga

SEQ ID NO: 124420 - DNA, 258 bp, Enterobacter cloacae
atggccgcgagacgtgtcccgacgggatttagaattctgatttgtgtcgctgtatttgcactgacgtttcttttggttcggccgtcagaccctgcgacgcaaggccagattgaattctggaagaagttagccgggctgtttggtgagcgtgatgttgaagggttcgttggtatctctctgcttgtcatttgctcagtggttatggtcatagcatatccacttatcgtccgctttattgaaaaacggctgaacaaatga

SEQ ID NO: 124421 - DNA, 528 bp, Enterobacter cloacae
atggctttacaaggaaaatttgttgttaatgacgctacctttagccctttgacgttctatggcataggcacatttctggcttattccggtaatgaccaataccggaatcgtgcggggtgtattggtgtccctgataatggtccaattcctgacggccgttatcacatagtcaatcgcccttccggaggatggaaaggggttattcgtactgatctccatgatttttattcatggccgacttcaaggccggtgatcaagtatgagtggtttgccctgtatcgcgatgacgggaaaattgacgatcacacatgggttaatggtgttgaacggggaaatttccgtttgcatcccccaggtcctcttgggatatccctgggatgcattacgttgcaacatcgcactgacttcattgcgattcgacaggcgttaatgtcaacgccgcagatcaggctgcctaatggtctgatgtcttatggaacgattgaggtgatcttgaatggccgcgagacgtgtcccgacgggatttag

SEQ ID NO: 124422 - DNA, 387 bp, Enterobacter cloacae
atgaaaaagagatcgggagacccccgtaaacgacaggctctcaaagatgcagaacaggccattaaatcagaagaagcacggcgtatggctctgattatctccagggagaaggaaataaaagcggaaactctccggttgatcgaactgttcgaagaacagtaccctgactcacccggctaccactacgatgagcagccctatataatgactatcagtgtcattgttatgcaccgggcaggctgtgagttaaatgacgaaccagaaaaatacgatcctaccgggcagcttgatacgctggaactgttaccggcaatgagaggagaagttgatgcgtttctcataaggaataagctggataaagctgattcctggtctgtattcagttaa

SEQ ID NO: 124423 - DNA, 768 bp, Enterobacter cloacae
atgaatctgttcgtacccgatgcatttcacaacctgcagaaaaccggccaacccagcccggcagcactggatatgatcaagctcgtggcgcttctggccatgctcatcgatcacatcaatacgctgtttctgacgccagcctggccggtgatgtatgcgcttggccggatggccttccccctgttcacgcttatatgggcgatgaacgtgcagcgttccccagagcgtctgcaggtaagggcaaaccggctgtggatctgggcagtcatcacgcagccggtattcagcctggccttcctggatcaccagccgtggtgggcgatgaacatcctgttcgtgttcgccggcgtcacgcagctgctcgccctgcggtaccggtatggccagaagggaaaccttgtcggtggactgcttctggcgctcatgatatttccgcttcagcccgcaagttatggcctggcgggcgtcatactggccgtcagcctggcaaccgttacgggaagctcagcccccgaaatgaagcgcagggccgccttcgttgccgtgctgtcactgctctgcttaaacggtataacgcatctgctcagcatgcctgcagagacattattactggccacactgccaacactggtattccccctgatcgcaatgtccctgtgcacggacctctgcccggcaggccgtcagcgttttatgccgcgtcatttcttttatatggcctataccggccatctgctggtcctgctcatactggaaaaggtctggtaa

SEQ ID NO: 124424 - DNA, 231 bp, Enterobacter cloacae
atggactattcagatgccttcatgcgacagcatgatgaaatgtgtcaggtggtgggcagtattgtgttttcgcttatcgaagccgggcatgactcaacaagcgaaaacatcgtgctcgtgctgcgtaacgggcttgccgaaaccgggagatgggaaccggaccagctgcagtacctccagctggccattgatttactgcagcgtggccgcaacatacccggaccgggctga

SEQ ID NO: 124425 - DNA, 1014 bp, Enterobacter cloacae
gtgaatgacaagcagatttctgttcactggtctgaacttccggccgaagagttaatccgtttctggcaggacgttgatgccggcacacaggataattttcttactgagccggtcaaaaagcggacccgccgtaagcgcggtgaacactccacaaaagccaaatgtgaaaacccgtcctggttccgtcctgagcattataaaaagctctccggggaactggggcatgcctacaaccgtctcgtgatgttcgacaagcggaccgggcgccccagactgcgtgttcacgtttcccgtcatcccctttttgtcacgggtcgccgtaaggcaggacgcagatatggtttccggccggaacggcggagcctgatcgactccctctggcccctgctcatcagtttctgtgatggcggcaagcataccgtcggcatgtgtatatccaggctggccagagagttaagcccgaaggacgctaaaggaaatgtcatcccggaaacggaggtgacagtgtcacgcttatcccgcctgattgaagagcaggtacgctttggtgtgcttgggctggcggaagagcgcacctgggatcgggaatcccgctcctggctgccgacctatgtctatatcacccatctgggattccagatgctgggcgtcaatatggacaagctgtttaaggagcaggatatgaagctccgtcagagcgccgagcgcgagcagctgatccgggacggggtgattaacgaacatgatgatgttcagccccactctgcgcgtaaatgctggtctgcccgtaagcgccgtgaagcactgatttaccgccgtaaaaaaggcgctgagcgtaaacgtgccaataatctgataaagctgccggtggatgaacgtcttcatgccatggaaaaatgggttttcaaaacccttcctcatgatgaggcgtactggtgtacgccggaacgactgacacagctggcgattcagcatctttaccagctggacctggcgctgtcaccgccggactag

SEQ ID NO: 124426 - DNA, 186 bp, Enterobacter cloacae
atgaagacatacggaacggagtttttctcaatgaacgatgtgaaccgactcaggatccttcaggatgttatagaccgccgtcttaccatacgtcttatagcaacccggcttgagaaagcttccaaacactgcggacgctatcgtgaacatgggccgctttcacttgttaaccgtcgtcgtggctag

SEQ ID NO: 124427 - DNA, 1392 bp, Enterobacter cloacae
atgccaaattctctatataccaatgagactgtctcaaatattaaattgagcaaacctctggaggaaaacagagtgactatagacgtgttgattcgttttttgagtgctggtcttttagatgttaaaggcgatgatgctaagttcgaaaagctacaaacaaccgcagtagacctatctgctgcattaaagaagaccccctcaaagtctgctgcatttgctctaatagctttcgatccgtcctctcctgtaactgatccagtgattcaggaggctgttgaggcacttcagaatcgttgggcaacttatatcaacaccttctctgatacgccagttacagtaatacgagctttattgttggatgctctttttaaagcatctagcgaagatgaccatattggccttacctttatctcctatgcacgtaatgcacttccttttatggaagttgccaatgaaagcaagatttggggcgatgtgattacaaaaattgaaaatcaggttaaccttcgagccgaggctgaatggacgacccccgattcaattagtgtctcagagatcgattatgtagcacctacggcgattgaaattcgtagtacggaagtgaaccttgacaaggaagagttggaggtaaaattatttgctgctgcagcacctaataatgcagcgggacaacctactcaaggtaatcaatatttgccaaatagcaaccaaacttggataaactattttgtccctcatatgtccaatgccatttatgacgcacttgaagaagtattagaaggggcacggattgcaccagtagatttgtcagaaccgctaaaagaactcgcaaatgcagtttcaacccatgtggataaaacgctgcaagctgtgagcggcgcgacagcaggcctacagcgtcgcaccaacttaatctggtggaaggaaacactttattctcctagtattcaacgtacttaccgtgatatgcctccgtccatcgcagctgctttaatggcattcgatctccatcgacaaatccctatattttcccctgcaagtgttgcagcctttttgcacgaaacagttttgagcttaccagatattgaaacacaagacagacagccaatccgtgttttactagaagaagctctacaagccgaggagcttgtaccattacgtgatctctccgctttgttactcccggaacctactggccgaggccctctacttggaattttaggacatgggtttggccgacacatcgatgatgatcagttccgtaatctggtaggtattccagctggtttagaacttactattccccaatgggctacgtggatctttagagagttgcaagctgcacgagccatccaagaaggtgggacgaagaagcgggggcgtaaatcctaa

SEQ ID NO: 124428 - DNA, 954 bp, Enterobacter cloacae
atgagagaatgtcctagagccacttgttttgcccctgaatccacttgcagtatgggctgcatagatcacactaaatgccacgaatggattgcacaggaagacatggcaacttcacaagaagaagttgtgcctcacgacgtggtgctcccgtggtcagggggggccttggggctagttgaccttggatttgttgttggccgatcgaaacctctggttgtgggtattatcggacaccagaatgcaggtaaaaccacattacttgctgcgtggtatttgttgcttggacggggttttatgtgtagcgatcatcagtttgcagggtcctactcactttcaggctgggaggcagttgctggctcacttcgatggactccaggccatgctcccagttttcctccacacactaccagtcgcagaggaagaactccaggattgctccacttggagtttcggcattctggaaacgagtctcgtgggtatatatttgcggatgctcctggtgaatggttccaaaaatgggctgcaaatcgtgatagccctgatggggctggggctcgctgggttgcagagcatgcagacgtatttttgcttgtcgctgattgtgaggctctagcgggggctggcaagggttctgctcgtggtgcctttttgcgtcttgttgaacgcatagcatcagaaagagaggggcgccccgttgcacttgtctggactaaatctgatatcaagattgctccagcgatggaggaagtagttagacaaaccgtttttaagtctattccagaaaccgttgaatttgccgtaagcacagttgtggacgacgaagatacacagggtaaggggcgaggcttcttggaccttcttaattggatactacaagttaggcgtgggcgtattctcttaccacctgttgatacaatgagtgttgatccacttttcatgtttggtaagaggtga

SEQ ID NO: 124429 - DNA, 834 bp, Enterobacter cloacae
atgagtaccagcgataactcgattttgcttattggtgagtcagatgttggtaagactcattatggtgctcaattattgaagcgcctaatgaagagggatggccaactaagaatgaatggtgcagcaacaaatcttgaaccatttgaatccgccatgagctgcctagatgaaggtatggcagcaggacatactgctgcatcatcttacgtcgatagcatctggcctataacggatgcgcaagggcgcacagctgaacttatttggcccgactatggtggtgaacagattaaggcgatctctgatacacgccgtattcctaaaatttggcagtcgcgagtaatttcagccccagcttggctcttccttattcgtttacagaaaactcgcataaacgcagacattttttcgaggccattacatgaactgccggtgtctccttcagaaagtcacgatattcaaatgtcagatcaggccaagcttatagaattactgcagatacttctttatattcgcggaactattagtacgaagcctctcgctagcccccgcctttgtgtactccttagttgttgggatgaacttggagtcgaagaagctccattgaaattattgaagagccgactacctatgttatcgagtttcatacacaacacatgggcaaaacctggtgttatgggattatctgcacttggacaagcattgagcccgacagctcctaatgaagaatactcaaatcttggaccagagcagtttggctatgttgtgcttcccgatggtttacattcaccagatcttactctgcctatacaatatcttttgaatgacaacctctga

SEQ ID NO: 124430 - DNA, 2475 bp, Enterobacter cloacae
atgaaaatcgagcaagctatttacggcgaagtccgcagcggacatgccttgaggctagctagcacccggggtaaaattttcgatgaactggcatcacggctcgacctgccagacactgcgccgccaggagttaattggtctccttacataacaggtttcccatatggagatagatatgtcctagcgcggacattcgctgacccatacgcaactcgggctggcatggttatatctcatgcgctgatcgcacctctcaatgagattatcacaacggctaacctaaaattgctttttgataacctaattgtcacgcctgaggcccctagttctcttactacgttggatattgagatatcaacagccaccccgaataatgcgaaagatttgacagcaacagccgaatcattggtcacacgagggggaggaccctcaataaaaattggtatcgatggattcgaggagttggttattgcattgtggtaccgcttgtggcctgaacttcgtgcaaatctttcgtttcgtttgagttttggtccacaggatatagtagaaaatcctcctccaatacttgtctgtaccccctctacattagaggtccgctggactgggcgtaatataatagggacttctagttcaaatcaattaccaagagctgcagcaattctgtgcgacagtaccgaagctgatacaatcctccaatttgctgaagatgttggaatatgcgtagataaatttactcaccttcatatgcttgttagtgcattcgagctcagttctataaatgatttcgaggcatctgttgctactataagattggtagataagctatcgtcagatcctacagtaggtaaggtgggtaaagaaaaacttatacgcagactgtgctctcagatgagtgatgttggaatagctgaatttcttcagttaagaaacttaaaaatagtaggtatccatggaactgagtgtatttgggtaagtttaagagacagggtcgcaacctatcatttagaggagatggatgatagaactttcctgcgtacaattagcgatgccctttcagcagaagctgtcgcaccttggtgtgacgccattcttagtggcattacagtttctgcgtgctcatcattatcaacttttccactagctttctggagatgggttaatatagagccaaccaccataactaaattattcgaatatctaccttcagattatgatctggaaactcgtatcttccaagtagcgccgcgagaaatgaacactagtgttggtaatacggtcatgacactagcacgatcaaaaaaatggttacgtttgcatggggctgctgcaggagcatctcttgaactaagggaagctgtttacaaacaattaagtatcgatacagagataacagacctagatggtataaaggcaactctgcggcgagcgacaagtctggagttgatcacacttgcgcttgagaaccaagagagccgtattttatatcttgcagcaaaagaagccgcacttgaaccacaacttctcaaggatttagactatagcgcgatttcagtgcaaaaactttgggcccgagcgttgggtattaacaaagatgcctggcatgggcctggagatcccaaacattcattacacgttatccttcagtctcttcttgatggtggtgagacaagcaacgaactgcttgatgcattatccaccacacctcttgccaatctatgcggctatgaacgctatgcagaagtctggacacgactcgtcgaacctgctcgcactcattttttaagcgcaacagctgcagggtggcttgagcaagcagtaatgggtagcgctgttgtcccggacacgttattggagaccactctgattgctgggccagttctggatcagaagcttcggactttagctctaacagatgcaaaaaaagcattacaaatgatcggagtcttacaaacatatggagagtcgcggtttcaacaatggctggattactggttgtccgctaataattcttctatgacatattctgaggctgaattacttggcaatcttattcataaccgacattggcaacgagtagttgatcatttagttcgtatcgtaaaaggtggtaagaatgacgttaaaccagcgctgatatgttgttgcgatatgatacattatattgatgtatggctgttaggtttatcaacacttacaaatgacgaaaagtggctagctctggaagaactcgctataaatctctatccaggaggaccggatgatagtgatctttgggatcgcgctggggggaaaaatagtaatttaacattctcaggaaccggacatgcaagatggcacgctgccctctcacaaatgcgcaaaggaagagaccccaaacttattcggttattgggtgaaatgaagcgagattatccagcaaataatcagcttcaacatctaatcagtgacttaacatttaagacaatattataa

SEQ ID NO: 124431 - DNA, 1110 bp, Enterobacter cloacae
atgaatacttattaccaagtaaacagcttgtcaaaatctacattcactaatgctcacgccttgatagtagctatttcagcatacaagcaagtcaatccattaccgccagaaattgcaaatgacgcaactgcaataagtaccgttctcactgcaccagaatattgtgggtataattcagaaagtattaaattactcttaaacgaagaggcaactcttgaggcaatccgccgcgagctttctttattagctagccgagttacaacatctgatactgttttgatatatttttctgggcatggtgctaatctcggtaatattactaatcctattagtgcattggtccccgttgattgtgacccttcgaatatattaaatacggttcttatggaggaagaattttcagaagcccttgctaaaataaaagcacagcggctactagtttttattgatgcatgccattctggtggagcgggtagcttaaaatctcctggagataatttagctaatactttcggttttagtgataaagcattagatcgattagcacaaggtactggacgagttatcattgcctcttcaagggccacagagacgtcacttattttacatggagcaagtaatagtcttttcaccgaacatttggttggcgcattgaaaggtgcagcatatacacagggtgatgggttaattcgtgtatttgatgttttcaattatgtatctgaaaaagtgcgatctgctgtaccaggtaaacaacatcctatctttaaagcaagtgatctagaagacaattttccaattgcgctagattgtggaggtgttaaagttatcaacactagtaatacaagcgaacccacagtatggcgacagcttgaagatgtttttgcagatctctacccagctggaccacaggatcaggatatatgggcccgcgcaggtggcgatatttcccgacttcgtttaaatggtacagggcgagtacagtggtattctgcactccggactatgcgacaaggtggtggtggccaaagtataaataagcatgctttagttttggctgctctacaagattttcctcatcatcaggaactgaaatatttagcgagagcttga

SEQ ID NO: 124432 - DNA, 978 bp, Enterobacter cloacae
atgatcctgattcccgatgacgaaccggagctgagtctgcccgcagccagtgaggaattcctgccggcgctgtcaggtgagaatgccccggtcagcccggcccgggcctacctgctttcactcaattcccaccgcagccggcagaccatggcctcgttcctgaacatcgtcgccgttatgctcggagctgcctccctggagtcctgcagctggggcagcctgcggcgccatcacgtgatggccgtgaccgaactgctgcgcgacaccggccgggccaccgccaccgtcaacacctatctttcggcactcaagggcgtggcgaaggaagcctggatgctcaggctgatggacgtggagagcttccagcacatccgggcggtccgtaacctgcgcggcagccgtcttccgcgcggccgggccctgccgccggaggagatccgggcgctgttcggtgcttgcgaggccgatgactccagcatcggggtgcgcgatgcggcgatgctgggtgtcattctcggctgcggcctgcgacgctcggaggccgtggggctcgatttgtgtgacattgtcacagatgagcgggcgctcagggtactgggtaaggggaacaaggaaaggctggcctatatgccggcgggcacctggcagcggctcagaaagtggatcgatgacgtgcggggagaaaaagacgggccgctgttcacccgtatccgccgctttgacaccctgacgaacgaccggcttaccgaccagacggtgtaccatgtcctgcaggtgcgccagcgcctggctgggattgcaaaatgcgcaccgcacgatttaaggcgaacctttgcgacctccatgctggataacggcgaggacttaatcactgtaaaggatgccatggggcatgccagcgtcaccaccacccagcagtacgatcgccgcggcgaagcgcgcctgcgcacggctcgtgaccgtctggatctgatatga

SEQ ID NO: 124433 - DNA, 417 bp, Enterobacter cloacae
atggcgttaacggctgagtacagtcatgtcacgtgggattcgtttttccagcccacgtttgccgtttaccctgagctggagagtcagctacaggcagagttcatcacgtataaatcaactggcgcaccgtcgaatctccttggaagggacgccccctttgatttcccgccattcgctgtcgatgctaacgtccagcatattcacgttaatctgcatttccagctcacctggagtgccagacaagagaattacaaccgtacctcagatcattatctcatttacacagaacacatgtgggatagcggccgctttctgctgatggggctgataacaccggctcatgaacgtatgccagcgagagatacccggttactcagctacttttctgaagttgcagaagattttcacgcttcataa

SEQ ID NO: 124434 - DNA, 549 bp, Enterobacter cloacae
atgattatggagtccgtcgtcgtgaaatttaaaatccagcacttgcaggccgcagtggcactggttcttgccagtttccagccgcaacccaaagcggttgcgtgtcagcctacgattgttgaacgggtttacgaaatgggctccagagtcaacaaaaccgatatcagcgagctcactgttgctctcaatgacgtagctgaagaattacgctcaagtcgcattgagctggcccggtatgcagacagcgatttctccggcgctatcaaagtcgccagcgacatcagaaatcatactatccatgtcgcaggtatcgcagagtcctttgttctgatgttgccggaaaaaaacatcattcagtcgtatgacaggaattctgttgagtttgcgttctttaaggccattaagatggtcagtcttgcgaccaaaaactaccttagtctgattgatcaaatcacgcgaacgacagaagtgcgtgactctggaatcaacctctcggccatgaatcacctgctggattcaggcgacagggctgcggccaaatggcgttaa

SEQ ID NO: 124435 - DNA, 681 bp, Enterobacter cloacae
atgaaagcaaacaaattaactgcattaatagttacaacatacattggctttgtttcaatggcacacgcttcggcccctcaggcggtattcagtccggagcaggaggctcgtatcggagaaatcgctgccgactatctgatctcccacccggagattctcgtgacggtcagtcaaaagctgcaggaacagcaggaggtacgtaagcagaaaatgtttgcactcagcgtgatggagaatcaggcgaaccttctgcatgatccggacacaccggcttacgggcctgagaatgcaaaagtcgcggtgattgaattctttgattaccagtgcgtgttctgcagccgctttgcgccggagctggagaaggttatgaaagcgcagccggacgtccgctaccactttaaggagtggccaatttttggtggtcgctgggaagcttcatttcaggcagcacagcaggggctgacggtctggcaaaagaaagggccgcaggcctatgtcacctatcacaatgccatctacgccaccgatcataatgaaggcaaactgacggcggaggatattcacggagcagcgtcaaaggcgggactgaccaccccagctcctgacaccatcacggttttcccggaagccgtaaccgctgaaagactccaggcagcaatcctgaaagccacggccagatag

SEQ ID NO: 124436 - DNA, 5424 bp, Enterobacter cloacae
atgatgtcagtcgccccagtagcgtcagccggcgaggctgcaggctactacagcaattccgataactactattttctgggcagccttcagagcctctggatgggggaaggtgcaaaagcgctgggccttgagggcaatgtccgtggcgatgatctgacggccgtgctcgaggggcgtcttccggacggctcacggcttggcaaggaggttaacggacagcatgtccaccgcccgggtcatgacctgaccttttcagcccccaaaagcgtgtctattctggcactcatcggtaacgataaagaaatggtggaggcgcataatcacgccgtccgtgtggcggccggctatgtggagaagctcatctcggcccgcgatacgaaagacggcgttacgtccatcgtacacaccggcaagatggtagcggccgcctatacgcatgatacctcgcgcaatcttgacccgcagctgcacacccatctcctgattgccaacatgacggagtatgcgggcaaatggaaagccctggccacggactatatccataacgccggctttatcgagaccgtcatgaagcaccaggtcacgctcgggaaaatctatcgcagcgcgctgcgtgagcgggttgaagcactcggtcatgaagtggaagaagtaggcaagcatggtatgtgggagatcatgggcgttccggaagacgtcagggacgaatattcttcacggggccgggaaattcagggggccgtgggggctgaagccacgctgcgcagccgggatgtggccgccaaagacacccgcagggcgaaagttgacccttcacgtatgcgcctgatggagcgctggctgggccagatgaaggagaagggatttgacctgaaggcgtatcaggagagcgtggtgccgcgtgatgcaggtcttcgtgagaccgcgactcatccggagcgagatcacctggctaagccggttcctgccgggcctgaactggcttctctgcagacgtcgtccacggcagaaaagagcgtcgatacacctgctcaacccgcagaacgggagagccagtcccgtcagcctgtaccacagcagattgacacgctgagtcagccggcacagaccagacccgaaaagacgccggcgaccaggagctttcctgcagcgcagctggacactgaaataccccgcccggaactgactgaggctgtccgtctggccatctcgcagctcagcgacagtaaaacgcgcttcacctttggcgagctgatgatgaccacggcggagctgagcgaacagctgccggagattcagtatattcgcgtggccatcgatgcggcgctgaaggacggcatgattgtgccgctggacagtgagaaaggggtcttcacctcccgtattcacctgctggatgaactctcgatccaggcgctgagtcaggaacatctcaaatccacaaaagtcgtcagtttcacccgtccggcgcagtacgcgccggcggcgctggaagtcgtggagaaagacgccctggttctgatgaatgccccgtcaggcgtggcgggtatccgtgacctgaccgcgcagctggccggtattgccggcgcgaacggtcgtgacgttcaggtgctggccagctctgccgagcgcgccatttcgctggcgaaatccgacgatttgcgggaacggattatcagccggcagcatgttctgagcggtgatttccacctgaaaccccagagcacgctgattatcgaaggggcagagcgtctggggctaaaggagacgctggttctgctgggcgaagcgcgcgcgcaggacgcacagctggtctttctcgacagtgccgggcgtcaggcgaacggtaatgccatgtccgtactggagtccgcgggggttgcccgctcccgccgcactgagccggcgcccagactggaggccgaagtggtcagtattccgaacaaacgcgaccgttacgaggcgctggccaaccggtttgcagagctgagcggaggaactgaaaacgtcaccgccgtcgtggtcggcagacgtgaacaggcacagctgacgggcctggtacgtgaggcgctgcagaacgcagggcagctgggccgcgatggcgtggagatagaggcccggcagccggtctggctcgacagcaaaacgcgccgcatgcccggttcataccgtcccggcatggtgcttgaagatcgcgcggacgcaaaagagcgtaagtcctatgtgattgaccgggtgcatgaggatacgcgagtcctctcgctcatcgatggtgatggcgtgctgacccggatgaaaatcggtgatatcagcgctgactggcgtctcttcagccgtgaaaccctcagcgtggccaccggcgaaaaactgctgtccgtggcgggcgaccgcgagtacagcctgaaggccaaagatcgtcttgaggtgaccgggataagtgaaaaggggattgaggtgaaacggggggaagacaccctgacgctgccaaaagaccagccgctctatctgtcacatgcttacgtgaccgcgccgggcggacgggataacgacaccggggtggtgctggccgcgctgaacagccgcgacatatcgacccagaccatgaactcattggcacagagtggccaccgggcggaagtgttcacagccgaagtacaggaccgggctgaagcccggctgcagcgcatgaagacaaatgcctctcccgtgcagctggtcagaaacctgagcggtcaccaggacatcagtcaggcggttgattcactacatgacagagtccggactgacgcgggcctggccgtctggcgtgccattaacgaccagcgcaccgtggtgatcagcgagcttaagctggcgacggaagcgcagaaatatcatcccgaccttgaagccatcgggaatgaaattggcgcgatgattaaaaatggcgagctgttgtccgtatccgcagggggagagccggtactggtttcccggtccacctgggagatggagaaagccattctgcgtgtggtggaggaagggaaaggtacgcagcagccgttgctggaacaggtaccggaggccgtgctgaacggcctgacggatggacagaaaaaggcgaccaccctggtgctgggtaccacggatcagtttatcgggattcagggctatgctggcgtggggaaaaccactcaactgaaggcggtgatatctgcactggagaccctaccggcggacgttcgtccggtgatgacggggcttgctcctacgcaccaggcggtgaaagaaatgagcgacgtcggtgtccgggcgcagaccatcaaatcctttgtcgttgagcatgaccaggcgacggccgcaggcgggaagcctgactataaaggacaggtgtttcttatcgatgagtcatcaatggcaggcaaccaggatacggcggcactgttccaggccattgccagcggcggcggacgtgcagtctcgatgggggatatcgaccagtttgaagcggtcgacgtgggcgcgccgtttaagctgatgcaggagcgcagcccgatggatgtggccatcatgaagcaaatcgtccgtcagaaagacctgcagctgcgcggcgccgttcacgacatcattgataaccggatcgatgcggccctgcagcggattgaaacccagccggctgaccgcgtggcgcgtagcgcttcagccgcgctcccggagagtgcgattcaggaaacggaaacgcctgttaacgacatcgtggctgactggaaggaccggacaccggaggcgcggtcccgtacgctcatcattgcgcagctgaacgccgaccgtaaggcgataaatgccggcatccatgccacgctggcagcgcggggagaactgggggagaaggccattaaggtgcctgtgctcgataaaatcacccatacccgccatgcgttcaataaaacagaggcctgggagccgggaatggtggttaaacgcggtgaccgctaccaggatgtggtggccgttgaccgtaacggcagcacggtgacggtacgtgatgaggaagggaagattgctctggtttcaccgaaggagctgatcaccggtgacgtgcagctgtttcgccgcagcgagatggaagtccgttccggcgatctgcttaagttcacggcgaccgatcgcgaacaggggcagatggccaaccagcgctatacggtggagtcggtcagcgaggaggggaatatccgtctgaagggggagaacggtcgcgtcaccatcaatccggagaaggtccgggcgcagcagcttctcgactacggctgggccgtcaccggctacggcgcacagggggccagtagcgattatgtcattgcgcttgagggcacgaaagacggacgtaaggcactggcttcccgtcgtgccttctacatttcagcctcacgcgtgaaagagcacgtccagatatacaccgacgggaaagcggactgggttaaggcggtaaaaacgccggagcgtgatatcaaaacggcgcacgatgcgctggcaccagaaacgcagcgcaaacaggcgaaagccatctgggcaatggggcagccggtgaataaaacggccatcggtcgcgcctgggtgcgccatcagggcatgcaggatgcgtcactgacggcaaaaatcatcccggccacccggcgctttcctgaaccggcgctggcgctgccggtgtatgacaacaatggcaggagtgcgggcctggccctggtttccctggttgccagcccggaaggacggatgacgcagggtgagacccggatggtcatgacagaacgcgcccgtggcgccgtgctgcagcggagtcagtccggaaacacgatagtggccagcgacctgacggctgcactcgatgcagtacgaaataatccaaaggacggcgtggtctggcaaaccggtgatgaaccaccttcagcatggctgcttaaggtaagcggtgggacaaaacaggatgtgtcaccaggtattgtctccacgctgacggacgaacagagcgtacagcagctgcgtgagcaaatgctggcagacctggttcgcaatgaagaagccagtcggagcaggcagccggagtcgttgctagcggaagttccacaggaagaggtgatcagactgaaaccggaagacattaacccgcgtaaaccggaaccactcaacccggatgcagatgtaatcgccagggtgagaggtgaggaaaacaccgatggacgggaaataaaagccgctgcaggcgtcagaagtgagctggaaggtgctgacaaggcatccggtgaacagtcgcgggcatcgcgtgtgattgcagatctggcaaacgcggaacgcgacatgctcagggcggcagaaaatactgaacgcggccgcacgccggagcgtgaagaacagactctcacccgaaccattcagaaagaacgttaa

SEQ ID NO: 124437 - DNA, 690 bp, Enterobacter cloacae
atgaccaaaaaggtaagtgcttattgttgtttcattccaatcggcatttatgcagcttattctttaagcctgcaattactttttgacgtgccatttatggctaagagcatgctcttatcagtaatccccagcgccatctatattttctgcttttggaagttacgaagcagcaaaaaagggatgaacctaaaagcgactctcctgtttaacacgctgcttgcaggcttactaactttcttggtggagtttgtaggaaatgataccgaaagtgctttaatagcaggcatagctgttcactcgctgatagctttcatctttgcgggagtagtcttacggcctattacttacaaggataatacccttcttaaggatgaagatgatggccgggtatatgttatccggaatgggagagctcatgttttgacagataatgaagctcagctcataagcactactgacaacaaaattatcagtttttcaggcagtcaaatgagtatccaggatggtggcataaccaatattcctatgactacatccttcaacgattcgtttagcaccggaataactgtgaaccctgcgtcaggaatgccaatggttggtggcatctctggcctggatatacacggaaacagttggggaacaaacttcaacgaaccttcaaatacgtatgaccctaaccggggatactga

SEQ ID NO: 124438 - DNA, 405 bp, Enterobacter cloacae
atgaggcacatcagactgaagacgtttatccgaaaccaggctatcgggatactgaaagacagtagtgaggatacggaaacccgaaaatggacggatttgttaaccctgaaactgttttatgccttaatttttaccgccgtagtcgaaagggtatacgtgaagtgcgccatcacaacgctcagtgcgatctccgttgaccgctccgaacagtttacgctctcgcttctcatccactatccacagtacctgttgtggggcgttatggccgcgattatcgcgctcattgcggtgaatttactcgtctgcggctggttctgtctggccacatatctttgccgcaaactgaaccggactgacatcccggcaggcaaggatatgcaagctgtggaggtgcctaatgattaa

SEQ ID NO: 124439 - DNA, 492 bp, Enterobacter cloacae
atgacaaaaacactgtttaccctcatccgcgatgcagggcgggctgccctgtattccttcgtcctcggcccggcactggtgctgtatgtgtttgtgatgctggcggcatcagacggctcactttcccggcaattcctgacgacctttcatcacctgactgagggtgcgcctgccggcaaggtgatgggatgtgttaatgaacatgagatggcagggcgtttctcgccacctgaacccggagagtcgttaaagcccgtgccttccgttttagataaagcaccgcctgaagtgttatgtcagctcgggcccgttgacagcgattcgtgggcgcgtacgacagatgcaacgttgctcaacacctggattatctcggtgatgtttggctttggtgtgtggtttgttttatatggcctgtcccgggccgctcagcgtcgcatttcaccagacacacattctgtactggtacggcagaacaaggagacacaggaatga

SEQ ID NO: 124440 - DNA, 1836 bp, Enterobacter cloacae
atgaaaaaactcctttcaacgatgctgatgcttttcccgctcctggctggtgcagccgatccagcctttgaggcgggtgcgagttttggcaagggcaatgcctccgccggtacgggggtcctgaaaaatccgggtaccgtcacaggaacaataccaggctataccgctaacccaccggagaaagggtattacggcggtgtgaatggcggcgacggcggactggcaaacaaagggcaggcggccctgcagggaaatgatgcggcacagtcggtgatcagttccggtaccaaaaacccggcccccacaattgacccgaacgccccctttattaccatcggaaaaaatgcggagggtacggcaggcgggatcatgaatggcaccagtcagcagtgtaaggagacgacggtatcaaaatcgacgtttgagaactttacctgcgatcgggatgtggccaccatccagacgtgcggaagaacagccagtatcaccgggcattatgaggataactacagctataagaccatcaccattgattcagacaatctggacgtcagcagcccggaagtgtcgtacagcatgccggaaggaacggtgtattcagcgacgatgaattacacgttcaagaaacatttagcgttcagcaacgatctctggttcctgaacattacggctctcggttcactgatgacgatgtacgaaacctccgggtcgtatgacctgcccccgggtaagagttttaccgaaggagagaagctgaccatcacgtttaataacaaacaaaaagtacccgaaagggttgccagtatctgggagatgggtaaaaccaaccatatgtaccattttgtcatcaccatcgtttaccgtaccggtacaaaggtttgggttccgcagacgacctggactgaaagctgtggttttgacaaaaaaacggcgctgtccagtgctggcagtacctgtactgagcctggtggcacccgtacggtaatcgttgacggcaaggagtacagccagacaaacagttgctgggcctggtcggatgaatacgtgacgggtaccagttcccggggaaactgcggttcactgatggataatcccgcctgcacactttcttcacatacctgcacaacaacggaatccggggtatgtactcaccagtcggagacgtatcagtgtcagaaaacgtggtcatccagtggtcttgtctgcggcggggaatacatctgcaagtccggggcctgtgatgagaccaatggtaccggtgataacgggtttgatacggcagtggccaaacttgcgggcctggcctctgcggcagaagatgtcagggatcagaacagcactatagatgtcagagcgttcacgggtaaggccatgagctgccgcaaagcgtttgctggcttctcaaactgctgtaaggactcaggatggggacaggataccgggctggcagcctgtaacgatgatgaacttgctctcggtaaggcgaaagccaagaagataaccgttagcttgggtgaacgttgcgaccgtaaggtgctgggagcctgcattcagaaaagtaaggtttactgtgtgtttgacggcaagcttgcccgcatcattcaggagcaggggcgtcgcgaccagttaggtgtgaagtttggcagcggtgacagcccggactgccgggggatcacggttccggaactgcagagtatcgacttcgacaaaatcaacttctctgacttctacgaggatttgatgaagaaccagaaaatccccgataccagcgcgcaggtcaagcagattaaggatcgcatcgccgcgcaggtgaaccagcagggaggtggcaaatga

SEQ ID NO: 124441 - DNA, 324 bp, Enterobacter cloacae
atgactcaccctgaaacgctcaggccggtgacggttacccgtgaccgcaacggcttctggacgcaccctcattattttgcccccgccagtgatgaggccacgcagactgaatttagtgactggatgcgacagcacaggctgacctgcgccacccgctggatggaaaatgacgcgcctccccatgttatcgcggcctgggaaaagggcatacaggacgtcagtgactggcatccctcagcgccagagggcgagggctggttcatgggctccattcatgacactgaggatggcccggtttgtgtgtggctccgggaggtgaaatga

SEQ ID NO: 124442 - DNA, 216 bp, Enterobacter cloacae
atgaaaaaagaccctgatactgaaaagggccggaatgttacagccgttcgtcatgatgaaaaatcggctttacggcttaaggccattctcgcagaaaatcccctttattatccctcaatcgtgttaagagcaggcctgctggctcttgaggatatgtccaaagagcagcggctgacattcatcatgaaagcggctgataaagcgaaaaaccactga

SEQ ID NO: 124443 - DNA, 1014 bp, Enterobacter cloacae
atggcgttaatcagctgtttcaccagtccccagggactgcaggggatgctcacctgtttgcgcgatactgagggcatgaccggtattcttgtcgtcgttgcgctactcgctggctggattgctgttcagtattttgcagatgcacggcgtgtacgtcaggcgtgggagagcagaccgggattacctgtccctctggcgcaatttggcagtgcccgacatgccgatgcggttcatgcctttgctaaccgggaattataccaggcgatgcttcgcgggctggaaaacggtctgactgaaacgggctacaaactgacgcgtgatagatcccggcgtgtggtggcaataccactggaacacagactgacgatcagtcgctgggtttttcgggcgcggcagtggtacatgtcgccaggaatgtctgaacaaaggacgaaagacattgaagatgacgcggtgaacgacgggtacgctggcatgctgctcaatgtacttatccgtggatgtgctcatgagggctggtacattacagaaccggtaccagaattcaccccgacatcctttccgctaaaacaggtatccatcaatgtcagggccacacaggctgtactgaccagcgatgtggtgagcatcatcaatgacgttgctggaaaagtgagaatgcagccatctttcccccatcacccgacgtgtactgtcgctgacgtggtgaacagcgggctgaattatgaggtccggcagcaggagattgacgagccgcctggctggtttaattctcctgcgggatgtgagctaccggacgatatcaccgaaggacattctccactcttcatgacatctggacaccggcatttcattgtccgggtgcagggagggagattttatacacagggtacgcttgctttctttatagagcaggccgcacacaggattgcacagggtgaagtcagcggagcgtgctacgaagatgacagcggctatgcttttgccgtgacgcctgcaaaaaacacgccctga

SEQ ID NO: 124444 - DNA, 237 bp, Enterobacter cloacae
atgtcactgagacacaatactggaaccaaaggcagtgaagaggaagtgaatcgcctctgtcagctgtaccctgaaattgcatcatggcaaccggcgctgatcaccggtgcctggaatcagtggtgcgctgagaacccgcatctgccggcgatgccggaaaaacgtgacgaggcgtttcccctgtacctcgtcaggcttatccgcaacagaatggaggagatgaacgcatggcgttaa

SEQ ID NO: 124445 - DNA, 2610 bp, Enterobacter cloacae
atgagttttgtcgacaacctgatggatatgctgaaaaacgggaaagaggaagacggtgccgctacggcccgcgagaatctttcccagacatggggctacccgtccctggttgcggcactgccgtaccggtattacgacgacatcaatgagattttcgtcaacgccggctctgcaggcttcatcatggaagccgccccgctgcctggcgcgaacgaacaggtgatggccgcgctcgatgacatgctgcgcaaaaaactgccccgccagactcccgtcaccgtcatcatgcttgccagcaagtgtgtcggggaacgtatcgatcgcggtgtgagtaacgacatgtggaaaggagggatggccgatcacctcaataaaatcacccgcgcgttctggcagcgctctgcgctgcacggcctggccaacgaacgcgaatacccgctttacctgcgtaactaccgcatctttcttgtctatggccagccgctgaagcgcgcttcccagacgcaacgggtgattgatgatctggttcagatccgcaacaccatccgcgtctccctgggggccgcgcgcatcgacagcgtgaacgttgatgtgaacggtttcctgtccgcggtacgcgagcagatgaactaccgccaggaacaggtgctgacgtcctccggggactacaacgaggatgaaaagctgaaccgccaggtggttgatcaggggatagggcttgatgtctatccgtcgcatctccggatgacgttacccgaaaccatcgacgcgcgcgggactcggttgccggcatcggcatgtcgcatcattaacatgcagcttgccaaaacgcctaaacgcttcgccctgtggcagggggcggacaatctgcagaacattcgctttcctgacctcggaataccctgtccctttatgctgacctggacaacggagctggaggagcagaccaaaagccagagtgaggcatttcgcaaagatactgacttgtccaaaaaggccaactcagcctacgccgcactttttcccggtaccaaaagagccgcagaggaatggcgacgtacccgtgagcaactgaacaataacgaaattgcactctgcaatacgtattttaacctgaccctgttcgcgccggacaacaatactgacgcacaggcctgtgagctggccgccgtgaacgtgttccgcaagaacgagctggagatggtaacgatacagtaccagcagatgcgtaactggctggccggcttcccgttcgtcatgcaggaagggatgtgggaagacctgaaaacaacaggcgcgacgctgcgcgccaagtcatggaacgcggtgagtctgatgccggtcgtggcagaacgccagctgtcgaatgttggtatgccgctgccgacctatcgcaaccaggtcgcattctacgacatgtttggtgaggagaacggcagcaccaacttcaacatcgccgtgaccggcacgtctggagcgggtaaatccttcctgacgcagggtatcctgcgcgacgtgctgaatgccgggggatacgcctgggttatcgacatgggtgacagttataaaaactactgtcatcaggccggcggggtttatctcgatggcgctaaactgcgctttaacccgttcgccaacgtcaaagatatcaagcactctgctgaagggattgtgcgtctgctgacggtactcgccagcccgacgcagccgcttgatggcgtctgcgaggcgatcctgcagaaagcggtaatggatgcgtgggagaagaaggcaaacaaagcccgtatcgacgacgttcataattacctgaccaatgaggatgtgaatcaggcgtttgcagacaagccaaccatcatcgcgcgtctcgctgagctggccatgctgctcgatacctactgcacctggggaccggacggagaatactttaacgccgacaccccgacgctcgatggtgaaacccgcttcgcggtgctggagctgctgagcctggaagacaagccgaagctgctctccgctatcctgttctcgctcattctggcgattcaggaaaagatgtaccacagcccgcgcgacctcaaaaaagtctgcatcatcgacgaggcctggcgtctgctgggtggctccaacccgcacgcggcacggtttatcgaaaccggctaccgcaccgtgcgtcgtcaccgtggcgcgtttatcactatcacccagggcatcaaggacttcagcgccagtaaggaagcggaagccgcctggaacaacagctccaccaaaatcaccctgttgcaggatgctaaggcgtttaaacagtaccttgccgataacccggatcagttctcggacatggaaaaagaagttatccgtggcttccagccagccctgcagaccggttacagctccctgctgataaacgccggcgaatacagctccttccaccgtctgttcgtcgaccccgtcacccgcgccatgttcagctcgcgtggtgaggactttgccttcatgcagaaattgcagaaggaagccggggccactgcggaagaagcggcatatctgctggcggagaagaaattcggcagtgaacttcgtgagcttgaagaatgggtgaaagcagcatga

SEQ ID NO: 124446 - DNA, 255 bp, Enterobacter cloacae
atgagcagccactacgtttccggccggaacggcatcgatcatccggtgaaatcattcacccatacacggaaaggaacggcgcaaatcaccgccacacagtcagtcgataccgacgatgaaacgctggccgttctgagcgtgagctgtggttggcagattaagactgccggtgatgcagcgcacaccgggcagatgaacgaagagaaactgcgtcgcctggaattaatccgggccgctgcggagggtcgaaaatga

SEQ ID NO: 124447 - DNA, 543 bp, Enterobacter cloacae
atgaaaaaactactgggtgctgcactgctgtgcagcgcactgaccggctgcgccggtctcaattctgatttcgactgtaacaagaccgcgaccgatcagtgcctgaccaccggtgaggccaataagctggccgctcagggtaaaagtctggatgacctgacggcagagaaaaccgcaaaaaagcctgcgggtgaaaccctgccggcactgcgcaattcggcaccggtcgtgaatccgttccgtcctgtctccgtcgcagcaaccggaaccagcgccgctaagccactcaccactgcgccagcgaaaacgtccggttcactggtcacgccgctggccacgaccagtcatgtgacccccgagccggttaacacggcgggccgcgttccggttcagcgtattcctgacgccacgcagcgcctgtggattgccccctgggtggacacggacgataactttcatcagccggctgtggtcgagttcgtgaaaaacaaatcccactgggatgaagaaagctaccgcgttatcggggagggtggggaatga

SEQ ID NO: 124448 - DNA, 489 bp, Enterobacter cloacae
atgtcgtataaaaccaggctggatgttatcgaagaagacctgaacaaatggcgtgccgggaaaaagatttacaagtaccggcggtttttgatgcccacagcgctcgcacttctgccttgcagtatttttctctacggtttttttcataataaggctgtatttgtcgtcctgggcttcatgctcgccttcctcctgttccggctctttacaggaaaagaagataccccggacacctgggaggatcgaatcaatcaggcattgctgtcctacagcccaatgaatcaggacgcgttcgaaaaactgtgccgcaccgtaaatgagaagagggcaatagagcctgatgatgttgctgtatggctcaaggacgaaaaagaagcacgtgcgcttttcaggcgtcagcgagatgaacggcaacgctacagtttcactaaatggctggataaacgggagtctgaccagaaagctgaatgtaatgaggaggacaaatga

SEQ ID NO: 124449 - DNA, 441 bp, Enterobacter cloacae
atgaagggaccacgcatagatgaccgtatcaattttctgaggggtattgaacgggactggaaagactggtctgcaggaaaaaaaacaaaaccccactggatattttttgtaggagtattaaccgctacagggatgctgatttttagcttctggtcaggcaatcagaggcttgccgtggcttcctttgctattggaatagcatttattctcgccggattgttacagccaggtgaaacatgggaagaaaaaatacagaagaaaattcgggcatatgagccgcttgatattgatgccatgcgtaccctggccgtctctgtttttcataaggatgagttgatgcaggaagaactcagacagtggctggatgcggagttcagcgccatttcggatgccgttcttcgtgatgggcgccagccacattccggcgacaccattaactaa

SEQ ID NO: 124450 - DNA, 285 bp, Enterobacter cloacae
atgaaatcaacaacgcagggggatgggccagactgcaaagcaaaggatgtgaatcgccgaataaggataacagttaactggctctattcgatttgttgggtcctctggtgggtggcggtgattgcaatcattatcaaaggagtacgggaggaatacgcatttcgcatctttggtgcaatcttcatggccatcgtcctgattcgtatacgacctcccatctggccagatgactccgccgaacccctcccgggaccaaacgacagtgaccaaaaggagggcaaatga

SEQ ID NO: 124451 - DNA, 642 bp, Enterobacter cloacae
atgaaagttaaagagaaaatgtgggatggtcgcggccgtccacgtaagttccagccgggcgaatctgtggagtggcgattgcgcgctccggataatctgcttatggagctgagaatatgtgccagggctggtaacagaagtgtgaatgacgaaattattgcgaggcttttgctgtcgctgaattatcagccgggtaaacctgtgattaaaacagcggaaggagagaggctcattgcgctggcggtgagatttgaagaatggcttggaaaattacttgatggtgaatccgttgatgctgtgaaggaagttaatgtcccgctcaagcaagagcaattgtggatgtggcgtgagggtgaaagaattttgcttccgggtaaaacaaccggatatagcatgcgtattcctgagaaccttgcggatgaaatcagggcaatggcgaaggtgcataaccgtagtctgaatgacgaaatgctcacccgcctgatgaatacgctgggttatttcacggaaaggttacttgaccagaacgaggatgcgcaggcgcttaaagttctttgcatggagttcgatgtgttcctgaaggagaaaataagggaggtggagaaaagtgacctcccctgggatgaaaggccgtctcagtga

SEQ ID NO: 124452 - DNA, 396 bp, Enterobacter cloacae
atgggaagagtcggcatctaccttaaagacaaaattgaacgtgaagttcgcgatattgttcaacaagacctgcagaacggcgctacagctggagaagcaaacatatcagccacctgcaatgaattaatccggcttggattgcttgtttataaacgcgatggagaggatggcaaccagtttgatatcgaaggatatcgcagagacgccataagaaaagcagccggctcacgcgagggtacagttctcattgccacgctacttgctgaggtgtatttaaaaatgacaggaaaagacggcgaaggtcgcctggaagaaacgcttgatatgattttaagtggcataaacacagccgaggacgaagcggaatcaaggcacttcatcaacgaaaaagaataa

SEQ ID NO: 124453 - DNA, 540 bp, Enterobacter cloacae
atgaaaatatcgatactgcctgctgctttgctgactctttcactatctgctggcgcagctccgcagatgtgctttgatcaggccgggaaagattatcaaattgatccgcttctgcttatgtcaatttcgattaaagagagccatctggtaccggatgcgataaatggatcaaacaggaatgggacagaagatgtctgcggtatgcaggtaaacagctctcattacggtaaacttaaaaaattccatattacccgtgagcgcctgctgaatgatccatgtatctgtgtttatacgggtgcatgggtactggcgcacaacttcaggtcatacggaaaaaactgggacagcgtggggatgtataatacggggccgagcaaaaagctcattgtgcagcgcaaggcgtatgctcaggatatcaaaaatatatatcgcgttttgctggccagaaaaaagttactttctgaacgcctggcgccagctgcgggtaaggagcatgagataaaaactactgaaacagcatcgcttaacaacgaacagtaa

SEQ ID NO: 124454 - DNA, 303 bp, Enterobacter cloacae
atgacagcgaagaaccagtttgatcgggagtctgtgccctggtggatgccatcagggcaaccgcaaaaacgataccccttcggggaagcggggagggcgaaagcgcctccggcgctcctgcctttccccgttgcagtggttctctcctcaccggcgatcataaccggcgtcctgccggttaactttctcagctgcagctccgtggccataacccgaaaacagggcagggcgatggcccccttcggctcccggcccgcgtggcggtccggtcgtcgagccccactccgccaggtcggctgctga

SEQ ID NO: 124455 - DNA, 336 bp, Enterobacter cloacae
atgacaagcaacacactgaacgctgttccggcgaccgtgctggagaccatggcagaacgcctcaacggccagcctgaaccgctaaaaatccgcaacaacgacgatcacgctgcactggctgcagatgtgctctggcagtttgcccgaaaaaccgggctgaacagggaaagcgagagcgtgcaaactgtcatcactgattttctggccaatcttctgcacctgtgcgaacagtgcgatcctgacggggcaggtatcgacggatttaatgccctgctgaatatggccatgatgcattatgagcaggaaaacggagatgacagcgaagaaccagtttga

SEQ ID NO: 124456 - DNA, 162 bp, Enterobacter cloacae
atgaaactgccgcgaaacgcccttatctggtgcgtattaatcgtgtgtataacgctcttaatattcacatgcctgacccggaaccgcttatgcgaactccggctaaaggacggggacagggaggtcgcggcaagcctggcttacgaatccaacggtaagtag

SEQ ID NO: 124457 - DNA, 231 bp, Enterobacter cloacae
atgagaaataatccctgcaagacggagctgaaagtcgcccgcagccagcgtaacaagctccgtaccatgtctgcaaagctgaaagagatgtgctgcgagtgggacggactcagtggctggctggaaaccgaaagcgagcagctggctgagagtatagacaggcatcttgaggcgctcgaagaccagatccgcgagtggtcagaaggtacggataaccgggagggatattga

SEQ ID NO: 124458 - DNA, 732 bp, Enterobacter cloacae
atgatcccgtcctcacacgcactcgtttccctgaagcccgcccgtcaggctgcaattcaggctatcagccatgttgagtctgcccgcgaacgcggcgcacgactgcccgccatgccgtatgtgcgtacttttctgcgcttgctcacgggcagcggtcgcctcaacgccacggtggccagtaaaatacctggcctgcactgggtgccaaacaatcgtcattcgaatctgaaacaggtcgaggaggcacttaacacgatgatcgccaccagtggcgaagcctgcccgctgccgctcacgactgacgtacaggccgaactgttcccggaagtcatgcacacccgcaccggtcgacggctgcacagatccggcattaagaccacgcgtcagcttcgccgccagtcgcgtgagtttgaacagcgctggaaactgcgccagaacctgctggagcaggcgaaaatcgacctgaattttcagtcaccggaaaccgtctgcacctggtacacccggtggagcgacgagtttgacgcggcagagcttgccggaccgttctggcgctggcagtcgcggttcgcgtcgctgagggaacttgactggcttcgcatcagcggcgagccgctgtatgcagtgatgtacgaaatcccgtttatcgtgcgggagactccagagcctgtccgtactgctgagcgctggcaggtaccgaacaagctgcgataccagcaggggggcgaatga

SEQ ID NO: 124459 - DNA, 198 bp, Enterobacter cloacae
atgcaactgtcaccggaaacccgcagtatcctgcgccagtataaaacgctcatcaacgagcgacgtcgcgaatccggactcagccccgtaaccacagcgaaagtgctggatgagatctgcgaatcggctacccgacagtgtgccgtctatctttgcggccacttcattctccagagcggccagggggatggacaataa

SEQ ID NO: 124460 - DNA, 348 bp, Enterobacter cloacae
atgagcgattttacttttgactgtacgaccggtcctgttgaggccgaggtatcccaggctattgcgggttataaaatggcgctgatcaacgcgcattaccgtaatttctggcaccggtttctgtgcaaacttaaggatgaagaggcactgaaaaatgagcgtatactcgtgattcaggagaaacagtgtcggtttgttgtcaataaaactcctgaacacatccaggtgttaaaaagcatcattgatgaacagtccgtcgccgccagaatacaggataaattcagcaatctgattgaaccatcatgccagtctgcgaagtcggctatcgaccacgtgaagaggcgttga

SEQ ID NO: 124461 - DNA, 354 bp, Enterobacter cloacae
gtggccactgagaaactgcttacccccactcaggacacccgggacatcattgcggccgccacaacggctctggagcgcatctggaaagatgggcaccggtatgccaaagccggggtgatgctgaatgacttcaccggctccggtgtttcgcagctgcagctgttcgacgaacgtccaccacgtcctcacagcgcggagctgatgaaggttcttgatggcattaatcattccggtctgggacaggtcaggtttgccggacgagggattgcgcctgcatggcaaatgaaacgcaatatgctctcccctgcgtacaccacccgcttgaaagatattcccgttgcgaggatcagataa

SEQ ID NO: 124462 - DNA, 168 bp, Enterobacter cloacae
atggcacagatccggcatatagaagagcagagctttcacttcggaggcgagaaggtacgccagggggcatcggttaaggtggccatccttctgagtgcgaccgcggtcgcaaagtcgaccccatgggctatcggcaacagtgatatgcgttctggtgaaatggggtaa

SEQ ID NO: 124463 - DNA, 135 bp, Enterobacter cloacae
atggaaaattcgtttcagtttgatacggggacgtttgtcaccaccacggctgaacaggattccgatctgtgcccgcaatcggcaccgaactggagtatctgctcgcgaagtatttacctgaccatggtgacataa

SEQ ID NO: 124464 - DNA, 561 bp, Enterobacter cloacae
gtgattaaacgtaccgggatggttgtcgtcgccgtactgctaagcggctgtctgccgaaaccgcaaccggctcatctttatcaggagccatctgcaggtgaaaacaccgcaaaactcagggtgcgtggatttaccgacagcacgacggtttatcgcgtcgacagctgcgagcaggcctttttcctgggcagcctccgcgatcctgaccatccggaacggaacccatcaaaggcgtcagaccggggttacaaaaaggccgacgtgccagaagataatgcgcccctggattacatggagctcaccctaccggccggccattatattcagctccgtccggccattttcaccacagatcatcagatttgctccgtgatgacgccgtggtttaaaccggaaaaaggcgtgctctacgaggtccgcagccagctcactcccgacggcagacaatgctatgtgcgcacctggaaagtggatcagcagaacggggcggtcacaccggtgacaggaccgcagtctatccgggatgtgatgacctgtgcaaagcatccggtatggcagtag

SEQ ID NO: 124465 - DNA, 315 bp, Enterobacter cloacae
atgaacaatgcatttattagttttggcactgctttttcggcagcgtgttttcttcaaaagcagattggtcatcgtcgtctttggatcaccaagttttatgtgggattcaatggcgttggatactactacgctcttgttgactgggatcaccgtgtgcttgcggactgggatcaggattcatgtcaatgggatttacgtcaggatgcctggactgttgttccagacagcagggactattgcccggaagatgtgttgactgaggtcatttctgaggagcaactctttcagctctccaccgtggaaggctttttataa

SEQ ID NO: 124466 - DNA, 483 bp, Enterobacter cloacae
atgcgtaaaaacatgccagctgtgtttttttttatatctattcttatcctcagcagtatggccgggttcattgcctggcgcaacatgaaaacagatccctatatctcctgtctcgccgtccagtcaacagcgcatggcgactttttgatgcagggaaaattcgattttttatttcagaacggaaagggcaggatcagaattaatggcaaaacgacggataccgcaaaggacagcattgtaagccgtcagatattttttacttatacccgtcatggctctgattacgtgctgaaaagccatcaggtacagttgatcaacaacggagacaccaccattgcgaacggcgattttaacagacactttccggcctttttttcgcaggaagaaaagcagctggcgatagccattcatcgggatcgatccggaaatgttgtcatgtattttgcagacgtgcctgtgttctattgccagcctaaaaagtaa

SEQ ID NO: 124467 - DNA, 747 bp, Enterobacter cloacae
atggaatcactgataacaagcaaaatagtcattggcaataatgtgatctttattccggccagtcggcaactgaaaaatgaccttacgggtgacagcattatcctgcacacgcctgcaaactattgtcttttacatttgttagaaaggcgtccgcaaattttgaccaaggctgaactgattaagctgtcctggaatgacgagacgcttctaatctcagataatactttttaccagatggtgttcaatcttcggcagaatctgacaaaggcaggcgggaataatgttattgttacggttccccgccgggggctgcaaatcaacccggaaatttcagttgaaattctgagtggcggcattcaggaacctacaatatcggaaaatgcgcgagttaattccattcgcctcgattctgatattcatgtgaaaaagcgcggacgtaatatcctgctgatgattttgtcatggtttttacttttaatttccggtttgctgtatttatcaggctatgataaatatgcctttgatgattaccagcagactgaatacaggatgtgtaccgtgcattatgatgaaatcatcgggaaggaaaatatcagtgcgctcattttaaaagcacgtattgattgctcgataaaaagagatttaattgttactcaaaacgagaatcattccaggctgtctgttatttcatgtccggccggtgccgtcagaacaaaaagctgctctctctctttatacgttcagtga

SEQ ID NO: 124468 - DNA, 702 bp, Enterobacter cloacae
atggatcgtggtgttactggtggttgccgagttctgcacaatactccggccaccgttatatatcatggtgccttttgccacactgccttcaccagtgacaagttgctggccaccattcaaaaatgtattttcagcgatgcttgcagtcctgatttcctgtgttccgccagtattcacagttgtgtttacggctttgctaccaagatataccagctgggtaccaccattaataatggagtcctggacggtcccccccatgcccacccacagcagaccgttatcattaactacggtacccgatgcaaaaccgttacccttaacactctgggtaccttcgttattaatgacggtattgacagccactccgccctcagcaacggactgtatacccatattaacaattgtatcagtggcaaccgcgccatatacgacctcctggccgagaacacagttgggtctactgcatttgtcatcctcgatacctggaggatcaatattcgggtcataattaataaccgtcccgatagcctggcttccttcccccgtgacaatctggcgaccgttattcagtgtggtattaataactgtcccaccgtcaaccacctgataacccagctctggtacggtttcgccggttacggtcatcccttctgttactgtctcagtatacgtagcgtaagccggtatactgaccagggctga

SEQ ID NO: 124469 - DNA, 513 bp, Enterobacter cloacae
gtgacgttacttttacgacaagcaacatcagcagattcagtattactcagtgaactgggctattgcatctatcccgcgcactttaagcatctgtggaagtcggaatcagacctaaacgattttctggaatccgaatattccgttgcagcgatagaacagagtctgagagacagcggaacaagctggtatgtggcggaccttgatcaaccgattggctttatgaaactgacatgggaagccacaatccctgataccgacatcagcggtgtgcttcttaacaaactctatcttgatccgaccaagacgagtaatcactacggtcagagcatgtttagcagcgtcatcgaacttacccgcagtcatggcaaaaaatttctgtggctcgaggtgcttgaacagaatgaacgtgcccggcgattttatgaaaagcaggggatgcggtttatcaaggatacggttttcgaaacagcgtcgcagcggagtgtattaaagatcatgggaatggagttatag

SEQ ID NO: 124470 - DNA, 483 bp, Enterobacter cloacae
atgcgggctcatcaacagcacaagtcacgtaaattgtatcgtagcgtcaacacgacgacacgacactattctaacaaccctggcgctgagtatcgctgggaacgtaatcgtaaaaaatccggggatgagctgctggtaacacgtgaaaccatgcacagtggacaaaagcgaggacgtgactacacgccattgttttactttttactcaaacagattggcaagcggtgggatgacgttttcagtgaagtttgtggacgtcttgatactaccgagcctgtgttctggttagtcgcgttgcatgagcatcagcaaagggatttagtctgtattggcgatagcagcttttatccgggcctgtttgttgacgagaatggcattttacaacaggttaacccatcgattagtgcaaaggatgtaaaggtgaattgccgctgctgtacgcacacctttattggtgagcctgtgccctggagggaggagtga

SEQ ID NO: 124471 - DNA, 696 bp, Enterobacter cloacae
atgagtttaaagccgcgtaaaatcgttttaattccagggtttatgctgaatgaaatgctttggcatgaatttgaaacctacctcccgtcaaactgtattgttcatcatgcagcggtaactgaaggacgaaccattcatgatgtagtgcagcatttgattactcttctgcctgagaagttttctttgataggtttttcgatgggagggtatattgcccgacaactggcagcagaattccctgaacgtgtagagtccttagtgcttattgccagttccttacgggaagatacgccgttagaggctgaagcaaagcggaaaagcgtgcagtcattgtcccccacaacgtttaaggggctgagcagacatgctattgcccggtcactccaccctctaaacacatcaaatcaggatatgatttcagctatccagaaaatgggatgctctctgggatttgaagccttcatcacgcaatcatccttgtccaggcaaggtataccttctgcaacgatacgttgtccaacactggttatcgccagtgaagatgatgccatccgttcgatgaaggaggcagaagaattggtcgaagccataccttatgcgtcgttaagaatcattctggattgcggccatatgattccgctcgaacagcccagggagttggcacgaactattgttgaatggatcccggctacgtaa

SEQ ID NO: 124472 - DNA, 717 bp, Enterobacter cloacae
atggggccttatcgcacttatctaatcactggtgcaacaaaagggataggaagagcactcagtgacaaattatcagaacagggtcaccaggttgtgggtattgcccgtaatgttgatgccagctttccgggggttttatatacggctgacctgagtagcgctgatgagactaacttaattttattaaaaatagtcgaaaatcacgaaattcacggcattgtaaataatgtgggtgtagccttacctcaacaacttggaggcattgatattcaaacgttcctgaaggtcatggatataaacgtacgggtggcagttcaaataacacaagccctcatcggcaacatgaaaagcagaggctggggaagaatagttaatgtatgtagccgtgccatctacggtgcgattgaccgaacagcttactcagcagcaaaaagtgctctggtaggttgtacacggacctgggcattagagcttgctcaattcgggatcacctcaaacgcgattgctcctgggccaatagagacagagctttttcataaaacacgccctgttggaagtgaagcagaacaacgtattttatcgacaatcccaatgggcagactgggttctcctgctgaagtcgcttcagcaatagcctttcttttatcaccagatgcgagttttattactggcgtagtgctgcctgttgatggtggaggaagcctgggaggacgttag

SEQ ID NO: 124473 - DNA, 834 bp, Enterobacter cloacae
atgagacatatcgaactgcgtcactcgttccccctttcgctcccggggctcagtctgaagaaaatcgtgccaggcgcgctgctggcattactggccaccccggtactggccgcagaacaacagggcaacgtgctgaccttaggcggaggcgtggatgttgcgccccgctattcgggttcggataaaaaccgcgccaccacggcggtggtactggattacgcgatgtataacggattcttcgtcagcaccacgcgagggatcggttacggcaacaacatcggcaacctggattacagtgcggcgctgagctatcgcgcgggccgtaaggatcgggacgtggacagcgattcgatcagcggcggcagcgattatttgcgcggtatgggcgacatcaaaggttcggctctggtggtgccagggctggggtacaaagtgaccgactggctgaatctgcaattacaggcagaggtgccggtttcggagcgagacaacggcgaagcgctgcatttcggcatttccagcccgctctttacctcaccgaacaacgccgtgacgctgtcgctgaccggtagctggggcagcagcaagtacatgcagacttactacggggtgaatgcatcccagtccgccgcatccgggtttacccgatatgacgctggagccggaatttatgcctggtcaacgaatctcgactggacgcacaagctcacccaacgctggagcgtggttgctggcgcaggcgttacgcagctgatgggggatgcagccgacagcccgattgttcagcgaaaaacctcgccgacgggaagtttgaaggttacgtacagtttctga

SEQ ID NO: 124474 - DNA, 1389 bp, Enterobacter cloacae
atgcgaaacctgtggcgtttcctgcgggtgcccacgctggtgcggcgaattatggtcgctcagatgcttctgctgaccctgctgtggtgtctttttttaacctggatgctgtgggatgacttgcgtagccccccgatcctgaccggcgataagacatataaaaccatatttactcttgttgaacacatggaaggacgtacgcaggaacgaagcgaggtgctggagcagttcagccaggcgttgcgggaagattacggcggcggggacgatgcgggactctccatcaccatgattattcgcaagcataacgcaatactgtatgcctctgatggcgcgccgataggcgtgaaaaatacccggttggggaagatagaacgaattcacagcgacggacgtagctggaccagccgcacgctaaaatccgcgaattccgacgtggaggtgacgctggtgacgcctgcagcggggtggaatttctttatctacctcaactcgcgcggctactacatcatgccgctgctggtgtgtattccttttctgctgtttcccgcatggctgtccatccgcatcgctatgcgcccgtggaacaacgtcgtgaatgaaattgcctcacgcgcgccagaagatctctctccgttaaaggcggttccaacgcaccgggagcttagccagatggtgaatgcgattaatcagttccttgccagggtgcgagaaagcacggaaagggagcgggtatttattgccgatgccgctcacgaactgcgcacgccgctggctgcgatgcgaatcaatgtggaggcgttgcaggcctacgtcagcagtgataatcaacaggcgctacttgcagggattattcgcagcaatagccgggcggcgcgtctggttaatcagcttttgctgatgatgcacagcgaagcaagcgtggatacggcgatggagccggtgccgcttacgacgctcatccaggagcgcatggcggtgctggcaccgctcgccgcggaacgcaatattgagcttgaattctacgctctggaagaaagctgggtgagcggagtcagggagcgtctgatgtcgcttatcgataatgtgattgaaaatgccatcaaatacagcccgcaaggcgggcgggtggcggtcgatctcttttcggcggagacgtccactcaattcagcgtctccgatgccgggccgggtattccggtggcgttgagggaacgggtgtttgaccggtttttccgcgatccgaatcaggtgcagaacgggagcgggctgggtctggccatcgttaaagcggtggcgcagcagcacaacagcagcgtgagcctgagtacctctgctgacggtgggctcagggtgacggtggatttccccaacccggcgtttgcctga

SEQ ID NO: 124475 - DNA, 831 bp, Enterobacter cloacae
atgggttatgtaacaactcgcgatggcgtcaatatctactacaaggactggggtccaaaagacgggaaagtgatctttttccatcacggctggccgctaagcagtgatgactgggacgcccagatgctgttcttcgtcaataaaggatttcgcgttgtggcccatgaccgtcgcggtcatggtcgttcagatcaggtgtgggacggccatgatatggatcactacgctgacgatgtggccgccgttgtggaacatcttggcgtacagggtgcgatgcatgtcgggcattcaaccggcggcggtgaggtggtgcgttatatcgcccggcacggtgaagacaaagtttccaaagccgtactgatcagtgctgtaccgcccctgatggtgaagacggagagtaatcctcagggtacgccaaagtcagtgtttgatgattttcaggcccagctggcggcgaatcgtcctcagttttattatgacgtgcccgcgggaccgttctatggatttaatcgcccgggagcgaagccttccgaagcggtcatctataactggtaccgtcagggaatgatgggaagcgccaaggcgcattacgatgggattgtggccttctcgcagactgacttcacggaagacctcaaagggatatccatccctgttctggtcatccacggggatgacgatcaggtggtgccgtatgcagattccggcgcgatgtcagtcaagctggtccaaaacggaaccctgcatacctataaaggcgcgcctcacggtatcccaacgacacatgccgatcaggtcaatgccgatcttctcgcctttataaacagttaa

SEQ ID NO: 124476 - DNA, 510 bp, Enterobacter cloacae
atgtttccgcttcttcagattcgtatagatgagcttcccgttatccctgagcaactgaaggatgtggcactcctggtgctctttcacaatattgaaagccatccatttgataaacctcatggtgaaggttggctcatacgggaatatgccacccttgaagggcttgagttattgcctgcgacagacacgccttatcgcgcatttccggttctatggaagggcgttaatgatgatgcgccgggatgggaggatgcctgggatattatcgacctttctgacgtaaacggtgatcaggaggcaagtgaccgcttccatgatgattttaaacgctacaggggaaccaaggtcggaggatacccgatggagatacaacatggcgtgggaatagaagactttgtctttcaggtgggatcagaggacaaggtcaactggatgtgggcggataatggtatcggctattttcacaaatcaccggagggactctggacgttttcgtgccagttttactga

SEQ ID NO: 124477 - DNA, 318 bp, Enterobacter cloacae
atggaaaagaatttcacacctgaacaaattgaaatgataaaccgtgttgtttttgcgcaaatcaacgtaatgaatgagaaaattgctcaaatcattgaagatacagaatctacggcacaccatcagttgaaggataacggcatcgacatgacagatttttatcccgctaataagcatttccttatgatgtcgcttatacaacatctgatagataaagtgcacggtggcgatatggcgctagcccaaaagatgctgattatggaagctaagaggctgaacatcagcgtaaatgttgaggcggataagtcgagagattga

SEQ ID NO: 124478 - DNA, 501 bp, Enterobacter cloacae
atgataaataaaattctggtcagtgcgtgcctgatggggttcagagtgcgttacaacggcagcgaaaaagcgaaggcgatggcgcaactctcccgctggcaagcggagcagcggttagtgatccactgccctgaactggctgccgggttgccggtgccccgaccaccagcagagattttgtcggccgacggtcgggatgtcatgcgcgggcaggccagaatcattgagaatacgggccaggatgtcaccgagcactatcagcttgccgcctggctggcgctacgtaccgcacaggagcatggttgtcgcgcggcgctgctcacggatggcagcccaacctgcgggagccagcatatctacgatggttcttttaccggcgtgcgcaacacggggatgggtgtcgcggcagcattactcgctgaacatgggatcgcggtattctcagaaacgcagcttccggaattgatgcgctggatagaagaaagtgaaagggtgaattaa

SEQ ID NO: 124479 - DNA, 924 bp, Enterobacter cloacae
atgtccttaccaccactctatgccctgcgcgcctttgaagtcgctgcgcgagtaaactccttcagtaaagccgctgaagtgctcaatattacgccgggcgcggtcagcagacatgtccgcacccttgaaatgtggttcgactgtgagctgttcaaacggcaggggccgagagtggagatcagtgaggcggggcgtgttctggccgggcagcttcacgaagggttcaggagtatcgagtgggcctgtcgggctttcagaagtgaaaaccacctgttgcggctgaaggcacccagtacgctcaccatgagatggttgcttaacgtcctgcgatcgtttcgtgaacatcatgaaaaacccaacgttgaaatagccagcgtctggatggacatcgataccgttgatttcacgcgagagccctatgattgcgcgatcctgctgggcaacggccattttggcgagtcaacggagagccgattgcttttcagtgaatggcttattccggtctgtacccccgctttactggaatctgcccgagagcaactttcgcagtgcgatctgatccatccttccccggacagacgcgactggcggcggtggctgagaaggacggggttattccccgggcttgatatgagtcgcggagcggttttcgacacccttgaacaggggagtagtgccgccatgaacggccatggcgtcgcgattgccgacctgctgctttcgcttgacgcgctgaatagcggcctgcttgcgctgcctttcaaagaagccatcgccaccggagacggttattacattgtctggccgaaaaattcactcaggaaaaagagtattgaatgtctgctggactggcttaacctgcatgccccggtcattccttctcttgatatcatctgtctggaatacgacgagcatcggctgtag

SEQ ID NO: 124480 - DNA, 471 bp, Enterobacter cloacae
atgacgcttgacgttatatttcatttaatgaagctggtctcactagatgaatattcatccggcgccaatttatcggcactgctggaatcgctgtcagcagaaaaagagaacgatgtcgcccttgcggcctttgtgcatcgccttcacattctgtgtgccgctcacaacgaccccatgcaagctgaggcgttgctcgccgctaatctgccaaaagaaggtgagccccttcccgtactggatttttcaggatggccgctggtgcgttacgccctttcaggtgaattacaaacgcccgagtccgaggcatactttcagaacgtcacgtcggctgccactatattgcgtgcagcgatagtagattcagagcgcgcaaacaatacgcctgcgatcgctattctcgataaacttctcaacctgaacggtgcattgccggaaaggtataaaaaaatggcaaatattccttacgcctga

SEQ ID NO: 124481 - DNA, 939 bp, Enterobacter cloacae
atgacaaaaaatattgttgccggaatgatgatggccgcgttttcaggggcagtatatgcaggatccgcacaagccataccggatttttcaccggaaagtttatcggtttcagcctctgccgggatgctgagcggaaaatcccatgaaatggtgtacgacgaagtcacaggaagaaaaatcagccagctcgactggaaaatcaaaaatgtcgccattctgaaaggcgatatttcctggaatgcttattcatttttgacactgaacgcccgcggctggacatctctggcatcaggctcgggtcatatggatgactacgactggatgaatgcagaacaatcctcctggacagaccattcatcccatcctgcgaccaacgtcaattacgccaatgaatacgatctcaacgttaaaggctggatcttccagggcgataactataaagctggcgtaaccgcaggttatcaggaaacgcgcttcagctggacggcgaccggtggctcttataattatgataacggcaccaatacgggcaacttcccggcaggtgaacgcggtattggctatagccagcgcttctccatgccgtatattggtctggcgggtcagtaccgtttcaatgattttgaaatcaatgccctgtttaaattcagtgactgggtacgcgcgcacgacaacgacgagcactatatgcgcgatctgaccttccgtgagaagacctcggattcccgctattacggtgcgtcggttgacgcaggttattacgtcacgccgaacgccaaagtgttcgcagaatttacctatagcagttacgaagaaggtaaaggcggtacgcagattattgataccaatactggcgaatcgggctctattggcggagatgctgccggtatttcaaaccgcaactataccattaccgcgggtctgcaataccgcttctga

SEQ ID NO: 124482 - DNA, 3072 bp, Enterobacter cloacae
atgagcgacggacgcttcaacctctcagcgcttgccgtgcgcgagcgtgccatcacgctgtttctgattattctggtgacgcttgccggtatttacgccttctttggactgggacgggctgaagatccgcccttcacggtaaagcaaatgacggtgattaccgtctggcccggcgcaaccgcacaggaaatgcaggatcaggttgctgaaccgctggaaaaacggctgcaggaactcaggtggtatgaccgcaccgaaacctatacccgcccgggcatggcgtttatcaccctctccttacaggacatgacgcccccctccgaggtgcaggaagagttctatcaggcgcgcaaaaagcttggcgatgagagcaaaaatctcccggcaggtgtgatgggcccgatgatcaatgacgagtttgcggatgtcacctttgccctctttgcgttgaaggcaaagggtgaaccgcagcgtctgctggtgcgtgatgctgaaagcctgcgccagcagctcctgcacgtgcctggcgtcaaaaaagtgaacatcatcggcgaacaggccgagcggatttatatcgccctctctcatgaccgtctggcgacgatggggctggcgccgcaggatattttcaacgcgctgaacagtcagaacgttctcacgccagcaggctccatagaaacacagggtgcgcagatctttattcgccttgatggtgcttttgatacgttgcagaagatccgcgatacgccgctggtcgctcagggtaaaacgctcaggctgtctgatgtggcaacggttgaacgcggttatgaagatcctccgactctgcagatccgtaaccagcgtgaaccggcgctgctgttaggtattgtgatgcgggagggctggaacggtctggcgctgggaaaagcgctggatgccgaaacggctaagatcaacgagaacctgccgctgggaatgaccctgaccaaagtcaccgatcagtccgtgaatatccgctcgtcggtggatgaatttatgatcaaattcttcgtcgccctgcttgtggtgatggtggtgtgctttgtcagcatgggctggcgcgtgggcgtggtagtcgcggcggcggttcccctgacgctggcagtcgtcttcgtggtgatggaggcggcggggataaactttgaccgcgtaacgctgggctcactgatccttgctctgggtttactggttgatgatgccattatcgccattgaaatgatggtagtgaaaatggaggaaggctacgaccgaatcaaagcctccgcttacgcctggagccataccgccgcccccatgctggccggtaccctcgtgacggcgattggctttatgccaaacgggttcgcccagtcgaccgccggggaatacaccagcaatatgttctggattgtcggcatcgccctgattgcctcctggctggttgcggtggtgttcacgccctatcttggcgttaagatcctgccagatatcgccaaagtcgaagggggccatgccgccatctataacaccccgcgctataaccgctttcgccagctgctggcccgggtgattgccagaaagtggatcgtggccggttccgtggtcttcatttttaccctggccgtagtgggtatgggactggtaaaaaaacagttttttcctacgtccgaccgccctgaagtgctggtggaagtgcagatgccttatggcacctcaattgagcagaccagcgccgcaacggcgaaaatcgaagcgtggttaaaacagcagccggaagccagcatcgtgaccgcctacgtcgggcagggttcaccacgtttttacctggccatggcacctgaattacccgatccctcttttgcgaaaatcgtggtgatgacggacagccagacgtcacgcgaggcgctcaagttccggctccgggaagcggtcgccggtggacttgcgccggaagcgcgcgtgcgtgtcacacaactggtgtttggcccctactcccccttcccggttgcctggcgtgtgatggggcccgatgtcgatacgcttcgcgacatcgccgataaggttaaaagcgttctgcaggccagcccgatgatgagaaccgtcaacaccgactggggttcacgggtgcccacactccatttcaccctcgatcagaaccgtctgcaggctaccggcttgacctcaaatagcgtggctcagcagctccagttcctgttatcgggtgtaccgattaccgccgtgcgtgaagatattcgcgctgtacaggttacaggacgcgctgcgggcgatattcgtcttgatccggcgaagatcgacgggtttaccctggttggcagtgcgggacagcgggtgccgctgtcgcaaatcggtcagattgaggtcaaaatggaagacccgctcctgcgtcgtcgcgaccgcacgcccaccattaccatgcgcggagatatcgccgacaatcttcagccaccggatgtgtcggtggcgatcatgaaacagctaaaaccgattattgatacgctcccgcccggataccgcattgagatggcaggctcaattgaggaatcaggtaaagccacacaggccatggtgccgttgttcccgataatgattgccctgacgttactgatcatcattgtgcaggtgcgatctctctccgcgatggtgatggtctttctgactgccccgctgggtctggtcggcgtggttcccacgctgctgctgttcaatcaaccttttgggatcaatgcacttgtcgggttgattgcgctttcgggcattcttatgcgaaatacattgatccttatcgggcagattacgcataaccagaaggaaggtctcgccccgttcgatgcggtagtcgaagcaaccgtccagcgggcacgaccggtgttactgacagccctggctgccgtgctggcattcataccgctgacacattccgtattctgggggacgctggcctatacgctgattggcgggacgctgggcggaacgatcatcacccttgtcttcctgccggcgatgtatgcgatctggttcaggatccgtcctgcgagtagcgtttcaaattaa

SEQ ID NO: 124483 - DNA, 1107 bp, Enterobacter cloacae
atgctcaggcttcattccgcccgttttgccgtttgtctcctccctttcgccctggtggcatgcggtgataaccccgccaccgacgatccgcgcacccagccaccgcttgtcagatccgcttccgttgaaccggcgaacgatgcgtcccgcgcgtttacgggtgtggtcgttgccagaacgcaaagcgatctcggtttccgggttcagggcaaaatccttgaacgccttgttgatacggggcagaccgttaagcagggccagccgttaatgcgtctggatccggttgacctgaagttacaggcacaagcacagcagcaggcggtggatgccgcccaggcccgggcgagaaaagccaccagcgatgaggcgcgctatcgcggcctggtggcaacaggtgctgtctctgcctcggagtatgaccagataaaagccgcggcggatgccgccagagctgaactcagtgccgcacgcgctcaggccaccgtcgcgcaaaatgcgaccggctatgccgtgctgctggccgattccgacggcgtggtcatggagacgcttgcagaacccggccaggtggtcagtgcgggacaggcggtgatcagactggcccgctcagggcaacgcgaggcgctcgtccagttaccagagacattgcgccctgccgtcggtagtgaagcgctggcaacgcgttatggcagcgaggcacagcctgttaccgcgacactgcgcctgctctctgatgcagccgataccaccacccgcacctatgaagcgcgctatgtgctggaaggctcgctggctaacgcgccgctgggtgcgaccgtcaccctgtatattgaacaaaatgctgaacgtcaggtaatgcaggttccgctggcgtctctgtacgatgcaggcaaagggcccggcgtgtggcggatctccgcgcagcccgcaaaagtgatgtggcagcccgtcaacgtgctgagcgtgagcgacgatgccgcgcaggtgacgggcggcgtcaaacctggcgagaaaattgtggcgttgggcgcccatcttctgcatgacggtgaagctgtccgtctggctgaacaacgcggtacggctcaggcggggagtcagccatga

SEQ ID NO: 124484 - DNA, 603 bp, Enterobacter cloacae
atgaacaccccatcaacgcgtggtccccttgaccactctgtccgcgagcaaatcgtcgaagcggcttttgagcacttcggccattacggctatgaaaaaaccaccgtggcagaactggctaaatccatcggtatttcaaaagcctatatctataaatttttcgattccaaacaggcaattggcgaggttatctgcgctaaccgcctggcgctgatcatgacggcggtggaaacagccatcgccgacgcgccgtcggccagtgaaaaaatgcgccgccttttccgggcgttaaccgaggctggcagcgaactctttttccacgatcgtaaactttatgacatcgccgccgttgccgcgcgggataagtggccgtctaccgagcggtataccgagagcctgatgaaactgattgaaagcatcattgttgaaggccgccaaagcggggagttcgaaagaaaaacgcccctggatgaggtgacctacgctatatacatggtgatgtgccctttcatcaaccccgtgcagttgcaatataacctcgaaaccgccccgaccgcagcactcctcctcccttccctgattttacgaagcctggccccctga

SEQ ID NO: 124485 - DNA, 468 bp, Enterobacter cloacae
atgaacacacgcccccctttaccgccgtttacccgtgaaagcgccatagaaaaagtcaggctggcagaagatggctggaacagccgcgacccggcaaaaatcgcactggcctattcgctggacacgcagtggcgtaaccgtgcggagttcgccacgaatcgcgcggaggcgcaggcgttccttgagcggaaatggaagaaagagctggattatcgcctgataaaagagctttgggcatttaccgacaaccgcatcgccgtacgctatgcctatgaatggcatgatgattcagggaactggttccgctcttacggcaatgaaaactgggagttcgagccagacggcctcatgaagcggcgttttgcctgcatcaacgatatgcccatcaaggaatctgaacggctctttcactggccgctgggcagacgcccggacgatcacccgtccctgagcgatctggggttatag

SEQ ID NO: 124486 - DNA, 579 bp, Enterobacter cloacae
gtgaatactctcactacgaataatgatcaaaaagtcagcgtcagagataaaatattactcaccgcgcacgaactcttttattccaccgggttcagagcaacgggcgttgatacgcttatcaaacaggcaaaagtgactaaagtgacgttttatcgccatttcccgagtaagagtttgcttattcttgcctatctgcaatatcggcacgagctgtggattacctggtttgaaaccacgcttcgacaatatctcgaagaggggcgggctgcatcggacgcattagctgcaacgcttaacgggtggtttatttccccgttgtttcatggctgtgcgtttattaatgccagcgcagaagcaaaatcagaagacaatgaaagtgaaataaaagccatttgccgcaaccataaatctgaaacccgggaaaaaattgccaccctcaccggtattgccgatgaggctattaacacgcagattttaatgctgatagacggggccatcatacatgcgcaaatgggcatggataccaaagaggtggtcagtcagttgcgaaggggacttgaagcgctgataccgcgctaa

SEQ ID NO: 124487 - DNA, 597 bp, Enterobacter cloacae
atgtctgcatcaaacgtcatcaatactgccctgatcgtgacggctcacccggtcgaaaattcgttatcccaatccctcgcgcagcgaattgccgggaagttacaggagcagggtacgcaggttgaaatagccgatctgcatgccgaaggtttttccccgatcatgattcgtcccgaccttgacctctaccacggcgatgcccgcgcgctgtcggacgaggtgctgcgcgagcagcagcgtgtcgagcgcgcggatatgctggtatttgtcttcccgatttactggtggtccgttcccgcccttctgaaaggctggtttgatcgggtgctgaccgtgaactgggcctataaagtggctgaagatggtcgcatcgtgggtaatttacgtgatgtgcccgtacgcctggtcgcaacggcgggcagcgatctggccgggttcgataagcacggttattccggtgccattcagacccagattgttgaaggggtgtttggcttctgtggccttaaaaacgtgacgctcgatatcctctatcaggccgattcagccactcctcagcaggtggacgatttcctgcaaagcctcactaagatctga

SEQ ID NO: 124488 - DNA, 594 bp, Enterobacter cloacae
atggttgttaagcgcttaagaaaagaagaacgccgcgcacagctgctggaagtcgcgcgcggaattgtgcgccagcaaggcactgaggcccttacgctgggtttcctggccgagcgcgccaacgtcaccaaacccattccttacgatcattttggcgatcgtgaagggctgctgatggcactctaccaggacttcagcgacaggcagcttaagaaatttcgcgagacgttgaacagagacaataaaacgctggcacagacgatccgttttttcagcgccgcgtatatcgactgcgcgatctctgcgggccccgaaacgggccccatagcggcggctctgtccggctcgcgggcgctgcagattttccgcgaggcctgcgtggccgactgcgcagactgcctgcggatggcgcttgccccttttattgtgctgcaaggggtaacaggtgaagcggccctgacggccattattggggccgcggatgcgctcagtacggctgccggaaatgggatcctcgcgcgtaacgttgcggaagagatgctcagcggcgcgatgaccggcgtcctcaatacctatctggacagcacaaaatga

SEQ ID NO: 124489 - DNA, 435 bp, Enterobacter cloacae
atgaaccttttgcctgacgtcatcagtcggtttgttgattactacaccgcgctggattcccggccgccctcggcgctggcggggctttaccatcccgatgccacgcttatcgatccgtttggtgaacataacggcctgttcgccctgcagcgctatttcacccatctgctggcgaatgtcgaacactgtcgtttcacgcttgattcccctttgatcggcgagcatcgctttgttgtcacctgggtcatgcactggtcacacccgcgcattgccggtggcgagcctctggaactgcctggctgctccgtggtggacgtggaaaaggatcggattattcgccagcgggactactacgatgccggagagatgatctacgaacatctgcctttgcttggctgggcggttcgcggcgtgaagcggagggtgaaatcatga

SEQ ID NO: 124490 - DNA, 1263 bp, Enterobacter cloacae
atgaagatcggcataatcggcagcggcatcgccgggttgacctgcgcctggcgccttgccgggcatcatgaggtcaccctgtttgaagccggtaccacccccggcggccataccgccacggttgacgtgccgacgtcacagggtacctacgccatcgacaccggttttatcgtctacaacgaccgcacctatccgcgctttatggggctgcttagcgagctgggcatcagcgggcaaaaaacgcagatgagcttctcggtacacaatccgcaaagtgggctggagtacaacggccacaccctgacgacgctctttgcacagcgtcgtaacctggtgaacccggcgttctggcgtctgcttggggagattgtccgttttaaccgcctggctaaacaggcgctgaaagaggtcgtggagcccggcgcgacgctgcaaacgttcctggaacagcatcgctttacgccgttctttgcgcgtcattatattctcccgatgggggcggccatctggtcgtcgtcgctacaggagatgaaacgttttccgctgccgctctttttacgcttctttgagaatcatggtctgctggatatcactcagcgcccgcagtggtacgtggtgcccggcggctcacgggagtatatccgcgctattctggcacagctgggtgaccggctcacgctgcacctcaacgcgccggtgcagcgggtatcccgtgatgcacagggggtcaccctccatcttgaagaatcgagccaccgttttgatcaggtgatttttgcctgtcactccgcccaggcgctggccatcctcgacgcaccttccgccgctgagcaggaggtgctgggcgatattggctggcagcgtaacgaggtggtgctgcacagcgatccgcgctggctgccggtgcgtcagcgcgcctgggccagctggaactacctcctgagcgaccaggatcaggccagcgcctgcgtaacgtacaacatgaatatcttgcaggggctgcccgccggtagcccgctgttctgcgtcaccttaaacccggaaacgccggtggacgaacgcttcgtgctgcggcgctttgtgtatgaacatccgctctttaacccgcaaagctggcgggcacaggcgcgccgcagcgaaatcaacggtcaccagcggagctggttctgcggcgcgtactggtacaacggttttcatgaagatggcgtgcgcagcgcgctggacgtcgtcaatgcgataacagccggggagggaaaccgatga

SEQ ID NO: 124491 - DNA, 525 bp, Enterobacter cloacae
atgagagccgcactcctgttcctctggctcatcaccctgacgcctttcgcccaggcagccgactggcttggctggcgtaaggtgggggatgccacgctgacctgggggcctttcaccgtttatacctcccagttgcgcacccctgaagggcgctacaccggcaagatgcaggatcaggcgctcattatcacctacgcgcgtgacatcgacagtgaagacctggtcgaggcaacccgcgaccagtggcgagcacagggggttttgcagcaggaaccgcagagcgaagcctggctgcggatgcttgcctcgctgtggccggatgtcgggccgggagcgcagctggcgttcgtgcttaacgataagcagggacagttctggtaccgcgcgcctgccgcatcgggcactttcagacccctggggccgcctcagtcgcaagcgttcagcacccgttttctggggatctggcttgatccccgcacgcaataccctgagctgcgtcagcagttaatcggaggacaacaatga

SEQ ID NO: 124492 - DNA, 942 bp, Enterobacter cloacae
atgtacgacgccgggagcatgaacctccgttcgctgaagatttttatcgcggtttttgaagccgaaaatttttccgtggtcgcgcgccgcgagggcctttccgcctcgcaggtttcgcgcattatccaccagcttgaggacgcactcggccagcagcttttttaccgcaatacccgggcggtgatccccacagaaagtggtcatctgtttatccgctatgccagggagatgatgacgagttttgaggaggctcgtcgggagctggatgcacgttcaacggagccttccggcacgatccgcattaatgcaccggtctttttcggccagcggcacattgcgccagggctgcctggtctgacggcgcgctatccgcggctgaatatcgagctgacgctgaccgatgattttatcgacccgcacaagaatgccgccgacgtgatctttcgcatcggcgtgctgacggactccacctttcacgcgcgcatttttggtcagcagcgctaccatctggccgcctcgccggactatctgcgacagcacggcgcgccgcaagggccggacgatctggcgcatcataaatgcctggtctaccgtggttcgtcggggcctaaccgctggttgttgcgcggtgcgggggaggagtgggtgcactacccggtgatgccattaatgacgtcaaataatgcggaatcgctgcttgctgccgcgctgggcgggatggggattgtgctgtttccggactggctgattggcgaccgcgtgcagcagggcgaactggtcgcactcctgccagggctggaatgcgccattcatacggagcccctgaatattgcggcgatctacccaaacgcgcggcatccgccccttaacgtcagggcggtgattgatcattacgtcgggtgtttcggtacgccgctctactggcaaacgcagagcaggtga

SEQ ID NO: 124493 - DNA, 975 bp, Enterobacter cloacae
atgagtaaagcttttacatttacccttaagcgcagttgcttcgatgaaaattataacccgtcagagaatacgcgtacgaccaccaactttgccaacctcgcccgcggggaaaagcgtcaggagaacctgcgtaatactctggtgatgatcaataaccgctttaacgctctggcgcgctgggataaccccaatgccgatcgttacgcggtcgagcttgagatcgtctctgtggatctgaatattggtgcggagaaaaccttcccggccattgaaatattgcaaaccacaatcgtcgataaaaaaaccaatgaacgcatcgacggtattgtcggcaataacttctcctcttacgtgcgcgattacgatttcagcgtcctgctgctggagcataataaaaaccagccccatttcaccattccggagaagtttggtgtcttgcacggcaatatcttccgccattttgttaattcgccggaataccgtgagaatttcaaaaaagcaccggtgatttgcctgagcgtgtccagcaaagacacttatcgtcgcacgggtaaccagcacccggtgctgggcattgagtacacgccggatggcgagtcattgacggagcagtacttcgcgaaaatgggcctgaaggtacgctatttcatgcctgaaaacagcgtggcgccgtttgccttcttcttcaccggcgatttgctcagtgattacaccaatcttgaactgatcgccaccatcagcacgatggagacgttccagaagatctatcgcccagaaatttataacgctaactcggcggcaggacactgctatcgccccgacctgaatcagcaggatcactcattaaccaaaattgtttacgaccgtgttgaacgcagccagttggccattgagcagggtaaattcacggaagaacaatttatcaagccttacaaacacgtactcgagcagtggtctgataactacgcgcgttaa

SEQ ID NO: 124494 - DNA, 687 bp, Enterobacter cloacae
atgtctgcgattattgattcttttattgccccaccgtgtcatgacaacattgagatcctctggcaggatgaacatctgctgctgatcaataaaccttccggtctgcttagcctctcgggtaaaaatccgcaaaatctcgattcggtgcactatcgtctggttcaaaactttcctggctgcacgctggtgcatcgcctggattttggcacgtccggcctgatggtgattgcacgtaataagtcgatcaatgccgcgctgtgccagcagtttagccagcgcagcgtggaaaaagtctacagcgccctgctttgcggccacctggaaaacgatgaaggggtgattgatgcgccgattgccaaagatccggcgctgtttccgctgatgtcgatctgtgccgttaacggcaaacccgcccgttcccgctatcgggtggtgaaacgtctgcatcaaaacgcggcgatgccgctcacgcgggtagaactgacgccagaaaccgggcgaacccaccagttgcgcattcactgtcagctgctgggccacccgattttaggctgcgatttatatgggggacggacgtggcctggcagcggaacaacgccgaggctgatgctgcatgccagtcagttgaattttattcatccggtgagcggcgagccggttaacgcccgtcacaccgcaccgttctga

SEQ ID NO: 124495 - DNA, 795 bp, Enterobacter cloacae
atgataccgacaatttttccctgtttgcccggcagcacgctcagtgccgtaaacacggttgggcagtggctggcgcaggatgacctgcaaccgggtcagtccgtggatatggtgattctggcggggaatgccgtcattccaaccatcgaagctgcctgccgtctggcggcggagcagggggtgcccatgatcattagcggaggcatcggacactccaccacttttctctatgccgcgattgcgaaacatccgcgctatcacaccattcccaccacgggccgggcagaggcggccatcctggcggatatcgcccgtgaattctggcagatcccggcagaccgggtgtgggtggaagatcagtcaacgaactgcggggagaacgcccgctttagccgcgagttaatgaagcaccatcaatttgcccctgaaagggtgctggtggtgcaggatccaaccatgcagcgccgcaccatggcaacattcgcccgtgtatgtcgggacgaacccgtatcgccggaatgggtaagccacgcgggctttacgcccgtcctgcaaaacggcgacgatggactggtgttcagcgattccggtgaagggctctggccggtggaacgctatttgtcgctggtgctgggggaactgccgcgcctgcgtgacgatgttaacggttacggtccggcaggacgtgattttattgcccatgtggagatacctgatgagatcgaggcggcgtggaatatcttacgcaacgatgtcattttgaccgatgcgttggtaagccgatccctgttgtga

SEQ ID NO: 124496 - DNA, 663 bp, Enterobacter cloacae
atgaaaaaaatcattctggctacagccatcgcgttgagcaccacatcagcttttgcagccggaactgctgttattaaggttaaaggtacattaaccaacgcagcatgtactgctgagctgggtaacggcggtgttatcgattacggctttattcgtctcggtgagttatccgaaaactcacataatcaactcggtcagaaacagatacctatgaccataaattgctctgcgccaaccaaaataggtttcactatcaccgataatcgcagcgacagcaacgcacaacttcctgttgatattgggaagaataagaatattacaaataaatattatacttatggcgttggtttcacgaacgacgggaaaaagatcggtaactacggcatgtggatgaccggtaccaccgcagacggtaaaactgtagaccctattgggcataaccacgactggtccgcaacaagctggaaatattccggtattccacgcagcgatactttccagaccatcgcctttgctgaaaccggcaccaccaccccattggctatcaccacggctaactttaacttcgtgaccaacctggtgatctgggatacctccaccctggccattaccgacgataccccactggacggccagaacaccatgacgctggtttatctgtaa

SEQ ID NO: 124497 - DNA, 663 bp, Enterobacter cloacae
atgaaaaaagttattttggcttcattaattgcactggccagcgcatcagctttcgcagaacctaccgctgtattaaaagtacacggaacgttgaccaatgcggcgtgtacgccttctatcggcaacggcggggtcattgattacggctatattcgcctcggagaactttctgcactggaaaataataatttgggacaaaaacaggtacctgtcaccattacctgttcttcgccaaccaaagtgggctttaccattcttgataaccgtagcgacagcaacgcgcgactgccggttgatatcggtaaaaacttaaaccagtcggtgaaatattatacttacggcgtgggtaccacgtccgaaggcgtaaatattggtgactacggcatgtggatgacggatgtcacggcagatggcaaagtcgtagacccgattgtcaacaaccacgactggaatcctgatatctggaaaaaaagcggtattccgcgtagtgatgcgttccagaccgtcgcctttgctgatacagggaccaccgcaccgttggctatcaccacagctaactttaactttgttactaatctgacgattcgtgacactactgcgctggcgattaccgacgatactcctctcgacggtcaggcgacgatgaccctggtatatctctaa

SEQ ID NO: 124498 - DNA, 1002 bp, Enterobacter cloacae
atgagtaaaattggcattaacggatttggacgcattggacgcctggtacttcgtcgccttcttgaaacccaggacagcaacaccgtcgtcgccattaacgacctcacctctcccaaagtactggcctatctgctccggcatgattctaactacggcggcttcccatggagcgtggatttcaccgaagacgcgctgattgtggacggtaaaaccatcgcggtgtacgccgagaaagaggccagacatatcccgtggaaagccgctggggtggatatcgtcgtggaatgcaccggtttttatacgtcggaagaaaaatccagagcgcatctggatgctggcgccaaaaaggtcctgatctccgcgccagcaggtgagatgaaaaccattgtgtttaacgttaacgacgacaccattgacgccagtgataccattatctctgtcgcctcctgcaccaccaactgcctcgccccgctggcaaaagccctgcacgatgcctttgacattaaagtgggtaccatgaccaccattcacgcctacaccggtacccaggcgctggtggatggtccgcgcgggaaagatctgcgcgcctcacgcgcggcggcggagaacatcattccccacaccacgggtgctgccaaagcgattggcctggtgatcccggccctcagcggcaaactgaaaggtcatgcccagcgcgtaccggtgaaaaccggctcggtaacggaactggtcgccattctgggcaaaaaggtcaccgttgaagaggtgaatgccgcactgaaaaaagcgacacaggggaataaatcctttggctataccgatgaagagattgtgtcgtcagatgtcattggctcgcactttggctcggtgtttgacgccacgcaaaccgaagtgaccgaggcgggcgaactgcagctggtgaaagccgtcgcctggtatgacaacgagtatggctttgtgacgcagctggtgcgcacgcttgataaatacgccgcactttaa

SEQ ID NO: 124499 - DNA, 1176 bp, Enterobacter cloacae
atgaatgatctatcccgctataacagccgcctgaaagagccgcgcctgccgcgctcaacgtgggtggcctggtcgctgttcgcgctgcttgcggcgtttatcgcctgggcgagtctgttccagcttgatgaagtcaccaccggcaacggcaaagtgatcccgtcttctcacgagcaggtcattcagtcgctggaggggggcattattcatagcctgctggtgcgcgaaggtgacatcgttgaacgtgggcagcggctggctcagcttgaccgcaccaaaacagaatccagtgtgctggaaagtgagtctcgtctgaatgccgcgctggccacggctgcgcgcctgaaagcggaagtgaacgacacggaactgacgtttccgcaagagctggatgacgacgttgaactggtcaaacaggaaacggcgctcttccagtcccgtcgcgaaagcctggaaaaagggctggccggtttgcgtcagggggctgaactggtccagcgcgagctgtcgttaacccgtccgctggtcactcagggggcggcgagcaaggtggaggtgttacgtctggagcggcaaaaaaatgagctagagaacaaaatcaccgaaatgaaaaaccagtattacgtgcgcgcccgtgaagagctggcgaaagcgaatgcggagatcgaagcccagcgctcggtcatgaaaggacgcgaggattccctgacccgtttgaccttcaacgcgccggtgcgcgggattgtgaaggacattgacgtcaccaccgtcggcggggttattccgcccaatgggaaactgatgagcctggtgcctcttgacgatcagatggtggttgaagcgaaaatttcaccgcgtgatgtggcgtttatccaccccggacaaaaagcgctggtgaaaatcaccgcctatgactactcgatttatggtggactgacgggtgaggtgaccatgatttcacccgatacccttcaggatgaggtcaaaagagacgtgtactactaccgcgtctatatccgtactgacagtaaccacctgaccaataaacagggcaaggaatttccggtattcccggggatgattgcgacggtggatattaaaacgggcagtaaatccattctggattatctgctgaaaccactcaataaagcgaaagaggcgttgcgggaacgctga

SEQ ID NO: 124500 - DNA, 885 bp, Enterobacter cloacae
atggataatcatatctcatccagggccttgctacatcgaagggatgttattaagaacaacccgcggtttagcgaggcaataatagaacactacaaaatcaatgacagcatctataaaaaacaacccttgttctacaaaacaatgctccaggaatcacgattcaatattattcttgccatgtgttgttttatattcggcaatcaggccgaatctgtttcagagataaaagcattatgttcgcgatacaaaatcgccagtcccaacagcgttattgctatcatcaccttactgagaactaccgggcggattaagacctggcgctgtatggaggatcgccgcaagacgcgcatcgcccccacgcaaaaaggactggatgaactaaaacgttacatgagcggcgcatttatacctgtcagtattctttacccgacatttaacatcgaccttaacctgttagataacgatattctgagaaataactttttccgccgggcggctgagtatctgtttcgcggattaaccttcaaagccgtgttaccggaagtggggttatttattgataaggatggagggcgaatgattatgctgtatttatatttgcaggctattaaaaacaaaaccgcacatggcgcgataattgattattcgcccggcacgctggcgaaagcattttttgtttcacgtatccacgtggcgcgcataattaaatccgcgcaagaggcaggttatcttaaagacagaggggatggccgcatgaccatttatcctgcatttatgcagctcgtcgaaaattatgccgggttatattttgcctatgtcacgcattacatcaacgtggttccgaaggagcggcgccaggggggtgacgtaacctccccggtataa

SEQ ID NO: 124501 - DNA, 1464 bp, Enterobacter cloacae
atgattcaaaacaattctcacaataatcatgattgtcatgcacaggaatttgttatttcagcctgcagttttacgttccaggggtaccgtctgttactgaaagagcagggaggggtggcgtcacaggtgcgttttgaggatgacgtcgcaaatcgggaagatgtctacactattatcaaaaatcaggacgctaaaattacggtctttctcggggaagagatcgtggatcttttgcagagcctcaggcaccttgccgatcttcttaacacgcttcccgtcatccgcccggtcaccctgtatggcaatatacctgacagttggctgtacgggaccttgcgtagtttattgaataacaatcaaaaattatctctgatccgcatcgccaacagcggcgatattatggcgcgtgtccagaaaaaaagcgacgcatgcagggacagatctcgctcattgcaggatcatcatgcggactgtagctttaaagatcgtcaaaaagggctcacaaacagagaactcgatgtcttattaaatttctaccggggtatgtcggtaaataaacagtgcaaaaaatttgggctgacaaataaaacggtatatacacatcgcaaggccggtttaagaaagctgcaattaatccagttgtggtataaaaattctcagggtttttctgtaccagggagtggggaacggcagggaaaaatagaatcactgtccagtactgaggtggatgtctttaatgcgctgcttaaaagggagatatttcctgcgtatcaaatcatcaccgataaaaataaaaaaggtgtggggtttgagattttattacgctggaacaagaacggtaaaattatcaagcctgcccattttcttaccggggtgaaaaatcgtgagctatggttgaatatcacggcgctggtgctgcatgccgctgtttctggcatcaacaaatataacgggaaatattatttttcggtgaatataccgccggaactcgcggccggaaatgccttgcccgagatggccaaaaaagccatcaagatgctgctcaaaccccagtgggccgggaacctggtctttgaatttgctgaagatattgatgtgaccaaagataaaaccatcccggaaaccatgcgtcgcctgcgcagtacggggtgtcggttattcctggatgattgcttctccagccatcaaaccatgtttccggtgaggcaggttcattttgatggtttaaagcttgaccgggatattgtcggaaagtttgtcgctaatgacaatgattacaaacttatcaaagcgattcagatatacagtgacatgaccggcagcgaatgtattgcagagggggtggatagcgaagagaaatttgaaaagctggtggcgttaggcgtaaaaagtttccagggatattatctttcccgcgccgtgaaagaggaggagttagatcgcatggtaagattgtttagctaa

SEQ ID NO: 124502 - DNA, 477 bp, Enterobacter cloacae
atgagcattatcattcgtcaggcccgccccgaggatgcggcggccatttacgccatgatttatgagctggcggtctatgaaaaagcgccggaagaagtgatcaccacgccggacgagatccgcgaaaccctctttggtgcagacagtaaaaccgaagcgctgatcgcggagtatgaaggtaagatcgctggctatgccgtgttcttcaccagctattcaacctggcttggccgcaacggtatctatatggaagacctgtatgtatccccggattatcgcggtaaaggcgcgggaagagccttgctgaaacatatcgcgcagctcgccgtaaaacgccagtgtggtcgtctggaatggagcgtactggactggaaccagccggcaatcgacttctacctgagcattggcgcgctcccgcagtccgagtgggtgcgctatcgcctggatggagaagcgctgctgaaatttgccgggtaa

SEQ ID NO: 124503 - DNA, 927 bp, Enterobacter cloacae
atgatgaatattatgcatccggctctgagacgccttgatttaaacctgctgcccgttttcgacgccatttaccgtcaccgttcggttcgcctggccgccgatgagttagcgatgagcacatcggcactgagccatgcgctgtcacgtttgcgaacgacgctgaatgatccgctatttttccgggaagggcatcgcatgtcacccagcgtgtatgccacacagctcgcgccgtccattgcttctgctttgtcgtttcttaatcatgagcttactccgcagccggagtttgaagcggccaaaagtagcgagagcctgcacattgcgattacggattttaccgcgctttgcatattcccggccctgatgcacacgttgcaggatgccgcgccgggtttgcgttttgaactgcgctatctgccgcacagcccggcgctgacggagctgctggcaggcgaagtggatctggcgctcggtttcagcacggcggaggagatccgccatcctgaactggaggagataagctggtttgaagatgagtatgtggtcatcagcaacgcaagccggacacgtctgacgctggaggattatctcgcggcccgccatctggttgtcaccccctggaatgagaagcagggcgtgctggatttacggctggaggagttgggctatacccggcacattgcaatcaaaaccccgtcaatgctcagcgcaccgtttatcgttgcgcaaagcgatctgctgatggccattccccggtatgcagccgaaaagctgaaggcggcagtggatatcaacatttttaccttaccgttctccattcaaaaatttgacgtgaaaatttactcccataaacgcagcggtcagcggggcgcaacccgctggctgaaagaagagttgcaagcgctggcgcaacagggtgataaatga

SEQ ID NO: 124504 - DNA, 372 bp, Enterobacter cloacae
atgatgtcgtggcgagtattaagttctgtcatttgccctaacacaggaatcgtttattcgcacattgttggtttgaaattattaagattaataatttggtacgagagtgacatctatcttttgcccggtgacagaatacatacaacaaaaaatggaatttttgtaaatggtgttttcaaccaaatatccctttataacgtctcgccatacaatgagaacctgtgggacgaaataaaaaacaaaatggcctgtccttttaataaaaacctggattctgaagactgctcatacgctgagcattgcaatgcgcgcaaatgcccacacggatttgagacaacccctttgataataagagtgccccgcgatagctaa

SEQ ID NO: 124505 - DNA, 513 bp, Enterobacter cloacae
atggctgccatgaatgataaaaatgaaaagttacccgggataaatgagagttatcgcttgctgaggtttgaatatgcatttcgccaggtcggatttattgtgttactgagtattatcatcgcggcgattgccggtctgttttcaagtgggatagtgagtgacacggagaaaaccaattctgcaaaatccctgaccctcaactatgaacgctttgcgcgtcggcaaacggagtcgcgacttcagctgatctttccggtcaacagcgagggcaaatacactgtgagcatgaccagcgagagcagcgacgcctacgagccgggcagcgtctggccgcagccagacagcatgtacagccgcgggaacacgctctattttgtctataatcatcttgaaaaatcgccacatttttcggtctggctgttcattaccccgaccagaggcggtaaatggcacaacgtcattcgtgtaaacaacctgccggatattcctttctggcaatttatttacccttag

SEQ ID NO: 124506 - DNA, 507 bp, Enterobacter cloacae
atgagcaatctataccacgacaacaccattaccgtggctgaactgaccaaaaaactggcgagcaggttaatcgatgcagggcttcgcttaacaaccgcagaatcctgcaccggcgggaagctttcggtggcgctctgcgcggaagagaacactgccgatttttatgatgtggggctggtcgtcttcagcgatagcgcgaaggagaggatcctgggcgtaagcccggaaaccctcgcgcggtttaccgccgtcagtgaacagaccgtcaccgagatggcggccagcatccgcgacattgcccaggccgatgtcagtattgccatcagcgggtatgccgggccggaagggggagatgacggcacggcggcggggaccgtgtgcttcgcctggaatatcggcggaaagacggaaacgagcagggtgctcttttccggcgactgtcaggacgtggtggaaaaagcggtgcattactcgctggctgaattagtgacgaaattatcgggctga

SEQ ID NO: 124507 - DNA, 1170 bp, Enterobacter cloacae
atgaccctgaagaccgcggtacaaacccgttccaaattaccggatgtgggtaccaccatttttaccgtaatcggccagctttctgctcagcacaacgccatcaatctttctcagggcgcaccgaatttttcctgcgacccgaaactgattgcgggcgtaacccgcgcaatggaggcagggcataaccagtatgccgcgatgaccggcctgcagcctttgaaagagcgtatcgcggagaaaattgccaccctttacggcaccacgtatgacccggggcgcgaggtgctggttaccgccagtgccagccaggggctctattccgccatcagcgggctggtgcatccgggcgatgaggtgatctacttcgaaccgtcatttgatagctacgcgccgattgttcgccttcagggcgctaccccggtcgccatcaaactcacggtgccggattttgcagtgaactgggatgaggtccgcgcggccatcacccccaaaacgcgcatgatcatcatcaacacgccacataatccaagcgggcaggtgttctccgcgaatgacctgcagcagctggtggccgtgacgcgcaataccgatatcattattttgtctgacgaagtgtacgagcacgtcgtttttgacggtgaaccgcaccacggtatggctacacatccgcagctggcggagcgtagcgtcattatctcttccttcggaaaaacctatcacgttaccggatggcgcgtggggtactgtgttgcaccggcggcactgatggaagagatttgtaaagtgcatcaatttttgatgttttctgccgatacgccaatgcagcatgcgtttgccgaacatatgaccgatccgcaaacctggctgtcgctggcggtgttttatcagtgcaagcgcgatctgctgcaaactctgctggctgagtcgccgtttaaactgctgccgagcgcgggctcgttcttcctgctggcggattacagcccattcagcgacgagcctgacagtgagatggtgaaacggctgatcgttgagtgcggtgtcgcgaccattccgctgtccgctttctatacggatggtacggacaataaattgattcgtctctcttttgccaaagatgaggcgacgttacgggcaggtgcccaggccctgtgtcgggttaaaccacgctaa

SEQ ID NO: 124508 - DNA, 585 bp, Enterobacter cloacae
gtgaatccgggtcaggaaatcatcggagtggttctggcgggtggcagggcaacgcgcatggcgggaaaagataaggggcttcagcagcttaacggtaagccactttggcagcatgttgctgacacgcttgcagatcaggtttcggcaatggccatcagtgccaatcgccatatcgatatttatcagcgcagcggataccccgtttatcaggatactcttggggattacgcaggaccgttggccggcatgctctcggtcatgcagcagtctgaggcagagtggtttgttttctgcccgtgtgatacgccgtttattccctcctgccttgtcgagcgtctcgtgcaatttcgtgatggtgcaccggttgtctgggtgcatgacggtgagcgtgaccatcctgctattacgctgattcatagatcattagttccagcgctgcaggattacctgacggcgggagagcgaagagtcatggtgtttatgcgtcagtcaggcggccattccgttgattttagcgactggaagtctgcatttgtgaacgtgaatacgacggaagatttacagaccatgcaggagaaaaaatga

SEQ ID NO: 124509 - DNA, 918 bp, Enterobacter cloacae
atggcactggaaaagggtattgataagcttgtgcaggattttatcgctgcaggccgacctggcgcgcgtaagcagagtattgatgaccggagagccggatatgtagccagcactgtacttgccggcgaaaccgaaacccgcgtgcaggttgaaacgcttgtcattgatggccttacctttcgggtattttcgcctctcaatgtctctgaaacgttaccttgtgccctctactaccatggcggttgttttgtcagcggtgggtttgcaacccatgacaatcagctccgccagctggcgttttacggtcagtgtcgggtgattgcggttcagtacaggctggcaccggagcataccttccccgctgcgcatgatgatgcagagagagcggcggagcttgtctggcaaaatgcagaaaaagtcggtgtggataaaaagcggattacgctttgtggtgacagtgcaggcggccatctggcgctggtcaccgcgctgcggctcaaggctaaaacacagtggaatccggcccagcttatccttatttaccctatgctcgacgccacagccagctttgcaagctacacccataatgggcaggactacgttatcacgcgcgatacgctgctgagtggttatgacatgtacctggcagagacagaccgccgggaccctgaagccagcccactctggcgggatgatttcaacggcctgccgccggtacatattattaccgccgagtacgattcgctatgcgacgagggtcaggcgctttatcaacatatgacagaacaaggggttatttgcacagcgcagcattggctgggtgtcatccacggcttcttccagcttgccggcgtcagtccatcagcgcgagacgttcttcgggacatcgcctggcggatcaactccgcccggcgataa

SEQ ID NO: 124510 - DNA, 699 bp, Enterobacter cloacae
atgaacgcattgatcaaaaaaggaatgctggttacagcgttagccatgtcggttaatacagttatggctgcacaaagcattgatattaaagtaacaggtaaaatccttccatcctcatgcactccagccttcccaagcggcggcggtgtggctgactttggtaccatgaaggttgcctcactcaactcgaccagcatgaccccgctgacggaaatgaaagaaattcctgttgccattacctgtgaagaagccacgcgtgttgctgtgaagtttaccgattcgcgtgatgactcttcacccactgaaaaagtcgtaatgggtaatggctttaccggttcgccatctactgtgtttggtctgggaatgtataacgataaaaaaattggtgcctatgcattagcgttattccgtactcaaggtgcaaacactaacagtaatggggacccgctttatccattggcgagtatagatggtggaaaaggctgggttgttagaggcgccgactatatgcaaatttacagtgacaattctgaaatttatgcctttgcttcagataaaacgagtggcgcgccttctgcagaaagcaagatcaactttaaggttgctgtgagcgccacaatcaacccaaccaacgatttaaacgtcacggatgaagtgacgctggacggtttaaccaacgttgagctggtttacctctga

SEQ ID NO: 124511 - DNA, 684 bp, Enterobacter cloacae
atgattctctctaaaaaaacgttgctctgcgtttgcctgctttcgtcgttgcagacatttgccgccggtatggtgccagatacttccctgctgttgattaacgaagacgagcggggagcgagcatggatgtgaaaaatagcgacgataccgcccagcttctttatacccgtattgtcgatttaccggacgatcccacacccggtgttattgtcactcaaccggtggtacgtgtaaatgccggtaaaacgcagcgtgtccgctttgtcttaaaagacagcgcggaaaaattaaaaacagaacacttaaaacgcgtcattttttccactattccgcaacgagagcagaataaagtgaaaatggtgttcagccagaatctcccggtcattattcacccggcgggtctcgacgtgaatatggagccgtggaaagatctgcgctggcagattaaaaatggcaacctgacggtggtaaacgatacgccttatgtggtgcgtatggagcaaaacgccacattattaccgtcacgaattaaggtcaaattcgataaaagctatattcttcccggccagacgatgatagcgacgtcagaaaacaaaatatccgggcagaataacaaggtagaaatgtaccctgctacccgctttggctataaagccagttcttacgttgctgaagtaaaataa

SEQ ID NO: 124512 - DNA, 2430 bp, Enterobacter cloacae
atgaatatttccccctgtaaaacaggcgtgctggcattttgcctgagcgcggtggcattcggaattcgtgcagaaattctgccaacggcagcgcccactatggagctggcaagagcgtttttcgatacccaggcgttaaaagagaatggcctcgatccggctattgctgactattatgccgtcgccccgcgatttatgccgggttaccataatgtcaccgtgctgattaacggcaaaaagcgcggcattatgcccgtgaaatttaatgatgaaggtcttccgtgtattgatggggaatttttggacgccgccggattatataaaaaactcaagcgtgaaacgtgcccttcaattcaccagtactggaaaaacgcaacggtcgtcacttctccagacgtagatgaaatttcactggttgttccgccggaggccattaaccctgaaagtggccgccaggtggctgacgtgcgtggcggacgcgcggctatgctgaactactccatgtttggcacccattacgactttgatgatgataagtccgatcgttttcagtcttcgtttgaatttggctttaacgcaggcgactggattgtgcgcagttcgcagtttatcagcgacggcagcggcatgtcgttcgagagcgactcgctctacacctatgcacagcgcacttttaccgactacggcgtgatggtgcagggggggcaaattaacatcgccaacagccgcttcagtatccccggcatctatggcgtacagatgatgccggataacgctctcctgccgggctacagcagcggtattgaggtgagcggtattgcccgcaacgcccaggcgcgcgtggacattcgccagggtggacagctgatcttctccacgctggtgcctgccgggccgttcaccttaagcgatgtgccggttgctaacctgaacacggatttaaaggtcacggtgacagaaaccgacggcagcgaaagccattttacggtttccgccagcaccttccgtagcaaccacgtgggccgtgcgccggggttttcactggccgtcgggcgtgcagaggacatggagacaaactttacgcagccgtggattgtcgccgcatcaaacggctggtccattaacaaccggatgaactttctcgccggcatggtgatggcagataaccactattacggtttctccgccaacattgacaccgtgccgatgcagcatatgtatgcctcgctgggttttctcggctccattgataacctctcgcaaaccgacggtaacaaaaccacgctggatctcggctacgccttaccgtgggggctcggcctgtcccttggcgggagctacggtacgccgaagtatcgtgaaatgcaggagttatacagcgatgacgatgactactcgaccacgaaatacgacaccaacgttggcgtgagctggtcgaacccgacgctgggccgtttctctctgagctattacaacaaccagacctggaacagcgaatacgacagccgccgcatcatttcgtcatggtcgcggtcgttccgctattttaacgtcagcgtaaactgggaatcagacatcagccacggtgataagtacaccagcgacagcgatatgttttatgtgaacgtctctgtgccgctgggccgcaccggcgtgtccaccaacagctggtaccgtgaaaacgagggcaaagcctcttacgggacccgcgccatggggtcatttaacgatgaaaacacctacacggtgggcgtctctcaggatcacgatgacagcgtaaccaactgggatggttcgctgaacagtaacctgcactacaccacgctcgcgttgggtattggcggtgacaatgaaagtaaccgtaactcctcgatcgcgctgagcggcggcattgtcgcgcacggtgatggcgtcaccttctcaccttatccggtaacagatacctatgcggtagtggcgctggacaagcccgttgccggggtggcgataggtaccccgcgaggtaatgtctggacggacaaatggggcagagcggttgtgcccgccctgacaccgttcagcgaaagtacggttgaaatagatacgcaaagcctgccgggcaatgtggacgtcagcaacggtcatgcgtcgctgaaggcctcccacggagcatttgctcactggaagttcaccacgctgagccagcgccgcgtgctgctgaatattacgcgcgcggacggcacgccgttaccgaaaggcgtctctgtcgtgaatgggaaaggggagtacatcacctctgcaccagaagacggcatcattttcctgaatgatatttccgccagccagacgctgtatgcgaagcaggatactggccgttgcacgctgagtttcaccttgccggaagcggatcccactcaattctacgaggagataaacggaaaatgtctctga

SEQ ID NO: 124513 - DNA, 591 bp, Enterobacter cloacae
atgtctctgattattcgtcgcacgtgtttactgctgctggcctgcgtcgccctcagccatgctcccttcgtcctggcagaagaagagtgtcaggtggtttcgtcagtaaagagtatcaataatggtctgctgcgtcgggaggcgatgcgcgaggtcagcacggatattggcggaaaaacgtaccggggttatgcctcgtcagaacgtgagatccaggtgtcggtgatctgcccggacgcgcgcaagatccgtctgcaggtggacggcccggcccgtggaaataaagcgtatcgctttagcgacaacggtgtgctgaaaatcacggcgaaagaggcccgcatggataatggtgccgtgcagctggcggccgtgccgcgcggcgcggcgcaggtcaccgcgggtgcagcggaggttacgctgccgccggatacgtcgcttgtggcggtgaacggcagcgaggtggcaggcaaacagctggttgttacgctctcggtggtcacttatctcaacgataacgcgttcaggaccggcaacacggcggaactcgaagaaatgctgacggtgaattacgttaccctcgcggcgcagtaa

SEQ ID NO: 124514 - DNA, 765 bp, Enterobacter cloacae
atgcattccgatatcacccgaattttgacagagctggttaaccgcacgttatcgctgggtcagatccatttctcagccagggctgagcagtccccccgaacagcgccctgcctcgttattaccctgaataattcctgtgaggcgatattttcctcatccgggcacatgactcatcacccggctaacttcctaagaatcaacttcggtaagcagcaaatggccattgagttacagcgtgagaacgtgcttgtgcagcagctccagatcgcccggcgtggcccgcgaaccggtgcgtttctcctccagacactagccgaattacagatgcaaccggatgaacaagacaccgcgaggctggtggtactgagtctgctcagccactgccgggatctttttggcagcgacattcgcaccgccaaccgcagccgcgcgctcttcgaagcgattcgtagctatatcgacgaacatcacgcctctttgttaacgcgtgaatcggtggcgcaggcgttctacatctccccaaactatctttcccatctctttcagaaagttggcagtgtcggattcaatgaatacctgacccaaacccgacttgaacatgcccgacagttgcttaaaggctacgatctcaaaatcaaggatatcgccgcacgatgcggttttatggacagcaactacttctgccgcctgtttcgcaaacacaccgaacgttctccttccgaatatcgccgccagtatcacagccagttaaccgccaaaaaatag

SEQ ID NO: 124515 - DNA, 186 bp, Enterobacter cloacae
atgaaaaaaatcagcatcgtaagtgccctgctgctggccgctggactgtccactggcgcgatggcagcagagaatggcttctgtgtaccggaagccggctcgaatatcgacaccagcatggtgaatcatattgatgtcagccacgcattcgacaaagagaacctgaccgcaggggatcttcagtaa

SEQ ID NO: 124516 - DNA, 1005 bp, Enterobacter cloacae
atgcgcagtttacgcaatgtgtttagcttagcgctgctctgcagcacgatgcccgcgtgggcgacggtttgccagaacgccacgggcgtgccgaaggatatctcatacgatctttcaaacgtctttaacagttccaataacaaaccggggcagattgtgacccttgcgcaaaaatccgggctggtgggcgtgaacgccatttgccctaaaggaacaaccggaaagtcgacgatgcgtagttatgtcaccagcctgccgataacgacggtaattgatggctataagtatgtgaagctgaatgactaccttgatggcgcaatgcagatccacgatgactacgcgggcaccttctatccaccgtcagactacattcagatggggcagcaccctaacgttccgaacaacaaagcgtttcctgtcaccgattcgaagctggtctttcgtctgcgggtcacacggcggtttatcaacatggtggtgatcccccagcagaccatgttcaccgtctatgtcaccaccacgtcatccgatccgctgaatacgccggtctataccatcagctacagcggcaccattcaggtaccacaaagctgtgcgattaacgccgggcaggtggtggagtttgattttggtgatattggcgcgtcgttgttcagccaggcgggggccggcaatcgtcctcagaacgtctcaccacaaagcaaaaccattgccattaagtgcaccaatgtggaggccaatgcgtatctgacgatgcgcatcgaggcggaaaaaatctcgggcaatgcgctggtttccgataacccggatttagggtttgtcgtggcgaacgatagcggtacgcctctgacgcctaacaacctgaacagcaaaattccgttccgtctggatgacagcgcgcaggcgcaggtggggatccgggtctggccggtgagcattacggggaataagccagcagaaggccggttcacctctcgcggctatctgcgcgtggattacgattaa

SEQ ID NO: 124517 - DNA, 723 bp, Enterobacter cloacae
atgcgaatgacagtgcgccgttaccggcggcggcgtacaggaagtgatgcactgggatttacgcactcgccttttgctcccccctttttcgaccggctcgaatttttgagccagtccatccaccaacatcgcaaaaccgacgcgccctttattattctggtcacggaagatcatttcctgcgcaccggttttctgaacggccagtttcccctgagcagctgtagcgactacccgacgctggacgaagcttttcaggcgttgaatcagtggcctgcagcccgtctggtggtagatattgaaagccgcaccacggcgcttatggaaaagctggatcagctgagaagacacagcctgtatccgccctttctcacgccgtatctgttggtcagggcggataattacgacacccgtctgttctgtaaagcggcggggccgtttcatgtccttgaacgccagtcaacggcggcggcactccagcacagcctgatggacatcagccctccacagggctccagtaaagagtggttctctcgcggcgagtggcccattttacaggagctgtcgcgggggaaatcactacgtcagatcgccctgctgcagaatcgcccctacagtcgcattatctatcgcctgagctgcattctggtgaagctcgggcttagccatcgccaggaactgctgcatcttctcaataatctctccgactgcccgttttactcttaa

SEQ ID NO: 124518 - DNA, 699 bp, Enterobacter cloacae
gtgacagcgcaaaacctgatcgatacgtcccccagcttacagcacctctctcacgatatcgcgggcattaaacttgagcctatcatcgccctctcctcgcagcgccaggttggagtggaagtgctgagcgttctgtcagcaagagagcaaagcgaagcatttttcaacgatcggtctgcggagtggtcacttacgctgcttgaagcgcaacttgtcgcgctaaaaaataccccgcactgtcataatctttacgtcaatctgccgataaccatattaacgcagccggacgcctttcagcggcttctccggctgcctgccgcaccgctgaatatagaaattgtcgacccggcacgctttctggcgctgtctgacacaaaacggcaggacgttcaccagcgcctgctgcagctcagaagacaaggccacggtatctggctggatgatattgatgaagcgatcgtccaaccgtttttgtcctgccggctgccgttaaccggcataaaaatcgacaaggaagcattctggcgtttacgcgccacccctgcgctcgggcaactggtgacacgttgctttcagcttgccgacaacgtgcttattgaaggtattgagactgaaaaggatcatagccgggcacgacaggcaggagcaggactcggccaggggtactactggccgtcctggacatggccggaggaataa

SEQ ID NO: 124519 - DNA, 831 bp, Enterobacter cloacae
atgtggtatctactcgcaacttcgcttgccgcactttccctgaataaaagcctggcttacctgatgctggggttaacggcatttctcggctggaaacagagcattcttgacgccccggcgctgctggtgattgcattaatcgttattggctggtctgttgttgaatggctacgtaataaaaataataaatatacttatctggtcgaaggcctgtgcgtggtcatcgccgttgccctggttttacatgcgatccctggcttccataacccccaagtactggacgctgtcgttgttggtccgcaaagcatgccgttcagtatgtactttaatatggacaaggcagtggtgccgttctttttaattacgtgcatgccaacgttattcgtagcaaaacccctttataaagctggcaaggtcggctggggaatattggtattggcgatacccgcgctgttacttctggctgttgcgttgggcgggctgagaattgagccgcatgcgccagaatggtttgctcaatttgcccttgcgaatattttcttcgtctctttggccgaggaagccttgttcagaggctatctgcagcagcgcttgtcccgggttgtgcatcctgttgtagcactgttgattgcctcactcatttttgggctaatgcattatagcggcggtttactgctgattatttttgccagcctctccggtattatttacggcctggcgtggatgtggagcggcaggctctgggttgcaacgttcttccattttgggctgaactgcgtgcatttattgttcttcacctatccgatgtacgcccctcacgcgtctgtgtga

SEQ ID NO: 124520 - DNA, 603 bp, Enterobacter cloacae
atgtcaccactgatgattgagtcagcagattttagccaaaaactcgggcttatctcccgaaatgtcgaacatacagaagcattcctggcgcggggcacggtggattttcagttgccggggtatttgctgcctgcaggataccggctcctgaaatcgcgttatagcgatgaataccgtctcgtcactaccgacgacggcaaaccttatacggcatatgccgtgaagctggcgttccataaagagatcacctttcctcacggtgccgcaacgcaagttatggtctggcgtacgccccgcgctgtccatcaacgcgtgataagcggattaccacaattgttttttcagtgggtgctaagcgaatacgacattgtagtgtcagacagcgagcaaaccggagacggtcaacggttctggttacgcatgatcgactgggcatttaccatgaattatcgcattagcgtggcggacggcacggaaggagaagagtggagactcacgccagtaaattcatacgcggaactggaagagcgctggatcgcctttgcgtggggggacgatcgtgacgttcatccgcaccgcagattggtgatcagtaaggtgtaa

SEQ ID NO: 124521 - DNA, 1104 bp, Enterobacter cloacae
atgaaaaagtccctcttcatctgcgtggtgtttgtcatgattattgcttcagccgcgagtttaccgtttgttctgaatgccggatttggccagccaccgcagggtgcgcagctcacggaagtggaggcctcgccgcagtatcgcgacggcaaattccacaatacgttgcccacgccaggctataacggcgacaaaaatatgctggtggcgatgtgggagttcctgaccaaaaagaccgaaaacgcccgtcctgcacagccgctgccgctggtgaaaaccgatctcgcaagcctgccgcgggagcaagagacgctggtgtggctcggtcactcctcctggtatatgcagcttgcggggaaacggatccttatcgaccccgttcttggaaattacgccgcaccgttttcattcctcaacaaagccttcgccggggaatatccctggcaggcgagcagcatgccggagatcgacctgctgatcatttcgcacgatcactacgatcacctggattacgccaccatcacggcgctgctgccgaaggtgaaacgcgtggtcactccgctgggcgtgggatcgcacctgcgttactggggaatgaagccggagattattgaagagcgcgactggaaccagtcggtgcgcatcagcgaggcgctgacggtgcatgtgctgcccgcgcgtcacttctccgggcgcggcatcaagcgcaatcaaaccctgtggggcagttttatgttcgttacgcccgaacagaagatttattacagcggcgattcaggttacgggccgcattttaaggccatcggcgagcagtttggcgaggtggatttagccattatggaaaatggtcagtacgaccaggactggaagtacatccacatgctgccggaagagacggcgcaggcctcggtggatctgaacgcgaaagccgtggtgccgggacataacgggcgcttcgtgctggcgaaacatacctggaacgatccgctaatccaactggcaaaagccagcaaggacaaaaattatcggctgttgacacccgcgctgggcgagcctgtccgggtgagtgatcccacgcaaacatttcgtgagtggtgggaataa

SEQ ID NO: 124522 - DNA, 393 bp, Enterobacter cloacae
atgttcactctatctgatctgattatctgcggattcgcggggttaagcctctgctgtggtatcgcggtcgcgttcctctcatttctcaacaaaaagcgcttctccgcgatctgcacgctgtataaagaaaagtttggttctctccctgccggatcgattatcttcgataatgccgattctatagggtttagctcaggttacgcagcgaagatcaactttatcgtgaaccctttgatctttggtaaaagctcagttgacagtacaaatgatgatgttgcattcatcaaagacttgccacctcacctcaaaaactggtttatcgtcgagtatgctttctccgctttaggattggtatcaatcgttatcgccggagcagtgttgtattttcgatag

SEQ ID NO: 124523 - DNA, 1392 bp, Enterobacter cloacae
atgggcgttaaggggtactttttattcaggggcgataagacagtatgcggcggtaggattattgaaggatggagtgatcatcagtttttcggtagagacatgtcctgtgaaggtcatcaagtgacctgtggtaaatatccaggtcgttaccgtatctgtggcgggcttgataccgactatatacatggtaaaaggatcgccggaacgctgcacagctatagctcctgtccctgcaaatcgaaattcgttccttcaaactttgacgatggttacgaacttggtggagaagaaacagtaacacacactgatctgtctcaccccttagggattcctgtactcccagaaccgattgaatcagaaccggaacaacacgcccagacagcgaagaagaaaacaggcatagacgctggttttgccgttctcccctatggcggcactacagaagcctggcaacgtctgctattcaccgaaaacccgccagcgggagcaaaggaactattcgctacgctgaacggccccgatgaaaaatacaaatctggttcgattatgcttctggttgatcctgaaaagcaggacgaggaacagattgcccacatgaaagccgcgaaagcgagggttgatgcagcgttagaaccactgactatccaggaagctaactttcttcataagaacaaagacaccattgatctgtttacttcacgtgccagtacgacagccggggttgcttcagatgctgctggtaaatactttgagaagatcgaaaatgttttgaccaggattcagcaagcgtacaaaaatcagtacattaccagtggatcactgatcagcgaacagttctatgtgcagaggcggcagctattcggtgaacttgatagcattctcactgatttcacccgtcacaaactcgccttgcaagactacccggacatcaagcgagcattaggactatcgaccagttctatcactcaccgctggaatcaaacgggggttgctgacattgaaggctacgccaccttcatggagaacgcagcaaaatacgtgaagatgatgaaagcagttggctatgtcggtattgctctcgatggcgctaacaggctggacaaagtttatgaagcctgcaccgttgggagcgattgtgaaaaagcggcatttactcaggtcggcggattcagtgttggtactgctgcgggtatttacacatcctcagcagtgtatagtggagccactgcggcatgtgcggtagtgctcggcgcgttaactgtagaagtcggagccgttggcgcgttagcatgtggcgtaatagtttctggagccgttgggtatggtgtcggtgaagttggcagcaacgttggggagtttgcaggagagaaaatttatgaggttgttaaataa

SEQ ID NO: 124524 - DNA, 471 bp, Enterobacter cloacae
atgcagcaatacaccaacgagatcacgcctgaaatccgagaatcctcctcacaggaacactacgacgaagattttttagcaagctgtgacagcaagacacgtgaagagcttgaggattttaataaacaagttagtcgcccattagcctccattttccgattcgctgtagtgggaagcatcacccgcaacgggggagtgatccgcaatgcttcggcaggcagtccaactggtgggtataagatggcgcgggttggagatagagttgtttacgctgacggcagtgaagccactattatttccggtgcaggtgtagcgcgtttaatgcaaggcgcatctgcggcactggttggcagtatgctcgataacggagaagaaataatctcaacaccacagtccagcggcagactggtatttcgtgaaggtgatacattcccgaaaggattcttaaccatgccagggagtaagcactga

SEQ ID NO: 124525 - DNA, 4212 bp, Enterobacter cloacae
atgtttgaagctgcacgcgttggtgatgatatcggccactccggtgcgctggccgggatgattgccggaacgattgtcggtggcctgattgccgccgccgggggcattctggcgggggcgatgtttattgccggtctcggcgcatcctgccttggcgtgggtgtgctgctcgtcggcgcaagcctggccgtggggtattacaccggggagctggcgaccgccgcccgggacagtatcgccgatgccggggcatccagtatgacgaagaaaggcgtcatcacctccggctcgcccaatgtgtttatcaacagcaaacccgccgccatcgcgacggacagcgcggtgaagtgctcggacgatggctcgcagcagatggccgaaggctctaagcgcgtctcgattaacagccagcctgcgtcccgcatcggggatcgcaccacctgcgacgcgaaggtgatgaccggctcggacaacgtcttcatcggcggcgatccgcagcaaaccctgcccattcagtctgaagtgcccgagtggctctataaagtctccgatcttaccctgctgttcgccgggcttctcggtggctggggcggtgcggccggcaaagtcggggcgctctctaagctgctgggcaaaatccctgggatcaataagctggcccgtatcgcctgccgcgccggcacgctgatgaccggcgtagcggccgcggggatcatcgcccgtccggtggatatcgtcagcggacagaagtttctcagcggggatgatgaactcgatttcgttctgccgtcacgcctgccggtgcgctggcagcgctactggcgcagcggcaaccccggtgacagcgtgctgggccgcggctggagcctgttctgggaaagccgcctggagccctatcaggacgggctggtgtggcgtgcgccgtccggcgattacgttgccttcccgaacgtgccgaaagggatgcgcacctactgcgagagcgaaaaaaactggcttgaacatcaccatgacgacagctggtcggtgtatgacgtcagcggcgagcgctggcactacgcagcgctgaaagatgacgcaccgtcactgcttcagcgtatctcagaaccctgcggcaacgatattctcttcgagtggaatgcggataataccctgcatgccctgaccgacagcgcgggccagcgcgtggtctgccgctacgaccgtgacaggctcgccagcgcctggctggatgacgagatttgcctggtcagttacgcttatgatgaacagcgccagctggtctgtgtgaccggccggggcggtagcgtgcgccgacgcttccgctggcaggacgggctgatgagtgcccacgaggacgccaacggcctgctgagcgaataccgctggcgggagattgacggtctgccgcgcgtggtcggtttccgccacagcggtggcgaacagctgacgttcgaatacgattttgaaaacggcatccgtcgcgccattcgtgatgatggtgcgcaggcgaactggctgattgacgacgacgacaacgtcgcgcgcttcacggattacgacggccgccagacgacgtttgtctaccgcgacggcgagctcagcgatgtcattctgcccggcggtgcaatgcgctgcagtacctgggataagtatggccgcatgaccagtgagacggacccggcaggccgtcgcacagaatattactggtatcgtctgaccgatcgcatcacccggacggtctacccggacggtacttcatcgcaggcgatgtacgaccttcgcggtcgtctgctgtcggaaacggatccggccggtaacgccaccgcgtatcactatcccgatgaggaagagaacctgcctgagagcatcaccgatgccctcggcggcgtggtacgtctggtctggaacatccaggggctgctgacgcagcgcaccgattgctccggcagcgtgacccgtttcagttacgaccgtttcgggcagctgattgccagcgaggatgcggaagggaatatcacgcgtcgggagtggaacaacgccgggctgctgagtgccgtgatccatccggacggcagccgcgagtcgctggtgtggaacgaacgtggccagctcacgggctggcgcgacccgctggaaagcgaggtgcgctgggcctataacgcgctcggcctcccggtcagcctcaccgaccgtattggccgcgtgcgccagtggcgctacgacccacgcggtaacctgctgcgactcgataacggcaacggggcggaataccgcttcacctatgacgctgtgggccgcccgctcagcgaaacgcgcccggacgagaccgtgcgccatatggaatgggatgcgcgagggttcctctgcgcgctcgaagaaaacgggcgacctgccgccgacggcggcatcgcccgtcgcgtccagcagttcagctatgacgacagcgggctgctgatcgggcgcactcagcgccatgcggagtaccgctacgtccgcgacctgagcggccagatcacccgcatccgtcgcacgccaacagccgaaggcgttgccctgggtatcgaaagcgatgagatcgcttaccgccatgatgccgccgggcgcgtgctgagcgaatccggcattaacggcgcggtgggctatgaatgggatgccctgagcaacctgaccggcctgacgctgcccggcgagcaaaagctggcctggctgcactatggctccggccacgtcagcgccatccgcttcgggcagcagctggtgaccgagttcacccgcgaccgcctgcaccgcgaggtgcgccgcacccagggcgcgcgcgagcagttccgccaatatgacagccttggcagacgtaccctgcagcgcagtgagctaagtacggacgtgaccctgccggagcaggcgatactggaacgcctgtatcgctacaccgcacgcggtgagctttctggtgtcagcgacaccctgcgcggagaggtggactacggctacgacgccgaagggcgtctgctgaagcactacgaggcccgacaggggcacagccgcgcgcagttcagctatgacgccgcggataacctcgccgccaatgatgatgcggtaccggtcacggataaccgcctgcagcactggcaggcgctgtttatgaaatacgaccactggggcaacctggtcagccgccgcaacgggctgtatgaacagcattatgcgtatgacgccgagaaccggctggtatccgcccgcggaaccgggccggaagggcggtttgaggcgcgctatcactacgacgcgctgggccgccgtacccgcaaaatcgtcactaccgcgcacggcaccaccgaaacgcgcttcctgtggcagggctaccgcctgttgcaggagcagcagcaaaccgggctgtgcagtacgtatatttatgacccgaatgaagcctggagcccgctggcgcgggtggatcatctccgtgaccagagcagcggtgagatttactggttcaacaccgacctgaacggcgcaccgctggaggtgactgacgagcgtggtgcggtacgctggagcggccagtacggcagctttggcgaggtacgccatcagagcgaagggttctcaagggttgtaaattgcacagcgatggcgcatcaaccgcttcgctatgccgggcagtacgctgacggtgaaacggggctgcactataacctgttccgctactacgacccgcaggtcgggcggtttattgtacaggatccgattgggttgaatggcgggctaaacacttacgcgtatgctccaaacccttacaaatatattgatccgcttgggttatgtaagggagatgtagtaagaggtaacaatccgtaccagacgcgggtagatccccgtttccccggaagacctgatcccgcattctcaatagacaccagaacatttgaatcgggaacactaacttcaaagggtggtataagaaataatcaagaattttggagtcaatgggctgatatgcaaccaggttccttaagtaatagtaatttatatagaataaaagagttagggttgtcaccaaaaatagatgacacatggattaaagcatttcctgaacatgtgaattataaaggagatacaataatacatcatcatgtcgattttggaccatatgctatacctgtacctggaagtactcatgttggcagtggcggtatttggcatacgaaatga

SEQ ID NO: 124526 - DNA, 534 bp, Enterobacter cloacae
atgttgttaacaataaatgaaattgaagttaagttgaatgagaagttctctccttttaatggagaaatggatgatttgattttgaaaaaaagaatggtgcctgtaaataatatccagcattctgaggaaagacttggtgtaaatttcccaaaggattttattgagtttgtcaataattatgatattgataacttctctttggggaatatatctttcggccatggcgatgattatttggagaaaatagtcaggattaacaatgatgagtttaaccattggtggattggcgagcatagaccagatggtgtgatatgtattgcaatatcagacccttatacaatcttacttaatactcataatggcaaagtttatgctattacaagtgaacaaactatggatggatgggaatcgatagctgatacttttgaactatttatcagaggtattggttcgcatttcttaaaagcatgcccgctaacggaaattataaattcaacaggggcaaatgatatttctttctggaatggtatataa

SEQ ID NO: 124527 - DNA, 531 bp, Enterobacter cloacae
atgttgataaataaactggttacaatactagcagcacctgtcgccccttcggattcaggaaagggaatgaaatggccactgattgaggatagtttatctttcccctctgattatattgaatttataaatgagtatggttcaggtcgcatcgcggactttattgttatttttaacccctttagtaaaaatgaagatgtcaacttttttgaacaatataaatttattttggaagaccttaattatctaattgagtcagataaggattattatcattatcaactgtatcccaaggataatgggttgattccgttaggagttaccgataatggggattatctattttgggtcgtaaattctaaagataatagtgagttatggactgttgctattattgcagcaagatcacctgaagttgagtattttgatggtgggtttactgattttgttaaaagattattaaaaaataaaattagatgtaaatcattccctgatgattttcccccacctgttatcaagttcgaaagcatttga

SEQ ID NO: 124528 - DNA, 522 bp, Enterobacter cloacae
atgcctatttcatgtggtcaatccaaaacaaaagatgagattagaattttggaggaaaaattcaaagtcagtttaccagaagattataaagaatttctcagcttgaaaaatggttttgttgtaaaatctccggatttttgtgagctggagtacgtagatgtcgatgaagggattatcgcttttcatgctctttttggaatgaatatgaaaaaccctaatcacgacatttttcgtcaaaatgagaattttttaaatgaacttgattttattgatgataaattaatcattggcgatgattctggaggtaatttttaccttatattaaatggcagtaaaagccagggtgtttattattgggatagaacacatctgcatgcagaggatgatatccaaaagtttgacatcgctgagaaaaatgagtgtggaaatatttatagaattagtaatgactttaccgatttttacgagaggatttgtgatttgtcacttggcacaggaatgaatgtaactattgatctgtga

SEQ ID NO: 124529 - DNA, 387 bp, Enterobacter cloacae
atgccagtggatatggaattttatgaagatgatgaaggtatctcagtcgattttgtattatcggcatttggtccttttctcgtccagtgcataaaacttgaatctgattcggtcgatgagaaaatgaaaaaagacatcgattttcttattaagaaacagaaagattttttcgagaaaatcgcaactgaaacccaggtatatagcaagcgtatttatggtgtggaggcaaaagacttgattttgctgaaagtttatctttccccagatgaggacaatgaatttgggttcatgttctcgaccgatttggatcaggaacatgggattggcatcaaatttaaagggcttgaagtgaagaaaattggtagtggcgaaacagtatttttataa

SEQ ID NO: 124530 - DNA, 900 bp, Enterobacter cloacae
atgaagattgatcttaaccttttacccgttttcatggcggtggcagaggagcatagtttcattaaggccgcggtacggctgggcgttacccgttcggcggtcagtcagggaatacgacggcttgaggatgcctttgggacaatgctggtcatgcgcacgacacgctcagtgaatttaacggaagcgggagaacggctgcataaatctctgtcattaccggtagccggtattgaagccgcattcgatgatatggcttctgacgatatgccacgtggccttctcaggattgcagtgacctcgattgcggaagaatttctttcgggtccgctaatcgcctcgtttgcggctgcgaacccagcggtgacgcttgatattgttgtcacggatgaggagtttgatatcgtggcagcaggttacgatgctggcgtgaggctcggagaagtcattgaaaaagatatgattgctattccgcttaccggaaagcaacgtgaaatggtggttgcctctccctcctatctctcagccaacggcatacccgctcacccgcgtaagctgatgcatcatcgatgcattggctggcgaccagccccgaatgttgcgccttatcgctggccatttgaagagaacggaaaagcgttcgacctgtcgattgaaccgcagattacaactaacgatctgcgtctgatgctgaggctggcacttgccggtggcggcataacgcttgccactcaggaaacattcaggccgtatattgaaggaggtcagcttgtatcattgcttgatgattttcttccccattttcctggcttttatctgtacttccctcagcgtcgcaatattgcgccaaagctccgcgccctgattgaccatgtcagggaatggcggcagcaatctgcttaa

SEQ ID NO: 124531 - DNA, 723 bp, Enterobacter cloacae
atggataaagtgatattaatcaccggcgcatcaagtggtattggagaaggcattgccagagagctgggaacggcaggcgcgaaggttttactgggagcacgcagagtggagcgtaccgaggcgattgccgcagaaatttgcagtgcgggtggtatcgcgaaagcccagcagctagatgtcacaaaccgacagtctatggctggcttcgtacaggccgcgctggataactggggccgtgttgatgttcttatcaacaatgcgggcgttatgccgctttcaccgctttcggctggcaaacaggatgaatgggaacgcatcattgacgttaatatcaagggtgtgctgtggggtattggcgctgtgcttccgctgatggaagcgcaggaatctggtcagataataaacattggctctattggtgcactttccgttgtgccaacggcggcagtgtactgtgcctctaaatttgcggtacgggctatttcagatggtttacgacaggaaagctctaaaattcgcgtaacgtgcgttaatcctggcgtagtggaaagtgaactggcatcaaccattacccatgcagaaaccatggcggcgatggatgtttaccgcgctgttgcacttcaacctgctgacattgctcgtgccgtaaggcatatcattgaggcgccggaaagcgttgatacaacagaaatcaccatcagaccaactgcatctgcaaactga

SEQ ID NO: 124532 - DNA, 474 bp, Enterobacter cloacae
gtgaatatttcagagaaatatgaatggagtaagaataactacctggtgagtacagacagagaaaaactggatgtacaggccatccatcgatatttaacgagatcgacctgggcaaaaggcattcctctggatattgtctctgcgtcagtcgaaaacagccttaacttcggcgtctaccataaagaaaatcagattggttttgctcgcctgataacagattacgctaccttcgcctacctttgcgatgtttatgtacttgaagaatatcagggtgaagggctcggaagatggatcatggaatgcatacatagtcaccccatttttgatcggctccgcagggtgatgttatttacaaccacagcgccctggctttatgaaaaatttggctacgagccggtaaacagagaaaactatgcatggactattacgcgtcctgatatttacaccggtggaaaaagcctgactgataaatag

SEQ ID NO: 124533 - DNA, 456 bp, Enterobacter cloacae
atgacgactctccctggattttcttactcgctcgctgaagaaagcgcggtgtatcaccttactcatctgccccttcccgattctgcggatctgttcgaactggcagacacctgcgccgcctgtgtcagcgtgctggttgaaaccgacgatgcctttacccatgccaccctttgcgagcgtttgctgatggtactgaaacgcctgcgtgaacgttgcgatgcagaactcccctcgcatctggttgagcaactgattgcgggggaaaagatcgtttcctgtgtgccggactgctggcaggagacgacgttgcaggtggattatgcgctggcacttacgcgtgcggtaaggggcggtacgctgcctgcggacgtggcaaaagacctgaccgggctgctgcacgatatggtctggctgctggcggagtttgtgaaagagccttatattccggcgcactaa

SEQ ID NO: 124534 - DNA, 186 bp, Enterobacter cloacae
atgaattacataaggttgcttgcaggtttcttccagaagggcattgccggatggcggttacgccttatccggcctacaaaaactaccaaccaaaccggccgctactcctcgcttatcatcgtcaagaaccgcttcaccgtccgcgagcgttcaaagcgccgccagcagagcgcgatatcggtataa

SEQ ID NO: 124535 - DNA, 960 bp, Enterobacter cloacae
atgagattatcagcagaaccactcagcgatccttctgatcaggtgtccggctggatctccaacattcagcggttttcgttacatgatgggccagggatccgcagtattgtctttttcaaaggttgccagatgcgctgcacctggtgcgccaacccggagggaataacccccggcagggagctcttttaccacgctgaccgctgcctgcactgcggcaaatgcgcggcgttgtgcccgacagggcttcatcggcggatggagaatattcacaccctggaacgcgaccgtagctgtacaggctgtggcctgtgcgaagcacactgccccaccgccgcgatcggcgtagttggtgagcatgttagcgcagggacggtctttgaacgtgtgatggcggacgagatttggttccggcagtccggcggcggcgtcacgctgagcggcggcgaagtggctacccagcccaattttgcccgggcgcttattgatcgactgaagaccgaggatattcatatcacccttgaaaccgctggctatgcctcctggcatgcgcttcatcaggcttccgctggctgcaatttgattatgtacgatttaaaaagtgcagacgacacgctgcataaacgttttaccggcgtcagcaataaaacgattgtgcgcaatcttgcccggttattacagggagatcagcagatcattatccgcatcccggtgatccctggatttaatgacgcaccggatcaggcggcgaagttactggcgttaattgcttcactgacccacggacggcgtaattttctgggtgtcgagttattgccctaccaccgcttcgggacagggaaatataaattactcagcagggattacggctggaattgccattccgccaatgtcgatcgcttcctgcatattgccgggcactatcacctgccggtgaacgtctcgggtacgctggctggataa

SEQ ID NO: 124536 - DNA, 2382 bp, Enterobacter cloacae
atgaacacagaacatctttccctgcgagtgatacagattcgtgataagtacctgcaggcaaagccttttgtctctgcacaccgggccgtcagcgtcaccgaagtgtataaagaaaaccccgggatggataacaccctgttaagggcgctggccttccgccgcgcctgtgaaaaggctcccctgtacgtggccgataatgaactgatcgtcagccatccggccgggggcgcacggggcggcgaagtctcgcctgaaataagctggcgctgggtggccggagagctggataacctcccccatcgcgcgcaggacccgtaccagattgatgatgaaacacggcgtttgctgcgggaagaggtatttccttactgggaaggtcgctcgctggacgagatggcgcaaacccggctcacgacgctcgggctgtgggagtggtgccacgacgacgggatctgcgatgtcaccatcaaaacccaaaacggcggtggcgactcctgcccgggctacgacacgctcctgcttggcaaaggcataaaagggattcgggacgaagcatcggcacgtctggctacactcgatccgactacgcccgactatagcgacgcctttaatttttacacggctatgcagcatacctgcgacggtgtagtgacctatgcacaacgctactcgcgctacctggcgcagcttgccgaaacggaaaatgaccctctgcgcagggacgaactgctgcagcttgccgacatttgtcgtcacgtaccggaacatccgccgcgccattttcacgatgcgctacaggctatctggttcgttcactctctctttatgctggaggagaaccagaccggcatctctcttggccgcgtcgatcaatatctctggccgctgctggcgcgcgatctcaacgacggtacgctcacccggcagcaggcagaagagctgctctgctgctggatgatcaaaatggccgaaaccctgtggatctgcagtgaaccgacggccatgtactttgcgggttaccagccttttatcaatcttgtggtgggtgggcagaaacgcgaaggcggcgacgccaccaacccactgaccctgatgatcatggactgctcggcacaattaaaaatctaccagcccgggctggcggtacgtatccacaaccagtctccccagccgtttatgcgcaaagtggtcgacgtcgtgcgcagcgggatgggattcccggcctgccactttgacgatgcgcatatcaggatgatgctacataaaggcttcagctacgaagacgcccgcgactactgtctgatgggctgcgtcgagccgcagaagtcaggaaaaatgtaccagtggacctcggtgggttacaccacctttacggccgccatcgagctggcgctgcgcaacggccacaatcgtgccggaaagccgtgcggcccggcaaccggcgatgtgacgcaatttaccacgtatgaagaggtagaacaggcggtgcgaagccagctctccgccatcgttcgcaacgcggcacaggccacgcgggttgtgcaaaaactgcacgccgagcatgcccgtaagcccctgatgtcatgctttatcgacgggtgtatggcgacggcaaaagatgtcacccagggcggcgcctccctgaatgccggaccgggcctgatttggaccggcctcgccgactgcgtgaactcgctgatggcgatcaaaactctggtctatgaaacctcccgcttcacgttgccggagatcgtagaagcactcgaccacaattttgtcggctacgacgagatccagaccgcctgtctgcgggcaccgaagtacggtaacgacattctggccgtggacgagatcgcacgggagctggtgcgttttcttgagcaggagcaccgccggtaccggatgctgtatgcgccgttcgccttcggcacgctctctatctccaataacacgccgttcgggcttatcaccggcgcactgccctccgggcgtctggcaggtaaaccgctcgcggacgggataagcccggctcaacaaacggattacctcggccctaccgccattatcaactccgtcagccggattaacgttgaagagatggacattggcatggtgcataacatcaagctgatgtacggcatgctggaaacccctgaggggcagaacagcctgatccacctgctgcgcaccgccagcgttctgggaaatgcccagctgcagttcagctacgtggacgatgagacgctgcgtaaggcccagcaaaatcccgccgactatcgcaacctgatgattcgggtagcgggatacagcgcgttcttcgttgaattaagtaaagaggtccaggatgagattatcagcagaaccactcagcgatccttctga

SEQ ID NO: 124537 - DNA, 324 bp, Enterobacter cloacae
atgtttactctattaacctatctgttttggctgattatttcagtcacgatggaagttatcggcacgctactgcttcctaaaacggataactttaaaaatatcccgctaaccattcaatgtctggtgtgctacgtcatttcattttatgccctgtcgatgcttatgggagccatttcacccgtagcggcctacgccctctggtcaggtatggggatagtcatgattacgcttatgagcagcctgttttaccagttgcgcagcagcattctcgaaaaagttgggatctgctgcattgtggcaggactgatcgtcatcgccatttga

SEQ ID NO: 124538 - DNA, 339 bp, Enterobacter cloacae
atgacgttatccaaaagcgttaccgcattgattgcggcggtatccattgaagtgattgccacaacattattatcgctctcaaacagttttcagcgtcctgctgtgggaaccgctgcgataatatgctacggaatcagttattattttttatccctcgcattacgcagaattcatattggcgtggcgtacgcaatttggtctgcgttcggcatattcagcattagctatattcagacgcgtatctttcattttacgctcgggcagaatgcatggatgggtttatgcctggtcatcagtggaataatcatattaaacctggcgattaagcaaaataaataa

SEQ ID NO: 124539 - DNA, 804 bp, Enterobacter cloacae
gtgaaaaataacagcccccggcgcatcccgttttaccaggttgacgccttctctgacggcccctttactggcaacccagcagcagtctgcttgctggacgcctggccagaagactctgttctccagcatatcgccacagaaaataacctttctgagactgcgttcgtggttaaacaggacgacggtttcaggatccgctggtttacgcctgcggtggaagtggatctctgcggccatgcaacgctcgcggcggccagcgttctgttaggtgacgaaagtgctggcgacagcattcgcttcttctcgcgcagcggtgaactgacggtaacctcaaacggcggcaaattcacgctcgattttccacagtccatcccctctctcattgaggctccgcaggggttgcttagcgcgctggggctggaagaagggacaggcgaaatctggcaagccgccgatctcatcgtggtgattgatgacgaagcgcagttagacacccttaaccctgactttgccgccctgaatacttttaacacgcgtggcgtggtcgttaccgctgcatcacgcacctatgattttcgttctcgctggtttggccctcaggtaggagtggacgaagatccggtgacgggctccgcgcacacctttctggcaccgctttggagtgaaaagctgggcaagaaaacgctgcatgcccaacaggggggatgccgtaaaggagagctgatttgccatattaaggataacgggcgtatcgcgctgacgggtgaagcgtgtctgattattaaagggacctttattctgtaa

SEQ ID NO: 124540 - DNA, 357 bp, Enterobacter cloacae
atgaagatcctgagcgtaatggtggccgtagtgctgctgacagcatgccagctggtacggccttttggcgaggctacgacctatcaacccttcactgtttctgcccatcccgggctggatgggcgctatcactgtatgcgaagcgcactcgtcgcggacggctacgacgtggagctgattttccctgagcgggatacccccaacttttttgatattgctaaaggggacaggctgattgcccagatcgatatgtctcatacaacaggagcaaactttatcgatattaccctcatctctggcgcaaaacagaccaatgaagaacttgctcgggtgttaacaccctgtgttggctggtga

SEQ ID NO: 124541 - DNA, 126 bp, Enterobacter cloacae
atgaacagcgatcgtcaaaagaacaccagctggagcaaatggtcagagcgaggcttcgtttatgccgtcgttctgctttgcatcatcaactacgtttaccagctctttcgcatattttctgcctga

SEQ ID NO: 124542 - DNA, 549 bp, Enterobacter cloacae
atgtctaatcaatttaagatatttctggcggtatgcacttatgccatcaccagcactctggtttatgccgcgagttctggcacgatcacctttaccggttcggtaaacagtgagacctgtgcggcggtggtaaataatggtagtgctgatggcacggtatctttacccgccgtaccgacctcagcattaagtgcagcaggagcgacagcgggggcaaccgcgttcaccattaatttgaccggttgtgaccctgcaaatactaaaacccgcgctttttttgaagcggggggacaggttaacagcgccgggcgcttaaacaactcggataccgccggggcaacaaacgtggagctggaattgcttgatgtggatgacaacagctccgtcattatggcgggtgactatgcttcacagtccacgtccggaaccacgattgatgcgtcgtcaacaaccggcacgctgaattatgccgtccgttattatgcgaccggggcggcgacatccggggcagtagccagctctgtgacgtacagtattatttatctctga

SEQ ID NO: 124543 - DNA, 699 bp, Enterobacter cloacae
atgaaattaaaatttatcggtacgtttattttattctgtttttttaaccatatcgctgcggcagcgatctctctgtccggaacgcgcgttatctatccgcagggaaaaaaagagatagcgctggaaattaaaaatcatggctcacagccggtgctgacccaaaactggatagatgacggaaacagtgaggcatcacccgacaaattaaatacgccttttgtaattacgccgcctatcgccagaattaatccggaacaggggcagtcattgcgtatatctgctgtggaaaatacgctaccccgggatcgggaatcggttttctggatcaatgtactggaaattccggcggtcaataaaacggcggtaaataaactgcaaatggctttccggacacgcattaaattattttatcgccctgaaggccttgccggaacacctgaaaaagccgcgcagcagctcagctggcgaaaagtatctgccacgcagctggaagcaatcaataacacgccctggagcgtttctctggcaggggtggcatccggcaactggaagacggtgggggatgtcgtgcctgcctggggcaaaaaaacgttcacgataaaacgcggacatgctctcgcctccggcggagatatcacctggacatatatcaatgattatggtgctgagcgttccgcaaatggtctcctgaaaaattaa

SEQ ID NO: 124544 - DNA, 2484 bp, Enterobacter cloacae
atgaagaagggattatcggtatggccaccgctttcaggcgtggcttgcggggtgatttctgcgctgtttttctcttccggcgttcaggctgacgatgacatacagtttgacagtaattttttgcgcatctcacatccggaaaaagtcgacctgtcggcgtatatgaaaaacggactgccggcgggccggtaccgggcggatatttacctgaataataagctggtcatgatcgatgatattcgcattagcggaaaagagactgactcgcagagaattctgttgtcgccagcgaccatcgcaggattacagttaaaacagaacagactgtgtgtaaataacgacgggcaatggtgcgatctgcaggctgtcctgccagaaagtcatctggaatttaacggcggcagacagcggctcgatgtcagtattccccaggccatgctgcagcatgccgcgcgcggccaggtaagcccggcgctctgggatgtcgggatccctgcgctattactgggttataacgtgaatggctaccgtagcgagaatagcggcggagaatataacaacctctatgcggcgctgaacggtgggctgaatatcggctcctggtattttcgccataacgggacgttaagctggcagcagcagaatggcacgcagcagaaaaaatataccgtgctcaacagctacgtgcagcatccactggcgggtattgagggaaacctgacgttaggggaatcgaacacctccgggcagctatttgactctgtggcgtttacgggggcatcggtcgccagcgatgaccggatgctgcccgcctcccggcgaggctacgcgccggagatccgtggcgtggcgcaaactaacgcgaaagtgatggttcatcagaacggtaaactcatttacgagacgtctgtttcgcccggggcctttgttatcaacgatctgtatccgagcggttatggcggcgatctgaacgtcacggtacgtgaggcggacggctcacaacatttttttgacgttccctatgcatcggttgcgcagttgctgcgtccgggaacacaccgttacagcgcgacggggggcaggctgaggggggattatctcagtgaacgtccggcatttggtgaagtgacctatcagcgggggctgacgaaccgcctgaccggctcaggagggatacaggcgacgtcattttatcaggccatgcaggccggctttgcggtgggaacgcctgttggcgcggtgtcattcgataccacctggtcgcaaacccgtctaagagaacagacgctgcggggagaaagcatccggctgagttacagcaaatttattccggcgagccagacgcagttttccctggctacctggcgatactcgacgggaaattatctttctctgatggatgccgcccttttacatcagcagcggcctggtgagggaacagacggacggacaggtaaaacccgcaatcgtatgacgctgaccctcaaccaggggttacccgataaatggggacagctgtatgtgacgggtattctgcaggactactggggtcgaaaaggccacgaccagcagtatcaggcgggctacaccctgaccacgggcagggtgaactggaatctgggggttaaccgcagccgcacggccgggggcgattttcagaatatctggacactgagtttcaacatgccgctgggagggatctcctcgccgctgcttaccgggcagatgtcgcgtgacggtcagggacatttcagcgagcaggttgcgctttccggcagtgcaggtgaacgacagcagttcagctggaatgccggggcatcgcatcagcatcagtcgggagatgccgggcaaattggcggaacgtggaccgggccggtttccaccctcacggcaaactatgcccagggtcaggcgtggaaaagtggctctctgggaatgagcggtaccgcagtcgcgcattccggcggcgtgactttctctccctggaccggcaacaccttcgcgctggtggaggcgaaaggtgctgaaggggctgaaataccgggctacgccggaacgcgcgttaaccgtgctggttatgcgctggtgccaaatctgatgccctatcagaaaaacagcgtgtcgatagatcccacctcggtagaggatgacctggatctcgacagcaccagccagcaggtgatcccgtacgcgggtgccgtggtgaaagtgaaatatcgtgccgctgaaggcgtgcccgtactggtgacggtacgtcggagcaacggagaaggtgtgcctttctcggctcgtgccattgatgccagtcaacagacagtgggatatgtcgggcagggggggcgcctgtatgcccgtctggcgcagcaaagcggagtactggaacttcgctgggcagatgacgcagcgtcccgctgcaaaatgaagtattcgctcccgtccacggcgggaaaaaaattgctgaccttcgacgcaatctgtaattaa

SEQ ID NO: 124545 - DNA, 537 bp, Enterobacter cloacae
atgaaagttttagtttgtgtatttactgataatgaatttttcttttcagccatggtggaattgatcgcctcgcatccgctattagcgaaaaaatatacgctgtgtaaaatccgttcagatgagacaggtgcgtggatgcggacagccaataatgaacatatgattattgcagggccggacatggaatcgctggtcagaattttttgcctggaaaaacaatgggattatttgaccgcgcgttacaatgcccgcgaaatgcaggagtttctgtcccggagaataaaccgacagcatgaagcaaaaaaacaccttgtacgaacaagaacacacttaaaactttcaacgcaggagttgcgcgtgctgtcctggtttattcttgggatatcgccgcataacatgtccagacactatggtttatcaattaaaacgatcagcacctataagcggcgcctgatggataaactgtatattaaatctgatgccgagctgtttaaggttggcttgatgtatcaaacatatcgtaaccattttggctga

SEQ ID NO: 124546 - DNA, 1140 bp, Enterobacter cloacae
atgaacatttccgtgaaggcaggggcggtgatatttctgtttctgatggtaatttcacaagcggtaatggctgtaacctgctcgctaagcagtacgtcatcttttaagggggggagtattgtttcgacaccattgaattatgcaaaaatttcagtaagtaatgatatgcctgatggtacagtgttatatcagcagcgatatcggcctggatttagtagcgttactgtgaattgtgatgaggcggcgacgtggtattacataacaaccatgaccagtacccctcagcctttatctggttggtcaggcacggttataccatcggaaagtacatcatggtcttcatgggcaggaaaaatttatgaaacagggctcccgggtattggattaacgtattctatgcttagtgcccatggtgctgttcctgccaatataggaggttcgtgtgctgccagtaccagctgtactgaatcgagttctatgttgagcgtctatcttactttagtaaagactggcccggtaagtccaggcgtaataaacgctgctaattttcctacgatgaatatggctttaggcagaaagaccagtgccgtagacctgttcacattatcattctctggttctatagatgtgtccctcccgacctgtactacgccagattatactattttactcggaaaatggaccaccagtagttttaacggaaaaggtagtacaactccctgggttcagtcagatatacatctaaccaactgcgaggtatttaatggaagccaggtgacctcctgggataatgtatcgtcagataatggcaccatttctacaggcacatttaaaaataacgcatggtctatatcattttcacccgttagctcactaattgatgcaactaatgggatcatgtcagttgataatagtacatcagatgccgctacgggaattgggatccagattagtgcaggagatgttgctactgcagatacaaatatcattgatttcggcctcccgattaccggaggacttccttctgatggtacaggtagtataattattcccctttctgcaagatatatccagacagaagatagtgttacggcaggaactgcaaacgggaaaataatttatacgataagctatctttag

SEQ ID NO: 124547 - DNA, 357 bp, Enterobacter cloacae
gtggaaataacaaaattatggatttcattaggcactattgtcagtcccatcacaggcaccttctttaccaaaataatcacgcaacataaccataaatatttgctgtggtataaaggtgattatcttatcaaaccgggtgataaaattacggttaacaacaacggttttattatttccgaaaaattacgtgccgtaaacattatacaaattgataaatacagtccgacactctggcgagtcatgcacaacatgtccagctgcccgggtgacagagagcctgaaaccccgtattgcgcttcaacaacacgatgcattttcaaaacctgccctcacggcaaaacacgtttaacgccataa

SEQ ID NO: 124548 - DNA, 333 bp, Enterobacter cloacae
atgaatagctacctttttctttttatatcaattatttgtgaagttattgcaacaacagcattaaaattatccgacagctttacccggctatggcctgccaccgttacggttcttttctaccttcttgcgttttggtcgttaaccattcccatgcgaaccataccgacgggcattatctatgcgatatggtcaggagccggaattgtcctgattagtctggtgggatgggttgtttatggccaaaaactggatatggccgccctggcaggaatggggctgatcatagcgggtgtggtggtgataaacctgttttcgaattcatcaggtcattga

SEQ ID NO: 124549 - DNA, 423 bp, Enterobacter cloacae
atgtttgaagacaatcaaaaaaaactctatgtcgttgttaaccgcacgcaggatccggtgttgctgctgaatgccacggcccacctggccgccgggatcatgcgcaaggcggatgatgtcctcttccatgactacccaaacgctgaaagcgggctgaacgcttatcttagccattacccggtcgtgatcctgcaggccaaaaacagcaatcagttaaaaaccgcggcactgaaatctcaggaagcggggatcccgtttaatttctttacgacgacgatgcttggcccctcctctgaagcccagattcaggcaacgaaagaaaccacgcttgaagcactggaattcgtcgccattgcgctctacggggatacggaagcgatagcgccgatcaccagaaaattttctgtttttaagctggcctga

SEQ ID NO: 124550 - DNA, 1305 bp, Enterobacter cloacae
atgacaactttccgcgtcagagacatttttatcctggggtttctcaacttcgccttgtttgttggggccggtaatatcatttttccgcccctgatcggcttacaggcaggaacatccgtctggtatgccgcaatgggatttttattgacgggtgtcgggttgccggtgatgaccgccattgccatggcgaaagccggcggatcgctgcaggcaataacccagcccaccggacgcctctgcagtctggtcctgactattgcctgttatctttgtatcggaccgctgttcgccattccgcgaaccgccaccgtctcgtacgagctggcattacaacattatcaccctggcgcgtatggcttagcctggtggagcctgagctttttcgcgctggtcgttctgatctgccttcatcccggccgccttctcgatacggtaggtaagttcctgtcgcctttgaaaatcgtggcgcttctggtactgacaatcacggcgatgctcgtaccagcgggggctcccctgcctccacagggtctgtatgccacctcccctttttctcaggggatcaccaatggttatctgacgatggatacgctggcagccctggtctttgggctggtgattgtcagagcgattcaatccagaggggtgacctctccccgccttattactcgttatgcgttctgttccggcctgattgcaggcgtgggccttgtcgtggtgtatgcaggcctgttccggcttgggctaagtagcagcgggctgattgatggggcaacaaacggcgctcaggtgctcagtgcttatgtccactttagctatgggcctggcggcgacatttttctgggggtgttgatgacccttgcctgcctggttaccgctgtcgggctgacatcggcctgtggcgcctggttcagcgaccatacccgttttagctatcgaacctgcatctggttttttgccatcgtctccatgctgatatcaaatatcgggttgacccaattaattgcattatcggtgccggttctgacggcgatttatccggtgtttgttgtacttatcgtgacctttttcatgcgaacaaccttccactcaccagcgcgggtcattgtccctgcggcattcgttacctttctgtttggtctggctgaggcacttagcgctgcgggcggccccttatggctgactacgctcagtgccaggatgccgctacataatcagggtttggcctggctgctacctgctgtcggcatactttgcgtaacgttcgtgaatgaccagctacggtataaatcaaaaaatcactga

SEQ ID NO: 124551 - DNA, 183 bp, Enterobacter cloacae
atgccgaacagtaagttatgtctgaatgtctccctggttatcctgagcctgatgctcagcggctgcgtgatcagggatcatcactccaccgatcgccatcatccggatcatcatcactggcaccatgatccttcccatgcacatggctggcatgattttcatgggcatcacggccatcgttga

SEQ ID NO: 124552 - DNA, 690 bp, Enterobacter cloacae
atgagggcaataggcagcacaatactgactgaagggaaaaccatgcacacaacccacagcacgttcgttctcgccagcctctccattcaccgcatcaccttcgcccccaccaccttcatcgacgccgatctcctctggctcccccatcacgcacagctggctgacgccggacgcaaacgcaaagccgaacatttggcgggccgcatcgccgccgcgcatgccttacctggccacgccgttcccgacatcggccccagcggcgaaccgatctggccggaggggttttcgggtagcatcacccacagcggcacgcaggcgatggcggttgtggttcaccatcctcatgcccttgtaggtatcgatacagaggcgatcctttccgaccgtgaagcccatgaaatccaggacggtatcatcaatgcgcaggaagcggcgtgtttaacgcgttcaggctacccttttgcacaggcgctgacgctcgcgtttagcgcgaaagaaagtttgtttaaggcgctgtttccgcaggtaaagatttacatgggttttgactgtgcgagagtcgcagcgttagatgataaaacccttgtgctggtgctttcgcgcccggctggagaatatgcggagggcacacgtttcaccctcttctggcacaaaagggatgacagcgtgttgacgctgctacaagcctaa

SEQ ID NO: 124553 - DNA, 1329 bp, Enterobacter cloacae
atggtttcttatgaacgcgcttcccacagcgcgggcattacgctattgcaaatgcaaatagttatcaataatattatcaataaaatttgtcctgaaacaaaaaagactgttaaacatgaggttagaagggtgacggtgttaacaacgggaagtgaagcctggtggcagtcgaaaaacggcccggaatgggtgcgtgaacaggggaaatatcgggtcacgttctggtggcgcgatccagcgggaacgcaacagacctcggcggtgaaacgcgtctggctgtatatcaccggcgtaaccgatcaccataaaaatgcccgcccacaatccctcgaacgcatcccggataccgacgtctggcaatggcagggcgagttcagcccccagtggcgcggcagttactgctttatcccctcagagaatacagacgattttgcgcccgatgtgtttcacggtgagcagccggatcgcctggcgctgcgcgaaggctggcgcaaattgctgccgcaggcaatgtccgacccgcttaatacccagagctggcgaggcgggcgagggcatgatgtctctgcgctggagatgcccgacgctccggtgcagcccggctgggatcgccccaatacgccataccggcagccggtctgcattgactggcagagcaagcggctgggcaatcgtcgtcgcgtctggatatttaccaccggcgatgacgatccggaacgcccgctggcggtgctgctcgacggccagttctgggccgagagcatgcccgtctggccagcgctgacggcgctaaccctcggacgcaaactgccgcctgccgcctacgttttaatcgatgtgatagatatggcgcatcgcaataacgaattgccctgcaaccccgatttctggctggcggtgcaggaagaacttctccctcttgtaaaacaacacacggcattcagcgaccgcgcagaccgcacggtggtcgcaggccagagcttcggcggcctctcctcgctttatgccgcactaaactggccgcagcgttttggctgcgtgctgagccagtccggctcttactggtggccgcatcgcggcgggcagcaggaagggctgctcatcgcccaactgaaagcgggtgagaaaaccgcacgcggcctgcgcatcgtccttgaggccgggcgcaacgagccgctgatttaccgcgcgaatcaggccatttacgacgaactgcacacacagcagcaggtttactggcgtcaggttgacggcggacacgacgcgctttgctggcgcggtgggctgacgcaggggctgatgaccctctggcagccgcttattcactaa

SEQ ID NO: 124554 - DNA, 213 bp, Enterobacter cloacae
atggaattcagcaatcctttcgataatccgcaggggcagtttgctattttgcgtaacgatcaggggcagtacagcctgtggccgcagcagtgcgaattgcccgcaggctggcgcgtggtatgcgaagcgcaatcgcaggacgcatgccagcagtggctggccgaacactggcagacgctcagcccctctaattatgcgggggagcatgcatga

SEQ ID NO: 124555 - DNA, 3684 bp, Enterobacter cloacae
gtgagcagcaaagtagagcaactgcgtgcgcagttaaatgaacgaattctggtgctggacggcggcatgggcaccatgatccagagctatcgcctcagtgaagacgatttccgtggcgaacgttttgcggactggccatgcgatctcaaaggtaacaatgacctgctggtattaagcaaaccgcaggtgattgcggatatccacaacgcctacttcgaagcgggggcggatatcgttgaaaccaacaccttcaactcgacaaccatcgccatggcggattaccagatggaatccctgtcggcggagataaactatgaggcggcgaaactggcccgcgcctgtgccgacgcgtggacggcgcgcacgccggagaaaccgcgctacgttgccggggtgctcggcccaaccaaccgcaccgcctctatttcaccggacgtaaacgacccggcgtttcgtaacatcacctttgaccagctggtggcagcctaccgtgaatcaacaaaagcgctggtggaaggcggttccgacctgatcctgattgaaacggttttcgataccctcaatgccaaagccgcgatttacgcggtgaaagaggagttcgaggcgctgggcgtcgagctgccaatcatgatttccggcaccattaccgatgcctctggtcgtaccctgtccgggcagaccaccgaagcgttttataactccttgcgccacgcggaagcgctctccttcggcctgaactgcgcgctgggtccggatgagctgcgccagtatgtgcaggaactgtcacgcattgcggaatgctacgtcaccgcacacccgaacgccggtctgccaaacgcctttggcgaatatgatctggatgcggacaccatggcggcgcagatccgcgaatgggccgaatccggtttcctgaatatcgttggcggctgctgcggtaccacgccggagcacatcaccgccatgagcaatgccgtggccggtttgccgccgcgtaaactgcccgagctgccggttgcctgccgtctctccggccttgagccgttgaccatcggtgacgacagcctgtttgtgaacgttggggaacgtaccaacgtcaccggttccgctaaattcaaacgcctgatcaaagaagagaagtacagtgaagcgcttgacgttgcccgccagcaggtagaaagcggcgcgcagatcatcgacatcaacatggatgaggggatgctcgacgccgaggcggcgatggtacgtttcctcaacctgatcgccggcgagccggatatcgctcgcgtgccgatcatgattgactcctccaaatgggaagtaatcgaaaaagggctgaagtgcattcagggcaaaggtatcgtcaactccatctcaatgaaagaaggggtcgatatctttattcaccacgcgaagatggtgcgccgctacggcgcggccgtggtggtgatggcctttgatgaagtgggccaggcggacacccgcgagcgcaaaattgagatttgccgccgtgcgtacaagatcctgaccgaagaggtgggcttcccgccggaagacatcatctttgacccgaacatcttcgccgtcgccaccgggattgaagagcacaataactacgcccaggactttatcggcgcgtgtgaagacatcaaacgtgagctgccgcatgcgctgatctccggcggcgtctcgaacgtgtcgttctcgttccgcggcaacgacccggtacgtgaagcgatccacgccgtattcctctactacgccatccgcaacgggatggatatggggatcgtcaacgccggacagctggcgatttatgacgatctgcccgcagaactgcgcgacgcggtggaagatgtgatcctcaaccgccgtgacgacgccaccgagcggctgctcgatctggcagaaaaataccgcggtagcaaatcggacgacgctgccaacgtccagcaggccgagtggcgtagctgggatgtcaagaagcggctggaatattcgcttgtaaaaggcatcaccgaatttatcgagcaggataccgaagaggcgcgccagcaggccgcccggcccatcgaggttatcgaagggccgctgatggacggcatgaacgtggtgggcgatctgttcggcgagggcaagatgttcctgccgcaggtggttaagtccgcgcgcgtgatgaagcaggccgtggcgtatctggagccgttcatcgaagccagcaaagagcagggctccagcaacggtaaaatggttatcgccaccgtgaagggcgacgtgcatgacatcggaaagaacattgtcggtgtggtgctacagtgcaataactacgagattattgaccttggtgtaatggtgccggcggataaaatcctcaggaccgcgcgcgaagtcaatgctgacctgattggcctttcggggctgattaccccgtcgctcgacgagatggttaacgtggcgaaagagatggagcgtcagggcttcaccattccgctgctgattggcggggcgaccacctcaaaagcgcatactgcggtgaagattgagcagaactacagcggcccgacggtctatgtacagaacgcctctcgcaccgtgggcgtggtctcagcgctgctctcctacacccagcgcgatgactttgtggcccggacccgcaaagagtacgaaaccgtccgcattcagcatgcccgcaagaaaccgcgcaccccaccggtgacgcttcaggcggcgcgcgataacgatctggcgtttgactgggcgagctatacgccgccagttgcccatcgcctgggcgtgcaggaggtgaccgccagcatcgaaacgctgcgcaactacatcgactggacaccattctttatgacctggtcgctggcaggcaaatatccgcgcatcctggaagatgaggttgtcggcgaagaggcgaagcgcctgtttaaagacgctaacgacatgctcgacaaactcagcgccgagaaagcccttaacccgcgcggcgtggtggggctgttcccggctaaccgcgtgggggacgacatcgaaatttatcgcgatgagacgcgcacccacgtgctgaccgtaagccatcacctgcgccagcaaaccgaaaaggtcgggtttgccaactactgtctggccgattttgttgcgccgaagctgagtggtaaagccgactacatcggtgccttcgccgtgaccggcggtctggaagaggacgccctggcggatgcctttgaagcgcagcacgatgattacaacaaaatcatggtcaaagcgattgccgatcgtctggcggaagcgttcgcagagtatctgcatgagcgcgtacgcaaggtttactggggctacgcggcgaatgaaaatctcagcaatgaggagctgatccgcgaaaactaccaggggatccgcccggcacccggctacccggcctgtccggaacataccgaaaagggcaccatctggcagctgctggacgttgaggcccataccggaatgaaactgaccgaatctttcgcgatgtggcctggggcatcggtatccggctggtacttcagccatccggacagcaaatactttgccgtggcgcagctgcagcgcgatcagattgaagattatgcactgcgtaaaggcatgagcgtctctgaagtggagcgttggttagcgccgaatctcggctacgacgccgactga

SEQ ID NO: 124556 - DNA, 456 bp, Enterobacter cloacae
atgagtaaaaaatcagtctggctcgcctgctataaagggcgaacggaacaccgtgggattgccagactggccgactgggtgactcgcaaagtcacccgcggtatctactctcactgtgaactggcgatagaacacggcggaaatgagtatctatgctactccgcgtcgtttcgcgatcgtggcgtacggggaaaattgatgccattgcctgacgacaagtgggataaattaccattgcaggcgagtcaacaggaagtggaaacattttttcgtaaacatagcggaaaacgttacgactggcagggtgcaataggtatcgtattaggcaatcgggaaaagcgcgaacggttattttgcagtgagttctgcgctgaatttcttcagctcaatgagagttggcgctactcacccaatcacctgtatgctctcgtcagcagttggcaattcaatccgtaa

SEQ ID NO: 124557 - DNA, 1575 bp, Enterobacter cloacae
atggttaatgaattctataccctcctgaccgacaaggggatggcaaaaatcgccagcgcccttgccgataaaaaacagatacatttacagaagatggccgttggcgatagcaatggacaatattatgaacccacagccagccaaaccgaattacgtcacgaagtctggcgcggcgagatgaatactctgacggttgcgccaaataatccgaactggttgattgccgaagtggtcctgccggaagacgttggcggctggtatgtacgagaggtgggtgtctttgatgttgacggagaactaatcgccatcggcaagttcccggaatcctataaacctctgcttcccggtggaagcggtaagcaggtttgtattcgtttgattatggaagtttccaataccactgcggtgacgctgaccgttgatccgagcgtggtactggctacacgggattatgtggatacacggctggacgaacatgaaaactcaactcatcacccggatgcaacacttacgcagaaaggttttacgcagcttagtaatgccactgatagtgacgatgaaaccaaagccgccaccccgaaagcggtaaaagcggcaatgattgaagcgcggaatcatacacatacctggaaccagattaccggcattccggacggtacgttgattcaaaaaggtattgttaagcttaatgcttcgactaaaagtaccagcactagcgaagcggctacaccaagtgcggtaaaagaggcgatggataaggccaacgcagcagcaccggctagtcatactcatccctggaatcagattagcggtgttcctgacggtacgctgacgcaaaaagggattgtaaaacttaataacgcgaccaacagcacaagtaccaccgaagcagcgacgccgagcgcggtgaaagcggctatggataaggcgaatgcagctttaagtagttctgatgccgatacacgatatttaggcaattttgctttttatactgaaaatggggtttttactgtccccacaggagttacaaaagtattagtagaattaattggaggtgggagcggaggaatgggaaaatattcaggctcttctacatcagatttgcataaatacagacccggaggtttagctgcatcacctattttaacgatagcagaggttacacctggtgaaaaagttaatgtcgtagtaggaaagggaggagcaggaggaacagcgtcaataataaatgatcaacagccttattgcggcgctggaggtgattcttatttcgggaaactgaaagctcaaggtgcacaggggccctattattcgggtgtgcgaacacaaatcaccaatgatattatcattcccgacgaccttccaggtggagatggagaaaatagtccttatggtttaggtggaaagggtgtttatgaaatcttaaatctggatgggcccctcaagtatattacatataatgatgctacaggctatggagccggaggatccggagtagctaatattggtgtaagttcgaaccaagaacatcgtggtggcaatggttctccgggctttgtaaaaataatttggtaa

SEQ ID NO: 124558 - DNA, 663 bp, Enterobacter cloacae
atggataaattgcttttgccaccaccgcttgccagtgacgagcgtttctctattctggcaaatatagctgccgaacgtttttcacaaatcgatcttacagtactgctggtttatctggtcgatttagttgatgcctcagcactaccgtcgctggcttcacaatttcatatacagggacttgagggctggttatttgcgaaagatgagcaggagagacgaaatttaattaaacaggcgatagagttacataaatataaaggaaccccttgggccgttcgtcgcgtactcgaaatactctcgttgccgggtatcgtttccgaatggtttgaatatgacgggaaagcttacttctttaaagtagaaattaacttaagcaatcagggcatgaacgagcatctatttaataaccttgtagatcttattcatgaatacaaaaatgtgcgttccaaactggaagcactaatcgtctggataattaaccaaagcgctatccctgttattggctgcgccctttatggtggtgagataacgacagtcctgccgttccagatacaggaagttgaacaaactaaaccgaattatttcggtacagggcaatggagccttgaaatcacatctatttacccggagcaaatatggttaatgaattctataccctcctga

SEQ ID NO: 124559 - DNA, 1116 bp, Enterobacter cloacae
atggcgatagccgaacccaattttatcgatcgcgaccctgcgcaaatcaccagtgaaatgatcgcacagtatgaagaagccagcggtaaaaaactctacccggcgcaggctgagcgactgctcattgacctgtttgcttatcgtgaaaaccttgtccgcatcgccgttcaggaggcggcgaagcaaaacctggtcgcgtattcacgcgcccctatgctggattatttaggtgaactggttggtgttcatcgcctgccgccacaggcggcaaaaaccacgctgcaattttctgtggcaaatgcctgtaaaagcaacgtactgattccacagggaacccgtgccagcgcatccgacagcgtgatgttcgccacagatgaggatatcctcctcccctctggaagtctgagcgttgccataaccgcaacctgtgtcgtcgctggagaatccggcaacggctggcaaccagcgcaaatcagtgcgctggtggatagcgtgagtggttacgatatcactgtcattaacctgaccgaatctacaggcggttgtggtgaagaaagcgatgacgcgctgcgtgagcgaatccggctggcaccagaaagttttagtaacgcaggaagctatggtgcttatcgttttcataccctttccgtcagccagtcgatcattgacgtcgctgtgctggggccggatgaaggactgccggaaggctgcgtagagatttatccgcttaccctgaacggtctgcctggtgctgaactccttgaacagatcgaacgggaagtctgtaaagagaaaaagcgtccgctaaccgataaggtcagcgccaaaaaatcgccacgagtgccttatcaaattttcgctcggttgacgctctttaccaccgccgatcaggaaacgacgctggctgccgcacgcgaagccttgagtacatgggttcaacaacgccagacccggttaggccaggatattgtgccaaaccagattatcaaagtgctacaggtcgaaggcgtttacgatgttgcgttggatatgccgctcaaaaaggtattaaaagcacatgaatgggcggaatgtaccgccattgaggtgaccattgctggagttagcgatggataa

SEQ ID NO: 124560 - DNA, 360 bp, Enterobacter cloacae
atgaacacaaaaacacgaccctcaaccctgcactggcaacctgccttgcaacgtcctgaagaatatgtctgtgggctggacgatatccatcaggcgatacatatcattctgcgcacaccacgcggcagcgatccccacaggccactttttggcagcaatctgtggcgctacatcgattatccgatcgagcgagccattccacatgttgtacgggaatccgtggaagctattcgcaaatgggaacctcgctgccagttgctgaaggtgacgccagctattgacggtgaacatctgacattacacgtgcaatggcgtgccgcagacgacgtaatcaactctacggaggtgttatggcgatag

SEQ ID NO: 124561 - DNA, 708 bp, Enterobacter cloacae
atgaaaggagtaacgcgtcagacaggcattatcagcgatattgatgaaacggcggttcgcgtcagagtcaccttgccagaatgcgataacttacgcagcaactggcttcccgtcctgcaacgcaatacgcaagaaaataaagactactggttaccggatattggcgagcaggtggaggttctgcttgataacaatggtgaagatggtgttgttctgggagctgtctattctaccgtcgatactgcaccactcgcatcacgcgataagcgctacgtacatttttctgatggggcagcctttgaatacgatcgaaagtctcaccagctcaccgttaacggtgggattgaaaaaattattattgaggtaagggatacaactcgtctcacctcgccacaggttgaggttaaagcgcagcatgttttggtgacatctgacaccgtaaatgtaaaagcgacgaatgtgagcattgaggcatcgactgttgacgtgaaggctctggacgttgccgtcaatgcgccactcactacctttaccggtgatgtcacgataatgaaaaagctgacctggctcggtggcatgatgggtagcggaggcgttggcagcagtgcggtaatcaccggcaatgtcaacgttcagggcaacgtgaacgtcagcggttccgttatggacggcggaggaaactcaaatcaccattcccacggctattaa

SEQ ID NO: 124562 - DNA, 1041 bp, Enterobacter cloacae
atggctgagataacggtttccggcggggggattgctaccctgacgcctgttttcaccctttggtacggtcataaggaaattacctacgacatagcgccttatgtcaccagtatcagctacagcgacagtattaaaaacgaatcggatgtgattgcaattacgctggaagatagtaccggacgctggataaatgaatggtacccaggtaaaggcgacacactgacactccatctgggatatcagggtgaggatctactgaattgcgggtcttatatcattgataaaatagatattagtgcgccaccctcaacggtcaatattgacggaatagccacttccgttagcaaagcgctgcgcacgaagaacagtcagggcttcgaatcaacaacactttccgccatcgccagtcgtattgcacaaaagcatggtctgacgctggtcggacaaatcgaatcactaactatcgatcgcgtcacacaatatgcggaaactgacgtagcgtttctgaaacgtcttgcaggagaatatggttataccgtgaaggtaacgacgaaagaactcatcttttcgcatctgccgacgttgcgctgtctggcgccggtgaagacgcttaaccgaattgatatttcacactattcattcaaggatacgatcaaccgcatctacaaaaatgccacggtgcaacaccagaacagtaaacaaaaagagttggttatctatacgcatgatggccaacaaaaaccgtctgcacgcggtgcagcaaccagcgccgataccctgaaaataaacagccgggcgccagatgcaggtacagctcaggcgaaggccaatgccgcactggatagccacaacgaataccagcagaccggtacgctcagtatgatgggctgtcctcagctcacggcaggtaataagatcgaactgaacggttttggtgtactttccggccagtggttgattgataaaacaatccaccgcttctcgcgtagcggctacaccacggaaatcgacgtttcacgcgggccggcaaccagccagtaa

SEQ ID NO: 124563 - DNA, 210 bp, Enterobacter cloacae
atgcgctaccttgaacatgttacgacagagggtgaacgctgggataacctcgcctggcgctattacggcgatgcattggcctacgagcgaatcattgcggccaacccacatgtcgcgatccttcctgttttaccgtcaggcatgcggttgattattcctgtcatcagcatcacgcaaacgtcctcggagttaccaccatggctgagataa

SEQ ID NO: 124564 - DNA, 954 bp, Enterobacter cloacae
atgtatgccgttttaggagagattgaatttgaagtcgttgcatactgggacgcctttgaaaccacactgggcgtagattatgccagccatgctcgtattgaaggcaaacctggcgtgcaatttattggcgataagctggaaaaaatcactctgcaattcagttttcacagccagttttgccagccgtcaacagaattcaatcgcttgcgcaccgcgatgactgcacatcaagcgatggcgctggtatttggcaatggggattatcgcggctggtttgtaattaccgatctgagcgccagccaccagcacaccgatcccagtggcaatgttatagcccagagcgggagcctgacgttgcaggaatacactggcgatccgaaggatccgctgctgcctccggctattaccactcaggagccgaatattgacgaaatgctggatgatttccctgagctcagcgacgcctggttcgatgaccttatgagcgctgctgaggatggaatgcgcgatgctaaagagatgatggacgacatggccgacaccattgatgacattaaaaaaaaggtcgcacaggcacaagagctggttaaggaagccaaagcgttgaagaagaagtgtagcgatattatcgactcactgaaaaaaacgatcgactcggtggaagcgctattgcgacaacctctggatctgcaaaccctggctggactgcccaaagcgctggcagcaaaaatacaggcgctaataggcagcctgccggggatccgtgaatgcgccagggacgcctcaacactcattgaacaagccgagtctctgtttaatgtcatcactagcagcgtagcagaagcctcttacgatagcgccgcattgctggtcaatcaggggcgcagcactatgcaaaaaagcgcgtctgaagtaagccaacttgctgctgcagatattacgaggagtttgtaa

SEQ ID NO: 124565 - DNA, 2262 bp, Enterobacter cloacae
ttggccaacgatgttattactcagctccaggcgcgtaatgaggcgttgacgcaggcaatagcccgttacggctcactaaacgccagcacgctacaaacgctcagtaccgagcaagttaaaataaccaggctgacacaacagcttactgagtcagccctccgacgggaagaaaacgacaagcaactcactgaattagtgggaaaaacgcaaagttttgtcggacaatcaggcaaacttttaaacgtcgagacgcccgactggaagctaccctacgaattccaggacaatatggtcaatatagcggtaaaaggcagcatgaataatgccacggaggacgccttaaactcgaatatccgtgactggagccttgcgttcaatcaggatcaaaaagagctgcaaaacgctactttcacgatggttgagggcggcgtcaccgcattgcaggatcttagccactacgtgcctgatatcgccaaagccgcaacgacaacccgcgacagtgcgcaaatatgggcgcgggcggcgattgccacccatgacaaactgaaaattgcgtctgataacttccgttccacacaaaacatgctgtacagcgtcgcaaaaggcggtggcggttctgttgaagaacaaacacagtggattaatgtttttgccgacaaaaccaagctacaaggaaaagaaggacttgcggagctgaccgcaacgatgcaaatcgccatgaaaaatggctcgagcttcagagcagcttcggaaaatttcgatcatttcctcaaatcaaccttttcaaaagagacggataactggtttgccagtcagggcgtggatctccagggatcgttgctggagcatcagcaaaacgggataggcgtgacggaagcgatggcacatatcgtgcagatgcagttggaaaaaatgcatccacagatccttgaaaccttcaaacagactatgaaaatggaggatcagtccgctcgtagcgaggcgctaattgcaatggcggataaatttaacctcggcgccctgtttggcgatacgcaaacgctggatttccttgcccctatgctggcaaatctggatgaataccgtcagctaaaagcgtcgacaatacgggcagcagatcaggatcttatcaataatgattttgacctgagaatgacatcgtcggcagagcaaaccaaagcactacagctcacccttaacgacctgtggcttaccgttggccaggagcttttgccggcgatgagtgaactgacacaaaatattacgccactagtgaggcaattcagcgcctggctgcgggaaaacccggcgctagtgcagggcatcgctaaggttgttggcattatctggttattcagcggtgcgctgaatattatgaaactggcagcgaaccttatcgcatcgccttttattcgcctgatcgatatcttcctgcgggtaaaagccagcctcgcattgggcggggcggccagtactgcgctatcggtgcttagatcgtttggaaacggcgtaaaaatagcggcgtctttattgggccgtgttctggttggcggattgaaactggtcggccaaacatttatctggctcggccgcgcgctgctgatgaaccctatcggtctgactatcaccgccatcgccggcgcagcctattttatctatcgctattgggaacctatttccggtttcttctccggcctctggactcatattaaagcggcttttgacggtggtattggcggtattacacgccttattatggactggtcaccgctggggctattttataacgccttcgccagcgttctggactggtttggtattgttcttcccgccagctttagcgaattcggcagcaatattctggatagtctgatcaatggcattctcaaagccctgccgttcctgaatagcgcaattgagaaaataaaaggtcttatcccggactgggcaaaaagcacattagggatcaacacggaaaaaccaggcgccagtatagtcggaacggcactcacgcctggggttaaacccgccgcaacatcctcaacagcgacagcgcctgcatcacaccgctcaaaatcttatacgctgccgtcccgctcattgggcaatatccaggtgcacttttcaccgcaggttacagtccagggccacgggcaaaacacggctggcgaggttaaaaacgtcatgacgctatgcaaacgggaactggagaaaatgattaatgacgtaatggcgcaacaacagcgccgggggtatgcctga

SEQ ID NO: 124566 - DNA, 318 bp, Enterobacter cloacae
atgaccgaaaaatatactctccagtttccatttacctctgccaccggagaacatatcgccgaactacgattacgccgtctgaaggtaaaagatatgcgcaccgctcgccgcgccagtgataaaccggaagaatgggacgaaccgctaatggcagcaatgaccgggctggtaccggaagatctctcagagatggatttgctcgactatcaggcgctgcagaaacgatttcaatccatgcttagtatggctacagaacccacagctgttgtggcaggcgatggcgttgctggcgaagtggtttcattttcagccagctga

SEQ ID NO: 124567 - DNA, 525 bp, Enterobacter cloacae
atggccggaaaaattcaaatcaaccgtattaccaatgcgaatatttatctcgatggtaataatcttttaggtcgagcaaccgaaattaaactgcctgatgtcagcatgattatgcaagaacataaggcgcttggtatggttgggaaaatcgagctgccagcgggttttgataagctggaaggtgagattaaatggaactctttctatcatgaagtaatgcgcaaaacggccaatccgtggcaggcagtcgctttacaatgccgctccagtattgactgctataactctcaagggaaagcagatcaattagctctggtcacgcatatgacagtgatgtttaaaaagaatccgctgggtacattcaaacagaatgaaaatccagaatttagcagcgcctttggttgtacctatattaaacaggtcattgacggtgaaacactgctggaactggattatctggcaaatattttccgcgttaacgggacggatcagctaaacgcataccgcaataatatcggcggttga

SEQ ID NO: 124568 - DNA, 1428 bp, Enterobacter cloacae
atggcagctaattacctacatggtgtagaaacccttgaaatcgaagccggtccacgtccggttaaagcagtaaaatccgcagtgataggtctgattggtacagccatcagcggtcctgtcaataaggcaacgttatgcctttctgaaagcgatgccgcgcagtttggttttgcaacagccaatacgaccattccgcaggcgctaaatgccatctatgatcatggtgcaggcaccgtagtagtcattaacgtattagatccgtcagtacacaaaagtacgatcgcaagtgaaagcgttacagttgatgccaatagcaagattcaacttaaacatgggggaatccagtccctggctattggtcgcagcattaatgccggcattccttatacaaaagattcagattataccgtcgatatgttgacgggtagaattacctgcatgggtaataacttaacaccaggaaccaaagcgtttgttaattatacctattccgacccaacgaaagttactgcagctgaaataattggtaccgtaaatgccgcaggcgatcgcaccggaatgaaagtgctacaggatacgtataacctgttcggtttttttgcaaaaattttaattgcccctgtattctgtacccaaaaatctgtggcaactgagctgattgctcaggctgaaaatctgggtgcgattagttatatcgatgcgccgatcggtacgaccttccagcaagtactggcagggcgaggatcgacgggcacgattaattttaatacaagttccgaccgtgctcgcctgtgctatccacacgtaaaagtatacgacagcacaacaaatacggaagtcctggagccgctctcgtcccgagcagcgggcctgcgcgctaaaatcgatctggaaaaaggattttggtggagcaactcaaaccaggaaattcagggtattaccggcgtagaacgttctctgagcgccatgatcgacgatccccaaagtgaagtgaatcaactcaacgaaaacggtatcacgacggttttcaatagttatggctctggtttgcgtctgtggggtaaccgtactgcggcctgcccgacagtgacgcatatgcgcaattttgaaaacgtgcgccgtactggcgatgttattaacgaatctattcgttatttcagtcaacaatatatggatatgccaattaaccaggcgctgattgatgcgttaactgaatcggttaatacctggggacgcaaactcattgcagatggcgcgctcttaggtttcgaatgctggtacgacccagcgcgtaacgaacaaacggaactggctgccggtcatttgctgctgagctacaaattcacaccgccaccgccactggagcgtttgacatttgaagcagaaattacctctgaatatttagtttctctggagagcaatcactaa

SEQ ID NO: 124569 - DNA, 198 bp, Enterobacter cloacae
atgaaatatgtttatcacggcccggcaagcggcgtcacgctctccaatggccaggaaattttattgtggacaaatagcgagatcgatctgcctgaagacaatgagtgggtcaaaactatgattgctcgccggcacctatcgccagttgtcacggaagaaacagaaactaacgcagaggatgttgtacatggcagctaa

SEQ ID NO: 124570 - DNA, 459 bp, Enterobacter cloacae
ttggaaacattaaccattatcaatactgtaatcaatagactacaaaaatccgttcctgaactggatgtgtttatttcagagatagaccccttggaatatattccagcagcaaataaggtgactgtactattacaatattgtggctcgacctttacctctctggaaagtactgatgcaattgtattgaaacgaacactcaagatggctgctaccgtaattgttccaaaaatcagtgaagcaataaatgcactggatcgtattcgtgatgcgttgggaggaattattcttcccggatgcgatcgtccactttggccagataacgaaaagtatctcggtgagaactcaggcctttgccgttacatactggagttggcctccagcatgccgtttattgctaatcaggtaagcaaggatttacccctgcttacggtcgttaactataaggacgaaactgtatga

SEQ ID NO: 124571 - DNA, 315 bp, Enterobacter cloacae
atgaagctcagtatcgatttttgggaacttatctcattcctgctttcgttcgcaggattaatgtttgcatgcggcaagcttcttttagcgcaaattttaaagcagttgaatgaacgttttgaaacacttgaaattgcccggcgtgaaacagaaattggatggacaagactagaacgtgaatttctggaattcagagcagaccttcctctgcattatgttcgcagagaagactaccttcgaggacaagctgttatagaagcaaagctggatgccgtttatagcaagatagaactcattcaacgtggaaaccattaa

SEQ ID NO: 124572 - DNA, 609 bp, Enterobacter cloacae
atgcggcaaagattcatttacttgttatatataatcgccagtatgccaatggccgaggcaaaaagccctccgcgtgaatcattacaatggcgaaatgaactgattcgtaccaccagagaaatttgggggcttaacgcgcctgtcgcagatttctccggacaaatacatcaagaatcaggctggaatatcatggcgcgctctccggcgggggctaccggtatggcacagtttatgcccgaaacggcaacatggataagcaagctttatccagaattacgcgataatgcgccttacaaccccacctgggccatacgtgcgttggtgcaatatgaccgtcgactctggaattctctccaggcgagagataactgccaacgaatggcatttacgctgagtgcatacaatggtgggcaaggttgggttaataaagataaaaggctggccacatcaaaaggacttgatccttccctctggtttgggaatgtagaacgggttaatgccggacgtagtgcggcaaactggcgtgagaatcgacattatcccaaaaacattttatttaatcgggcatcactttatttgttatgggggccagcaagttgcatctcttaa

SEQ ID NO: 124573 - DNA, 288 bp, Enterobacter cloacae
atgccaaagaaaacgattccccggctatcaggttggttgatctcatctgtattgctttttgcacttatcgcctggacatcacccgcacaaattcctgttgctatttacaaactcagccttgtatcactctcagcggtggttggttattggctcgaccgtagcctttttccctgggctcgccctgactctttttgtccctgggaagaatctttgtgctgcgcggcagcaatgattcgccgcgctattctcgttgcggcgacctgtcttgctgttgcactggggttgtaa

SEQ ID NO: 124574 - DNA, 348 bp, Enterobacter cloacae
atgattgataagtctgtggagatgactcggttccctgaaattattaacgatctggcgtttcatgcgtcccaggtgcttattgaaagcataaatcttgatagcgaatcagcaacgaatgttggccaggctatagctgacaggatgatgaggaactgggggggacaaagcatctatttccccaagggcatttctggtagggcttcagaacgggattacaagatctatagtgaatgtgacggtcgtaactatgccgagctggcaaaaaaatacaatctgacgctacagtggatctacaaaatcgtaaagcgtgtacataaggaaaagcagaaacatcagcgcattgcataa

SEQ ID NO: 124575 - DNA, 453 bp, Enterobacter cloacae
atggagcgcagacctaccggggttcgcaacgtaacctgtggtgaaaatgtcaccctgtatgagccctgcaatctctatgactgcgtgcttggcaacggtgtgtttatcggcccgtttgttgaaattcagggcaatacgcgcattggcgacgagagcaaaattcagtcgcacaccttcatttgcgagtacgtcaccctgggcgaacgctgtttcattggccatggggtgatgtttgccaacgatatgttccgcgacggcaaacccaatgctgaccggaacagctggggacgcattaccgtgggaaatgatgtgtcgataggcagcggggcgaccatcctggcggtctccatctgcgacggggtggtgattggtgcggggagcgtggtgaccaaatccatcaccgagaaaggcgtttatgcgggaaacccggcgaggctgctgcgccgcttgtga

SEQ ID NO: 124576 - DNA, 1695 bp, Enterobacter cloacae
atggcccactcttcaatactggagcggataactgacgtctcgcaaaagctggcatcagaagtccatcttcgaagtctacgggacagttttattatttctgtcccgttccttgtcctggctggactcttcattatgcttaattatgtttttctcgatccgaaaggcatattgagcggtctgttatccactgacaccctggtacagctacgcaatattggcgagcgcgttcttaacggaacaatgaatattttatcgctgatgctggtgatattaattgcgtatcatattgccagtaagaaaaaacaccctacgccagtcatacccgctatggttgcgctggcggtgttttatgcattaatgcccattgaaaccgtgcaaaccctggccgatggtcagcaggctcggcttaccgggatggtctcctatggcagtaccaatgctggcggtgtctttctggcaatactgacggcggtgttatcaacaaatctttttttatggatttcgaaaaataaaaaattacagatccggctaggagatgatgtgccttccatggtggtgcaatccttccagtcgatgttttcaattatgctaaccgtcgctattttcgcgctggttgcatttagcgttaatcttttccttcatactgaaatcccgacgctgattcagcatctcatccaggcgccgctggtacatttaacgactaatttatccggttttctggtgttaacgaccctgacaaatcttctcttttcgttggggatacatccgggtgggattattaatcccattcttgaacctcccttactggtagcgatgcaggaaaacatgtccgcctttgccagcgggcagatcccaccccatattatcgttctgccatttcgcgatctgtatggtcatatgggaggaaccgggagcacgctggccctgctgctggcagtgtttgttcgaagccatatgtccagccaccgtaacttttccagaacggtgattgccccaggcatttttaatattaacgagccggtcatttttggtttcccggtactctacaacccgttaatgatgatcccttttatcctttatccgcaaattaattttacgatcgcgtactttgcaaccgcctgggggtgggtctcaaaaattgttgcctacgttccctggtcagtgcctccgcttatttctggctggctcggatccggcggtgattttcgtaatgtcattttgcagatcctgctattagcgcttggggtcgtaatctatttaccttttttaaccgcctatgagcgttcgttaatcaaacgcagcaatgaaacgataattaatactctcgcctctgagtcagaaataacgctgcaggaggacaatgatattcatcggttggatgggaaaaccattattctggcctgcaatgaaggtatgtcgacctctttgatggccagcaaaatgcgaaaatattgcgaaagccagaattgtacgctcaatgtgtatgccgtgaatgcaggtaaactggtcgatgaatataaaaacgcccagcttattttgctgggtccgcaaatcgcgtatctccaggaaaccattcttcaggatatcaatcaccactgcccggtgatcccccttgaccctcagcacttcagcaaacttgatggaccggaggtaattcatgccgccctgccatactttaaaaaggaatccgtatga

SEQ ID NO: 124577 - DNA, 1044 bp, Enterobacter cloacae
atgattaactgcgcctatattggctttggtaaaagcgccacgcgctatcatctcccttatgttttatgccgcaaggataaatacaacgtaaagcgtatttatgatattgcgcgtaagccagaggttgaagcgcagccgcactatcaacacatctgttttacctcccggctgcaggatattctggaagataatacgcttcagctggtggttatctgcacccatcctgatagccattttgagtatgcccggctatgtctggcacacggcaaaaacgtgctggtcgagaaaccttttacaaccaccccagaagaagcgaaaacgctgtttgctctggcgagagaaaagggcttaaccgtctctccgtttcaaaaccgacgttttgatagctgttatttgaccatgaaacaagcgattgagagcggtaaactgggggaaattgtcgagatcgaaagccattttgactattttcgcccggcgtcggaaacctgtcccggcagttatttcgacggcgcgttttatggccttggcgtgcatacgctcgatcaaattatcgccctgctggggcgtccgcagcaggtcgggtaccatcttcagcgccagagaaacccgctcaaccctgacgacgccttcaccgttcacctctattacccgaagacgactgcgatcgtgaaaaccagccatctggtgaaaatacccgcgccgagattcacggtacacggtacgagaggctcgtttattcgctatggtatcgaccagcaggaaaccagcctgaaggcgggcattatgcctggggacccagggtttggtgaagatcgtgaatgcgcggtgctggagtatatcgatgacgcaggatgttctttccgggaggaactgccggcggtacccggcgactacggacgcgtttatgacgcgctttacgacacactctcctcaggcaaggccaactatgtcagcgagcaagaagcgttaaccaatctcgacattttgcaaaaggcatttcaacagccaacacctgccatcgtttctctcgaagaggaggcgtaa

SEQ ID NO: 124578 - DNA, 861 bp, Enterobacter cloacae
atgaaacggcttctgaattgccgggccagcgactttcgtggccccattaccggcgatagcttacgagatgccatcagcgccagcgaagggcgcgtcattatggccgaaattgccgtgcaggcgcccccgctgtttgcagaggtgacgaatgcggaattgttgtgcgcgtttggcgccgaccttctgctgctcaaggggatccattttcagcggcccgcattgaacggcggagaagaacgttttggcgccgatcctgtcagccaggtgaaatgtctgacggggcgtttaacaggcgtcaattttgaagtcctgcccgcagacgatctctccagccccggcgcttttctgcctgcgcatctggaggcagtgcggcatgcggatttttactgcctgaccggctatgacaagcccggggtgacggccgggcgtatgtgtcaggcgatagcagcgctcagggcgcaaaccgataagctgattctggccgcgaaattttataattccgggctggcgcaaccccaggagtatgctggctatatcagtgcaggcgcagatggcgctatcttttcggcaccaggcggatgccggggggcatcggaaggacgcgtcagccacattgcgcaggcagtgcagtcgctgggagggcttgccatcaccacgctgagcagtagtcaggaaggtgcggattgtgctacggtgcgcgacattggcctggccagtaaacgttgcggtagcgacatgcataattttggcgacgcaggggtggcaggcatggccgacccggaagcgatgaatgccttatccctcgctatccgtggccgacggcacacctgggtgcgtatggctgcatccctgtctcgttaa

SEQ ID NO: 124579 - DNA, 705 bp, Enterobacter cloacae
atgcctaagtatatggagatctaccatgaagtgcggcggcgcattatggtgggcatctatgctcccgacaaaaaattgcccgaaggggcaaggctcgccgctgaatttggatgtagcgagctaaccatcaccaaagcgctggatttgctcgtccgcgagggactggtgttgcgcaagcgtgggctaggctcgtttgttaagcgccaggtttctgcggcaagcaattcacacctgataggcacagcgcagcgctgcgccactcaggggaaaacccttaccactcgcgtgcagttatataccgccgtgcctgcctctgccgatatcgcgcaaaaattgcaaatccctgagggtgaactggtgcatgaaatccacagggtacgcgtcatagcggagatcccttccatcgtggagtacacatggatgcctgtcgcgctgtttcctcgtctggctctgagccatgttcagcattccatttacgcgtacattacccatgaactggggtgtaccgtccatagcgcacatatgaaagtcaccgggcgaaacgccagcgagcaggaaagggtgtggctggagctgaccgaacccaccacgcttattcaggtggagcagacggcatttctcgataacggcaagctgtttgaatactcctgcgcccgccatctctggcatacctttaactttgagactgactttgtgcgtgtctga

SEQ ID NO: 124580 - DNA, 636 bp, Enterobacter cloacae
atgccacaacaactctttgatcccgcagacgttcagaagacattcgcaatgctcacggtggataaccacaacgctgcgttgctgaatgaaatttctccttgcgcgtcagtggatgaagaactgtgctttggcccattcccgccgggatatcattttgtcagagctgaaaatcgaattgctgatattcctaatgagcactttgaactggcgctggtcaatgaaattacgcaggagattgtttactacaatcgcgtgatttatcagaaagatgcatttttaaattacatgccagtgacgcaaattctgatatggcgctcgcctaaaccgtcgcaccgtggcgtgttgcgcgatttgccaggaaaagtgttttctcagtatttgctggaaaaatacaatgtcatcatcacagaccgtcaccagacacgtgatggtatgagtttctggcaatcacgtctgtatgatgccatcgccagtgggcatcatttatatgcgtacgacatgatcacctgtgaaatgcggccgataatgaaagacagcgatatcggcaatcaggttgattggctatggggcgatgaggagcatcatcagaaccgactggcgatcatcagtaaacttccgctgcctgctgtggactga

SEQ ID NO: 124581 - DNA, 678 bp, Enterobacter cloacae
ttgagcaacctgaacgggacgcttgagtcccttgagtgggagagccatttttttggcctgccttcagccattctgcgtctgcgcgaaactgcaccggcactgaccgacgccgactttcgcgtctggcagcgggtacaggcgaagatcccggcggaccgcgccgacctgcttgatgcgcttcagcaacacggttttcagctggtggaaggcgaagtggatcttgccattacgctaacccggcatgaggcgccaggcgcggaagttgccgctgagcaggatatcccggtgctgcgcgaaatggcagcgcaggcgtttgcccgcagccgctttcgtgccccctggtatgcacctgaggacagcggacgtttctatgcccagtggattgagaatgcggtaaaagggacgttcgatcatgtttgtctggtgttccgcgcggcggacggccagatccagggttttgtttcgcttcgcaagctcaacgagcgcgaggcgcgtatcggcttattagctggccggggtatgggcgagaaactcatgcaggcggcgctacactgggcgcagcagcaacaggtctcgacgctgcgggtggcaacccagatgggcaacaccgctgcgcttaaacgttatattgcgagtggtgccaacatcgacgccaccgcctactggttatacaggtga

SEQ ID NO: 124582 - DNA, 717 bp, Enterobacter cloacae
atgaccagcaaaccgaagtatcggcagattgcagatgcgttgcaccagcaaattcagcgcggcgaacttaaagctggcgatgcgttacccacagaatctgtcctgcaggaaacctatgcagtcagccgcgtcacggtacgtcaggcgctgaagttgctcaccgaacaaaacatcattgagagtattcagggcagcggatcgtatgtgaaagaggagcgggtcaattacgatatttatcaactcaccagtttttacgaaaaactcgcggatcggaacgttgaaacccacagtgacgtacagatttttgaggttgtcagagcgggcgaatctctggcgcagacgctgctgctgacaacgggcgataaagtctggcacgtcaaacgcgtacgctttatcaaacaaaaaccggtgacgctggaagagacctggatgccgctcacacttttccctgacctgacatgggaagtgatggaaaactccaaataccactacattgagcagatcaaaaaaatggtcatcgatcgcagcgagcaggagatcgtcccggtcatgcctgacgaggaagtgatcgccgcgctgggtattgatccaaccaaaccgatcctcgaaaaaatttcgcgcggctttctcaaggacggcagagtttttgaatacagccgcaatagttttaaaagcgaagattaccgcttcacgttaattgcgcgtcgtcatcactga

SEQ ID NO: 124583 - DNA, 1956 bp, Enterobacter cloacae
atgaaactcaagaacgttgctttcctcatgctcaccctggcggcatctgcgcaagcctgcgcaaccagcgtcgccccctccgcctctgcttacacccgtgaacataacgcggcgatatatcagcagatcaattttaatgacaagcgcgatatcgaagatgcaaaacgtggatttatcgccaccataaatcctttgctcataaaaaacgacaatggcaaaaccgttgttaaccttgaaaactgggcatttttaaaaggtgaagcacccgataccgttaatccttccctctggcgccatgcacaactgaataatattaacggtctctttaaagttaccgatcgcgtatatcaaattcgcggcatcgacatttccaacatgaccattatagaaggaaatagcggattaattatcatcgacccactggtcattcccgagtcagcacgtgccggactggaactttattatcagcatcggcccaaaaaaccggttgtcgcggtcatttattcccatagccatctcgatcatttcggcggcgtcaaaggcgtcgtgtccgaaacggatgttaaaagcggcaaagtcaaaatatatgcgccagaagggtttatggaagaagccgccagcgaaaacttcctggccggtaacgcgatgagtcgccgcgcgctttatatgtacgcgatgatggtaaaaccaagcgcagtgggccatgtggacgacgggatcggtaaaactatcgccaccagcaaaaacacgcttatcgcccccaccaatatcattagccagccagagcagcgcgtaaaaattgatggggtcgaggtgaattttattctcgctccaggcactgaagcgccatcggaaatgatgatgtggttccctcagttcaaagtgtttgatggctccgaactctttaacgccaccatgcataacctgtataccctgcgcggtgcgaaagcgcgcagcgccgttaactggtggaaggcgctggataaagcgctggtgaaatatggcaaccaagtggaaatcgcactcagccagcatttgtggcccgtctgggataatgcgcgcgtcaaagactacatcgcctctcaacgcgacatgtacaaatacatcaacgatcagtcgctgaatctcatcaacaaaggctacagcatggatgaagtggctgaaacactcaccctgccagacagcatcggcaaacgctggttcaaccggggctactatggctcgctcagccataacgccaaagcaatgtatatgttttacatgggctggtatgacagcaaccccgctaatcttaacccactaccagagaaagaggccgccccgagatatgttcgcctgatgggtggcgagaagaaggtttatcagcaggcaaaacaggcggcgaacagcgggaattatcgttgggcggcgcagctgcttaatcatcttattttcgctaatcccgataacaagcaggcgaaagatctgcaggctgacatctttacgcaactgggctatcaaagcgaaaacgccatctggcgcaacgaatatctcagcggtgcgaaagagcttcgtgatggcgttcctgtcctgccggtcgccagtacgctggatagcgatttaaccgccaatatcgagcctgaagccctgcttgattatatgggcgtgatgttaaacggtccgaaagcggacggcaaaaaccttcgtttcaactggacgctgtccgcgggcgacacctacggtgtggagctcaataacagcgtgattatctatcacaaaggtctgccattcaccgatgcggcatttagtctcaaagccagtgtcgtcgatatggcgcggctaataagccacagtgcccccgtggataaaatcctgggtgatggcacggtatctctgaagggtaacccgcagaaactggacgaattactcgcgttgctggacgtcttcccgcagatgttcaatatcgtcaccccttaa

SEQ ID NO: 124584 - DNA, 924 bp, Enterobacter cloacae
atgcgaagctctgagcgtaaccttttggtcgccattattgttttgatagtggggatgctgctcgttttattgccggtctatgtacgcgccgataatgcccgcgactggcaaaacatgccaaaagataaaaacctggttttcggttactacagtaatattcataccaacacctcaattgacagcgccctgcccgtagacggcgcgagcgtcgatgccgatctctatctgctgcgctatgcccgctcttttgacattgacgggcgaatatcggcgatacagatcattcaaccttacgccagcgttacggcctcactcgataacgcccgttatttcaccggatcgttgagccatgaaaatctcggcgatacgcaggttatttttgcccataacctgtttggtgcccccgcgctgagcgaagaggagtttcgtcgctggcagcctgaaatgttcctcagcgccgccatgtggttaacgttacctaccggcgactacgatagcagcaatacgataaatatcggcgcgaatcgttggtcatttaaaccagagctggcgtttggtttgccccttggctcaagctggctggagctaaacagttgggtaagtttttacaccgacaataaagactatcagcaaaacagccgtcttgagcagcgcccgctctatacgctggaaggccactggagctataccctttctcccgcgttgtggctgtcatttgacggaagctgggcaaaaggcggtgaaacccgcgtcgatgggcagttacaggacgatgagcaggaaaacatacttctggggggctccgtcggctttatgctgagcccgcatttcggcggaatggtcgcttataccgatacagccaaacaccgcgatgcctcgccagacatcacaacgtggaccttcaggcttcagtatttctggtaa

SEQ ID NO: 124585 - DNA, 774 bp, Enterobacter cloacae
atgcgctgtatgacattgattatcgcgctactgggcgccttgccagtgctgagccaggcggaggagacggatgcagtagaaaaagcgaccaatccgttacatctttccactgccatcgcgcttcaggactattacaccccggagctttacggtagcgagcagcacaccaacgacactctgctacgcgcaaccgtgcctgtagccgctaacgactgggtacctgtgccgcaaattctgcgaataaccaccccgctggccacccgtccccagcctgccagcggctacagcaccgggttaggggatatcaatctgttcgatatttttctgcttaaacaggaaggcgttaaaattggcgtcggcccgctaataacggctccttctgccctggaagacgaactgggaagcggcaaatggcaggcggggttatccgctgttgccatcaaatccagccccagatggatggcgggtacgctggtgcaatggcaaaaaagttttgcgggcgatggcgaacgtgatgacgtagaaacgggtacgcttcagcccatcgtggtctataaattgccaaaaggttggtatttacgcacctccggcatctggacctggaatatgaaaaatgacgattattatatgccactcggttttggcggcggacgcgcctgggcgatgggagataaagtgatgagcgcttttatagagccgcaatggaccgtggcacataaaggggactatttaccggagcttacccttttcgcaggtatcagtatcacaatgtaa

SEQ ID NO: 124586 - DNA, 1413 bp, Enterobacter cloacae
atgcccacccatctggtttggtttcgcgcggatctgcgcctgcatgacaacatcgccctggcggcagcctgtcgctctgaacacgcccgcgtgctggcgctgtttatcgctactcccggacagtggcagcagcatgatatggccccccgacaagccgcttatctctgttcgcatctgaatgccctgcaacgttcgctggcggaaaaaggcattccgttgatttacaaagaggtcagcgattttaccgctcagctcagcgcggtacaggaggtgtgtcagcagaacgacgtcacgcatcttttttacaactaccagtacgaattcaatgaacagcagcgcgatcgcgagcttgagcgcatcctcggggatgtagagtgtcagggatttgatgacagcgtcatgctggcgccgggcagcgtaatgaccggcaatcgcgagatgtataaggtctttacgccgtttaaaaatgcatttatcaaacggctgaaagaggcgttgccggagtgtgttgccgcgccgtctgcgcgaggggagtgtgtaaacgacctgcctgaactaacgtttgactatccgcaacaggcgtatgaccactctttattcccggctgatgaaaaagcggcaatcgcgcagctgcgccagttctgcaaaacgggggcggccgcttacgaggcacgccgggatttccccgccattgaaggtaccagccggttgtcggcctgtttagcgctgggcgtgctttctccgcgccagtgtttacaccgtcttctggcagagcagccccaggcgctggaggggggcgctggctcggtatggcttaacgagcttatctggcgcgaattctaccgtcatctgatgacgtatcaccctgaattatgtaaacatcgtcctttcattcgctggaccgaaaatgtgcagtggcagcaaaacgagatgctgctgcaggcctggcaaaagggtgaaaccggctacccgattgtggacgccgcgatgcgccagctgaatgaaaccggatggatgcacaaccgcctgcggatgattaccgccagcttcctggtgaaagatctgcttatcgactggcgtgtcggggagcggtattttatttctcagctgatcgatggcgatctcgcggcgaataatggcggctggcaatgggcggcctcgaccggaaccgatgcggcaccttacttccggatttttaatcccaccacgcagggacaaaaatttgatgcggacgggacgtttatccgccactggttgcctgcgctgaaagcggttcccgctaaggcgatccacgacccgtgggcatgggcggacaaacagggcgtaacgctcgattatcctcgtccgattgttgaacataaacaggcgcgcgtcgccacgctggcggcgtacgaagcggcccgcaaagcgtaa

SEQ ID NO: 124587 - DNA, 726 bp, Enterobacter cloacae
atgatttccctgaaaaatgtttctaaatggtatgggcactttcaggtgctgaccgactgctccaccgaagtcaaaaaaggtgatgtggtggtagtgtgcgggccgtccggttccggtaaatcgacgctgatcaaaacggttaatggtctggagcctgtgcagcagggtgaaattgttgttaacggcaccaaagtgaacgacaagaaaaccaaccttgcccagcttcgctcccacgtggggatggtgttccagcattttgaattgttccctcacctctccatcatcgagaacctgacgctagcgcaggtgaaagtgcttaagcgtgacaaaaaagcggcgcgtgagaaagggctgaagcttctggatcgcgtggggctttctgcgcacgccgataagttcccggcacagctttccggcggccaacagcagcgtgtggcgattgctcgcgcgctgtgtatggatccggtggcaatgctgttcgacgaaccgacctccgcactcgatcccgaaatgatcaacgaagtgctggacgtcatggttgaactggcccacgaagggatgaccatgatggtggtgacccacgaaatgggcttcgcccgcaaagtggcaaaccgcgtgatctttatggatgaaggcaagatcgttgaagactcgccgaaagaagagttcttcgccaacccgaaatccgaacgcgctaaagacttcctggctaaaatcctgcattaa

SEQ ID NO: 124588 - DNA, 942 bp, Enterobacter cloacae
atggcacagcctattattttcgattgcgatccgggtcatgatgacgcgattgccctcgtccttgcacttgcctcccctgaacttgaagtcaaagctgtcacctcatctgccggcaaccagacgccggataaaaccctgcgcaacgtcctgcgtatgctgaccttgctaaagcgccccgatattcccgtggccggtggcgcggtcaaaccgctgatgcgtgaactgatcattgccgacaacgtacacggagaaagcggcctggacggcccggcgctgccggaaccgggtttcgccccgcaatcctgtaccgccgtggagctgatggcaaagttactacgcgagagtgccgaacccgtcacgctggtagcaacgggcccgcaaaccaacgttgcgctgctgctgaacagccatcctgaactgcacagtaaaattgcccgtatcgtgattatgggcggagccatggggctgggtaactggacgcctgcggcggagttcaacatctttgttgacccggaagcggcggagatcgtcttccagtcgggcttgccgattgtgatggccggactggatgttacccaccgggcgcagattatggcgaatgacatcgagcgttttcgtgcgattggcaacccggttgccacgaccgtggccgagctgctcgacttctttatggaatatcacaaagccgagaaatggggcttccacggcgcgccgctgcatgacccgtgcaccattgcctggctgctgaagcctgagatgtttaccacggtagagcgctgggttggtgtggagacccaggggaaatacacccaggggatgacggtagtggattactattcactgacggggaataaaccgaataccacgctaatggtggatatcgatcggcaggcgtttgtggatttgctggcggagaggctcgcatactacagtgcggcctga

SEQ ID NO: 124589 - DNA, 2385 bp, Enterobacter cloacae
atgtttattgaaaaaagcgactcattccttgaattatcctcagaagttatttttcctgaggcggctaatgctgccattttgaaacatgataaatgggcggatgtttgggagaccctgacaaccgatgccgatctgaactataccgatgaaaaggagactgtgagtctttcttctctggtcatgtcagccacatctgctatttatcaggctattacggacggctggacaatgtgcgtgggatacagtggcggcaaagactcccattctcttctgcacctgtttctgatggcattgatcagggcagtacgtaacggcacaaatatcagcgaacatcatttcattcagatgtccgatacgctgatcgaaaaccctgagatgcactatcaggcttcacaggttctcaaccagctcagaatgttcattgctgaacaccagctaccggtcacagtccttgtcgcccgaccgtctcttacgcagagctgggtcggccgcattctgactgggcgcggacttccgacctggactaattcttctacccgacagtgctcaaccgactacaaaatcgcgcccctgcgccaggccaaagctcgttacctgaaaaacgccccggcatccgttcgaagcagggtatgcctgatgctgggctccagggatgatgaaagtgcccgaagggccggaaatatcctcaaaatgggagggcaggcgaggaaagtaaccctgactgagcacggtggtgaactctatccggtaaaggagtggcgcactcaggacatctggtcttttctgatggcctgtggttccgaatcacgcttccctttaccaagctttatgccggataacttcagcctggcaacgctttataaagacgccaccggggagtgtatctggtcgccggagaaacccactcgaacatcagcttgtggggctcgatatgggtgctcgctttgcacagcagtaggggttgaccattcaatggaaacgctccttcgaactgacccggagaaatacggttatcaggctggcctgagtcgtcttcagcgatttctttctaagatccagtacgactggagcctgcgggattatatcggtcgtaaagtgttcgaaggcggatatgtgcgtcttcaacccaatatcttttcttcgtccctgactgaacgtctttttcatgcctgttgcagccttgattatgttgaagcaagacgtgcggcagagcatcgcagaaagctactttccggcgaggttgacgatacggcttataaccgtcgtatggctgagccacaatttcggcttgtacaggaagcaaacgtgatccacgttgatttcctctggtcgttgcactgtttcaaccctcgcccgtttcgggcaattgagatctatcgcagggtctgggaagaggccgatctggaccttcttgaggatgagcctgacatgcagcctgtgccccgtacaccaatgccagctccactctggatgaaactgcccggaggccggttcggtacagcttatgatggactgactgatacgttgccgctgatgacctattttgacgggcaggctgaccccagggcttcacgtagcctaaagaccggagagagcagttctgtcgtcgtggcattcgaggaagaggatgagctgactgttgaagaagatacggcgtcctggattatctggcatgaatacgacgggttacgccagcgcatcgctgacggtgagtttactccaacgactgctgctcagtatcttcttcgttatggcgcggtccgaatttcaaaaggcaagggcgctgtctatcatcgtctcgcacaacggggacaaaccttttcccgcctggggataggcgacagagtgtcgcttccagagctggttgccagtcggcgttttaaaatactcagtgattctgcataccgtcaggttgtagcccggaaattgcgtggacagataaaaaagttcagattctgggcatgcgtagctgcctgtgttcagttgcacgtacacaacaagacggcactcggagaaagaattttaacgttactcgaaggtgagagggaacagcaacaaggtgcgatccaggcgaagctgaaggcgggaatgatggatgcagttctaactctgtgtaaccagcgactccgggtgaaagaaaatactaaccagccagaggagttccgctattaccgtgccgtaagagctcgtttcatgcgccatttatctgaatgccttaagccagaaaatggcggcgttatccgtgacgttatctgggaactgagggtgctgagcagtgctcacggtacgaccaaaacaggtttttactatgtcgatagcaatcgcccgacagcgaaaggactgttaaaccgccttctgatgaggatggtcaagcaggtcgtataa

SEQ ID NO: 124590 - DNA, 534 bp, Enterobacter cloacae
atggtcaaggtgataaatatcaacgggaatttagttgaattacctgagccctcagcaaagttatccaaagctgaatcacctgatggtaggttctcaaaacctaaaaataagatctctaaaatacagcgagctgagctgcgaatgaaatttggggggcgttgtgcctattgtggttgcaagcttcctgaaaaagggtggcatgccgatcatgttgagcctgttcgacgcgactttgaactggtgagagcccctgtcggcagcggcgtaactcatgttgcccgaagtacgggtaaggttatgcaccctgaactgcatgctatagaaaacttatttccatcatgcgccccctgcaacctttttaaaggagcttttagtgttgaaggaatgagaaaagaaattaccaaacaggttgaacgggctcgcgcatatagcgtgaatttccgtaccgcagaacgttttgggttgcttcatattgtagaaaaaccggtcgtcttctggtttgagcagtataacgaacagaaacaaaacgaataa

SEQ ID NO: 124591 - DNA, 609 bp, Enterobacter cloacae
atgtatctgcatcttgtgccccgtattcttcaccatatgaaaaacaagtgtactctcgtgtcagtttctgtacctgaattgtcacttgagcttaaagctgattcgctggtggcaatgaaaccttatcccaacaagtcctaccacgttgtcatgttgaaggggcgacgtgcattaaatggctttctggtaaaaagcccacggactttaactgagttcacaatgataacaatctgggaaattgaaggctttggaaaaattagtcataccgtaaaaacgctcgttcaggacaaagactatgacttggtctcccatgatgtccttttggcacatgcataccatcagagggaggaagaattggggtaccgtgtacatccatcctatgacagtctagctcccgtcgattttgaaccaacaatgcagtcaaggtacataaaggaatccgatctttcccacgacgtatgggaaacctattcatggggggaattgctgcgttcgcgtgaagagacatttctggcgatgaccatgtcatctgctcgtttaagccatccagcattcatcagaggaaaccgacttcctcaaactgaccaggccatcattatcagttcgtaa

SEQ ID NO: 124592 - DNA, 132 bp, Enterobacter cloacae
atggatgagcaagatattctccgcgttataaacggccgtgagattgatgcttctgacctcctggaagaagctatgccgaacgcagcccgacgcttttatcgtttaactaacagcatgaacaaattgctttag

SEQ ID NO: 124593 - DNA, 786 bp, Enterobacter cloacae
atgaacgtttcaactgacagcagcaacatatcgatagcagaactcaaagaagaatttatacccggtcttctgcttaatgctggggcaataagccattacggcgactcggctttatcttcgaaggctatggataagtattcaaatcttctggagaaagacgcagttaccgctttatcaggagccttgaaccgtatcgtaagtgccttagcggaggcagatccacgttctatcagtagcaatccatcctggttttcccgctttacgggcaaacaccttgaaaagcgcgttcgttaccaacacgcacgtgagaaggtggaaaatcttattaatgaggggaacggatatctgacacatgtgaatgagacgctactggctttagaagagctgcttgaaacatatgtgtcagaaatcaaacgccttaaaatttttatccaggcaggccatgagttccttagggattctaccgaagaaaaaaatagtgacgatctaagccttgtcttcgataaaccgagggaaagatttgccagacgtttagctaacctggcaacactgcttgcgtctcatgaaatggccgccatgcagatggaaatcactcgcgggacttgtatagatattgctgaccgctttaacgaaactataaaagtcctggttccagtatggcggcaacacacactttcgctgttatcagtaaataacactgaccctacgattgttagaaaagctaatcaggcccacgaggctcttctaaaaagcctgcgacaaaatttagagggattccaaaaatga

SEQ ID NO: 124594 - DNA, 1113 bp, Enterobacter cloacae
atgattaataatttgaccaccaaaactgaggttgttgcttttactttgacttccgctgaactggaaaagttcgggctgaatgagcaagatgaacaagagattaaagccgtcgcggaatgcattaatgccgatgatccaggaacagtttatcgttttggccgggcaatgggggaaaacactgctaattatgcggatagcctgcttgagcaaattcgcaataaagatttagacgaagccgggagcaaattaactgaaattatcaaccttgcaagaaatgtaaacatctcgaacttaactgaaagtcgttcaaatctgccagttattggccctttgttggataaaatccgcacccgtgggaagaatttcgccgcacagtttgaatcaactcgtgaacaaatcgatgctctggtttcagaggtttcagttacacagaatagcctcggttctaataatatttcgctccagcaaatgtttgatgaagtcgttaaagaacaccacttaacaggtgtacatattgctgccggtaaattaaggctgggagaattacaattaaaagcagaaaatctcagagctaatgttggtaacaatcctgctaagttccaggaagtatctgatctggatacgctaattgctaatttagaaaaacgtattggcgatttagttgtttctcagcagtctgctatgcaagtattgccaatggtacggattatacaggcaaataaccaaagtcttatcgacaagtttcatagcgtcaaagaggttactgtccctaatttcaagcgtcagtttctgttagccatttctctaaatggacagcgtaacgctgtaaatcttgccaatgatatcgataatgccaacaatgagttactccgtagtaatgcaaaattactgcatcgcaatgcagtagaaactatgaaagcaaaccaacggctggttattgatataagcacccttaaagaggtgcaggatacgcttatccagacggttggcgatgttgttaaaatccagagagaaggggctattaagctcagggaaacagaaaaacaggttcttgccatgcgtgagaatttgcgcacccgactgacacaaaaaggggtagatcatggtgcgtaa

SEQ ID NO: 124595 - DNA, 177 bp, Enterobacter cloacae; identical to SEQ ID NO: 26516

SEQ ID NO: 124596 - DNA, 606 bp, Enterobacter cloacae
atgaagatcattgagacactgagagaattatcggaagtctggaagctattcggtgatatgcctgacgatacgacactgaatgttgatttggctgctctttaccttggtattagtgttaaaacattagctcgttaccgacaaaatggtggtggacctgaatacattcaataccaagccgaagatagtaaggctcgaaatcaacgagtaaattatttgttgggtgatttaaggatctggcgagatagtcataaagtaaaaagcactatgcatggtgctcaggttcgagggcttgcattcaactcactgattgacttcacaatagaacaaccattctggcatattgataattatgatgagttacataatcgaaataaaatcctatctcatgcgcttagaacaccagaagaacgatttaaactttatttaaaagaagaacgagtacagattgtttgggtctcaatagaagaagctttatcctgggattggatagatttaaatgaacgacaagtattcaatgattctttcgtagagttgctgaataatctaatccagatttctaattcggcacaagaaactctagaattgaaatttattttcaaaaaataa

SEQ ID NO: 124597 - DNA, 735 bp, Enterobacter cloacae
ttgaagtttgatatgcattgtcatttggatctatacaaagatccaaaggatattatttatcaatgtgataagaaaggactatatgtcctttctgtcacgactacaccgaatgcgtatattggtagcaataggcttgtttctggctgtaaaagaataaaaactgctttaggactacatcctgagttggcacacttacggcacgaagagttagctatctttgatattttgctaccccaagtaaagtatgttggcgagataggacttgatggtggacaagattataaaaaacatgctgagatccaactgaaagtttttagacatattttaagagagattcatcatcggggcgggaagattatgtcaatacattcacgaggtagtgcagataaagttgtggatgaattgaaggggattgatggggttccaatatttcattggtttactggcacaaaaactgagctggataaagccatagatattggggcttggttctcagttggtcctgcaatgttaaactcaaaaaaaggaaaagagataataggattgataccaaaagatagattattaacagagacagatgcacctttcgcaaaattcagtggaaaaaatctattcccttgggatgttgataaagccattagaggtatatccgaaatatgggggtgtgattcagaaactgttgaatataaattagaagagaattttaggcgaattctttctatcggtgaacgatga

SEQ ID NO: 124598 - DNA, 1341 bp, Enterobacter cloacae
atgaatatttatatagaccatgattatagtcggttgccagcatcgaatgattctactatttcagttcaaatttattcgagagatggagtcgttgccaaaaatggaataaagcctcgaaatgatattgcaacaataggaaagcctgtatatgacgcaattaaaagattaggagttcaaatatcagatgaggtaatggatttcctgacaatatcaatggctgtgacagccgctgacacctttatagttcgtgatgattgctttgatggttggacacgggatataaacgtatctgtgagggtcataaatccaactatctggataaaaaataaagcatatattgaaaaagcattacagtttttaagtggagatgtctggaaatttgattttaaaaaaggtggaatgaaacctcctgtgccatttaaaccagtcaatgggcgtagattaataaatttagatggattagattgtatttctctattttctggtgggttagacagtgcaatcggtgttattgatattttaacaacaggtgagaaaccgttgttaataagtcattcatacaaaggagataaggcaaaacaggaacaaatatcaaaaggaatcaaaggtaagggggatttctcaaggctttgtaccagtgcaaatcctataggaaggggaatgcaaagagatattacgatgagaacacgcagtttaaatttcttagcatttgctgctgttggtgcggatgctgtgatgagagctaataataaaaataatatatcgatatatgtacctgagaatggttttatctcattgaatgcaccattgacaaatcgaagaattggctctctcagcacaagaactactcatccatattttatcgaaatgatacaaagtatttttgataacattggtttcaagatgaagtttactaacccgtaccaattcaaaacaaaaggacaaatggttagtgaatgcaaagataagaatatactcgctgatatcgttgattctacagtttcgtgtagtcattggaaaagaaagcatcagcaatgcggctactgtgtgccttgcatgattagacgagcctccctattaagagggggagtaaaagaatcaataacatatcatcaagcttcatatgctaatttactgaattttgttaaaaataaacaagatggaagagatgatattttttcagtgataatggctattgaaaatgctaaaaaaaggaatttgaaggcgtgggtattgaaatctggaaagcttaaagagcaggatattggcaagtatgaaaatgtattcattgaaggattacaagaagtagaagctttcttgaagaaggaaaaattagtttga

SEQ ID NO: 124599 - DNA, 747 bp, Enterobacter cloacae
atgggaacgtcacagtcaagtaaaggacctaaaaatgggaatccacttgttccaccttgggcagatcaagcaaaaaatggaggaaataaaaatctaagcggttttagaactctttttggcagatttgctcgaagccgagatatctcttcactaaaaggtgctcttggacggtattcccgacaagtaacaggtggaggagattcagctaacgaacgacttggtaatattgttagtgctggtggtggcttatttgaattactgaatgatgggattgtaaacgatcagaacagtaatcctattattgacctaaacagccttaatgggctctcatgtgaaaacgcgattgcaagaatatcccaagccctttctgatggcagtgaggatgctgataaaattcaaactgcaatgaatgatgctttagttgaagctttagatggaaaaaccacgtttaacccacaagatattacagacgatgttcttatagaaacgatgatttgctatttaactgatagtatttttattcaagttacaatggacgcaggaaaatcttggaataatgcacagtcagcgaaagaattgcagagagcagaaaatgaattgcatgagtatattagtgcaacagttgataaccatatggaaccgaaaataagtaaaaacattagatcgttttcaaaatcggatataattaaaattcaaaaagatgttattactgaagtttgggatgaatggaagggttatagcgaatga

SEQ ID NO: 124600 - DNA, 1770 bp, Enterobacter cloacae
atgtgggctgacgtagaatccaacattgattacttaaattttggcgaagtttcaagtctcgcagtagatatattgaagtctgaaaatatgttgccagtgtctattggaatatttggtaactggggagctgggaaatcatcattacttaaaattatagaaaaacagataaatcaagaagatggtaaagatatcctagttgtaaatttcgatgcttggctgtatcaaggctatgatgacgcaagggctgcattactggaagttattgcaacaaaacttaacgaagcagcccaaggaaacccaaaccttgtagagaagacattcagtttatttaaccgagtagataaagtgagggcattaggttacacccttgaaggaattgcattagctatggggattcctaccgggggaatggtttctaagggggttggggcaattaaaaatatttttagtaacggtgttaatgaaaatacataccaagaagccattagtataggtaaggaggttgcaaatagtgggttaattaaagataaagaagcattgaccccaccacagcaaataaatttatttagagatgaatatagtgggattttaaaagagttagggaagaatttaattgtttttatagataatctagatcgttgtttaccacaaaatgctatacaaacattagaagcaatacgattatttttattcctaccaaatacggcctttgtgattgctgctgatgaagacatgataagaacatccgtatcagagtatttcaaaggaacatcagcaagacatcacattgattatttggataaactaatacaagtccctatccgagtcccaagaacaggccttttagaaataagatcgtatcttttcatgcttcatgcagtaaatgcaggggtagatagtaatttggtagaaaagctaaggatagcattggagaaatctttacaggaatcatggcataaagatcctatgaaaaaagaagatgcaataaaaatattagaaggagagaataatttagaattagcaagggcatatgatcaagtagaccggttggcacctatatttgctacctcaccaataatacatggtaatccaagaatagttaagagattactaaatattgtaaaaatgagatcaaacattgctagaagaagaagtatttcattagatgagaatgtcattacgaagttagtaatctttgaaagatgtgcaggagagaatgctgccaatgatttatattcaatgattgatactaataaaggctacaagaaattatttagtgaaatagaaagcacgaaacctaagaatttgcctgattctgtaccagaatcttggacgaaagatgatgcaaccagtgaatttattttaaagtggtttgatcttgaaccaaaattgagtgataaggatttacgagcgtcaatctatttatcacgcgaaacgatgccagcagcccattatgtaataggtttgtcaccaaaagcaagagatgcgttaagtgtattgattactacgacaaggaaaagttctcaagctgctgtagctgcattacgggatatatctcaagatgaatttgttccagttatggaaagtttgattgaacaccttcgaactataactgaatggagcaaacaacctgctggttttgctggggctgtattagttgcagataaacatatcgaagcagggaaagtctttaaaagatttataagtggcataaacgataatccgcattggatgaatgctcttataaaagaaaaaagttggtttaaataa

SEQ ID NO: 124601 - DNA, 1569 bp, Enterobacter cloacae
gtggccccaagtgaaacccctttaaactcacataaacccataaatttgtataccagaagtattctagctactatctggtatacacacttgaaccactggtatacattgatgaaaatgacactcaatcagtcgattataatcaataagttatctatcgacgtgaaaccgagccttgatccgcaaggcagagtagtctacttacccaatccagagcgaaaaccgtatcttatcactgataatcaccgggattcaccagttggttttggtgtcaaaatcagtgccacgaaaaagacctatatcgttcagcgacgagtgtccgttgctgaaagccgacctactaccggtggcaagtctcctcaaacggtcatcaggtctactattggtaatgtctcagatttcgccagcattgatcaggcacgcgagactgctcgcaagttcgttgaaacgatgaaattgacgaaaaggaaccctaatgcagtgaagcgggaagctgatgcttctgaactcactatcagtgaagtgtttgctcaataccgccagcatctgctgggtagagcgaaaccagctaaacccaacaccttggctgtattagataaagcacaaaacaggctttccgagtgggctggtttgcgagttaaagatcttactggtaatgaaattcttcggaagtttgatgaaattgcttcaagagccagaacagcagcggaacagacctttaggtggatcaatgttgctgtcagacatgcaatcgaaattgaagccagtaatgcccagacccagcaacgacaaccctccttgtcctacaatccattctctatcttgaaagttcagaagaagttcaggactcgttctgagcttgaggatagctatcgtgcgaaaggtgttcggaatccattgtctcccaaagatacacttggaaaatttttaaccgcattatataacaaaagaagtttcaatcgtttaggctgtgattacctgctgttaactgttcttcttggtgctcgtaaggaagaaaccgcttctctgtgctggcgagaaacgcttacaagcgaagaagcaaaaacgacaagctatgttgaccttagtaacagaactatccgtttttacgatactaagaatcgaaacgatcacgagcttccgatttgtgatgccgtcaaaagaattttggaagatagaagagacattgttcaggagacagaaactcgtccagaaagactgaagtgggttttccctgctcgttctaaaagaagcaaaatcgggcattactctgacagtaaaagtttgcgggaatacttgtgccaagaggcgggaatcttgaaactcggtatgcatgatctacgaaggacatttggtagggttgctgaagaacttgtttcatatgccgtcgttaagagactgctcaatcacagaaatacaacagatccaacagaaaggtatgcagaacctgatcaagaacggatttttgaagcattacaaaggattgagttgcatatgcttatgactgctcctaaattatacaatgtgttacttgcttcggctaagtatccccccttaaacgaaacttgttaa

SEQ ID NO: 124602 - DNA, 888 bp, Enterobacter cloacae
atgctgaatctccagcgaacggcgatgtttgtggcggtagcggatgcgggcagttttactgccgccgcagagtcgatggggctgacaaaggccgtggtcagcttcaatattcgccagctggaagatgagctgggagtcacgctgctgttgcgatccacccgtcgcctgacgttaaccgaggcgggcgcgctttttcatcagcgaagcgtcaggcttttacaggaggctgaacgcctgcaggacgacgttcgcgctaaccatgccggcctgaccggcgaattgcggatcaccaccacgcccgaatacggttcgcaggtggttgtgcctttgctggccgaatttagccagcagcatccggagcttcgcgttcgtcatgtttcgtcgtctcagcacgccgatctcatctcggagcgctttgatgtcgccatccggctgggaacactcgctgattcgcgctaccacgccgccttgatttcaaactttactatcctgccggttgcagcccccgggtggctggctaaccatcccgttggatctctcgaacacctggcgcaggccgagtggatcgttcacgagcgtttaccttcgccgctgcactggcaggtgaaagatgcagatggcaatctggttgcctttgagattaaaaaagccccgcgcctgtacgcagatagcgcccaggcgctgatggctttcgcgcatgcgggatgtggtgtggcgctgctgccggagtggctggtgcgaaacgcactgaattcgggggttctggtatcgcttttaccgggatacacgtttgctcagcagggcatctatgccgtttatccagatgcccagcatgtgcccgctaaggttcggacatttattgattttatgcgtgcccgggtgaactag

SEQ ID NO: 124603 - DNA, 1209 bp, Enterobacter cloacae
atgacgtatcgcagcaaagtcgccgtagtctatctgctgggcttttttcttgatttgatcaacatgtttatcgccagcgtcgcctttccggcaatggcgcagacctatcacgccacgccctctgcactcgcctgggtcagtaacgggtatattgccggcctgacgctggtgatcccgttcagcagtgccctgacgcgccgcatcggggcaaagcacgtcatccttctctcgctggttctctttagcgtagcctccaccgcggcaggcttgtctgccacacttgaaactctgattgcctggcgggtgctgcagggcgtgggcggtggcttattgatccccgtagggcaggcgctgacctggcaacagtttaaagcgcatgaacgcgccaggctctcttccgccgtcatgctggttgcactgcttgcccccgcatgctcacctgcgttagggggcgtactggttcaggcgttaagctggcggtgggtattttttgctaccctcccggttgctctcctgacctttgcgttggcctgtctgtggcttaagcatgaaatgcccgcgatgaaagcaaaccgactgctgaacctgagtttgatcgccgatccgcttctgcgcgtttccatgatggtttatgtatgtgtccccggcatgtttatcggaataaacgtcaccggcatgttttatctgcagagcgtggccaacatgacgccagccgcgacgggcatgctgatgctgccgtggtctctggcatcgtttatggccatcaccgcaacgggccgttactttaaccgtgtcggcccccgacctctgttgatcgcgggttgcctgcttcaggcgtcaggtattctgcttttgctcagcgtcagtgcgaccacgggcacgctgccagcgatcgttgcgtttgcattaatgggcgcaggaggcagtctttgcagcagtacggcgcagagcagcgcatttctgacaacgcgtcgggaagagatggctgatgccagcgcactgtggaatcttaatcgtcagctgagtttttttgcgggtgcctttctgctggcacaggtgctggatctggcccagaggtatttgccccccgtcgccgcatggcacgggatgtttctggttgcttcggccatcaccctggtgcccgtcatctctgtatttcgtcttaacaacccgcaggtgcttgcacaactgcaacaggagaaaccatga

SEQ ID NO: 124604 - DNA, 378 bp, Enterobacter cloacae
atgacgcctttcgaacacgacatcattgatattcatatcgcactggaaaactggctgggtgccggtgaaggtaatattgatgccctgctcgcccgtttccagccaaactttctgatggttcccccgagtggagcacatttaaaccatgacgcccttgtccgttttctgcaagcccagcgtggacgccgacccggccttaaaatcatcattgatgagctagccacgattcagtcatgggataacggtgcggtgcttcattaccgggagacgcagacccgcccggaccagcccgtcaacgtacgctggtcaaccgcggtgctcaatcgggaaggcgagacgatcagctggcgtctgctgcacgaaacggcgcagccttaa

SEQ ID NO: 124605 - DNA, 708 bp, Enterobacter cloacae
atgaaaactgtactggataccctgaagggaaaactggtcgtctcctgtcaggcgcttgagaacgaaccgttgcatagcccgtttattatgtcgcgaatggcgctggcggcgcgtcagggaggggctgcggccatccgtgccaacagcgtggtggatattgaggcgatcaaagagcaggttacgctgccggttattggcatcatcaagcgggagtatcccgacagcgaggtgtttatcaccgcgacgatgaaagaggtggatgaactgatgaccgtctccccggcgatcattgcgcttgatgcgaccgacagggcgcggcctggtggggaatctctggcaacgctggttacgcgcattcgtacccgttatccctcggtgctgcttatggctgatatagccactgttgatgaggccgtcacggcgcaggcgctggggtttgattgtgtcgggaccacgctttacggctataccgcgcagaccgccggccacgccttacccgatgatgactgtcagtttctgaaaacggtactggcagccgtcacggtaccggtggtggccgaaggtaacgtggacaccccggaacgcgccgccagatgtctggcgctgggggcgcatatggtggtggtgggcggggcaatcacccgcccgcagcagattacggaacgctttatggcggcaattgacgcgcaaagcaccgatcgagcatga

SEQ ID NO: 124606 - DNA, 228 bp, Enterobacter cloacae
atgccccttaatgttgtgtttttgcacggtgagagaacgtgtcactccttcatatactttcccggtcacaataaaacggcttcaggccgtaccaaaacgacaaacacaaatctcattctgattaccctaccggtgctgtacagagtgaaccaggcgaaagctatgtttcaggagtgcaacaatgagtacattaagccacgcggcgagcagtgcggagaagcgcactaa

SEQ ID NO: 124607 - DNA, 168 bp, Enterobacter cloacae
atgtccacagggttcatcgacatgatgcttaaaactatcatgtctgacctctttatatgggtaggaaaaaaccacgcaacgctctacgccgcattaggaatagttgacatcaaacagctattaatgaaagaacaaggaaggaggaggaaaagaataattaacggttaa

SEQ ID NO: 124608 - DNA, 942 bp, Enterobacter cloacae
atgaaagtaacccttaataagtttaaaaaaataaacctggcgtgtgcgattactgccgcgctcagcgtattgatatccagcactgcatattcagcagaacgagtgaagcacgtcatcgatataccggcagacgtcaaaactgcttcagggaagacggcaccacagccctaccgtccggtcgcagatgtgacaccggaacaggcacaaattgtggtttattaccctgaggggagcgtacccgcgacgatctacgtcgaccgcgagctgcagtcggtactgctgccggggcaatttaccgtcctgtgcgccgcgccaggcgcgcatgcggtggagtcctggttcaacgatcaccctgcttatcaggggaaacagaatcctctgcaacagctcaatgccgagagtgcgcaaacctattttattcaggttaatccaggtacgtcaggaaatacggcggccctggaagagcgttcccgggctgaagctctgttgagtaagatgcataaacagaccaaaattattaaccgtgcatcgcaggtaaaaacctgtgattacgttaataacagcggtgtggtgcttattcaggagcaagtcctgttccgctttgcggcaagtaatgcggcagggatttttgctgaatcccgcaataagctggacgaggtggtgaaatttaccaaaaaggcgaataacgtcagtgagatccagattgtgggttataccgacgcaattggtagccgtgaggctaaccagcgcctgtctgaagcacgtgccgataccgttcgttcattgctgatcgagaaagggattaaaccggagctgatcaataacacgacgggcaaaggaatagcacaaagcgctgaaggctgcggtacctctgccagccagcaagcggcaggatgtaacgtcaacagccgccgcgtagaaattttagtgaaaagccactaa

SEQ ID NO: 124609 - DNA, 696 bp, Enterobacter cloacae
atggatacgtcgcgggtcatattatcaagatgtcatttcagcaacatcggattgcgccatttactttccaatacgttcaaaaaagaagagattctctctttttataatcagcaccatttacacgactgggtaaaaggtatgaaaaaagatagtttttttaccttgtacctggtgcttcctgactctatttatagcaacatcatctactttcagtggcttatctcactaaaacagaaaacaaacctccacgccattgaagagatcatcatcgcttaccactcggatatctttccggagcttttcgcctgcatctgctcgcattacaaacatcgtctcgtgaatatcaataatttgaccaacgatgaaatcgtcaggaaaatgcatacccagcgtcaccccagcaaaagcgggatcgtaaaaaaacatatcgaactgacgcacatggagttctgtgtcctgaagttaatgatctcaggctacacgattgacgacatcagtaccttatataacatcaagccaaaaaccacctatacctacagcaacagcataatgaaacagttggggtttaactctttaaaaaaaatctattcctgcggcgaaatcattaaatcctcgattgaccatgacataatcagagaaaagaaaaagtactacagcattgcccacattaagatgtacgaaccacaaactgcttaa

SEQ ID NO: 124610 - DNA, 1140 bp, Enterobacter cloacae
atgagaaaattgccagctctgtttattttcaccacgctatttttactggcagggtgtcagataacccccggaagccatattgataccgacggaaaaacggttgtcgaaacgcccgaccccgataatatcaatgacgtcaaggtgaatgtttaccccgttacgccagcgctgattgagaaattacgtgaaaacgtcgtggtcgcccacgccaatgcggagctgaataaacgactcgaagcgtatgagtaccgtattggggttggtgacatcattatggtcacggtgtgggaacatcctgagcttaccaccccgtctggccagtatcgtagcgccagcgatacgggaaattgggtccattcagacggcactattttttatccgtacatcgggaaaatccatgttaaggataaaacggtcactgaagtcagagagctgattaccgaacatctggcgaaatacattgagtccccacaggtcgatgtggggattgccgcgtttcgctctcagaaagtgtatgtctctggtgaagttaatcagtccgggcagcagcccatcactaacgttccattgaccatcattgatgcggttaatctggcgggtgggctgactgaaaacgcagactgggggaatgctgttttaacccaggggggtaaaaaatcaatcatttcgctgcaagcgcttatgcagtatggcgacctgcagcagaacaggctgctctattccggcgatattctgtatatcccgcgtaatgatgatctaaaagtctttgtcatgggcgatgtggtgaagcaaaccaccatgaaaatggatcgctcaggcatgacgctgaccgaagcgttgggtaatgcggagggcatgaatcaattaaccagtgatgccagcggtatttttgtgatccgttcggaaaacaaaccggatgcgtcaaagggaaaacaggcaaatatttatcagcttgatgccagggatgcgacggcgctggtgcttggcaccgaattcaggctcaagccgtacgatattgtgtatgtgacgaccgcaccgattgcgcgctggaacagagtcatcaatcaattaatgccaaccattagtggtgtctacagcctgactgaaacgacgcgcttcatcagaaactggagtaattga

SEQ ID NO: 124611 - DNA, 450 bp, Enterobacter cloacae
atgaatggcaggtatcagtccattcttgtcgtctgcacaggcaatatttgtcgttccccggtgggggaacgcattttgcgttcacgcttgcccaatatgatcgtagattccgccgggattgctgcgttaacgggggaagcggcagatcccgtaatggttaacactgcacgtgagaatggcctttcgttagagggtcattgtgccaaacaacttacaccgctgatgtgtcgtgaatatgatttgattctggccatggagcaaaaccatattgaagccgtgacccgcctggcaatggaagcccggggaaagacatttttattcggatattggctccagcaaatggaaattcctgatccttatcgtcggggtcgagatatctcaggtgttatttttcaacaacttttttccgctgccgaagaatgggtcaaggttttccagcaggttaaataa

SEQ ID NO: 124612 - DNA, 2148 bp, Enterobacter cloacae
atgtttgacaaacagattagcaattcgcaaaccgataatgttccgcggcaggaggatattgacatcgttcaactcctcaaagtcttatattacagtaaggtctggatagcggcgacgacattactgtttatcgctttcggcatcgttattgcttacacattagcgccggtctataaaagtgatgcgttaattcaggttgagagaaatgcatctacggggctgttgaataagctctctacgatgctgcctgaaggttccggggtcgcttcagaatctgaaatttcgttaattaaatcgcggatggtgatcggtaaaaccgtgcgcgatctggggctggatatctccgtgactgaaaaacgctatccgtttgcgaatggccagctcctgcgcctgtttggcaaacccacgggtaacattgaggttgcaaccttaactgtccccgaggagttcctggacgaagcgttaatcctgaatatgacagttgcgggtgagtacaccctgcaggtcggcgaggccgttttgcacggtaaagtgggggttcctcttcacgcgcacggcattgattttatgattgaacgtgccgaactgacccaggacaccgtgttcattttacgaaagcacaatgaatattcggtaattgatgagatcaaaaacaatatcgtcgtggatggaaaatccggtggcaatgggatgctgcatctgagcatgaccggcaccgatccggtcatgatcaacaaaatccttgaaacgatcagccacaattatcttgcccaggacgttgagcgtaagtcagaagaggccagcaagagtctggcctttgtgaacgaacaattactgcaaatcaaaaacaatctggtgacggcagaaacgaaactcaatgatttcagaaagaataatgagtcggtggatttatcccttgaagcgaaattcattttagacaatgtggtgtccattgatacccaactgaatgaattaacctttaaagaagccgaaatttcaaagctctataaacgttcgcatccggcttataaagcgctgtcagaaaaacgtgcggtactgcaggaagagaaagagaagctcaatcaacgtatcagtacgatgccgcggactcagcaagaaattttgagcatgacccgtgatgtgcagatgggaaatgatatctatatggtgctgttgaataagcagcatgaactcaatatcaataaggccagcacgctgggcaatgttcgcattattgacaatgccgtcacgcagcataagccgattaaaccgaaaaaaacgttgattgtcatcctgtcggcgctgttgggcttcctgttcgcctcgggcgtgattctgctacgcaacatgttaattaaagggatcaaacaacccgcggagctggaaaaacggggcatccctgtccacgccgtcgtaccgctggcacctgaactgacaaagagcagacgctgccgggcgattaccacctatcagtctgatgagctgttagtgaaatcgtcgccaacctcgctggcggtcgaagcgataagagggctgcggaccagccttcatttcgccatgctgaagtcagaaaataaaatattaatgatttcaggcacctctccgggggtgggtaaatccttcgtcagttcaaacctggcggtgctaatggcgcaggccggttcacgggtgctgctgattgattgcgatctgagaaggggatatttgcacagcatcttctcccaggcggaaggccatgccgggcttgccgattatctctcagcgaatgtggcggtgtcccaggtgatagaagagacagagtaccagggcgtcgattttattggccggggaagaatggtcaataaccccgccgagctgtttatgacggagaaattccagacactcgttgacgcctgttcagcgcaatacgatgtcattattctcgatacgccgcctattctgagcgttacggatgccgcgattattggccgattcgcctcaacgtctctgatggtcgtcagattcgaacagaactcggtccaggaggtggaagcggggctgcgtcgattcaatcaaaacgggattgccatccagggggtcatattcaacggcgttgaaaaacgcgcttcggccacctatagctatggcgattactcatatcaggagtaa

SEQ ID NO: 124613 - DNA, 3873 bp, Enterobacter cloacae
atgaatagtaataaaaataaagtctttcaactcgagttgaagtggcatcctgttgccgcttctgtgctactcgctctgccaattgttgcgcactcagcagagatcaacatcaagaacggcgtggtttatactgccgggaatgtgcctgtcattaacattaataaagccaacgataaggggctttctcataatgtctatgacaacttaaacgttgataagaatgggcttatcttcaataacagcatgactgaatcaaataccgttctggcgggtaagattcaggggaacagcaacctgacgtccgggacggcgaaagtcatcctgaacgaagtcacgtctaaaaatgcctctgcgattaacggcatgatggaagtggccggcgataaagccgatttaattattgctaacccgaacggtattaccgttaacggtggcggcgccattaacaccagtaaactgaccctgacaaccggtacgccggatattcagaacgatcagttagccggttattctgttaacggtggcaccattacgctgggtaaactgaataacgccagcccgacggaaattttgtctcgcaatgttgtcgtgaccgataaagtcacagctaacgagctgaacgttgtcgccggtaataactacgttaacgctgcaggtcaggtgaccggttcagtagccgcagccggaacgcgtaatgccaacagcattgacgttgctgcgctgggcggtatgtatgccaataagattaacctcgtcagcaccgaaagcggtgtcggcgtgcgtaaccagggcattattgcgggtggcatcaacggtgtaaatattgacgctaacggtcagttgctgaacaacactgcgcgcattgagtcctctggtcagatcaatattaaaaccaacggcgcactgagcaacgtcaccggggatattacctctgtgggtaccatcgcgctggacaccaataaaaacagcctcaacaacagccgttcaggcaacatttcgacaatgggagacctctatgttaatagcggcgccattgataacaccaacggcaaaatggcggcggcaggcatgctagctgcggataccaacggcaacaccttaaccaactacggtaaagggaatactgtcggtattgaagccggtatcgtggcgttaaaaaccgctaccctgaataacagcaacggccagatcaagggcgggtatgtgggtcttgaatctgctgctgtgaacaacaacagcggtttagtcgactccctgggcgatgtgaacgtggtgagcggcggtaacgtcgataacaaccggggcatgatccgttctgcgggcggtttcaccaagattgccgcgaaaggtacgattaacaacggcgcgaccaaaaccgcagataccgccagcaatgactcgttaggcattatcgctgagaagggcgtgcagattgccgcgaacagcatcaataacaacggcgggcagatggcgtcaaatggcgatatctcccttgaaagtgccggcgcgattgataactactcgggcaaactgaactcaaacagcaaggttattgccaaagcggcctctatgcgtaacgacaacggcggtgttgcgggtcgtaccggtgtgagtgccgcagtgggtggaaacatcaccaactacatcggcgtcttcagctctgaagaaggggatgttgccctggcatcgaatgccctgaacaaccgcggtggcttcattatgggacaaaacgtcaccattaatgccaacgcaggggtgaacaacaacaccgcgttcatcgttgccagtaaggtattgagcgtcactgcaggcgataacatcgaaaaccgttacggtatcgatttcggctccacatttggtacctacttcggcatgccgcagcagaacggcgggatggttggtaaagaaggtgtctcgctgtccgggaactatatctataacggcgaaagccgcatcattgctgaaaatggcccgcttacaatgcaggcacgaggcagcattgataacgcgcgttcgttgctggtcagcggcggggatgcctccatcaaagcgggaagcaccctgacgaacaactacgcaaccatctacagtatgggcgacctgctgattgatgcgaacagcgtgagcaactacagcaacggtgcgctggaagataacaacgccactggcgttatcgcggcagataaaaaactgaccatgaatgtgaagaacagcttcaccaactatggctggatcagcagcctcggtgatgccattctcaatattctgaacggttctttaactaaccgtaatacgctctccgctgagaagtctctgaccgtgtctgcacagaccggggttgaaaacctgaaagatatcgccgcgggcgagcatctggtggtgaacagccagcgtggtgtgaccaacaactccaacagcaatatggtgggtgataaggtcacgatctctgcggtctatgatattaacaaccgtggcaatatcgtggctgacagcagcctggcgatgagcgctaaaggcaatatctataacgatctgtatatgatcagctatggcgacattgcgttaagtgccaataacattgataacgcctcgcgtaaaatcaaagcggtgggtgatgtcacgctgacagcggccgggaatgtgagcaacagccgcggcgaaatcagctctgagactggcgatatcactatcaatgcgggtggcaccttagataactactacggccagctcctgtccggtagcgatattgcgctgaaagcgaaccgtctgaacaacgactacggtcgggttgccgcttacggcaatatcgatctggcgctgacggggtatttcgacagcaaccgtggttccgtcctttctcagacgggtgatatcacactggctgccaacaccgttgataacaacaacggtctgattgccggtaagaatgtcaccgtcgagtcaaaaggtgcggtttacaacaacactgcgatgatcgtggcggacaaaaagctctccgtgaacgcggcagggaatgttgaaaaccgtgacggtaacaacttcgtacgtaatcatggcgaaaccttcggtgtgacgggcgatgtgggtggcatgattggccgtgaaggtgtcgcggtttccggtcaaaacgtctacaacaacaacagtagcatcatcgctgataacggtgcgctgagcgtgctgtctaaagggacgctggacaacacccgcgctatgctggtgagcggcgctgacgccatcatcaaagcggccggtacgttctataacaactatgccaccacctatagtgcaggcaacctggacatcactgcaggtacgctgaacaactacagcgatggcagcatggagagcaacacggcgaccggcgttatcgcgtcagataagaatctcaatctgacggttgataacaacgtcaccaactacggttggatcagcggtaaaggcgatctgaacttcactatcctgaaaggtgcactgactaaccgcaatgcaatctcttcaggtaacgctctggcgattaatgccctgaacggtgttgagaactttaaagacatcgtgggtgtggccagcgcgaaaattgatactcagcgtcatgttaccaataatgccaacggcaatatccttgcacagaatatcgtgattaatgccggtgccgacattaacaaccgcggtaatattgtgagcgattatacgctgtctgtgaaaacagcagggaatatctataactacctcaatatgctgacttatggcgttgcgggtgtcactgcgaataacgtgacaaacagcggtcaggatgcagtatttggtggcttatacggtatggaactgattaccaataaagtgaccaataccggcacgattgttggtatgtaa

SEQ ID NO: 124614 - DNA, 1620 bp, Enterobacter cloacae
atggaactgcgatttaaatttttactgtcattgctggtaatgtcgtctcaagcgtttgcagttgacgatattaatgccctgattaaacagcagcaaaatgcagatctaaatactttcaaagaacacaaggtgtatcggcaggatgttttctccagcaccgaacgtaaagtatttagactggacaaattacctgaggagaaaaactgttttacccttaaagcacttgttcttgataatgattttttgaaacgtaaaaccgaaaaggcgataaaaaaagagatcgtcgggcgctgcgtgggcagcatcggtgtggtgaaaattgccgccgcgttacaggatttttatatcgatgccggttacatcacgacccgcattacgatcccttcgcagaatatttcgtctggcacgctgaagcttgacgtcaatgcggggaaaatagaaaaaattattgtcgagcataatgatattaatccatggatgctgccgtttgcgaaagaggacatccttaatattcgcgatatcgagcagggtctggaaaacctgcagcaagaacccggcgtggatgtgaagatcaatatcgagccgggtacaaagcacgggtatagcaccattcgcatcagcaccaaccgggaaaaacagtggagcgtgcgggcgagctataacaactggggcgataaagcgacaggagaacacctgacctctgtggtgggctatctctataacatcgcccggtttagcgatctgttttatctcgccggaacgaagagcacaacgggtcagtatcagagtgtaagtggttactatgccctgccggtaggctactggaactattcgctgttttatagcagcagcaagtcacgtcaggcgataccgctctattacaccacggtggattacgccggtaagagtgagtacggcagcgtgaaggcgacgcgcacggtctaccgggataaaagccggaaggtgacggggaatgccgagctgatccgtcgaaaagccagctatacccttaatggcgaggaacttgtcttacagaagcgtgacatggataacgtcaggtttggcgtgaattacacgcagcagctggcaaatgcacactgggattcaacggtatcctggcagcgttttgtcacctggttcggcgccgaaaaaacgccggatatggtgtatggcaatgtcagtcccgtcagtcagctggtgaatgtggaaagtcgctatacccgacaattttctcaaaccgcctatagcgctttttttttggcgcaatacgcaccgcgtgagctgacgctgcaggatcaaatgacgatgggcgatcgctggagcgtgcgcgggtttgaaaacagcgttggcctgaccgggaacagcgggtactacctgcaaaatacattttatcgcccggtgcgaggaatgaacgcaaattattatgttggcgtagatgccggtcatataagacgggacagtgtctatggcgaagagattatcgtcggcagcaccctgggtattcaggggaatgtgaaaagcctggcgtacgattcatcagtctccatgccggttaaatatcctagcagcatggacgtgaataaatttaattttaatctgaatctttcttatcagctttga

SEQ ID NO: 124615 - DNA, 951 bp, Enterobacter cloacae
atgtatttatcctcattttcgctcattgagccggaagataaattttatttctatcagcccagctggctaaacgcgtgggagtcgcatttatttaataaagcgctcaaatcaacccatgcaaacggctggggtctgaaacgttttggtacgcagccggagttatatgccggtgagatgatccgcaatcctcagtatcaaaaatacctggatgcgatggagcaagcggcggatgacgcgctcatggcgctgccggcgaaagagcgaatgaagctgctaaagcagcgtacggcatttatttatgtcgactcctggggggaatccgggccgtttgaaaatatctccagcgcattacacatctcaatgattgatacgctgccaaaaaacctggtgaagaaattctctgtgaattcaccgacgtgcaaaatccggggtgaaaggcaatccttcatccaggccatgagtctggcaaaggattatctgagctgggatgtgtttgattacgtggtgatctgcgccgcctaccgtgcgatcccggtgctggtgttttcggacgaagatatcgcgctgaagtggggagagaagcgcagggggaaagcccaggatgtcaatttaaccgttgagcgcgcgggctgtttcatctttagtcagcatgaaagtgcaatccgggtgaacggcggtcaatacgtgatggccgatacccttgaggacatgcaggcagcggatcgcgtggcgtttgccggtctgcgtaaagagatgctgtctcgctcaaccgttgcgccgcaaaagacgttagatctggtcgatacctttggtgccagcggctgtctgacgccagcattaagctttgcgtatctccagcaggctcctcattttgcgggaaaattaagaactgtcgttcccgataaacagttcggttacagctatttcgacattgactattgcaaggaataa

SEQ ID NO: 124616 - DNA, 708 bp, Enterobacter cloacae
atgagcggaatgattaaagaactcccaatgatatcgctgaacaatatctataagagttatggctcgggcgaaggcaaagtcgatgccctgaaaaatatcaatcttgaaatagagaaaggcgaatttctggcactgtgcggcccctccggcagcggtaaaagtacgctgttaaatatcctgtcgggtattgataaaccgggatttggttcggtgatgtttttgcgaaaattactcaacaatttaccggaagaacaattatcagaaattcgtggcaagcatctggggttcatatttcagttttttaacctcatccccgtgctgagcgtatttgataacgttttttacccgctggtgctgaatgggcacattggcaaaaaagaggcgaaagagcgggcgttgcattttatcgagagcgtaggactggcgggatataccgatcgtaagccgggccagctttcgggtggacaacagcagcgcgtggctattgcccgtgcactggcgcatgaccctcaggtcgtgattgccgatgagccaaccggaaacctcgacctggtcaccggtgaggccattctcgatctgctgctgaaaatcaaccgggagacgcgcaccactttcattatttcgacgcactcaagccagctgaaagagcgcgcgcggcgtgtggttgaaattaaggacggagtattagttcatgattcacaatcgtaa

SEQ ID NO: 124617 - DNA, 648 bp, Enterobacter cloacae
atgattcacaatcgtaatttcttcattctctgctggctgctgatctgcatggcctatgccgggagcgttaaagccgccgcggcccccgtggctgagctggtgataaaaaatggcttcccgacacaggccgataagctagccgatatcacccgtgcgttgtttaccgaatacaaggccaatgataacgcgctgtcgctggttttttatgcctacggcatgctgcgccaggcggaacatgccctcaataccaatgacgtcattcgggcgtctgagtatggcaaaacgggctttttctatctcgatgaagcggtggacctctacgagggcaatcaacgggtgcgctacatgcgtgcccgtgtggacgcgtacctgccagccgatattggccgctgtgtggtgacgttaaaagatacggaacagatggcgaaaagccctgacgtattcaatgccgggttgatgaagcacattgacgaaatgcgttatcgcgcgctgttgagctgtaaccgtaccgccgaggcagacgcgctgctggcgcaaacagaactgcgtcacgccaactctgcattaccactggcttctggcgacgcgccagagtgggatatcaacgaagtgacagaggtcttgttaccgctggtgaaagggaactaa

SEQ ID NO: 124618 - DNA, 789 bp, Enterobacter cloacae
atgaaacgcgttgtcatcacaaaactgctcttttgtctgtgcctgttttcctcggcggtattatcagcgccggtggataacgaagcatcagagattattcgtcgtgccgatgaggttcgttccccgaataaaccttttcgctacaccctgaccatttatgaatataagtcgggcgcatctcagcctgataataagcaggtgctggatatttccatgcgctttatgaaacccgaagggggaatgaaagccgatgcccgttcgctggcgcgttttatttatcctccgcgggacaaaggcaaagtgctgctctctgactggtacgatctttggttctacacgccagaactgcgtcgaccggttcccgtttcgcgccagcagcgcctgattggacaaatttccaatggcgacgtcattgtcaccaattttgagtatgcctaccacgccacgctgctgggcgaggaagcatgcggcgatacgcagtgctataagctggagttggtgcgcaaaacggatgacgtcacgtggccaaaagtcatctattacgtcgaaaaagagggggagaaccgtccttttaaagcgtcgtattactctctggataataaattgatgaaagaagtgctgtaccaggattttcagatggtattagggaagatgcgtccgatgaaaattattgtgaaggaggcccgtcacggtaacagctactccgtgatggagtacagcgatgttcgcctggagtccttgcctgaatcccactttactcgcgagtctattcagcgaggtgccaattga

SEQ ID NO: 124619 - DNA, 1389 bp, Enterobacter cloacae
ttgaaacgcacattactggggttaaccctggcactctccgctctgcccgtgagcgcactggcggactgcctgtccggttccgactttgcaaaaaacagcactgtcacgctgtatgagcaggtgtcgctggtcaaaaaacaaatttcagactggcgaattaacggccgaaatccttataccagacacaatatctacaatgacgcgggcgtgaatctcaccagcaagtgcgcgatcgttcataatgcgctggatctggatttgtctctctacgggctcacctggtactcaccgcgcaaggtgggggcatttgaagaggacgacagccgctctcagctgctgattgagcgtctgagactggtttacgccgtttcagacagcgtgcagcttgaagtgggaaaacttcaggcgaagcagggtctctttttcctgcgctcaccttccgatctgactccgcattactacgccgggttcaaaccgacgcgactttacgatcccgcgcttcgcactgcgtatcagtcctcgtcctgggccgcgacgctgtcaatggacaaccgggatgagtcgctctcgctgaccgtgattccgaagctggcgacgatcgataaatactatctgacctccagcaactggtccgcgaaccagcgtggcaacagcagcgaggcctggcttctgagctatacctcacatgccttccgtcaacatacgccggggatgcgcattctgctgggagactcgcagtcggttgccgtctctgacagctatcactacaccccacagctgaccctgaatgccgagatggcctggcaccgggagcagcgctggcgtcatctctctgaggagaaaagtgcagaagtccagaactatgcatttccttcatcgctgtatgagaccagggacaaaaatggcgtagagctggcggtgggcgggcaatataccactgatacctttaacgttttcggcctggaatattattaccagagcgaaggctactcccgcacggaatggcgcaaacagcgcgagctgatgacctttttgaatacgccgacaggttatgcgccgctcgacagggcgtttgattcctataagtacctgatggcgtctgaaatcagcaatacgggcaacaaaggcatgttgcaggggaaacactatctcaacgcctggtccagcgtgcagctcacgcatcagatcgccgtgcagccttatttcgtcgtcaatctgatggataaaagcaccctgtcggggctccacatcagcgcaccgctgacctttattgatgaccagctggaagcgtataccggcgtctattcagcactgggtagcgcaaattctgagtttgctttcttcggcgatgttgccggtggctatgttggctttaagtattacttataa

SEQ ID NO: 124620 - DNA, 1002 bp, Enterobacter cloacae
atgattccagattatttaaccttcatccgctatcaggataaaaggaacgtgctttttatctatatcgtgacgtttatcctgctgggcttttactggaaaaatgccggtttctctttttcccggcaggatgcctgggtcgcgagcggtattttcgcgctgatcgggtatagcttcattgccgaccttaaggccttctgggcctataaatgcgtcgtcaagaatgttgatttgtcggtatttgtcggcaaagagagcccgaaaacgaattcgatcatcttcgaaccgtttatcgtgctggccgtctcgatcctgattttcgcgggcatcacggggctcttccttgcgctgaccacgccaggcatcacgctgctgatcatggttttcgtggcgccgctgattatctgggggatctttgccgcgctgcgccatgtctatattcagcaggtcgttgcctcagccagagacaaggcaaaatacacgcagctttcacagtatgtggccgttgctgttgtgatgagtgtggtgatgaatctcctgaccatcagccccttacgcaacagtgcgcagtttgatctctatgggcgctacttcaccttaaccgccatcattaccatggtggtgctctgcgtggtggtgctgggaatcaatctgctgttcttgcgctttacccgacgctatgtgtttctgggccatctgttccttaacgagattgatctctatttctccccgtcaatcccgtggaggacgctgtctgagaaaccattatggctgcggctggtgatgctggtgggcgtggaatgtgtctggtcggctgttatcggcgtgctgcttacgctttcgggatggcaggtctggtttgaggtctatttcctgctttgctatctgccatgtctggtgtactacacgctgcacacctggtggaaatggcataccgattttatgatgtcgagcgatatgtatctgcgctgggcggagatcagcagagaggacaccccctggtag

SEQ ID NO: 124621 - DNA, 1722 bp, Enterobacter cloacae
atggttaaggcacgtaaagagcgtcgttgggcaagggtagcaaccgcagttgcactctgcttgccctgctcttcttttgtcattccgctgcacgcggctgacattgctcaggctaaaagcagcctggcgtcattgccgccgatgcgcacacagtcacagctcaaccgcgaagtgcagcctgtgcagcggacggtgtcgcaaagtgcggcctcgccgcgttcgctgcccgccatgcgtacccagtcgcaatacgtcagtacgcaaaaggcgatgccaacgcaagccactgcgcgcccagaacgttacgcctctgcaccgacagccagggagtttgcccccgccccgtcaaaaccggcggaaagccgggctgcgctgaagaaaaacgcagacttcttcccgcccgtcaccgagtattacaaaccggacccggcgtacgccggggtgcgtcgtgacggcggtgcgcgtcaagccatcagcggcatgtcgcagggctaccgtgccggcagtcaggattcgcttgtttttctgcgcagcatggtggccagagcgctggcgtatagcccggaactgcgggccgcctcagcagaggtgatggcgtctgactacatggtcgatcaggtaaaaggccagcgcatgccccaggtacgtctgggcgtaacctcgccgctgtcgaccgtgggcggcgatcgccagtcgtcatccaacaatagccatatcagcgactctagcggcacggtctccgttaatacaccgattattgactggggaaggatcagtaaccaggtggacaactctctggaaacggcaaaagcagcccgttattcaaaagagtattcccgcgaacagctggcctacaacaccgtgtccgagctgatgaacatggggcgttaccagcacagtaaggttgtggcgaaacagtatgttggccgcatgaaagagctggtcaccatgctgtcgcaaattacccaggcagaccgcggcagagagagtgaactggtgcaggccaaagcaaaactgatgtcggcccaggcaagtctcgacaacattgagcatcagctgagtgccagcaaaattaaactggtgcgtctgctggggatcgagcctgaattaccggaaggcataagctggcacgacacggtcatcccggcgtcggtggcgctttctgggctggataaaaacccgatgatgctgaacctgcagtccaaagtccgggcggcggagtatgaggctgaaagtattaaatcgtcggccctgccgcaggtgaactgggtcatctccaaaagcaccgccaaagacagcaacggcaacgaagcgggttggtatacgggcttaaacgtcgagtgggaggcgtttagcggcggctctcagcgtgccgctgagatgtcggcacgggcgaaagccaatatggcgcagcagcaatatgaagtgagttacaaagatctggagtatcagattaactatcagattcaggtacgtgactcctctttcctgcgcgccgatgattacgatcgcctgacaagtgaaacggatcgggtgcgtcgtatgttctacgaacagtggtatcaccttggcaaacgcaccttgctcgacgtgctgacggcagaaaacgattattttaataatcagctttctgccattaacaaccgctacgacggctatatttccaacattaacgtcattgccagcgcctccatgctgctgtcatggatgaaaatgagctaa

SEQ ID NO: 124622 - DNA, 636 bp, Enterobacter cloacae
atgaacattattactattaaacaaaatgagaatgacaactacactatgcgttgttacggatgtgtgcataaatgtgcctatgcctccattcgcagcacaaagtgcgatgaatgttcaggaacagaattttatatttggccagaaaataactcatttctgatagaaggcattttacaatactttgctgatattaattcaaaaataatttcacaacccattgtcgtgatagactttaattacaaaaatataaattacttcttatcaaacaattggttatctcaattcagaaactcgcgcctgattctgatcaccgataaaaaaatggcggccattgcccactactggttctacaacgacacggcagacacgatcatcagcacggtcatttttcatgatgacctggccgaggatatcaaaatgaagatcagccagtcttttatggggaaaataatacggccttcagaaaaaagagccaaacttagcgcaaatgaatatgcactcttttctgaactgtataaaggtcaactgcctaaaaagattgccatgaaaaatgccacgaatgtcaaaaacatttacgccatgaaaataagaattgaaacaaagttgggcgttcccatttcaaggctggcgagctaa

SEQ ID NO: 124623 - DNA, 663 bp, Enterobacter cloacae
atgtactgtgcaactaacaatcctggctatttatctcatacaggtggacaacccgtttgtcatacccctgacatgcgttgttatggttgcgaaaagcaatgccgttttaatacgtctgaagatggccaaaaccgtgattgccacgcgcttgaatattatatctggcctgataataacacctttttggttgaaggcattcgccatcactttggcgaggtaaatgataaatatatttcgcagccggttgtcatcatcgacttcagtcataaaaacatcaattattttttatctgaaaactggttagatcagttcaaaaacatgagactgattcttgtcactgataaaaagatgacggcaattgcgcactactggttttacaacgacacgttagaaaccactatcagttcaattatcttttatgacgatagcgcagaagaagtctcgacgaaactgaaaaaaacgttcctggcaaaaacgattaaaccgacaggtaacagacccaaactgagtcagaatgaatacagcctgttttcattcctctttaatggatggtcgccaaagaaaatcgcctaccggaacggcaccagtgttaaaaacacctacgccatgaagaaccgcattgaacgcaagctgggcgtgtccatcacacggcttgcaagttag

SEQ ID NO: 124624 - DNA, 1119 bp, Enterobacter cloacae
gtgaagcaggttggcattgttggttggcgcggtatggttgggtcagtattgctgcaacgcatgctcgaagaaaatgattttaatgatattgcagccagtttttttagtacgtcttctgttggggcacctgggcctgtcattaatggtgtccgttcggtacttaaagatgcgtattcactggatgcgctggcggaaatggatatcatcattacctgccagggcggtgaatatacaaaatcgatgtatcaatcattaattgatcatgattgggagggttactggatcgatgccgcatcagcgctgcgaatggacgaaagagcctgtatcatcctggatcctgtaaaccgtgaaaatatcgatgattccatcaaaaagggcggtaaactttttgtaggcggaaactgttcaatcaccttaagcctgatggggctcgccggtttgatcaaggccgatctcattgaatggatgagcgtgatgacctatcagtcagcttcgggggcgggtgcaaagcatgtacgcgagttgatcgcccaaagtgcatttgtcacccgaaatttaacccccgatgagctggaaaacgcaggctcggtgcttcctctggtcaataaagtcagcgaactgattaacagcagtgacttgcctgttgacaattttggcgcgccgttgatggggagcatcattccctggattgatagcgacctgggggatggcaatagccgcgaagagtggaagggagaagcagaaacaaataaaatccttggtctgaaaaaaggcaccatcccggttaatggtctgtgcattcgtgttggtgtaatcaggtgccatagtgcggccattacaatgaaactcaaacgcgaagtggatgaagctgaatttgctaaaagggtaagcaacgctcacccttgggtaaaatacgtccctaataataaagaggccagcgtcagccagcttactcccgcacatattagcggcgcgcttaaggttggcgtagggcgttataaaaaaatggcgctaaataatgaacctgtttattcggtattgaccgttggggatcaactattatggggggcagcggaaccattacgccgcatgcttaatattttgcttaacagaatataa

SEQ ID NO: 124625 - DNA, 2583 bp, Enterobacter cloacae
atgaccatacctcagaagacccctggctttacggatagcgagcattctaagggactgataaataaaacgtttacctatattgttaccttgttgataggtatttttatcgcagcgatagtgtcattgctgatcattaaaaacaatgttaataaaatcagcgataaacatgacgagtttttgttaaggcaagcattagacgcccgccaggaaaacatgcgcagccatttgaaagataatgctgagtggggagatgcttacaaacatcttcatcaaaaaactgacctgaactgggcatgggataagcagaatctgggcaagtctctgtatgataactttggctacgaaggcgtgtttgttctgtccccggagggaaccacccgttacagcgtgcttgacgggaaactgaagcacgaagagctggaacgctggttagatcaatccaccatagaccatttactcagtgagacgggcagtaaaaatggagtgccggtctccatgctcacgcttatccattctgtccccgccatagtttctgcggcatggataacgacgggagatgataccagtgtgcagccgttgcccggtaagccatcaaccatgttgtttatcgataccttaacggctaagaaactgcttgctattgggcacgatgcagggatcgaaaacgtccgcgcggtctcttctgacgctcttgctgagacagacagtctgacagcattaacgttacgtacccagaatggcccagtccacattatctgggacacagaaaaccccggccaggcattgatcatttattttttacccttgcttattctgtctgttcttctgaccctcgcgctgacggcgatcctgatgcgtcatattttgcataaggcaaaaattcatgacgaaaatatctttctccttgagcaggctcggttaaatctgattaccagtgaaaaacgcttcagggatgtcagtgaaaccaccagtgactggttctgggaaacggatttatcgttaacgatcacctggctatcagggcgttttacgactgtcacgggctatgacgagagtcagtggctgggacgcaagctggatgcgctttttccttcgacaaacggtttattaaatacatgcgtcaggcggcgtgagttatcggggcgctttgaatttaagaactgcccgtacactaacgctcaacggtcaacttcgtactgcacacttctggcaaaattctctgctcagcctgatggcacggtggttttacggggggcggcatcggatgtttctctggaagtggaagccaccaaacgtgttgaattcctgtcacgccatgacgaattaacgggccttcccaaccggtatcatattaaggagtttctcacaggacagttggctaaagaggatatccacaattctccctttgccatgatttgccttgatttggacaagtttaaacccgtgaatgatattttcggccactcaacgggcgatgccctgcttggtgaggttgccttacggcttaaaaaatgtgttcgtcgcggtgattttgtcgcacgacagggcggggacgaatttatgctgcttctcgacaacacccggcacctgcaccagatagaagaggtgtgtcatcgcatcgtgcaagaactcaaccgcccgttcaccattgatggcaatgatgtgaccatcggcgtcagcatgggcattgctctggctccccaggacagtaccagtgcaaacgaccttttacgctatgctgatattgcgctttatcaggctaaacaatccggtcgaaaccgatgggtctattatcgtcaggatatgtcggaaaagctcaccgagcgcagaaagctggaattagcgctgaagaccgcaattcgggaagaccagctctatctggtttatcagccgcgttataacctcagacattcacgcatcgacgccgtagaagccctggttcgctggcagcatcctgaacgcggaaacatgatgcccgatcagtttattccactcgctgaagaaacggggctcatcatcaacctcagcaactgggtcattcgtaaggcctgtacagagacgcatgaaaaactgccggggctttcggtttcagtcaatatttcagccattgaattccaggcaagcgatctcgccgaaagaataaaagctattcttgatgaaaccgggcttgagcctacccggctggaaatagaggtgactgaaaatgtcacgctctctaatccagagaaaacgttgcagaccatgatggccctgaaaaaaatgggggtgcgtattctgattgatgatttcggtaccggctatgcctctctgagctatctgcggaagttccagtttgatggcttaaagctcgataaaagctttattttttctttaggggattcgacacagaaccagtcggtggtcgagaagatcatcgatctgggtaaagcctattccatggaggtcaccgcagaaggtgtcgaaaccgtagaacaattgtcgttcctgaagaaaaataagtgtgacgaagtccagggatatttactcggcaaaccggcggcgattgcagaattaaatctaaaaaccaaccacgtaatttattaa

SEQ ID NO: 124626 - DNA, 1209 bp, Enterobacter cloacae
atgtctcttcgttcactgcgggcgttgtgcctgacgagtttttttatcgctgacgtccgtgacggtctcggtccttttctcggtatcttcctgacgcagcggcactggacgccggatgacatcggcttactgatgaccgccggaggtctggcaggactcctggccacgctgccggcggggttcatcaccgacaccaccaaaaacaaacgttccattctggcgctgctctgtttgctgatcaccctgagtacgctgctgctctggtttagccagcagagtggcgttgtcgtgctctcgcaaattgtcaccgggatctgcgcggcgttcgtggggccgcttatcaccgggatcactctggggctgacggggcagagcgggtttagcgcgcagatgggcaaaaatgaggcgttcaatcacggtgggaatttcctcacggcattgatcgccgggggcattgcgtggtactggggcattgggggcatcttcctgctgatgacctgtacaacgctgttaacgctctgttcgctgctggcgatacgcaataaggatatcgacaatgaggcggcgcgcggcctgaacgcgtcagaacatcagccggtgccgggttttgcggtactgatgaaaaacagagccctgttcgtgaccgggctgacgctgctgttgttccatctggcgaatgcggccctgttgccgatgctcagcatgcgggtcgctgccgcaccggccagcgttaatcccggcgtgtttgctgcggcgacggtgattatttcgcaggcggtgatgatcccggtggctatcctggcctccaggcgaatcgaacgctatggttactggcgtttaatcatgctggcgctgttaatcatgccggtacgcgcggcgctggctgcgtctaccgatgcaccgtttatgatgatcccggtacaaattcttgatggtcttgccgccgggatcctgggcgtggtggtgccgtcatttatcgtggtgcttttgcgtgggagcgggcacgttaatgccgggcagagcgtggtcatgctgatgcagggggttggcgcatcgatgagccctgccttaaccgggacgatcgccggacactactcttttgcgacggccttcagtgtgctgagcgccattgccctggctgctgtcctgctctggtggcgtttcccgaaccggacctggcagaccgataacgccccggacggggcgtag

SEQ ID NO: 124627 - DNA, 324 bp, Enterobacter cloacae
atgtcgcaagaatttgagttgtcattaacctcacccgtttggcctgccttatgctatttcattgtatcaatagtcgttttcctgttgctgtatgtggggaagctgaaggtgaatggacttggtaaataccctctgttcattgtttatacgttgttcgtgatcggcatggccgcagtacaaataaacatctttgcgaatggttatgagtttgtggacggatttttacgtatcgattttgatccttatcggtatgactcggtctactggggttcgctgattttctcgctcctgtatttgctggctctgccacgtaaccgctactaa

SEQ ID NO: 124628 - DNA, 1107 bp, Enterobacter cloacae
atggaaaaaagaaaaaacctcccccccgaacgagccacctggcctacacgtcaggccatggtgcatcacgggctggcgatgaacctgccctggctggcctttgtaaacgtcagctttgccctgatgatcctgctgcgccacatcctgctggaaaacagcgcggtgctgtaccccggttcacaacacctgacccggattgtcgatgcctcgatgctgggcattattatactgtccgctgcattaatcctgatggcctggcgccgcatcgccgggataagcgtagtgctgtttgtctgcagtgccttctggtcgatgtgcagttactggttcattaccgccctgcaccttccccacgtctggccgctgtgcgtgattttattgctctccggtttgacggcgctctatttttacccggagggattactctcgtttgtgctcccgctctggctcaccctgccgatcgccagctgggtgctgaatgatggccttaatcttcgctttgtcaccatctggagcgtattcacgctgattatgctttgcgggcggtttatcctgttaagctggtttgacgaggcctggcggcggaatcagcaaaaccagctgttaatctccaggctcgatgcgctggcgcaccaggatcccctcaccaaaaccgccaatcgccggatgatggaagtggtgctggagaatgccgttgagcagaataaagccttctcgctgatcatgctggatatcgattatttcaagctttacaacgatacctacggacatcaggccggtgacgactgtctgacacgcgtggcgcaggtgctgaagcaggccgtgcgcaccccggacgatgtggtgtcacgctacggcggagaagaatttgtggtgatcctgtttaattgcccggagaacgttgcacagcaggttgcccgccgcattcaggacggcctgcgcgcggcggcgataccgcacggtgcgtccaaagtgagtgagcatgtgaccgtcagcatggggattgcaggaattgcaccgggcctggcgggcccggaactgatcgcccgcgccgatgcggcgctgtaccgcgcgaaagaggccgggcgggatcggtggtcgttgtaa

SEQ ID NO: 124629 - DNA, 1425 bp, Enterobacter cloacae
atgctgaacattcgtactgtcgccgtcattggaagcgggacaatgggcgccggaatagccgaagtcgcggcaagccatgggcatcaggtgatgatgtacgacatagcctcagacgccatttcccgcgccattgacggcattcgccagcgcctggcctcccgggtgacgcggggcaaactcactgaggaggcgtgtgggcagatcctcgcccggctgaccccggtcacggatatcagtgcgctaaccgcggcggacctggtgatagaagccgcctccgagcgccttgaggtgaaaaaagcgctgtttgccgaactggcggagatctgcccgccgcagaccctgcttaccagcaacacatcttctatctcgatcacggcgattgcggcggatatccgtcatcccgagcgagtggcaggcctgcatttctttaacccggcaccggtgatgaagctggtggaggtggttagcgggctggcgacctcgccggaagtgtccgacgcgctgtgcgagctggcgctgaactgggggaaacagccggtgcgctgccagtcgacgccgggtttcatcgtaaaccgcgtggcgcgtccgttctattccgaagcctggcgcgcgctggaggaacaggtcgcagctcctgaagtcattgatgctgccctgcgcgaaggcggcggtttcccgatggggccgctggaactgaccgatctgattggtcaggacgttaacttcgccgtgacctgttcggtgtttaacgcattctggcaggagcggcgttttctcccttcactggtgcagcaggagctggtgctggcggggcgactgggcaaaaaaagcgggaagggcgtttacgactggcgcggcgaatcgccacaggtgccatggctcgacgcggtcaacgacagctttagcccaatgcgggttgaacgaaaacgtgacggtgtcacggaaatcgatgatgtgttgctgattgaaacgcagggcgaaaccgctcaggcgctggcgctgcgcctcaactgcccggtggtggtggttgatcgcattgagcgcgacgtggcggtgattgcgtcggcggccagcaacccgcataccgcgacgcaaaaagtcatccgctacctgcaacagcagggaaagcgggtggtgcagattgccgattaccctggcctgctggtctggcgcacggtggcgatgattgccaacgaagcgctggatgcgctgcaaaaaggggtcgccagcgaaaaagatatcgataccgccatgcgtctgggcgtgaactacccgtccgggccgattgcctggggcgcgcggctgggctggcaacgtctgttaacgctgctggaaaacctgcagcgtcattacggcgaagaacgttatcgcccctgttcactgctgcgccagcgtgcgcttctggagagtagctatgagtcataa

SEQ ID NO: 124630 - DNA, 957 bp, Enterobacter cloacae
atgtcttccatcgtcgatacaccgtattccactctgtcgcagcctaaatccggctggcagctgtttaaaagcctggtcactggcgccattacgccgggcctggcatggcaaaatcccgcctatcgacgtaagtttgcgcttcgcacgctggcgacgccgctcagcaccgcacgtctgctctcaagcctggcaaagcagccccgtttgatgcaaatgctgcaggtccagcctggcctgccctgtcgcctgcatcgcccttggctgaccgtgaatatggatcgcccgcatgcactggaagccctgaactggcactaccagtccatgagtcaccacctgccggccgcgctgctcaaaggctatctttctaagcagggcgtgacgctcctgaccttaaccggtaaggatgaacagcagtttaccgttcggttgtgcgccgatgcgttcctggataaagagggagaagctaccctctttttcagtgaccatcaggataccgtgctggcagaaataacgtttacgctgtgcccgtttgaaggcaaaagcacgctctttatcggcggcctgcagggggcgaaagcccacgttccgcatgagctgatccagaaggcaaccaaggcgtgccatggccttttcccgaaacgactgctggttgaagctgtcatgacgctcggcagtgcctttccggtggagcagattgtggcggtaagtaatgccacccacatctatcgcagctggcgatatcgcaagaaaaaagaggggaaactgctggcggattacgacagcttctggatctccctcggcggacacaaacaggataacggtaactttgaactgccgcttgccatgccgcgtaagtccatggaagagattgccagtaaaaaacgcgcggaatatcgccgccgctatgagctgctggatagcctgacagagcaggtcacccaggcaacccggcgttaa

SEQ ID NO: 124631 - DNA, 441 bp, Enterobacter cloacae
atgaatacagaaaacaatttcgcccatttatacagtgaactctccctcagccccgatctcccaaccctcgccaaacgctgcacactgctcaccgaaatcctcctcgattgcaaatccctcccacaaacgcagcccgtatgccgctgtctcggagcctggctggaagaagtgaaaaccggcctcatagaatcaatgcgtgattttcaggtagtggaatttgaggacgacgcggagcaaccgcgacaaaaagagtggttgctggaggataccgaaacgaaatgcgactactgccgggcgttaaaccatgtgctgctggtgtcgcatgttgaccgcgatatgttgccacacctgacgggactgcttcatgacattacgcattcaatggcggcagatgtctttgcacctcaaccttcagaaaagttaatgctcattatttcctga

SEQ ID NO: 124632 - DNA, 1122 bp, Enterobacter cloacae
atgaatataatatatcaaagtgaaaagtattttttacttaattatcactgcaattacttttcatttgatacccatcacatttgttttcatcttatctacgataacatgtcgtgtattcaatgtattgaaataaaagcccttgccatgcccgtcaacagcatcactccaacagacttaaaaactattcttcattctaagcgcgccaatatttattacctggaaaaatgtcgtattcaggtgaatggtgggcgcgttgaatatgtcactcaggaaggcaaagaatcgttttactggaatattcccatcgccaataccacggcagtgatgctgggtatgggaacatccgttacgcaaatggcaatgcgggagttcgcgcgagcaggcgtgatggttggtttttgtggaacggacggcacgccgctttattccgcgaacgaggtggatattgacgtctcatggctttgcccacaaagcgaataccgcccgacgggctatttacaaaactgggtctcattctggtttgatgaggaaaaacgtctgctggcggcaaagcagtttcagtttattcgtttacagcaaatcgaaaaacagtgggcagggctgcggatgcagcgagaaacgtcttttcagcccgatcgggatgcgctggaaactattctggagcgtgcaaggcagggtatggaaaacgcgcaggatcatacgtcgctgatgctccaggaagcacagctcacaaaatcgctctacaaactggtaagccagacggtgggctatggctgttttacccgcgccaaacggggcggcggtgcggatatggcaaatcggtttctcgatcagggtaactatctggcctacggcctggctgcggtagcggcctgggtaacggggatccctcacggtctggctgttatgcacggtaaaactcgtcgcggtgggctggtttttgatattgccgatttaataaaagatgccctcgttatgccgcaggcatttattgcggctatggaaggtgaggataatcaacagtttcgtcagcgctgcattaacgcgtttcagcagtccgatgcgctggatgtgatgattatcacgttgcaggagacatcgcaggcactggcgggacactag

SEQ ID NO: 124633 - DNA, 3228 bp, Enterobacter cloacae
atgaatgtactgatcatttctcgctgcacaaaaaatgcaagggacgaaagttgtcggattatcgatcagttcgctgagcgtacgggtgacgcggcgtggcagacgacgatgactatggaaggcgctattacgctgcgcaagctgctgcgtaaaacggcacgtcgtaacaccgccgtggcctgccactggctgaaaaaaaacggtcaaagtgaactgttgtggattgtcgggaatttgcgtcgctttaacgcgcaagggcgcgtgccaacaaaccgcacaaccctgcaaattatccggaacgacagtgaacaccgctggcacagcgcggaaagcatcgccttgctggcagcgattgccgggctgtttcatgattttggtaaagcggggatgtgcttccagcagacgcttaagggggaaagtaagcacatttgccagccgtatcgtcatgagtggatctcggttcgtctgttcgaggcgtttgtaggaaaacaaaccgatgaacagtggctggcatccctcactcagctaaaagccgctgacgaaaaggccatgttgaaagcgttgaagatggacacagagaagaactgcagccttttgggggagctcccgcctctggctaaagtggtggtatggctgattttgtcgcatcaccgtttgccgcagttatattcgacacgtcctcagatgatctactgcgaaggctggtttgagaaacagctgaacgcagaatggaactcgcttaatcatacatctaccgaaaaacatcagtggaaagagcgtgattttaaaaatgtctggaaattcccctacggtacgccgctaagaagtaaaacctggcgcgagaaggcccgacagattggtaaacgtatccggaatctgcctgcgctgcttcacgcgggaacgatggataatatcttcaccctccatctcgcccgcctgtcgctaatgctggccgatcacgtttactcctctcaaccagcttattccggatggcaggatgatgccatacaggcgtgggctaacactcaccacggaaccgaacttaaccaaaaacttgatgagcacaatgttggtgtcgcccatcatgcgctgttgatgggacgctctcttccggcgttgcgacgctcattacccgccatcgcccggcataaaacgtttcgggaaagggcgaaagaagagcgttttcactggcaaaacaaggcgtgggacgttgcgtcttctctgcgcgagaagagtgctgagcagggcttcttcggcatcaatatggcctcgaccggatgcggtaaaacctttgccaatgcccgaattatgtacgctctggcagatgagcaggcagggtgtcgttttagcgtggcgctggggttacgcacgctgacgctgcagacgggtcaggctttgcagtcgcgcctgaggctggatgacgacacgctggccgtggtgaccggtgccgccgcagtgaaggagctctatcaggggaatgacgccgaagatacccgcagtgccagcgacgaaacgttcttcgccagccatcactacgtgcattacgaaggggcaaccagtagcgggatcgctcagcagtggctggcgaaagaaccggcgctcaatcgcctggtcagtgctccggtgctggtgacaaccctcgatcacctgatgcctgcaacggaaggggtgcgcggtggcaagcagatccccgctatgctgcgcctgcttaccagcgatctggtgcttgatgagcctgatgattttgagattgacgatttgcacgccctttgtcggctggtgaactgggcgggaatgctcggctcccgcgtgctgctttcctctgcaacgttgccccctgcattaacggaagcgctgtttgaagcctatcgggaagggcggagagtctggcaggccgcgtgtggtcagtcggacagaccgatgagtatctgctgcgcctggtttgatgaatatggcgcgcagccgcaggatgtggccgacgatgctcaattccgtaaggtgcatggcgattttgtcaggcagaggattaaacgtctgccaaagcagccccagcttcgcctggggaaactggccgtcgtgaagcctcactcgtcctgtactgccgacgttatctctgcgctggcgcagacgttgcaccagcaaacaatcgcgctgcacggtcatcatcacagcacacataaaagcggcaaaaccgtgtcatttggtctggtgaggatggcgaatatcaacccgctggttgccgtcgcgcaggcgctgatggcattaccttctccggacaattaccgcattcattattgcgtgtaccacagtcagcacccgctggcggtgcgtgcggcaattgaaaaacgactcgatgccgcgttcacgcggcacaaaccggcgctggtctggcagttgcctgaagttaagcaggcgctgacgtcaccggaacagcaccatctttttgtcgtgctcggcacatccgttctggaagttgggcgcgattttgatgccgactggggaattatcgagccgagttcgatgcgttctcttatacagtttgcggggcgtattcagcgccatcgccagatcgttccggatactgaaaacctagtgattctggaacgcaacgtgcgtgccctccgtggagaaaggatcgcctactgccgacccggttttgaaaccgagcatcatctactaccacaccacgatctccatgaattgctcagtgaagagggctatcgcacactaaatgcaataccgcgcatcgttgaaaatctgcccggcaatgcgctggcgacgctggagcatgcccggttgcgcgccgcgctgctggacggcggcgataaatcagatgtggtggccgcgtcgtggtggcggctgccgctgacgtggaacggtgaattgcagcggcggacgccgtttcgcgcctcatcaccgcaggagtccttttatctgacaatgaaagaagaagacgacgagcccgtattttgtttgcttcaggaggatggtgaaccgaaacctgcgggtggattttgcgaacagctgttatcaatggctcacggcgtagaaccgtggattgcaattgattatgccgaggtattacagatcctggccgagacgaagcaaatggagttggccgcggtgtcgcgacggtatggcgaaatcacattgagagtaagtcgggaggaggaaacagagcagtggttgtatcaccctttgttgggtgtgttcagggaataccgataa

SEQ ID NO: 124634 - DNA, 1311 bp, Enterobacter cloacae
atgtcagttgaagcactaagcgctttcatcgctaagtacattgccgaacgacggcaaaccaagctggaagcatttgataaagaggccgcaaagcgcagcgatattgatagcgcaacgcttgcggcagaacgccgggaactggagcttcgttacgagccgaaagcatggctaacggatgccgcgaagcgagccggacaaattaacctcgtgacccatgcggcgaagtttacccatggggattcaaaaagtagcagtatctacagcgaggcagtggcgaaggaagggtatctctgcacagcgacgctgtcaggtctcgaaacggatgcggtgggtaacgccgctgcactggatgtcgcgaaactgctgcaaacacgggttgaaggcggcgactcgcttctggcaagcctgaaacgtggcgaccacgcagcgttggctgcttttaccgatgacgccagtcaactgagcgaatggattgccggattttgccgtgcgttgacgcccggcgaccccgcttcgcacaagctggcgaaacagaattattttccggttgatgatgattatcatctgttaagcccgctgtttgccacctcacttgttcacgccatgcatcagaaaatgattgcctttcgttttggagacgatgttaaagccatctggaaagccaggcgcgagaaaacctggcatcccactccgctgacgttattcccggattcagcggaaatacacttcggtggcactaaaccacaaaacatttcctatctcaacagcgtgcgtggcggacgtagctggctactttcctgccagccgccgcagtggaaaagggcagaaaagccgccaacgagtttacgttctgtattcgcctggggtgggcaatttgatcgtcgtgcgaagagccacattcagctgcttgtttccttgctgacaaaagcgggtgattacaccaattttcgtatacgcgaagcccgcgatggctacattaatatgattatcgatctcttgttcgagatcgcatctgactttcaacgtgaaaccgcgcagaactggacgcgcaactgtcccgatctgaaaccccatcaacagctctggctcgatccctggcgtacaaaaacagatgaagccttccgtcttgagcgagaaaaagacgactggcaggacgctgtggcagaagatttttccctttggctgaacgcacgtctgcgcaagtcgatgccggatttaggtgctgtggaaaaacgtgaatgggaaacccgcgagcgcttacgggccaacctccgtgagatggaaaaaattatccaggaggcgctgaaatga

SEQ ID NO: 124635 - DNA, 936 bp, Enterobacter cloacae
atgagttcattgattttgcttcgccgtgtgagagttgaaaacgccaacgcggttgctggcctgacctgggggtttccagcgatcacccatttcatgggatattctcatgctttatcgcgcaggttgacagaaaagcatgggctgcacattgatggctgtgctgtcgtgagccacgaacaccagatccacgcgcatacgtctggccgcgattatcagttcgccctgacccgcaatcctcttacccgtgaagcgaaaaccgcctcctttaatgaagaggggcgcatgcatttgacggtttcattgctgctggagtgtcatggggaaatcccaaacggtgaatacggacagcgcgacctcgccgagtttctgtctcagatatgcccgacgcttcgactggcggggggaatcatcgtcgatatccagaatatttcggttatggcgatgcctgccagcgttcaggaaatgggccgattacagtggcaattgctgccgggctttgccctgcgcgaccgcagcagctggctgggcgaacatcatcaaacgcttctggaaaacaatcctgatgccacgctacttgatgcctggctcgattttgcttcgctgaaactgcaggccgaaatgccggacgagggcgatatccaggaaggcgatccggccagttggctctacgttcccaaacctaaacccgggtatctggtgccattaatgacaggttaccagcgcatctctgaactctacgcacccggcgtcgtggcaaatgcgcgtgatgcagaaacaccgttcgcgtttaccgaagccgtatatggcgtgggcgagtggtgcggtctgcaccggattcggtcattagaagacattttctggcgctatcgcacgacggaaacaggctactactgtcagggcgcgggcgcgccggtgacatctgaacctctaaattaa

SEQ ID NO: 124636 - DNA, 999 bp, Enterobacter cloacae
atggcaaaggctccaactgccgttaaaacggcatctgtactggcatttgaacgtaaactggcgacctcggatgcggtaatgtattcaggatgctgggaaggagaaacctggcaaccgattcggattcaggaaaaagcagtacgcggcactatctctaaccgtctaaaaaacgcgctcaccaacgatccggcaaaactggatgctgagatccagaaagccaatctccagcgtgtagatgtggcggcactgcctgcggacgcggataccttacaggttaaatttaccctgcgcgtgttaggaaacttatcgactccttctgtatgtaatgaccgcacttatcaggaagaactccagcaggttatcgacggctacatacatgaacatggttttgccgaactggcgcgtcgttacgccaacaacctggcgaatggccgttttttatggcgtaaccgcgttggtgcagaaaaaatcgttgtgaaagtgacaggcagccagtcgtggacgtttgatgcgtacagttatgcgctgcgtgattttaccgcccgtgacaagagcctcacagaactcgctcaggaaatagaaaaagggctcagtggaaaaggatttgttctgctcaacgtagaggcgcaggttttgcttggcgcagggcaggagatcttcccgtcgcaggagttagtactggacagcaacaacagcaagagccgtctgctttatcaggtggatgaagtcgctggcatccactcgcagaaaatcggtaatgcgattcgaactatcgatacctggcatcctaaagtggacgaacttggtgcgatagccgttgaaccctatggatctgtcaccagccgtggggtggcgtgtcgtcagccgaaagagaaaatggatttctacacgcttctcgataactgggtcaccaaaggccagaagccggatgtggatcagcaacattacgtgatggccgtattgatccgtggtggtgtcttcggcgagaagagcgagtaa

SEQ ID NO: 124637 - DNA, 555 bp, Enterobacter cloacae
atggatcactatcttgagatccgtgtgttgccagatcccgaattcagtgaagagatgctaatggccgcgctggtggcaaaactgcatcgcgcattgggtcagagagggcagggcgatattggtattagtttccctgcgtatgctgtaaaacctggcgctattctgcgtttgcatggccaccggcaggcactcaatgagcttgagcgactggcctggagaaaagggctgagtgattactgcgactgtacgcagattaagaatgtgccagaggtaaatcactggcgttgtgtcagccgggtacaggtcaaaagtagtgcgcagcggctcatgcgacgttcggtgaagaagggatggctaactgaagaggaagcgcagcagcgtatgttgacgatggcagaggctaggactgatttgccgtggctaaatttgcgtagtctctctacgggtcaatcgttcaggctgtttatccgtcatggtgatttgctctccgcacccgttacgggagtattttccacctacgggctaagcgctacagccacgatcccctggttttga

SEQ ID NO: 124638 - DNA, 474 bp, Enterobacter cloacae
atgattttttatcgtctggtgacaggacgatatgccagcgaagcgtggagtggaggcggcgcaaaccagtatggcggccgctggaatcacaaaggacacccggcggtatacgtctctacatccatctcgctggcatcacttgaaattctggttcacgttaaaaaagataccgtgttaaaccagtaccagcttttcagcattgatatcccggaagagcaaattgagtatctggataaagcatggctacccaaagactggcaggaggatcctgcaccgatgtcgacaatggatctgggaaccggttggctccagtccagcagcgcgctggcgcttattctaccgtcctgcatcattccttatgaaaataacgccatactgaatccactgcatcccgattttcatcagagactggagaccgtccagcaactcccttttagctttgataaccggctagcagaaaaaaccgcatcctga

SEQ ID NO: 124639 - DNA, 444 bp, Enterobacter cloacae
atgagaacatgggttcctgcgcagaagcctgctgataacgcgctttggcgctatgccggtttacctgcaaatcgaggtatgcaactgatcgagttactcaaccaaggtctacccgttagcgtgctcgacaacattcatgaatggacggcgatgtcaaaagcagacattttgcgcgtcaccggtataaacgaacgcaatgtcgcgcgtcgtaaaagtgcgggtcgtacgttgacccccgatgaaagtgagcgcgtggcgcgcttcgtacgcgttttggatgctgccgttgattattttggcagtaaagatgatgcatggaactggctgcaatcaccggtccgtggactcggaaatgttgcgcctgtcgatttgattgcaacagaaaccggtgcactggaagtgaccgatttgattggtcgcctggaacatggagtattcgcatga

SEQ ID NO: 124640 - DNA, 1650 bp, Enterobacter cloacae
atgaagagagtcctgacggcgcttgccgccacacttccctttgcggcacacgccgcagatgccattaccggcgaggttcagcgccagccaaccaactggcaggcgattatcatgttcctgattttcgtggtgctgacgctgtatatcacctggtgggcgtcgaaacgcgtccgttcccgtaatgattactacactgcgggcggtaatattaccggtttccagaacgggctggcgattgcgggcgactttatgtctgccgcgtctttccttgggatctccgcgctggtgtacacctccggctacgatggtctgatctactctctcggcttcctggtgggctggccgatcattctgttcctgatcgccgaacgcttgcgcaacctggggcgttttacctttgctgacgtggcttcgtatcgcctgaagcagggtccgattcgtattctctccgcctgcggttcgctggtggtggtggcgctgtatctgatcgcccagatggttggcgcaggcaaactgatcgaacttctgttcggcctgaactaccacgtcgcggtggtgctggtgggtgtgctgatggtgatgtacgtcctgtttggcggcatgctggcaaccacctgggtgcaaattatcaaagcggttctgctgctgttcggtgcgagcttcatggcctttatggtgatgaaacacgtcggctttagcttcaacaacctgtttaccgaagcaatggctgtccacccgaaaggggaagcgatcatgagcccgggcgggctggtgaaagacccgatatccgcgctttcactcggtctgggtctgatgtttggtaccgcaggcttgccacatatcctgatgcgtttcttcaccgtgagcgatgcccgcgaagcgcgcaagagcgtcttctacgccaccgggtttatgggttacttctacatactgacctttatcatcggttttggcgccatcatgctggtgggagcgaacccggcatttaaagacgcggcgggcgcgctgattggcgggaacaacatggcggcagtgcatctggcggatgcggtaggcggcaatctgttcctcggctttatctcagccgtggcctttgccaccatccttgccgtggtggccgggcttacgcttgccggagcatctgcggtgtcgcatgacctgtacgcgaacgtgttccgcaaaggcgcaaccgagcgtgaagagctcaaagtctccaaaatcaccgtactgattctgggtgtggtggcgatcctgctggggatcctcttcgagaagcagaacattgccttcatggtggggctggccttctcaattgcggcgagctgtaacttccctatcatcctgctctccatgtactggtctaaactgaccacccgtggcgcaatggtaggcggctggctggggctgctgaccgcggtgattctgatgatcctcggcccgacgatttgggtgcagatcctcggtcacgaaaaggcgctcttcccgtatgagtacccggcgctgttctcaatcgccgtggcgtttatcggtatctggatcttctctgcaaccgacaactcgccggaggggaacctggagcgtgagaaattccgcgcccagtttattcgctcgcaaaccggcctgggcgtggaacaaggccgcgcacactga

SEQ ID NO: 124641 - DNA, 909 bp, Enterobacter cloacae
atgttcgcagcaattatcatcgctatatttattatcagtgttatttatgcgcattcgcgcggcaaagaaaaacagacgctttcccgtcaacttttcgaccactccacctttatggcgcctatcaatatgtttatgacggcgttctcttcgctgcccgccagacagcccttttttgaaaccgagcgctttccggaattaaataaactgacggaaaactgggaggtcattcgcgaagaggcgctgcgtttgcaggatcatattaaggcggcacaaaatcataacgatgccggttttaacaccttctttaaacgcggctggaaacggttttacctcaaatggtatgccgatgcgcatccctcggctcagaccctgtgccccgttacgacacaactggtgagtgagatcccgtccgtgaaagcggcaatgtttgccgaactcccggcgggcgcgaagctcggcaagcatcgcgatccctacgccggctcggttcgttaccatttaggcctggtcacgccaaatgacgatcgctgctttatagaggttgaccagcagcgccacagctggcgtgacggtgaggctgtcatctttgatgaaacttacgtgcactgggcggagaataaatcggatcacacgcggattattctcttctgcgatatcgaacgtccgatgaaatggcgctgggcgcaggcggttaaccactgggtcgggacaacgctgatgtcagcggccagctcccccaatgacgataacgaccgcaccgggggaatcaaccgtatcttcaaatatgtgcacgccgggcgagaacgcggtcagcgtctgaagaagcgtaatcggaagctctattacgcactgaagtacctggtcatcacggcgattttcgccgcgcttattgtcgctgccataacgtaa

SEQ ID NO: 124642 - DNA, 624 bp, Enterobacter cloacae
atgatcgtgatgcctacaacgtacagcccgaatacggttgccaggtcatttacgctcgtagatgaatttgaactctccggtcgggtgttacatgtcatttatgacagccagacgccccgggctgcaattattgaagcagatatcgaaacctttgatggcgttccccggcatcgggttgttgctgctctggatttacagcataaagcccatctgggaaaggacattatcgcagtcgaacgatgctgggaagatactcgcgttgtccaggtagaaggcatttgtgtcgatcctgccgaacgagacaaagggctggcgactcgtctctatgaagcgttggtcttacattgcggcgtgaccttaatcagcgacttcgagcaatatgagggtggaaagatgctctggcagaaaatagcccgtgaatccgaccaaatcgctgtttttgtactcgacacagagcagggagcattctggccttatgatggcagcaaggtgatatatgacggaggatgtattcctgaagaccgcatctggagtcattctccggaccaaaaatgctccgggattgtgctggtcgcagagaataaacagcgagtgcgtcaaataatggaagcgtcgcctcgctaa

SEQ ID NO: 124643 - DNA, 588 bp, Enterobacter cloacae
atgcaaatcggttacgtgagggtgtcaacaaatgaccaaaacacggctttacaacgaaatgcgctggagtgtgcaggatgtgagctgatatttgaggacaaaatgagcggaaaaacctcagatcggccagggctaaagaaggtcctgcgcacactctcagaaggtgacacgctggtagtctggaagctggacagattaggcaggagcatgcgacatcttgttacgctgattgaagacctgcgcgggagaggggtaaatttccgcagcctgacagacagcattgacacatcaactccaatggggcgtttctttttccatgttatgggcgccctggctgaaatggaacgtgagctaatcgttgagcgtacccgcgccgggctggcagcggccagacagcaagggcgtatcggtggcaggcggccaaaactgacagagcagcaatgggcgcaggccgggcgactccttgaggcaggggaaagcaggaagcgtgttgcgctaatttttgatgtgggtatctccactctgtaccgtaaatttcccgcgtctgccgtggcgccattgtctgagcggtcagacactcctgtataa

SEQ ID NO: 124644 - DNA, 753 bp, Enterobacter cloacae
atgcaaaaagcggttattggggcggcaacgatttactgtggtgacagtctggaaattttgcgcgaactcactggcgaatttgatgcagtaattactgatccgccttattccagcggtggtatgacgcgcagtgatcggcaggccaaaccctcagggaagtatgtaggcaataacaactaccatgagttttacggcgataacagagacgtgcgatcctgggcgttctggatgacgcagtggatgagtcaggttaaccgcctggtcaagtcaggcgggtatgccatggttttcactgactggcggcagcttccaacgcttactgacgttttccaggctggcggttttgtatggcgggggctgattccgtgggataaaaccctttcaacccgtgcgcctcataccggttattttcgccatcagtgcgaatacgttgtctggggaagtaacggaccattgcctaaaagtctgcatggtggaccctggccgggtatggtgactcgccgggttattccgtctcaaaaactccatatgaccggcaaaccgattgagcttatggaaagcctgattgcccccgttccccctggcggccatattcttgatccatttatggggagtgcatcaactggcgttgccgcgctgaggaagggatataaatttaccgggattgagatgagccagcagtattttgatatctcatgtgaacgcctggaaaaagaaaacgcagatatccgcgcgggcgtattgtgtgattaa

SEQ ID NO: 124645 - DNA, 1122 bp, Enterobacter cloacae
gtgaatttcagctctgatctcctgaacctgaacagcaaaactcccggtttcagtatcatcattgaaggtaaagatgtgactaccgtgctggatgcgcgcctgatgagtctgacgctgacggataaccggggctttgaagcggaccagcttgatctggaactggacgactcggacgggctaatcgttctgccgcgtcggggggccattattcagtttgcgctggggtggaaaggtcagccgctttttccgaaaggggcgtttactgtcgatgagattgagcacagcggcgcgcctgatcgtctcacaatccgcgcgcgtagtgcagatttccgtgaaaccctgaatacgcggcgtgaaaagtcctggcaccagacaacggtgggcgaagttgtgaaggaaatcgcgggcaggcataaattaaagatggcgctgggaaaggacctgttggacaagcctgtcgatcatcttgaccagactaatgaaagcgacgccagctttttgatgaagctggcgcggcagtatggggcgatagcctcagttaaggacggcaatctgttgtttatccgccaggggcagggcagaacggcaagcggtaagccgctgccggttatcaccatcacccgccaggctggtgacggtcatcgttttaccctggctgatcgcgatgcctatacgggggtaattgccagctggctccatacccgtgagccaaagaaaaaagagacagcaaaggttaagcgccgtcgaaagaaaaccaccgcggcaaaggagccggaagcaaaacagggagattacctggttgggacggatgaaaacgtgctggtactcaacagaacttatgcaaaccgcagtaatgcagagcgagcggcaaagatgcagtgggagcgcctgcagcgcggggttgcagcattctccctgcagctcgcagagggaagggctgatctgtataccgaaatgccggtgaaggtgagcggctttaaacagcccattgatgatgccgaatggaccattaccacgctgacgcatagtgtcagtgcagataatggttttactacgactctggagcttgaagttaagatcgatgatctcgaaatggagtggcgggttctcaaaattgaataa

SEQ ID NO: 124646 - DNA, 603 bp, Enterobacter cloacae
atgcgagtaatcatgtttgacaggcagtcgatatttattcatggagcgataaacagtttgcagacgttaattcctgaaataaatatgacaggaacccgtcaggcagatgaattatgggcgcagttgtccgcgtcgccatccgctatcgtcatgattgacggctcattaattcagaatgagggcatcagctttctgaaagacattatcacgcgtttccctgcgatacgtgtcgtgatggtgctgacgaaaaaagagacccgatgggctgaacagatgtttcagcgcaacgtgaaggcgattattccccgtaatgccagtcccgagcggtttgccgcagtgctggattcggtctcccgggggatggtctgttttcccggcgaatggcttgcgcagcaggcgtcacaccaggcattgttatccttaagcgagcgccagcgtgaagtgctcaagttactggccgccggggagtctaataaagagattggccgcacgctcaatatcagtgcggcaacggtaaaggcccatctggagtcacttttccggcggctggatgtaaaaaatcgcacgcaggcggcaatgtgctatacccggctcaccgcctga

SEQ ID NO: 124647 - DNA, 327 bp, Enterobacter cloacae
atgttgaagctatcttctgctgccgttgaattaattaaaaaacagcaagggctgtctctggaaaaataccgtgatgagcacggtactgaggttattgggtatggtcacgttattcagcaatgggagaagttccatggtcttattaccgttgctgaagcagagcgcttgttagataacgatattcagatttatgagacgttaattcaggaaaatatcgcccagccattaacgcaacaccagcacgatgcgctggtgttgttaatgttcagttttactgacacaccgtgtccgataaacgccatcgctcaggcggtgagccgggtatag

SEQ ID NO: 124648 - DNA, 540 bp, Enterobacter cloacae
atgccgcagctaaccacctcgcgtcttatctgctcgccgttacaggaagatgactggcccttttttctggcgctacagcaagacccggatgtgatgcgctttgtcgcgcaggatcgcactgtggcggacattcgtgaggccttcgactcccgactgacgccatggacgcccggctgcatgcactggctctgcctcgtggttcgcgataacgccagccagactccgctgggggtgaccggctacaaacaccacgaagcggattgcgccgaagtcggtttccttttcgctcccgcggcccagggaaaaggctacggctttgaatccctgcaggcactctgtgattatgccttccaccagggggggatccgccgcctcaccgccaccgtcacggcagggaatatcgcctcccggcgtctgctggaaaaagcccgcttccggctggagggtgagctgcgtgagagttattaccttggcggccgctggcataatgactggctattcggtttattacagcgcgactatctggaaaatatcagctga

SEQ ID NO: 124649 - DNA, 789 bp, Enterobacter cloacae
atgtatgttgcggtagggcagtttgcggtcacgcctcgctggcatgagaatgcggcgcagtgtgtttcgctgatgaaacaggcacaacagaagggggcgtcgttgctggtgctgccggaagccttgctggctcgcgatgataacgacccggatttgtcggtgaaatccgcgcagccgctggatggcgcgtttttacagcaattactggccgagagtgcgggtaatgacatgaccacaatgttgacggtccatgtgccgtcaacgcctggccgggcagttaacacactggtagccatccgtggcggcgtcatcatcgccagctatgccaagcttcatctctatgatgcgttcagtatccaggagtcgcgcctggttgacccgggggagtgcgttccgcccctgatcgcggttgatggtttaaacattgggctgatgacctgctacgatttgcgctttcctgagctggcgttgagcctggcactacaggcagcggatgtgcttgttctgcctgccgcgtgggttaaagggccgctgaaagagcatcactgggccacgttgcttacggcgcgcgcgctggataccacctgttatgtggtcgcggcaggggagtgcggcaataaaaatatcgggcagagcagggtgattgacccgctgggcgtcacgattgccgccgcagcggaaggtccggttctactgatggcggagataatttcggaaaggatagcgcttgcacggcagcaattacctgttcttcgcaaccgacgttttgcgccaccgcaattattgtga

SEQ ID NO: 124650 - DNA, 1224 bp, Enterobacter cloacae
ttgtcaatttataagcatccacttaatcaaaatgtccttgacgctgccacagagcgcataacatggacgcttgagaatctgccaagggtctgtgtttcattttctggcggaaaagattccaccattatgttccatttaacggcccgacaagcccgaaaaatgggaaagaaaatctgtctgttatttatcgactgggaagcacagttcacctgtaccattcagcatgtgaataacatgatcgtacaatacgccgatgtgattgaaaaatgctggtgggtagcgctcccgttgaccacgcaaaattcactttcacaattccagcccgaatggcagtgctgggagccgggtaaaaactgggtacgcacgcccccggaagaggcggtaaccgatccagattacttctcgttctaccagcccggcatgaccttcgaggcctttgttcgcgaattttccgactggtttgccaaaaggcgcccggcagcaatgatgatcggtattcgtgccgatgaatcctacaatcgctttttgactatcgccaacgcacgaaagcagcgctttgccgatgacaaaccctggaccaccgtcgcccccggcgggcacgcctggtatgtctatccgctttatgactggaaaaccgccgatatctggacctggtttgcgaaaacgggcgggtgctataacccgctttacgacctgatgtttcaggctggcgtgccgccgcgctatatgcgcatctgtgaaccctttggcccggagcagcgtcaggggttgtggctctatcatgttgtggagcccgaacgctgggcggcgatgtgtgagcgggtaaacggcgtgcacagtggcggggtctacgcggggcaggacaatcacttctatggccaccgcaaaattctgaaacccgacgcgctcagctggcgggaatacgccatgctgcttctcgacagcatgccgcacaccactgcggaacattaccgcaataaaatcgcgatctatttgcactggtatcagaagagaggcatggccgatattcccgacacccaggagggcgatatcggcgccaaagatatcccgtcctggcgacgcgtgtgcaaggtattactcaacaatgactactggtgccgggcgctgtcattcagtccgaacaaacccaggcattaccagcgttacagcgaacggatgaaatcaaaacgcaaggagtgggggatcttatgcagcagcaattaa

SEQ ID NO: 124651 - DNA, 627 bp, Enterobacter cloacae
atgcagcagcaattaattaacgagatgaaaaattatcttcagtctcttcccgaagataaacgcattgaagccattaacgcctttcgccaggccatccatgaaaatagcccttttcgcgaacagcctgtcgactgcgtgctgtggatcaaacaggacgagattaccgcgaacgattacaaccccaacaacgttgccccgccggaaaaacggctgctctgtaaatcgctggagatggacggttttacccaacccattgtggtgacggaaagtgaggcccggcattatgaaattgtcgacggcttccatcggcatgaaattgggtccaaccgggcggtattaaaacgccagcttaaaggctatctgcctgtcacctgtctgcgtaaagagcggcagaaaaagttcgaccggatagcggccaccattcgccacaatcgggcgcgcggccgccaccaaattaatgcgatgtccgatattgtccgcgagctggtgcagcttggctgggacgacgagagaatcagtcaggaactgggaatggatagcgacgaggtattacgcctcaagcaaatcaacggtctgctggaactctttgcagaccgccgttattcagaagcctggacggtcaaataa

SEQ ID NO: 124652 - DNA, 600 bp, Enterobacter cloacae
atgttcaaaattcttttgattgaccgatgtcacttcacccgcgcggggtttgaagcatggctcaatcattccggtttgtttcccgggcacttcgtcgtgaccgggctgaataatctcatcctcgccagagagcatattctgcagtgggatccatcggtggttatcgccgatctgcacggctttatgcaggacattcaccatttccagcagctttcttccctgctgaacgccagtgaaaaagtgcctttcattttgctgcagtcgggggaggataaagagatgacaggctttctgtcccaatttccgatatgggcttcgcttaccaaaaatgccggactggagacgctggcgacggtcatcaacgacgccctgacgactcgcgcaagcgttgagatccctgcggtcgcggcccccctgctcactcgccaggaggagaaggtgttgacgctgtggatggatggcgcaagcaatcagaagattgccactcacctgagtatcaatggaaaaacggtctatacctataagcgaaatatccgcatgaaattgcatatggatacgcgcttttccccgtttttatctctgcaggaatcagaaaactga

SEQ ID NO: 124653 - DNA, 678 bp, Enterobacter cloacae
atgagtgaagtatccccgaatcaggggaaagtgacgtgggtagggtatctcgctttctttctaaccatcattttcttttctggctttttcgccaaagccaccgaatggtggcgagtctttgatttcaccgtgctgaacggcacatttggtcaggttaacggcgaaggcgccgcaagcgtctcttttcgcggcacaggcggtaccggcgcaaaagatggctttctgtttgcgctggaactggcaccgtctgtcattttgtcgctgggcatcatttcagtgaccgaagggctgggcgggctgcgggcggcacagcaattgatgacgcccgttttgaaaccgttgctgggcattccaggcatttgttctctggcgcttatcgccaatttgcaaaacaccgatgcggctgcaggtatgaccaaagagctcgccgatgaaggcgttatcagcgacagggaacgagcgattttcgccacctttcagaccagcggtagcgcaattatcaccaattacttctcgtccggcgcggcgctgttcaccagcatcaccgtgccggttatcaccccgctggcagtgattctggtctttaaatttataggtgccaattttctcagagtatggattgcgcacatggaaacccgtcagatcaaggagagagaagatgaccgccgaagtgcgtaa

SEQ ID NO: 124654 - DNA, 591 bp, Enterobacter cloacae
gtgagtacaataccttttctgctgtttgcctttgtcgcttcgataacgccagggccgaccaatatcctcattctcaccaacagccagcacttcggcatcaaaaaaaccgttccggccattcttggaggatgcatggctgcgagcatgattgtgctggtttcaggtgccggtgcaggggaagtgcttcgccagtaccccctgattcgtcagatgatgagctgggcaggggtgttatggctaagctggatgagctggcagttatttaacgcgcctgcagcaaacctctctgcgaagacgcagacccgttttaccgcgcaagctgcagccctgttgcagatcgtaaacccgaaaacctggatgatggcgctggcggttgtcagcctgtttgcccctgcaagcgagcacgcgctgcgggatatagcgctgatggcgctgtggttcctggccatctcggtggtgtgtctgatgtgctgggcgtggctggggaaggcggtaaatcaattctttcgcaccaccgtggcgatggtgcgatttcagcggctgatggcattgtgcctgcttgtctcagcctgggctggggtgctggcttag

SEQ ID NO: 124655 - DNA, 672 bp, Enterobacter cloacae
atgaacgatcaaaaaaacatattacatctcagggatgtcgggtttcgtgttggggggaatacgatccttcagcacgtcgaattttgcctttcaccgggcgagtttaaattaatcaccgggccgtcaggctgcggcaaaagcacgttgctgaaaattgtggcttcactgctaagtcctacggagggaaccgttctgtttgagggccacgatattgcgaccctctccccggaacgctatcgccagcaggtctcttattgtgtacagaccccttcactgttcggcgaaacggtctatgacaacctgatcttcccgtggcagattcgccagcaaacgccagagccgaataaatttatcgctgacctggcccgctttggcctggcgcaggagacattgaccaaatccattaatgagctctccgggggcgaaaagcagcgcgtttcgctgattcgtaacctgcagtttttaccgaaggtgctgctgctggacgagatcaccagcgcgctggatgaggccaacaagcgcaacgtgaacgacatcatccatcgctatgccagtgaacagaatattgccgtgctgtgggtgacgcacgacgcaaatgaaattgcccatgcggatgatgtcatcacgctgcagccgcagggtgggaaatggcaggaggcaaaccatgggtga

SEQ ID NO: 124656 - DNA, 528 bp, Enterobacter cloacae
ttgaaaatagccctgcttttagagacgctgcaaaatcagctcgttgccctgcgcacgcaggcgtcaccgttgatgcagcatgcgacgctcaaaccgcgctttgaccggcaattatttcatacgcgtagtacgctaatgaaagactatcttgatgaggcgcagaccaacctcgacgaactgcgacagtccgtgaatgacggtaaacatgagcaggtggcctggcttgcggagcatctcaccagtcagatcaccgccttgcaccgggagatcgcagcctggcccctgcgtacgtgggacagcgcgtcgcccggcctcggtaaatggcagcgcaaacggctggagcaccaggagtttgaacgccgtctgtttgagatgaagcgcgagcgggaagcacgtctgaacaacagtgaaacgctggaagagcagcagttattgatgcgcgaaatcgacgcgctggatggacgtcttgtccgttgccgtcaggcgctggatgagatcgaacgcgtcattgaacgcctgacccgttaa

SEQ ID NO: 124657 - DNA, 297 bp, Enterobacter cloacae
atgaagattgtctggtccaatggggcaaagaaggcatttttaaagattgacgagcgatatcagcgtcgcattgagttgaagcttgttgagctggatgaccgctcggctccccggcccgatatcaaaaaaatatcggcgacagaagatcactaccggctacgcgttggcgattaccgcatcgtctatacgctttgggacgaacccgataaccattgttatgttttggccgttaagcgcagaacatcaacaacttacctgcacgaggagaaagccacctatggctgttcagctaattaa

SEQ ID NO: 124658 - DNA, 4158 bp, Enterobacter cloacae
atgagcctgaaaaaatgtgcagcctggttgcaaatagcactgcaactccttccgtcgtcattattttcgctgggagcgacgcccgtcgccgcgcaggataaggtagccgagccgcaaaccacagagcgggtagtggcacaaaccgccgtgcaggcggggtcactgctggagagcggcagtggccgttctgtcgccagcgcaattacgtcccaggcaacaaataccgccacgcaggaaattgagtcctggttaaatcaatttggtaccacgcgtctgaatatcggtactgatgagcatttttccattcaggacgcggagttagatctgcttatccctttatacgagcaaaaatcgtcgctggtgttcacccaattggggggacgtcgtcacgacgacagaaatatcgttaatgtcgggtttggctaccgtgaatttaataccgcatggatgtggggcgtgaataccttttacgatcgccaggtttcggcgaatcagcatcagcgccttggtgttggagccgagctaggctgggactatctgcgtctttcagccaacggctactaccgtttaagcgactggatgtcttcgtcccgctatcgcgattatgacgagcgcgtggcgaacggctttgacctgcgtgcaaccgggtatcttcccgcctatccgcagcttggggcgaacctcgtctacgaacaatactatggtcagcacgtcgggcttttcggtgacgatgaggacgatcgtcagaaagatccttacgccgtaaccgttggactgagctatacgcccattccgctggttaccctgggtgtaaaccaaaaaatgggtaaaggcgaggcatcggatacgcagtttaaccttgcggtcaactgggcgccgggcgtgccgctgcgcacgcagcttgatgcggaccaggtgggggcacgccgtacgctactggggtcacgtcaggagctggtcgatcgtaataacaatattgtcctggattaccgtaagcaggagctgatttcgctcgcactgccagaaaacattgccgggaatgaaaatgcccgccagaccgtaaccgcgaaggttaaaacgaaatacgggctcgaacgcatcgactggcagggtgacaatttgatacgtaacggcggcaaaatcacaccgggtgccgatccggcccaggtggtgattacgcttccagcctggaaaaatggcggttccaacgcgtatacgttaaccgcaacggcctgggataagcacggtaacgcttctgataccgcgcggatgacggtgaacgtaaacggcatggacgtgaccacgctgcagcccagcctgacggcgtctccgtcccgcttaccggcggatggcaccagtcagtcggtattaacattggcgctaaaaaccgcatccggcgaggctgcaaccgggttatcggagcgtcttggcgcatcgatcaccctgaaaaatgccgttacaggcaccgcggcgcctgtcgcaccgcaaataagcgcgtttcgcgaaacgagcagcggcgtatacagcgcaacgcttatcagcggaaccgcgcctgccaccctcaccattcagacgttcatcgacggcaatattaagcttgctaccgcctctgtgactgaagaggcggtgtccgaggttgtggaacttgcatcactcagtccgtcgaccgtaagcgcaccggcagacggcgtaacgccaattgtcgtagtggcaagcgttgtcgatcggtccggcaatcccgtttcggggcaagaggtgaaatggacagcggataacgctgcggttcagctgtctgctgaacgcaccctcaccaatgaacaagggcaggccagcattcagctcattagccgtgacgtggttgcgacgacagtgagtgcgcaactggcggacggtaacccgctctctaccccgacgctaaaatttgttgcggacagcgccagcgcacaggtgagatcggtcaatgtcgataaaacccgcattgttgccaataacagcgacagcgtaacttataccgcgcaggtcgcagataacagcaatcatccgcttgaaggcgtgacggttaactggacggtgaagcgggaagatggcacgaccgcaggaagcaaaacctcggttaccgacgcagccggaaacgccacgttgtcgctgtcgtcagcaaaaacgggcgttgcctgggtttatgctgatgtaaatcagcagaatgcggtgaaagcggaagccgtaacgtttgtcgcagacaccagcacgcagcgtatcgccgccgtggtggccgataagcaacaggccgtggccaacggcagcgacagtattacctggacggcgcaggtgcgcgatctgcagggtaacgccatttcgggcgtagaggttaactggtcggcagataacccagacgttaagctcgccgccagcagtacgcggacggatgcgcagggcaatgcctcgctggtggttacctcgctgaaatcaggcaacgttgtcatcacggctcagaccgctgaaagcgcacccgttcgtgctgacagcgcaaccttcacggccgatctcacgaccgcgaaaataacggagatggccgccgacagcgtgacggcggtggccaatggcaccgacggtatcaccgtgcgcactaccgttgtggatgccaatgacaacccggttgacggagcgaaggttggctgggcggtgagcccttccggcgcgacgttgtccgatacgagcagcgtgacgaatgcatcgggtgaggcgagcgtgaccttacgttctgaaaccgcgggggaatattctcttcaggccacgttcggcagtaacacgttacgcgtgacaaaactgaccttcaccggtgacaccaccacggcaaagctggctaccctcacggcggataaaacgaccggcattgtggctgacagcgataccgtactgttaaccgcaaccgtggtggatagccatcaaaaccctgtaccaggcgttgccgttaactggagcagcagtaatgcggctgatgtgaccctgacgcccgtttcagcaatgaccaatgcgcaagggcaggctgaaacgcgcttctcatcgcgcaaagcgggcaacatgacggttaccgcgacggtgaatggtagcggtcagacgcttactctctccgtgaccggtaatccggcgacagcgcaatttaggagcctgagtgcggataaaaaagaggcggtggctgacgggaacgcgaccatacgctggaccgccaccgtcgaagacgccaaccataacccgcttagcggtgtggatgtggcgtggcgtgtagataacagcagcgtgaagcttgccagcgccagcacaaaaaccaacgaagcgggtcaggcgtttgtaacggcgtcaacgacaacggccggaacggcaacggttagcgcaacagttgtcggttcaacggcggcgataaacgcggagccggtaacatttattggcgatgcgaccaccgccagggttgagagcctcaaggccagttctgaccacgcggtagtcaacaccgaccgcattacttacaccgcagtggtgaaagacgtaaacggtaatgccgtcaaaaatgcgacggtcaactggaacaccacgcttaataccctttcagcgcaaaccagtgtgaccaatggcagcggcgtggcgaccgtgaagctgagtggcccggataccggtacggcaaaggtgagtgcagagagtaataacaccactaaaaccgatcaaacggttgtgtttattgccagctattcagccatgtggagcgtcaccggttcgacaagcgcattcagtacgggcgcaatatttggcttcccttcgcttgggttcgtggcaacgggaagtacgcaggggccgacgtccctggtatggaccgcagaaggttacagcacgcttgtcgtgccgatgaaggatgaacaaggcaatacccgggacgtgaagattcgcgcgcagcgcagatcggattgctccacccgtccgttcaatgtggcggttctgtgtagcagttgggaaaccacaggctatagcgccagccttaagtatgttgaggccgataacccggatctcccgagcggggtttaccgtggggatatcaagtttgccggtaaagactggcattcatcgtggtctctcgattacaccgtgaccaccacgctcaccaaaaactga

SEQ ID NO: 124659 - DNA, 474 bp, Enterobacter cloacae
atgcttactctcctccccttcctgctcatctattttgttctctcatgtttactggtgcgtgaagatattcgctcaggcattctccctgataaatatctctgtcccctgttatgggctggtttgctctatcaactctgtcttcaccctgattttctgcctggcgcagtggtcggggcgatggcagggtatgtcggctttgccatgatctactggggttatcggctaatatttcgccgtgaagggatgggctatggcgatgtgaagtatctttcagcgctcggtgcatggcatggttggtgcgtgttacccgaactggcactggttgccgcactattggcgctgctctaccttcttatgacttcgttgttcaaccctgccagacggacattaaaaaacccactgccttttgggccatttctggcggcagcgggtttatgtgtaggttggcagacgctggttaatcttccactttaa

SEQ ID NO: 124660 - DNA, 369 bp, Enterobacter cloacae
atgtggttgctcgaccagtgggcagaacgccatattcgcgatgcccaaacaaaaggcgaattcgataacctgtccggtagcggtgaaccgctaatactggaagatgattcgcatataccccctgaactacgggctggatatcgcttactgaaaaatgcggggtgtctgcctcccgagcttgaacagcgcaaagaggcgattgagcttactgacctgctaaaagggatacggaaagacgatccccgtcatggagaactaagccggcggttggctctggttgaactcaagctacgacaggcaggaattgcgactgattttctgcatggcgagtatagtgaaagactgatgcagaaaataaacgaggaatag

SEQ ID NO: 124661 - DNA, 1140 bp, Enterobacter cloacae
atggcagggaataggatgacgtccacggagatatggttacggctaatccacacaggttctctgtgtggtgatcagatgctcgcagcggcagcgcgactacttatgcagacaaggattgatgatgccgttgtcagagatgccgggctgtcaacaaaacaggctcaacagttctttgcgcttgatgaaaatgaactgcaacgaaatctggcgtggcttgaacagccggagaaccatctgctgacggcggatgatcctcgttatccccctatacttcgcacgatccctgactaccccggcgcattgtttattaaaggcaatcctgaagtccttaataccgttcaactggcggttgtgggtagccgcgcgccatcctggtacggtgagcgatgggggaaaatcctgtgcgaacaactttcacaaagtggtttcacgatcaccagtgggctggcctgcggtattgacggcgtcgctcaccacgccgcgctgtctgtaaaaggccgaagtgtcgcggtgcttggaaacgggctttttagcatttatccccgtcggcatcaggctctggctgcacggcttatcgaatcagagggggctattgtgtcggagttcccgctgtcagcgccgccctggccggcaaattttccacgtcgtaaccgaatcatcagcggtctgagtctgggcgtgctggtggtggaggccgctttaagaagcggctcactcgttacggcacggtatgccctagaacaggggcgagaagtctttgccttacctggcccgataggtaacccggggtgtgagggcccccactgtctcatcaagcagggagcaacgcctgtgacgagcgtcgaggacatccttgaaaatttgcaatatggcttgcactggttaacagacgaacccgaaaagcgacatttttcatcagatcaggagaaggtggcattgccatttcccagcctcctggctaacgtaggagatgaggtaacacctgttgacgttgtcgctgaacgtgccggccaacctgtgccagtaacggtagcacagctactcgaactggagttagcagggtggatcgcagctgtacccggcggctatgtccgattaaggagggcaagccatgttcgacgtactgatgtatttgtttga

SEQ ID NO: 124662 - DNA, 1365 bp, Enterobacter cloacae
atgccccacgccagccccgacgccctgcaacaacgttgccagcacattgtgacaagcccggtattaaccccggaacagaagcgtcattttctggcgctggaagcggaaaacaatctgccttatccggcacttcctgaggcggctcgtgccgcgctggacaagggatttatctgcgacatgtttgaaggccacgcgccctataaaccccgttatgttctgccggattacgcaacgtttctggctaaaggttcagaatggctggagctggagggggcgaaagatctggatgacgcgctctcgctgttaaccattctctaccatcatgtgccgtcagtaacatcaatgccggtctatctcggtcaccttgatgccttactgcaaccctatgttagaattctaacacaagaagcgatcgatagccgaataaaacgtttctggcgctatctcgacagaacgttgccggacgcctttacgcacgtcaacatcggtccggcagatacccccatcacccgcgccattttgcgtgccgatgcagaattgaagcaggctgcaccgaatctgacgtttatttatgacccggacgtgacgccggacgatctcctgcttgaggtggcaaaaaatatctgtgaatgcagcaaaccgcatatttcccatggcccggtgaatgataaaattttcacaaaaggccgctatggcatcgtgagctgttacaactcgctgccgctggcgggcggcggcagtacgctggtccgcctcaatctgcggacgattgctgaacacagcgcgtcacccgacgatttcttcacgcgtatgttgccgcactactgtcagcagcaaatggccaccattgatgcccgctgcgcgtttctctatcaacaatccggcttctttgagaatagcttcctggtgaaagaggggctgattgatgccgatcgctttgtaccgatgtttggcatgtacggcatggcagaggcggtgaatacgctttgcgaaaaagcgggtatcgacggccgttacggtaagagcgagcaggctaacgcgctgggctatcgcatcagcgagcagctggcggcgtttgtggaaaacacgccggttaaatacggctggaaacagcgtgcgatgctccatgcacagtcgggaataagttcagatgtcggtaccactccgggtgcgcgtctgccgtacggcgacgagccggatcccatcactcatctgctggccgtggcgccgcatcacccgcactactccgccgggatcagcgacattctgacgctggatgagacggtaaaacgcaatccgcaggcggtcgtgcagctgtgcctggggcgtttaaggccggtatgcgggaatttaccgccaacgtag

SEQ ID NO: 124663 - DNA, 783 bp, Enterobacter cloacae
gtgacgcaccgttttgttgatacccactgccactttgattttccgccgtttacgggggacgagacgcagagcattgagcgcgccgctcaggcgggtatccacgcgatgattgtgcctgcaatcgaagtggacagattcgagcgcgtgcttgatctcgcccgccgccatgatgcgctgtacgccgcgctgggtctgcatcctatagtgatagaacaccatctggacgaacatctcgacgtactggatgcggcgctgcaaacccgcgaaaacaaactggtcgcgatgggtgagatcggcctcgatctctatcgcgataatccgcagtttgaacgccagcagacgatccttgatgcccagctcaggctggcaaagcgtcacgatctgccggtgatcctccactcacgacgtacgcacgacaaactggcgatgcacctgaaacgcatcgatctgccgcgaaaaggggtggtgcacggtttctccggtagtctgcagcaggcgcagcgttttattgaactgggctataaggttggcgtgggcggtaccattacctatccccgggccagcaaaacgcgcgacgtaatcgcacagttaccgctgtctgctctgttactggaaacggatgctcctgatatgccgttaaacggttttcaggggcagccgaaccgcccggaacaggcggcacgcgtgtttaccacgctgtgtgaactgcgtgaggagccggaaacggagattgcagatgcgctgctggaaaatacccgcgcgctgtttggcatcacgctatag

SEQ ID NO: 124664 - DNA, 315 bp, Enterobacter cloacae
atgaatgaaaactcagtaatcttaataagtttattttggtttttttttggatcgagtgttgtagctggttttatggatgcatcattatattgctggatttttgcagccataagcgcattgtttcttctttcggtgatacaaacaccaaaggagttaacggtatctattcttcttgcggtacttatggcaagctccgcaggtgttttcattctggcttataaagtcaaaacgaatgtcgtttcaccaatctatctcttaaaaaagcctactgcatacatggctgaaatagataaccgaaggattcatggttactaa

SEQ ID NO: 124665 - DNA, 435 bp, Enterobacter cloacae; identical to SEQ ID NO: 31726

SEQ ID NO: 124666 - DNA, 1347 bp, Enterobacter cloacae; identical to SEQ ID NO: 31725

SEQ ID NO: 124667 - DNA, 1761 bp, Enterobacter cloacae
atgactcaaacgtttatccccggcaaagacgccgccctggaagattccatcgctcgcttccagcagaaactgaccgacctgggctttaatatcgaagaagcctcctggcttaatccagtgcctcacgtctggtccgtgcatattcgcgataaagactgtgcactgtgctttaccaacggtaaaggcgcgacgaaaaaagcggcgctggcttctgcgctgggtgagtattttgaacgtctgtcgaccaactacttcttcgccgatttctggctgggtgaaaccatcgctaatggcccgttcgttcactatcccaatgaaaaatggtttccgctgaccgaagacgatgaactgccggaaggcattctggatgcgcgtctgcgtgcgttctacgatccagaaaatgaactgaccgccagcatgctgatcgatctgcagtcgggtaatgaagagcgtggtatctgcgccctgccgttcacccgtcagtctgatgaacagaccgtgtacatcccgatgaacattgtcggtaacctgtatgtctctaacggcatgtccgccggtaatacccgcaatgaagcgcgtgtgcaggggctgtcagaagtgtttgagcgccacattaaaaaccgcatcattgctgaatccatcagtctgcctgaaattccggccgacgtgctggcgcgctatccgggcgtggtggaatccattgctaagctggaggcagaaggctttcctatctttgcgtatgatggctcgctgggcggtaaatacccggttatctgcgttgtgctgtttaacccaacgaacggcacctgcttcgcctccttcggcgcacatcctgacttcggcgtggcgctggagcgtaccgtcaccgagctgctgcagggccgtagcctgaaagatctcgatgtatttactccaccaacctttgacgacgaagaagtggccgagcataccaacctcgaaacccacttcatcgactccagcggtttgatctcctgggatatgttcaagcaggacgcagactatccattcgtcgactggagctttgccggtacgaccgaagaagagttcgctaccctgatggccatcttcaacgcggaagataaagaagtctacattgctgactacgaacacctgggtgtttacgcctgccgtattctggtgccgggcatgtccgatatctatccggctgaagatctgtggctggcaaacaacagcatgggtgcgcacctgcgtgaaacgctgctggccctgccgggcagcgagtgggaaaaagaggattatctgaacctgatcgcccagctggacgacgaaggccatgatgacttcacgcgcgtacgtgaactgctgggtctggctaccggtaaagacaacggctggtataccctgcgcatcggcgagctgaaagcgatgctggcgctggctggcggcgatctggatcaggccctggcctggaccgagtggaccatggaattcaatcagtcagtgttctctgccgagcgcaccaactactaccgctgcctgcaaaccctcctgcttcttgcgcaggaagaggatcgtgagccactgcagtacctgaatgccttcgtgcgcatgtacggtgccgaggcggtagaagccgccagcgcggccctgagcggcgaagcgccattctacggactgcaggcggtcgacagcgatctgaaagccttccctgcgcatcagtcgctgttgaaggcctatgaaaaactgcagaaagcaaaagccgcttactggtcaaaataa

SEQ ID NO: 124668 - DNA, 528 bp, Enterobacter cloacae
atggctacacgtcgtttaaccactaccgcactggcagtagtgttgtctttaacgtttgctacagcaccggtcatggctaaccctggaaacgggaatggcggtggtggtcacggtaacagtggcggacaaggtaatggcggtaatcacggcaacgggaattccggcaatcatggcaacggaatgtccgatactcatggcaataaaaaaagtggtctggacaatccgggtaaatcgaataaaagcgttagcgatgatgtcgatgctcgcgtgagcttcgatcatgctcgccatctggcagtgaactatggattaacggggtatgaatcgctgcctccgggcatcgctaaaaacctcgcgcgcggcaaaccactgcctccaggtattgcgaagaaaaccgtgccagcctccatgctgggccagctccctaactatcctggctatgaatggcgcgtggtcggtgacgatctggtcctggttgcgctgagtactgcgattgtgacttccattattaatggtgtctttaaataa

SEQ ID NO: 124669 - DNA, 483 bp, Enterobacter cloacae
atgagtcttggatatatcaattctgttgatcttctgatctcacatagtcaaatattgttacgctcccgagattatgatgaaaaaatgagccagtggggaaaaggtaatgtttctcaaggtgcggttctccataacgattatgttatattcgatccattgccagaggatgcgtttggagcaaacgtcaacatcaaactagagaacgttttcaaattggatgaaaatgctcaacgctgcattgttgtgccctttaccgttactgatcaacataaactgcaagtcgcttcagcaactgagaagtttgatttaagcttggatttaaccgataaaatttattcactcttttatgagatttgtgaaggggatgaaatttactataatttcactcttgtaccgacaaaagaagcaattgctgcgaagtttttgctggatgatccttgggggggaataaaagatcgtccactcaaggaaggtattttttaa

SEQ ID NO: 124670 - DNA, 432 bp, Enterobacter cloacae
ttgaaagtaaaatataaagagggtgacatctttgtcattccaatgagtaatgggaagtatgcgctttgccaggttgtttttgctccaaagcaaaagtttaagcaagcaataggtttctgcattttatcaatacaggatacggaggagtttgaagagaaaagttcactaacatctctatcttttgaaaaatttggcaaagtgatgaaggttattttcactggcaaccaaaatattagcaaaggcatttggaaaattattggtcatactaatctcacagaagaaaaaaaacaattaaaaatatttaattatgctggtggtttatatgatggggaggaggaaatcaggcgtttgtctgttgctgaatatcctaattacacaactatgggggtttcaggctttgagcttgtcgacaatgttctgataaatatttga

SEQ ID NO: 124671 - DNA, 207 bp, Enterobacter cloacae
atgctggagaagaatagccacaagtttgtcgccacagatctggatatcaatactcatactttcaccccgagcgggagagaacagtcggtcgtctgcactacggtggaatggctgaccggctaccacgacatcccgtcaggtctgcactacaactttttccggtattatgacccgacagcgggcggtttacgcagcaggatccgatag

SEQ ID NO: 124672 - DNA, 261 bp, Enterobacter cloacae
atgcatatgattgattttgaaattaacatggcagatggcaaagttaagttggataataaagatcttttgatacaaagggaggatgaatttatagtttcagaaccatacaaatatcttgagtcaataaacaaagtgcaaagactaattccttatcattataccgttaatgccgttctttggtttagtaaagaatttgagcttatagtacgtccattatgctttagtaacttaccatttgtggtgcaattaatttataaataa

SEQ ID NO: 124673 - DNA, 498 bp, Enterobacter cloacae
atgtctatgtatgtggataatattactggcgagttttgctttcacaaaaatctggcactcacaccctttataacaaaaaaagaaataatggagagtaattgtttaaattgggagccttggccagacaagggggataaaactgtctcttataggactatctttgacataaaaggaaacaaacagggtgatatctatttaattgttaattttgttcaatgtaatgatataaatgcaattattggtagttggagttttgcccctgcaaagttaatcgatggggagcaaaagaaaccagagggaaaggttacaaaaaggctaagggattggtttaaagaaaaaactaatatcaaccttccgatttatggttcatgggggcatattgatgcgtcatatgactattggaattgttcaggcactattttttgcaattatcgttccagtttcagagatgataaatcctggaaggcttactgtaaatggaatagcattaaactttaa

SEQ ID NO: 124674 - DNA, 789 bp, Enterobacter cloacae
atggccactcataccgtacagactgttgaacccctcctctggcgagcccgtctcaccacgggagactcttcgcttgcggaagccatacgcgaaaagatagcggcaacccgtgcccatctgctggactttatcaaactggatgagccgcatccgcaccacgccatgacactggcacagtggcagcagccggcaaaacgccagtcgctgctggcaacctattctgaccatatctatcgtaatcaaccctcccttacgcgggaaaacaagcccctgctctctctctgggcgcaatggtataacggcctgatggcgcctccgcttatgctggcattgctcacccaagagaccatgctggatctctccccggagtattttcacgttgagttccacgagacggggcgtgcggcctgcttctggatcgatcttcacgaagacccaacggccatgcatctttctgccacgcagcggatggagcggctcgtgacccgcgccctgatgccggtggtgaatgctctggaagagacaggtgagatcaacgggaagcttatctggagtaataccggctatttaatccactggtatttgacggaaatgaagcccctgctcggtgatgagaaggtggatgccctgcgtcagtccttgttctttacgaaacagcttgcggatggccgcgataacccgttattccgtaccgtagtgccgcgtgacgggcttctggtgcgtcgcacctgctgccagcgctatcgcctgccggacgttcagcagtgcggggattgtacgctgaagtag

SEQ ID NO: 124675 - DNA, 1065 bp, Enterobacter cloacae
atgacatcacaatcctggcggtctttggtcaacagcaaatatcaattatcgttacgtttatttttatttttgaacgcaacctcagcggtgttctcggtaacaaatccgctctattctgttcagctgttatctttccccctgctggctatttttacgctcagcaccggattgctgctctggcactggcaaaagagtacccgcaagataaatattcctgtggtttcagcgatattcggtattttatgggcctggcaaatcgcctcaaaattttcgttaattacgcaggatagggcgacatatttgatcatggcgctattgacggtgctttttatcggttcgctggcattcgccattaatatcaaagcgtttacgctccactcattacccgcatttattgtctgcctgtggttaagcccctctgaacactggttgagaatgatctactctttcattcttccggtcgtggctatcggcgttcaccacgtactacaaagacgtaacgatcgcttcgctcaggagctcctctcccggttactggaagaacgagaaaccctgaccgatctcagcatgatggatccgcttaccggcctgtataaccgtcgcggcttgcaaagccgactggagaatctgcccgcggtagaaaacggcgaacactttgtcctgctaatggatatcgatcacttcaaagcctataacgaccactacggccatatgatgggtgaccaggcgttaatccgtgtctcggcagccattcgtgatgccgtacgctcgcgggatattgtggcgcggtttggcggagaagagtttatggtactgctgacgaacatctcgctggaacatgcccgccagacggcagagcgcattcgtcagaaagtgtacgacttaaaaatccctcacatgttcaatgagcgcgtcgcgactaacgtcaccatcagcattggtattgccattttcgagaatgaagacgcagaaggcgcgctggaaaaagcagataaagccctctacgaagcaaagcatcttgggcggaataacattctgctcagcgaagaactacaggcggtttaa

SEQ ID NO: 124676 - DNA, 297 bp, Enterobacter cloacae
gtggaacaaaatagtgtttatgacaacagaagttgggaagagttgagaaatatcgagaggaaggtgttattttccgaagaaatgttatctgatttaggagaaggagttagatttgaactaattgctaagatcaaagagaatttagaatcactgcgcaataattatgaattatataaaagccagcatgataatcaacgagtgaaaatacttgttaaggaaattaaagaaatcgataaaatcataagccatatcattagatattacaataaaggtgacgaacatgagcaaaaagtttag

SEQ ID NO: 124677 - DNA, 444 bp, Enterobacter cloacae
atggtcggtttcaccggtgcatcggtgtcgatggtcacggtccagctgctgctgctcgactcattgcccatcgggtctttcgccgtggcggtgaaggtgtggtccccgcggcccaggtccacgctcggcgtgaagctccaggtgccgtccgcgcccgcggtggtggtgcccagcacgttgctgccgtccatgatggtcacggtgctgcccgccttcgccgtgccgctgatttgcggacgggtgtcgtcggtgagcgcgccctgcgacaggctgccggtcacgctgccggtgtcgtcggtcacggcggtgatttccaccttgcccgggaccacgtcaacggtgatgaccacgtgcgagccttccggcccggtgttgcccgacggatcggtgacggtggtggtcaggtcgtgtgcgccgttcgccagcggctggtccggggtgtag

SEQ ID NO: 124678 - DNA, 474 bp, Enterobacter cloacae
atgaactattggtttagccctgcaaataatgctttttaccccgtagctttaaaggagtcttatgtaaatgcaggtagtcttcctaatgatttaatcgaagtggaggatagtgtttttagcgaattttccgcgacgccaccagaagggaaattgcgtggcattggatctgatggttttccgatctggattgatattcccattgtggaagaaagcccggaacaaatccaggcacgcgcccgtgctttgcgggatgaattcatcgtcagtacagatcgaatgcttgtttctgattacactatcaacaatgttttattaacctctgagcagcaagcggaacttttggatgtaaggcaaaagtttaaagtttggcctgagagtgagggatggccggacatagcgttgcctgcgatacctcaatggattctcattgaggcagtaaacaacggttacgtagtaaaaaattggcctgagtga

SEQ ID NO: 124679 - DNA, 321 bp, Enterobacter cloacae
atggaggcggccatcgcccagatcggtgctaatggctggctatatattcccgtttctggcggcaaaaaaatgctgctgcagtgggggcttttaaccggtgcgagtaattattcttttaaattcccaattgcatttcccgtaggtggtttatgcctggttgcaatggcccatacaactgattccgctgatgtgagcatggtaactatgactaatggatttatcagggataaaaccagcgcgtttgctttgtgcgccagaacagtgaacggggtgcagcaaccttttgaacgtagcgtttactggttcgctgttggctactga

SEQ ID NO: 124680 - DNA, 1176 bp, Enterobacter cloacae
gtgcctttacagacagtctgccagaaatttttctccgcgtctttaccggacgttcacagcttccggattaatgtccttgtttccatggccgttgccctcacgcacggtgcggatctgaccctgaccagtcttggtcgcactcttcccggcagggcgcacgtcaaaaataaaattaaacgtgttgaccgtgccctgggtaataccgcccttcaccgggatattccccgtattcagcacctgctcacacataccatcacctccctgatgcccttctgtgtaattgctgtcgactggaccggctggcatgacaggaactggcatctgctgcgggcaagtctggtctgtaatggtcgctcactgccgcttatgagtgaggttgtccccgcagagctggcgcagaacagcgatgtacagtgccgcttccttgaccgcctgcatgatgccatcccgaaagataaagccgtcaccatcattacggatgcaggcttccggacagactggttccggcatgtcagccagctgggctggagcttcaccggcagggtcaggggctgcatcagcttccggctggacggagataaaaagtggatgaaaatcagtgagcttgaggctaccggacaaccggtctgcgtgggttacggtgtcctgtcccgtaaaccacgaacgccctgttacggccggttctatctgcataagcgccctgacgcagggcgtcagggaaaaggggggatgccgaaaacacagcgggaacaccgcagtagcgcgcgggagccctggctgctgttcagtaatgcagagggactggagccgcaccagataatggccctgtacagccgcagaatgcagatagaacagaacttccgggacgacaaaagtccacgcttcgggttcggtctgaggctgagccggagtcagggaaaagggcgactggaagtgctgaatatggtcgcggcaatggcaagcctggtgatgtggctggcaggttacagggcagaaaggcagtgtttacactggcactatcaggcaagcagcatcaggcacagacgggttctgtcatacctgagtctggcagaagaagtcatccggcatgagcccgggaaagtgagacggctgaatatagttaacgagatgaaaaagctgggaaaagagtacagtaatatggtcatggtggcatga

SEQ ID NO: 124681 - DNA, 171 bp, Enterobacter cloacae
atggaatttaaagatattgacgaaagggggagaaagattttgtatgatattaaattcaaactctggcctgccgttatactatcaaaatatatatcttggtttgcttgggcgacagaaaaacaagtcgttcaatactatattgagaaacgcctatgttttgatcctttttga

SEQ ID NO: 124682 - DNA, 378 bp, Enterobacter cloacae
atggacgaacagtggggatacgtcggggctaaatcgcgccagcgctggctgttttacgcgtatgacaggctccggaagacggttgttgcgcacgtattcggtgaacgcacgatggcgacgctggggcgtcttatgagcctgctgtcaccctttgacgtggtgatatggatgacggatggctggccgctgtatgaatcccgcctgaagggaaagctgcacgtaatcagcaagcgatatacgcagcgaattgagcggcataacctgaatctgaggcagcacctggcacggctgggacggaagtcgctgtcgttctcaaaatcggtggagctgcatgacaaagtcatcgggcattatctgaacataaaacactatcaataa

SEQ ID NO: 124683 - DNA, 216 bp, Enterobacter cloacae; identical to SEQ ID NO: 10294

SEQ ID NO: 124684 - DNA, 618 bp, Enterobacter cloacae
atgacaacccagtatggattttttattgactccagccgttgcaccgggtgcaaaacctgcgagctggcctgcaaggattacaaagacctgaccccggacgtcagcttccgccggatctacgaatatgcgggcggcgactggcaggaggataacggcgtctggcatcagaacgtctttgcctattacctgtcgattgcctgtaaccactgtgaagatccggcctgcaccaaagtgtgcccgagcggggcgatgcacaagcgcgacgacgggtttgtggtagtgaatgaagacgtctgcattggctgccgctactgccatatggcctgtccgtacggtgcgccgcagtacaacgccgccaaaggccacatgaccaagtgcgacggctgccatgaccgcgtcgcagagggcaaaaagccgatttgcgtggagtcctgtccgctgcgggcgctggacttcggcccgattgacgagctgcgtaaaaaacacggccagcttgcggccgtcgcgccgctgccgtccgcgcacttcacgaagccaagcattgtgattaaacctaacgccaacagccgcccgacgggagataccaccggctatctggcaaacccgaaggaggtgtga

SEQ ID NO: 124685 - DNA, 576 bp, Enterobacter cloacae
atgcgatatctgagcaaggatgaacggcgggaagcaatcttacaggccgccatgcgcgtggcgctcgccgaggggctggcggcgatgacggtgcggcgcattgcgactgaagcgggcgtcgctaccgggcaggtgcatcaccactttgcctccggcggtgagttgaaatcgctggcattcgttcgcctgatccgcgaactattagatgccgacgtagcggatgaacgtgccacctggcgggaacggttgcacagcatgctcggcagcgacgacggtaagtttgagccttatatccgcctgtggcgggaagcgcaaattctcgccagccgggatcccgagatcaaagcggcttatgtcctgaccatggagatgtggcatcacgagacggtggttattatccgtgccggggcggaagcaagggcattcacactcaccgatcgggcggaaaatattgcctggcgtttgatagggctggtttgcggcctggatgggatcaccgtattaaatatgccggaaatggacgatgcggcgctaaataaacatctcgacaaacttatcacgctggaattgttttaa

SEQ ID NO: 124686 - DNA, 441 bp, Enterobacter cloacae
atgcacctgttcaaaggacgctgcttatgcggaatgagtcagttcagcgtgagcctcaaccattttgatgtatatgcctgtcactgtacgcaatgccagaagtggtcaggcggcattgccatgtatcttgagacgcagggcgagccgcttgtggagcaagattccattgctccttctcatttcgcctcatccgcacgcggagaacgctggttttgtccaggctgcggctgcccgctgtggttcaaactgaccgcaacggcgcgctattttattccctggacgctgcttgagatgagcgaagatgaacgacgccggctggtacttgcagcagaaatctatactgaaacccaacccgcgttttttggcctgaccgggcaatacgcacgctacagcggttcggaaattgaagcacgagatgaacactgcctgctaacgccctaa

SEQ ID NO: 124687 - DNA, 324 bp, Enterobacter cloacae
atgctgagacaatttaatgtttaccggaatacctctacaacaaccagggataagctgccttactatatgctcattcaggatgattattatgatgatcttgccacgcgcgtaattgtgccacttgcgagagtgaataaattaccgttatggcagagccagctggcaccagccgtaaatatcgattttgaaacgtttctaatttattcacccatgataaccaaccttaacaacaataaaattaaccccaaagattttgtttgtaatttacgtaacacacgtcatgatgttatagccgcaattgatcgtttattgactaatacatga

SEQ ID NO: 124688 - DNA, 189 bp, Enterobacter cloacae
atgaaacacacagttgaccacaccctctcgcgaagcattaaaccaacagtaccgtcgagccatacctcaccagactccgttgcgccgtgtcagtcatcagatgcggatctttcattcattcactcaatgaatgaatttgtggaaaaacatggaaccattactgatgatgagtttttcagggtgctttaa

SEQ ID NO: 124689 - DNA, 1482 bp, Enterobacter cloacae
atggcgaattggccctggcgagtcagcgagcatctgatggtgcttgttaagaaaatagcgatggtggtggggatcgtactggtcgtcctgctggcagtgcgggtctatctctcgcagcaggggcctgaactgcatctctggcatacctggcgggcagatgagatgtccgtacgcgagctcgatggcgccgactttgccgggtatgttgcccgcgaaaatgccattttcgccgatcttaataccgcggtgacggcaaaaacagagcatgaggaacaaacgccgctaaaccgctattaccgccagagcctggtctggccgggtcagttttcaccggatgccaaccgctcttttgtactcatgccagccggaaagccgcgcggcgcggtggtgttgctccatggactgacggattcaccctatagcgtcagacatcttgctcagaattatcaggcccacggctttgtggccgtggttccgcgcctgcccggacacggcaccgcgcctggcgcgctgacggacgttgactgggagatgtggctggcggcgacgcgccttgccgttcgggaagcgacgcgtctggcgggagaaaatgtgcccctgcatctggtgggctattccaacggcggggcgctggcgatgaaatatgccctcgatgcacttgacgcgccatcgctgcgtaagccgcagcagctggtgctgctgtcgccgatgatcggcgtgacggcattcgcgcgattcgccggtttcgccgggttaccggcgctgctcccggcgttcgccaaagcggcgtggctgaatatttccccggaatataacccgtataaatacaactcgttcccggtgaacgccgcccgccagtcgtggctgttgacgaaggcgctgcaggagcagattggccgggaggcgcgggaaaacaggctggcaacgctgccgccggttttggcattccagtcggtgatggattccaccgtcagcacccgcgcggtggtgagcggcttgtttgatcagcttccggcaaatggcagcgagctggtggtatttgatatcaaccaggcggcgagcttccgtccgctgttcaagccctcgtcctggacggccacctcagcgctgctgcctactgttgaacgacgttacactgtcacggttattaccaatgcgaatgaacacagtttctcaacggtagcgaaaatcaccccggcaggaagcactcacgagacggtcgtgccgcttgggcagtcctggccgcaggatgtctattccctgtcgcacgttgcggtgccgttcccgccgaatgacgatctctatggccgggagcctgacgtgaaaaaccgctacggcattagcctggggacgatagcgctctggggggaaacctctgtattgagtgtcgggaaagaggcgcttatgcgggtcacctcaaacccgttctacggctacatggaggagaggatcaacagccgaatcggggatgagaaaaagtaa

SEQ ID NO: 124690 - DNA, 891 bp, Enterobacter cloacae
atggaaaaaatctgggtactgggtgatgcggtggtggatctgctgcctgatggagaaggaagattgctgcaatgtccgggtggcgccccggcaaacgttgcggtcggtattgcccgcctgggggggcgtagcgcgtttattggcagagttggagatgatcctttcgggcgctttatggctcacacactggctgacgagcgggtcgatgtgcagtggatgcgccttgacccggcacaccgcacctcaacggtggtggtcgatctcgacgaacagggcgaacgttcgtttacctttatggtgcgcccgagcgccgatctgtttctggaacctgccgatctgcctaccttcagccagggtgaatggctgcacgtctgctccatcgcgctaagcgctgaacccagccgcagtgcggcctttcaggcgatggatgccatcaggaaggcgggcggttacgtcagttttgaccccaatatacgcccggatctctggccggatgaaaccgcacttcgtcgcagccttgaagaggcgctgcaacgtgctgatgtggtgaaactctccgtcgaggaactggcatttttaaccggtgaggagcaggtgcacgccggtctggctgcactcatgcgccgctgtccggcgcggcgggtgctcgtcacgcagggtaaagagggcgttattgcctggcatgaaggcaccgtgaaccactatccggcaaccccggttaagtgtgtagataccaccggcgcgggggatgccttcgtcgccggtctgctctacgggctggccgccggtcttgaactggttcccgccatcgccttagcccagcgctgcggcgcgctagccaccaccgcgaaaggggcgatgaccgccttgccctggcagcacgagctgtaa

SEQ ID NO: 124691 - DNA, 1407 bp, Enterobacter cloacae
atgacgttaccttcccgctggcctgcgattctgcaggccgttatgaaagggcagccgcgcgcgcaggctgacagccattatccgcaatggcacgccgcgccggtgacggggctgatgaacgatcccaacgggtttatctggtttgccggtcgctaccatctgttctatcagtggaatccgctggactgtgagcatcgttttaaatgctgggggcactggagttctgcggacctggttcactggcagcatgagccgctggcgctgatgcccgacgaagagtatgaccgcaacggctgctactccggtagcgccgtggataaccagggcgtgctgacgctgtgctataccggcaacgtgaagttcgatgacggcagccgtaccgcctggcagtgcctggccgaggaacagccggacggcacctttaaaaagcaggggccggtgctggcgctgccggagggctacaccggtcatgtgcgtgacccgaaagtgtggcaacacgacgggctgtggtacatggtgctgggcgcgcaggatctgcaaaagcgcggcaaagtgctgctgtttaaatccgctgatttacatgcctgggcttcctgcggtgaaatcgctggtcacggggtcaacggcctgaaggacgcaggttatatgtgggagtgcccggacctgttcgcgctcgacggtacgcacgtgttgatttgctgtccgcaggggctggcgcgcgagccgtatcgctatctcaacacctatccggccgcctggatgagtggggcgtttagctatgaacgcggcacgtttgcgcacggcgagctgcacgagcttgacgcgggctttgagttttacgccccgcaaacgacgctggcggaagatggacgacgcattctgattggctggatgggcgtaccggacggggaagagatgcttcagccgacgcggtcgcacggctggatgcaccagatgacctgcccgcgcgaattgcagtatcgcgacggcaagctctggcagactccggtgcgtgagctggcggcgctgcgtgaagaggagcagtactggcagggacgtgccagcgatgcgcccgttctggatgccgcgcgactggagtttgagttaagcgcctcgcaggtgaacgtcgattttgcgggcgcgctgcgcctcacggttgatgagcagggcgtgcggctggaacgcgcgagcctgaaaaccggtgagacgttgacccgctactggcagggggacgtccaccatttacgcgtcctgtgcgaccgctccagcgttgaaattttcatcaatcatggcgaaggggtgatgagcagccgctattttcctgaccatccggcctgggtgcgcttcgaaggtgcgtccgatatcacattacgctactggtcgctgcgcgcctgcatgatagaatga

SEQ ID NO: 124692 - DNA, 369 bp, Enterobacter cloacae
atgcgcaaccgtcagctcctcggaaaatggcttttgatcgttacctgtctcgcgatggcgctttgcctcgtgcagcgtgcggtcatgctcaaccattttttacagggactggagccgcagatcgccctgagtgcagacgccccgtcgcaaagcaacgccggggagtcagggccatcgccctgtcagctaggcgcgcactccctgctttgcgcgcagccgctgttcttcgacggcgcgctacctgccattattatcttcttcgcgctgctgcagctgtttacgcaagggcgggcatttgcgcccgtggaacagcccgttcaggcaccgcctccccgaatacaccttaaaaactgcgttttccgtgaatga

SEQ ID NO: 124693 - DNA, 2025 bp, Enterobacter cloacae
atggttaacctcttcaggggattcgtcttcctgtggctgtcctgcatcggcattgtccatgcggcggacaccggctggctggtctccccacaaaacgatcacgcccgcatccgctttcaggcgggaagggaacaaacgcacattaaaggcctgctcaccgttgagctaaagcccggctggaaaacctactggcggtcgccgggcgagggtggcgtcgcgccaaaaatcgcctggccgcagggcgttacggatagctggtcctggccggtaccgtcgcgattcgatatctccggtatgaccacgcagggctatcacgataaggtcacgatccccattgtgctcgacggcgtgaagggcgacacgctcgacggcacactcacgctctccacgtgcagtaacgtttgtctgctgacggactacccgctgcacctcgattttacacagccggtggatgacggtttccgtcacgcctttgaccgcgcgatgcaggccgtgccgggcacgtctggcgtttccgccgatctgtccgcctggctctctgacggcaacctggtggtgacgggaacgaccgacgggaaatgggataatccggggatctactttgacccgctggagggggatattctgcccggcgagccggccattaagcacgatggcaatacgcttcgggtcacggtgcccgtcaccgacgaatggggcgataagcccacgtcgctggaaggaaagaggctgtcatttgtactgaccaatggcagtgacgcacagcaaaccacgatgaccgttggcgctacgcccgccgagccttccgccccaggcgggacgggcaaaatggtgctctttgccctgctgggcgggctgatcctcaacctgatgccgtgcgtgctgccggtgatgggaatgaagcttaacagtattctgcaggcgggttcggacagacgcgtcatcaggctgcgcttcctggcaaccagcgccgggatcctcacctcctttatgctgctggccgccatggtgaccgggctgaagctggccggggcgtccctgggctggggcattcagttccagaacccgtggtttatcgggctgatggttaccgtgaccttcctctttgcgctgaacctgtttggaacgtttgagatgctgctgccttctgccgctaccgggcgactggctacggcaggcggggcggggcttggcggcagtttctgcgaagggatgtttgctacgctgctagccacgccgtgctccgcaccgttcctcggtaccgcagttgcctttgcccttggcgcgccgctgcacgccctgtggctcatcttcctgatgctcggcgtgggcatgagcctgccgtggctgtttgtcgccctggtgcccaaaacggccatgctgctgccgaagcctggccgctggatgaacacgcttaaagcgatcctgggcctgatgatgctggcctccagcctctggctggcgacgctgctgagcctgcatctgggggcaatggtgagtcagatcgtggtgctggtgctgattgttgtcgcgctggtgctgttcgcgttgaaggggcaaacctcctcgccgttgttctggatcgtggtcatcgcgctgtcggcgtttggcgggtatcagctgcgcggagtgtttacctcgccgccggacgctccggcgcaacatatcgctgagaccatcccgtggcagccactgagtgaagacgccatccagcaggcgctttctcaggggaaacgggtgtttgtggatatttcggcggactggtgtgtgacctgcaaagttaacgagcatcgggtcctgaatcagccagacatcattgccgcgctgagtcagccggacgtagtggcgctgcgcggtgactggagccagccgtccgcctttatcgcggattttctggcgaagcgaaaccgctacgccattccgtttaatgcggtgtatggcccaggtctgcccgagggcgaaatcctctcaccgctgctggataaacgcaccctggtcaccaccctgaacaatgcaaaaggctaa

SEQ ID NO: 124694 - DNA, 1452 bp, Enterobacter cloacae
atgaaaaacagtgggaacatctttagttggcttgaagtttcggcgcagcatgttctggaaagggaacaagagaaaaaatatatcgatcagttgagattaataaacaagcggagtggaattaaaaaaattctgcgttacccgtcctatgaacatgtttgccttccgtaccagcctcctcataacaggtcacgtctggaagaacagctcatcgccgaaacttcactgtatgctacgcctggtgctttggaatgcggatatgcacagaatataaactggaccgcagacggcattttaaatgaagagatttacaaatggattggttggtacacgcgtatcagattagagcttgccgggacatgtgttgagatcggtaagaacaatgcattcaaaatgcgagatttttaccagtgcatcgagtcctcagaaaaagcgactatatcgtttatcctcggcggttttttttgctttcaatcggcaacttactggctcaggtccagaaatgaagagataaatcttttcattcacgccggactagctatgaaggcatcattggaattccccccaaaaaaaaccaagagaaaaatgcctgattacctggttgggaccgataaggatgagtggcatatttttgaaagcaaagggggcgaacataccagtcgctggcaaaggatagaagagggggttgtacaactaggtagcgttactcatattgtctgtaacgctaaccctcctcaaaaattcagtaccttcgtttgtacacatacctcgattgatgcaggcgatgatattgtcatcaacgttgttgatccagccccagagaaaccagaatctattattatcaaccgcgatgtttgccttcttcttacgaaactaacgttaatcagtcttttcgatacgctgtctgccattaaaacaagccgtatacaaaagataccaggaatggatgactgggtatttgtgcacgcgtcagaatatgacaacattaactttggcattccagaaatgtgcttaggttataagagaaaattaaagttaagacttgggatataccttctgataaaggagataatcgatcttaatcttgccaaagataagatcggtgtaagtatcgcagaacttaaagaaaaactcactgcatcactttcttctccagtaaaacttcgcagagtaatcggtgtcctgagtccctttatgcgccggaaaatatcccatgaaaattacggtgattactttaatgcattatcggaatatctggcacttccaaaactaacagtaaaaattctggaggaagaaaagcggcttgttaatgatttaccgggaatcataaagaagcaccgttcaccatggggtggactcactcgcaaggctccattgccgggcaatgacgatccttgggcgctggcgcacagcaataaacagaaaaagctgcggatgaaacacaaaaaccgctaa

SEQ ID NO: 124695 - DNA, 1788 bp, Enterobacter cloacae
atggaattcaggacatttcaaaagcagtggggtgctgagtttatttccgatgacgttgtacgttttcgcgtctgggcagaaggacagaaagcgctgacgctacgtctggccgtcaccgacgtgccgatgacggcagtgggtaacggttggtttcaggcagacgttccgggcgttacgcacggcacagagtatcagtttgtcctgcaggacggcatgacggtgcccgatcccgcgtctcgcgcacaggcgagagacgttaacggcccctccatcgttatcgatccccgacgttatcagccggttaaccgggactggtcagggcggccgtgggaagagacggttatctatgaactgcacatcggcacgtttaccccggaggggaccttccgggccgccattgaaaaactcccttatctggcagaactgggtataacccagcttgaagttatgccagtgtctcagtttggcggatcccgcggctgggggtacgacggtgtgttgctttatgctccgcacgccgcatacggtacgccagaggatttccacgcgttaatcgatgccgcgcacggtcttgggctttccgtggtgctggatatcgtactcaaccacttcggcccggaaggcaactatctcccgttgctgtcgcctgcctttttcgatgcagagcggatgacgccctggggcaacgggatcgcctacgagcgcgagccggtaagacattacattaccgatgcgccgctctactggctgaccgagtaccgcctggacggcctgcgttttgatgccatcgaccagattaaagacagctcgaagacgcatattctccaggaaattgcagagaagatccgtgaggcgatcccgaaccgtcatgttcacctgaccacggaagacagccgcaacgtcattttcctgcatccgcatgatgagcacggcaatacgccgctgtttaccgctgagtggaatgatgatttccacaacgcggctcacgtgtttgccaccggtgagacgcacgcgtactaccaggattttgcgtttgaaccagagaaaaaattcgcccgggcgctggcagaagggtttgtctaccagggcgaggtttcgctgcaaaccggccagtcccgcggggtggagtgtcacacacagccaccgcagttcttcgttgattttattcagaaccacgatcagaccgggaatcgcgcccagggtgagcggcttatcaccctcgcgggcgccaataaaacccgtgtgctgcttgctgcactgctgctttccccccatatcccgctgctgtttatgggcgaggagtttggtgaatcacatccgttcatgttcttcaccgattttcacggcgatctggccgacgcggtgcgggaagggcgcgcaaaagagtttactggccatgccgggcacgatgacgctgtcccggacccgaatgacgtgaacacctttgtccgctcaaagcttgactggaataaaattgccaccgacgacggcaaaacgtggctccgcttcacgcgccatctgcttacgctgcgtcatcgatatatcgttccgcttttgcatgagggaagtcgcgtcgagggcaaggtgatcgggacggcgcccgggatggtggccgtaagctggcgcttcccgtccggaacgctttcgctggcgctcaatatcggcactaaatctgtcaaaccgcccgctctttcgggggagacacgtttcgcctggccggaggtaaccgacattttgccgccgaacagtattgtcgttcgatttgctgatggagaagcatcgttatga

SEQ ID NO: 124696 - DNA, 2469 bp, Enterobacter cloacae
atgatcccttccgccacgtaccgtatacagttccgtaatggcatgaccttcgatcgcgttgtcgcgctggtaccctatctgaaagacctcggcatcagccacctttatgcctccccggtgtttactgccacaacggattccacgcacggctatgacgtcaccaacccgaatgaaatagaccctgcgatcggcggacgcgaaggtttcgaccgcatgtccgcggcgcttaagcaggccggcatggggctgatactggatattgtccctaaccatatgtcgacttctctggaaaacacctggtggcgggacgtgattgagtacggacagcagagccgctatttccgctatttcgatatcgacgggtctcgcccgctgacgctgccgtttctcggggacacctttgaggcggagctggagaagggggccattactttaaaacgtgaccctgtcacaaacaaagccgctctgatctattacgacaccgcatatccgctcaacccgggcacgttcagcgaggataagagccttgcggaactgcacgaagcacaaagctggcgattgatgtcctggcgggaagcgccgaaacagctttcgtggcgacgtttctttgagattaccggtctggtgggcgtgcgggttgaagatgacgcggtattcgacgatacgcatcgcctcatccttgaactggttcacgcgggtgtggtggacggtctgcggatcgaccatatcgacggtctggccgatccgctgggctatctgcagcgcctgcggcaggcaaccggaccggactgttatatcacggtcgagaaaattctcgctaaaggagaacagcttcccgccgagtgtcccgtctccggtactaccgggtacgaatttatcgcttcgctggcggaagtgctggtcgacgacgataacctgtcgcgtctggaaaaaattcacgacgagacgctgggggtaacggtcgatcgccacgcggaactgcgcgatgcgaaaggcctgatgaccgatcgtaattttgagggcgagttcaccacgctgcttaatcttgcagacgatctggcccgccgcaatgacgttgcgcttcagcgcgatgatattcgccacgcgttacgcgagttgcttatcgcctttccggtgtaccgcacctacggcacccgggaggggttaaccccgccagatgtcgcgctgcttaaccgcgtggtcgccagcgtagagacatccgaagccgccctgagcctgatagtccgcattcttaccggcgatttgccggaagagtgccgcgagtccgccgcgcttttcagaacccgctttcagcagttgaccgggccgctgatggcgaagtccgttgaagacacgctgttctttcgtcataacctggagctggcgcttaatgaagtgggcgccgacccgacgccgcgcgcgttctcgctatcccgctttcatcaggagatgcgcattcgtctggcccgtcagcccgatgcgctgctgggcacctccacgcacgataccaagcgcggggaagatgcacgggcccggctttacaccctgacggaagccccggaacagtggggcgaaaatctggcccgctggcgccagatgaaccagacccaggtgcggtttctcaatgacggtaccgcgccaaacgccgccgacacgtggatgatctatcaggcgctggcaggcgtctggcccgccacgctgtcgccggacgacaccgacgggcttgcctcgctggaggcgcgttttatcgctttcctcgaaaaagcgctgcgcgaggcgaaacagcgcaccgactggatcgacagcaacgagagctatgagagcgtggtgctgcgctatgcccggcacctgctttcaccggacaacacgctgtttctgcatgatttcagcgagtccatgcggccctttatccgcgccggactgatgaacagcctcagccagacggtgattaagctgacggcgcccggcgtgccggatatctatcagggcagcgaggcgcttaacgttagccttgtcgatccggataaccgccgcgagccggactttccgacgctggtgcaaaacctcagcgtggcgaatgccggtatgtttgaaaacccggcgtgctggcaggacggaagggtgaagcagtttgtcaccgctacgctcctgcgcctgcggccacactatcccgggctgtttcgctatggcgactggctgccgcttaaagtgtccggcgagcgggaggagcatctgattgtctatgcgcgagtgaaagacggcgaggtgctgattgttgccgtgccgcgactggtttttggcgtcaccgataaccgcacgctgtggggcaataccacggtggcgatacccgaggcgctggcaggaaaacgctatcgggatctgttcagcggtgaaagccgcatgctgcaagagacgctggatttaacgtcggaaaagggatgtgtactggttctgcttacctgcgaataa

SEQ ID NO: 124697 - DNA, 987 bp, Enterobacter cloacae
atgatgacgcttatcaccattaaccgcgtgtactacctgattggcttcgtcgtgatgttgctggtggtcatgaccctgcgcgatcgcgcgaatccgaagcgtttcaccaccgcgcttttctggtttttattcggcgggattttcctgttcggtgatctgatggttcaggagctcggcaaatcgctggcgtaccggatcatcggcggcagcgttatcgttatcgcgctgctggcgggctttggtctcgtcggaaaggggcactacaaaatggcctccgatgaggaacgggttgcctcgtcaaaccggctcaaaaactggctgttcctgcctgcgctgatgatccccgtggtgacggttatcgggacgctgttcctgaagggcgtgtcgattggcggcgtttatcttctcgaccagaaacagctcacccttgcggcgctgtgcgtggcctgcgtcgcggcgatcctcaccggctggtggctgacgaagggcacgccgctgcacgcgattcgccagtctcgccgccttgtcgataccatcggctgggcggtgatcctgccgcagatgctggccatgctgggtggggtattcgtggcggccaataccggtgactccgtgcaaaaggtagtgagcctgtttgtgaacccggataaccgcttcatgctggtggtgatttactgcgtggggatggcgctgtttaccatgatcatgggtaacgcctttgccgctttcccggtattgagtgccggtatcgccttgccgttcctgattaacgtgcatcacggtaacccggcaccgctgctggcgattggtatgtacgcagggtattgcggcacgctgatgacgccgatggccgcgaacttcaatatcgtgcccgccgcgctgctggagctgaaagacaaatatcaggtgatcaagatccagatcccgaccgcgttaaccttgctggtggtgaacgtgttcttaatgtatttcctcgtttttcgctaa

SEQ ID NO: 124698 - DNA, 489 bp, Enterobacter cloacae
atgttttcccgtcgtttctctggaaacagagatctgttttactatcgcgaagtgtatgataatcggccatataaccatggagagttaagggttaatatggctgttatacctttgttaccaaaagaaggaatcgctcttgtattggcaaacatgaggattgcaagagcgcatggtatgagcagggatatggctatccctacaacctatatttggttttatcaaaaagtgagaaataaggggccgtgggattacaagcaaggacaccctgacctggcaaactttggtaacttcaattatggttcggctggctatgccgccgggataccatcagaaatattattaatgggtgcaggatgggcgcaggaaagggctaaaacatccaaaaataaatgggggcactggtatcaaaaacccccttatggggatgatcctcatgatcagttctggataaagcaaggaattgaatatgcaaagaaatccggttattaa

SEQ ID NO: 124699 - DNA, 435 bp, Enterobacter cloacae
atgcaaagaaatccggttattaaacggcttcattgcttactcacaacgactctaatactcgttgtttgtgggtttctgacgtaccagtactatttcaatgcacctcctcacgatagttttgtcagcaaacagaagctatctgagaccgtcacactgtacataacaaagtatgatgatggaggagcgaccgtgtcagatgtttaccgcttctatttagataaagataacagcggaaacattatgaaagaccttgaagaccgatcaccattcctggaagccaatacaagcaatgttacagcttcagcttatggaaacacggtaaatgtaaaaatcacgggtaaggtttattcattcactaattctgatctgttctatgcagatggtgtagcgatcatgcctgtcattaacctgatagccaatggaacaagagattaa

SEQ ID NO: 124700 - DNA, 486 bp, Enterobacter cloacae
atggctgtaccagttcacctctttttgaaagacgacggcggagcaatgatccgtggcggttctgatgttgcaaaccgtgaaggaagcatagagcttaaagatctgatccataacttgagcataccaacagatggagcaacaggtaaactcacaggtacaaggcaacactccgctttcagtttaacaaaatcaattgattcatcttcaccctatctatacaaagctgtagcaactggtcagacgcttcaaagtgctgaattaaagttctatcacatcaataatgcgggtcaggaagtggaatatttcaacatccttatggaaggtgtgaaagtcatttctataacgccaataatgcacgatacaagagattgccccggtaccggtcacatggaaaatgtatctttgcgatatgcaaaaatcacatggaaaattctggacggaaatattcagtatactgatgcctggaacgaacgacctacagcgtag

SEQ ID NO: 124701 - DNA, 1407 bp, Enterobacter cloacae
atgacgctattttcaaacctgcccggcgatgaaggtttatccgggcatgagcgcgcccgggtcctggccgccgtgatgaccaccacgctgatgggggtctttgacggaacgatgatcaacatcgcgctcccctccatggcaagcgcaatgcaggttcctgccaatgttgctgtctggttcgccaacggttatctgctgtcagcggccatgaccctcgccatctttgccgcgctggcggcgcgcgtgggctatcgcccggtgtttctggccggacttgccacctttacgcttacctctctcggctgcgcgctggcgaagaccccggatgtgctgatcggaatgcgtattctgcagggcatcggcggcgcggccaccctgagcatcgccccggcaatcctgcgatccgttttccccggcagactgcttggccgcgttctggggctgcacgccctgcttatcgcctccagcacggccatagcaccggtgctgggcggaacgatactgaacgcgctgagctggcagtggctgttcgccattaaccttattccaggctgcatcgccctgctgctggcatggcgcgctttaccgaaggaatcagcgggtgataaatcctcctttgatgcgccaggcgcagtgctctccgcaacatttctgggagccacggtcatgacggccaacagtcttcagcgcgtcacgcagcacattaatcacgaagccatcggctggggacttttcgcgctgatgagcgccctcgcctttatctggcggattcggcgggcaagtcaccctttattgccgcccgtcatattcaaaaacggacgctttaccctcgctgcgctaacctcgctggcctcgtttgtgagccagggcatcacctttgtcgcgctgccgttcctgtttcagagcgtttatggctacagtccggtggtttctgcgctgctctttaccccgtggccgataggtattgtgctaattgcgccgcacgcggggcgttgggctgatacgatttccgcgccgctgatttcgaccctcgggcttatgatatttgtcggtgggttggttctgctggcgaccctgcctgaaagcccatccgtatggaacatctgcctgcgcagcctggtttgcgggatagggtttggctgcttccagagccccaataaccgggaaatgctcgctaacgtggcgcgggactatgccagctatgcctccggcgtgttgtctatcgtcaggacattcggccagtgtctcggcgccgctacggtgggcgtgctgctggcggcaacaaccggccaaacccttgatgaccggatcgtgcatgttgcgctgtggatcgccgtcatagcctcgacgggcgccgtgttgtttagcgcgagcaggctacgccctgcggttcgggcatccgcctga

SEQ ID NO: 124702 - DNA, 906 bp, Enterobacter cloacae
gtgaccgatcctgactttaatctgcttgtcgcgctcgatgtcctgctggccgaagccagcgtggcgggcgcggcgcgacgcttaaacctgagcacctccgccatgagccgaaccctgagcaggctgcgggaggtcaccggcgatcctattctggttcgggcgggtcgtcagatggtgctgaccccctgggcggaagccacacgggatcgcgcccgcaacgccgtacacgaggcgagggcggtgctccagccctccagcgatacgctgaaggtcgagaatctggcgcgcctgttcaccatcagagccaacgacggttttgtggtggcgtttgggccattgcttattgccgcagtcgcgagtgttgcccccgacgtttgtatccgtttctccccgaaacctgaaaaaacatcgcgctatctgcgagaggggcttgtcgatctggaaatcggcgtgcagagcaatatggggcctgaaatacgtctgcaacggctgtttcaggacaggtttgttggcgcagtgcgccaggggcatccactggcttcgcgcccgtcagttagcctgcaggattatatctcctgggggcatgtggtggcctcgcccgacggatcgttacacggttttgtcgatgacgcgctggcggaacgcgggatgaaacgtaacgtcgccagcgttgtgcctggtttcccgacggcgttatccgtggcgctggcctccgatctgattgccatggtcccggcgctgtatttgctcaatcagcccatgtcagaacgcgtacacgtctttgaactgccgtttaaaacccggagcattactgtctcacagatgtggcatccgcgcatggaaaaggatcccgcgcaccggtggctcagggagaaggtgctggaagtatgtcggccggttcgctga

SEQ ID NO: 124703 - DNA, 1455 bp, Enterobacter cloacae
atgcgcattaagcctttcaggcgccctttttcgctggctcttcggctgaccttttttatcagtctctccacgatcctggcgtttttcgccttcacgtggtttatggtgcattccgttgaaaagcattttgctgagcaggacatcagcgatctgcagcaaatcagcaccgcgatgcaccgtatcctccaatctcctgccgaacccgagcggaagaaaatcagtaaactcaacgagtcgatcgccagttaccgcaacgttgccgttctgcttgtggatccgcagggaaataccctgttcagctcggcacacggggcaacattacgccctgcgatgaatacaccggattttaacgtgcaccgtcgcacccaggatgtctttctgtggacggtggaggactctgctgcttccatgcacgcgggacccgacatgaaaatggacacgtaccggattatcgcctcgtcaggcacggcgacattgcagggtaaatcgcaggactacgtgatgctgattggcctctccattaattttcatctgcactacctggatgccctgaagaagaatctcttcgcgattgccgcggcaatcagtctgctgattattgttgtcattcgtattgcggtacgccagggccatctgcctctgcgtaacgtcagcaccgccattaaaaatatcacctcagagaatctcgacgcgcgacttgaaccgtcccgcgtgcccgttgagctggaacagctggtgatctctttcaaccatatgattgaaaaaatagaagatgtctttacccgccaggccaatttttccgccgatatcgcgcatgagatcagaacgcctgttaccaatctggtgacgcaaacggaaattgcgctgagccagaaccgttctcagaaggagctggaagatgtgctgtattccagccttgaagagtacaaccgaatgacccggatggtcagcgacatgctgttcctggcgcaggcggataataatcagctcatcccggaccgggcgatctttgatttgcgcgctgaagtcatgaaagtgttcgatttcttcgaagcctgggcggaagaacgtaacgtcacgctgaaatttaacggaatgccctgcctgacagaaggcgatccgcagatgttcagaagggcgattaacaatctgttatccaatgccctgcgctatacgccggaaggaaaagcggtgaccgtctcactccgagagcaggaaaacaatgttgaactggtggttgccaaccccggcgcggcgatcccggaagaacatctgccaaggctgtttgaccgcttttaccgggtggatccatcaagacagcgtaaaggcgaaggcagcggcatcggccttgccatcgtgaaatccatcgtcagcgcccatcacggaaaaatccgtgtggaatccgatgcggtatcgacgcgctttatactttccgtgccgaagaaaaccgtttaa

SEQ ID NO: 124704 - DNA, 714 bp, Enterobacter cloacae
atgtcgtcagcagccagtcaggggagcaagatgaaaatactgatcgtcgaagacgaaatgaaaaccggtgaatacctcagcaaggggctgactgaagcggggtttatcgtggaccacgctgacaatggcctcaacggttaccatctcgccatgactgcggaatacgatctgctgattctggatattatgcttcccgacgtgaacggctgggatattgtccgcatgctgcgttcggccgggaaaggaatgcccatactgctcctcactgcgctcggcaccattgaacaccgggtcaaagggcttgagctgggtgcggatgattatctgattaagccttttgcctttgctgaacttctcgcccgggtaagaacgctgctgaggcgcggaaatacggtgattgcggaaagccagcttcaggtggctgacctgacggttgacctcgtgtcgagaaaagtgagccgggcggggaatcgcatcctgttaaccagtaaggagttcagcctgctggagtttttcctgcgccatcagggagaagtgctgccccgctccctgattgcctctcaggtgtgggacatgaactttgacagcgatacgaacgccattgatgtggcggtaaaacggcttcgggcaaaaatcgataacgattatgaacacaagctgatccagacggtgcgcggtgtgggctatatgctggaggcgccggatgcgcattaa

SEQ ID NO: 124705 - DNA, 1386 bp, Enterobacter cloacae
atgttcctgttaaaacgacttagcatcagtacggtatttttcctgacaggctgcgtctcgctggcgcctgagtaccagcgacccgtgtcaccggtgccccagcagttttcgttatcccgaaatggcctgacacctgcggtggtggggtatcaggataccggctggcgtcacttttttgtcgacccccaggtcgttgggttgatcagcgaagccctggaaaacaaccgcgatttaaaaatggctgccctgaaggttgaagaagcccgggcgcagttcacggtgacggatgcggatcgttatcctcagctgaatgcctcctcgggtatcacctatagcggcggtctgaaaagtgacaaacctgcctcgcagcagtacgacgcaggtcttgcagtaagctatgaactcgatttcttcggcaagctcaggaacatgagcgaggcggaccgacaaaacttttttgccagcgaagaagcccatcgagcggtgcatattctgctcatctctaacgtgtcgcagagctatttcaaccagcagctggcctataaacaacgccgtattgcgcaggagacgctgaagaattaccagcagtcttacgcgttcgttgagcaacagctggtgaccggcagcacaaacgtcctggcgctggagcaggcccgggggcagattgaaagcactcaggcagagatagccaaaagagagggggagctggcgcaggccaataatgccctgcagctggtcctcggaacgtatcgcgcactgccgggcaacagcggcatgaacgccagcgatattgcgccggtcaggctgccgcctcatctttcatcagcgatactgctgcagcgcccggatattatggaggcggagtatcagcttaaagcggccgatgcgaatatcggtgcggcacgtgctgcctttttcccgtccatttcactgaccagcggactttcaacgggcagcacggaactctccagccttttcacgacgggcagtgggatgtggaattttatccctaaaattgatatcccactgtttaatgcaggcagaaataaagccaacctgaagctggctgaaattcgccagcagcagtcggttgtgaattacgaacaaaaaattcagtccgcctttaaacaggttgctgacgcgctcgcgctgcgggaaagtattaaccagcaaattaatgcccagcagcggtatcttgattcgctaaatatcaccctgcaacgtgccagagggttatattccagcggtgcggtgagctatatcgaagtgcttgatgcagaacgttctctgttctccacgcagcaaactcttctcgaccttatttatgcccgtcaggtgaatgaaataacgctcttcaccgcactgggtggcggttgggtcgaataa

SEQ ID NO: 124706 - DNA, 342 bp, Enterobacter cloacae
atgcgtaattcacttaaaaccgttgtcctcggtgcgatcgccgtaatgttttctgccagccttcaggccgaggttcatcagcacgcaggaatgaatgttgccagtgacggaacctcagagcagattattaaggggaccggcattatcaaggatattgatctcacgagtaaaaaagtcactattgcccatgatgctatcccggcggtgggctggcccgcgatgatgatgcgcttcacctttcttcaggctgacgagagtatttcggccctgaaagtcggtagccacgttgatttttcgtttgtccagcagggcaatatctctttactgaagagcattaaatag

SEQ ID NO: 124707 - DNA, 1251 bp, Enterobacter cloacae
atggcatctttaaaaataaaatacgctgccatgatagtcagcagccttattgcaggagggctgatatccgtcacggcatggcagcatattcacacctctgcaaaatctgaaaatcaggtttctgaaagaaaggtacttttctggtatgacccgatgaagccagacgttaaattcgataaacctggcaaatcaccgtttatggatatggatctggtgccaaaatatgcggatgaaaatgatgataaaagcggtgccggaatacgcattgaccccacgcaggtccagaacctggggttaaaaacgcaaaaagtcacccgcggaacgctgaattatagccagacgatcccagccaatgtcagttataacgactatcagtttgttattgtgcaggcgcgggcggaaggtttcgttgagaaagtatacccgttgacgaccggcgaccatgtcaggaaaggcacgccgctgattgatatcaccattccggactgggtagaggcgcagagtgagtttttgctgttatccggtaccggtggaacgcctgtgcaaatcaaaggcgtacttgaacgtcttcggctggccgggatgccggatgaagatattcagaagctacgggcgacccgaactatccagacccgatttaccatcaaggctcccattgacggggtgatcacggcgtttgacctgcgcaccggcatgaatatttcaaaagataaggtggtcgctcaaattcaggggatggatccggtctggatcggcgcggcggtccctgagtctattgcttatctgctgaaagacacgtcgcagtttgagatttcagtacccgcttaccctgataaatccttcccggttgaaaaatggaaccttctgccgagcgtggatcccagcacccgtacgctgcaggtgcgcctgctggtctccaacaaagacgagcgtctgaaaccgggcatgaatgcgtatctcaaactgaatacgcaaagtccggagatgctgttgatcccgtcccaggccgttattgataccggaaaggaacagcgcgtgattaccgtcgatgcagaggggcattttgtgccgaaaccgatccacgttctgcatgaatctcagcagcagtccggtattggttcaggcctcaacgaaggggagacggtggtagttagcggtctgttcctgattgactccgaggccaatattaccggcgcgctggagcgcatgcgtcacgctgaaacagcagacaacacgcattcaggtcattaa

SEQ ID NO: 124708 - DNA, 3144 bp, Enterobacter cloacae
atgatgattgaatggattattcggcggtccgtcgcaaaccgtttcctggtgatgatgggggcgctgtttcttagcatctggggcgcatggaccatcatcaacacaccggtcgatgccttgcccgacctgtctgacgttcaggtgattatcaaaaccagctatcctggccaggccccgcagatagttgaaaatcaggtgacctatccgctcactaccaccatgctgtcggtacccggagccaaaaccgtgcgcggtttttctcagtttggtgattcgtatgtgtatgtcatttttgaagacggtactgatttgtactgggcccggtcgcgcgtactggagtacctgaaccaggttcagggcaaactgcctgctggcgtgagttcagaaatcggcccggatgccacgggggtgggctggatatttgaatatgcgctggtcgatcgttccggtaagcacgatctcgcagaattgcgctcattgcaggactggttcctgaaatttgagttaaaaaccatccccaacgtggctgaagtggcatcggttggcggtgtggttaagcagtatcagatccaggtcaatccgttaaaacttgcccagtacggcataagcctgtcggaggttaagcaggcccttgcgtcgtcgaaccaggaagcagggggatcgtcggttgaaatggcggaagcagagtatatggtccgggccagcggctacctacagacgatagacgatttcaataatatcgtgctgaaaaccggtgcgaacggtgtcccgatttacctgcgcgatgttgctcgcgtacaaacggggccggaaatgcgccgcggtattgctgagctgaacgggcagggggaagtggcgggtggcgtggtgatcctgcgctcgggcaaaaatgcgcgtgaagtcattacggcggtgaaggataagctggagacgctgaaggccagcctgccggaaggcgtcgagattgtgacgacctacgatcgcagccagttaatcgacagagctatcgataacctgagcggcaagctgattgaagaatttatcgtggtggccatcgtctgtgcgctgttcctctggcatgtccgctctgcgctggtggcgattgtctctctgccgctcggcctgtgtattgcctttattgtgatgcattttcagggactgaacgccaacatcatgtcgctggggggcattgccattgccgtcggtgcgatggtggatgcggccattgtgatgattgaaaacgcgcacaaacggctggaagagtgggatcatcagcatccggaagagcagatcgacaacgccacccgctggaaggtaatcaccaatgcctctgtggaagtggggcccgcactgtttatcagcctgctgatcatcaccttatcgtttattcccatctttacccttgagggacaggaagggcgactgtttggtccactggcctttacgaaaacgtactccatggcgggggcggccatgctcgccatcatcgttatccccatcctgatgggcttctggatccgcggaaaaatccccgcagagaacagtaacccgctgaaccggctgctgattaacgcctatcatccgctgctgatcagggttctccactggccaaaagccaccctgctggttgcagccttatctatcttcacggttatctggccgctgagccaggttggcggtgagtttttaccgaagatcaacgaaggcgacctgctgtatatgccctcgaccttgcccggtgtgtctccggcagaagcggcggcgctcctgcaaaccacggacaaactcatcaaaacggtgcctgaagtggcgtctgttttcggcaagacaggtaaggcagaaacggcaacggattccgcaccgcttgaaatggtggaaactacgattcagctcaaaccagaggatcagtggcggcccggcatgacgattgacaagataattgacgaactggataacaccgttcgtttgccaggcctggctaacctgtgggttccgcctattcgtaaccgcattgatatgctctccaccgggatcaaaagcccgataggtatcaaagtgtccggtaccgttctgtctgatatcgacaccacggcgcagcgcatcgaggcggtcgccaaaacggtacccggcgtggtgtctgctctggcggaacgtctggagggcgggcgttacattgatgtggatattaaccgggaaaaagccgcccgctacggaatgacggtgggcgatgtgcagctgtttgtctcttcggccattggcggcgcaacggtaggtgaaacggtggaaggcgtcgcccgctacccgatcaatattcgttatcctcaggactaccggagcagcccgaatgcgttaaaacagatgcctatcctgacgccgatgaaacagcagatcacgctgggcgatgtggctgatattaaggttgtttccggccccacgatgttgaaaacggagaatgcccggccagccagctggatttacatcgatgtacggggcagggatatggtatcggtggtgaacgacattaagacggccatcagtcagaacgtgaagctgatgccaggtaccagcgtgtctttctccggacaatttgagcttctcgaacatgccaataagaagctgaaactgatggtaccgatgacggtgatgatcatcttcattttactgtacctggcgttccgtcgcgtggatgaagcaatgctgatcctgatgagtctgccgttcgccctggtcggtggaatatggtttctctactggcagggtttccatatgtcagtcgcaaccggaaccggatttatcgccctggccggggtcgcagcggaatttggggtcgttatgctgatgtatttacgtcatgccattgaagcgcaaccggaactgtcccgtcgggaaacgttcacagaacaagggcttgatgaagcactttatcatggtgccgtgctccgtgtgcggccaaaggccatgaccgtcgcggtgatcattgcgggcctgctgccaatactctgggggaccggtgccggttcggaagtcatgagccggatagcggcgcccatgatcggcgggatgatcacagcgccgctgttatcgctgtttatcattccagcggcttacaagttgatttggttgcgcaggcataaaaagccataa

SEQ ID NO: 124709 - DNA, 570 bp, Enterobacter cloacae
atgtttaatgttttatcccgtcgactgcaacactgtaacgaggtggccgtcaacataaacaatgccgccccggcgcagctgcaacagatcaagacgcagctggccgaagaaatgggtaagtctgtaggcctacataccatgggtattccggcggcggtcagtacgctcggggtgattgtcagtttcgccattccgcagctgtggctgggttacggcatactcaccgcactcgaccagccagccgagcgcgtattcgtgtgggttgtgctggttgccctgctgttcgctggccttaacggtgtgacgatgtttatgattggcaaaggcagcatgcgcgctgtgcggttacattttacgctggcggtgataagccttttgttaacagcagcttatctgcttgccgcgctgagcgagagtacttctccgggcgtcagtctgaccgcggcgctagtgagtatcgtcatgttactgcttagcggcagctgtattttttccaccgccttttataagatgctgctgtttactctgcataacagagcctggcgcaagcttatcagccaggcgcgttaa

SEQ ID NO: 124710 - DNA, 1245 bp, Enterobacter cloacae
atgtcgaaatcggcttcctcccatcctcatacagctgcacctacatggagtgggtttatttatcaagggcacttagcgctttatcattccatagaatgtgtgctcaataaaatgtcgtttgagttgcaaatcgacagcattgatgacttttcgataattgaaaatggaattgcagtttcaacgcatcaggtaaaagcgctagcagatgataaaagagctgcctataaggaggctctcgaaaaagctgcatcgacatatatgttgtgtgataagactaccaaaagatattttcatacatctgtgcgccttgatgatgcttctgattttgttggcagcaatgggaataccgttaaattttatacttacgatgggcggccttactgctatctccaagatgttgaaataaaaacgaaatcaaaaattgagacgtacttgctttccgaaaagttaccttgtagtgattttttagtgaatttgaagttcgaggctttgcaaagtcatattgccgctcaagtaatatatatacacgcgtgcaatcaggatgggttaatgagcgccgcagaagccgcgtttactcaaactttaaaaagtgagaagattgtagagttattaaacctcaccgctacccatgaagacgacattgtatacaagatgttccaagctaggatggctgtttgtaaatcattgtatgggtataccaatacaatggaaaaaacagcagatagaactgttattcaaaaagttgcaaatgtttacgatcagattaaagatttgggtgatactcaatttatatggttgtggaagtcgttatgttttggatcttccacaatggttgtgagtgagaacagtgtttatgattatgtggatgtgatctacgatatagataaagcaccactgagtgagcaaaagcctccttactataggtgctctgccggagatttttatttgccaacagcaatttcggcagacaatgttcgacgggagcataggtttgctgaagatctaatggagcagctgaaatgcgatccagagctgatagatatcttagttgaatatcaatggctaatcgcagccagagcaaatattttttcacctgctgagcgattttgtgcagctaccggaatttcgcgggatgctgtagaagatgagttttcattgatgggtaaggatcgtaacaaaataactaaagcctttgatgcaaaaataatttcaaaggaagaggcgagggtgaagttgaatgattaa

SEQ ID NO: 124711 - DNA, 750 bp, Enterobacter cloacae
atgattaaagatattgttctacaggctgccttgaaacatgagtttactttgtttaatgccggcgactattctaaagcagatgacgtcaccatagactattcggcaggagaaactttaactggtcttgaaggtgttgattataagtctttgacttattttagtcaggatagtggagataggaagcgattcctcgctgtggttgaatgtggaaatataccatcaccacagttgctgaataaattagtattactgtatgctcctgaagcatttaaatctgatcctgctttcgataaaaataccgatctgattattttgcataaattaaggcgccgagctgattttaatggaattgagagtaaggtgtttggtattgaagaaaatccatattattttaaaaaatattttctttattacagcgaagaagagcttaggttgttagaagggcacaacttcgaaagcgtttcagcgatggttgtcgatgataggatgtttgcagaatatcgagatcaaccgctatcgcctacattatatagtatcgcggcgagaatttttataaagcttccatttgtaaaagttcctgttaaggaaagctcactgaagccgcttgatgtttatgtaaatgaagcactcgccgagaaaaaattgaccggtcttcatctcaaaatctttaatgcttctgcatctgggattgaagctgataaactaatcgagactctgattcatgaagaaatggaaaatatccagtcttaa

SEQ ID NO: 124712 - DNA, 2328 bp, Enterobacter cloacae
atgaagaaatggaaaatatccagtcttaagattgaaaatttcaagccatttgaaaatacatctattgattttcgagctgcctccatgattaccttggatggccccaatggctttggaaaaactagcatatttgatgcgttggagcttttgtttactggcgttatacaaagaattatcaatacaaatgatgcaacaattgcaaaacgttcgcgcaaaaaacaatttgaagaaaatatatactggaatagaaataaagagggcgacatcgctattagagctgagctcataaatcaagattcaggagagtcaattttcctggctcgtgttgctaccatagcggacctatcgaacccggataataatgcacctgataacttctctatttttaagctttacgaaataagcagtattgactccaataagtttggagagagtcttgattctaaagcacttgagagtattctaggagagaacttcttaaaaaacttctctttattgaactatcttgagcaagggcagaatagatacctgtactcgactgatgccactgaaagaaaaaaaggcattgagcatcttattaatacagataaattgacgggacagatatcatattgctccgcgctagaaagtattattacggaatcttatactggaaaagtgcatactgaccgccaggctgagttgaatgaaaaaattaaacagcttagtggtcagtttcaagatgccgagaatgccgttgacttcaaacggttaagtaccgcgctgccgtcacctggttgggatgttgaacagcctctatcggctgtaaatgatacagatattgaaactctgatacgtgaattacggaatatttttagaatatatcagaactttgatgaggttctgacgagaaaggctaatagtaatattgatgattttttaaaaagagaagtcgatataaagctggctcttcagttgggttctgaagtagctggatatgaaggtctgaaagtaaaggagtcaacgctagttgggctggatcatgatcttttaatattcagaaagccagcttcagagataaatgaagtagacctaaacggtcttaagaacactgctgatttggttggtgtaaatagtctcattaaggcacgggatctgattaaatcagattgtgcagctaagaacgcaaagcttgtaaatttactaaatgctcatgcagagttgctgcggcgacaccaagaatgtgaagatttggaaatttccggttgtccattctgtgggttctcatgggcgacttacgctgcgttaaaggaagccgctgtaaataatgcggaaagaattcgatctgaaatagatgcttctgcccagaagttggaggagacagtaaggtcaatacaggacttactaaatttacagataacagcattcacacagcagcgtgacctagttgcaaaagatttcgatagtgtactttttaaggctctctcagcagcagaatctaagttctcaatcataagtgaagtggctttgcagttggtaaattatggcgtatcaaaagaccttagttttacggctgatgatgcagctctgctgttacggtttaatgaagcaaaagggattattgctacagctaaaaaaccagaaaaggatgtgctccctttagactggtcatctagcttagagatggctttcttgaacgcatcagatataacctcacttagtatttcggattttgaaaataaagaatcctatctcagagccgctcattctaaattcaaaagtgaagagtacaagtcaaaagtagctgagcttaataagctcagttctagaattgaagctggcaaaaaaataaaagcaaaaattgttaatcttaggaagcaattggactgcactgcgaagcagtatgcgaaaaagactattggtgatatagagctgttattccatatatatagtggaagactcatacagaattatcagcgtgggttaggtttgtttatagtgagcggtaaaggagatatactcaaattcaatactgcgctgaagtctgatcatgatgcaatcctgtctatgagtagtgggcaaatcgcatcattaggtttggcatttttcctaacattgaatagggtatatgcgcttaatccatttatactgattgatgatccagtacagtcaatggatgagattaacattgcttcattgagtgatttgttacgggtagagctttcagatcgtcagattttgttgtcaaaccatgagatggaagtgtcaacatatatgcggtataaattcaagcgcgcaggattatctcaagcatctgtttctatgttgccaagaaacataacagagtaa

SEQ ID NO: 124713 - DNA, 363 bp, Enterobacter cloacae
atgacacaacagctcattttaattgccggtccctatcgaagcggcaccgatggccttcaggcgcgcattgatgagaatcttgcgcgtctcgaaaacgccgcattagccgtataccagcgtggtcacgttccggtcattggcgaatggctggctctgccactggcgaaggccgcgggctcgacatcgttgggagatgacatcgcagaatcaatgctttaccccgtagctcaccggctcatcgcaaaatgcgatgcgatttatcggattgccggtgcgtctaagggggcggatatggacattgaagtggccagggaacttggcctcacgatttatactacgctggagagcattcctcaggcttaa

SEQ ID NO: 124714 - DNA, 762 bp, Enterobacter cloacae
atgctcaccagtcagcgaaaacaattgatacttgagaagctcggcgccgaaggccaggtccagtctaaagcgctcagcattctctttgatgtctctgaggacaccatccggcgtgatttacgtgagctggcggcagaagggcgtttacagcgtgttcacggcggtgcgctgccgtcgtcttccgctattgtgccttttgcagagcgtcagtccgttaaaatggatgccaaaagaaaggtggcgcagaagggcgcgcagctgatttcttcgggccaggtagtgatcattgacggtggaacgaccacctctgaactgattactttcttaccgcctgatttgcgtattaccgtggtgacgcacagtccgagcattgctctggggctggttaatcatcccgctattgaagtgattctgattggcggccgtttgtataaacactcgattgttgcagtcggcgcggcggccatcgaaggtatccaaaacattcatgccgatctgttctttatgggcgtgaccgggatccatccggaagcagggttgaccacgggcgatttcgaagaggcgtgtatcaaacgtgcattttccggcagagcggccgagacggttgttctggcttcaccggaaaaaatcaatacggcgtcatcgtttgtgattggggacgtatccttagcgaatacccttgtcgtcgaagacgataccgatcgtggctgggtgcatacgctatccgaaaaaggggtatcggtcgtactggcttcctcatga

SEQ ID NO: 124715 - DNA, 1299 bp, Enterobacter cloacae
atgaggttctggccacgctcactgttggcccgtttgctgatcattgtgcttcccggcctgttgctggccaacgccctgagcctgacgctggtcatgatagaacgaatgcacagcgcccgcacggtgatgctcggtaacctggaatacgatgtcgcgaccagcgtggccattttagaccgcttaccggccactgaacgggcggcgtggctgccgcgccttgagcggggtaactatcgttatatcctcggtccgggtgagccgggcaacgcaccgacggataagcgttcccaggatgccatccgtaccttaaaagcgacactggcagcacaatactcgctcagctttacggctgttcctggcgccatttcacatatccaggcacatcttacgttacacgacggtgcgccgttgaccattgatctgatcccgcgcatgccaccggtcgccagctggctgcccgttgttctcatcctgcaattgttgctgctcgcggcctgctcctggtttgccgtgcggcaggttgtgcggcctttttcacagtttacccgcgcggttgacgccctggatccggcggccaatacgccaatgaccgagaaagggccgcttgaggtacaacgggctgcccatgccttcaacgccatgcaggcacgtattcagtcttatctccgggaacgtgcgcagattctggcctccatatcgcacgatctccagacgccgattacccgcatgaagctgcgggtcgaaatggcggaacaacctgaactgcgcgacaagctaatggatgaccttgataatatgtcgcgtctggtgcgcgaggggattgcctatgcccggtcatcagaatcactggaagagacatcgctgaagctggaacttaatgcctggataaacagcatcgcctgtgattatcaggacatcggtaaaaacgtgcaatttcaggcgggcgaatcccgtttgccgattgtcacgcgtccgcaggcgcttcgccgggtgatgaccaacctgctggataacgccctgaaatttggcgagcgcgccaacattgtcattgatgattcatccgccagtgaggtggtgatccacattattgatggcggcccgggaatacccgatgccgaactggaggccgtattgcagccgttttatcgggttgaaacatcgcgcaaccgtgataccggtggaaccggactgggtctggcaattgctgcgcaactgaccgcgcagctggacggcaagttgaagctggtgaaccgcgccgagggcgggctggatgtctccgttacgctcccacgacgttaa

SEQ ID NO: 124716 - DNA, 585 bp, Enterobacter cloacae
atgagattgctgccacttttaaacggacgcgttttctgtgatctcctgcatcatggctgggagattgagaagactatcgcccgaggcgaggctcatctattgaaccattccactcccgagcttgaacgttatttttcccggccgctcaatgagcttccacgtcaaaacccttatccggtcgcggtgctgcttcctctgtttttagtggcttttgcatttaatcttctaccttttctccatgcgtttccgggcttatcacctttacaccatgcactgagctttttcttaccgtcattggtcatgattggcgcgctcatcatcacaagcgtacttctggctcggggattaacgtcagggttagcgggatttctggcgctgttctttattttgctgataataaccgtcgttcaggcggtatatctcttgcttgcccatcacggaagtagttggccactggtcattgccttcttcgcgttggtactttgcagattggtgatgaatggaagagggttcgtgctctttacgctctactgccgtacgcagcgtcttgcccgtctggcccgcaaaatgcgattaaaaaggtga

SEQ ID NO: 124717 - DNA, 528 bp, Enterobacter cloacae
atgaatacctcactgcatatccaaaacttcacccgtgacgacattctcactcatcttgatgcgctggccgggatcctcgaaaactgcgtgaccggcggcgcatccgtcagcttcatgttgccgtttagcctcgagaaggcccgttcattctggctcggtattgctgaaagcgtagggcgccatgagcgcgttgtgcttgccagcgttgatccccagttgggcgttatcggaacggtgcaactgattactgatcagcctgagaatcagcctcatcgtgccgatgtggcaaaacttctggtacatgaaaaagcgcgtcgcaaaggggccgcgatggcgctgatggaagcgcttgaggctgaagcccgcgccagaaatatttcggttctggtacttgatacctccaccggcagcggcgctgagacgttttatcagcgtgccggctggcaaaaggtcggtgagatcccgcgctacgccctgatgccggacggtgccatgacggcgacgtccgtgttctacaaattcttataa

SEQ ID NO: 124718 - DNA, 1692 bp, Enterobacter cloacae
gtggccctcaatttgagggccactgtcatttctctgcaatggttctgtcattttcgtttcgtagactcgcacgcgtctaacgtcttgttactgaagaaaatcatgaacctaacgcaaattttccgtcgtattgcgcagcgctgtatcccacgtcaatttggtttgctgacgggtatcttttgtattattggccttttctccgcactgcaactctcctcatcttttctgcttaacgcctccctgaaggacgctcagcgcaacgagcgacaaaatctgctggcgtatcagcaacagagcaatcttgatctggcgcgtgtctccctgctggctgcaagcgatctgcttaaccgctccggcgtctggtttatgcaggataaagagaccggttcagaaggaagctggcacagtctgatggatgaggcgcaagcgtcgctggcggtttctcagcaggcgtggcaagcctggcgggcactcagcccgccggaagatgaggccctggtgaacagctatcagcttttctacggtgccattaaagagcaatcggaagcgcttgtcagaacccacactattgatgccttttttgctgtcccggcccaggcgtttcagagcgacttcaacgataactacgcccgttatcagcaggccagcgagaagcaggccatgcaggggcgtcaggctcttatgacgcagctttcaaggctgcaaacgttgttcctgtttgcgccggttttactgctcgccatcgccgttgccgtctggttcggcatgtccaggtgggtgatcacgccgttacgtcgactgattgcgcatattaaccagctggcagccggagatctatccggtacgccgcctgccgtcaggcgttttaatcgtgagacggggcagcttagcgacagtatagccaccatgcagcacggtctgcagcagctggtgacccaggtcagccatgccacgaccgcaatggttgaaaatatcggctccctggcgcaggggaatcagaagctgtatcagcaatcggcgcgtcaggcaaaagagctggaagaggtcacgacccatatcgcgacgctggaaacgcatgtggaagggaataccggctacgccagactcgccagctcgcgcgcggacgaagcgcgtcaggccgcggtaggcggtgaccagatgatgtcgaccgtgaatgcgtccatgcaggcgatcgtcgagcgatcttctgaaatgcgcgggatcgtggcgatgatcgacagcgtggcgtttcagaccaatattctggcgttaaacgccgccattgaagccgcccatgccggtaaccacggacgcgggtttgccgttgtcgcccgggaagtcggcctgcttgccagaaagagtagccactcaacgcagaccatccaggaacttatcaatcgctctttgcagggcattgaagatggatcccgggcggtgaatttaatggaagacaatttgcagcaggtcaccggtctggtcggcaacttaagcagtttgctgaatgaaatctcaaccgctacgctcagccagggagagagtattcaccagatgacgcgtcagcttcaggcgctgaatcaggtttcacgccagacggatctgctggtttctgatgcctcagaggcctctgagcgactgcaaaagcaatccgatcttttattgcaggccgtttcgcgttttcgtcttagcgcctga

SEQ ID NO: 124719 - DNA, 1575 bp, Enterobacter cloacae
atgaacgtcatgcgcacgatcgtcgctcttatatggcttaccggactgctgccagggatggcgcaggcatcggatgccgatcgtttcgttgctgccagccgcacccagcaggcggaattactgacgcagtgggccgccgcgccggatgccgccaggctgccgctgcttcaggcgttgcaaaaggaaaacctgtataccgacagccaaaagcacgcttttgcgcagcgtaatggcggaatggttcccctcggtgaagcaaaggcgactgaagggcagaccaaagcggtacggctgacgaaccgactgcgcgtacttgctgccacggctatcgctacgcatcagctggtcagtgacagtgtcacggaaaggcgggcggcggcccgtcaactgcagcgagatgcgcaacctgcgatgctcgcttttctggaaaatcgggtaaaccgtgaaacggatgcggtagcgcgtcagacgctgctgctggcggtggcgaatctccagctggcaagcccgcaggcggaggtgcgtcgccacgctgctgaactgttaggccagtccgacgatccggacgtggtgtcccgactcaccccgtatacccaggcgcagaccgagccggacgccggcgttcgcgccgctgccgaagagagccttaaccagattacgcaccgcctgatgtggggcgatctgctgggtcaggcgtttatggggctttccctcggttcggtgctgctgctggctgcgctggggctggctatcacctacggcctgctgggcgtcatcaatatggcgcacggtgaaatgctgatgctgggcgcgtatgccacctggatggtgcagcaggccatgaccagcctcgcgccacagtggctggcgctctatccggttatcgccttaccggtcgcgttctgcctgacggcggcaatcggaatggtgctggagcgcaccgtgatccgtcatctgtacggtcgtccgctggaaacgctgctggcaacgtggggcatcagcctgatgcttatccagctggtgcgcatgacgtttggcgcccagaacctggaggtggcgaacccggcatggctttccggcggggtacaggttttcgccaacctgacgctgccgtggaaccgtattgtggtgctgggttttgtgctgctggtactgttctttacctggctgattctgaataaaacccgtctggggctaaacgtgcgcgcggtgacgcaaaaccgcagcatggctgcctgctgtggggtgccgacagggcgtgtcgatatgctcgcattcgggctgggctccggcattgccgggttaggcggcgtggcattatcccagttgggtaacgtcggaccggagctgggccagggatacatcatcgactcgttcctggtggtggtgctcggtggcgtgggccagctggcagggagcgtggccgcggcctttggtctgggcattttcaataaaatccttgaaccacagatgggcgcggtgctgggcaagatcgtgattctggtggcgatcgtgctgtttattcagaagcgtcctcaggggttatttgcgctgaaagggagggttattgactga

SEQ ID NO: 124720 - DNA, 363 bp, Enterobacter cloacae
atgaaaaaaataatcgcgtttgcgctcctcgtggctgccgtgggtgctacggcaggggttcgctatatcgggaatgacgaaccagaatatattcagtccgcagaaacccgtgttggttcatatttaaccagcgattacgggcgtgtagcctgcaatagcaaaaaagtagacgatcaacgctgggaattagattgcctgcatcaggcaagaggaaaagtattccagtttgcggtgtatccttctgaaaaagccccctatggtgtttcgcgttcgttttatctcgaagcgattaatgatgaagcaaaacagagcgccgaacagggtctgatgcgttatttgcaaatcaacacgaaggcgagttaa

SEQ ID NO: 124721 - DNA, 1257 bp, Enterobacter cloacae
atgcgcccttcctctcatcttattccagtcacactggctggatttgtcgccgtcctggtgggttatgccagttcggccgccattatctggcaagccgccgccgcggcaggtgccagcgcgcagcaaatcgcgggctggatgaccgcgctggggattgggatgggggtcagcacgctggcgctctcctggtggtttaaagcgccggtactgacggcctggtcaacccccggggccgccctgctcgccaccagcctgcaaggggtgacgctgtctgaaactatcggtgtatttatcttcgctaacgcgcttattttactctgcggcattacggggcttttcgctcgtctgatgacgctgatcccccattcgctcgcggccgccatgctggcaggcgtgcttctgcagtttggcctgcacgcgtttgcgcatcttgacggccactttctgctgtgcggcagcatgattgccgcgtggctgctggcaaaagcgctggcgccgcgctatgccatcgtggttacgctgctggcaggtggtctcgtggcatggataagtggtgacgttgccaccgataaagtcagcctctccgttgtgatgcctgagtttattgcccccgactttacttttaccagcctggtgagtatcggtttgcccttcttcctggtgaccatggcctcgcagaatgcgccgggcttcgccacgatgaaagcttccggctactcgctggcggtctcaccgctcatcatcgttaccggtggcctggcgctgctgctttccccctttggcgtcttctccatctgcatcgcggccattaccgccgccatctgtcaaagcgctgatgcccacccggatacgactaaacgctggctggcggccattgcagccggtgggttttatctgctggctggagttttcggcgggtctattaccgggatcatggctgcactgccgctgagctggatccagactctggcagggctggcgttgcttggaaccctcagcgggagtttatttcaggccctgaatcatgaagccgaacgtgacgcagccatcgtcacgtttctgatgaccgcgagcggcgtcacccttctgggcatcggttcggcattctgggggctggtgctgggcgggatatgctatgccctgttttcacgcgctcgccgcgcgcagctgggacggagtcatacccatcacgctgcggaaacggttactgaagtggctggcggagttaaatccgcaggccagcgcgatgtccgttag

SEQ ID NO: 124722 - DNA, 540 bp, Enterobacter cloacae
atgtctgcagaaattatccccgttacccagaatatcgagcttcgcgccgtcgaagagcgctataccgccgatctccatcacctcgtcgtcaaaaacaaaacctggctgcaaaccgcctttgactgggcgcagcacgtgggcgcggaagaggatacccgccgcaatgtgctaagtaaccagatgctgcaccagcgcggctacgccaaaatgtttttgatcttccgggatgatgcgctggtcggcgtgctgtcgtttaattcgatagagcctgccaacaaagcgggttatatcggttactggctggacgaggcgcatcaggggaaggggatcctctctcagtcattgcaggcgtttatgcgctattacgctgagcgcggcgagatccgccgttttgtgattaagtgccgggtggcgaatcagagcagcaacaacgttgcccggcgcaacggttttaagctggaagggtgcctgcgggaagcggaatacctgaatggccgctttgacgatgtgaacatctacggaaaaatttttaccctataa

SEQ ID NO: 124723 - DNA, 519 bp, Enterobacter cloacae
atgagcaatctttttcacgacgatcattataccgtaagtgaattaacgaaaaagctggcgagtaaattaaccgatgccgggctgcgcttaaccacggcggaatcctgtacggggggaaagctctcggtcgcgttgtgcgcagaagagaacaccgccgatttttatgatgtcgggctggtggtgttcagcgatgaagcaaaagcgcggatcctcggcgtgcgttctgaaacgctggcgcgctataccgccgtcagcgaaccgacggtgggcgagatggccgccagtatccgcgatatggcacaggcggatatcagcattgccatcagcggatacgcaggccctgaagggggcgacgatgggacggcggcagggacggtctgctttggctggaatatttgcggcgagacgaaaacccggaccgttcttttctccggtgactgtcaggacgtggtggaaaaagcggtgcattttgcgctggctgaactggtaacaaccttgtcggacgacaatatcgggtaa

SEQ ID NO: 124724 - DNA, 504 bp, Enterobacter cloacae
atgaagcgtgaaaatgaaaagttacccgggatagatgagagttatcgcttgctcaggtttgaatatgcatttcgccaggtgggttttgcgctgcttttaggtattatcatcgcagcgatggcgggtctgttttccagcggcatggtgagcgacacgtccaggaccaattctgctaaatctctgaccattcactatgaacgctttggccgtcgggagaccgagtcaaggatgcaatttacgtttccggtgaaaacggcgggtcacttcacgctcagcatcaacagcgagcgcagcgacgtttacgaacccggcagcgtctggccgcagccggacagaatgtatagccgtgggaaaaccctttatttcgtctatgacacgctccagaagtcagacaggttctccgtgttgtacttcacgaccccgacccgggccggtaaatggaatactgtcatccgcgcaaacaacgagccggagatcaccgtctggcaatttatttacccgtag

SEQ ID NO: 124725 - DNA, 1161 bp, Enterobacter cloacae
atggttttttggaatgatgcttacaggaatgaaatagataagttcactaattatataaaccgagaatatcgtcatctacaagatgaaccgatgactttaacttccgccccagataatattttttttgatctaactctcatagatgcatggaatcacttcgtttttctatacgataacaatcgagagcaactagagaataatacaatctttaatcaagaacatttacaacaacgggctttaatcactcttgaaggttttaattcaaataaacttgtatttctatcaactttgttaagaatattatatgagtataatttttggattgacgatccatcagcatatcccgaatgtattaactttagagtccttgaacgtctagactttctaagcaaagacagtattcatcctggaatgttcatttggatagagcgcgtgatgcctgcacgaattgcacgagacataataaaaagcaatgaatttgcatctattaaaatgttatcagagaaggttgttaaacaacatgataacatacaaaagcaatgtgataattttttagatgagtttgataagaagtttatagctatagaatcagattccgtaaaactcttggaatcagtgaatgttacaaaagaagagcttgaaacttatgaagaaaaattgattgggtataaaaatcagtataactttgtgttactaagtcatggttataaaaagttaagcgatcagaagaaaaagagcctagtaaacacaaggattgttacatggtttttttcatttatgcttctaatggcacctctcatcaccttattaaataacaaatttaactggatcgcaattggtacaggtttatcctctctcagtttttatcttcctttggcgacattcgaaatcataatattttactttctgcgtctttactatagtgaagttcattctattcaaacacaattgctacaaattgatcaacgtttaagtttgtgtgaatttatacatgattatgttgaaaaacgtagtgcatccgctgaccacgactcatggaaaatgtttgaaacattaatatttagccctatacaaatgagtaaagataacattccttcgattcttgatggcgcaaatgtgctagctgacgtagctggaaaaataatatcaaaaggcaagtaa

SEQ ID NO: 124726 - DNA, 513 bp, Enterobacter cloacae
atgatgaatattatgcatccggctttacgacgtcttgatttaaacctgttgcccgttttcgacgcgatttaccgccatcgttctgttcgtctggcagccgatgagctggcgatgagcacatcggcactgagccatgcgctttcgcgtctgcgcgcgacgctgaacgatccgctctttttcagggaagggcatcgtatgtcccccagcgtgtatgctgctcaactcgcaccttccatcgcttccgcactgtcattcctgaatcatgagctgaccccgcagccggagtttgacgcccccagcagtaccgagagtttacacattgcgattacggattttaccgcgctttgcgtttttccgaccctgatgcacaccttgcagcatgctgcccctggtttgcgttttgaattgcgttatttgccccacagcccggcgctgacggagctattagccggggaagttgatttggcgctcgggttcagtacctcggaggatattcgtcatccggaactgtag

SEQ ID NO: 124727 - DNA, 2181 bp, Enterobacter cloacae
atgaagacacatccacagtacgaaccctggctgcagggcatgctgatcatcgcgaagcactatcggctggacttttccgcggaacatgttcgggtcacgattaaccatgaaagtcagtctccgcgccagctggtgctggaggagatggctcgccagctagggctggggatgcgtgtagtggcggcggaagcggtctctctcgatccgtggcgtttaccgctgctggcggaattcaccggcggacaaatcgcagtgattacccgcatggacaacgaaggcaacgtcagcctgcagtttagcggagacggtggcctggagacgacgctgacgctggaagcgctcgggacacggttaaaaaccctgctggtgctgcgcccgctggagtccacaccggatgcccgcgtggacgattacattaaaccgtatgagaaaaactggttctggcagctggcgctgaaagactggcgacgctacagcgacattatgctggtggcgctggtggctaacgtactggctctctctggcatggtcttttccatgcaggtgtacgacagggtagtaccgtcgcaatcagaagccacgctgtgggtgctgtttggcggcgtcatgattgccattgtcttcgaattcgtcatgcgcatgctgcgcgtgcatatatctgacgtggtggggaaacgcgccgacctgcgcatttcagagcgtgtgtttgcccacgcgctgcggattaaaaatggcgcacgctccaaatcaaccggttcgtttattgcgcagatccgcgagctggagtcggtgcgtgaactcatcacctccaccaccattgcggcgatctccgatctgccgttcttcctgctgttcgtctttattctgtggatgatcggcggcccgctggtgctggtggtgctgctcgccgtgccgctgttgctgattccgggcctgctggtgcagcgtccgctgggcaaactctccagcgaggggatgcgcgaatccgcgatccgtaacgccacgctggtggaggcggtgcagggcattgaggacatcaagctgatgcgcgccgaacagcgtttccagaaccagtggaataacaccaacgatgtcgccgccagcgtcggcatgaagcagcgctggctgacgggcctgctgctgacctggacccaggaagtgcagtctatcgtctatgcggtagtcctgctggtgggctgttatctggtgatcagcggggatatgaccaccggtgcgctggtaggaacctcgattctggcgtcgcgcaccatcgcgccgctgtcgcagatctcaggcgtgctctcccgctggcagtcggcaaaagtggcccgtaaggggctggacgacctgatgcagcgaccgattgacgatccgcagcacgggaagaaggtgcataaagcccatctgcgcggcgactacgtgctggaggacgtcgggttttactacgatgaagaagagaaactcagcgtgcttaacatcagcaagctacagatccgtgccggggagcgcgtggcggtgcttggccgaaatggctccggcaaaagcacgctgctgcaacttctggcgggcatgcaggagccgcagcagggcagcatcctgctggacgatatcgcgcttaaccatctggacccggccgatctgcgtcgcgacatgcagttgctcagccagcaggcgcggctgttttttggttccgtgcgggacaatatcctgatgggtaacccactggcgactgacgaagaaattcatcaggcgctggtgaacagcggcgcgctggagtttgtgcgcaagcagaaaatggggctgaacacccttatcaatgaaggcggcacggggctgtccggcgggcagcgtcaggcgctgctgctggcgcgcgcgctgatcacttctccgacgattctgctgctggatgagcctaccgcctggctggatgaagtgagcgagaagcagtttattcagcatcttcaccagtggctgggcaagcggcggacgctggtggtggccacccaccgcctgccaattctggacctggttgaccgcatcattgtgctggaaaacggcaaggtggtgatggacggcccgcgcgacgcgatcctgcatcagcacggtatggcgacgccaaaagccgcgcagcgcaccgtgaccatgaaagcggcggcggttgctgaggagggtgtggcatga

SEQ ID NO: 124728 - DNA, 1338 bp, Enterobacter cloacae
atgacgatattgcgaaagcctatgttacgccgatttacaacagcactggcattaatttcattcgccataaatacggcttatgccaatagtcaccaggcagggattgccgcagtggcaaagacgaccttaaaagaaagtattctttttgctatcgatcgcgatccctcaattagtcagcaggccgcgcaattaggtattggtcaggcgcaaatagatgaagcgcgtagcggctggatgccacaaatcgcgttgaacgggagcacgggtcatagccagaccaccgattccagcggatcgctgaagaattctgcggcctgggggattagcctgacccagctgctgtacgatttcgggaaaaccaataacagcatcagccagtcttccgcccagcgcgatagttaccgctaccagctgatgagtacgctctctgatgtggcggagaaaacggcactcagctacgtggaagttaaacgctattccgatctgctccaggcggcaaaggacaacgttcaggcgcttaaaaatgttgagcaactggcaaaactgcgtgcggatgcaggggtgagctccacttccgatgaactgcagacccgcacgcgtattgctggcatgcaggcaacggtcgcgcagtataacgccgccttaaacagcgcccgcgcaaggcttgcggtcttaaccgggatgcaggctgacgcttattcgcccgtgcctgcgaacctcgccgttgagcctgattcgcttaaccgcattgattattccttgatacccacggtgttagcggcgcagaaccgggagcgttcggcccagtacggcgtggaaacggcgaagtcccagcactggccgaccttaagcctgaagggggggcgtacccgttatgagtcggacaaccgttcttactgggacgaccagatccagctcaatattgatgcaccgctttatcagggcggcgcggtctccgcacgtgtgcgtcaggcagaaggcgcacgggctatggcctcttctatggttgatcaggcgcgcttcgatgttctgcaaaaagcctccgttgcgcaggctgactggaccggtgcacggggaagaatggaagccggtaagctgcagctggaaaatgcactgcgtgcccgtgatgtttataaaaatgaatacaccctgagcaagcggagcattaatgatttgctcagcgttgagcaggatgtctggcaggccacgtcggcaaaaataatcgctgagtatgatgggtggagttcggcaattaattatgcttccgcggttgataatttaatgtcgcttattggaatagagaaaaacgctgccgcaaaattacccgatttgagttaa

SEQ ID NO: 124729 - DNA, 795 bp, Enterobacter cloacae
atggttcagccccatttccccgtcctgccggacgctacgcttacggccatcaatactgtcggtgaatggctggcgcaggacgatctccgcggcacgtctcaaaccccggatgttgacgcggtgattctggcaggaaacgcggtgatcccgaccattgaagcagcctgccgtattgccgcagaaaagcaggttccgctgctgattagcggcggcatcggtcactcgacaacgtttttgtatgacgcgatccgtcaccacccccgttatcacccactgccggcgtccgggcgggcggaagcaagcattcttgccgacattgcgcgggagttctggcagatccccgagtcgcgcctgtgggttgaagatcgctccactaactgcggagaaaacgcccgatttagctggaacatgctgaaacagcaccagcgaacaagcggacgaatgctggtggtgcaggatccgacgatgcagtgccgtacgatggcgacattcgcccgcgtttgccgcgatgagcccgtttctccgcagtggattagccacccgggaatgacgccaatactgcaaaacggcaaaaacggcgtggtatttagcgagggtaacgcagggctgtgggccgttgagcgttacctttcgctggtgatgggggaactgccccgtctgcatgacgatgagaacggctatggcccggccgggcgggattttatcgcgcacgtcgaattccctgaggctgtcaccgaagcctggaaacagcttcagcaggatccggtcctgaaggtggcgcgtaaaatcatctga

SEQ ID NO: 124730 - DNA, 1083 bp, Enterobacter cloacae
atgagtcagcaggatgccgccaaagagcaggccaacacccgcaaaaatgtgcgcattgtttccgttttcaccgccgctgccatcggtcttgtcggcgtgctggtgatcctttacgcctggcagttaccgccctttacccgacacgtgcagtttaccgacaacgcctacgtgcgggggcaaacgacgtttatcagcccgcaggtgaatggctatatcacagaggtgaaggttcaggactttgtgcaggtcaaaaaaggcgatctgttgctgcagattgatgaccgcatctaccgtcagcgggtgcatcaggccgaggcgcagctggcgatgaaaattgccgccctgaataataacctgcagcagcgtaaaagcgccgaagcgacgattgccaaaaatgaagccgcgctgaaaaatgcccgcgcccagagcctgaaaacccaggcggatttgaagcgcgtgaaggatctgacggcggatgggtcactttccgttcgcgaacgcgatgccgccctggcaagcgcggctcagggcagcgccgatatcgaccaggcgaaagcaacgcttgagatgtcgcgtcaggatctgcagacggtgattgtcaatcgcggggcgctggaggcggacgttgagaacgccaacgcggcgctggagctggcgcagatcgatctggaaaacacccgcattgtggccccgcgtgatggccagctggggcagattgccgtgcgtctcggggcgtatgtgaccgccgggacccatctcaccacccttgtgcccccccagcactgggttattgccaatatcaaagagacccagctcgcggagctgcgcgttggtcagccggtgaaattcaccgtcgatgccctgaacgacaaagcgtatcagggccgcgtggagagcatctctcccgcaaccggcgtggaattcagcgcgatcacgccggataacgccaccggtaactttgtcaaaattgcccagcgaattccggtgcgcattgaggtactcggtaagccagaggaatccgccctgctgcgtccgggcatgtcggtacaggtaacaattgatacgcgggaggcgaaaccatga

SEQ ID NO: 124731 - DNA, 933 bp, Enterobacter cloacae
atgttcgatgccagtaatatcaacgtccgcgcgctgctgatctttattgaggtctatgaagcgcagaatttctccgtcgtcgcgcggcggcaggggatatcagcctcacagatttcgcgcgttattcaccagcttgaggatgccctcggtcagcagctgttctaccgcaatacgcgcgcggtgatccccaccgaaagtggtcatctgtttatccgctatgcccgggcgatggtcgaaaacgtcgaagaggcgcggcgtgagctggatgaacgttcgtcggaaccatccggcacaatccgcattaatgggccggtattttttgggcagaggcatgttgcgccaggcctggcggagctgaccgagcgttatccgcggttaaacattgagctcacactgaccgatgactttatcgacccgcaccgggatgcggccgatcttatctttcgcattggcatgttgacggactcgacgttccacgcccgcatttttggtcagcagcgttaccatcttgccgcgtcgcccgcgtatctgcgcaaacacggtgtgccggacgatccggccacgctgagcgatcatcaatgtctggtctatcgcggttcgtccgggcctaaccgctggctggtgcgtcgcgagggggagaactggatacactatccggtggtggcgcggatgacatccaataatgcggagtcgttgctcactgccgcgctgggcgggatgggaatcgtcctgtttccggactggctgattggcgacaggctccagcggggagagcttgtcgcacttctgccggaaatggcgtgtgcgatcaacacggagccgctgaacattgcggcgatctatccacatgcacgtcatccgcccctgaacgtcagggcggtgattgattattacgtcgaacgctttggtacgccgccgtactggcaaacgtaa

SEQ ID NO: 124732 - DNA, 525 bp, Enterobacter cloacae
atgagagcagcggttttcctcctttggctgacgatggtgatccctgcggcccacgccgccgactggctggcctggcgtaaggtgggtgacgccacgctcacctggggcccgtttacggtttatacctcccagctgcgcacgccggacggtcgctaccgcgcggcggatcaggatcaggcgttgattatcacctacgcgcgcgacattgaacgtgatgaactggtggaggccacgcgcgatcagtggcaggcgcaggggattttgcagcgggagccgcaaagcgaaggctggttacagatgcttcgttcgctgtggccggatgtccggccgggctcacagctggcgtttgtcctcgatgataagcagggacagttctggtaccgcgcgtcagcaacgcagaaaagctttattccacttggcccgcgccagtcagaagcattcagcacgcgctttctggccatctggctcgatccccgcacgcaatatcctgaactgcgtcagcagttacttggaggacaaaaatga

SEQ ID NO: 124733 - DNA, 402 bp, Enterobacter cloacae
atgagaacacagaagcgatgtctggggtgcgtggttattgtggttgatgactacgatcgtgcaattgaatactacaccgacaagctggggtttacccttgtcgaggacacgccgcagcaggataaacgctgggtcgtcgtcacgccaaatccggaaagcgactgcaatattctgctggcacgggcttctaatgagaggcaggaagcctttatcggcaatcaatgcggtggccgtgttttcctgttccttcagacagatgatttttggcgcgattaccatgccatgaaagaaaaaggcgttcatttctgtgaagcacctcgtgaggaagagtacggtacggtggtggtgtttgaagatctctacggcaaccgctgggacctctttcaaaaggcccagggctga

SEQ ID NO: 124734 - DNA, 153 bp, Enterobacter cloacae
atgaaggcagcgaaggatgccgacggacccgtcctgctgatgggacacggaattatcaaccgatttattgcgaaagaactgctcgcaactggctggaaagaacagacccgcccccgtaccggttactggggtgcgggtgtttacagccgttaa

SEQ ID NO: 124735 - DNA, 579 bp, Enterobacter cloacae
atgaaaacagaacccgcaagcaacgagacaaaaatcagcgtcagggataaaatattacgtaccgctcacgacctcttttattccacgggcttcaaggcaacgggcgtggatacgttgattaaagaggcgaaagtgaccaaggtaactttctatcgccactttccgagtaaaagtttattgattctcgcctatttgaactatcggcatgaaatatggatgaactggtttgaagcctcattgcggcgtaatctcaacgccggtcagacatcgtcagaggcattatctgccacgctttacgaatggtttgtttcacccgagtttcacggctgcgcgtttattaacgccagtgcagaggcgaagtctgaagatattgaaagtgaaataaaggcgatatgccgtgaccataaactcgaaacaaagaaaatgattacgtcgctgacgaagatcgctgatgagcgcgtgatcaacgaaatcatgttgcttattgacggcgccattattcatgcgcaaatgggcgtggagacggatgctgtcctccactcgttatcacgcggtctggaacagttaatggaaaaataa

SEQ ID NO: 124736 - DNA, 543 bp, Enterobacter cloacae
atgatgaactattcaacctgttttcgttctgttttattgccgcttatttttatcggtctgtcgggcgccgcttattcggcgcaggaggagtgggtgaaaccacagcagctgattgtcgataaaagcctgccgcaggcgcaattagccgcgaatgaggctgcagccagaaaatatgcaacgttctggaatacggggacgccgtctctggcgcgtgaagcgcttgcagttaactttattgataaaacgccgccggaagggcgtaaacagggacccgagggcgctattttagcctcccgggcatttcgtactgccgtacctgatttgcgctgtgacgttgagcagatgattatttccggtaatcgtgtggtctcccatttacattttcacggcacgtttaccggaacatttggcgagctgaaaggaaaggggcagaaaatagattttatcgccacggatatctatgaaattaatgacggtaaaattgtggctaactggcatattgaggacaatctgacgctgatgaaacagctgggcgcactgtaa

SEQ ID NO: 124737 - DNA, 1104 bp, Enterobacter cloacae
atgaaccgttcctcactttttgaccgttaccggttgggtcagcaggacctgaaaaaccgtatcgttatggcgccaatgacccgcgcgcgttcccttcagccaggcaatattccctcgtcgctgatggcggaatactaccggcagcgggccagcgcgggtttaatcatcaccgaagccacccagatctccccgcagggccagggatactcctggactcccggcatccattcgccggagcaggtttcaggatggcaactcacgacgggggccgtgcatcaggcgggcggggtgattttttctcagctctggcacgtcgggcgaatgtcgcacgccagttttcatcaggatggtctgcccgtggccccgtcagcgctggcaccggacgcgaaagtgtgggtggtgaacgaaaagggcgaaggccaaatggttgactgcccgcagccaagaacgctgacgcgcaaagacattcacggcatcatcgcggactatcgccaggcggcactgaatgccgtccaggccggctttgatggcgtggaagttcacggcggaaacggctatttgattgaccagttcctgcgtcaaacctccaataaacgcacggacgagtatggcggcacgcttgctaaccggatccgctttgcccaggaggtcttgtacgcgattgcggaggccattgggcccgagcgtacgggcatccgcctttcgccgtttattacccagcgggggatgaatgacccgcaggtgatcgacgccatcctcgctctggcggcctggtgcgaacaacacgggatagcattcatccacctggcggaagccgactgggacgacgcgccgcaggtacccgacactttccgtcaatccctgcgcgagacgtttagcggaacgcttatcgtcgcgggcaactatgaccttaacaaagccgaacaaatacttacggctggctatgccgatttgattgccttcggacggccatttattgccaacccggatttaccccaccggctggcgcacaagttgccgctggcccaggtgcgcgatcccgccacgctgtttggtggcagtgcgacgggatataccgattatcccaccttgccgttatcctga

SEQ ID NO: 124738 - DNA, 912 bp, Enterobacter cloacae
atgggcaagcttgaagatatggcattgctggttgaagtggccgaggccgggggactttccgccgccggacgacggctgtcgctctctcctgcgaccatgacggccagactgaaggcgattgaagaacgttaccagactcgcctgtttcaccgttcaacgcgatccatcacgctgacccgtgccggagaagagttttatcatgccgcgctgcgcgtgctggaagagatgcgccatgccgagtcgctcctgacgcaaaaagagggcgtcctcagcggcaatattcgcctttctgccccctcggattttggcagacagtatcttagccccgccgtggtggaattttcccgacaccatcctgacgtgaaatttttcatcgcgttaagagaacatgttgaagatctggtcgctaaccggctggatatgagcgtgcgtttcggtaacctgccggacagcagcctggtcgtcagaaacatccgcccaaatcatcgggtgctggtggcctctgcggcgtatcttagcaaccgcggcgtccccgccacatttgcggagttagcccatcaccggtgccttgcacttgagtctgagggcgtggtgatgaacgaatggcgctttgaaaaagatggcgaggaaagtgtcgttcgcgtagagccagccatggtgtgcgacgacggggcattgcttcgtcagtgggcgctcagcggcgctggcattgcggggaaatcctggtgggatgtgaaggacgatgttgaggccggaagactcaccgtcctgtttgctgacagttttaccggttttagccgatacgaccgcaaagatgtcgggctacagtttgtttacccgcagcgtaaactgcagccgcttcaggtcacggcgtttagccagttttttctcgactggctaaaaaaacggtag

SEQ ID NO: 124739 - DNA, 369 bp, Enterobacter cloacae
atgcgcattggcgaactgtgtgtgaaaacgggcttatcgaaagagacggtccgttactacgaaaggcaagggttgctggagaaaatcccgcaaccgaatcgcagcaataactacaaagtctactccgccgtcgatttacagcgtttgaaaatgatcaagcatgccaaaatgctgggctttaccctggccgaaatttcggatgttttagctgtctgggtcgacgataaatttaccgctgagcaaaaacaaagcgcgctgcgccgcaagttgcaacaacttgaagagaaggaagccgcattaactgaactcagatccaggctggtcaacgctttggataaggtgggtcagccttgtgtcgatgaattttaa

SEQ ID NO: 124740 - DNA, 795 bp, Enterobacter cloacae
atgaatatttttaattattcgggaaaaatagcgttgattaccggggcatcgtcgggaataggtcgtgatttcgccaggcaactcgctgcccgcggcgtgtcgttgatcctggttgcccgctcggagccaaagctacagacgcttgccacagagctggccaaaaagcatggcgtatcaatcactattatcgtgcaggacttagtggaatcagatgccgttccccgcatcgcggaacggctggggatcctgaggcgcttccccgacattctgattaactgcgccgggttcgccacctatggccccttcgaagcgcagtcgatcgacaggcaacgtgatgagatatacgtgaactgcgtggcccccgtggcactgactcacgctatgctaccggaaatgctccgcaaaggtgccggggtggtaattaatgtggcctcaacggccgcgatgcaaccggacccctatatggcaatttatggcgcgaccaaagccttcctgctctccttttcaaatgcgctatggggagagtaccgtgcaaagggcattcgcgtgttggcgctttgccctggggcaacggatacggctttttttgatgtggtgaatgcggaagaagcctcggtgggtaaaaggatgccagcggataaggtggttacgctggcgttgaaggcggtcgataccaaccgtaactacctgatcaccggatgcagtaactggcttctggggcagttataccggtttgtcacgcgtaagcgtctgttactcatcgctgaaaaaatattgcgtccacgatcgacttaa

SEQ ID NO: 124741 - DNA, 1110 bp, Enterobacter cloacae
atgctcaggctcaatacagcccgccttgccgttagccttctgccgtttgtcctcgtggcgtgcggcgataattccgcgagtgacgatccgcgcacaaagccaccgcttgtcagatccgccgccatcgcgcttgcgaataatactgcgcacgcctttaccggcgtggtggtggcgagaacgcaaagtgatttgggtttcagggttcaggggaaaatccttgagcgactcgtcgataccgggcaaaccgtcagacagggtcagccgttactgcgcctcgatccggctgacctgaaattacaggcccaggcacagcagcgcacggtggatgctgcccaggcgcgtgcgagaaaagcgtccagcgatgaggcgcgttatcgcggtcttgtggcgtccggcgccgtgtccgcctcggagtatgatcagatcaaagccgccgccgattccgccagagcggaactcagcgcagcccgggcgcaggccaacgtggcgcaaaacgcaacgggctatgccgtactgctggcggattcagacggggtagtgatggaaaccctcgccgagccaggtcaggtggtgagtgccgggcaagtggtgatccgactcgccagggcgggacaacgtgaagcgctcgtgcagttcccggagaccttgcgccctgccgttggcagccctgcactggccacactttatggcaatgaaaaacacccggtcagcgcaacgctgcgcctgctgtctgattcagccgatgccacaacccgcacctatgaagcccgctacgtgctgaatggtgacctggcaaacgcgccgctgggggcaaccgtcacgctgaacgttcaggacccaaaagcggaacgtcaggtcatgcaggttccgctcgcctcactctacgatgctggcaaaggccccggtgtctggcgcatttccgccaggccggcaaaggttacctggacgccggtgaaggtgctgagcgtgggtgaagatgccgcgcaggtcacgggcagcgtgaagccaggcgagaagattgtggcgctgggcgcacaccttttgcacgagggtgaaatcgtcaggcttgcagaacaacgcaatgccgcgctggcggagaacacgccatga

SEQ ID NO: 124742 - DNA, 3090 bp, Enterobacter cloacae
atgagcggaagtcgcttcaacctgtcagcgcttgccgtgcgcgagcgctccatcaccctgtttctgatcgtccttgtgacgattgccggtatctacgccttttttgggcttggccgcgcggaagatcccccttttacggtgaagcaaatgacggtgatatccgtctggcccggcgcaaccgcgcaggagatgcaggatcaggtcgccgaaccgctggaaaaacgcctgcaggagctcaaatggtatgaccggacggaaacctatacccgccccggcatggcgtttatcaccttatcgttgcaagacaaaacgcctcccgcagaggtgcaggaggcgttctatcaggcgcggaaaaagctgggagacgaatccctgaacctccctgccgggacgatcggcccgatgatcaatgacgaattcgccgatgtcacctttgccctttttgccctgaaagcgaaaggtgaaccccagcggcagctggtacgtgatgccgaagccatgcgccagcaacttttgcacgtacccggcgtgaagaaagtgaacattatcggcgaacaggcggagcggatatacatcgctttctctcatgaccgactggctacgttgggtctttcgccgcaggatattttcaacgcccttaacaatcagaacgcgttaaaagcagcgggctctattgagacccggggcgcccagatgtttatccgcctcgacggcgcgtttgatgagttgcagaagatccgcgatacacccgttgtagctcagggcaaaacgctcaggctgtccgatgtagcgacggttgaacggggctatgaagatccccctacgatgctgatacgtaaccagcatgaacccgcccttctgctgggtatcgtcatgcgtgagggctggaatggtctggcactgggtaaagcgctggatgccgaaacggcaaaaataaacgcgagtctgccgctgggcatgaccctgagcaaagtcaccgaccagtcagtgaacatcagctcggcggtggatgagtttatgatcaaattcttcgtcgccctgctggtggtcatggtggtctgttttgtcagcatgggctggcgcgtgggggtggtggttgcagcggcggtaccgttgacgctggcggtggtcttcgtggtgatggaagccgcggggataaactttgaccgcgtcacgctgggctccctgatccttgcccttggcttactggttgacgatgccattatcgccatcgaaatgatggtggtcaaaatggaggaaggttacgaccgggtcaaagcctccgcctacgcctggagccataccgccgcgccaatgctggcgggtacgctggtgacggcaattggctttatgccaaacggttttgcccagtcaaccgccggggaatacaccagcaatatgttctggattgtcggcctcgccctgattgcatcgtggtttgtcgccgtggtgtttaccccctatcttggggtgaaaatcctcccggccattcccaaagtggaaggaggccatgccgccatctatgacacgccgcgttataaccgttttcgccggatgctgagccgcgttatcgccggaaaatggcgggtggccggtgccgtggtcgctattttcatcctcgccacattcggcatgggactggtaaaaaaacaatttttcccgacatccgatcgcccggaagtgctggttgaagtgcagatgccctatggcacctcaatcgaacagacccgtgccgcaaccgcaaaaatagaagcatggttgagccagcagcctgaggccaacatcgtgacggcctatattggccagggatcgccccgcttctacctggcgatggcccccgaattacctgacccgtcttttgcaaaaatcgtgatcctgacggacagcgagacgtcacgcgaagcgctcaagttcaggctcagggaggctgtcgccagcggcctggcgcctgacgcccgcgtgcgggtgacgcagttggtctttggcccgtactcgcccttcccggttgcctggcgcgtttcggggccggatgtcggtaccttacgcgatatcgcagacaaggtgaaaggcgtgcttcaggcaagcccaatgatgcgtaccgtcaataccgactggggatcacgcgttccggtattgcatttcaccctcgatcaaaaccgtctgcaggccaccggattaacgtccagtgccgtggctgagcagcttcagttcttgctctcaggcgtgccaattaccgccgtgcgggaagatattcgctcggtagaggtcatggggcgcgccgcgggggatatccgtctcgacccggcaaaaattgagggttttaccctcgtcggcaatgcggggcagcgcgttccgctgtctcaaattggcaagattgagatcggtatggaagacccgattttgcgccgccgcgaccgcactccgaccattaccgtgcggggtgatatcgccgacaatcttcagccaccggatgtatcggtcgccatcatgaaacagctccagccgattatagatacgctaccggccggataccgcattgagatggccggttcgattgaggaatcgggcaaagccacgcaggcaatgattccgctgttcccgatcatgattgcgctgacgctgctgatcatcattctgcaggtgcgttcgctctcggcgatggtgatggtgttccttaccgcgccgctggggctgattggcgtggtgccgaccctgttgattttcaatcagccgtttggcatcaacgcgctggtggggttgatcgccctttcaggcattcttatgcgcaatacgctgatcctgattgggcaaatcgatcataaccagaaggacggtctcgatccgttccacgcggtggtcgaggcgacggttcagcgagcccggcccgtactgctgacggcacttgccgccgtgctggcgtttattcctctgacgcattcggtattctggggaaccctggcttacacgttgattggcggaaccttaggcggtacggccattacgctggtgttcctgcctgcgatgtatgcgatctggttccggatccgccctgcggaacagcgcgtgcagtccccggcagaaaacgtgtaa

SEQ ID NO: 124743 - DNA, 594 bp, Enterobacter cloacae
atggttgttaagcgcttaagaaaagaggatcgccgcgtacagctgctggaagtggcgcgcggaattgtccgccagcaaggcacggaggcactgaccttgggttacctggcggagcgggccaacgtgaccaagcctatcccctacgaccattttggcgatcgtgaaggattgctgatggccttgtatcaggattatagcgatcggcagttggcgaaattccgtgagacgctggcggtagacagcaaaacgctggacaagacgatccgctttttcagcgccgcctatattgattgcgccatgaccgccgggcccgaaaccgggcccatcgccgcggcgctgtccggctctcgcgcgttgcagtcgtttcgtgaggcgtgcgttgccgaatgcgccgactgcctgcgtaccgcgctttccccttttgtcgtcctgaaaggcgttcagggagaagcggtactgacggccatcattggtgcggcggacgcgctcagcaccgccgcgggtaacggcgtgctcgcccgaaatgttgcggaagataccctcagcggcgccatcaccggggtgctggagacctacgtgaatagcacaaaatga

SEQ ID NO: 124744 - DNA, 600 bp, Enterobacter cloacae
atgtctgctacacatgccattaataatgcactgatcgtgacggctcaccctgtcgacaattcgttatcccattcgctggccgcccgcattgccgggaaactgcgtgaacagggtacgcaggtggagatggccgatctgcatgccgaagggtttaacccggccatgtcccgcgccgatcttgatttgtaccacggcgatccgagcgcccttcctgacgctattctgcgcgagcagcagcgggtcgagcgggcggatatgctggtattcgttttcccggtgtactggtggtccgttcccggtctgttgaaaggctggtttgatcgcgttctgacgctgaactgggcgtataaagtggcagaagacggccggattgtgggcaatttgcgcgacgttcccgttcgccttattgcgactgctggcagcgatcttaacggtttcgataaacatggttattcgacggcgattcagactcaaatagtcgagggcattttcggcttctgcggtttgaagaacgtcaaactcgatattctttaccaggcagacacggcgatgcctgagcaggtggaggagttcctgaagggactagagggccttaaataa

SEQ ID NO: 124745 - DNA, 540 bp, Enterobacter cloacae
atgatttctgacaatgctctcttaattatcgacatgcagcagggcctcttccggggcccggtctcaccctgttccgccgatgccgttctggcaaatatccgtttgttaatagccaacgcgcgccacgctcaggtacccgtcttttttgcccgccatgttggaccagacgactcgcccttttcagcgcaggggccgttgacgcagctgatacccgagctggacgtgaaggagcaggatgttgttttcaccaagcgccatcccagctgttttcgggataccgaattgctgcgtgaacttaatcagagaggcatcaaacagctggtcattgccgggatgaaaaccgaattttgtgtcgacaccacctgccgggccgcgccggagctgggcttcaggacgatattgatttcagatgcgcataccacaatggataacgcacatttatccgccactgacatcattgcgcatcacaacagcacgctggccggcccgttcgtgatgctgtcgactgccggcgactggcattttaatacggtcagttga

SEQ ID NO: 124746 - DNA, 477 bp, Enterobacter cloacae
atgaaacaaattacgttcagtgacctgcagcaacaaagcgagcaggctgccaattctcctcgcttacgcgcgcaccgcaatttacatcccgaactgagcgacccggtacaacgcctggctatcgcgatggagccaggtacctatgttcgccctcatcgccacccgcacacgtttgaactgctgacggctctgagcggtcgctttctggtgttgaattttgatgacagcggtaacgtgacccaacacgtggtgttaggtgaagactgcaaagtgctggagatggatgccgatacctggcatgccgtgctgtcgctggaaaaaggcggcgtcatttttgaggtgaaacacggcggctatcagcctgttccggagcacgataccgctccatggtcaccggctgagaacgcgcccggtagtgcggagctgatgaaatggtacgctcaggcacaggtgggtgatggaggttttaccctgtaa

SEQ ID NO: 124747 - DNA, 471 bp, Enterobacter cloacae
atgacactcgatgctttattccctgtattgaatattatctcgcctcataaatatagcctcgatgcaaatgtgcatgagttgataacgttactttcagcagaaaaggaaagctcagaagcgctatcgcctttcatccatcgactgcatcttttggctttcgcccaaagcaatccgggtaacgccgaagagttgctctcagcgcatttaccaaaagaagatgggatccttccgctgcttgactttgcggagtggccaaaggtgcgtaacgccgcgtcgggcgaagatcaaacgcgtgaatcggaggagtatttccgtgacatgacctcggctgccaatctgttacgcacggcgctgatcgacgcagagcgcgcaaaggggacgcctgcgctttatattctggataaattacttagcctgaacagcgccctgccggaaagatataaaaagatggcgaatattccctacgcataa

SEQ ID NO: 124748 - DNA, 924 bp, Enterobacter cloacae
atgtcattaccgccactgtacgcgctacgcgcgtttgaagtcgccgcgcggctgaactccttcagcaaagccgctgaaaccctgaatattacgccgggagcggtcagcaggcatgtcaggacgcttgaactgtggtttgactgcgagcttttcaaacggcaggggccgagagtggaagtcaatgaagccggacgtattctggccggacagcttggcgaaagcttctcgaatatggagtgggcatgccgggcattcaaaagtgaaaatcaccttctgcgccttaaagctcccagcacccttacgatgagatggctcctgaatgtgcttaaatctttccgcgaaaaccatgcgaagcctaaaatcgaaatcgccagcgtctggatggacttcgacaccgttgacttcagccgcgagccatacgattgcgcgatcctcctcggtaatggctatttcggcgagtcaacagaaagccggctgctcttcagtgaatggctgattccggtttgtcccccgtctttgcttgaatctgcccggcaccagcttgctcagtgcgatcttattcatccctcaccggacagacgggactggaaacgctggttgaaaaggacagggttattccccgggctcgacatgagcggcgggcttgtgttcgacaccctggagcagggcagccttgcggccatgcacggtcacggtgtggcgatggctgaccttcgactcacgctggacgcactaaaaagtggcctgctcgcactgcccttcagggaagcgatagcaaccggagatggctactatcttgtctggccgaaaaattcgctcagaagacagagtattgaacgtttgctggcgtggcttaaccttaacgcgcctgtggtgccttctttgaatatcgtctgtcttgattacgatgataatcaggtttaa

SEQ ID NO: 124749 - DNA, 459 bp, Enterobacter cloacae
atgcccgagctggacgcctcgtcgatgaaaatttttggccgaatgctcaggctgataaagcatctggcaaaagcgcgcgcgcaggccatggcgcagtttggttttcgcgagggggagtttgacgtcctcgccacgctgcgtcgcgccggtgagccgtactgcctttcgcccacgcagctgtacaaagcgttgctgattacctccggggcgatgacgaaccggctcagccatcttgaacagcaggggcttatcaggcgaatcgccgacccgaaggataagcgcagcacgctcgtgagcctgacgtccagcgggaaggatcatattgaacaggcgttgctcgttcacacggaaacgcaaaatgcagtattgagacatttatctggtatgcaacatgcgcagcttgaatccctgctcagggaattactgctgacgtttccgactgaggaacggggtgaatag

SEQ ID NO: 124750 - DNA, 399 bp, Enterobacter cloacae
atgctggccccacccagtaacgcggtacccataaggctcgccagtgtgacgctaaaacctcgtaataaacaggccgcaagcaggatgaagagtccgaacgcgatcccccggacggctccgatcctggctaaaagccaggggccgcataaggcggccaggcccatcatcgcgaccggcagggtggtcagcagactgaattccgtggccgacagcccaacttcatgctgcagcacggagaacaaggggccgacagaagccaggacagggcgcaggttcaacccgacgataaaagcaataacggcgaagagtaaaggtgacgtgcgtttcaacgtggaatccttttcgattgtgtacggccagcgcaaaatgccacaagcatttatcttaacgttaagataa

SEQ ID NO: 124751 - DNA, 459 bp, Enterobacter cloacae
atgctggcctggctgacattgaccgaagtggtcgccgggtttgccgtctccgcgctgattggtaaatgccctgaccgccgtgtgccgctgatcgctgtgctctcgctactgctggcaggattactgtgtctggtctttgcaccgggtacaacgccggtagtatccacattgctggttggcacagggatcggcgcccttttcccactgtcgctcatcgtcacgttcgatcacgcccgcacgcccgctgaggccgggaagttactctccagagttcaggggggcggatatatgattgccgcgctgatgccgttaatcgcggggattgttcgcgacagtgcggtttcattgaccagcgcctggctggtgatgagtgcgggagtggtgctgctgatcgtcatcgcgttgaagtttaaacccgtggtgaaggtgcacggtagcggggtttgtgacgagcagtga

SEQ ID NO: 124752 - DNA, 564 bp, Enterobacter cloacae
atgtttatatcaaaaataaataaatcaaaaccatttagaataactgtgtttctcgtcgctgcatttctttctggttgtgatattaatggaagtgagcagcgtgttgggtatatcgatatgaaagctgtactgactgagtcaggattatctcagcaagagaaaatgcatctggaacaggttggcagagtgcttaaaagtgccgatgacgaagcagaagcattatataaaaaaatagaaacagataaattaaaagagctgcgtaaaaatgatcaactcctgttgcaagaagtatggcgtttggctcagcagtcagcaaggaatctcatcaccaatgaggcaataaaagctgcaaaagtgacgggcgaaaaaaaggggctgcaaataatgcattatggtcctttgatactctcgtctgaacaccatacagatatcaccgatcaggtcattgctgccctcaaagatacgcgcgttaagtttgaacctctgcccaggttattaatagcgctacctgaaaatgcagaaaaaaatcagcgggtggcgtcagggctgataagtattaagtaa

SEQ ID NO: 124753 - DNA, 627 bp, Enterobacter cloacae
atgaaaatattgttcgttggagccgataatttctgggctgaaggtgtcaggtatctgttagaagatatatatgaagaaacggtaaaactggtttctgttcaggatggccataattttacgaatcagactggcgtgatgtttgaagaatatcattttgtgtttgttgatttgatgagttatgtgccagcactttacggtaatttatacctgacgttaaataaggcgaccgaaaaaattgtcttcattacttctgtgaactctcctttcgtcaatatccatcgtaatttgagatcgaagtccataaaggtgtcgaaagatgcaacgttacagaaaatgaaggttgatcttttgatgtcgtgtatttgtgaaagtaataatattatcccctgtgacgctaatcaatccgggtttaaacgtacaagagacattatgagcgcctttgagcttgaggtgatcagatcaatctctacaggagagaaagtaaaaagcattgcgataagaatgaataagagtgataaatcaatatatcatttgctttctaaaataaaattgaggatgggcttcaaaagcaaacatgaattcctttcgtttttatcaacattcaacgcgtataagatagagcgataa

SEQ ID NO: 124754 - DNA, 591 bp, Enterobacter cloacae
atgagccagacaacccgtcagttttttacgttttatatggtcattatggcactgtctgtggtgctgctgggaggatgtgatatgaagaaaaaagggaatgaagttgcttatgttgacctggccgccgtgctgtcaatgtcaggacttgcggagcaagaaaaggaacgcatgaacctggttattgatgcgctaaaaaaagcggaaaccgaggccgggaagctgtacgaaaaaatggataaagagcaaagggaaaaggcccgccaggccgatcaaattatgcttcgccggttgctgacagaagccggtcagtctgccagaaacagtatattgtcagaggttcgtcaggctgcggataagattagacagcaggatgggttacgcatcgtgatggacggttcattaatccttgcgtcggctgacgataccaacataaccgttcaggtcacggaagcgcttaaagacgttaaagcagactttggtcctttaccttccatctcagtcacccgtccaaaatctgaacctgccacagcggcaaaagaggttaaagagagtaaggaagcaacaagctccaggaataacaccacaaaataa

SEQ ID NO: 124755 - DNA, 7908 bp, Enterobacter cloacae
atgaacgcaatctataaagtcatatttaacagggcgacggggcaacctgtcgttgtttctgaactggggaaggggaagctgaaaagctctactaataaatctgttaattctgcaataatctttgctgcaacattaatctctgtgccggtgcatgcaagttcctgtgataccactttactcacatgtcagcttgatcaaaattggtcatatttaaaaaataacaatggtaatggaaccgttgaaataaataacggccaaacatggaatgtgtcaggtgtaaattcatggctcactggtgacaaatcttttgtacagtataaaaatttaaaaaatgtactttctgatgggtatttagttgttaaagatggggcggctttagataaaaccgcaacattaccgcaactcgaaaaaatcgtgttctctggctctcaaacaatttctgtgactgatccgattacactcgctcagaaaagtgtaagcgttttttcatcttccggtatcgtgatggaagactcttatgagtttgcatatcacacttcatttcttaaagagaatgctcctgtttatatagattctaagttggtaaatgtttcttctggtgtggcaaatatttcattgtccaataacaaatacgtgaccggtgaaatcaggaacagtcatttagttgctgttaatggtacaactaaccaagccgtagctaactggaattcaagtcaacttttccatattaccatcgcaaatgactggagtgatacgccttcgttaagtaatttttcggttgaaagtgactctttcagaggaacatttacagcgtttgataacagtgaacataccgtaaataatattagtgattttaaaaactataatgactggttaatttctcagttacgcaatggtaaaatcactgatcaaacggcttacatatatgctcttaaagatgcttacaagcatagttcggaaaattattcattttccccttaccccaataatagtgacgcctcaagttatggtgaggctgctgccgcactaatttatgcgaatggtaagtatgcgcaagcgaatatttctaaaggggccgctttagaaatttcatcaggaagtcagggggcctttaagataatttccgcagaaaataactccattgttactaataatggttatattaccggaactggtagcttagcggatgtaaatactggggcgtcatttattaacaatggcgagctttctgtcggtggaagtggcctgagtaattataatgctggatactattacaactatccattaactttgactggagtaggcagtagttttataaataatggtgcttataatataaatgcagttcacgcatacagcacaaaagatttgaacggaacattgttcggggtatatctcactgatggctcccaaggaacaaacaacggacaaattaatagtggttattggggaggggggagcatccctcaggaatacactggttctattataagtgtaagagtattgaataatggttcttttgtaaatgatactacaggttcaattacattagggatgggtgaagatggaaagacgcccagctatcttaattcaggaagtgctgctattcaggcaaatacagacggcatagctgtaaacaatggccacataattcttggtgcaaaggctgacggcgtttatggattgttggctattggcaataatatccagttggttaacaacggaacaattgatgtgaacagcgatggtgacaatgggctttatacccctgcacagagtgttggcctcatctccctcaacggagccaacggtaccatcgataacaacggtacaatcaatctaaacggcgctaataatgttggcgtcaaagcaataagcggtgggaaagcgatttcctctggcatcattaatgtcaatgccgcttcaggtcaaagttctctgagcaactatggagcctgggtagaaaataatggctcgcagcttgagattgctggacaagtaaatctgaacggcgataacgctataggtatacacgcccgcgaaggcggtactattaacctgacgaataatgcttctgttaattttgtctccggtaaaaatcagattggttatttcgtctatggtgcaggttcccagattaacaacagcagcagcagcgtgcagaaagtgacgtctgataactcaaccttgatgcgtctggacggaggagccacctttacaggtagttctgcgtctggctcatcgatggtcgcttcaggggagaattcgcagattctggtggcaacgggaactggcacgtcggtaaataccggaagcctgaccctcgatctgttgggaacgggatccaccggtgtactcattgagggcggagccacgggtgtcattgatgccaacaccgcgctgcagctcaataatgccagcgctattgcggcgatcgcagacggaaatggctacgatctcaccggcgcactgacgaccaccggcgattcatctacaaaactcaattccgccgccgctttgtcttcgacacagaataaggtgaccggttatatcgcccgtaatggcgccgcacttgaaaattcaggaagtatctcttttgacggcgagaatacaatcgggatagaagtactggatggttccgcagggacgaacagcggcagtatcacgttgaacgacggcggcgttggtctgaaggccagctccagcaacctgagcacaaccgttaataacaccggagatctgacgctgaaaggcggtgccgatgataatcgtaccaccggtatccaggcttccgggaaaaccgttacggtgaatatgacgggagggaccattcgccttgaggggcagggcgcgatcggtgttgctgtgcacgacggtgcaacggtgaatttggccggtacggctatgccggactttgccggaaacaatgtcagtaatcagattgcattcctcatttctggtgcaggctccactctgaatacccagggcactgcaatgatggacgcgaacggagagggatcgacccttttccgcgttgagaataaagcatcccagcagggagtcttggcctacaccgtatccggtgacaatgcccgggggatatgggcgacgggatccggaacgctcgtgaaagccgcagcaggcagtcaattatccatcgccgggacgggggctcaggggatctatgttgctggcggtgcggatgccacgcttgaaaaaggcgtcacggccgatttaaccggcaccggtgccgtcgtgggggtcgttgacggcaacgagtacgatctggcaggggtggtaaccaatagtaacatgggcaccatcttgaccaatgaagccagcatcacttccggtctcgctggcgctactgcctttatcacgcagaatcaaggcaagttgatcaacaccggtcgtatcgatctcagcaacggctccgggaataccggtattaaggtcatcagcggccagttcgaaaacaaagccagtgatattaccgtcagcggtgtggctgtggacgtggaaggggctaactctacggtattcagtaccggaggtagcatcattgccacagatggagaggccgctattcgcctgagtcagggtgcctcactggatttagtgggcagcggtatgggtgtcgtcgagggccggggtactgcacatggggtgctgctggataccggcgcgaaaggactgattatcaacggcgcgcggatcgatgtgaacgcaaccggcgccagtggcaatgctatcgaaaaccgggccgaaatcgcgggcattcagcttaacggtaccacgattaatgtgcaggacggtaaaggcgtccggacatcagcgaccctggcgcaacagaacagtggcacgattaatgtggatggaagcggtacaggtattgctttcatggccgccgatggtgggatctctgtaaacgatcttgatttgtctcgctcgtcagggctggcgatcaacgttctcggcagcggcggtaccggtatcctggcgaacactgcagatggcgcgacggtgcaaagtgcggccagcgtgaatgtcactgcggcagacggcggctccgcgctggtggtgaataataacgcgaagcaggtggaacagactggcgttctccgttctgcatcaacgaccgcagcggtagtggatgccgcaaaggtcagtacctttattaataccggcgacatcatcgccgcgtcaaacacggcgctggcaatggcctttgatgacggtgtcgatacggtcatgcgcaacggttccggaggcgtaatccagggggtaattgcgcttaataacggcaataacagcctctaccttgatgatgccagtaccctgaccggtacggcgaccctgggagacggtaacaacagtatcaccctgaccggtaccgcccgtgcggacacggttattgccggtagcggcgacaatacctttacggtgaaaggaaaaggcgctgtctttaatcttctggatggtggtatgggcagtaacgacacccttgtgttcgatgccgccgtgcaccgtctgaccagtgcatcgacgatccagaactttgaacgtgtggcactgaaaaacaactcgctccttaccctggacgaagctctggttctgactgatggcggcatcgcggctggcggtgttgatgttgaacttggcagcgaactggcagtgaagccttccgtcgcgggagatttcacctttgacccggcccttaccggtcagggtctggtatcggtaagtctcgattcctcacaatctgattttgctttcaccggcaacacaggaagtgatttcgcgggaaccctgaaactgggcaccagtcatttccagctggaaggggataacacgtcttcactgacgcaggccgccctggtcgccgggaatggtagtgtcgtcacggtcgggacgggcgagcaacaactgggcggtttgtcctttgacggggggaccgttcagttcggcgcggttatgccaggcgatatcatcgcggacaatcacatcatcacttctgccgatggcacgcttgatatcggtggtaagggcactgtacaggtcacactgggtgggggagtgattaaccatgttcctgccagcctgagtaaaaaatcgctgatggagcaggatgacgccaccacgctggtccagcttgccggggcaaacggcacggtaaaaggaacgggcggccagcttaaccttgtggatgaaaacggcaacgttattagtgatgtgcagctcctggacatcgttcaggacggcaacaccgtggcgaagggaacgtgggattaccagatggtaagcagctctgacggtatcaccagcgacgggctttatatcgcctatggcctgaaagaagtcgagcttctgggcacgggtgaaaatgccctgacgcttgcggttggtgctgatgctcagggattacagaccgatctgcgcgtgaaggtgacaggcagcggcgatctggcaattgataccggcaacgggcagacggtgagtctgtcggatggtggaaatgactacactggcgcgaccagcgtgttcagtggaacgctgcgcctcgatgcagacaatgcgctgggcctgacgtctgctgtgaatgtcgccgcagattctgtgctggatatgcacggttcactccagacagcaggcgcgctgaatacagaggccggaagccaggtgatgctgaacgacggcagccgtttgacgctcagcgatgcccagcgggaggcaggaaataatgaggccgggacgatcgcgggtaacacccttacggggacgggggaactcgagttactttccggagaacttcacgtccatggcgcgaatagtggctataccggggatgttgccctgaacggcggcgcaaacgccattcttaacgatgtgttgggtctgggggggagcggaacggtcgagatgacgtctgctaacgatacgctgacgcttagcgatggtgccgctggggcgctgacgaaaacgctggcaggaaacggtcgtgtcgcacttaagggcgatgcagatattactctggctgctgataacagcgagttctcgggtctcttcgcgctggaaagtggaacgcaactggccgcacagggcccagagcaggtgggccaggccagcattgagaaccacggtaacctggttctgaacaatgaggcggcctggacggtagagaatcatattagtggtaccgggaatctgattaaagatggccgtggcaacgtaacgttgacccagtcggcagcccagtacaccggaagcacagacgtcaatactggcacactcatcctgggtgatgctgacaacgcggtcatgctggcttcctctgctgtaaacgtggcgagtggcgctctctttggggggtacggcagtacggcgggcgacgtgaataacctggggtcgtttgtgttgggagagcatggcgtcatcagtgataccccgctgcagttcaccatagggggcaacctgaccaacgccgggacggtattgataggtcagtcgggcggcagcgccgggaacactctccatgtgagtggtgactacgtgggtaacaacggaaccctgaacctcaacaccgtgctgggtgacgataattcggcaaccgatcggatggtgattggcggttcaaccagcggcaataccacggtcagcatcaccaatgcgggcggaagtggtgcctccactcttcacgggattgagctgattacggttggcggtaagtcggacggggaatttacgcagtccggacgtattgtggccggcgcttacgattaccgcctgacgcgtgggcagggcagcaatgcggcaaactggtacctcgtgagccgtgacactaccctggtcaccccggatccagaacccgaaccagggacagatccggatacgggttccggaacggatccggatacgggctctcagcctaagccggactggatccgcccagaggcaagcctgtacggggtgaatatggctgcggcgaacacgctgttcacgcaccggcttcacgaccgtctgggggagactcactacgttgacgctctgaccggagagaaaaaggtcaccagtatgtggctgcgtaacgttgggggacacacccgttcgaaagacagtagcggacagatgaacacccagtcgaaccggtatgtgatgcagatgggtggtgatattgcgcagtggagtagcaacgatgataaccgctatcacctgggcgtaatggcgggctatgcaaaccagaagagcaatgcccgtaaccacctgaacggtaataaggccgatagcagtattaacggttacagcctgggtctgtatggcacctggctgcaggataacgaggcgaaaaccggcgcatggttggacacctggctgttgtacaactggttcgacaataccgttcgtggaaaatctgcgagtagcgcaagctacaaatcgaaagggttcactgcatcggttgaaggcgggtacacctggaaactgggtgagcgtgatgagcgcacggcctactacatccagccgaaagcacaggctatctggatgggtgttaaggctgatgatctcactgaaagcaacggaacccgggtcaccggtgaaggggacgggaatattcagacgcgcctgggtgcccgtgcctttatcaaaggacacagtacgctggatgacgctaaggagcgaaccttcgaaccgtttattgaagccaactggatccacaacaccgagacgttcggcgccactctgaacggcgtacgggtgaatcaggccggtacccgcaacattggcgagctgaaggtaggggtggaaggtcagttgagccgcaatgtcaacctgtggggcaatgtggcgcaacaggtgggtgacgatggttacagcgacagcagcgccatgctgggcctgaaagtgagcttctaa

SEQ ID NO: 124756 - DNA, 444 bp, Enterobacter cloacae
atgcgtaaatttggttatattctgggtgatgacaaaaatggtgtgttagtgctgcgtgaaaacagggtgttgatccccttaaatgccaatccgctcagtcagaagcctatttacctgagacagaccatgttcagattgcttgaatatcttctggaaaaagggaactcgggacttattcgggatgaaacaattatgagagctgtctgggaagcgtatggtctgcagtcctcatcaccgcgtttatggcaggttatgaatgaattaaagaagcgcttaagcaggcttggtatcgatgatgaatttatcattcgcgtcgaagggcggggttacatggttaatacaggagggtatgaacctgtttacatccgggcatcatatgaccgcctgaatcggttctttatggcccgcactcagaatactgaagtcgtgaaatcatttaaataa

SEQ ID NO: 124757 - DNA, 798 bp, Enterobacter cloacae
atggggaaaacgtttctaattgacagcaggatagtttttgattgcgaacggaacgagctgtacgtcctcaaccaacctgaattattgaaggagacgctgaatgagccctgcgctcgctgccttgaagcattgctgagttcgcctggcgaaatcatcacccaggcggaactctacagggtaggatggggaaatgatgacaaggaggtatcacctaatacgctgtatcagaatattctcctcgcgcgtaaggccctgaagagtgtttcggaaagcaatactgactttatcattacgctccccaggaaagggtttaaatttaatgatgccatatccgtaacaatacccgacactgcaaatgacattaatcatggccgggataaaaacctttcttatgaaaataaagccattgcaaatgttagcccttcgatgcgtttactctctgaaaaattaaatacattcactttacccttatctggtttatttataataattgcctttggcatttttattttttcactttacaaatacaacatgccttatcatcaggatataaccaatgcttataagttatcgcttgagaaggcgggatgtaaaatttatattaataaacgcgaaatgataaataaaacagaaactcaaaaacttacagaaacatggccaccgctcatatctgactgcaccagatatccaaatcgctatgtaagcctttaccggcaacacttcaggattttttatctctcatgtagcacgcaaaacgagactaacaggacatgcaaaacgggctatttcagaccatga

SEQ ID NO: 124758 - DNA, 516 bp, Enterobacter cloacae
atgcaaaacgggctatttcagaccatgaaaataacaatcctggcgctatccatattgttgctggtcatttccggcttttacttttccatactcaaatcccgcgccgataacagggtgatccattgttcttctgcttttgacagttatgtcgccaatgatagccttcatgctaaatttactttgtatctgtatcgcggaaaaggtaacgtacagatcgttggagattacatttcatctgacggtataaaaaaacctgttaaatccgtaaccggggtcgagtatcagacagacggcgaaaactatcatgttcgcttcaccggtaacagaaaatcctttatctctgaggagaaagaaaaacgattcttccatttggttccgttttccttaagtagcgaaaatattgattatatttaccagatacagcaaaccagcgaaaatagcttcattataggtcaaaacggcatccctctgatatcgtgtaaaaaaacaacaggtcgacaggtaatgtctcactaa

SEQ ID NO: 124759 - DNA, 603 bp, Enterobacter cloacae
atggctgccaaacgccgcgccgaaacgatggaagaaacccgcactaaattgattgcggctgcacgtaaagcctttgccgaaaaagggtttgccgcagcctcgatggatgatttaaccgccagcgtgggcctgacgcgcggggccctgtatcataattttggcgataaaaaggggttacttgccgctgtcgttacccagattgattctgaaatggcgcaaagcgccaaaagtgcagcggcacatgtgaaggatgaccagcaaaagcttctggcagaagggatagcctatatcgagatggcgctggatgaagaagtccgtcgcatcgttctgcttgatggtccggcttttcttggggacccgggaaaatggccgagccagaataactgcctcgacgctacgcgtaagagcctttccgacctgattgaacgcggcttaatcgaaccggtagatgttgatgccaccgcctggctgttaaacggtgccgcactgaatgccgcccagtgggtggccgccagcgaagatccgcagcaggcattaccaaaagcgattcaggtttttaccctgctggtaaatggcctggtgaagggcgtcacgctttcataa

SEQ ID NO: 124760 - DNA, 402 bp, Enterobacter cloacae
atgaaccaaccgaaacccgttttccctgcaaatcgccacgcgctgtatgagcagcacggttattctgcagcgatccgctctggtgatttactgtttgtttccggacaggtgggtagccgggaagacggtacacccgaacccgactttgcaacgcaggtagagcgtgccttcgataatctcaaggccacgcttgacgctgcaggatgtacgtttgccgatcttgttgatgtgaccacctttcataccgatccggagaatcaatttccagccattatgcaggtgaaacaaacgcttttccctaagccaccgtatccgaactggacagccgtgggcgttacctggctggcgggatttgattttgaaataaaggttatcgcccggatccctgaacatcaggaatga

SEQ ID NO: 124761 - DNA, 408 bp, Enterobacter cloacae
gtgagcgtgtctgaaacaataaagaaaattgttatggcggcattagtggtgaacatggtcgcaggatgtgcgccgttacatccttctggatgccataagaccacggcaacgggcagttgcagctcaggacgctgggacgatcaggatgagtggggcgcgcaagcgcgggcaatcagggcggcaataaatgccaaactggatgagccgcaaaactggaaagggaaaaaatgcaggctgcatattgaatttgctcaggatggcacgcctttaaacatatccaccagcaacggcaataaagcctattgtgaagcgataaaatcagcagcccaaaaagccaaattcccggcattcaacaatccggaagtctacagagattttcaaaaatccggtttcgatatgcgtgggtaa

SEQ ID NO: 124762 - DNA, 483 bp, Enterobacter cloacae
atgaccaattttcatcaactcaccgccaccagcctggatggccgtcttatctcaatggacgactatgcgggtaaggtggttttggtcgtgaatactgccagccagtgtggcttcacgccgcaatacgcgggccttgaagcgctatacacgaaatacgccagtcaagggttagtggtgcttggctttccctgtaaccagtttggtaagcaggagcccggcggcgccgatgaaatctcgaagacttgttacattaactacggcgtaagtttccccatgttcgagaaagttgaggtaaacggtggcgcagcgcacccggtgtttcgttatctgaaaaaggaattgcctggcatgctgggaggacggatcaaatggaatttcacgaagttcctgatcggacgcgatgggatacccctcaagcgttttgcaccgatgacgacgcccgagaaaatggaggatgcaattcttgaggcactggggaggtga

SEQ ID NO: 124763 - DNA, 492 bp, Enterobacter cloacae
atgaacacaaacacgatagtcacgctattaaagttcaagcgctgggcagatgcagaaacattacaagcgataaagaaggtagatacgttagcgaatgctgataagcatcatctgatgctcaggcttatgaaccatgtttatgtcgttgatatgattttcagagccaacattactggccaaaagcaccaatacaccgcgttaaatacgccagaaaccccgactgcagacgagcttctgacaaagatgtttgaatgcactgaatggtatattcaacacgtcggtacaatgaacacgtctgatctttctgaagtcgttaaatttcgtttcgtcgatggtgggtatggtgaaatgaaggcaggagatatgctcaatcatgtcctttttcacggttcatatcatcgcggcgcggtgggctggatgctttcagaaacgggaataacctctccaaaggatgtgttaaccgttttcctgagggatcatcatcacgagtga

SEQ ID NO: 124764 - DNA, 1206 bp, Enterobacter cloacae
atgtccgcagaacatttcctgcccgtagcagatcagaaaaacaatatcatccgactgtcggccgcacaggctctcgccggtgctaactccgtcgtcttttatgcgacaggcgcgattgttggtaacgcactggctcccagcagttcgctggccactcttcccatcaccatgtttgttctggggatggcggcctgtatcttgccgttaggttcactggcgcggacaaatggtcgtaaggccgcctttatggtcggcaccggggcaggcgtcattaccggactgacggctgctctggccgtcttcatcggctcattcctgctgttctgcattgctgcatttatgggcggtgcctatgcggcggtcgcgctaagctttcgttttgccgcaacggatggcgttacgcccgaacgccgggcccgggccctgtcgctggttatggggggaggagtgatagctggcgtggttggtcctatgctggtttccggaacgatgcacctctggccgcctcatacctttgccgtcacgttcatcgcccaggcgctcgtggccgttatatcagcgttcattcttaaaggcgtgaaaacgatagattccgtcagcacggttggaacaggtggacgacctctgagcgtaatagtccgacagccggggtttgccagaaccgtattcagcggtgcggtaacctatatggtgatgaacttcctgatgacggcagcaccactctcgatgcacatgcacggcatttctcagcaggcgtcaaatctcggtatccagtggcatgttattgccatgtacggtcccggttttttcaccggtaaattaattaaccgctttggggctatgcgtatcgccgctgcgggtctgcttatcacggcatgctctgtgctggccggactcggtggaaccgatattttccactactggctgtcgttaatattgctgggtcttggctggaattttggctttaccggcgcatcggcaaaaatcattgaatatcaccgtcccgaagagaaaacccaggttcagtccctgaacgattttgtcgtgtttggggtgatgattgtaggatcattttcttctggtgctctgcttagtctctacggctggaacgccgtcctgtggggatctcttgttcccgtcgggcttgcatttttaggtattgttaacgagttgcgtgcaaaaaaggaccataaattaagctcctga

SEQ ID NO: 124765 - DNA, 486 bp, Enterobacter cloacae
atggccgttcagtacgcccgtaagatgggttttgaggtgactgtgattgcgcggggtagtgaaaaagagcaggctgcttttgagctgggtgcgcatcactacatcaatatccttgatgaaaacgcatcagaacgcctgaaaaatgacggcggtgtggattttattgtggcaacggcgccggcttcagaaatggtttcagccctcatgtccgcgctggctccacggggaaaagcgatcctgctgggtaccggaaaaacgccgctgctggtcacaccgggtatgatgatcggcgctgaacgtaccctgataggatcctttgtcagcacaccggtgcaaaccgagcgcgcgctgcagttcagccacctctttcaggctttgcctgttacagagcgactgccatttgaaagggcaaatgaggcgctcagcagactgaaacagggtctggcgcgataccggatagtgctcaccatgaatcaggataattaa

SEQ ID NO: 124766 - DNA, 450 bp, Enterobacter cloacae
atgcacggcagagagcgcggagggaatggctatgagcgcggtatgacgcatgacaatgtactctgcgtagccgccatcgcagctgagaccgggcgtcagttggttttcacagagatgaaaaagcccgctccggcaggggttgcaatgctgacagtacccacccagtcgcccaatccctacccgctgaccggtttgccagatatcgggcacctggttccccttccgggtaataaacccgacgatttcatgtcccgggatacggccggactggcccgccagcggtgctttttccgcgtcccggagatcggcaccgcatacgccgcatgcttcaattctaacgagcacctcatccgggccgggagcgggtattggccgctctgtcatttccagtacaccgggggcaacgacctgcatagcacgatattttttattcataaattgcacaggtaa

SEQ ID NO: 124767 - DNA, 483 bp, Enterobacter cloacae
atgcaaatccagaccgcgcattatgaccttgtcacctcgtggcaggggggcatggccagccggacgctctgccagtccttttccgcagacaacgctccgcctgccctgcaaagtcatgttatcgattccgatgaaccggtttcgctgggtggcgaagggctggctcctgatccccaggagctgatgcttgctgcgtttaatgcctgcatgatggccgcctttattctcgaagccagggctgaaggtctcgcccttacgcatcttgaaatacacactgacgggtaccttccgaagggtataccggcctccggtgacaagcgtgcagatgatgcttccggcacgcttcagtatgtcatccatgtaagcggtgacggcacggtgcatcaatttgatggggttcatcagcgggtgattaacgcctctctgaaccggtggttactggcccagaatatgctgatcgaaggtgacttaatactgtgctga

SEQ ID NO: 124768 - DNA, 915 bp, Enterobacter cloacae
atgcgatcgctaaaccgacttaaatggctgcacgcttttgaagccaccgccaggcacggcagctttaccggcgcggctcaggaacttggcgttacgcccgccgcagtaggccaactggtgcgctctctggaagactgggtcggacacccgcttcttcaccgcacccgttcaggaaaagagcggctgacgctggtcgacgaagcgcaggaggcactgcaggacatcacgcagggactcgacaaactggaaaccggattaaacaagcttcgcggccgccggtcgcgctcggtggtggtggtgacggcttctcaggtactgatgatgaactggctgatggaccgcctgaaccggtttgcggaatcgcatgagaatatcgatttgcggcttaacgtgacggaaaagctaatggacgtgtcgcacggcgaggcggatatcggtattcgctgtggacagggcgactggcccggcgtgaataaaacctggctgatggatgaggaagccgtgctgatctgcagcccgcacctggtgccacccgggaaaatggcctgcagtgaatggctcgccacgcaaaaactcattcacgatgacacgccgcatccaggcgcggattttccatcatgggatgatgtcctgagaacggtcggtgcccccgaagcgctggaaagcgggctgcatattaattccacttcagctgtgattctggcgacgctgagtggcaggggcgtagctatcgtgcgatacgcgctggtgaagcagctcatcgaaaccgggcaactggtccagctacaccccaaccatcgctggccgctcaaatggtcctattatctcgtcaccccgcagcaaaaagtcatgcgggatgaagtaaaagttttccatgactggctccttcaggatgttgtctcggaccgttcataa

SEQ ID NO: 124769 - DNA, 345 bp, Enterobacter cloacae
atgttcttgaactggaatgaatatcgcagtgacctgcttgccaccatcggcaaatttgccaaactgaagccagagtttatgaaaggctttcagcaaatggataagggggcgtcagaaaacaagcacctcgatcccaaaacccatgaactgattgccctggcggtggccgtcaccacccgctgcgacggttgcctggccgtacacgtggacgctgcggtcaagcacggtgccacgcgcgaagagatcgccgaagcgctggccgttgccattaacctgaataccggcgcagcgttgacgtacaccgcgcgtgctctggatgtgtacgataatctgccgaacaaatag

SEQ ID NO: 124770 - DNA, 684 bp, Enterobacter cloacae
atgatgttactgaattctgatttttcgcagcgtgcgatcgtcaccccggatgattatcagtggataccttctccccagcccggcgttgagcgcgtgatgcttgaccggattggtcgcgagcaggcccgcgcaaccagccttgtcaggtatgcgcccggatccaaatttcccgcacacagccatcccggcggagaagagattctggtgctcgacggtatttttaccgaaaacggggtcgactatcctgccggctggtatctgcgcagcccggacggttcttctcaccagccctcaagtcgcgacggcacaaccattttcgtcaagctgcgccagatgtctgccgatgagcgccagccggtcaggataaatacgcaggaggcagctaactggcacggtcagccgcaaagacaagtctgccctttattctccggtacttcagaaaccgttcagcttcagaagcttgctccgggcgagcggatcttctgtgcaccgcttgttggcggagcagagctcattcttttacagggggagatccgtgcgccggaaggtcgctatgagtcaggaagctggctgcggtttccgccgggtgatatgccagctctgatagccaccgcctctggcgcacttttttatctgaaaacgggacatctcagcccgacaaccctgaccggagcgacattatga

SEQ ID NO: 124771 - DNA, 1095 bp, Enterobacter cloacae
atgaagcagagcgctgttatcatcggtgcgggcataagcggcctttttgccgccacgctgcttgaaaaagcgggtgttgattatgtgatccttgaggctcgtgacagaacgggcgggcgcgtactgtcaggcctggaactggcgggcacctccgctggcattcatgtagatatgggggcagcgtggttctggcctgatattcaaccggacttcgcgcaactgatcgagcggcttaatcttccggtaatcgcgcacggtcgcccgggagacatgctctacgagcgccagttggattcgccccccgaacgctacccggcatgggagagctccccggcgtctttcaggctgaagggaggaatgcaggcgctgacggcggcacttaaaagtcagatcccggctgagaagattaaaaccggccatcaggtggtggcggtttcccgggctggcaaggaagtgcaggtccatacccggtccgaaggcagtaaaaaagccgtgttttccggtgagcatgtcttcctcgctttgcctcctgccctggcagctaaaatagatttcagaccggcgatgccggaacaggtactgtcaaactggcggaaaatcccgacatggatggctccccatgcaaaatatgtcgctgtatataaaacagacatattgcatgagcggcagctttcagggaatgcaggaagccgcgtggggccaatggtagagatccatgacgtatccgagccagattcgggcaaaacggcgatttttggttttattggcgtaccggcaaaatcgagatggacagtcagcgaagctgttctcaaaagcctttgccgggagcagctcgtacgcttatttgggcaggacgcggcagaacccgaagctgagtatataaaagactgggcggccgatccgtttactgcgacggaatttgatctcctgcaggaggtcgggcacgcaatgcctgagcaacttcccgcctgggtagaatggtccggcgagataacaggtgtcgccagtgaatggtcaccgcagttctcgggctatctggcaggcgcaattgactctgcattaacgggcgttcagcgctggctacaacagaaataa

SEQ ID NO: 124772 - DNA, 933 bp, Enterobacter cloacae
gtgacaatagagcgaaaacagatcgacacttatgccacactggtcatgaccttgctgtgtgttatctggggaactcagcaggttgcaattaaaagcgtagccaatgaaatttctccagttctacaggtagcaatcagaagtggagctgctgcaggccttatatgtttattgtttattctaaaaaaaacgtctctaagaaactttgctatatgcgtagttcccgggggagctgtgggcgtactttttggtttgcaattcctgtttgttgctgaaggcctgcgatatacgtcggcatcgcacatgtcagtattcctatacaccgcaccaatttttgctgctctggggctacagttttttaggcgcgatgaacgactaagtgcaccgcaatggatagggatagcaattacatttgcagggatttgcgttgcgtttctgacaggtaatgtttcaggggatagttccagccagacactggcaggagatataatgggtttatttgctggcctgtcatggggagccactaccgtactcgtccgatgctcatctcttagtgagtcgccggcttctcatacgctttttttccagctcgcagggggtgttttagttttatcatcctactcatacttctccggccaaaatcactttgtacccggcaccttcgggattattagtttaatctttcaaagcgtaatagttggctttctgagttatttagcctggtacagtttaatgcggaaatacatggcatctcagctcggtgttctctcattcatgacgcctttatttggggtcattacagcagtatttattttgagagaacagctacagccagggtttatttcaggatcgatgctaattctgagtggcataagtatcgttagcggctggccctggttcaggtcgagatttttaactgggtcagttaaaaaataa

SEQ ID NO: 124773 - DNA, 900 bp, Enterobacter cloacae
atgttcgatcacctccccccattgcagactctgcgcgcttttgaagcaactgcccgcctctcaagcatgacgctggcggcagcggagttgcacgttacgcatggcgcgataagccggcaaatccggaagctcgaagagcatctggggtttaagctatttttcaggctgacacggcagataattctgactgagcaaggggctgaatttcaccatttggttacccgtcttttgagtgatttaatgagggaagctgagcgcctgcgtggaagaagccagatgaagattttgcgtataagtacaacggtttcatttgccagcaagtggttagcaccgcgtctcagccgttttaggcagagatatcctgaatttgatattgaactggatgtaactgacatcaatgtggatcttaatgatggtcaggtagatgctgccattcgatacggccttggcaattatcgagatgtttcgtctgaacgtatgttcgatgaaacagttacccctgtctgtagcccagattttcttaagaaacataatggactgacagagattaagggacttttaaactgcgttcttcttcatgagtacagaatgctggctaactggaaggcatggtttgagatggccggagaaaaaaattatagctgccagcaggggcccttatggactcttggcagcatggcgactgaggctgctatacgtggcgaaggtgttgctctgggacgcagtgttctgattgcggacgatgtagctgctggaaggcttgttgttccctttccccagtacaaacttaaggcggagcggggatacgatttagtctaccgttcagatgatcaagattcatttaaaatatgcattctaaaacagtggatctctgaagaattgagctctctgaaagattga

SEQ ID NO: 124774 - DNA, 1107 bp, Enterobacter cloacae
atggaaaaaagaaaaaaaccgacactggaacgcgctacctggccgacgcgccacgcgatggtcatgcatgggctggcgatgaacctgccctggcttgcgttcgtcaacgtcagcttcgccgtgatgatcctgctgcgacacgtcctgcttaaggccagcgatccgctttatcctcatataccgcaactgacgaccctggtcgatgcctcgatgctcggcattattatcctctctgccgcgttgatcctgatggcctggcggcgtattgcgggtatcagcgtggtgctctttatctgtagcgccatctggtcggcatcctgttttttgtttattacctatttgctgctgccccacgtctggccgctgtgcgtgattttgttactcgcagggttaacggcgctctacttttaccctgagggattactcgcctttgtgcttccgctctggatcaccctgccggtcgcaagctggatactcaacgatggcctcaaccttcactttgtcatcatctggagcgtgtttaccctgatcctgatctgcgggcgttttatcctgttgagctggtttgatgaagcctggcgtcgtaatcagcaaaatcaactgttgatctcacggctggatgcgctggcgcatcaggatccgctaaccaaaaccgccaaccgccggagaatggaggtggtgctggaaaacgcggttgagcagaagaaacctttctcgctgattatgctggatatcgactatttcaaacgctacaacgacacctacggccaccaggcgggtgatgactgtctgacgcgcgtggcgcgggtgctgaagcagtcggtacgaacgccggacgacgtcgtatcacgttacggcggcgaggagtttgtggtgatccttttcaattgcccgctaaacatcgcagaaaaggttgccatgcgtattcaggacgggctgcgcacggaggccataccgcatggcgcctcgacggtcagcgaccatgtgaccgtgagcatggggattgccggcatgacggaggggtttgccggcaccgaaataatcgcccgcgccgatgcggcgctttatcgggcgaaagaggccgggcgggatcggtggtcgctttga

SEQ ID NO: 124775 - DNA, 1500 bp, Enterobacter cloacae
atgtccgaatcccaggtggctattcagcctgccgtgcagcagtttttagaccgacatcatggcctgtggattgaagggcgtcaggccgcgtcggacagcgaaaagcggctcaacgtctataacccggccacgggcgaggtgattgcctcgacggccgatgccagcatcgatgacgttgaccgtgccgtcatgtccggctggcgtgcttttgttgcccgcagctgggccggaaaattaccggcggagcgcgagcggatcctgctccgtttcgccgatctggttgaacagcacagcgaggagctggcccagcttgaaacgctggagcaggggaaatcgattaacatttcccgtctctttgaagtggggtgtaccctgaactggatgcgctataccgccgggctgaccaccaaaatcgcaggcaaaaccctcgacctttctattcccctgccacagggggcgcgttatcaggcatggacacgtaaagagccggttggcgtggtggccgggattgtgccctggaacttcccgctgatgattgggatgtggaaagtgatgcctgcgctggcggcggggtgctcgattgtcatcaagccatcagaaaccacgccgctgaccatgctgcgcgtggcggaactggccagtgaagcgggcattccggacggggtattcaacgtggtgaccgggagcggcgcggtgtgcggcgcagcgctgacctcgcatccgcatattgcaaaggtgagctttaccggctcaacggcgacgggcaagcaaattgcccgcgcggcggcagataccctgacaggcgtgaccctggaactgggtggcaaaaacccggctatcgtactcaaagatgcggacccggcgtgggtgatcgaaggcctgatgaccgggagcttcctgaaccaggggcaggtgtgtgcggcgagttcccgtatctacattgaagcgccgctgtttgacacgctggtcagcggcttcgaacaggcggtgaaatccctgagcgtcgggccgggtatgtccccggaagcatttattaacccgctggtgtcgcgtgcgcattgtgacaaggtgcagactttcctcgatgaagcgcaatctcgccacgcagagctgattgtcggtaaccgtggcccggaagggaaaggctattacgtttcgccgacgctggtggtcaacccggatgccgcgctgcgcttaacccgcgaagaggtgtttggcccggtggtcaatctggtgcgcgttgccgatggtgaagaggcgcttcagctggcaaacgataccgaatatggcctgaccgccagcgtctggacgcagaatatcagcaaggcgctggagtacaccgacaggctgcaggcgggcaccgtctgggtaaacagccatacgctgatcgacgccaacctgccgttcggcggcatgaagcagtccggcaccggtcgcgactttggcccggactggctggacggatggtgtgagacgaagtcggtgtgtgtgaggtattga

SEQ ID NO: 124776 - DNA, 1854 bp, Enterobacter cloacae
atgaagggtaaatacaaagccgcacttgcgcttttactgctgttcattttattgccgctgacgctgctgatgacgctcgctcagtgggtaccgacgcttgccggaatctggcttcccgtcgggacgcgtatcgctttcgaagagagtcctaaactgactcgtcatgcgctggtgatccccgatctccgctatctggttgaagagtgcgaaattgctcgcattgagaacgtgacgctgtcacatccgagccgctggcagctggatatcggcgcgctggatcttaacgccgtctgcctcagcaaaattccccaatccgcgccgtcgaccgttgcccccaaaacgctggcgcagtggcaggcggtattaccgaatacctggctgaccattcaccgtctcaccctctcgccctggcagcagtggcagggtgagctgaaggcctcgctgaccccgtccagccaggagatagcctataaaggcgagcgggtgagcattcaaggaacgcttcgcggccagacgctttcggtcagccagttcgatgttcagctacccgatcagccgcagcccattaaactggtgggggagttcactctgccgctggtgccggatggcgtgccggtaaaaggccacgcggtggcgacctttaacgtgccacaactgacgtctctcgtcgatgccgatctggactgggaagacaaccgtggacaactggtggtgatggcgcgagacaaccctgatccactgctcgatctgccgtggcaagttacggcggaacagctgaacatcagcgacgggcgctggaactgggatctgtccggtatgccgctgagcggacgcgtttcgcttcgcgccgataactggcagcaggggcttgagaaagctaccctgaccgggcgtttgaacgtgcttacccatggtgatgcggggaaaggcaacgcggtactcaatattgggccaggcaggctcagtatggaaaacagcgacatgccgctgcatctcagcggtgaggcgaagcaaaacgacctcattctttatgccaaattgccggcaacactgaccggcagcgtatatgaaccgcaactcgcctttgaaccgggcgcactgcttcgctcgcgcgggcgcatcattgactcgcttgatatcgatgaaatccgctggccgctggcaggtgtgaagctgacgcagaagggcgtggacgggcgtttacaggctatcctgcgtgcccatgaaaacgagatgggcgattttgaactgcatctggacgggcaggcgaacgactttttacccgacagcggtctctggcagtggcgctactggggaaaagggagttttacgccgatgcatgcccgctgggatgtcgccgggaaaggcgagtggcgtgacaaactcattgagctcacggcgctctccaccggttttgacaagctccagtatggaaccatggaggtcagcacgccgcgtctggtgctggatcaacccgtgcgctggttccgtgacgccgaaaagccgacgttcagcggcgcgctggcgctcaatgccgggcaaacccgtttctccggtggcagcacgctgccaccgtcggtgctgacctttagcgtcgacggcaccgatccgacggtgttccagtttaagggcgacctccatgcagagaaaatcggcccggtacaggtgaatggtcgctgggatggtgaacgtctgcgcgggcaggcctggtggccgaaacagtcgctcaccgtgttccagcctctgatccctccggactggaaaatgacgctgcgtgacggggaactctatgcgcaggtggctttctcggcggcggccgatcagggctttgaggcggggggcacggcgtgctga

SEQ ID NO: 124777 - DNA, 324 bp, Enterobacter cloacae
atgccgttacaactggagttgtctttatccccgccaatgttgcctgccttgtactatttcattatatctattgcgtttttattgttgctgtacagaggtaaactcaaagttgaaagagctagaaaatatcctcttttcattgcttacaccttgtttgtgttagccagtgctgccatacaactcaacgtgttcgccaatggccaggactttgtgagcggttttctgcatatcaactttgacccatggcggtatgactccgtgtattgggggtcattaatatttgccatgctttacctcctggcgatacctcgtaacaggtactag

SEQ ID NO: 124778 - DNA, 453 bp, Enterobacter cloacae
atgaacaacatcgatgtggcgctgctgaagaccattccggaagtctgtcctgtgtttcaggcgcgagccactgcccgggctattacacgctattacaacgcctgcttaagaccgtttggtctgaccgcagagcagttcagtcttttggttgggatcggaggtgcacctaatgaaaccgttgcagaactggccgcaagggcgggggtagatgccaccacgctgagtcgaaatataggtagtatggtgtcccgcggcattatcgacgcggtgggaggccgggggcgtgccggtaaacgactcaccctcacagcagagggctggagcctgctcgaacaggtcattccggtatggaaggcagcgatggaagaactgtcccatcagatggggagcgaacaacttagcctgacgacgaatatgatgagaagcctgggcaaagccactgcttctttatga

SEQ ID NO: 124779 - DNA, 291 bp, Enterobacter cloacae
atgccccattcgtccacatcaacttacgtattattgaccctgcgcgacaggccagccttgcccccccgcttcacattagcgttagaggaagcgggagggaaaattgtgcattttggttcggttgcagaagtactcgaaggcgatgaagccccgttaccctatgctggcatttttgaattcccgactttagatcaggcgcttgctttctatcattcagaaaagtatgcgccgattaaggctgaacgccagctagcccagcaggccaggatgttcatcgtcacgacaggctga

SEQ ID NO: 124780 - DNA, 435 bp, Enterobacter cloacae
atgtacaattcaattttggttccaattgatatttccgaagatagcctgacgcatatggtgattcctttcgttcaggctcataccgcacttaacacagctaaagtccattttcttacggtcattccttcgctaccttattattcatctttaggcctggcctactccgtggagatgccgaagctaaaagagttccagcatgcggccttagaaaaactggatgaaatcgttaagcaatttaaaattccgccagaaaaggtgcagacgcacgccgttacgggatcgccaaaagatcagatccttaaactcgcggacacgatcggcgccgacctgatcatcatcgcctcccataagcctgacatatcaacgtatctgttaggttcaaatgcggcggcagtggtgcgccacgcaaaatgccctgtgctggtcgtaagataa

SEQ ID NO: 124781 - DNA, 1368 bp, Enterobacter cloacae
atgacgcaagcacaacctcaaagaaccacctccgatctggtgaaagccgccgtttcaggctggctgggcaccgcgctggagttcatggatttccagctctactcgctgggggccgccctggtatttcatgaaatcttcttcccggaacagtccgctgcgatggcactgatcctggcgatgggaacctacggcgcaggctatatcgcgcgtatcgtcggcgcctttatttttggtcgcatgggcgacagcattggccgtaaaaaggtactgtttatcaccatcaccatgatggggatctgcaccacgctgattggcgtgctgcccacctatgcacagatcgggattttcgcgcccgtactgctggtgacactgcgcatcattcagggactcggggcaggggcagagatctccggggccgggaccatgctggcggagtacgcaccgaaaggtaaacgcggcatcatctcctcgctggtagcgatggggactaactgcgggacgctgagcgcgaccgctatctgggccgttatgttctttgccctcgaccgcgaacagctgctcgcctggggctggcgcgtgccgttcctcgccagcgtcgtggtgatgatctttgccatctggctgcgtatgaacctcaaggaaagcccggtctttgagaaagtgaacgatgctcaaaccgcgcagccggacacatcgttaggtgccatggtgaaaagtaaatctttctggctggcgaccggtctgcgtttcggtcaggcgggcaactcgggtctgattcagacgtttctggccggttatctcgtccagacgttgctgttcgataaagccattcccaccgacgcgctgatgataagctccattcttggatttatctctatcccgctgctgggctggctgtccgataaagtgggacgtcgtctgccgtacattatccttaatatttccgccattattctggcctacccgatgctgtcgatcatcgtcgataaaagctatgcgccgggaaccattatgctctccatcatcgttatccataatttcgcggtactggggctgtttgcgctggaaaatatcaccatggcggagatgtttggctcgcgaaatcgctttacccggatggctatctccaaagaggcgggcggtctggtggcagtggggtttggtccggtgctggcggggatcttctgtaacatgaccggttcctggtggccgattgtggccatgctggtggcttactctgtgattggtctggtctcggcctgcctgatgcccgaagtgcgggatcgtgatttgagcgcagcggaagatgctgcggaggccacgccaaaagagcctgtggcctacggcacggtatcgtcacggcggtaa

SEQ ID NO: 124782 - DNA, 615 bp, Enterobacter cloacae
atgaaagacgtcttacagcgtgaatcgttcgcgttcagcgcccgggtgctgggcgcgctgttttatttcgctcctgacagcgagcagactgcgcccctggtacaggcccttatcgctggcaaatgggttcaggactggcctctgtctccggaaacgctgcagcccgttgccgatacctttgccacgtcttccgatgagccgctgacggacgcctggcaacggttgtttattggcccttatgccctgcccgctccgccgtggggttccgtctggctggatcgcgaatccgtgctgtttggtgactcaacccttgcgctgcgccagtggatgcgtgaaaacggcatcgcttttgagatgcagcagaacgaaccggaagatcatttcggtaccctgctgctgctggcggcgtggctgattgagaatggccgcgattcggagtgcgaccagctcctggcgtggcacctgctgccgtggagtacccgcttcctgtcggtatttgtcgacaatgcgggtcatccgttttacaccgcgctgggcaggcttgcgcagctgacgctggcggactggcgatccgcgctggttatccctgttgcggaaaagacgctgtatcgctaa

SEQ ID NO: 124783 - DNA, 1119 bp, Enterobacter cloacae
atgaagcaggttggcatcgtcggttggcgaggaatggtaggttctgttttgttacagcgaatggtcgaagagaacgacttcgacggtatttctgtgcatttttacagtacttcaagtgcaggtgccgccggtcctgtcattggtggcgtcggctatacgctaaaagatgctaattcaatcaatgtcctgtccgaaatggatatcattataacctgtcagggcggtgaatatactaaagcaatatatcctgatttgattgatcatggctggaaaggctactggattgatgcggcctcagcgttacggatggatgagaaagcctgtattattctcgaccccgtcaatcgttctaatattgatcgtgcaatcaaagaaggaattaaactttttgttggtggcaactgctccatcaccctgagtcttatggggcttgctggactgataaaggctgacttaatcgaatggatgagcgtaatgacgtatcagtctgcatcaggtgcaggggctaaatatgttagagaattaatcgctcaaagcgcatatatcagccagcatttatcctcagatgaactcatgtcatcaggatcggtgcttcctttagtcaataaagtcagtgagcttattaacagtgctgacatgcccatccagaatttcggcgtacctcttatgggcagcatcattccatggattgatagcgatttaggcgatgggaatagccgcgaagagtggaaaggtgaggcagaaacgaacaagattcttgggctttctccaggtacaatcccggtaaaaggtttgtgtattcgtgtgggcgtgatccggtgccatagtgctgccatcaccctgaagctcaagcgtgaagtcagcgaaaaagaattcgcaagcttagtaacgcattcccacccctgggttaactatgtacccaataacaaggatgaaagtgtcagtcgattgaccccagcttacatcagcggttcgctacaggttggcgttggccgttacaaaaaaatgtccctgaataatgaccctatttactcggttctgacggtgggcgatcagctattatggggggcggcagaaccgttgcgccggatgttgaatattttgcttggcaaaatataa

SEQ ID NO: 124784 - DNA, 195 bp, Enterobacter cloacae
atgcaaacgtattacggcgtgagcgatgcccagtcggcggcatcgaggtttgcccgacatgacgccggcgcagggatttacgcctggtcgatggatcttgactggaaccacaagctcaccgcccgctggagcgtgcttgccgcagcgggcgtaacgcagttgacgggagaggcaggcgataacccgattgtgtaa

SEQ ID NO: 124785 - DNA, 1176 bp, Enterobacter cloacae
atgagcctgcaaaaaacctggggaaacgaacctctgcatgcgctgggagcgatattgctctccctgttgcttgtcggatgtgataacagcgccgcgcaaaatgctgcaccccctgcgcccgccgtcaatgctgctgatgtcgttgtgaaatccattagtcagtgggatagctttaacggccggatcgaagccgtggagagcgttcagcttcgcccccgcgtctctggctatatcgacaaagtgaatttcaccgacggccaggaggtgaaaaagggtgaggtgctgttcacgattgatgacagaacctatcgtgccgcgctggagcaggcgcaggcgacgctggagagagccaaaacgcaggccagcctggcacgaagcgaggctaaccgtaccgataaactcatcaataccaatctggtatcccgtgaagagtgggagcagtgccgtgcggccgccattcaggcgcaggccgatattcgcgccgcgcaggctgcggtagacgccgctcagcttaacctcgatttcacaaaagtaacggcaccgattgatggccgcgccagccgcgcgttgatcaccagcggtaatctggtcacggcgggcgacagcgccagcgtgctgacaacgctggtctcgcagaagacggtgtacgtctactttgacgtggatgagtcaacctacctccactatcaaaacctcgcccgcagcgggcagggggcgtccagcaatcacactgcgctaccggttgaaattggcctggcgggtgaagaagggtatccccatcagggcaaagtggatttcctggataatcagctggcgccgagtaccggtacgatccgtatgcgcgcgctgctggataacgcgcagcgtcagttcacgccgggccttttcgctcgcgttcgcctgccgggcagcgctgaattccaggccacgcttattgacgacaaagcggtgctgaccgatcaggatcgcaaatatgtttatatcgtggataaagagggcaaagcacagcgacgcgatattacgccagggcgcctggcggacggcttacgcatcgtgcagcaggggctgaaacccggcgataaagtcatcgtcgatggtttacaaaaagtgtttatgccgggtatgccggttaacgcgaaaaccgtcgccatgaccgccagcaccgccctcaactga

SEQ ID NO: 124786 - DNA, 354 bp, Enterobacter cloacae
atgaacacgggcgcatttatgcatgatttactcgactggatcgacaacaaccttgatagccgtctggatattgagtccgtcgccaggcgctccggctattcgaaatggcaccttcagcgactgtttaaagaacatacaggctaccctctcgccggatacattcgcgcgcaaaagctgcaaaaatccgttgagcgcttaacccacagcgacgaaccgattctgaacgtggcgatcgcgttgggttttgactctcagcaatccttcaaccgcagttttaaacggcaatatggccaggctccaggcgcatggcggcgcagtgtggcctgccgtgaaacccagcaggcgcacacgtaa

SEQ ID NO: 124787 - DNA, 675 bp, Enterobacter cloacae
atggaaaaaataatcccggaatatacggctgttgatttatcccgttgggcaagaaaggagcattttgaggtatttcaggggtttgctcaatcgacgtttaaccagacggtgttggtcgatattaccgtgctgctaagccatattaaaaacgttggctggaagttttatccgacgattatttttctcgttgctaaagtcgttaaccgtcacccagaattccgtatggccatgaaggacaatgagcttgtcatatggaatgaaattcatccaaattatacgattttccataatgaaacagagaccttttcatcattatggagtcattacgatggcgatatacagcactttcagaaaacctattctgaagacatggctcgctatggcgataaacttgcgtattggccaaaagaagaatccagggaaaatatcttttttatatccggcattccgtgggtaagttttacgagcttcagcgttagcgtggctaatatgaaaaacttttttgcccctatgtttacgcttggaaaatattacgagcaagagggcagggtattattacctctcgccgttcaggtacatcattctgtctgcgatggtttccatgtggcaaggttttttaatgagttacaagaggtctgcgatgcgttaccacagcagaccgggcaacaggaatga

SEQ ID NO: 124788 - DNA, 1128 bp, Enterobacter cloacae
atgaccctttgcgtattcgtcctgattgcctcggaatttatgcccgtgagcctgctcaccccgcttgccgcagatttaggcgtgacggaggggcttgcaggccagggcattgctatctccggcgcgctggcggtactgaccagcctcttcctctcccggcttgccgggaatatgaatcgtaaacaccttctgctgggcatgacgatactgatggcgctctcggggctcattattgccttcgcccagaactatcagacgtatatgaccggtcgcgcgctgatcggtatcgccatcggcgggttctggtccatgtcggcggcaacggctattcgcctggttccccatcatcaggtcacgcgcgcgctggctattttcaacggtggtaacgcgctggcaacggtcgtggccgccccgctaggcagctacctgggtgcaaccattggctggcgcggtgccttcctttgtctggtgcccgtggcaatcgccgcattcctgtggcagtacgttagcctgccaaatatgagcgggcgtaaaaacggtgcgtcaggtgaaggcgtctttcggctatttcgccagcctgtcgtatccgtcggtctgatagcctgcagcctgttctttatgggacagtttgcgctgtttacctatgtgcgcccatttctcgagaccgtcacgcacgtcagcgcctccgggctatcgctgattttgctcgccatcggcattgccggatttgttggcacccttctcgttactctggttctgaacgcggcgttttacctgacgttaatagcgattccactgctgatggccgccatcgctggcgcgttgattttgaccgggcataacgtgtggattgttgccctgctgtcaggcttgtggggaatgctggcgacggcagcaccgacgggctggtgggcgtgggtcgcccgaacgctaccggaggatgccgaagcgggcggagggttaatggtcgcggtgatccagctcgccattgcactgggttcaacggcgggcggtatggtgtttgatcgcctcggctggcagagcacgtttgccctgagcggcatagtgctgctttgtgcggctgcgttgacgtttatgctttcacgcctccgcgaaagcgcctcatga

SEQ ID NO: 124789 - DNA, 765 bp, Enterobacter cloacae
atggaaaatataatgaacaagccagtcattggcgtggtgatgtgcagaaacaggcttaagggtcatgagacccagaccctgcaagaaaagtacctgaatgccattatcaatgcggggggcttacctattgccttaccgcatgcgctggcagagccagagttgcttaccactctgctgccaaccctggacgggatttacctgccgggcagcccaagtaacgtgcagccgcacctttatggtgaaaacggcgatgagcctgacgccgatcccgggcgtgatcttctgagtatggcgctgattgccgccgcgctcgaaaggcgcatccccattttcgccatctgccgggggctgcaggaactggttgttgcgacgggagggacgctgtatcgtcgcctgttcgagcagaatgacctgcttgagcaccgggaagatcctgaactgccggttgagctacaatacgccccgtctcatgaagttcaggttcaggagggaggactgctgtctcaattaataccaggctgtaacacattttgggtaaactcgttacacgggcaaggtgcacgaacgttaggaccacggcttcgcgtggaggcccgctcgacggacgggctggttgaagcggtcagcgtgcatgaccatccttttgccctcggcgtgcaatggcaccccgaatggaacagcagcgagtacgccctgtcacgtatgttgtttgaaggttttatcaccgcctgtcaaagccacattgccgagaagcaacgactttga

SEQ ID NO: 124790 - DNA, 159 bp, Enterobacter cloacae
atgaaacaggccaaattccccaacatttcctccgtggaaaccgtcttccggaagtccgggagacggttctcagtgggcacttatgccttatcacgcatagcctgttgcaggatcgccagcgcctgggtgaactgggcatccggaatggtcaacggataa

SEQ ID NO: 124791 - DNA, 306 bp, Enterobacter cloacae
atgctttttagcggcctgggctttctgctctacagcaggtttagcggcttttttatggtgctttttagcggcctgggctttctgctctacagcaggtttagcggcttttttgtggtgctttttagcggcctgcgctttctgctctgcagcaggtttagcggctttgtggtgttttttatgatgtacagtttttgctggcgcagcagtggtcgttgcagttggcgcagcggccgctggtgcagcagtggtttcagcagcaaacgcagcagaagacagacccatagcagcggcaacaaccagagctaa

SEQ ID NO: 124792 - DNA, 894 bp, Enterobacter cloacae
atgaaaagacgctatgttgttgcggatgtttttactgacactccgtttctgggtaaccctgttgccgtcgtactcgatgctcaaggcatgaacaaagcacaaatgcagcaggtcgccgttgaatttggctacagcgaaaccacgttcgttttgccgccagacaatccttcccatacagcacgcgtgcgaatctttacgccctcgcgcgagatccccttcgccgggcacccgaatgttggaacggcttacgtgcttgcccattacgccgcgatgaatcatcagcgcctgcctgatacgctacacttcgaggaaatagccggtgtggtgcccgttcgcctgttgcgcgacaacgatacggtcactggcgcagaactcctggtgcctgaggcactctcgtgccgctctgaagtcagcccggaaagcgtggctgcctgcttatccctgaacacggaagatatccgtaccgaggtacataggcctgtggtcgcgtcggtaggtctgccctttctgatagccgagctggcttctcgtgaggcgcttcgtcgatgcgtgccgaatttacagggttttcgcgcgaccttaccgctggatggcgccgtttccctctatgcctacaccctggatacgaatgctgatgaacctcatgatgtgcaggcccgcatgtttactccccgcatgacagaagatcctgccacaggcagcgcgactgccgctgcgacagcgctgctggcgttgcaccgcaataaaacgacgcttaaccttaacgtcagtcagggcgttgatatgggacgagcaagcgtgctgttcgcgggatacgatgcctcgtcgggagaggcggtggttcgcgttggcggaaagtgcgtgatgacgcttgaaggcacattctcgctctag

SEQ ID NO: 124793 - DNA, 768 bp, Enterobacter cloacae
atgcacagcgataattttgatatttccacgtatttcaaacgcataaactacaccggccccgcggctaccgatacgggtaccctgcatgcgcttatgcgtcatcagctttttgcaatcccgtttgaaaatctggatgtacaggcggggaaaattgtctcgctggcacctgacgatattgccgataagctgttaacaccggggcgcggcggctactgctatgaggtgaacgggctgtttgccatggcgctggaggcgttaggtattccttaccgttttgtggcggcacgcccgatgttctatcccgtacggcggccaaaaacccatatggcgttaattgctgaggtggagagccgacagtggctttgcgacctcgggtttggtagctatggcattcgtgcgccaatggctctggacacgcttgatgttgatatcgcacaggattttgacacgttccggcttagccgcagcgctgagggcgaatatctgcttcaggcgaaggtggcgggagaatgggcccgtcagtacggctttgatctcacgccacaggagtggattgatttcgttccggccaactaccttaactccacgcacccggatgccatttttgtgcagaagcgtgtggtggtgcagcatcgaccggagggacgcgagattttactggggaatatgctgaaaatcattacggcgaagggcacggaaacccggcagctggcggaggacgacatcccccgtattctgaaagagcgttttgcgttgatcgcggcataa

SEQ ID NO: 124794 - DNA, 1437 bp, Enterobacter cloacae
atgtctgccccatccccgtcctctcctcactatcgccgtattgcggatatgctgcgtcttacaattacgtctggcgcgttgcgagccggtgacaagatcatctccgcgcgtaaactggccgaacgcgagcatgtcagtcttccgacggcgcttgaagcgctgcgctgccttgaggccgaggggctgattgttgcacgtccgcgttcaggttattacatccaccagacaagccttccgcagcctgtggagccttctcgttctccgccaggcccggttcccgtcaccctgtcggccatggcccggtcgctgttcagcagttcagaagcccgtctggtgcctctgggtgcagccctgcccgatcctgcttggctgccgggcgagacgctacagcgggcgttgcactccgcgggccgacgtctggacgcgcacggtcagagctatagcctgccgccgggaaggcgtgatttgcgaagcaagattgccgcgcgttctgcacagtggggagcccgtttcagcgcggatgaccttattatcaccgcaggtgcgacgcaggcgttgcgccttgcgctacgagccgtgtgccagcccggtgatgtggtggcgattgagcagccagcctactttggtacgctcctgctgctggaggatttgggtctgaaggccttatcgatccccaccgatcctgttgagggcctgctgctggaaccgctggcggacgccattcggtgccaccgcccggccgccgttctggcctcccctacggtgcaaaaccctttgggcgccagtatgcccgtcacgcgtaagcaggaactcgttgccctgcttgacgcggcagatattcctctcattgaagatgatgtttacggcgatcttgtcggcgagggacaacgtcccccagcctgtaaagcgttcgaccagagtggaaatgtcatttattgcagctccctgtctaaaacgcttgcgcccggctggcgaatcggctggattgccgccggacgctactttccgcaggttttacaggcccgcatggccggagactgggcaggcgctccgctgctggaagccgcaacgagcgaagtcctggcgagcggcgattatgatcgccatctgcggcggctcaagcgtcgcgttgcggagggaatagacgccgtcgtggcgcgggtcgaggcaagttttcctcccggcacgcgtgttaacgcgcccgccgcgggttacttgctgtgggtagaacttcctttgcaggtcaacgcgctggaggtacatcgtcgcgcgctggcgctgggtattggcgtcagccccggcccgctgttttcccctgccgcagagctgtctcactttttgcggctaaactgcgcaaacgaaccgacgccccgcctgctgaatgccgtggagcggattggggcgctgtgttatgaactggcggatgcgcggccgtga

SEQ ID NO: 124795 - DNA, 429 bp, Enterobacter cloacae
atgatatcagtcgcgctgcccctcattgcgcttttcatcctgttaagatttgttgtcagacgtattcgccaggcaaagcgccttatttcaaatcataacgggatgaaaaagatatctgctaacccctcaatttttggcgggaatgcaggtaaaacatggttttatgatgaccagtttttatatgaagttaaaaacaacgccacccgtaagattgcgctggctactatcattaaaatcgggccggggaatatcgagataaatagccgacgggtctggattgttatttaccgtgacggtgctaatgaaaagcaggtgcagttttataacaatctcaccctctggaatcataacttcacggcttttctgaccgcgataaaaagtgccaatccggacgctgtcgttaaagagcgcgcaatcctgaatttgtga

SEQ ID NO: 124796 - DNA, 261 bp, Enterobacter cloacae
atgtatagctaccatgaagtagaagccatcaaaaccaatcttgaatggattgttaatcagctaacctttaggcaatcctccccctcaggtaccgacctaaaagcgctctttgacctgctggaactgattcagtcttacgaaatgctcctggacttaatcagggacttcggaacggacgtgattgatacgcacattgcggaaggcctggccgtcacggaaaaactcatcgccaaggtcaaaagaagtgcgcacgcaatgtaa

SEQ ID NO: 124797 - DNA, 1362 bp, Enterobacter cloacae
atgcttgcgaatcgtcttaccgtaaaaggtcgttatctctcgttctgtttcggttgtgttattgtcatcggaatattacagggtttattttcaaaactggttgaatgggtaccttccttttcgccgctgttgttccccacgctcaccatttttttactggtatttcacctgtttattgcctgttttatggcaatgaaatactggtgtgataagaggcgtctgtatctggttgccatcgcttttgcctttgccggttcggcattgctgatggttggaacgctgtccagttttcccgcctggctggatctctaccagttcaacgtcgtgaactataacgatgcgatgatctactatatgttccgccatctcatcatggcggtcctgttcatcgcttcggccctgctgtttcccctgcgtaatcagcccctttcgaggctgacgcatatcgctatcgtcagcacgacatttctttttactgccggtggcgtgatgttggcgtggatgtattccagccattttgattttttatccctcgacctggttgataatgaaacgcggcagtttatggttctctggagccacagcattaatatttcattaattgtcctctgggtggtgacattagctacgctgatgtatatgacgcgcgtacgtaatctgttctgggtgaccggtaattttctttgtgtctgctatatcgtcacgctcttgatgctgttattgggtgggcatgccgaagacatatcgtggtatcgcgcacggttatttgaaaccgtcgccacgctgctgattatttttgttctgctctgcgatgtcttcagcttgtaccgtgagtcgcattcaaagtatcaacagtcgtatcagaattcgattcgcgatccgcttacgcgcctgtataaccgcagctatttttatgaatcgttaaatcaggcgctggctgtcgcaaaatccagccgccctgtttcggttattgtcagcgatctcgatcgcttcaagcgcatcaacgacaactacggtcacctgcagggggataaagtcttacagtttgtcgccaatctgctggtggattccgtgcgcccgcaggacatcgcggcgcgtatcggtggtgaagagtttgtcctgatgctggcaaataccccttcagacgcagcatgccaggtggcggaacgcatacggctgaagctgagcagctttgataaaaccaccagcgaaggtcagctaccggagcccattaccatcagcatgggtgtgtttacggcaacatcatcgtccgtgaccgcagaggagtgcgtggaaagcgccgataaagcgatgtatgaagcgaaagagactggccgaaaccgcgtcgttgtctttaggtag

SEQ ID NO: 124798 - DNA, 1596 bp, Enterobacter cloacae
atgaagagtatcgccattatcggctccggcccgacagggatttacaccttttatcatctgcttaaaaacagcaccccgctctcagtttctgtctttgaacaggccgatgacgctggcgtgggcatgccttataacgacgacgataattctcgcctgatgctggcgaacattgcgagcattgaaatcccgcccatttttatgacctacctcgactggctgaagggacagagcgaagcgcacctggcgcgttttaaggtagataaaaccacgctccacgatcggcagttcctgccccggatcctgctgggtgaatattttcgcgacagcttgcgaaccatcgtcaaagaagctaaaaagcaggggttcgaggttaacatccatgaatccgccgccgttaccgacgtcattccctcctcaaccggcgtcacgctttccgtcaatggtaacgtctttcctgaacgctttaaccttgcggttatcgccactggtcacgtctggccagacgaggacgaagccacgcgcacgttcttcccaagcccgtggtccggtctgatggacgcccgcattcccccttgccgcgttggcattatgggaacatcgttaagcggtctggatgcggcgatggcggtggtgatgcagcacggtgagttccgtgacggtaaattcatcctggacaaaggcagtgaagcgttaaacattacgctgatgtcgcggacaggcattctgccggaagccgatttttactgccctatcccttacgaaccgctgtccgttttaaccgcatccgtggttgaaggcgagatagccaaaggatcggatggcctgcttgaccgcatttttgccctgatggtgaaagagctccaacgtgccgacccggcatggtgcgagaaaatttctctgcaacgccacaacgccgacagcctgcgtgacgcctggtttgaggatcgtcaacagcacggtccatttagctgggcggaagagaacctcaatgaagttgaacggaacaaacgcgaacggcgcaccgtcgcctggcgctataccgtccttcggctgcatgaggtcgttcaggagattgttacccatcttagcgatcaggacagagagcgcttcaaaaacgggctggcccgcgtgtttatcgacaactatgcggcgatccctccgcagtctatccgcagactgcttgcgcttcgcgaggctggcatcatcagcgtggcggccctgggcgacgactatacgctggatgttggcagcgaccgcacggtggtgtccacaaaagagaccgtttaccgctttgacgttttcatcgatgcacgcgggcaaaagccgctcaaaaccaaagatctgcctttcccctcactgcgcagagcgctggaaacgaccggcgatgagatacccgatgtcggtgaagattacacgctaaatgcacctgaaacggttcgcgggcgcatcgcgtttggcgcgataccgtggctgatgcacgatcatccctttgttcaggggctggcggagtgcgcagagattgcagaggcgatggccagggcggctgaaaaaccggccacaggtttacggcgtcgattaccgtacgtagagaactga

SEQ ID NO: 124799 - DNA, 783 bp, Enterobacter cloacae
atgattacactctgtaaaacctgcggtacctcctacgatgcacagccggaaagatgcccgatttgcgaggatgaacggcagtatgtcccggccagcggccaggcgtggatcgagtatgagacggtaacggccacgcacgcgaataaatggcagcagctggagccgcagttgtacagcatcaaaacggtaccgtcttttgcgattaaccagcgcgcgttgctgctgcgtaccccacacggcaatattttgtgggactgcatcgccaaccttgacccggccacccacgctatcatcaccgcgctcggcggcctccgcgccattgcgatttcccatccgcactattacaccaccatgcaggagtgggcagcggcgtttgatgcgccggtctatctgcacgccagcgatcgcgagtgggtgatgcgcgccagtccggcgattaattactgggagggcgatgcgctggagatcgtgccatcggttactttgctgcgtctcggcggccatttcgcaggcggcacggtgctgcactggcaggaaggcgagggcgttttgctggcgggggatattctgcaggtcacccccgggaaggatgcggtgtcgtttatgtggagctacccgaatatgcttccgttgcctgcccgcaaggttgaggaggtcacccggcgcctggtgggcaaatctttcacccgtctttacggcgcgttcgaagggcagaacattccggcgaatgccgacgctatcgtacagcggtcgggccagaaatatattgcttgtctgaagtga

SEQ ID NO: 124800 - DNA, 642 bp, Enterobacter cloacae
atgctgaatattgtgattaaagagaccgacgcatttttcagagcgggattgcagtgttttcttgaggatttcttctttcataatttcaaacatctgcttcactttgacggcgaactttctcatgaaaatgtcagtgccgccgatattatttttctctctttatgtcagggggaaaccctgacctgttatcccgaattacaggcgcggaaaaaaggaattgtggttgggctggtggatgatgaacaccgtttctcgacatatccgtcctgttttcaggatatgatttttatctcccgccgcgcttcgctggacaggatcaccgaggcgctgtttatcgcatggtaccgcacacagctctcaagctttcactggaggaagagaagctgcagcgaatgccagcataaaatattatcgccacagcaaattcgcgttatggtgaatttttacagaggattatcggtagggcagatcgcgaataagcttaaaacaagtgataaaactatttttacccataaatatttgctgatgcaaaaattcaacctgcgcagtgattttgaactggtggctttgattcacaggatggtggagaagaatacccctgcaaaccggttgcgagactatctgactcaccatcatggttaa

SEQ ID NO: 124801 - DNA, 513 bp, Enterobacter cloacae
atgaatattttgcgcacggccgcgctcgccgccacagtaataagcagcaatatctttgcggcggacagcgttaatgtcagcgttaccggcaatattattgccgctccgtgtatattcaatggagggaatgccagtctgaatattaatcttggcaatatacaggcatcaaatatggctacgccgggatcttcatccgatcctgtgccctttaacctgttatttacccagtgtccgacggggacgcgcagcgtgacggtctcctttaccggcactcccgatccggatgcgggagcggattattacatgaacagcggttcagccacgcacgttgcgattgcgatgagtgaggccgcgacaggcgtgctgaaaggaacgggtgcaagcctcactcaacctgtttcagcagacagaacggcaacgatagccatgctggcatcggtcagatccttcaccggcggtgcgacgccggggagcatcagtgccgtcgtggtcatgacgatgcagtacaactga

SEQ ID NO: 124802 - DNA, 948 bp, Enterobacter cloacae
atgcgcttaattacgatgatatttctgctgtgtatcgcagcaggctggagcagtgcccatgcaggcacctgcacgacgattacgccccaggaatctacgttgtccatcggcaccattacggtgcagcgcgatgtggccgttggtaccgttttattttcgcgtaatgcgtcaatcaccagcgcctatttaacgggatgcacgagtccggtaatgctgggatttagcatgcgatatctgaatgcaacccagagcgctttcggaaatcacgtctatgacacaaacgtgagtggaattggtattcgtttttcatctgggggatattttgaaaatccgaccaataccttttcctataccgcgcaggccagctatgtcgaatggtggggcggtaaaatagaacttatcgtgaccggaccggtcgcgtcaggttcactcacgccgggagtactgggcgtggtgatgctgcaggggagcgatggcatttaccgtgatgctctgacgaccacgctgctggggggaacggttaacgtgctggcctgcagcatcaccaccccgcagctgacgttccctatcggcgatatttctgcggcgacatttggctcgacggtgggcaccacaccggcgggcgcccggaatacgcaaaatcttggacttaactgcgatcctggcgccaacgtgaatgtttcgatcagcggtattcagaacccggacgttgcgacgacgagcgtgctggcacttacggggcaagggaataccggcacggcgaaaggggttggcgttcagttgctctataacggcacgccgctggcgttaaatacgcgcctgccgttaaccgttgccgcgggcggtcagcagacatttccgttaacggcgcgttattaccagacaaaaacgacggttgagcccggcacggccaatgcctctgcgaccttaaatttgacgtatcagtga

SEQ ID NO: 124803 - DNA, 2532 bp, Enterobacter cloacae
atgatggcaacgaaaaatataaaaatgcaacccgcgcgtctggctgtttatatcaccttcgcgctgacgcatgctgtatctgtggcgcatgcccgggaaacctttaacgccgagctggtggagctggataatcccgggatggcaaaagccgatttatctgcgtttgaatccggttcgcaggcaccagggaaataccatgttgatatcattcttgacgaccagcttattgagacgggcgatattgattttattgcaggaaacgatgagaagggaaatgacagcctgctgccttgcctgagtattgcacagctaaaaagctggggcgtcaaaaccgcactgttccccggcctgacgagcgaaacgacatcctgtgtcaacctgcaggcaatcccgcatgccagtaccgattttcagttcggcgcgcagcggctggtcatcagtattcctcaggccgcgatcgatctgcctgcacgagggtatgtttcgccggaacaatgggatgaagggatcaccgccgcgatgctcaactacagcctgagcggggcgaacagccgggcaaaacaggccggcaataagaacagtaacagtcaatacgccaacttacgcccgggcattaacgttgggccgtggcggctgcgcaactacaccacctggtcgcgggatgagacgggccaggacacgtgggataccgtctacacctacgcacagcgggccattatcccgctcaacgcacagctcaccctgggcgatagcgccgcgcccgcagacgtgttcgacagtatgccgtttcgcggcgggcaactggcttccgacgacgacatgctcccggattcgctgaaaggctatgcacccgtggttcgcggtatcgcgcggaccaatgcccaggtggtggtgcggcaaaatggctatcagatttatcagacctatgttgcgcctggtgcatttgaaattacggatatgtaccccacgggcggcgcgggcgatctggatgtcaccattaaggaagctgacggcagtgagcaacatttcactctaccgtatgcctcgttgccggtattacagcgcgaggggcgcctgaaatatgcggtgaccgggggccagtaccgctcttataacaataacgttgataagacgccgtttgggcaaatcaccgggatctatggtctttcgcggggcgtcacgctctacggtgggttgcaggcgtcgagcaaataccagtctgtcgcagccgggctcgggaaaaacatgggcgatttgggtgcgatttctgcggacgtgacccaggcctggtccaccccgcaggacggcaaaaaatccaacgggcaatcctggcgcgcgcgttacagcaagaactttgtgggaaccggaacccagttttcgattgcaggctaccgctactcgacccgcggttactacggcatgcaggagatcctcgattcctggggtgacagcactgcgcttcaggaccggcgtcgcaaccgggccgaactgacgatgagccagacgttgggcagcaatctgggttcgctgaccctgagcgcggcccgtgaagactactggaattcgggtaaaacgatggcgtcatacagcctgggttacaacaactactggcacaacatcagttacggactgacctggacttacagtaaaaacggcagtgcgggttcatacgatggcaataaacgatacgacagcgatcggctcgtggctttcaacgtcagtattccccttgagaaatttttgccgcaaacctgggctaactatggcgtgagcgccagtcagcataacggcaccacacacaacatcggtctgaacggggtggcgctggaaaaccatgcgctgaactggaacgtgcagcaggggtacgggtcggatggcgtgggctacacgggcaacctgaatggtgattataaaggaacctacgctgaactgacggcgggctacagctatgacaaaaacagcgagcgccttaactatggcctgcagggaggcgttctcgctcaccgggaagggatcaccttctcacagcctctcggtgagaccaatgtgctggttagcgccccgggtgcgcacgatgttgatatccgtaatcaggcgggggtcaaaacggattaccggggctatacggtggtcagtaatctctccgtttaccgtaaaaatgagatcgcccttgctccggaaagtatgccggatgatgttgagctggagattaatacccgcacagtgaccccgacgcgtggggcgatcgtggtggctgattatcaggcgaaggtggggcgccgggtgttgtttaatttaacgcataacggccaatttgttcccttcggggcaatggcgagcctgaacggtgtggataacagcagcgttattgttggcgataaaggacaggtctatctcaccggtctggatgcacggggaacggtcgctgttacctgggggacggaaagcgaccggcaatgccgcgcaccgttcgtcctccctccgccatcatcggcaggcggaattaccgaactcaacgtcaattgtctttag

SEQ ID NO: 124804 - DNA, 678 bp, Enterobacter cloacae
atgaatgttattagcaaagccctgctgagcgcggctgttattatggcgtcgctgtcacaggcttctgccggggttattattggcggtacccgcgttatttttgatggtggaaaaaaagaggcctccatcagcatcaataatgcggatgaagccccttacttaatccagtcctggattgagatgccagaaggtaatgctaataaagcgccttttatcatcaccccaccgctctacaggcttaacggtggtcagcagaatattgaacgtattttgctcaccggctcgttgccgcaagataaggaaagtctgttctggctgaacattaaagcgataccgtcagccacgaaacaggttaattcattgcagattgccgtgaagacacgcatcaagcttatttatcgtccggaaaagctgaaggcgtcaacgccggaggatcaggtaaataaattaacctggtcccgcagcggaaataaaatccaggtctctaatcctacaccctatgtcattaactttaatgacataaacgtcgggggtaaaaaactggaggaggcctcatgggtggcgccgggcgcagtggctgcatttagcttaccgcccggcatttctggcaatcagatccagttcagcgtgattaacgattatggcagcccgggaataagacaccaggccagtttttaa

SEQ ID NO: 124805 - DNA, 630 bp, Enterobacter cloacae
atgtcccttccagaaacgtctcaacgtggctcaccctacgcgcaagagcttatttctcacttactgcctgactgtacgacacgacaaaccgctcgcggcgagcgacttgaccttcagatcgatggtcagggaatgtgctatttaattcttgagggaacggtcgctatctacagaagaagcgacgatatgatgctctccacggcccgcagccccgccctcttcggcctcgcgaatctgaccgacatttattttaatgactacctcaagaccgtaagcccttgcctcataggcacgctcaccgccgagcgggttaatgacatcatcaaagaaaaggccttgtgggggctgctttcaaaacagctcatgtttgtttatagccgtctttataacaacgtgatgcctcagggggcaccgacggcgtatgagatgattcgccagcagctcataaagctgatggaggaagatgatagctatcgcggcagcgtgacggcggaaaggtatatcagggagaaaacccagctctcccgaagcggggtcatgcgcattctggccgatttaaaaaccggcgggtttatcgaaatggaagaaggccgtctgcttaaaatcaacaaacttcctgccagatactga

SEQ ID NO: 124806 - DNA, 822 bp, Enterobacter cloacae
atgaaaacgtggtttgccctgctgaccgccctgccgctggtggcgtttgccgccgcgcaggagaaaattgtcacccttggcggcgacgtcacggagattgtctatgcgcttggcgcggactcttcgctggtcgcacgcgacagtaccagccagtggccgcaggcagcgaacgcgctcccggacgtgggctatttgcgccagcttaacgccgaagggattttgtccatgcgtcccacgctggtgctggccagcgaccaggcgcagccgtctctggcgttaaagcaggttgaacgcagtcacgtcagggtgattaccgttcctggccgcaacgatctgagcgtcattgacgaaaagatccgcattattgccgaggccacccaccgtgaagcgcagggagagagcctgcgccgctctctacgtcaggcgatggcggctctgcccgcagaaccgctcaacaagcgggtgctgtttatcctcaaccacgggggaatgaccgccatggccgccggacagcaaaccggcgccgatgccgccatccgtgccgccgggttgcagaacgcgatgcagggtttcacgcggtatcagccgctgtcgcaggaagggattattgccagccagcccgacctggtggtgatttcgcaggacggcgtgaacgcgctgggtggcgaggcgaatctgtggaagctgcccggactggcgcaaaccccggcgggacggcacaaacagctgctggcgattgatgacatggcgctgctgggtttcagcgtgcgcacgccggaagccatccggcagttgcgtgctaaagcggagcaactgccctga

SEQ ID NO: 124807 - DNA, 993 bp, Enterobacter cloacae
atgtcccggcggatcccactgtcgttgtggatgctggccgcaattctgagcatcatgacccttacggcaacaggctttggggcattgcctctgccggtcagcctgctgtggaacggcagcgatgaggcgatgcgtcagatctggctgaccattcgcctgccccgcgtgctgctggcgctggtgattggcggcgcgctggcgctggccgggtgcgtgatgcagggactgttccgcaacccgctggcagacccgggtttgcttgggatcagcagcagcgcggcgctggcggtcgcgatgtgggtggttattcctgtcacgttgccggccctgatgatgctttacgccccgatggttgcggcattcctcggcgcgctggctgcaaccgttgtgatcttcctgctcagccagcagcgtcacggttccctgtcccgtttactgctggtggggatcgccatcaacgccctgtgcggcgcggccgtcggtctcctttcctggcttagcaacgatgcgcagcttcgccagctttcgctctggggaatgggcagcctcgggcaggcgcagtggtccaccctgcttgcggtgacctcgctgatggtgcctgcggttctgattatctggcggctggctggtccactcaatttgctgcagctgggtgatgaagaggcgcactatctcggggtggatgttgcccgggtacagcggatcatgctgctgtgcagcgccctgctggtcgctgcggcggtggccatcagcggcgtgattggctttgttggccttgtggtcccacacctgatgcgtatgtggctaggggccgaccaccgggccgcgatccccggctcggtgctggccggagcgttactgctgctggctgccgatacgctggcgcgcactctggtcaccccggcggaaatgcccgtcgggttgttgaccagccttctcggtgcgccgtggttcctgtggcttatctttcgtcgtggaggtgcgcatggctga

SEQ ID NO: 124808 - DNA, 780 bp, Enterobacter cloacae
atggctgaacgctattgtgcggaaaacctggtctttcacgccgggcaacggacgctgatcgacgatgtatcactgaccttatctcagggtgagctggtcgcgttgattggccctaacggtgccgggaaatcgacattattacggctgctgaccggctatctcacacccgcaagcgggcggtgcagtctggcaggcacgccgcttgctgactggccaacggagactctcgcccgctaccgggcagtgatgcgtcaaaatacgcagcccggattcgactggccggtggaatccgtggtcggtatggggcgcgccccctggacgcggtcccctgaggcgtcagtggttgaggaggtcatggcgatcacaggctgtttacccctggcgggcagacgctattcggcactctccggaggcgagcagcaacggatccagctcgctcgggcactggcccaactctggtgcgacggcgccccgcgcggctggctgtttcttgatgaaccgacctccgcactggatctcttccaccagcaacatctgctgcgcctgatgaaaaccctgacccgtcgggggcatctccacgtctgcgtggttctgcacgatcttaatctggcggcactgtgggcggatcgtatcctgctgctgcataacggcaggctggtctcccgggggacaccggaggacgttttgcaggccgggacgctggcgcgctggtatggcgcgcaggtgctggtcggcagccatccggctcatgccgtgccgcaggtgttcctcgctccctga

SEQ ID NO: 124809 - DNA, 1182 bp, Enterobacter cloacae
atgaaaaaggtcatgattgtcggggcaacgcgaacccccattggcagttttcgcggatcgctctcgcccctttcagccattgagctgggtgccgtcacggtacagcgtctgctggagagcagcggtcttcacccagagcaaatagacgaactggttttcggtcaggtgctgacggccgggtgcgggcaaaaccccgcccgccagacggccatcactgccggattacccgtcagcaccccggcgacaacggtcaatctggtgtgcggcgcggggttgaaagcggtacagctcgccgcccaggcaatccgctgcggtgacgcagacgtggttatcgctggcggccaggagagcatgagtaacgccccgtatctgctggatggcgcacgttcagggctgcgttttgggcatacgggcctgcaggacagcatgatcaccgacggcctgtgggacgccttcaacgattaccacatgggcatcactgcggaaaacgtcgcccgtgagtacggcatttcccgcgagcaacaggatgccttcgccttcgggtcacagcaaaaggcagcgtccgccattgagactggtcggtttgacgccgaaatagcgccagtgacggtgaaacagggcaaacgtgcgccacagattgtccgccatgatgaacagccacgcccggaaaccaccgccgggcagcttgcacagcttcgccccgcatttttgcatgacgagggcacggtcacggccgggaacgcctccacccttaacgatggtgccgccgcggtactgctgatgagcgaggaaaaggcgcgggaaagcgggttacctgttcttggccacattgtgagttacgccgtgacgggcgttgatccgtcgatgatgggcatcggcccggtcagcgcctgccggatggcgctggcgcgggcgggctggacgctcgacgacgtcgatctcattgaagccaacgaagcatttgccgcacaggcactggcggtgggcaaagagcttggctgggatgaacagaacgtcaacgttaacggtggcgccatcgccctgggccatccgattggcgcatccggctgtcgcatcctggtgaccctgctccatgaaatgcagcgccggggggtaacaaagggacttgccaccctgtgcgtaggcggcggacaaggcattgccctgaccgttgagcgttaa

SEQ ID NO: 124810 - DNA, 2250 bp, Enterobacter cloacae
atgtcgaacaaagataatacacatcaatcaccgattcatggcactgaagaatctcaaccgggtatggactctctcgcccctgctgacggctctcaccgcccctcgccaggcacttccgcccccggcgaacagcctaccgcaccgggaagcatgaaatcgccggacaccgggaacgagaagctgaaatcgcttgagccacaccgtaaaggtggtgaaggttttgcactcacgaccaatcagggcgtgcgcattgctgacgatcaaaactctcttcgcgccggctcgcgcggccccactctgctggaagactttatcctgcgggaaaaaattacccatttcgaccacgagcgaattccggaacgtatcgttcacgcgcgaggctcggctgcgcatggctacttccagccgtacaagagcctgaaagcaatcaccaaagcagatttcctctccgacccggataaaattaccccggtgtttgtccgattctccaccgtccaggggggcgcgggttcagcagacacggtgcgtgatattcgcggtttcgccaccaagttttataccgaagagggtatttttgatctggtgggcaataacaccccggtgtttttcattcaggatgcgcataaatttcctgactttgtccatgcggtaaaaccggagccccactgggccataccgcagggacaaagtgcgcacgacaccttttgggactatatctctctgcaacctgaaacattacacaacgtgatgtgggcgatgtctgaccggggtattccgcgcagctatcgcacgatggaggggtttggtattcacaccttccgtatgattaacgcggaaggaaaagccacgttcgtccggttccactggaagccggtggcgggcaaagcctcgctggtgtgggatgaggcgcagaagctgaccgggcgcgatccagacttccatcgtcgtgagctgtgggagtccattgaagccggagatttccctgaatatgaactgggcctgcagctcattccggaagaggacgaatttaagtttgatttcgaccttcttgacccgaccaaactgatccccgaggagctggtgccggttcaactggtggggaaaatggtgctcaaccgcaaccccgataatttctttgccgagaacgagcaggccgcgttccacccggggcatatcgtgccgggactggatttcaccaacgatccgctcttacagggacgtttgttctcgtacaccgatacgcagatcagccgccttggcgggccgaacttccacgaaattccaattaaccgtccgacctgcccgtaccacaatttccagcgcgacgggatgcatcgtcaggatattgataccaatccggctaactacgagcctaactcgatcaacgataactggccgcgcgaaacaccgccaggcccgaaacgcggaggttttgagtcgtaccaggagcgtatcgatggcaacaaaattcgcgagcgcagcccttccttcggcgagtattacgcccatcctcgcctgttctggaacagccagacgccgattgagcagcagcacatcatcggcggctttagcttcgagttaagtaaggtggtgcgcacctacatacgcgagcgcgtggtcgatcagcttgcgcacattgatattcagctcgcccagagcgtggcggataacctgggtattaccctgactgacgagcagcgcaaccttgctccgccaaaagaggtcaacggcgtgaagaaagatccatcgctgagtctgtatgcggtgccaggtggctcaattaaaggccgcgtggtcgccatcctgctgaacgataaaacccgggccagtgacgtactgggcattatgcaggcgctgaaaacccagggcgtacacgccaaactgctttattcccgaatgggtgaagtgacggctgatgacggttccgtgctgccggtggctgcgacctttgccggggcaccctcgctgaccgtcgatgcggtgattgtgccgtgcggggatattgccagcctgttgaacaacggtgacgccgtctattacctgctggaagcttataagcacctgaaaccgatcgcgttgtccggcgatgcgcgtcagtttaaagcgcagctgaaggttgccgagcaaggtgaggacggcattgtcgagggcgataatgtggacgacgcctttatgacgaagctgtttgacctgctcgccgcgcaccgcgtctggtcacgcagcagcaagattgaccagatcccggcgtaa

SEQ ID NO: 124811 - DNA, 648 bp, Enterobacter cloacae
atgggcgcatttattctgacgtttgtcatgctgccaccgggcacgctctctctggaagggattaaaactcaccagcagacgttactctcctatgtcgaccgcgcgccgctgcagagcgcaatgatcttttttgcactctacgtagcggtctccgccctgtcgcttcccggcgcggcgatcctgaccctgctgggcgggacactgttttccctgtgggaaggcaccgtgctggtctcgtttgcctctacgctcggggctacgctggccatgcttgccagccgttatctccttcgcgactgggttcagcagcgctttgcccggccgatgaaaacggtgaataccggtatggcacgcgagggtacggcctatctttttgccctgcgcctgatgccgctgttcccgttttttgtggtgaatttgctgatgggggtgacccgcatcacggtgaggcgctactggtgggttagccaggtcgccatgctgcccgccacagttgtcttcctcaacgccgggcgcgagctgggaaaagtgacatcgctgcacgatattgtgtcgccgggtatggtcttcgcctttacactattggggttattgccgctggctacccgctggctgtattcccgttacacctcttcgttcaaaaagtga

SEQ ID NO: 124812 - DNA, 1170 bp, Enterobacter cloacae
atgcgccgtgtgcgtttttgcacgtttctgacaggcctgctgctggccgcccccctgtatgccgccgacagctggcaaagtatccagcaacaagccaacgggcagactgtctggtttaacgcctggggaggcgatccggcggtcaaccgctaccttgagtgggtgagcggcgagatgcaaacgcactacgccattacccttaaaatcgtcccgctggccgacgctgccgatgcggtaaaacggatccagaccgaagccgccgcggggcgcaaaacgaatggctcggtcgacctgctgtgggtcaacggcgaaaacttccgcacgctaaaagaggctaatctcctgcaaaccgggtgggcgcagaggttgcccaactggcgctatgtcgatacccgcaaacctgtcaccgaagatttcgccattcccacagacggcgcagaatcgccgtggggcggcgcgcagctgacctttatcgcccgcaaaaccagcatgccgacgccgccagaagatccgcaggcgttgctggattacgcaaggcagaaccccggcaagctcagctatgcccgcccgcccgattttaccggtaccgcgttccttgagcagctgctgatgacgctcacggctcatccggatgcgttgcaaaaagcacccgatgacacctttgcccaggtgaccgccccgctctgggcttatctcgataaactgcacccgctgctgtggcgtgaagggaaagactttcctccctcgcccgcccggatggataccctgcttgccagcgggagcctgaatctgtcgctgacctttaacccggcgcatgggcagcagaaagtggcgagcggcgaactgcctgccgacagctacagctttggttttcgcaacgggatgctcggcaacgtccattttgtggcgattccggccaatgccagcgcaagcgctggcgcaaaagtcgtcgccaacttcctgctgtcaccgcgggcgcaaatccgcaaggccgacccggccatctggggtgacccgagcgtgctggatgtgaaaacgctgcccgaagatgaagcaaaacagctgctggctcatacgccgcaggggctgccgaaggttctggcagagccgcagtccgcctgggttaacgcgctggagcaggaatggctgcgtcgttacggcacccgttaa

SEQ ID NO: 124813 - DNA, 1530 bp, Enterobacter cloacae
atggctgcgtcgttacggcacccgttaagctggcttgtctggctggcgatggcgattatttatctgccgctcctgcccgccggtgccatgctgcttgctccggcattttctgtcgttaactggcagcggctgctgaacgacccacaattgcctcaggcagccatcgccaccctggtttcaacgcttatcgccacgctgggggcgttgtttatcgccctttctctcgtggcccttttctggcccggcaaacgctggcggcgtctcagtacgcgcctgccgtggctgctggccgtgccccatgtggctttcgcctccagcgcgttgctgctgtttgccgaaggcggtctgttttatcaggtctgcaccgtctgttcacctccgtatgaccgctacggcatcgggctgggtctgacgctcgcggtcaaagagagcgcgtttgtactgtgggcgatttacgccgtgctgccggaaaaacggctcgcaccgcagaagattgtcctgcagaccttcggctacgggcgttttcagacgcttaactggctgctccttccggcgatcgcgccggtactcggcgcggtgatgctggcggtgctggcgtggtcgctgtccgtcgtggacgtggcgatcgttctcgggcccggtaacccgccgacgctggccgtgctggcctggcagtggctgagccagggcgacgtacagcagcaggcaaaagggacgctgctgtgcctgcttctccttctgctgctggccgcgcttgctgcgctgggctacgggctgtggaaggtgtggcgtcgcacgtttgcaaatccgacgggcgcacgccacaggtctcatctcgccctgccagagcgtgtattcagcggctttctgcccgcgtgcgggatactttgcgccgcggtgctgtcgatgctggcccaacgggacgatgttggcccggtgagtaccagcctttctttcggtctgctttcgagccttgtcgccctgatcgtcatttttctctggctggaatgggggccgcagcgaggcgctccgtgggtgtggttaccgctcgcgctcccggcgctaccgctggtcacggggcaatatgccattgcgttacatctgggcctcgacgggcactatgccgccgtgctctggagccatctgctctgggtactcccctggatgctgctggtgctgcaaccggcctggcaaaggctcgatccccggcttattcttaccgccaggacgctcggctggcggcgggcaaaaatcttctgcctgctaaaatgccctctgctggtgcgccctgcgctgctggcctttgccaccggtttttcagtcagcatggcgcaatatatgccgacgctgtggctgggcgcaggtcgtttcgccacgctgaccaccgagaccgtcgcgctcagcagcgggggcagcatcccggttctcgctaaccgggcgctgggtttactgctggtcacgggcacggtgttcggtctggcctcactcttctcccgccttgcgggccgctatcgtcagggattacgttaa

SEQ ID NO: 124814 - DNA, 1308 bp, Enterobacter cloacae
atgaaacgtgtttctcaactgaccgcgctggccctgctctgcggcctcgcttcgttttcctctcaggcggctgaaatggccaattcactcacgctgtcccagcttcaggcgcagcacggtacgcctgtcgacacccgcgccagcgcgttctacaacggctggccgcagaccctcagcggtccttccgggcatgaacccgcagcgctcaaccttgcggccagctggcttgacgcaatgagcgacgaacagctggcgcgctgggctaaacagcatcagctttcgcctgcgacgcctgtcgcgctgtacggcgacgatagcgccaaccaggcggtgaaagcgcgcctggagaaagccggatataacgctatctcgctgctcagcgatgccctgcaaaccccggaccgcctgcagcgtctgccgcactttgaacagctggtctatccgcagtggatccaccagctccagcagggtaaaccggtgacagccgcgcccgcgggtgaatggaaagtcatagaagcggcctggggtgcgccgaagttttatctgctgaaccatattcccggcgcgggatacatcgacaccaacgaagtggaaagcgagccgctgtggaataaagtttccgacgacaagctgaaagcgatgctggcgaagcacgggatccttcacgataccaccgtcattttgtatggtcgtgacgtttacgccgccgcgcgcgtggcgcagattatgctgtatgcaggcgtgaaggatgtgcgcatactcgatggcggctggaaggcgtggtcagatgcgggtctgccggttgaacgcggtacgccagggaaagtgaaacccgcccctgattttggcgcaccgatccctggtcagccgcaactgatggtggatatggaacaggcgcgcggtatgctgcaccgccaggatgcctctctcgtcagtattcgttcgtggccggaatttatcggcgaaaccagcggctacagctacatcaagccaaaaggtgacattgccggcgcccgctggggccacgcgggaagcgatgccacccacatggaagatttccacaacccggacggcaccatgcgcagcgccgacgacatcaccgccatgtggaaaacgtgggatatcctgccggagcagcacgtcgccttttactgcggcaccggctggcgagcggctgaaacctttatgtacgcccgggcgatgggctggaagaacgtcgccgtctatgacggcggctggtatgagtggagcagtcacccgcagaacccggtctcccgcggtgagcgcgggcccgagagtacgcgttaa

SEQ ID NO: 124815 - DNA, 570 bp, Enterobacter cloacae
gtgaaagagtcgtccacctgggtagaacccatcccaacccttccggcgagcgtaaaaccgattgccgccatgcagcgaaaacactttggtgcagtcctaaatcccacgcgctggtgggggcgcatgccgcgtctgttctggctggtcgcattgtttgtcggttttctggagcgaagaaacgcgcgcctgacgccgcaactccgctcgctgctgatgacgcgggtatcgcagctgtgccactgtgctttttgcattgatgctaacagcctgcgtctggccgagcgcagcggggcgctggataaagtccaggccgtgagcgactggccagactctgacctgttcagtgaacaagagcgcgcggcgctggcctatgctgaggcggtcaccgccacgccgcccagggtggatgaagcaatcaaaacggcgctgaaacgccactttaccgatgaggttattactgaaatgacggcgctcatcgcctttcagaatctctccgcccgctttaacgccgcgctggatatcccggcgcaggggctgtgcgccacgtttaaagggaagcctgatgcttga

SEQ ID NO: 124816 - DNA, 345 bp, Enterobacter cloacae
atgattcagtgcaaacgcgtctatgagcaggcaagcccggacgatggctatcgggtgctggtggacagactctggccgcgcggggttaaaaaaacggacctcgcccatgacgaatggtgtaaaacactcacgccatcgaacgcattacgtcaggagtatcatagcgaagctattgattttgcgactttcagtaaagcctatcaggaagaactggcgcagcataaggacgagggaaggcgtcttgcggcgctggcacaaaagcagactctcaccctcctctatggcgcgaaaaacacggaacagaatcacgccctggttttagccgactggctacgccatttgtga

SEQ ID NO: 124817 - DNA, 1500 bp, Enterobacter cloacae
atgaaaaagatcgttgccgttactatcgtttcagcgtttctggtctttctgtctctttatacggtcaatgcggttatcatgggccagcagaaaagcaaactgcgtgagatttcccagacccttttacagtattcagaaggcctgtctcagagcgtggcgcagacacttaaaggcctgaccactcagggatgcgacaaagccagccttgatcgctacagacagattaagctcgacagcctttattttgcagacatcggttttatagagcagggaaaaataatctgtaccgctttttggggaaaactcgctaaccctgtccccctgccagcagagctccataaaacacccaggggattcctgctcgcgcaattttccagaaaagattttttcacgggcaatgcggccatctacaataatcttattatcttctcctcccgctacgcttacgataaattcaccccggttaccaacaattactcactcagcgcaaccaccaaagactttgccagaatatttttttcagcaacccatgaggtaaaagaacaggatggggtacattccacgttatttaccctcaccctcacacagtgcagcacttcctgggatttatgcgtcattgtgaagcatcaccatgcaggactggcctcgttatctcccgcggtgtttgcctttctcgtggctattttatgttttatctggattgcgataacgttatttttctttcgactcaatgaagaccgcttttcactggaacggacgttggttaaagccgtcttaaccaacactattggcgttcactaccagcccataattcgcattcaggatagcaaaatagtgggcgtggaggttttatcgagatggcgcgacgcaaaacacggtgacgtctcgccggaattgtttattccattaatccagaaaattggtttgtataaaaaatattatacccatattcttgagaaatcccttaaggacatagcaccgctggtgcttaagcatcagctggtcgtttcgctcaatgttggtcgaacggaaattgaagatggacaatttatcagcattttgcgccgtggatgtttagccaacaacattccgctgtctctggtaaaagtcgagctctctgaaaaagccgtttccaccgcgaatattctggagggcttctgtcagaagttaaaatcctttggtgtcagaatatccattgatgacttcggtgtgcaaaactccaacctggccaggctttcgcttcttgaatatgatgagatcaaaatcgacaagtcgctggtcgatggcatcagtgagcattataagcagaacatttttgtgatctttagcgacgccctcgcaaaactgaataaaacgctggttttcgaaggcgttgagaacgaaatacaattccgctttattgctgaacgatatcctgaggctctggttcagggatggtatttttcaaaatctgtttcccgccgtgagcttgcgaagcggctcctgggtctggcgcggtag

SEQ ID NO: 124818 - DNA, 246 bp, Enterobacter cloacae
atgaataacgacatcccattgaagtattatgacatcgtcgaagaatacgcgacggaagccgcaaagcctgtcagtgagtcagagcaggacccactggcgcattatttccagctgctgctcacgcggttatcaaataatgaggagattgatgaggaagatcagcaagagatggcgcgtgaagccggggttcatgctgaacgtattgatgatattgcgaacttccttaatcagtggggaaatgaatag

SEQ ID NO: 124819 - DNA, 348 bp, Enterobacter cloacae
atgctagccactgttcttatcgctgtcgttgcatttatccatctttacatccttgtgctggaaatgttcctgtgggacaccagaaccgggcataaggcgtttaatctcagcccggaatttgcgcgtgaaacccgcgtgctggccgcgaatcaggggctatacaacggttttcttgcggcgggtttgctctggagcctctggctcggtgaagagggtgttcatgtggccatcttcttcctggcctgcgtgctgattgccggtctctttggcgcagtgaccgccagccggaagattctgtatgttcaggctttacctgcgcttgccgccctgcttgcgctgcttatctga

SEQ ID NO: 124820 - DNA, 825 bp, Enterobacter cloacae
gtgcggttacgcaacaatgacagcacgcgtgatgcgatcctgacgcgctattttccgcagtaccgccttatcgcgccgcaggcccactccgggcttggcggcgcgagttgtattctggagcagggtgcgcaccgtctggtcttacggcataatcacgatcccttcgcgcccgctttccattttcgtcgtcagtttcgtgccctcagacgtcttccgtcggatctcgtgccggaaccccgttttttccgacagggctggatggccgtcgactatcttgagggcgaggtgaaaagcgcgctgccggacaccccggagctcgcggcgatgctgtatcatctgcaccagcaacagcgtctggggtggcgaatcgcgttacttccgctgcttgagcactactggcagcaagcctccccgaaaagacgtaccccggtctggcttgcgcatctcaaacggctgcgtaaagcgggcgagccgcaaccgattcggctctcaccgttacatatggatgtacacgccgggaacattgtgcatacgtcaggaggagccagacttattgactgggaatatgccggagacggcgatgtggcgctggagctggccgcggtctggacggaaagtgacgccgcgcggctgacgctcatcagagagtatgccagagtagcgcatattgacgccgacgcgctggctcggcaggtgagacgctggcgaccctgggtcattatgctgatggcgggctggtttgaaatgcgccttcagcagtccagagataaacaatttattgcgctggcaaacgatgcctggcgtcagttacaaacgaaaggataa

SEQ ID NO: 124821 - DNA, 810 bp, Enterobacter cloacae
atgtatctaattaatggtgagttacaaaaaaagttagatgtgaacgatcgtagcgttcagtttggggatggttgttttaccactgctcgaattagcggcggcgttgtttcacttttcagccaccatctgacacgtttgcagacggcctgcacaaggttggctatcccgtttgatgcatgggaaacccttgctgcggaaatgcgggatatggcgcaaaaacagggtgacggcgtgttaaaggtcgttatcacgcgtggagctggcggtcgcggctatagccccgcaggctgtcagcaaccggtgcgcatcctgagcgtttctgaatatcctacgcattacgcacgctggaaagaaaccggcgtaacgcttgctctcagcccgatccccttgggtcgcaacccttatcttgcaggaatgaagcacctcaaccgccttgagcaggtgctgattcgttctcatcttgagcagacggatgccgatgaagcccttgtccttgacagcgatgggtggcttacggaatgctgtgccgcaaatctgttctggcgctgtgggcaggatgtctttaccccacgcctcgatcaggcgggcgtaaacggcattatgcggcagtttattatcgcccaactggcactgaccgcgtatcgcgttgtcgaagtgaatgcgccgctaacggcgctcgcgcaggctgatgaagtgcttatctgtaacgcgctaatgccggttgtccccgtacagcgctacgcagagcgagagtggcccgcgcgcgaactttaccactatttagccccaatttgtgagtcgtccgattag

SEQ ID NO: 124822 - DNA, 540 bp, Enterobacter cloacae
atgaaaggaaaagtagcggctgttgccttaatcactacactcggaatggtttctgccgcgcaggccgatgatggacaggtaaatttcaccggtaatatcatcgagcaaggttgtaaaattgacaccaccatgaccgcgccgcagaccgtcaagttaggtgatatcgctaaaactgctctgccagaggctggttccgttgccgcgaatactcgctttactctgaaactgtctgagtgcccggcagacctgaaaggcaaagctgttgttgtgaaatacaccggcaaaccagacgccactaataatgactatctggaagtcaccggcgcaggcaccactggcgttgccaaaggcgttgctattcagttgctgaacggcgacggcaccgcgttaccgctggcaaccgcatctaaagcagcgaccatcgatgcgactgctggcaccgctaccatgaatttcagcgcacagtatatcgcaactgccgctaccgttgaggcgggttccgctaacggtaccgctaactttacgctggcatacaattaa

SEQ ID NO: 124823 - DNA, 672 bp, Enterobacter cloacae
atgaaattagtgaattcattaatcgccgctgcatttgttttttcaatggcaacagcgcaagcgggtgttattattggaggcactcgcattatataccatgcagacaaaaaagaatcttccctggacgtcaaaaacccagacccatactcctatttaattcagtcatgggttgataaagatgaaaacgacaccagtaaaacaccgtttatcgtcacgccgcccctgttccgcttagctggcaatgaagaaaacaaactgcgtattattaatacgggcgggaatctgccacaggatcgtgagtcactgttctggatgaacattaaaaccattccggcaacagaaaagttagacaacgtaaataccctacagattgcgattaagacacgtatcaaactcatttatcgccccgcatcgcttactgagatgccggaaaagtttgccagcaagcttagctggaaacgcagcgatcaacagcttacggtcagtaacccaaccccctattacatgaacttcagcgaagtcaaagtcggtgccagtacggttacggatgcgacatacgttgcgcccatgtccagcgcgaccttcagtcttccggcaaatgccaaaggcaatattcgctggaaaattatcagtgacttcggcgcagctggcgcggaacaccagacgcagtaa

SEQ ID NO: 124824 - DNA, 723 bp, Enterobacter cloacae
atgatcagagctaaaaaaaataagatctcgccaaccaggctggcctgcttcatcgcattgcagtgtacgttctcgttgtcgcaccctgcctgtgcccgggaatattttaaccccgcgctactgggtattgacggtccaggtaaagacatttctgacctgagtgcctttgaagaaggtgttggccaaatgccgggtacttatcgcgttgacgtgctggtcaatcagacattgactggcacacatgacattgaatttagcatgcaaaaggacagtcacggccagacatcattgcaaccgtgcataagcgtggagatgctacgtgactttggcgtccgaaccgagcaatttccgcaaccgaccggagagaaccattgcgcaaacctggccgctattcccaacgctgctactcagttcgtcttcaataaacagcaacttttgttgaacatccctcaggcggcgatgaataaccaggcgcgtggatatgttgctccagaacgcctggatgaaggcatcaatgcgctgctgcttaattacagctttacaggcggcaacacccaggctcgtcactctgatatgaccgattcagacagctattacctgaacctgcgcccagggctaaatatcggcccatggcgcgtacgtaactacagcacctggtcacgcaacaccagcggcaacagtacccagaataactgggattcggcatatacctacgctcagtga

SEQ ID NO: 124825 - DNA, 1713 bp, Enterobacter cloacae
atgctgcctgacagcctgcgcggctacgcaccggtggttcgcggaattgcccggaccaacgcccaggtcatcattaaacaaaacggctacaccatttaccaaagctatgtgtcgccgggggcatttgagatcactgacatgtatcccacgggcagtagcggcgatctggacgtgacgattaaagaagctgacggcagcgaacagcaccagttggtccccttcgcctcactgccggttctacagcgtgaaggtcgtttaaagtacagcctgaccagcggtcagtaccgtccttacgacagcgccgtcgataaaacattctttactcagggctcggccatctacggcctgccagcaggatttaccgcctacggcggcggacagctatcgcaacattatcagtcgctacttgtggggatcggtaaaaactttggtgggctgggagccgtatccgtcgatggcacgcaggcctggtcaacccaacaggatcaggaaaaagcgatcggccagtcaatgcgtgttcgttacagtaaaaacattctcgaaacggggaccaatatcgccatttcgggttatcgctactcaacttcaggctattacaccctgcaggaagtactcgacacctggcgggacagtaactggcaggacaataccgaacgccggcgtaatcgtgccgagatattgcttaaccagaatctctgggaaggcgcggggtccatctcgttaaacgccatcagcgaggattactggaatagcgaccgaacaatgcgctcaatcggcgcgggttacagcaacagctggaacggcatcacctggagcctgaactacagctttaaccgtaacaccactgatgcccgcgacagcgacaccgtttacagcgaggaccaggtgttctcaatgagtatcagcgtgccgctggatcgctggctcagcagcagtcgcgccacctacaacctcaataccagtaaacatggcagcaccagccatacggtcgggctgaatggcaccgcgctgcaagatcagaacctcaactggagcgtgcaggaaagcgagacgaaccacgatgggggtaacggtggtagcgccagcctggactaccagggtacctatgccagaatgaacagcgcctacagttacgaccacgatcagcgccgggtaaattatggtatcagcggcggtgtggttgcgcatgcaaatggcattacgctgagtcaggaattaggtgagaccgtcgctctggttgaagcgccgggagcaagcggtgttgatatcactaaccagacgggcgtcagcaccgatttccgcggctataccgttgtgccgtttatcagcccataccgtgaaaacacgctgtcgctgaataccgaacaactgccggatgatgccgacgttgagctttctgcgaaaacggtcacgccaacccgaggggctattgtccgggcacattttgacacacgtgtgggtaaacgcgttttgatgacgttaacccgtcgtgacgggcgccctgttccgtttggtgcaatcgtgactgacgacaagaacgcaaaaaccacctcgattgtcggtgatggtggacaggtttatctggctggtatgtcacttcagggaagtgcaaccgttaaatggggtgcaaataagcagtgtcatacccgctggcaattaccagagagcacatcatcaagcgcaattgtagaggtcaacgcatcatgtcgttaa

SEQ ID NO: 124826 - DNA, 1002 bp, Enterobacter cloacae
atgtcgttaaataaaatgcttaaaaaatggctaacccctgttatttttattccatgtggtctgtcaggcataaattgcgcctacgcaaattatattgaagttcaatctttccatgtcatgcaccatggattttctacattatctataccgaatgtcgtgggcggcacgacagactggtatgataatgattccatttataccgagactatccccggcgaaggaaaaaactcctatattgatttgtctgttaacggacaattacttgccgacaatgtgacctgggcaacaagcaatccaggtattggtattcaatatcaggtccatgtttcatctgtaccgggatattcaccgcaagataatcccacagctcccaattaccgcatcaatctgccaattgtcgatggtagcgcgcgtgacggttactaccatgtatggtatcgcctggtcagattaagtgaaaaaataccagcaggtactattatttctgtccccgacgtaaccatgaacgtacataaccctgatggtgatggtgttgcgttagattcgggcctgattctgtccggcgtagtcagtcagccaattataactgcctgtactattaacgcaccaaaggaaataaaattatccccactgtatggcgcaagcctggcaagtggcgcatcaaacattaccgacgtacccaaagttgagttgaaaaactgccctggcgcgattaatgggatcacctataacttattcgcggtatacggcgcacacaatgccaataatggggtattaaatacggtcactggcgatggttacgccagcaatgtctatattcaggtacagaacgccgatggttctgcacataagatcaacagtgagatcaatctgggcctttatgacggctcaggcgactacaccctgcccgattttaaggtcgcttattatattgatgacgctgcaactgttactgctggcaatgtgaaatcggccattgaacttaaagtaacctacaactaa

SEQ ID NO: 124827 - DNA, 528 bp, Enterobacter cloacae
atgaatatcgcgaatggaaaaaaaatagcgattctggcaacgctctgcggaggtctgttttctggcacgtgttcagccaactcggtcaatattgacattacaggcacggttgttgcctcaccctgtgtggtcaatggagatagcccctcgctggcggtaaaattaggtgacaatatacaggctgatagtctggccactgccggaagtgcaacaaactggactaactttacgcttgcattaacaaactgccctgcttcaacgtccagctttagcgttacttttggcggtacagcggataccgatactaactattataaaaataccggaacggccactaacctgaagctggagttgaccgacgaaacgactaacacggcttacaagagtggcgccacgttgcaaaatgtcgccatcagcagcagtacgcacgcctatgatttgaaaatgcgcgcccgagcagtttccaacggcaacgtgatgccaggcaccattatcggccaggcacaggccacctttacctatcagtaa

SEQ ID NO: 124828 - DNA, 513 bp, Enterobacter cloacae
atgatagaacgggtaaaatctactctcgcatgcctggtgtttgcgctttgtagcaccgcgcaggcaaccactatcgatctgagcggcacggtcgtggcgtctgcctgtaccgtggatgcgggatccaaaaatcagacagtaaggttcgatcaagcacgagcggtaaactttagtcgcgttggggcaaccggagaatggcaggatttttcactcacgctttcatcctgcaccagctcaacgacacgtgttaaggctaccttgaccggcgattcagacagtgacgatcagacaaaatttgctaatagcagcggggatgcaacaggcatggcgatgcagatcatgacccgcgatcatctcaccgagatctcacccgcgggctcgattaccgtcgatgtagacagaacaacgcacaatgcgcagtttcctctcgcggcccgcctctatacccctacgggaaccgtcacggcaggcgaatttaacaccaccgtccagttcactttcacctatcagtaa

SEQ ID NO: 124829 - DNA, 1242 bp, Enterobacter cloacae
gtgtctaagcgtcgtgtagttgtgaccggacttggcatgttgtctcctgtcggcaataccgtagagtccacctggaaagctctccttgccggtcagagcggcatcagcctaatcgaccatttcgatactagcgcctatgcaacgaaatttgctggcttagtaaaggattttaactgtgaagagatcatctcgcgcaaagaacagcgcaagatggatgccttcattcaatatggaattgtcgctggcgttcaggccatgcaggattctggccttgaaattacggaagagaacgcaacccgtatcggtgccgctatcggctccgggattggcggtcttggcctgatcgaggaaaaccatacatccctgatgaatggcggcccgcgtaaaatcagcccgttcttcgttccgtccacgattgttaacatggtggcgggtcacctgaccatcatgtttggcctgcgtggtccaagcatttcaatcgcgactgcttgtacgtctggcgtacataacatcggccaggccgcgcgcatgattgcgtacggcgatgcagatgctatggttgcgggtggtgcagaaaaagccagtacccctctgggtgtcggtggttttggtgcagcgcgtgcgctctctacccgtaacgataatcctcaggcggcaagccgtccgtgggataaagaccgtgacggtttcgtactgggtgacggtgcgggcatgctcgtgctggaagagtacgaacacgcgaaaaaacgcggcgcgaaaatttatgctgaagtcgttggctttggtatgagtagcgatgcttatcacatgacgtctcctccggagaatggcgcaggtgctgcgctggcaatggaaaacgcgatccgtgatgcgggcattacgccagctcagattggctacgttaacgcgcacggtacctctacacctgcaggcgataaagcggaagctcaggctgttaagtctatcttcggcgagtctgccagccgcgtactggtcagctccacaaaatccatgaccggtcacctgttgggtgcggcgggtgcagtagagtcaatctactctatccttgcgctgcgcgatcaggcggttccaccaaccatcaacctggataacccggatgaaggttgcgatctggacttcgtgcctcacgaagcgcgtcaggttagcggtatggagtacaccctgtgtaactccttcggcttcggcggtaccaatggctcgctgattttcaaacgcgtgtaa

SEQ ID NO: 124830 - DNA, 168 bp, Enterobacter cloacae
atgggctccggacagttcggggcccgttttctttacggtgaatcatggggcattatgcgcaggatcgtgagttttctcgtcaataatattcgcgaacattttatgctctatatcttactgtgggcgctgcttgcgatcgttgattttatttacattgtattttattga

SEQ ID NO: 124831 - DNA, 321 bp, Enterobacter cloacae
gtgacccacaattttgcacatcttatttcaggtttgggcctgctcgtttctgcctttatcgttcctgcgcattcggccacttttgcggaagggggcgtcattcactttcgcggtgcaatcgttgctgacccgtgtgaagttacgcagcaacatcggcagctggcggtatcgtgcccggataaaaaccgtatgcaaacccgtatggtcagttacgacgatgcgctgaacggcatgacgacaccttccagcctggcgacagtggatatgaaataccttaatcctgaaaaaacgctcgcagtggttcagatccagtaccgctaa

SEQ ID NO: 124832 - DNA, 333 bp, Enterobacter cloacae
atgaataccttaattctcctcgccgcgctgtcgagccagataacctttcaaacctcacagcagggcaatatgactaccattattccgcaggtcacgttgacggaatcgtgtgattgtcaggtccagattgtctctttgcgcgaagggcagagtggacaaagttcatcccgccagcaaaacacactttttatccccgctaatcaggcgattgatttaatgcgcttgagtttaaatatctctgcgggagacacggtaacgatcgtggtaaccgtcactgatggaaaagcacttcatttatcacaacagtggtcgcctggagggcgcgcgctctaa

SEQ ID NO: 124833 - DNA, 453 bp, Enterobacter cloacae
atgaaatttatcaaagtggcagcacttgcagcaatcgtagtttctggtagtgctatggctggtatgattaaccagggcggatggggtcatggacatggtcatggcggatacggtggcccaaattcaaccctgaatatttaccagaatggtggcggtaactccgcgctggccctgcagactgatgccagaaattcagttctgaatattagccagaccggtggtggtaacggcgctgacgttggccaggggtctgacgacagtagcattaacctgacccagaacggatttggcaacagtgcgacacttgatcagtggaacagtaaagattccgtgatgaatgtcagccagtacggtggccttaacggcgcactggtagaccagacggcgtctaactccaccgtcaacgttacccagattggctttggtaaccacgcgacagctcatcagtactga

SEQ ID NO: 124834 - DNA, 225 bp, Enterobacter cloacae
atggcgtggtttgatcatctgcttactcattttgcgctctatccggcacatctgtttgcgttgttattcgtgatggcgctgggtaaatcgacggtactgatctcctccgtgctgccacccgcctcgctgatgctgctggcgggcatcggcgtcagccaggggagcatgcatcctgggctcgcatggcttgccgtggttatggggcaacggtgggatcggtgctga

SEQ ID NO: 124835 - DNA, 1584 bp, Enterobacter cloacae
atgcaaagtaatgtctccacacacgggatggctgttgccccccaccaccttgccagccagagtgcgctggccgtcctgcgcgaaggcggcagcgcgatagaagccatggtcgcggcggcggccaccattgccgtagtttacccgcacatgaacgggctgggtggcgatggcttctggcttatcgtgccgccggaaggggctccgatcgccattgatgccagcggtgcggcgggatcgcgcgcgacgctcgcggcctacgacgggctcccgcatatcccccatcgcggccctcaggcggcgttgaccattgccggcacggtgagcggctgggacgaggcgctgaaggtctcgcgcgagatgacgggcaaggcgctgccgctgtcccgcctgctggccgacgccattgagtacgcgcaaaacggtaccccggtcacggcgtcacaggcgcatgccaccgccagtaaatttgacgagctaaaggacgttcccggctttgccgaaacctggctggtggacggcaagccaccgccggtcgggagccgtttttaccagcccgccatggccacgaccctttcgcgcctggtggaagacggtctggacagtttttatcgcggcccgctggcggaggtgctggcgcagggtatggagacgctgggcctgccggtcacgctggccgatctacacgcccacgtcgcccggcgcaccacgccgctgaagttgcagcatcagcagggagaaatttataaccacgccccgccgacgcaggggctggtgtcgctggcgatactcggcatcacagaccgcctgaatatggcggaggctgacgatgcggggacgattcaccgtattgttgaagccaccaagctggcctttggcctgcgcgatgcgcacattaccgatccgcgcgagctgaaaacggatattcaggcactgctggcacccaccgcccttcaggcgcttgccgacagggttgacgacagccgtgccgcatcgtggggcaccggcaaaggtcccggcgatacggtgtggatgggcgtgatggataacagcgggcttgccgtgtcgtttatccagagtatttatcacgaatttggcagcggcgtggtactgcccgataccggcatcgtctggcagaaccggggcgcatcgttcagtctcgaccccagtcatcttctggccctcgcgccgggcaaacagcctttccacaccctgaacccggcggcggcgcgcctcaaggacgggcgcgtgatggtctatggctcgatgggcggcgacggacagccgcaaacgcaggccacgctgtttacccgctatgtggtccagggtgcgcccctgcaggagagcatcgctcgcccgcgctggctgctggggcgtacctggggacaaacgtcggacacgttaaaactggaaggacgcttttcgggtgagaccgtgtcacagctcagggcgcgtggacacgacgtggagatcttcccggacttcagtgaagccatgggccacgcgggggcgattgttcgccaccccaacgggctgtttgaaggagcgtttgatccgcgcagcaacggcgcggccgccggattttga

SEQ ID NO: 124836 - DNA, 1398 bp, Enterobacter cloacae
atgacgctacacgagatgagtatcagcgcaatccagcaggcgctgtgtgcgggcgagctgagcgcccatgagattgcccgtcagacgctggaggcgatagcgcgcgtgaacccgcagatcaacgcctggaccgccgtgacggaagcgcgcatgctcgccgaggccgcgaatatcgacaccctgcgccgcgaaaagcgccccctgccaccgctggcgggcgtgccctatgcggtgaaaaacctgtttgacgttgccgggcatactaccctcgccggggccgagctgttcagccagcgccctgccgcggccactgacagttttgccgtacgtcagctacgtagcgcgggcgggttactgaccgggatggtgaatatggatgcctacgcctacggctttaccaccgaaaacagccactacggcgcgacgcataacccgcacgacctgacgcgcatcgcgggcggttcgtccggcggttcagccgccgccgtggccgccgggctggtgcatttttcgctcggcaccgacaccaacggctccattcgcgttccggcatccctgtgcgggatttatggcctgaaacccacctttggccgcctgtcgcgatccggtagccatccatttgtcgcgagtctggatcatatcgggccctttgcgcgccgcgtgtgcgatctggcgtcggtgtacgacgcgctgcaggggcgcgatacccgcgacggttttcaggcagaacgctcgcgcgaggagacgcgtcccctgctcgaacgcggtcttgacggcctgcgctgtgcggtgcttggcggctacttcaccacctggtgcgacacggaggcccgggacgccgtggcgcgggtggcgaaggccctcgacgtgcaggaggagctgcagttccccgacgccgggctggcgcgctccgcggcgtttatcaccagcgcctcggaagggggtaaccagtacctgcccgcgcttcgccgcgagcctgagcgttttgaaccccattcccgcgaacggcttctggcaggcgcgatgatcccttccgcctggtatattcaggcccagcggtttcgcgctcaggcgcgtcaggcgttcaacgccttgtttgaacaagccgatgtcctgatcgcccccgcaacgccgcgtagcgccacgcggataggtgagcaaaccatggagattaacggtcagccgctgcccattcgcgccagcatgggcatgctcactcaaccgatttcgttcctgggtttgccggtgactaccgttccgctacgcaccgcccggggtatgccgattggcctgcagctgattgccgcaccgtttaacgagcaggcctgcctgcgcgtcgcgcgcgtgctggaagagagtggcatcaccgatgcccgcccggcggaggtggcggcatga

SEQ ID NO: 124837 - DNA, 291 bp, Enterobacter cloacae
atgaaaaatgaaataaagaaaacggtaaatgatatcatcaccatactgtcctcaaatgatgaggacgcatgggctaaaacatttgaaaaactgtgctttgaactcgatgttgattatgagtcatccatttactcattgaaaaaactctacggtggaatgggatcatttaacgatattgttcttcataaaaatggaatacctctcattcgagaaaatgacgagttagaagatttgagacacaaactctacaagcaactcgatcatgctatcggcttgttaaaagcaggttaa

SEQ ID NO: 124838 - DNA, 1152 bp, Enterobacter cloacae
atgttcacgctctacatgaaatgggaagcccagcgaatactggcgccggatgatattcagttcatcctcactccacgtgaagcactggtgatggcgagcatattttacgaactggattacctggaatacgactaccagcgtaaccccctatgccataacagcgtcccgaaacgtcgacaaggcgttcaccaccgtcacgcgacgcagccttataaacgcaagcagcgtttcgaatatgacggactttatgatgaagtggaatggaatctcgaacacggctggatggtcggcgtgaacacgggggaaaagtgggataagtattgcaatccgttctcctttgatgacgaatgtaatctggtttatgactgttttatggacacctacggcgagggtttcccgcaggaagtacgccggatttacgattacgttctgaacgaacaccaaggcagaaagcccgcaccgacagttaaacagcactattccgacgccccattacagcatgcgcaggcagcggaaaccatcaacagcaaagctgcgggaagtcttcttgctgcgggtggcatctacaacggcaacatagagggatttcatgagaccgcacagcagctaggcggcgatgctccagcaggttacgatcaggttatggacaacaaagggttaatcattgctgccgcttctgttgctgcgggtcttggtcttggccgattaggagttgccagtgagattaacgatctccacgttctgggaaaagttgagggtgaatattcgataataaagcccggatcattacctaaagagctagcagaaaccttttccagtggtacatacaaagagatctctctatcatcagatacaagtttttatagaggtggtgttgaggggcgaccattaggtcaatttttcggatatgaacaacctcgaggagtacttcaaacaagggtagataaggcactgctacctaaatggcccaatggaagtgaatctcctcttgatagctatcacgagattcaaatacccgcaggaacaaaagtatatgttggaaaggtaggttatcaaacagacctttattccggcggaactgagcaagttatagtgcctacaccgtggaaaatacctggcataaagatacttggaagtggtggtttgaaatga

SEQ ID NO: 124839 - DNA, 324 bp, Enterobacter cloacae
atgagcacactcagcacccatattctcgatatttcaacggggaaacccgccgagggcgtgacggttcatcttgagcgggacggggagatcatggcgactggcgtcacgaacgccagtgggcgcatcacagaattcgtcccgaacctggcaaaaggccgctaccggctggtggccgaaatcggtaagtggtttagcgacacaggccgcgagacgatctatccctgcgcgcagattgagtttgtgacgggagaatcggcagacgagcatttccatctgccgtttgtgattgcgcccggcggctggtcaacctaccggggcagctga

SEQ ID NO: 124840 - DNA, 501 bp, Enterobacter cloacae
atgatcgcactgcacgactttaatcggcttcctgagaaagaggctctcgcgcggctccacccctgcgtggcgatctccggctgggctgaagccctggtacgcgggcggccctactcccgccgggaagacgtgttcagtaaagcactggcgctgacgcaatgctgggatgagacggcgttaacgcaagccctgagcgcccatccgcgtatcggggaaaagccagcgggttcccaggcggaggcagcactgtcgcggcaggaacagggcgcggtgaatgaccgcgatgctgccctgacgcaggcgttacgggaaggaaacgcccgctatgaagcccgtttcggacgggtctttcttatccgcgcgaagggccgcagcggagaagagatcttacaggcgctgaacgcgcggctggaaaacaacgatacgcaggaagtattgaccgcgctggaacagctgcgggaaattacgctgctgcggctggaaggagtcattagcgaatga

SEQ ID NO: 124841 - DNA, 936 bp, Enterobacter cloacae
atgttgagcgttatcgttgatgggctgtggcgtgagggggataaaagcctcgccgtcaggctggtggcggaaaacggcgccgcgctaccggcgtggcagcccggcgcgcatattgatgtgcacctgccctgcggcctggtgcgccagtattccctgaccggagcctgtgaggacgaggggtatcttatctgcgtggggcgcgaaaccgcctcgcgcggcgggtcgcgctacgttcacgagacgctgcggcctggacagaaactcacgatctccgccccacgcaatctgttcccgctcgttcaggcagagcgggttttactcctggctgcgggcattggcattacgccgctgtttgcgatggccctgcagctgaaggcggccggaacgccgtttacgctgcattattacgttaaaaatcgcgaaagcgcggcgtttgttcgggaactctcaaagtacggtgagtgcatcattcataccctcagcccccgctcagcgctggcagaacatctccccataccggaagcgggactgcatgcctgggtgtgcggacctgcgggttttatggagaaagtccgcaatgtggcaacgacgaagggatgggataacgcccacattcacagcgaggcgtttcagcctgctgcgcctgccgctggtcatgaaaccggcgagatctttaccgttaaactggcctccaccggggagcgctggccggtgcctgcggataagaccatttcccaggtcttacaggcaaacggcgtagacgtaccgctgtcctgtgaaatggggatctgcggcgcctgcctgacgccggtgattgacggcgtagtggatcaccgggacagcgtgcagtcggaggcggaaaaaagcgcaacaaaccagcaggtggcgctgtgctgctcgcggagccattcgggggagctggtgattgggctgtaa

SEQ ID NO: 124842 - DNA, 600 bp, Enterobacter cloacae
atgaaaagcgtagccgtgctattggcccccggttttgaagagggggaagcgatcgtcaccattgatatcctgcgtcgcctgaatattacggtgcagacgattgcctgcggcgagagccgcgaagtggtgagctatcacgccatctcaatggtggcggacagcaccctgaaggccagtttcgattgcacctttgacgccgtggtgttaccgggcggcccggagggcagcgttaacctggcgaaaagcgcggaggtcatcgccttcgtccgccgccacgatgaaatgggcaaatatatctgcccgatttgttccgccgccgcccgtgtgctgggcggtaacgggctgctgaaggggcgccgctacgtctgttccggcgatctgtggaaaacagtcagcgagggcaggtacgtcgatgccgaggtggtggaagacggcaatctgctgagcggtcgcggcctgggtaacgtatttgatttcgcctttaccctggcagcgcgattacagggcgatgatgccctggcgcgcgagcaggccagccatattgagtacgcgtggcaggatagcgatcccgtttacgggctggcaaaaagcgatgtgtga

SEQ ID NO: 124843 - DNA, 1191 bp, Enterobacter cloacae
atgaccaaatctgttatcaccgaagcgctgcggccgatcgaactgcatcaggtcgatcgcctggccctgagccagaagctggaagtggcgttaacccgcgtaacgcgcaagctcgacaaaaatattgttgccttcggcgataaattccccggcgaagcctgtgagaagggcgtctggccgcgcaccgataacgtggaatggaccaccagtttttggccaggccagctgtggctggcgtgggagatgacgggcaaagcgcattatcgtgacgccgccgagcgctatttatcgtcgttcgcccggcgtattgagcagcgtatcgacacggcaacgcacgatcttggttttctctattcgctctcctgcatcagcgcctggcgcctcaccggcaacgaagccgctcgccggtcggcgctgctggcagccgagcgcctgatggagcgttttaacccaacggccaggattatccaggcatggggtgatttaaacgacccggagcagcaggggcgaatgatcatcgactgcaacatgaacctgccgctgctgtactgggccagcgaacagaccggggatccgcgctatgcgcaagcggcgacggctcacgccggacaggctgcgaactttatcgtgcgggaagatgcctcgacgtatcacacatactatatggatgtgcagacgggtgagccgcgctttggtaatacccatcagggctacagcgacacctcgtgctggtcgcgcgggcaggcatggggcatttacggcttcctgctcagctatcagcacaccggcgataagcagatggttgagctgtcacgcagtctggcacattacttcctcaaccgtttgccggaagatgatgtgtgccactgggatctggcgctgctcggcaccgacgccgtgcgcgacagttcagcggcggcgattgccgcttgcggtctgctggagctggtcaaggcgctgccgacgctcgacgcaaaccgtgcgtattacgaagagatggcgctgcgtattgcgctgtcgctgaccgataactaccttgcccacgacgacgatccgaccgaagggctgctgcaacactcggtttatcatatgggcagcggcaagggggtcgatcagtgctgtagctggggagactatttctatctcgagctgctggcgcggctgcgacagatttggcacccgtactggtaa

SEQ ID NO: 124844 - DNA, 1281 bp, Enterobacter cloacae
atgagcacatcatcgtccgtacgcgccgcacagtacaaaatgagtacctttatttttctctacttcttcacctggtcatccagctttggcctgtacgccttgtggctgagccagaaagtgggcctcgatagcatcactatcggcagcgtgttcgccatcaatggcgtctttgcggtggtcctgaagccggtgtatggctacatcatggacaaaatcggcatgagcaagtggctgctctattttgtctgcgccatttctgcgctgatggcaccgttttttgcgctggtgtaccagccgctgctggaaagccatgcgatggccgggattatcatcggcgcgctatatctgagcctgggctggtacgctggcgtggcggcgtctgaatcttacgctgaccgctttagccgcctgtacgggctggagtttggccgcatcagaatgtggggttcgctgggctgggcgatggcggcttcggtctccgggctgttgtttaacgtcacgccgctggccaactttctgctcagcagcggtacctcggtactaatgctgctggtgctgattagcctcaaaatcggcgatgagcagctgcgtaataacagcgttatttccgccaataagattgtcttcgccgatgtgctgatgctcctgaaaaaccgcaaattctggatgttcagcctctacgtcgccggggtggcgtggatgatgtttatcgccgaacagcaattcccgcgctacttcgtatcattcttcgccaccaaagagcagggaaatgcctggtacggctacctgagcaccgtccagtcgggtatggaattcctgatgatgatgtgtatcccgtggctggtgaatcactacggcgccaagcgcggcctggtgttctgcggctgcgtggtcggggctcggctgatcgcctccggactcaccagtgacccgatagtgatctctatcatcaaaccgttttatggcgtcgagatcgcgctgctgctgatctcggtctttaaatacatcgccgaacacttccatcgtcggattaacgccacgatgtacctgctgggctaccaggcgatgatttacgtggggtcgattgtggtcgccccacctgctggctatctgtacgacaagataggctttgagcatacctatctgctgatgggctgctgcgccctgatatttacgctgatttccgcctttacgctgtcgcgctgccagtctaagtgcgatgtctcacgcccctttgctccggcattagattccgccccggttgaaccggccaaacattaa

SEQ ID NO: 124845 - DNA, 1839 bp, Enterobacter cloacae
gtgcaacctgaaaatattcatgtggataacccactgacgagccgtgatgaggtactgcggctggttaacgatatgctgaacgcggtgacgccttattttaaaaaagacgccagccgcattgatttagcgaactttaccgctcactacggccagcaggtcgcgagcatggaaaccttttcccgtctgctgtggggcatcacgccattgttggctggcggcagcgagccgcaacacttctctttctatttacaggcgataaaaaacggcaccaatccgcagcatgctgattactggggcgatgtcggtcctttcgatcagcgaatcgtcgaaatggcggcttacggcttactgctggcgctggcgggcgaaaccgtactggcacatttcactgagacggagaaagagaatctatggcgctggctaaagcagtgcgagacccaggatatccccgataacaactggcacttctttccgattctggtgcaggttggcttccattattgtggcatgccgacccatccgcaggtgctggaaaatcatttcgctgccatggagcactactatcttggcgatggctggtactccgatggaccgggccggccgcgcgactattacatctcgatgggcttccatttctatggactgatttacgcgaagctaatggccgatgttgatccaacgcggtgcgcaaccctgcgcgatcgcgccgcgcgtttctcctctgacttcattcatttctttgccgaagacggcgcggcgatcccgtttggccgtagcctgacctaccgctttgccgaggcggcgttctggagtgcggcggctttcgccgggctggaggtcttttcgccgggcgtaattaagggcatcgtgctgcgccatctgcgctggtggctgaagcagccgatattcgaccgcgacggcatactgagcgtcggctacagctacccgaatctggcgatggcggaagactacaacgcgcccggttcaccgtactggggcctgaagaccctgctggtactggcattagatgagggcgacgctttctggcaggcggccgagctgccgctgccgccattgcccgcgcagcacacgatagcccacgcggatcaggtggtggtgcatcaggccgatcacctgtggatgctgacgtccggccagctggagctgaacaacttcgtgaataccgaagcgaaatactgcaaatttgcctattccacccgctttggcttcaccctcgaacgcgggcgctatggcctgaaccatgccgcacccgattcgatgctgctgctggccgaaaaagataactactggcgtggccgccgtgaatgccagcacgtggtcaccgccgacggtaccatatacagccgctggctgccgtggcgcgacgtggtgattgagagctggctgctggcgctgggcgactggcaactgcgcgtccatcgtatcaatactcaacgcgagctggattgcgcggaagggggctttagcctcgcgaaccgcccacagccgcaggcgcaggagatggaaagcgcctgctggttacgcaatgcccaggatgcctcagccattttctgtttacatccgcacgcccgccgcggcgaaacggtggtgacgccaccaaacagtaatctgttgtttgccgagcgcgcggcagtgccgctgctgcgcggcgaactcgatcccggcacgcatttgctgataagcgcggtgtgggcgggaaatgccgcaggcttcgatccgcaacactgcccgcaggccttcattagcgatgacgcggtacgcttcgtgatggcacgacaagaaacgacgctcgttctggccccggagacatcgctatga

SEQ ID NO: 124846 - DNA, 858 bp, Enterobacter cloacae
atgggtgagacgcaactgctggaacgcattacgctcgatcggcaggccatttcatttaaccgcatgtacaccaccagcgcggtttactaccactggcatcagtgcgttgaattgctctatatttccagcggttatggcatcgtggtggtggacaatcagcactacaccgcccgtccggggcgtttatttgttttcccgcccttccgtttgcacaaagtgcaggtcgatcatagcgataagaacccctaccaccgcaccaccatgcacattgcgcaatcggtcgtcgaaagtgcgctcagcacctttccgcgccatcaggcccgcttcgcctcgctggccgccagcaatctcccggcacaaatttacgatctcagcacgcacgcggcgtttattgagagaatacttgaacagtttcagcgcctggaggacaacgcgcagaccgaggcctgcgaggtggcatttctggtgatgcagctgatgacatgtctgcccgagcagccgcagccctacccgccgcgccagcagaccgtcgcctcgcggataatgagctgggtcgaagcccactatgccagcaagttttcgctcgatcggttagcgcacgacctggggctctcgcgaagctatacctcacgcattttccgccagcagaccggcggtagcatccacgaatatttgctgacccggcggattaaaagcagctgcgatctgttacggtacagcgatgagcctgttgacgccattgcactggcagtggggtttagcgaggtgacatatttcattacctgctttaaaaagatgatgcgtcagacgccgctgcagtatcgacggagtaactccggcaccagaattcccggttaa

SEQ ID NO: 124847 - DNA, 1140 bp, Enterobacter cloacae
atgatgaaaatcaaaaatacgttttgcttacatatcctgatggcagccctggccattttattcctcagcattcacccgctggtgaccagctttgatccgccgcttaaattccagccgctgatcaaatccatggcgggcacaccgaaagaacaagcggaaaaaattgccaccatttcccatgccctggaggggaatgccattttcttcattggtgcctctgaagttgccacctccgaagatgaacattacgcggtctatcattattttaatcagcaattacaccaacccgtcgtggcgtatggcgatgcgtttgtcgatgatgaaacacaatttttactgttttcacgttttaaaaatagccttaacacaaacagtaaagtggttttattgttggcacctgacagcttttactcaaaaggtctgccacccgctatctatgcggataattttccgggctctgtttttgatcccctgatgaaggatccgcaggcacgtccgatcctcgtgaattatttaaaacatattgatgctaaagagataagccatttaacctttgggcaaatgcgtgtctttggctggcaccccgatctgatttgggatgagatcggtttccagttcgctaatttttgtaccctgataaaaaacgactggctatcgctgctcaatatcaggcctgagacggcgcaaccctggccgcaacagccaaccacccacatgactccggactggaataaagagctggcgaatgcccgtgaattaaataaagttcgccagcaaagtgcggcgaccctgtggatggacaaaacgatttacgaagaggacggtaagccgcagcagtgggatgacacgccggtggtgcccggccaattcgccgcgttcaggaaaaccgtccagctactgagggcacatcacgtgcaggtcattgctatcgtcgacccggttaacccatgggcgctttaccataccgacacgttccgcccgtacgataagcaaattcaatccattctgaaagagaaccagatcccttatttagatatgtacgctatgccttatcagaatggctggaactgggaccgactgcacccgactgaactggcctgggtgcctatgcttcgctttattgcacagagttttaaataa

SEQ ID NO: 124848 - DNA, 1119 bp, Enterobacter cloacae
atgtacagctcaggactgttttttgtctgtttattttcatcggcactggtatttgcgctgattaatcgcctgctgcgccatcgcctgacctggttatcgtccttggccgtcctgacagcattgggctggggctatatttttcagggcgattatcgtattccggcgatcgtttttggctgtttttatcttttcgccacgttaaaagaaaaaggatggttaaaaacctggcaggcgatcgtgttaacgctgctgcccctgtttttggtgaaattacattttaatcaccatctcggcatgatcggtctctcttttatgacctttcgcgcggtggatgtgctgttgtatcgcagtaaaaaagagggccagaatattctgcactatttctgctacctctttatgccctttattattctggccgggccgatgtaccgctggcggacatggatgagcgatgtgaataaacccgcattcacccttaaccgtgaacaatgtttaacagcgttagagcagatcgtcaccggcatcatccagaagttcctgtttgccatgctgatcgattcgcttgtggtgcagccctggagccataagccgttttcgctgaccgtcggcgtggtgatgtcgattgcttacagcgcctatctgtactttgattttgcaggttacagcaatatggccatcggtgccgggcgcttattcgggctgaatattccggcaaacttcaatatgccgctgcttgcaaagaaccctcaggacttctggcggcgcttccacatcagcctgtctgaatggctgcgcgatgtggtgtttatgcccgtctatatgaacctgatgaagttcaactttttccgtcagaacaaaacgctggcgcaaaatatcggtattttttgcaccctgttctgcatgggggcatggaatggcctggaacgccattatgtcatcagcggcgcgctgtttggcgccatttctgtcgcacacaacatgctgctgtggtcagccaaacgcagcccggcattacaccgtggtttgcagtatccggcagtggcgtttttggggcgaattctgacgctgggcagcgccgcaggagccctttacatctttagtggaatgtctcctctatga

SEQ ID NO: 124849 - DNA, 1434 bp, Enterobacter cloacae
atgaaatatcacaccgatctgcaggaactgcaggatttcttacgtgcggcattgcgcgatcccgcctccccgcagcagctggccatcacgggtagcgacgaaaccctcagctggctacagctttccgccgccgtgatggactgggcggaacgctatcaacgctgcaagcctatcgaaggcacaccggtcgtattatatggtcatcagcaggccgagttcgccgtggcgatttatagctgcctgttgcacaacattccgtacatcccggtggattgcatctacccgcaggagcggctccgggagatttgtagcctggccagtgtcccttactattacgacgttgcaacccggcagtttattgccaccggtgaagcgggcaaggtcctggaagagcaggatctggcctatatcatgtttacctcaggcagcaccggcaaaccgaaaggcgtgcagattggacgtgagagcgtctggcacttcatgaaatgggtcagccaggacttttccctgccggcaaaaccggtgctgatgaaccacgcggtgttcagctttgacctctccctgatccctttgctggcgaacctggcgatgggcggacacatcgtgctcaacgccaaagaggatattcagaaagagaactggctggcgcgactcaaaagcaacgcggtctccgcctgggtgtccacgccctcttttgcctaccagcagctgctgtccccgcagtttaacagcgagtatttgcctgaactcggcgtctttatcttcattggtgaagtgctcaataaagcgctggttaaacagctgcgccgccgtttcccgcaggccaaaatcatcaactcctatggcccaacggaagcgaccatcgcgacgacggtggttgaaattacggatgagatccttaaccaggacagcgccgtgctgccggtgggggtcatgatgccggagagcagaatggacatttccgccgagggcgagctgattatctggggtaaaaacgtcatgcgcggctacctcggcctgccgcaggagaacgcggcaaaattactgcatcgggaagatgacgcgtgtcgcggctaccggaccggcgatctgggttatgcagcggggatgatctattgccagggtcgcaacgatagtcaggtcaaactgaatggctaccgtattgaaatcaacgagatcgaaaaccgtctgctggccatgtccggcattaatgaagcggtagtgatgccgctgatgaaaccctgcggcagcgtgctgcgtattgccgcgttctgcgtgacggaaatggcaccggatacgatcaaaacctcgctgtcgaaagtggttccccactatatggtgccttcacaaattatcgtaaaagacgcgttgccgctgaaccctaacggcaaaattgaccgcaaattgctggacgcttacgcccgcactcattaa

SEQ ID NO: 124850 - DNA, 219 bp, Enterobacter cloacae
atggaaaacgaaattctcgccctgttcgaaaaagtattatcccgtaaagtgggctttcacgatgaactgattgaatctgatattctcgactctattctggcagtcgatatggtgctggaagtgcaggacgtttacggctgtatgatcccgccaactgacgtagcgacggtgttgaagaccccggcagatctcgcccgctatattgaagagaaccgctaa

SEQ ID NO: 124851 - DNA, 837 bp, Enterobacter cloacae
atggcattcgtaacaacgaaagacggcgtcaacatttattacaaagactggggtccgaaagaagctcaacccattgttttccatcacggctggccattgagtgccgatgactgggataaccagatgctcttcttccttgcagagggctatcgcgttatcgctatcgatcgtcgtggtcatggacgttcggatcaggtcagtgaaggtcacgatatggatcattatgcggccgacgcgtcggccgtggttgaaagcctggatctgcacaatgccgtgcatgtcggtcactctaccggcggcggccaggtcgcccgctatgtagcgaaatacggccagccgcaggggcgcgtcgccaaagcggtgctcgtcagcgccgttcccccgctgatggtcaaaacagagaataaccccggcgggacacccatcgaggtgtttgacggcttccgtagtgcgctggcagccaatcgcgcgcagttttacctcgacgtagccagcggccctttttacggttttaaccgggatggcgcggaggtttcacagggtacgattcagaactggtggcgtcagggaatgattggcagtgccaaagcgcactatgaggggattaaggcgttttcagagactgaccagacggaggacttaaaagccatcacggttcccgttctggtaatgcagggcgatgacgatcaggtcgtaccgtataagaatgccgcccttctgcaggacaagctgctggcgaacagcgtgctgaaaatttatccaggcttcccgcacgggatgcacaccacgcatgcggagaccatcaacgcggacattctggcgtttatccgttcataa

SEQ ID NO: 124852 - DNA, 477 bp, Enterobacter cloacae
atgaaaataaaacttatttttgggctgagcggtgtactggttggtggtgcaatagcgcttttttactattctggcggcctgggtaaaaaggatatgcttgcctgcagtacagaatttaatttcacgcgcaatgagggaaaagcaagtgaggtgaaggtcaatacctttgctcagttctattttcatcaggatggaaccgggttgacgacttacaaaggcgcggcaagggctggcgggcaatgtttgatcgttgacagggatgtcgactttacctgggagcaacggaaagatgataacgtcattgtattgagctacaccaaaacctggcgtcgacacaatgacaataccccggatgctcaatggggaagcttcgcctatccgaccgcacgttactacctgacgatctctgaactgtcgcccgccgtgtggctgattcaggaccggcgttatcctacctatatctgccggggagaataa

SEQ ID NO: 124853 - DNA, 756 bp, Enterobacter cloacae
atgttttttatatgcaataattcgttgttattcgatcctgaatcacatgcaataagtcttgttggacaacccgagtctgtattaacgctttcggcaccggccgttcgtcttttacaggagtttattaagcacagaggtcgtgaccttagccgggatgaattgatcgctcgcgtgtgggaagcgttcggctttacgccatcaggaaataatctcaataaagcggtaagcgaattacgtaaaagctttcagtcgctgggagaggggcatgaatttatcgtgaccgtaccccgctatggatttcgttttgaggccgatgtgatttttcagcctcgggagaatattcaacccgttgattctcagtctccggttgaacagcaagacgtaaagccgcggcgcacattcctgaaaaggggggcgattacggcggtcgcgatcgtcgctgcactagggggatgcctgtactttagccgcccgcaggggataaccgttccggcgaaactcacgccagttaaggaaaaaattgcgcgttgcagtatctggataattaacgatcatggacggccgttagtgttatcgaaattagcgaaacagctggaggcgaataacgtggcatgcgagcgagaagagtataatatttattatttcagcgcccgttttgctatttccgccgcggatgaggttttcattggtgcctgcccgggaagtaaaaccagactgtgcaaaaccattcgttataaaagcggggctgaaaaatga

SEQ ID NO: 124854 - DNA, 744 bp, Enterobacter cloacae
gtgaaacagaaaaaaagagtgaacatgacaaccgccttttatgtcgccgcgctgtcattaccatttttctcagaaatggcaatggccaatatgagcgtgtacccgatggaacttaacgtggataagtccggggcggcgcaaataaaagtggcttcaaaaacggatgatattcagttcattcgggtgaggcaaaagaaaattcttaatcccggcactgccgaggaaaaagagattgatgtggcctcgtggaaagaaggtggcgttgttgtgacgccagaaaaatttgccctggcggctggcgcaatgcgcgtcgttcgtctggtatcgctcacgccaccggaaaaagagaccacctggcgcgtctattttgaaggggtaaagcaacctgacagcattattccaggtcaggcagaaagcgctgcggcgaaggcgacattgggcgtcaatgtcatctggggcgccctgattcacctcgccccggaaaaaagtgtggtttcactctcgatagaccctcgcagggggacgttaaaaaacaacggtacgctgcgcgtgccgctgagagagatcggtatttgtgacgcaaattcgtcgtgtaaatggattaaagaagacgcgacgatttatccggacaccgaacggaaattaaaaacgctcacaaagacacaaggccataaatataaattccgctacttcaactgggtgaataaaaccgctgaagaagctgatttacccgtcgtgcaataa

SEQ ID NO: 124855 - DNA, 507 bp, Enterobacter cloacae
atgcgtaagtattttaaacccctgatgattgttgccgcgatgaccacgtccgttagcgcgctggcgatccaaaaagatattaccgtcaacgccagcgttgattcacagctggatatgacccaggcggataatacgccgctgccggcaagcatcgatatgcagtacctgccaggccgcggtctggaaagctaccgcctgaataccaaggtatggtctaactccgccaccagcaacgtgaaagtccgtctggtgagtgccgcgaagctggcaaatgccgacggtgctgagtccatcccaatgacggtgaagctgggcgataaaaccctctctaccgccgatgttgaatataccggtaccgaactgttcccggggagcattgaaaacggttcagcggtactgccgctgaccatttctcagaccaccaaaggcattctgaaaaccggtcagtacagcggcgttgtcagcctgatgctgacgcaagcgacgaccacggaaggcggtgcgtaa

SEQ ID NO: 124856 - DNA, 2718 bp, Enterobacter cloacae
atggcgtttcacagaaatactctcctctttgttgctttgttacccgcttccatccaactcgcctgtgccgggatgaccgtcccggcaggttttgaagatctggcgaaaacccagcgcctgtggacagaggtaaacctctatggcgagtcgcttggcctgtttgaaacggatatcacgcttgaaacggtcagttttgtcgcacctgaaaccattgtagcggccatcaaacgacggtttaacgacgaccctgctctcgttgccaccgtgtctgccacgctggccgttccgcttgcccgtaacggcaacctggcctgcagcagcaacagctccgcagcgggctgcgattacattgataccgaccgcgcggccattatctatgacgagaataacgcccgtattagcctgtttttagacaagaaattcctgcctaaagccaccgcggaaaatcagtggtatcagcccacgcaggacaccgaaaatgcgcttatccatcagcagaatgttaattttgttgccgacagggattatcagtcagccaccgtgcagggcaatggcgcgctggcgctcacgcaggacggctatgttaacctcgactggacctggctgggacagcgttcaaggcaccagcagcaacaggaaatcaccgttaacaatgcctggttccgccaggatatcttgcgtcagtactatgtccagctgggcgaaatggatacccgcgatctgttcagtaatgccggtggaaatatcaacctcagccagcttccgctggggaaaattcgcggcgtgcgcgcaggctcaacacgggcgtggataaatccggttcagcagtcaaagggaacccctatcaccgtgctgctttcccatgacgcgcgtattgatgcccgccgtggcagtcagctgctggccagcttttacctgaatgccggggcgcaaactctcgacacgcgatcgtttccggacgggagctacaccgtcacgctgtcggtctatgaaaataaccggctaacgcgtaccgagcaggtgccgtttacccgaaccggcattacgccattcgaccgcgtcgagtggttcctgcaggcgggtgaaaccgacaatagcgatcaaaacgaagaacccagcgcggttgcgcaggcgggcgtacgcctgcccgtcaccgagaccttagcgcttaccagcggagcaacgataaagcaaaaccagcgcttcctggaaaatgcgctcgactggagccggggcttcaacgcgggcccgatcgacggcgtgctgagtacccggtttagctacctttacggcagcgaaggccagcgcggcaatattcagcaaatcagctacaacgacggtttttcactgagcctctatcgcaacgcgctatcagcggaaaactgcaacacccgaagcgccgggtttgacgccgtgaacggctgttatcgcaccctctcggtgatgttttccgtccctgtcggcgcctggtatgcgagcctcggctattcggataaccgcaacgaaggacggtacgtttcacgccgggagctgccggatagcgacgatcgccacgatgcgggtttgccatgggaatcggtctatatgacccgctcgcgctcgcgggcctggcagggaggcctgagcaatgcctttagcacccatggtctgaacattaacagcagcgttaacctcttcatgcgcaacgatgatgcccgcgacggcagggacaaaggcggctacctgagcgtgagcctgtccatggcgcataaccgtcagggtgatgcgtctagctatacctctctgggggcgacctggcagcaccagcagcgtgaaaaaaatcagctgagctacaacgtggcgcataactggtacagcgatgcacgcggtgaaaacgagtacggccttagcgcatcaggcattaacagcgactcgctgaatacctcagcctatacgcgccagggcgggcgatatggcaacggcagtctgaccgtcagcgacgcctgggatcgtcaggacagacgccatacgctgagcaccagcggcaactacagctcgacacttgcgctgtcgcgttctggcctgtggctgggccgctggagcgacggacgccctgcttccgccgtcgcggttaacgttgccacaccgactgatacccaggctccaagcgttgccgtgtcgctggataacagcgggagcgcagacattccgggtaatagccgcgccctcttcgccgtaccgggctaccagcagaccacgttgacgattaacgaatcgctggatgtatcccggggagccagcagtgagatcacgcaaggttcaggcagcagaacgctgtttatggtgccaggcaaactgctgcgtcgggatgtgcaaaccaccgcaagctacacctggctcggccagttaaccgacgagcgtcattcgccgtttatcggtggtgtgccgctgaacgttaacggctggagcgatctcggcaacggcggattcagcgcccagagcgatgccctgctgcataacctctacctggtgcgtcagcagcagttttatcagtgcgaactcaacgtgaaaagtatgcgcgacgtggtgcgctatgtcggctcaattccttgtcgggaattaaccttctcggccctgccggatgccgtccagcagcaggcgcagctgatgctcgccggacgatcggtacctgccgggccaactgccatgaacgccgacaacctcactaaagggaaatga

SEQ ID NO: 124857 - DNA, 1155 bp, Enterobacter cloacae
atgaagtacctctttattttactgttgttaagcctgtggacaggccagacgctggcgggcgcccctgcgggacgaaacaccagcgttgggatcagcttcgatcgcacggcaccgcctgcacgtttcgatatctggttgcatgaatcgggcggctttgacaccgccgacccgcaaaagtggggacgtaataccctgacctgtcagtcccggaccgacgccacgtacggggcctgcatgaactctccggtctggttctcgggtaacccggccgcgccctatgccatcaatttacgtttcacgcataccctcaccagcaagacggtggatatcaaggtgtatggcgatcactacatgtttatcaacaataaagtgtttaccttcgccagctttgtgacaggcggaacagccacaattgctgactggaacagagagccctacttcgatttctatattgtgaaaagcgaactggataagctcgccctgccggggatctggaccgcaacgctgaagcagaacctgcgtcaatgggggagcgccgactgcggcggggacttcaatgacgtaaacgtcggatgccctggctatctcactatcgccaggtggcaggcaaacattcgcattgaggtggtcgatccgggtaatcagcagatttatctgccggcatttccgcactccacgcccatcgttaacctcaacctgactaacttcccggggcggccgggtggcagtgagatccagggagaaaatacgctggatatgtgcctgtacgatggtaaaaacagcaccagcacccgcacctaccttcggtttgaggacgacggactcgcctcagcgggccgtactgaaggtgcattttctatcaggcgacgcggaggaagccagaccgatgcgcgggaccgtcttgactatcaggtctttgtcacccatcccatcacaggcgcaacagacatcgtcgctaacggtaaaaccatggtctggcaagggactaacgatccgcagtatctgcgtcaggtcgtcctgcccggcggacgcgagagcgtactgtgcgtgccagcccctattatcctgaaaaccccttcatttactgccaacagcaaaaatgccggggattacaccggcacgctacgcattatctacacacccagtacgttataa

SEQ ID NO: 124858 - DNA, 552 bp, Enterobacter cloacae
gtgaattacgttattcttgataataatcgcttttatgccgaaggtttacgctacgcccttctgcgccgtaacgcgcagatgctggttgaaagcggcgcggtaacgtggcgccattcgttattggcctgcgacaccctcgttgtgcgctgccgcttttccgtcgccgggacgcatcaggcgctggttgagattctgcttcagctggaggccagccgctgggaaggaacgctttatctggtgtgcaatgaaaaaggctgggcgctggccacgcatctgcgaaagcgttttgccacgctgacctcatatattattgatgacagaattgccgtcgcggatgcagcgtatctgcttgcaaaagagccccgtcgggtccgcagcctgaattgttgcctgacgggcatggagttcaatgttctcgacaggctggttaacgggcaatcggtaagacatgttgcgacaatgacgcagatgagcgaaaaacaggtctcgacgtacaaatgcaacgcgttaaaaaagctgaatgccaacaatctgctacagcttcttctatag

SEQ ID NO: 124859 - DNA, 330 bp, Enterobacter cloacae
atgttcatttttgcaggccaggaaattgagaccgatagcgaaggctatctgaaagataccacgctatggagcgagccactggcggaaaaaatcgccgaaaacgaaggtatcaccctctcccccgaacactgggaagtcgtgcgttttgtgcgcgaattttatctcgaatttaatacctctccggcgatccgcatgctggtgaaagcgatggccaataagtttggcgaagagaaaggcaacagccgctatctgtatcgtctgtttccgaaaggcccggcaaaacaggccaccaaaattgctggcctgccaaagccggtgaagtgcatttaa

SEQ ID NO: 124860 - DNA, 729 bp, Enterobacter cloacae
atgcatcgcctgcaccaggttaaacttttttttccggccatttgtcacattactcacggcagtaaggtcattgttcaggatgataatcgcctggtggcaacgagggatgcgctgattattatcccggccaatacgtcaatggagattattaatcagcctgcgaacggcatgtttcgatcggacttgctgatgttgtcgccagagatcctggccgagtttaaagcgcattacctgaaatcctggccgggcacgacgttacattccctttgtgtcccgttgagcgaggggctggcgtttatgtgggataacctgctgcacgccgtgcgtcaggatttaccggaggcgttacaaaaacatcaggccttcggtcttttgctggcattgctgcatgaaggcgtggcaggtccgctgcttattgagcgaagcagtaacctgactgagcaggtgcggcagttcatcatgctatcgccggccagatcctggactgcgcaggatatcgcaagccgtctggccttaagcgtgccgacgctgcgcagaaagttgcgtgaagagtcgcagagttttcgccagatcgtggaagaggtgagaatggccgttgcgctgtcacagctgcaatcgacccgattacctattggcgagatcgcattacaatgtgggtatctttccagttctcgtttcaccgcccgctttcggcagcactacggctgtttgccgaaaacgctacgttaa

SEQ ID NO: 124861 - DNA, 558 bp, Enterobacter cloacae
atgaaaaagcgcaatgtaatagtaacaaccgctctggcggcgataagttttcaggttttagcggcaacgcctttcagtatcaccagtcaggatatctccagggagcaccgtttagcgcaacagcaggtgttcaacggttttggctgccacggtgataatcagtctccgcagcttgcatggaaacatccgccagccggtacgaaaagttttgccatcacggtatatgaccccgatgcccccaccggcagtggctggtggcactggacagtcgccaatattcctgcgaaaacaatggcactgcccgcgggcgcgggtaacccaaagagtgagaaattacccgctggcgcggtgcaggggcgtaatgacttcggttattctggatttggcggcgcatgtccacctgagggagacaaaccgcaccgttaccagattaccgtctgggcgctgaacgtggacacactgccccttgataacaatgccagcggcgcgctggtcggttatatgataaacagtcacgttctcggaaaaacgcagttaaccgcaacgtacagcagatag

SEQ ID NO: 124862 - DNA, 2265 bp, Enterobacter cloacae
atgggaattcccgctttatgtatctgcgccattctggcgatagccccgttactctggttacctgaactgccatcacgctataccgtctggataatgctggcgggcggggtggtgctgggcacatgtcaaaacgtgcgcctgaagtatgtgggaatcgtgctgttattttgcgcgtggggccttctggccgcgcaggagagcgtctggccgatgcagcatttaaccacgggagccgtgcaggccgaggtagagatcaccgccactgatggtgcaactcagcatcagggaaagattcgtaccgtaaacggccggcgctggtgggcgtccaccggcgtaacgctgtatggcaattatttgccacagagagcatgtgctggccagcgttgggcgatgatgctcaggctaagacctgcacacggcgagctgaacgacggaggctatgatccccaacgcagcgccattgcccgacaccaaacgctgagcgggcgcttcacccatgcggaacttgttgatggacactgcagcctgcgagcgcaatacctgatgtcgctgcaaaaccgactttctgattatcgctggggagcggttatcctcgggctggggatgggagagcgtctggatgtcccccgagaaataaaagacctgatgcgtgaaaccggcacactgcatctgatggcgatttcgggcctgcatatcacgctggcggcatccctcgtctggttactcgcgcgtgcgatccagtttatattccccagccaccgggtccactggcaaatgccactcctggccggggtgttcttcgccgctttctacgcctggcttaccggtctgcagcctcctgcactacgaacggtcatcgcacttgccgtgctggcggcgctgcgaatcggttcccgccaatggtcgccgtggcaggtatggtgttgctgtgtcgcggcgatcctgataagcgatcccttagccatactttctgagagtctgctcctgtccgcatttgccgtcgcggcgctgattttctggtttcagtggctgcctcttcctcgctggcagtgggcccgacgcatacggccactacttaatctgatctatctgcaggtcggcatgctggtgttgctcatgccgttacaggtgctgattttccatggcttcagtatctcctctctggtcgccaatctctttgccgttccgatagtgacgtttgtcagcgtaccgctgattttactcggtatgttgctccatctgttaccgctggggggaatggaaagtgccatctggtttgcagccgataagtcccttgccgggttgttctggctactgatgcgcttgccagacggctggcagagtgtggatcaacgctggcagtacatgacgctactgccctggcttatcatcatcggctggcgtttgcgagcctggaaaaccgttccagccgtgtgtctggctgggagtctgttgctggcatttcccctctggcgaacggctaaaagtgatgcctggacgctacatatgctggatgtggggcaggggctggccatggtcatcgaacggcagggaaaagcgattctctatgataccgggctcgcctggccagggggagatagcgcacagcggttaattatcccctggctgcgctggcaccatctgcggccagatggcgtgattctcagccatgaacatcttgaccatgcaggaggtctcgcatcgctgcaaaaagcatggccggagatgtgggtaagaagtccattacgtctggcggggcatcggccctgctttcgtgggcagagctggagatggcagggattaaccttcaccgttcactggcccctggaaaatgacccggctcggggaaacaaccgctcctgcgtggtgaaagtggacgatggtgagcagagtattctgctgacgggagacattgaagcgccagcagaacaggctatgcttagccattactggcaacatctgacgtcgacgttaatccaggttccccatcatggcagcaatacctcatcgtcattggcgctggtacaacgggtggagggaaacattgcgctggattcagcagcccgctataacgcctggcggtttccgtcggcgaatgtggtccgacgttatcgaaaagaggggtatatctggcaagataccccccattccgggcaaatatcggtgacattctcgcaacatcgctggcaaatccggcgcttgcgggatcaatttttaccacgttggtatcatcagtggtttggcgcgcccttagataacgggtag

SEQ ID NO: 124863 - DNA, 474 bp, Enterobacter cloacae
atgattttttatcgtctggtgacagggcgctatgccagcgaagcgtggagcggaagtggtgcaaaccagtatggcgggcggtggaatcataaaggccatccagctgtgtatgtgtccacctccatttcactggcctcgctggagattttggtgcacgttcgaaaagatactgtactgaatcagtaccagcttttcagcattgatatcccggatgaccagattgattacctggataaagcgtggctccccgaggactggcaggaaaatccggcccccgtatcaacgatggatctgggaaccggttggttgcaggctaacagcgccctcgcgctcatcttaccctcctgcatcattccttatgaaaacaatgccatccttaaccccttacatccgtccttccacacggcgctcaattcagttcagcaactgccctttaattttgatacccgcctggctgaaaaaaccgcaccctga

SEQ ID NO: 124864 - DNA, 555 bp, Enterobacter cloacae
atggatcactatcttgagatccgcgtcctgcccgacccggagttcaacgaggaaatgctgatggcggcgctgatggctaaactgcatcgtgcgttgggccagcgggggcagggggatattggtatcagcttccctgcgcacggcatcaagcccggcccggtgttacgcctgcacggtactcacccggcgttaagcgaactcgaatcactgatatggcgaaaaggattgagcgactactgcatgtcttcggacatccagcttgtgcctgtcgtcaagcagtggcgctgcgtaagccgcgtccaggtgaaaagcagtgcgcagcgtctgatgcgacgctcggtaaaaaaaggatggctaacggaggaggaggcgcaacagcgtcttctgacgatgcaggaggcgaggacggatttaccctggcttaacttgcgcagtctctctacaggccagtcttttaagctctttattcgccatggtgatgtgctctctgcgcctgtctccggaatgtttacgacctacggactcagcgcgacggcaacggttccctggttctga

SEQ ID NO: 124865 - DNA, 1302 bp, Enterobacter cloacae
atgaaagaaggaacgctattctcatttattacagctttcattgccggtcgacggcaagcaaagctggaagcatttgataaagcggccgcaaagcgcagcgaagatagcgcaacgcttgcggcagaacgccgggaactggaacgtcgctatgagccgaaagcatggctgacggatgcagcgaagcgagccggacaaattaacctcgtgacccatgcggcgaaatttacccacggggattcaaaaagtagcagtatttacagcgaggcagtggcgcaggaagggtatctcagcaccgccgcgttgtcaggtctggaatcggatgcggtgggcaacgctgctgcgcttgacgtcgcgaaattattacaaacacgggttgagggcggcgactccctgctggcaagcctgaaacgtggcgatcacgctgcgctgggcgcgtttaccgatgacgcgagtcaactgcgtgaatggattgcgggtttttctcgcgcgttaacgccaggcaaacccgcttcgcataagctggctaaacaggggtattttccggttggtgaaaattaccatctcttaagcccactgtttgccacctcacttgttcacgctatgcatcagaagatgattgcctgtcgttttggcgacgatgtaaaagccctctggaaagcgcgtcgggagaaaacctggcatcccactccgctgacgctttttccggattcagcagaaatacactttggtggcactaaaccgcaaaacatttcctatctgaacagcgtacgcggcggacgtagctggctgctttcctgccagccaccgcagtggacgcaagttgaaaaaacgccgactgaagtccgttcaatctttaagtttggtgaagagtttgatcgtaaagcttacggcatcgttcaacgcatgcttgccgtcataaaacgtcccggtaaaaacgttaaaattcgcgacgatcgtgatgaatgcattgatcaacttattgatcttttgttcgaaatatcaacaaagctccagtttgaaaaatggcaaaattggacgcttaaatgtcctgttcttaaatcccatcagcagctctggctcgatccctggcgcacaaaatcagacgaagccttccgtcttgaacgagaaaaagacgactggcaggacgcggtggcggaagattttgccctgtggctgaacgcccgtctgcgcaagtcgatgccggatgtcggtgctgtggaaaaacgggagtgggaaacgcgcgaacgtttacgtagcaacctccgcgaaatggaaaaaattatccaggaggcgctgaaatga

SEQ ID NO: 124866 - DNA, 957 bp, Enterobacter cloacae
atgtcttccatcgtcgatacgccttattcccccctgacgcagcctgcctccggctggcagcttttcaaaaacctggctttgggtaagcttaccccaggactggcatggcagaatccggcttatcggcgcaagttcgtattacggtcgcttgcggctcccgtcactacctctcgcctgttgacgcgcctggcaaagcagccgcgtctgatgcagatattacaagctcagccggggctgccctgccggatgcaccgcccgtggctgacggtgaatatggaacgtcagcacgcgctggagtctctaagctggcactatcagaccatgagccgccagcttccggcgacgctgctgcagggctatctttcgaagcagggtgccacgctgctgaccttaaccggtaaagatgaacagcactttaccgttcgcctgtgtgctgatgcgtttatggataaagagggagaagccaccctcgtcttctgtgacgatcaaaatacagtcctggcggagataaccttcacgctctgcccgcttgccggaaaatcgacgctgttcattggcggtttgcagggcgcaaaagcgcatgttccccatgagcggatccagaaagcgacgaaggcctgccatgggctgttcccgaaacgtctgctggttgaaaccgccatgacgctcggcgccgctttcccggtcgaacagattgtcgctgtcagtaacgacacccatatttatcgcagctggcgttaccgcaagaaaaaagagggaaaactgctggctgattatgacagcttctggctctccctcggcggtgaaaagcaggatagcggtaactttatgctgccgcttgtcatgccgcgtaaaccgatggaagagatcgcgagcaaaaaacgttccgaatatcgccgtcgctacgaactgctggacagcctgattcagcaggtgaatcaggcgacccggggttaa

SEQ ID NO: 124867 - DNA, 498 bp, Enterobacter cloacae; identical to SEQ ID NO: 82144

SEQ ID NO: 124868 - DNA, 1701 bp, Enterobacter cloacae
ttggaaatatcatctctaaaactcaaaggttttagaaactttaaagatgcacacatcaattttaactcaaatactctggtcatcggtgccaatgatgttggcaaaagtaatatgttgcattcgctaagaatgctattagataaaagtatatcagattcagaaattgaaccaaatgaacttgactttcatttagaaaatggaaagtcatgtgaagaatttgaaattattattcattttaaagatatcaatgaagatgcagtactttcaattttgaaagggaatgtcagtgactcaggtgaatcgttcattaagtatattgcacaaaaatccgatctcagctataaactttttattggtgagtctttagactctttacaagaaatcaactctcgctattatcttaaattcgttaatttaaaatatattcaatcacaacgagatttagagcgatttatccgtaaagaaaaaagacaactattaaaaatcgcacagcaatcattgaactctgaagaaagagaagaagatgacgatttgttaggagagataagtatagatttacagtctattaatgataaaatatctcaacttatatatgtagaaagagctacaaaagatgtcaacgatgagctaaaaaaacttgcgcatcattactcagagtattctgtgcaactagatactggggcaattggaataaatgactttatcgacaacctacaacttggagctaatacaaatggttctaatgttatgcttggaggagacgggcgaaacaatcaaatattattagcattatggaaagcgaaaagtattaaggaacatgatatcgagaacgaggttatcttctatgttatcgaagaacctgaagcacacctacatcctcaccaacaaagaaaactggctgattatttgatatcagaacttccaggtcaaacgatcatttcatcccactcaccacaaatagctgtaaactttgaaccaggctcagtaataaggttgcttgaccgtgctggacacacagtagccgcaagtaaagggtgttctaaagatatttcagatggctgggaaggaatgagctatcggatgagtatattgccagcagaatcgtttttttcaaatggagttttcttaatcgaaggaccatcagaagttttattttaccattctttagccgaaaatttaaacattgatcttgattatttaaatatttcactggtttcagtggacggaatatcatttaaaatttacgtagctatactagatgctttagagatcccatgggtaatgcgaacggataacgatatatctaaacttaaagatcaagaaaagtggcaatattcaggtataaaccgatgtttagatatagtcggtttggaaaagtttgaacatagcgacatacaaatagtacctatagatactctgaccagcggtgattggcaaacagtttctgaagaaataaataaacgcggggtatatttatccaaagttgatttagaaactgatctggtaggagaattaagcgcaccaattttaaacgctttaggtaagaaaaatgaccaaggtgcgatagagtacttacaaaagaaaaaagcattaagaatgcgtgaacttcttaaagatataaaaacagaccttcacaaacttaatgccggtgaattagttaaaccgttaaaccatcttgtaaaaataattagaggtgaatga

SEQ ID NO: 124869 - DNA, 324 bp, Enterobacter cloacae
atggagctttcaaaagcagcagataccctgaaagagctgggtcatcccacgcgccttagcgtttacagagagctggttaaagccgggcatgaggggctaccggttggcgaactgcagaaacggctcgaaatccctgcgtctacgttgagccatcatctctcatcgctgatatcagtctctctggtacgccaggatcgccagggtagaacgctctattgccatactcgatatgagaaccttgaggctctcattaccttcctgacagaagaatgctgctcagggactgacgactgcctcaccatgccccagaagacggagaagtaa

SEQ ID NO: 124870 - DNA, 576 bp, Enterobacter cloacae
atgaaagagacaaagacgcgatatgacagtttgttaatcagctatcaacgttggctaaacgggttcacaaaactggccatcatgaatggcatgtgtcaccccaatatccaggccagccaccatctgatggtgggcagtctgtactttcccggcgcggggcagatgactgccgtggtacctcaatgcctttaccgactgatttacggaagtcagcatccagagccagtgtcgttagtgactgatatgcaaatcagccttgagacaaagcaaaaaactttactgcaccacccaatgctggaagggatattgctgagtgaatgtatccgcctgaagcagcgtccgctggcgaataagctgattagcctgctacaacaattcagctcaccggagtatcgccacaaactggtctggctatgttggtacgatttgatgatgggggcgacgctggaagactggctggataatctgaaacgtaaggcacctgaagatctaggcttgtggctggttggacggcaggaggaaaacatacccctcacgcagatgatggatgaatatctgctatttaccggccactaa

SEQ ID NO: 124871 - DNA, 207 bp, Enterobacter cloacae
atgactattcaaatttccctgctcgaggaccagttcatcgatatggcattcattacgcaactcacccagttgaccgataaatggttttacaagcttattaaagacggtaagtttccaaaaccaaccaaatttggtcgcagctcccgctggcggaaaagtgaagtggaagcctggctacaggcgagaatcgacgaatcacgcagctag

SEQ ID NO: 124872 - DNA, 588 bp, Enterobacter cloacae; identical to SEQ ID NO: 109350

SEQ ID NO: 124873 - DNA, 930 bp, Enterobacter cloacae
atgagtgcggaaaggcgagtgaccagtctctggacgaaaagagtaaatttatggctttactgggaattctttagctcagcattaatgcatgttgatgagtctcgtgaattaatggaaagaataaatgatgccaatcttttcaaagagtcttgcattaactgtatgaataaaaaagaaatggttgaagatgggggtgcggagggaatctttgaaaagagtaaacgagaggctgagggtaaattaataccttttagtgaacttgaatggattgattgtgagcgttcgttgtcatttgttgctaattatattcatgccgaatataagatatatacaaataataataccccctctcttcttgatgtcactttacctgaatggagccttgattctgataagagtggtgtaaattatgatgggctaattcttttgatcgactatcaatgtcgcgtatcaagctttaataatatccgttccaccttagaacgtttgaagaggtcatggctccgtatccagaaaaaatttggtaatccattctggttctcatcaaccagatatgatgctaaatatctggcagattatcagtgggtgatgtcttacttcgataagaacaaaatgattaatggtaatgtggatttttggtttgaaaaaaatttgaacctgaaagttcactcaatatttgatcaatgggttgagaataaatccgatgctgaaggtgaattgtttattataaaaacaaaaaaagcatggggtcagaaaaaattcagagatagtgttgcaaacaaaaaggttctcaatacctatcttagcaaagatactaagagacaacttgattatctggtaagccaaaatgaaatgaaaatcaatgaattgattgagatgctgatcaatgatgcatacgcaaaagctaaactgaaaagttgggaaaattaa

SEQ ID NO: 124874 - DNA, 864 bp, Enterobacter cloacae; identical to SEQ ID NO: 85419

SEQ ID NO: 124875 - DNA, 537 bp, Enterobacter cloacae
atgacctggcattacgagaaaaatggcatacgtcacgacaatgtgaccgaagacgacatcactggcctgattgcacgcggtgaactcactgctgccacgctggtgtggcgacagggcatgccggactggcagccggtctccgccaccccgctggcttctgcgctgctccacagcaccacaccaccagcgctgccggggaaccgcattccgggtggcgttgtgtggacgctggcatttgctcccttcattggttatgcgctcgagctgtggactgcagggctgaacggaatgtcttttgacgaggcatatgaggctgtctcgggcgggcagtactggtttatcacgctgctgctcaatatcgctctggggtatctcgatgaacgacgcctgcgtaaggccggagtggatacaaccatgttcggcaaactggcctggctggtgccgttctatttgtggcgtcgggcgaaaactctcggtcagaaaccggcttacttctgggtatggcttgtgatgctggccctgaccgtatgggcctga

SEQ ID NO: 124876 - DNA, 438 bp, Enterobacter cloacae
atgaaaacgctgattaaaatactgggcatttccggcagccttctgctttgtgcaggggctcaggcccagccctataaccggacgctacctgcagtcgtcaatgacaacaacgggaatattttctggtgtgatgcgcatcgtcaggttaccggaaaatgcgaagccatgtctgttgaccgtcagggcgggatggtcacggtgcgttcagcaccttttaaagactgcgaaggcggcctgtggggctggataactatcatgcgcaacgatgtgtcgaagggattcaccattactccggataagaaattcggtctcaccgtaaaagatctgtgccgtccgggcacggtagtgacctttaagcccaaccagaagaagccggaatatgacgacctggtggcactttaccagggcaaagagctgtttcgctaccggcgcttctga

SEQ ID NO: 124877 - DNA, 411 bp, Enterobacter cloacae
atgctgaaaatactgacctctgctgtacccgccctcattctgtcacttgccgcattcagtgccggtgccgctcagcttccggcaagccttatggataaagacaatcccggccaggaatactggtgccagggaaacgacatcaacacctccatgtgctcactgaccggtgtcagcgatgaccataaatttgccctgattcaggacctgccgggcccggcctgtgaggacttaagctttgggattatcgacctggtgcgccagaccggcgtcaatattccttacgacggtggtgactgtaagggcgatgtgcaggccgggtttgtgcgcggcacaaaagataatgccctgtatgtgaaaattgtccggggcagtaaaaccctgcggctgtataaggtacaaaccggttactga

SEQ ID NO: 124878 - DNA, 237 bp, Enterobacter cloacae; identical to SEQ ID NO: 80604

SEQ ID NO: 124879 - DNA, 432 bp, Enterobacter cloacae
atgtccgctaatgaacctcaatttgacctcactgcaacaccagtacctgacgaacagcgcctcgatttctggccgctgtactttggcgctatcccgcaatggataacgctggaaccccgtattttcgcctggatggagcgcttctgtgatgagtacagcggtggtatctggtccttttatacgctcagcaatggcggcgcgtttatggctcctgatgctgaaggtgacgataaatggaatctgttcaacggcatgaacggcaatggtgcggaaatgagcgcggaagccgcaggtatcgctgtctgcctgattgaatacagccatcacgcctgtcgcaccgaatgcgatgccatgacggagcactattaccgcctgcgggattacgccctgcagcaccctgaatccagcgccattctgcgcattattgattaa

SEQ ID NO: 124880 - DNA, 369 bp, Enterobacter cloacae
atgaaaactctacctgcaacaatttcgcgggcgacgaagccctgtctgtcgcccgttgcagtctggcaaatgttacttactcgtctgcttgaacagcactatggtctgatgctaagcgacacaccttttagtgatgaaaccattataaaggagcatatcgatgccggtatcactctggctaatgccgttaactttctggtagagaaatatgagttagttcgtatcgatcgcaatggatttacctctcaggtacaagcaccatatttgactgcgacagacattcttcaagccaggaaagcgtgcgggctgatgagccggtgttcttacagggaggtaagtaatattgttcttagtcgatcacggctgtga

SEQ ID NO: 124881 - DNA, 468 bp, Enterobacter cloacae
gtgagtgtttcagacaactatgaatggtataagaatgactacctggtgagtacagacagagaaaagctggacgtacaggccatccatcaatatctgacgagatcaacctgggcaaaaggtattcgcctggacatagtctcttcctcaatagaaaacagtcttaactttggcgtttaccataatggaaaccagattggtttcgcgcgtctgataacggattatgcaaccttcgcctacctttgcgatgtttatatacttgaagactatcagggtgaggggcttggaagatgggttatggaatgcattcacagtcaccccgtgtttgagccgcttcgcaggatcatgttatttactaccaccgcgccctggctttatgagaaatttggctacgagcccgttaacagggaaaactatgcctggacgattacgcggcctgatatttatacgggtggggaaaaacagggttga

SEQ ID NO: 124882 - DNA, 1938 bp, Enterobacter cloacae
atgaacaggatactggttggtatcattttttctctttttatcacgacaggatatattgcattccttgtttacgatcgacagcaggagttgcaaaaactgactcaatacaccgagtcctggtccgtggctcaactggtatcagagtattaccgatttgaatcatggcttggtctatacgcaaccgataccgatgacgttacgatagaccaggtccgcatgcgtcttgaaattatgctaagccagagcgatttaatgaacggcggggatttaggtcgctatattgacagcgataaaatgcaccaggaactcgcttcgcgtttagagaaaatactggcgtatctggatggcaatctcgaaaaaatgagccattcggagttacaggcatacctgaaaaatatgcatatgcttgatgcgccgctcagccaactttcggccacggcattaacaaaagatattaatacagttaatgaatccaacagaaaaatccaaatcctgtattatatttactccgcactttcattacttctggtgattttaagctttattctgggctttttaatgatctaccagaataaaaacattctcaaagcccacatgcaggttaaaagcctggctgacgaactacagatatcaaaagaaacgctgcagattcagaacgcgaagctggagtatgatgtttatcatgattccctgaccggtatgaaaaaccgccttttcttctgggacgatctcaacaaaattaatcttcaggcggataaaaaccatatccccgtcacggtaatgttatttgatttagaccggtttaaagaggtcaacgatacctatggtcatgatgccggagatttactgctgaaccaggtctcccgccgccttacctcaatgagcagcgcgacggatacgttttaccgtttgggtggcgacgagtttgcccttctctccagcggcctgacggaaagcgctgcggtttcgcgcgccaaagagatcagcgatcatatcagccagccctatacgattaataaccagctgataaaaattgccacctgcgtgggtattgttttatcggataacgaacgacgctctgattatctttacaagtttgccgatctcgccctctacgaagccaaaaaagagggctcgcagcagataaaagtcttccgtcagtggatgctgcaaaaactgcaggaaagcagaacccttgaacatgatatggcgctggcgctcgatcaccatgaatttgttgtgtattaccagcctattgtcgatgcattcagcaatgatatttacggctatgaagcgcttattcgctggatacacccgcagaagggaatactgtcgccggattactttatctctgtcgctgaaaaaacagggatgatcaatgagatcggtaaaaatgtgcttgagcttgcctgccgggaggccgtttcctgggcggttccggcacggatctcggtgaacgtctcgcctgttcagttaggcacgaaatcctttacggcgatggtgcagtctattctgaaagagactgggctaccggccaatcgccttgagttagaagtcaccgagtcttcactcttcagtgacagcaacacgccagtcactattctcaaaaagctcagatcgctgggggtaagaatttcgatcgatgatttcggtaccgggtattcatcgctctcacggctcagtgaactcaactttgataaaatcaaaatagataaatcctttgtgaatcccatctccacgcaagatgaagcgctgaatatcgttaagctgatcgccggtatggcgaagagtcttaatatgagggtcattgcagaaggcgtcgaaaccgaagctcagctcgaacgtcttcaggcgcttggctgcgacctcgtgcagggctatctgttcggaaaaccgcaggctgaagtcgacaaaaaaataaaaagcggtgcagcgtga

SEQ ID NO: 124883 - DNA, 480 bp, Enterobacter cloacae
atgctgttgtgctgtctggtgccaactttagcctgggcaggtgaactgccaaaacctgttggaaaacctattttgacgatttacggtaatatagaaaataccaacgaagagggaaaagcagtgtttgatctcgccagccttgaaaaactagggatggtgagtttcgagacgacatcgccctggtataacggacgtacaaagtttgagggtgtccctatgagaaaactcatggattatgtgggggcaaagggtactaacgttaacgtcattgcgctcaatgattactctaccgtcatccctcttagcgacttcaaaaaatacaacgccatacttgccttaaaggtcaatggcgaatatatgcgcatccgcgacaaaggcccgtcgttcattgtttacccttatgacagtcttcctgagttgaataatcaaatttattattcgcgttcagcatggcaggttagcaaaatgaagattgagtag

SEQ ID NO: 124884 - DNA, 1218 bp, Enterobacter cloacae
atgtcctaccgtatcggtactttccccgccattgcaatggcggcattgttctctttcgcaagctgcgccagcgcggcggatcagatgcctcttgagcactggcgcagctactcaggcgtaagctgggataaacctgaaaacgtgcaaatgccagccgtgttttccgggtcggtgaatgcccccttagcaggcattcactttgatgcaaagggccgggcctttgtcagcacgccccgactgatttcagccagtgcccccgccacgttgaatattctcgacaccgatcctcagtccggacccgcgcgcctgacagcatttccgtcccgcgagcgtaatgcggttgattccgctcccgatcagaacctgcgcaacgtgctcggcttttatgttgatcgtaaaaacggctggttatgggcgctggatatggggttcatcgcgggagaaacggaatccccttcaggctcgcagaaattggtcgtactggatctcgactcgggccgaacggttaaacgtatccccctggacggcgtggccgaccgtaaggcaagtttccttaatgatgtcgttgtcgatgagaatcatcgtatcgcatacatttccgacagcgggtcgcgcagtgcgcctgaaaaccgtgtcggcctgatcgtcgtggatttcgccaccggcacagcccgacgcgtgctgaatagtcaccctgccctgcagattgaaccgggggtaaacgtcatttcccatggcgcggaggtatggccaggtaaaccgctattgattggtatcaacggcattgcgctgtctcccgatgcagaaacattgtactggacggtgacgacgggaacacatgcatacgcggtgcccactgccgtgctgaagcaacatgattcaactgatgcgcagattgccgctcaaattcagaatctgggcacggtgggaggtaatactgacggtttggtgaccgatgcaaaaggctacctctatattacagatgtcacccataacggcattgtcagatatgatccgaagacccgtaaaatgttacttattgctgcaaatgaagccataaagtggccagacacaccggctattcgcccggacggtgacctgatcttcacatcaagtagccttaatgaccacttcgctggaatggtcaaaccaagccatgaacggtacgatctgtggcgcttgcgacaggacacgaacccgccgatgaacactcgctaa

SEQ ID NO: 124885 - DNA, 795 bp, Enterobacter cloacae
atggatcttcaactcaacggtaagacagcacttgttacaggggccaccgcaggcattgggctggctatcgccagtacccttgcgcgcgaaggtgttgccgtcacgattaccggacgcgatcgggaaaaactgcacaatgcggtagcgaaaattgctcaggcagctccccaggcccgggtatcagccattgtcgccgatctggctaacgctgaaggtgcagaagcgctgattaaggcctgtacggataccgatattcttatcaataacctgggtttttatgaagccacccctttcgctgatatcaccgacgaggaatggctacgcatgttcaacattaacgtgatgtcaggcgttcgtctttcacggcattacttcccacgcatgctagcacgcaactggggccgggtgatttttatgtccagcgaagttggcgctttcactccgccagacatggtgcattacggcgtcagcaaatcagctcaactcgccgtatcgcgaggaatggcagagctgacgaagggtaccggcgtaacggtcaacagcgtactgccatcggcaacccgctctgacggaatcattgattacctgcgccagacagcgcctgaacctggcatgacagaccagcagattgaagcgcatttcttccagacctaccgccccagttccctgatcgcgcgaatgatcgaggctgacgagatagccgctatggtcgcgctactggcaagcccactcggcgcggcatcaaacggggctgcggtacgcgtcgaaggcggaacgttccgctccattctttga

SEQ ID NO: 124886 - DNA, 900 bp, Enterobacter cloacae
atgagcagaaaattcgattatctcggcgatgttgaggtcttcattactgttgttgaacatggctcctttaccgctgcagcggtcgccctttcaaccacgccctcagtgttgagtcgtgcggtctcccgtcttgaagtgcgtcttggacgacagctattgcaacgcaccacacgtcgtgtggggctaacggaagccggacggatttatcttgagcaggcgcgttctgctttttccctgcttgatgacgccgaacgcgatggccgggggcaggagggggatctgactggcagggtacggatcagcgtcccgaccacctatgggcattattgtctgccgcccttgctggcccgcttttcccaacagtttccgcgcgttcaggtggagctgaacattaccaatcgcaatgtcgacctgatcgctgagggattcgacctggctattcgcctgggtcaaatgcctgacagtggattcgtcgcgcgtaaattgcaggatgcggcactgctgttggttgcttcacccgcttaccttcatcgcatgggaatgccgcagacgctcgatgaactgcggcagcatatgtgcctgccttttattatgccgcgtaccggccgtattgcgccctgggtatttcgcgtggatgagcgggatgttgactggcagccagattcaaccatcgagatttcagatgatgtccttggcgtggtttcgctggctgaacatggaataggggtctgtcagagctacgaattcattgtccgcgagaagatacagcgcggccagttagttgagatacttccgcaacttcgtggacgatcgcgacctttctcgctcatctacgcgccccatcgacgccagtcagcagccacacgggccatgattgatcttctggcgtcagaacaatga

SEQ ID NO: 124887 - DNA, 684 bp, Enterobacter cloacae
gtgcaaggaaaaactctgctgaccgttttcatcctgggggcagttgcaacggcgggttatcgctggttgccgtcttactacaatccatttaaaccgctggccctggacgatccccctggccgtattacccagtataaactgcgacgtttaacccccgaagcctgcgcgagcctgttaacgcaggccaatcaacgaaaccttatccgcacccaaccggtcgctgacggcggcgggacatgtccgctgcgcaacgtcgtgcgcgtgcgtgacttcggcccggtgagtctgaacggcagttttcttgccagctgtccgctggcgctcagctctgcactgtttgtcagccagcaggcccggccactgacgcagcgcttcacgggacatgagctgacgcgcattgagcatcttggcagctttgcctgtcgcaatatctaccaccggcccgatgcgcggcgcagtgagcatgccaccgcagacgcgctggatatcgccgcttttcggctggcgaacggggagcgcgtcacggtgctgaacggctggaaatcggcaaaaacgcagccatggctgaaggccctgctggcggccagctgcggctactacggtaacggtttggggccggagtataacgcggcgcatgccaaccattttcatctggggatgcgcggtttcggactctgtcgctga

SEQ ID NO: 124888 - DNA, 2622 bp, Enterobacter cloacae
atggacgagctctacatccttggctgtttgttactggtttttgcgctggtggttgcgcccgtgcttgcggttattggctttaatcggagcacggcggcgcggcaggagatcgccaggcttcgccagcgtattgaagcgcttgagcagcgtggtgccgctgagatagcgccggagacggcgaagaccgccgcgccggtggttgtgaccgcgccagtggtggagcacactcccgcacgtgtcgacccctggcgtccggacgcccgcgtgcccagggctgaacccgctcccgtttccgctcctgcccctgcggcaaaacagccatccgtctttggcggcatactgacgtcgctggtgcgctggtttatgcagggaaatccgctggcgaagctggggatcctgctgcttttcctcggtctctctttcctgctgcgctataccgtagaacattccctgttcccgcttgagttgcgcctggtggcgacggcgctgtttgccatcgttctgctggcgattggctggcgactgcggcataagcagccggtttatgcgcttatcttacagggtgggtcgacgggcattctttacctgacggtctttggtgccttccggctctggcaaatgttgccgatgacgctggcttttgcgctgctggtagcgatttgcgccgcgagcgtcgggctggccgtgctgcaaaaggccttgagcctggccatgctggcgagcctcggcgggtatctggcaccgctgctcctgtctaccggaggcggcaactttgtggcgctgttctctttctatctcctgctttccatcggtattctcgccatcagcatctggcagcactggcgcgagctcaatctgctcggtctgctttttacgtttggcgtgggtggcctctgggggctgagcgactatcagcctgaacactattgggtgtgccagctgttcctgattgccaatacgctgatattcggcgtgctgtgcgtggcgctgtcgctgcgggcgcaggaaaaagggaaacagattattgacggcgtactgctgtttgctccgccgctgattggcttcgggatgcagtacggcatgacccggcactgggaatatggcccggcgctgagcgcgctcggatatggggcattttatctttcccttgcgttcctcgcgctgcggcgctatccgtccatcggacgaccactggtcatggcggcgctggccatcggcggcgggttcgctacgctcgccattccgctggcactctcggcgcgctggacggcgatggcctgggcgctggaggggctgggtatcctctggctgggcatgcagcagaaccagcgtcgtatgagctatagcgggacggcgctgctggtgctggcactcggcagcgcgctgtgggcgcaaatggacggcgtgacgtcgctgagccttctccttatcttcgccatcctcagcctttgctggctggctgcggcgtggctatggcgcaaaagtgttctgccggtcagttgggcgttgttggcaggcggcctgttgttctggatcgtggcgctattgggtgcctcgcaacgggtgctgaaacaagaattacctgttctggcaggcgtgctggcgctctcggccgtctcggtctggggctggcgccaggctgccgctcgtctggcgtggcgggagctggatgccagcaaatggctgctgtggccactgatgctggtgatggtggtttaccagctttcgcatcagcagatcgttgccgctggctggtcaaatctggcctggtgcattgcacttcctgccgcattgatgctgctgcgacgtgacggtgaaagactactgccgcgcatcgcgatggggctgcacctgacgctttgctggatgattttactggcgctggcggctgagctttactggtttgctcgcgcgctaccgtggggcatggcggcgtggggcagtggactggcgatggcggctgggggcggcgtgataatggcgctttccgcggcggtgcgtcgccgcgcgtggccgttcggggagtggcctgcgctctatacctgcctggcgccgatccctgtcgtcgtggcgctgctggtgctgctggtcgtgaccaatttccaggacggcgtcgtttaccggcaaatctggctgccgctggtgaacccgcttgaggaaggcgcggcattcgcgctgctggggctggtggtcttttatcgggcagtggatcgctactatcccgcgttgcttgctcaggctcgcccgtggcctgccgttgctatcatggcgtttggcttctggtggcttaacggggcgctgatgcgcgctctggcctggtatggggatgtggcctggaatatggcgtcgctgtgggattcgcggcttattcagaccacgtttgccctgttctggatgctgatcgcgctggtggccatggtccatgctacccgccgggcctcccgccaggagtggctctgcggggccgccttgctgggggtcgtgatggttaaactgatgctggtggacagcgcaggcggaggcggcctgtcccgtgccgtggcgtttatcggcgtggcgatactggtcctgatcgtggggtatttctcgccactaccgcctaaaactggagatgaaaaatga

SEQ ID NO: 124889 - DNA, 1386 bp, Enterobacter cloacae
atgaaatggatgaaagcggtagtctgtaccacgctgctggcgctatcgggcatggcgttctgcgacgagatacaaacggaatcgccgcgggattatgcctttggtcgttcactggaaacgtcggttccttcccagtggtatcgggtattgctgccgctcgccgtctatgaacagagcacctccccgaatctggacgatgtccgcgtctttaatcagtcgggtgagccggttcccttcagcctggtcaccgcgacgcgcccgcaggtggtggcgcaatccacggtgctgcgtctttttcctctggacgcctcaccgcttgccgcggcgccagatgccggtgatagcaataagatcctgctccgttccggaaatggcgttgagattgtgctcgaagggcagaaagctgccgtggccgggcaacattatctgctgaccttgccagagcaggcgacgggtgagatggctatatcccagctgcagctgctctggaatccccctcagacgtcgtggcagggaacggcgtcggtctattacagcgaggatttgaagcgctggtataccctacgcgaggatatgcccttgctggacgtcgtcagtggccaggatcgccttaagctcgatcggatcgataccgatacggttttatctcctgatgcgaatcgctatctcatggtggtgctgaatacgcagagccagggcatgaccttgaccggcgtaaacgcgattagcgcccctgcgcagatggctccggaagcgatcgacctggagggggaaggggaacagctatcgacaagcgaagcgcagtggcactgggcgcacccgcagccattgagcgcggtcagcttcttgctgaatggcgacggcgttctgcccgtggagatcgcgtggcgaagtacggaaaaagacacatggcaccccctgaaaaaagaggttctttaccgcctggagggcaaaacgtctgcgccggtttcgcttaacggagagcgggtccaggcggtaaaaatcacgacgctgaatgcgcgtctgcctgaataccttccgaacgtcatagggcatcgcgaccgcgttgatctggtgtttaacgcgcaggggaaagcaccgtacgtgctcgcctggggaaacggggcggcaaaaccagcaaacctggagccagacatgctgatccccgccgacctgcgcaaaacctatgatatggcgaatctgccgcaggccgatattgtggatgatgtcgcgttgggcggtgaggcgcgtttaaccgccacttctgcgggcgagcaggagagccggatgaacgcgctgctggtgtggagcgtgctgattgtgggcgtgatcctgctggcgctcatggcctggcgtatctggcgagagacgcagcgtaaagcataa

SEQ ID NO: 124890 - DNA, 321 bp, Enterobacter cloacae
gtgaaatactttgtgccaatcactcagctgtggggcggcaacctgagctatatcggcttcaccaactttgactggggctcagacctgggcgataacgacttccgcgatctgaacggtaagaaagcacgtaccaatgattctatcgcgtccagccacatcctggcgctgaactacgatcactggcactattccgtggttgcgcgttactggcacaacggtggtcagtggaacgacgatgccagcctgaacttcggcaacggcgatttcagcgttcgttctaccggttggggtggttacctggtcgtgggttacaacttctaa

SEQ ID NO: 124891 - DNA, 381 bp, Enterobacter cloacae
atgaaatgtggaatcaaatcactgttaattgcgctggctattgccaccaccggggtggccacgagcgcgctggccgcgacgcccgcagccaaagcacagacggtgcagagcaagtctgacgcctcagcgtcagtgcaagggcaatccaaagcggctgatgccggtaaaacggcggatgatgacggtacgcgggtcagtatcaattcggcctctgcggaagatctcgcccgcgcaatgaacggtgtcggcctgaaaaaagcacaggccatcgtcagctaccgcgaagagtatggtcctttcaaaactgtcgacgacctcaaacaggtgccgggcatgggcagcgcgctggtggagcgtaacctctcacacctgacgttgtaa

SEQ ID NO: 124892 - DNA, 366 bp, Enterobacter cloacae
atggacagggactacgttgttgaacgctaccgtacccgtgacggaaaagtgccatttgaggagtgggtagcgaagatgaagcgaaaggatccggaattagtgtttcggattcttttgcgaattgaccgtgcagagaaagggaatttcggcgattaccggtatctcagagatggtatctgggaattgaaaattgattgtggtcccggatatcgaatctattttgcagtacaacatcgggagatcctattgttgctgattgggggtgacaaaaagagtcaaaggaccgatgtgaaactggcaattgattactggaatgaccatcaaaaggagaaatccgatgagcaaaagcgaacgaaaattctctag

SEQ ID NO: 124893 - DNA, 612 bp, Enterobacter cloacae
atggtacgtcgtctgctacaactttatgtcggtttgggtctgtatggcctctctaccacgatgtttattcgctcggatctgggggttgatccgtgggatgtatttcaccttggcgtcgggctacagctggggatgagtatcgggacggtgatcattttgaccggcgctgcggtgctgctgctgtggatccccctgcgccagatgcccggactcggcacgatcagtaacgtgatttgtatcggtctggcggcagacgccagcatggcgctcatccccgagctgagttcgttacctgtgcgaatcgctttcctggtatcgggcattgtgatgaacgcgattgccaccagtatgtacattggtgccggtttcgggcccggcccgcgcgatggtctgatgacaggcattcacgcccggctgggctggtccattcgcagcgtgcgaaccacaatcgaagtgtccgtcctgctgattgggtgcgtgcttggcggtacgtttggcgtaggaaccgtactgtatgccctgaccattggtccgcttattcagctctgtatgccctggttccgccagaagtcgcgcaatgagaacgttcctcagccggaacgggttgtttaa

SEQ ID NO: 124894 - DNA, 1566 bp, Enterobacter cloacae
atgaacacccgacatctggtcagtctggtgactggcatacttatcttttctgtgctggttcccatttgcctgagcatctggctggcgcatcgccaggcggaagagaaatttgtcgatgcgctggataactatgcttctcgtgtgctgatacgaaccgacagggtcctggctcaggcaaaagatgcgcttaatcatctgcaaacgtatgacggtgtgccgtgcagcccttcgcatttaaaagagatgcgccgggccgcgttttcctggcgatatgtccaggaagcgatctataccgacaacctgaaaccacgctgctcctcgctggagcaatccagccatgcctcccccttccccccaccaacgcgcattacccgggatggttacagcgcatggctgacggcgcaaaacgatctgggatttcaccgctacatggttgtgctgggcaaaggccgctaccttgtcatgatcgatcctgactcgctggtggatgtgatccctttcggggaaatagccatcgacgcagccctggtcggaaccgcaacacaccgcatttttgccagcactaatccactcgcgccgcatatccgcgagatgattcaggaacgagagggagaccgcgtccagtacaacggttcaatgtacgtgatgaagcctgtccctgagttgggctttaccgtcgtgacctgggctccgctcaaacctttggctgatacctggcacaggcaactccttttctggttaccgtttggcatgttgataagcttgctcgccgcactgtttgtcttgcggatactgcgtcgcatccagtcgccccgcaatcgcctgcttgacgccattaacagccgggattttgtggttcactatcagcccatcgtggcgctctgtagcgggaaagtggtaggggcagaggcgctggcgcgctggcctcagccagatggcagcagcctctcgccggatatttttgttccccttgctgaacaaaccgggctcatctcgcagctcacgcagttagtcattgaaaaagtgtttgaagatatgggccactggttgcaacaccaccccgatcagcatatctccattaatctcgcccctgccgatttgacctccggcaaactgccaccattgctgagtaagttaatgaataaatggcaaattcatccgcgacaaatcgctcttgagctcaccgaacgcggttttgccgaccctaaaatcagcgccccggctatcgccgcgctacgtcattccggtcatcctgtctatattgatgactttggcacgggctactccagcctgagctatctgcaggatctcgacgtggatacgctcaaaattgataaatcgttcgtggatgcgctggagtacaaaaacgtcacgccgcacattattgaaatggcgaaatcgctgaagctggcgatggtggcggagggtgtcgagaccgaagggcagctcgcgtggctgcaccgtcatggggtgcagtatgggcaggggtggttctacagtaaggcgctgccaaagacggaatttattctgtgggctgaaaataacctcggcaggcacgttacttga

SEQ ID NO: 124895 - DNA, 1653 bp, Enterobacter cloacae
atgaagttaatgaagcggggcgtcgcgctggcgctcatcgccgcatggggtctggtaagcctgcccgcgcaggcgtatgaaaaagataaaacctataaaatcaccattctgcataccaacgatcatcatggtcacttctggcgcagtgaatatggcgaatatggtctgtcggcgcaaaaaacgctggtggacggcattcgcaaagaggtggcagcccagggcggcagcgtgctgttgctctcaggcggtgatattaataccggcgtgccggaatctgatttacaggatgccgagccggatttccgtggcatgaatctgattggctacgacgcgatggccgtcggtaaccatgagtttgataacccgctgacggtgctgcgtcagcaggaaaaatgggccaaattccccttcctctccgccaacatttaccagaaaagcaccggcgaacggctgttcaaaccctgggcgctgtttaagcgtcaggatttgaagatcgcagtcattggcttaaccaccgacgatacggcaaaaatcggcaatcccgagttctttacggatattgaattccgcaaaccggcagacgaagcgaagctggtgattcaggaactgcagcagaacgaaaagccggacgtgattatcgccaccacgcacatggggcactacgacaacggtgagcacggctccaatgcacccggcgacgtggagatggcgcgcagcctgcctgcagggtcactggccatgattgtgggggggcactcacaggatccggtgtgcatggcatcggagaataaaaaacaggtggattacgtgccgggcacgccgtgtgcgccggaccgtcagaacggtatctggattgtgcaggcccacgaatggggtaaatacgtgggccgggcggactttgagttccgtaacggcgagatgaaactggtgcactaccagcttattccggtcaacctgaagaagaaagtgacctacccggacgggaaaagtgagcgcgtactttacacgccagagatcgctgagaacccgcagatgctctccctgctgacaccgttccagaacaaaggcaaagcgcagctggatgtgaaaatcggcacgctgaatggtcgtctggagggggaccgcagtaaagtccgcttcgtgcagaccaacatgggacacctggtgctggcggcgcaaatggcgcgcaccggtgctgattttggcgtgatgagcgggggcggcattcgtgactctattgaaggcggaaatatcacctataaggatgtcctgaaggtgcagccgtttggtaacgtggtggtctatgccgacatgaccggcaaagaggcgattgactacctgaccgccgtcgcgcagatgaagccggattccggggcctatccgcagtttgccaacgtcagctttgtggcaaaagacggcaaactgaatgatctgaagatcaaaggcgaaccggtcgacccggcaaaaacctaccgtctggcgacgttgagctttaacgccaccggcggcgacggttatccgcatattgataataaaccgggctatgtgaataccggctttattgatgcggaagtgctgaagcagtacatcgagcagaattcaccgattgacgtgaacgcgtatgagccgaagggtgaggtgagctggcagtag

SEQ ID NO: 124896 - DNA, 165 bp, Enterobacter cloacae
atgagcctgtttaatcgtatgaaaacctcgtttcgcgccctctttccccgccgttatgcgtggcccggcctggatatctccctgcccggcggtcagcacctgcatctggtcggcagcatccatatgggtacgcaggatatgtcgcctctgccccccccggtctga

SEQ ID NO: 124897 - DNA, 672 bp, Enterobacter cloacae
atgaaggataacagcgcggtattaaccatcgaggacgtgggctaccgcacaggcggtaccaccattctgaataatgtcagttttagcctcttgccgggcgagtttcgactgattaccggcccctcaggctgcgggaaaagtacgctgcttaaaatcattgcgtcgctgctcacgccaacgtcgggaaagatcttctttgaggggaaggatatttcaacgctttcacccgaggcttaccgccagcaggtctcttattcggtgcaaaccccgagcctgttcgacagcacggtgtacgataacctgcttttcccctggcagatccgacataagacgcccgatcctgaacggttttccgccgacctggcacgcttcaatctgccgccggacacgctgacaaagtccgtttccgaactgtcgggcggcgaaaagcagcgcgtctcgctgatccgtaatctgcagttcttaccgaaggtgttactgctcgatgagatcaccagcgcgctcgataatgccaacaagcgcaacgtcaatgaaatcattcatcgttacgtccgcgagcagaatattgccgtgctgtgggtgacgcatgacgctaacgaaattacccatgcggatgacgtactgacgctccagccgcatggcggaaaaatgcaggaggcaaaccgtgggtga

SEQ ID NO: 124898 - DNA, 1071 bp, Enterobacter cloacae
atgaacgatggaacggactatcgcgcaatcctcgcgtctgatacccctttaatcgacgttcgcgcgccgatagaattcgcccagggcgcgatgcccgccgcccttaacctgccgctgatgaacgacgacgaacgcgccgccgtgggcacctgctataaacgtcagggccccgaggccgcactggcgctcggccacagtctggtcaacggcgagacgcgtgaggcgcgcattaacgcctggcgtgaagccagccttgctcaccctgaaggttatctctgctgcgcgcgcgggggccagcgctcacatatctcacaggcctggctgaaagaggccggtgtcgattacccgctgatccgcggcggctataaagccctgcgccagacggcgattcaggtgacgattgagcagtcgcaaaagccgatggtgcttatcggcggctgtaccggaaacgggaaaaccctgctggtgaagcagcatgcgcagggtatcgatctggaagggctggcgcaccaccgcggttcgtcctttggccgcacgcttactccgcaactgtcccaggccagctttgaaaatcatcttgccgtcgagctgttaaaaaaagatgccgcacgctgggtgctggaagatgaaggtcgaatgattggctccaaccacctgccggagtgcctgcgcgaccgcatgaatgaagtgcccatcgcggttgtcgaggatccgtttgatattcgtcttgagcgtctgcgcgaagagtacttcgaccacatgtgggcggatttttctgccgcttatggtgaagaggccggctggaaagagtacagcgcgtatctgcaccacggactgttcgccattcgccgccgcctggggctacagcgttttgcggaactgactgccctactcgattccgcgttgcttgaacagcaacggacgggctgcaccgaggttcactttagctggcttgcgcccctgcttaatgactattacgacccgatgtacggctatcagcttgagaagaaagcggagaagattatttatcgcggcacgttcgcagaggttgcggactggttgaatcgctga

SEQ ID NO: 124899 - DNA, 2562 bp, Enterobacter cloacae
atgaaaaaccatcagggacgttactgcccggttgcgctggcgctgatggccgcgctctggccccaggctggctggagcgaaagctacttcaacccggccttcttgtctgacgatactgccagcgtggcggatttgtcgcgttttgaacaaggacaccagcaggcacccggcgtttatcgcgtggatatctggcgtaacgatgagtttatcggcactcaggacgtgcgttttgagcaggctgagaacacgccaccggtggcgggcggtctgaccccgtgcattacgcgcgcgatgctcgatcgctttggcgtcaacgttgcggcgtttcccgaactggctaacgtgcagggcgaaacctgcgttccgttgaccacggccattcccggcagcgaaacggtatttaactttgcctcacagcgtctgaacgtcagcctgccgcaggtggcgatgcaaaacagtgcgcgcggctacatcccgcccgaacagtgggatgaaggtattcccgccgccctggtgaactacagcttcacgggcaaccggggaagcgaagacgacagctactatctcaacctgcagagcgggctgaactatggtgcctggcgtttacgtaacaacggcgcatggcgttacacccagaataacgggcagcggcacagtgagtgggagaatattggcacctgggcgcagcgcaccgttatcccgctcaaaagcgaactggtgctgggcgacagcaataccgggaatgatgttttcgacagcgtcggttttcgcggcggacgactctattcgtccgacagcatgtacccggacagcctgcagggctacgccccgaccgtgcgcggtattgccaggacgccagccaaagttgtggtgcgtcaaaacggctacgttatctatcaaagctacgttcagcctggtgcctttgccatcaccgatcttaacccgacctcctcaagcggtgacctggaggtgacggtggaagagaaagacggcagccagcagcgctacaccgtgccgtattccaccgtcccgctgctgcagcgagaagggcgctggaaatacgatctcgtggcgggggactatcgcagcggtaacagcgaccaggatacgccgttcttcacccagggcaccctggtgaccggtcttgccaacggctttaccctgtatggcggtacgcagctggcgtcacgctataccgcgctggccgtcggggccgggaaaaacctcggtgactggggcgcggtatcggtcgatatcactcatgcccgcagccagctcgcggacgacagcaagcacgaagggcagtcgctgcgttttctttatgccaaatcactcaacggcttcggcaccaacttccagctgctgggctaccgctactccaccaaagggttttacaccctggatgatgtcgcatggcgctcaatggaaggctatcagtatgccgataatcaggacggtaacgatgtgcctgacgtacagagttatcataacctgacgtggaacaaaaaaggccgctttcagctcaacgtctctcagtcactgggggattacggctcggtctatatttccgggagtgagcaaacctactgggggacggacgaaacgaacctctggtatcagctgggttacgcggggggcgtgaaggggatcaactattccgtctcgtggtcgtggaacaaatccgtcgggatcgacgggactgaccggatcgcgtcgttcaacgtctccgtgccgtttagcttgtttacccgtcagggctatcgccgggacagcgcgattgaccgcgcctacgccacggcatccgccagccgaaacagtgagggtgataccagctggcaaaccggcgtcagcggcacgctgctggaggaccgcaacctgaactacagcgtgacccagggacacgccagcaccaacggctcaagcggaagcgccagcgccaactggcaggcaacctacggcacgctgggggtgggctacaactattcccgcgatcagcacgatttcaactggcagctctccggcggggtggtcggccatgctgacggcgtgacctttagccagccgctgggcgacaccaacgtgctgatcaaagccccgggggcttcaggcgtcagcgtggaaaaccagaccggcgtgaagaccgactggcgcggctacgcggtgatgccgtatgccaccgtctatcgctataaccgcgtggcgctggataccaataccatgagcaacaacaccgatatcgaaaataacgtgagcagcgtggtgccgaccaaaggcgcactggtgcgcgccagctttgacacccgtattggcgtgcgtgccctgctgaccgtcacacgtggtaaccagcccgtgccgttcggcgccgtggtgcgtgaaacccagagtggcgtgaccagcatggtgggggatgacgggcaaatttacctgagtgggctgccgctcgaaggcgaactgctgatccagtgggggaacggggcacagtcccagtgccgtgcgccttacagcttgcctgaaaagagcctgcaacaggcaatcacacttaaggggatccgctgtgattaa

SEQ ID NO: 124900 - DNA, 633 bp, Enterobacter cloacae
atgaaaccggcatccgttatcattatggacgaacatcctatcgtcagaatgtcgatagaagtcctgctacagaaaaataagaatatcatcgtcaagcttaagtctggcgatagccatgaagttcttgactgcatccgcaatcaccctatcgatttggtgatccttgacattgaacttacgggcacagatgcctttgctttacttaagagaatcaaaaacttaaataaagacattaaggttcttttcttatcatctaaatcagaactgttttacgccggacgtgccattcgcgccggggccaacggctttgtcagtaaacgaaaagatttgggtgagatctacaacgccgtagagatgatcctgatgggctattcttttttcccgtcggagacgctgaattttataaaccatatggggtcgggaaagggagagctggcagatatgccgttatcgaatcgcgaggttacggtattacgttatctggcgaatgggctgtccaataaggaaattgcggagcaattgctattaagcaacaagaccattagtgcgcacaaatccaatatttattccaagctgggggtgcaaagcatcgtggaattaattgattacgctaaagcacacgaactgctataa

SEQ ID NO: 124901 - DNA, 699 bp, Enterobacter cloacae
gtgacagcgcaaaacccgttcgatacgcccccccgattacagtctatttctcaggacatcgtcggcatcaaactggagcctatcgtcgccctcaacgcccggcgccgggtcggcgtggaggtcctgagcgtcttgtccgacaccgggcatagcgaggacttcttccgccatcagtcggcagaagcgtctttgacgctgcttgaagcgcagctggccgcattaaaaaataccccgcacggcaataatctttttattaatctgccgataaccgtgttgacagcacctgcgccttttgcgcggctcatcaatatgaaaaccgcgccgctgaatattgagattgtcgacctccctctctttctgacgctctccgccgcacagaagcagagcgtcgttaacaacctgcggcaacttcaggaacggggacacactatctggctggatgatatcgacgaaactatcattcagccgtttttattttgtcgattaccgttgaacggcatcaaaatcgataagaacgcattctggcgtttacgcgccacacctgcactgaggaaactggtttcactttgctttcagctggccggaagcgtactcatcgaaggtattgagactgaacgcgatcgtatctgggcactgcaggcgggtgccgatctcggccagggatattactggccgtcctggacatggccggaggattaa

SEQ ID NO: 124902 - DNA, 2184 bp, Enterobacter cloacae
atggacaacaccaaaatacacaaaacgctgctggcgctcgccattggggcggtgacacattccgtccaggcggcggatgataaaaaagaagatacgcttgttgtgcaggctgcacctgccagtgactttaaacccggcggcgaccagctggtaccggcctttcttgacgggcaggtggcgaacggcgggcgcatggggatgctgggccagcagaacgccatggacgtgccgtttaacatcatcagctacacctcgaagctggtggaagatcagcaggcgaaaaccatcgctgacgtggtcgccaacgatgcgggcgtgcagtacgttcagggatacggtaacagcgcagagacctaccgcattcgtggcctgaagtttgacggggacgacatgacgtttggagggctgtccggcgtactgccgcgtcaggtggtggatgcgcagatggttgaccgtattgagatcttcaaaggcgccaacgcgctgatgaatggcgcggcaagctctggcgtgggcgggatgatcaatcttgagccgaaacatgcgggcgataccccgcaggcaaaagtgggcgtggattacacctcagattcgcagtttggcaccaccctagatgcaggccgtcgctttggcgacagcgaccagttcggcgcgcgcgtgaacctggtccaccgtgaaggggaaaccggcgtaccaaacgaccgtcgccgcaccacgctgctctccaccggtcttgattacaacggcgacaacgtccgcacctcgctggatctgggctatcaaaagaaaaccttccacggcagcccgaccagcgtcaacatctcggcggtggatttcgtgcctgaaccgccgaaaaacgatcgtaacttctcccagaagtgggcctacagcaacatcgaaaacgaatttgggatgtggcgcagcgaatacgacatcaccgataactggaccgcctataccggcctgggcgcgcagcacgcgcacgaagaagggatctacagcgcgccgaagctgctggacaaaagcggcaaagccacggtcagccgtctggatactaaccgcatcagcgattccgttagcggcatggcgggcattcgcgggaatttcaataccggctttgtgtcgcacaaggtgaacgtggggtattcggcgacgaccaaaaacgaaaaaatcgcgtggaaaatgtcggcgacgaaggataacccgaccaccaacatctaccacaacaccggcgttgatatgccggacagctccaacttcaatggctcaggtggcaaatacagcgatccgctgaccagcgggcgcacccgtactcagggctggctgctgagcgatacgctgggcgtcctggacgacaagctgctgttcaccgcgggggcgcgtcatcagaaagtggtcatccgcgggtataacaaaattaccggtgcggaaaacgacgcggacggcttcgacggtagccgctggatgccaacctacggcgtggtttataaaccgtgggagcagatttccctttacgccaaccacaccgaagcgctgcagccgggaaaaaccgcgccggacaccgccaccaactacggccaaagtaccggtattgttcactctaaacagaatgaagtcggcttgaaggcagactttggtcgcgtgggcggctctctggcgctgtttgagatcaaaatgccatcggcgatcctcgacgatgacaatcactacggcctggacgctgaacagcgtaaccgtggcgtagagctcaacgtttttggcgagcccatgctcgggatgcgcctgaacgccagcgccacctggctgcaggccgagctgaccaaaaccaaaaacggcgtgaatcaaggcaacgatgcgattggcgtgccgaacttctatgccgtgctgggggcagagtacgacatcaagccagttgacggcctgaccgccaccgcacgcgtgaaccactcgggcacgcagtatgccgatctcgcgaacagcaaaaagctggacagctataccacgctggatctgggcatgcgctaccgcttcgcgctgaaccacaatgcaaaccagatgaccgtacgcgcaggcatcgacaacgtgaccaatgaaaactactgggccagcgtggacgattccggtacctacatcactcagggcgaaccgcgaacctttaaggtctcggtgggctacgatttctaa

SEQ ID NO: 124903 - DNA, 300 bp, Enterobacter cloacae
atggcaacgctaaaagaactcatggcacaacagagcgcggaaagtcaggagcgtattgcggctaaagttgatgtaatacgcagaattgttgccctgaaccaactgcgggaagagctcaatatttcgcagacagaactggccgcggcaatgggggtaaaacaaccaactgtggcaaaaatcgaacagccgggaaacgatccccggctttcaacactcaaacgctatgtcagtgcgctcggcggtgaaatgagcattgatgtgacgttaccgaatgggaaacgaatagcgtttcagatttga

SEQ ID NO: 124904 - DNA, 363 bp, Enterobacter cloacae
atgtggaatgtcgagacaacggacagatttgatcaatggtacttcgaacaaacaacagcattaaaagaagatgtgctagcgatgatgcatattcttgctgagtttggcccaacgcttgggcggccatacgtagataccgtgaaggcttcagcctatgcgaacatgaaggaattacggattcaacatgcgggaaatcccatcagagctttttttgcttttgatcctgaccgtaaggcaattgtgctctgtgctggagacaaaaccggttgcaatcaaaaacggttttataacgaaatgattacgctggctgacgttgagtacagcaggcatctggcggataaggaggccatatggcaacgctaa

SEQ ID NO: 124905 - DNA, 591 bp, Enterobacter cloacae
gtggcacgtccgaagagtgaagataaaaaacaggccttactggacgccgcaacggcggcatttgcacagtcaggtattgccgcctcaacggcgctcattgcccgtaaggcgggtgtcgccgaaggcaccctgttccgctactttgctaccaaagacgatctgctgaatgccctctatctgcacctgatgcaggatctctgccagaccatgctggcgaacctcgatcgcaccatcacgctgccgaaagaacatacccgcaatatctggaacagctatgtggactgggggattcgtaaccccgtggcgcatgcggctattcgccagattggggtcagtgaaaagctgagcgccgaaacggaaatggcggtgaaagagatgttcccggaactgcatgaactgtgccgtcgttcggtgcgcccggtgtttatgtcggatgaattcaaaacgtttggcgatgcgctgtttttatcgctggccgaaagcacgatggagtttgccacccgcgatccgtcccgcgccgtcgattttaaagccctgggttttgaagtcatgtggcgcggactggctcaggaggagagcgatggacagtaa

SEQ ID NO: 124906 - DNA, 1278 bp, Enterobacter cloacae
atgaccgaaaaaaaattatccccaaacatgccgccttccggcgggctggcataccagcagaccgtagagcaggtgctggctcatacgcagagccaggtgagcggtctggaccgcgcagaggcgcaggcgcgtttgcaaaaacatggcccgaatgcattgccggagaaaaaaggcaagccgggctggctgcgctttctcgcgcattttaacgatgtactgatttacgtcctgcttgccgccgcggtattaacggcggtcatggggcattgggttgatacgctggttattttaggcgtggcggttatcaatgccttaattggtcatattcaggaaagcaacgcggaaaaatccctgaagagtattcgtaacatgctctccagcgaagcgcgcgtcattcgtaatggcaatcatgaaacgctccccacaactgaaatagtcccaggcgatattattgtattacgcgccggggatcgtattccggcggatatgcgtttaattgaggcgcataatttacgcgtggaagaggcgattctgaccggtgaatccaccgtggtggataaacatactcagccgctgaacggtgagctgccgctgggcgatcgcaccaacctggtcttctccggcactaccgtgagcgcgggcggtggcgtgggcgtggttattgccaccgggcaggagaccgagcttggccatatcaatcagatgatggcgggcattgaaaaacaccgcacgccgctgctggtgcagatggacaagctgggtaaggcgatcttcgccattattctggcgatgatggccgcgctgtttgtcttcagcctggcattccgcgagatcccaatgggcgagctgctgctctccctcatcagcctggcggtcgcctccgtaccggaaggtctgcctgcaattatctccattatcctctccctgggcgtgcaggcgatggcgcgcaagcgggcgatcatccgcaagctgccgacggttgaaaccctgggtgcgatgaccgtggtctgctcggataaaaccggcaccctgaccatgaacgagatgacggtcaaagccatcatcaccgccgacacctgctaccgcgtggacggcaacagctatgagccggtgggcaacatttatctggaaggcagcgatgagccagtgcagatccagccgggcaccgtgctggagcagtacctgcgcactattgacctctgtaacgacagccagctgattcaggacgagcgcggcctgtggggcatcaccggggggggccaaccgagggcgcgctga

SEQ ID NO: 124907 - DNA, 3135 bp, Enterobacter cloacae
atgctgacgtttttcatcaaacgcccgcgctttgcgatggtgatagcgctggtcattaccctgctgggggccattgcgctgaagattatcccggtggagcagtatccgcagatcacgccgccggtggtgaatgtctctgccagctggccgggggccagttcggctgacgtggcggaggccatcgccacgccgctggagacgcagcttaacggcgtggatcacatgctgtacatggagtccacgagttcggatgaaggcacctacagccttaacatcacctttgccgcggggaccgatccggatttagccgccatcgacgtgcaaaaccgcgtggcgcaggccgtggcgcaactgccagcggaggcgcagcaaaacggcgtgcaggtgcgcaaacgcgccaccaatctgatgatgggggtaagtctttactcacctgacaatacccacacgccgctgttcgtcagtaactacgccagcacccaggtgcgtgaggcgctgtcgcgcctgccgggcgtcggtcaggtgcagatgtttggcgcgcgcgactacagcatgcgcatctggctgcgtccggaccgcatgaacgccctgaacgttaccacggacgacgtggcgcaggcgctgcgcgagcagaacgtgcagggagcggcgggccaggtcggcacgccgccggtgtttaacggccagcagcagaccctgaccatcaacgggttggggcgcctgaaccaggctgatgattttgctgacatcattatccgcgccggcgagatgggccagctggtgcgcctgaaggacgtcgccaccatcgagcttggctcgcgtagctacagctccggcgcgcagctgaacggacacgactccgcctacctcggcatctacccgacaccgtccgccaacgccctgcgcgtggccgacgcggtgcgcgccgagctggagcgcctcgcgtcgcgcttcccggacgacctggtctacgaggtgaaattcgataccaccaccttcgttgcggccaccatcaaggagatcggcgtctcgctggcgctgacgatgctggcggtcgttgttgttgtatccctgttcctgcaaagctggcgcgcgacgctgattgttgcgctcgccattccggtgtcgctggtgggcacgtttgcggtgctgtacacgctgggctactccgccaacacgctcagcctgttcgccatcattctggcgctgacgatggtggtggatgatgccatcgtggtggtggagagcgtcgaaacgctgatggccgaagggcagagccgcacggcggcgaccacgctggcgctgcgccagattgccgggccggtgatagccacgacgctggtgctgctggcggtatttgtgccggtggcgctgctgccggggattgtcggtgagctttaccgccagttcgcggtcacgctttccacggcggtcacgctctcaagcctggtggcgctgaccctgacgcccgcgctctgtgcaatgctgctgcgcccgcgtccggcacagcccgctgcgatttttcgcggattcaaccgcgggctggatgccacgcgcaatcgctatacccggatcgtaagcgtattcaccctgcgcccgtggctggcgctgctggccaccgcaggcgcggcggccgtggtggcgttcagctttacgtcgatgccaaaaggcttcctgccacaggaggaccagggctacttctttgccagcgttcaactgccggaagccgcctcgctggagcgcaccgaagcggtaatgaccaccgcacgcgaattaatcgctaaaaatccggcggtggaagacgtgattcaggtctccggctttaacattcttaacggcaccagcgcttccaacggcgggtttatctccatcatgctcaaagactggagcgagcgcccgccgctggacgaggtgatggctaccctgcagcgtcagctgctggccctgccggaagcgaccatcatgaccttcgcgccgccgaccctgccggggctgggcaacgcctccggcttcgatctgcgcatacaggcgcaggcggggcaaagcccggcggagctggagcgcgtgacgcgcggggtgctgatgaaagccaatcagcacccgcagctaagccgtgtgttcaccacctggagcagcaacgtcccgcagctgacgctgaccgtcgatcgcgagcgtgcggcccgtctcgacgtgccggtatcgcgcatcttcagtagcctgcaaaccgcctttggcggcacgcgcgccggggatttcagcatcaacaaccgcgtctaccacgttgtcatgcagaacgaaatgcagtggcgcgagcgcgctgagcaaatcagcgagctgtttgtgcgcagcaacagcggcgagcgggtgcgcctgagcaacctcgtcaccatcacgccgggcgttggcgcgccgttcctgcagcagtacaaccagtttccgtccgtgtcggtgagcggctcggcggcggaaggggtgagcagcagcaccgcgatggcggtgatgagcgaaattctggcagagagcctgcctgccggatacgactacgcctggagcggcatgtcgtatcaggagcagcagaccggcaatcaggcgatatggattgtgctggcagcagtggtgatggcgtggctgtttctcgtcgcccagtatgagagctggacgctcccggcgagcgtgatgctctcggtgctcttcgccctcggcggggcgctggtctggctgtggatggcgggctacgccaacgatgtctacgtgcaaattggtctggtattgctgatcgcgctggcggccaaaaacgcgattcttatcgtggagttcgcccgcgcccggcgtatggacggaatgacgattgtcgatgcggcgagggaaggggcatcgcgccgcttccgcgcggtgatgatgaccgccgtgtcgtttattatcggcgtcatgccaatgatgctggcgaccggggcgggtgcccagagccgtcgcatcattggcaccacggtgttcagcggtatgctggtggcgaccgtcgtggggatcgtgttcatccccgcgctgttcgtactgttccagcgtctgcgtgagtggggccacggccttacggactcgtcgcccacagctcgcagtgcttctgaaccagagaaataa

SEQ ID NO: 124908 - DNA, 1983 bp, Enterobacter cloacae
atgaataaaatcttctctcatcacgtgcgtctccccgccacattgcgaaacgatgcgggcgcgctgatctactccgcgaagagttttgccgcggcgatgctggcttactacctcgcgctgtcgataggtctcgaacgtccttcatgggccattattacggtttacatcgtatcgcagacgtcggtcggggcgtcgctgagcagaagcctctaccggctggccgggaccgtggcgggggcctgcgcgaccgttctgatcgtgcccatcttcgcgaatatgccgatcctgtgcagcgtggtgctgacgggctggatcacgttctgcctgtggctctccctgctggaacgcacgccccgggcctatgccttcgtgctggccggttacaccgcgagcctgattggttttcccgcggtatccgatccgggtggcatttttaacgttgccctcgtccgcgtgcaggagatcgcgattgggattttctgtgcggggctgattcaccgctacgtgctgcccgcacgcgtatcagggctattcaacgcgaaattatcccagacgctacaggccgcgcgcggtcgggtggcggacaccctggcgggtaaacccggcgcggcttccggccccctgcatctggccctggcgctgcagttcctgcaggggataagccaccatgttccgtatgattttggcctgtccgctccggtgcggcaggccagaaaagcgattcacgatcggctggcacggctcgcgatcgtcaactgtgaactacacgatcgcttgctgacgcccggaattctgcccgccgacatgcaggcattgcgggaggatgttcaggcctggcttgccgctgaagacgcgggtgccagcagcgcggctgaggcgttgcggctccgctgtacgcttcttatcgatcggtatgccgcgcatgcgctgacgattgacgacgcgctgcaggtcagttttattcgctacctctcagaggctatcgcgcttctggagcagtgcgagcgtctttccggggctatccaccacgcaaaacctgcgtttggggagatgcaaacccacgcggcaaaaggctacgttttccaccgcgatccgcttaccgccgcccgcacggcgctgggggctttcgtcatcattctgagcggttgtctggtctggattttctctgcgtggccggatggcggtacggcggtctctatccttggcgtctgctgcacgctgtttggcagtttcgacacgccggcgccccacatcgtgaaatacatcattggctcgttctggggcgtggtgattagcctgctctacagctttgcgctgctgccgcaggtaagcgatttcccggtgctggtggcggtgcttgctccggcgtatctgctggccgggtcgcttcaggcgcgcccgccaaccacgtttatggcgatgggcatcaccctgacgctgcccattctgtgcgagctgggcgcgcactacagcggcgacttcgccgtcgcggctaacaccgccattgcgctctttgcagcgaccggctttgccgtcatcagcatgagcctgatgcaaaccgtgcaggcggacgccgccatcacgcgtctgctgaacctctgccagcgcgacattcgccgcagcgtgaaaggcacgctgcgggtcgacgaaacgcactggatcaacctgatgatggaccgaaccgccctgttgctgccgcgtttgcagcgcagcgagcgtgcgccagagcaggcgcttgaaaggcttttgcacgcgctgcgcctggggctttcagtcatgcatatacgccgcagtgacacaccgcccggcagggaggttgacgcgctatttcatcggataaacgccgcggaccgccacgccttaggcgaacgcattaccgccatcatcgagcaaaacctgcctgccgcagatgaacctacgcgccagtttgtcttcaggctggtggatcttcactgtgcattacgggggccagaccatggttaa

SEQ ID NO: 124909 - DNA, 216 bp, Enterobacter cloacae
atggttaacgatattaatatcggcggcgtttttattccggggctgctgatggccgccctcgcgacgctggtctgcacgctgagcctcgtcgcgcttttctctctcagcagggtctaccggcgcttgccgtttcgcccgctgatggatgtttcaatctggattgtcatcttttacctgctgatgcagggcctgatcgcgttggggttattgtcatga

SEQ ID NO: 124910 - DNA, 438 bp, Enterobacter cloacae
atgtcagaaccaacttcgcagtgccttttcagtgaaggtctgatcgattttcctgaaggttatcaggatcgtaccgtcaacgtcttcgcgccgcccgcagcggacgcgccagcgttcaacctctcccgtgatgccctcaacgctggcgaagcgcttgccgcgtacatcgatcgccagctcgccctgatggaaaaacacatcaagggatggaagcagggggagcgtagcgccgctacgctgggtgacggcctttcacagggtgaaaccgtccatgccagctacctgcgcgacggcaaacgcatctggcagcagcaggccgtgtttaacgtcgacggcaataaaattctggtcttcaccatgacctgcacccgcgcgccgggcgatgctgatcgcgcgctgtttggcgatcttctcaggagctttcgcttccaccattaa

SEQ ID NO: 124911 - DNA, 558 bp, Enterobacter cloacae
atgtatgaactacgaattgcttctgattaccccaatagttattggtttgaataccagcaccctgacatatctggaagtgctttctcgcaatgtaaatcaattgaaattaacgaggggtatttttttaaattaaaatctaaggtgagtgagaaggcactgcttgcatatgatttttattatagtgatgggcctatattcatatcacccagactagcatcactaatttcttgccacgatgtttttcggactgatgttcaacttattgacgcaactgtatctataaatgaaacccaatatcaagggtataaaataattaatatactaagagaggtttcatgcattgatatggaagcttcagaaagtcaacctatattaagttatttacctcatggtccaaggaagtttagtaaaatagtcttcaaagaaaatgttattgaagattttagtatggcaagatgtagtgaatataaatcttgcataattatttcaaatgaatttaaagagttcctttctaagagtaatgtgaaaggaatagattttgcagaccctatttattaa

SEQ ID NO: 124912 - DNA, 567 bp, Enterobacter cloacae
atggtggatgagattgaaaaagcatttaaacaacttattgtcatttgcaataaatactcgctgtcagggagtttcagaaccgtcaatgatctggacaatgccttcccgtccaacttacctcgttcgacagaggtggaatttttatatgaaaattataatcctgaaaaattaaagattgaaacaggcttcgcgccaattaagcttcactcagtcagtgagctcttaaaggctcaaaatggttatgagtacttactaaaaaattaccttgttattggtgatgatttaggtggaggtaaacctataattgcggttgtcgatgaagggaatacccctatttatgcaagttatgatgtaattgaaccatttaaaatagcttgtagtctctctggatttatattttcattggctgagcttattgatttggtatatggtcaatatgatatctttgatatagcagatgataatgacgaagtaaaagatgattttattgatgagttgcggaaaagaattgtgcctcttatcggtaatgaaagttttaatgcgttttataattatttttatgggtaa

SEQ ID NO: 124913 - DNA, 387 bp, Enterobacter cloacae
atgcagactacgcgagtaatgggagaaggatatgaaccttacgttgagcaattaggcgacaaactgatttattcattacctgttgaatctggatttgtcagcttttattttgagtttgatattcgtcagaccgatcttgacgtcctgctgtccgatcattaccggcgggccgtcatggaagtgaccgcacacactctgcttcagcactcgacgttgaagggacacaaacgatttactcagaacgattttgataaccttattgccactacccttcatgcatcgcaagagcatcttagcgcattcatttctcagattaatcgggagcacaatatttcgattgaacattatgtgaatgacatagtgaatagacgcataactaaaggatga

SEQ ID NO: 124914 - DNA, 387 bp, Enterobacter cloacae
atgtatcttactgattcagaaaataaactgactgtagacgaaataaacgcgttcaatgcgtactttgatcaccatcttcccgcatcatttcttgatttttatcttaaaaataatggtgggtatcctcatgataatgaagagggtaatccttttatgcttggcggttttaaccctataaaatatggtgacctgccaattgagcaactctatcatgatcttatcgagtcgtttggcgagttaaagaatatggttccttttgcttatgatgacggtgggaacacttttctattatctctcaaatctgatgattcattagggaaggtgtttatttttctgatggatgataaagaggttgagttggtcgctgattcgttctcggaattttag

SEQ ID NO: 124915 - DNA, 474 bp, Enterobacter cloacae
atggattttagatttagattaattacagcagaagatcgcccttttatggtgcagatgctttatgaggcaacgatagcctctgaacaaacatttgatatagataatattgaaaattttccccattcatatgcatatatagaaaatttccctgaagcgggcgaggtgggtattattgcggaatccacagatggaactccagcaggggctgcctggctcaggaatttccccgaaggggagaaacctgggatttcgggtcctgagttaacgattgctattgctccgtcatatcggcgacaacacctggctaaacgtataatggcgcaactttatcaggcagccaatgcgttaaatattaaaacgctgaagctgggtgtttatcaaaaaaatgtgcctgcccttgcgttttataaaaacgatggctgggagccagatgttatctttggcgattacgtgatgatgaagcgcgctatttaa

SEQ ID NO: 124916 - DNA, 591 bp, Enterobacter cloacae
atgctgaacccaggattcgttacccgcaaagcgcttgctaactggcaggatgttcccgcttttctcccccagttccagtttcatgaaaaacaccaaacggtcatccacacttcccaccctgaaaatattctgccgttgattgcaaactttgacatccgtcaggatgccgtgattcggcggttaatgtctttgcggcaaataccgaaaaaattattacggaataaacaggccgggtcgatgagcaactttgggttgcacagttttacccttttgacccaatcagcgtcagagatctgttacgggttaagaggacaattctggcgtacagatttcaaccttgaaaacatgccagatgccagcgcttttcagacgccagtcgctgcgggtaaagcaaagctgctgctgcgctatcaggtaacggaacgcgcaccaggccaacatgagctctccacggaaacctttgtttattgttccgacagaagcactcagctaaaaatgacagcttactggctggtcattcgggcaggcagcggctggatccgtaaaagaacgctgaaggcagttaagtcgaatattgaagggctggagtga

SEQ ID NO: 124917 - DNA, 822 bp, Enterobacter cloacae
atgcgtaacaatcagatcttcttgaatattttttttagtttgtgtttagtacccacatgtcctgtgctagctgatgggtttgatgcattcaatgcgcaactaaaaagcgtcacttttaatgatgttatcaatgcaaaaaaatataaagagccagaggcaggtagaatatttaaggtcgagacaatgggtaaactgtctggcccaagatctgacttgaaaatatcaaatgaagctaaaaaacttattatttatttcgaggtcactgggaagaataattatgataaaaaacttcaaaacccaacttggccgggtggggcgtcaggtgcgaccgtaggcttcgggtatgacataggatatagtagcgaaaaatctatacatgacgcatggattaattacattccagagggaacaataagaggactaatgacatgtgcaggaaaaaaaggagaggatggaagactatgcactaataaaataaaaaaattaactattgattgggattcagctagtaaacaatttgaatactacctcccttttttaatagcccaaacaaaatcagcatttaaaaatttcgagttactgccaccatcagctcgtggggcgttagcatcgcttgtatataacagaggcgcggatactagcaacacgcagagacgcaaagagatgtataacatagccaaattaatgaaccaaaaagaatactcgaaaataccagaacaaatagaattaatgaaaaaattatggcccaacaccaaagggcttttaataaggagagatctcgaggctgagttatttagaatcggaataaaaaacaatgaatag

SEQ ID NO: 124918 - DNA, 1419 bp, Enterobacter cloacae
atgaataggttatttattggaacatttattttggcctcatcatttaatctttttcaaatatcagcatctttcgccacaccaggcaatgcatttataatgaatgaaggctttagggctgaaaaatttaaagatattggaatgaataatgattttataaaaaagactcctgaagaattttttgactcatctaggcttaacagtccttctgggaaatggggagtgggctgtgtaaattgcattccttcaaacccagagaaagcattaaataccatgttcgataaaatagaaccgaaaaatatcccagtatgcactgcttatctcagggccttaatgagtagcaactccatgataaaaataggcaaagaatgtgaacctatattgaaagtaaccttaaatggtaaaggtacattagattctccattaaaaaacaaaactcacttatgtagtgttgctgttaacgcattgagaatcccgagaaaggctataggtgatacttattcattcgggaattttctgaattcatttcaaaatctatgcatatcaaactcccaacaagatgataaatccatggcggcaacatgtggagaaacatataatgactatgtaagtaactgcttatcagcatcaaataaagtattcgaccatcgaatactggatagaataggtctatttatattttctagtggtgatgccagaagcactccagcatgcacggggacagtaatagataaaaacttagtaatcacagccagacattgctttatgaccaataattacaatgaggatagcaattcgcaatcaggaaacaaatatcttaaatttattccaaacattcatttactatcaggagaaaatgctggaaattacgatggggaacttttaggggaactaacccttgacggcataaagaacatagaaataatacatgaacaaccctcgttagaagatgatgtcatagtcgttgtgttgaaaaaaccagtaatcctagagaacccggaattgaaagtaaaaattgctgagcaagttatcgctccgacatatcttacgataattggataccaggatttagcaacaagaaacgacgtactacatggaataattaacaaagaggaaaatccatattattattttaaaaacataatgatggacaattcactcttatgtttcaaaggcgcagatgaagttggaggatttcaacattactgtcaaacaatgtcagggatgagtggagctccattgttcataggaaatttagaagatacgtcttcaatgggatttataactattgctggggttttatctgggggtaatgacacttcagatgttgatgtagaagaacaaggcgcacctaataaagcagcaatggttaatgaacaattgctagatgcactacatatgaatcctagagtaataccttag

SEQ ID NO: 124919 - DNA, 135 bp, Enterobacter cloacae
atgaagggccgggttctgcttgatgaaaaacaggatgtcgtccttacgcaaaatgcaattttgtttgttgaatgtctgataagagcgaagagcggacattgcatgaagtccgggaattcgcagaacggtggctga

SEQ ID NO: 124920 - DNA, 885 bp, Enterobacter cloacae
atgatgaatcttttacactggcgcttactggttgccgtggccgatgccagtaatatttcgcgtgccgctgaagaggtcggcatgacgcaatcgggtgccagccaggcgatcgctcagttagaggcttcattaggatttgcggtattcacgcgtgagcgacgccacgtcggcgtgactgcccagggtgaacgggtggtcaaagaagcaaggagcatgctggcgcggctggacgccatccgcgtactcgcggataagagccgggggctgagtggcgggcgcattcgtcttgccagttttccctcggtgacagccacatttttgccaggactgctgcgcgactttaagcgcctgcatcctgaaattgaggtggtcgtactcgaaggaacggaccaggaggtcgaagagtggctggcggcagatacggttgatgtgggtgtggtcatgaaccctgttcccggacgtgctgaagcgatcttaggacaagatgcatgggtcgcggtgttgtcggccagtcaccgtcaggctcgctatgtacgttcgcgcggcatcacgcttgaggaactggcggaccagcccttcgtgctcgccacgggcggttgtgccgtcaacggagaaagcctgatggaacaggctggtttgcagctgtctgatgtacgtgtgaccgtccgcgactggatcagcgcctgcttgctggtacgcgaaggcatgggcgtcacgctgataccagaatccgccctgcctggtgaattacgcgggttgtgcgtcgtgcccgtgacgccttcactctgccgggaatttgggctggtttgttcggcggcgggaaaatcttcccaggcaacgcaggcgttattagaagggttgctcaaaatgaaaagatctgcgtga

SEQ ID NO: 124921 - DNA, 606 bp, Enterobacter cloacae
atgaaactctattacgccccggacacctgttcactttcaccccatattgtgcttcgcgaactggcgattgagttcgaactggttaaagtagataacagaagcaagcttaccgctgacgggcgcgacttcctgaccatcaaccccaaaggttatgtcgccgcgcttgaactggatgacgggaaaatcctgaccgaggggccagccattttgcagtatcttgcagacctcaagccagaaagcgggctggcaccgcgagcagacagctgggagcgagtgcggcttcaggaatggcttaactttatcaccagcgaaatacacgcgggatcggcacctctttttaaccgccaactgcccgaagaggtcaaatccatttttcgtgagaagctgttcaggcggttctgttttcttcaggagacgctttccgcaaacgcttatctgacaggctcgtcgttcagcgtggcggatgcctatcttttcaccgtgctgggatggtgcacgttcttctcaattgaactgaacgactggccagcactactggcattcagagaaaaaatcagtacccgccccgcagtgcaggccgcaatgcgtgcggaggcgaaagtctag

SEQ ID NO: 124922 - DNA, 819 bp, Enterobacter cloacae
atgtcgaatgcaaaagccaacaaagactgggtcagactggcgcaacaacccggaaaaatagagcgcatagaggcgtatttcagcggacatggctatgagccgcatcgtcatgacacttacgccataggacggaccttatccggggtgcagagttttcactatcgggggagtaaacaacatagcttgccgggcgggacaatggtcctgcaccctgacgaaatacatgacggagaggcgggaacgaacgacggattccagtatcggatgctgtatatcgatccggcgttaattcaaaaaatcctgggcggaaagcctttgccgtttattcccggcggcatttcatccgatccccggctttttgcagcgaccgaaccgctgttaaaagcgccagaagaatctttcgatacgctggaagaagacgatgcgctctacgatctcgcccacacgctggccgttgtgggagggcaacgttttcgccggaattgcgtggattatcactccgcagaacgcgcgcgcgaatatatacacactgaattcattcagaacattacgctggataccttatccgccgtaagtggcagaggtcgctggagcctgagtcgggacttccgtgcgctttatggaacgagtccttatcgctatgtgaccatgcgtcgtcttgagtactgtcggcgcctgattcaggcgggcctgtcgcttgctgaggctgccgttgcttcgggattttcagatcaaagccacatgactcgtcagttcatcaaaacgttgggtatgtcaccggggcgttggcaaaaattcatcaaaggtaaccctgcctga

SEQ ID NO: 124923 - DNA, 363 bp, Enterobacter cloacae
atgtatcaacctgttaatctggaaaataagttttctctcttcgacgcacactggcagccgaaagtcatcgcccagatgaacgactatcagtttaaaatcgtcaaaatatcgggtgattttatatggcacgcgcacccggaaaccgatgaagcattcatcgtagttgagggtgtgttacgtattgattttcgtgacggacatgtgctcgtcaatccaggggaaatgtacgttgtgccaaaaggcgttgaacataaaacgtctgctgaaacaacggtaaaaatgatgatgatagaaccttgtggggtcctgaataccggacacgaaggcggggatcgcaccgcagaaaacgacgtctggatttaa

SEQ ID NO: 124924 - DNA, 1569 bp, Enterobacter cloacae
atgacaaaaaaactgttgccgttactggtgctggccgcgctctcaaacgcagtccacgccgctactccgccgaatacgctggtggttgcccaggggcttgatgacatcgtaagcctagacccggccgaagccaacgagctctccagcatccagaccgtaccgagcctgtatcagcgtctggtgcaaccggaccgcgataacccggaaaaaatcacgccgattctggcggaaagctgggaagccgacgcggcagcaaaaaccttgaccatcaagcttaagcccgatgcgaaattcgcttccggaaacccactgcgcccggaagacgtgatcttctcgtatacccgcgccgtgacgctgaacaaatccccggcgtttatcctcaacgtgctgggctgggacgcgagcaacatcgccagccagctgaaaaaagtggatgaccataccctccagcttcactggacggcggacgttagcccgtcggtggcgctgaatattctctccacgccgattgcctccatcgtcgatgaaaagcaggtggtggcgaacgtgaaggacaacgacttcggcaacgcctggctgaaaatgcactcggcaggcagcggcgcgttcaaaatgcgcgtttatcagccgcatcaggctatcgtgctggaagccaatgaatcggctcccggcggcgcgccgaagcttaaaagcatcatcattaaaaacgttcccgatccggcttcccgtcgcctgctgatccagcagggtgatgccgacgtggcgcgcgatctgggtgcagaccagattagcgccctggagggcaagccgggcgtgaaggtgctgagcattccgtccgccgagcaaaattatctggtgtttaacaccggcaacagcgctaacccgctgctcaacaacccggcgttctgggaggcttcacgctggctggttgattatgaaggcattaccaaaaacctgctgaaaggccagtattttgtgcatcagagcttcctgccggtcggtctgccgggcgcgctggaagcgaatccattcacgtttgacccggctaaggcgaaagaaattctcgccaaagcgggcattaaagacgcgcacttcacgctggacgtggagaacaagccgccgtttatcaccatcgcccagtccatgcaggcgagctttgctcaggggggcgtgaaggtcgatctgctgcccgctgccgggagccaggtctatgcccgcgtgcgcgcaaagcagcatcaggcggcgattcgtctgtggatcccggactactttgatgcgcactctaacgccagcgcctttgcgtggaacgatggcaaatccagtaccgtagccggtctgaacagctggaaaattcccgagcttaacaaagccacgctggcggcggttgccgagccggatccggcgaaacgtctggatctgtacaagaaaatgcaggaacagctgcaacatagctcgccgtatgtgttcgtcgatcagggcaaaacccagatcgtggtgcgcgataacgtgaagggatatcagcagggcttgaacgcggacatggtctggtacgatcgcgtcacgaagtag

SEQ ID NO: 124925 - DNA, 1695 bp, Enterobacter cloacae
atgattaaatcattaacgtccttatcagatctcaatatgcgaacgggcgccgatattctccttgaagtgctggagagtgaaggcgtggaatatatttttggcaaccccggcacaaccgaactgccgctcattgatgccctgcttcgccatgaaaatattcactatattctggcacttcaggagagcagcgtggtcgccattgccgacggctatgcgaaagcttccggtaaaacggggtttatcaacctgcacaccgccagcggcctggggcacggcatggggaatctcattaactcgcggatcatgaaaaccccgctggtggtaaccgtcgggcagcaggatacgcggcactacgttcgcgacccgcttctgtacgatgacattgtctccattggttccccggtaatgaaatgggcgcaggaggtcaccagcgccgaccagctccctgtgctggtgcgccgcgcgtttcacgctgccagctatcctccggccggcccggttctgctttctcttccaatgaacgtcatggaggaactgagcgacgccggaatacagacggcgtccagagtgaactaccacaccgtcgcgggctcgctggacgaactggctgaggcgcttagcgagatcgcgccaggcaggatcatgattgtggcgggagatgaagtccactccagcggctcgacgcaggagattgtccagctggcggaagcgctcagcgcccacgtctacggctcctcctggccgctgaatttacccttccccacccagcacgcactctggcggggcaatatgcccaccaccgcaagcgaaattgccagcatcattaatgcctacgatgccgtgtttatcatcggcggcagaagcctgatcaccattttatacagcgaaggcgaggccattccggcgacctgcgcggtgtatcagctctcggcagatatgcacgagcttggccgcacgtatgccactcggctttcagtgatgggggatatcaaactgtccctgcacgaactgttgcccaagcttgagcagcgcctgatcgccagcagtctgtcccaccagcggctgctggttgcggcccgcgacgagcgcgagaaggagtggcagcagcaggaagaacgtctggccgccgagcggctacgcccgaccctttcgccgatggtagcggcctgggaagttatccgttccattcccgcgggaactaccatcgttgatgaggcgatagcgaccgccagacacgtccgccggttcatctctgaccagcagcatcagcgctactactttatgcgcggcggcggactgggctgggggatgcccgcctcagtggggcactcgctggggcgcggacgggagccggtggtatgcctgataggtgacggcgcctcgctgtactcgccccaggcgctctggacggcggcacacgagaacctgccggtcacctttatcgtcatgaataacagggagtacaacatcctgaaaaactttatgaagagccaggctgactacagttcaacgcggctggggcgttttatcgggatggacctggtgaacccgcatatcgattttcagtctcttgccaccgccatgggcgtcccctcctgccgggtgaccgaggcggcagatatcgccgaagcggtaacgcgcgggctgcagtcaggaaaaaccaatttgattgaaattgcaatttccgcggattag

SEQ ID NO: 124926 - DNA, 741 bp, Enterobacter cloacae
atgaataatagtcgaaacaacgttattgtcatcaccggtgccagcagcggtattggccaggccattgccctccatttagcgaataacgcattttcgctggtgctggtggcgcgccgtctcgacagaattaatgccctggtggatcaaataattcagcaagggggaaaggccattgccgtgaaggcggatgtgacccgtcaggaagaggttcggcgcgccattgatgccgccgttgccgcctaccagcgtgtggatgtgctgatcaacaacgcgggctttatggctatcgccccccttagcgagctgaaaaccgacgaatgggacaagatgattgataccaatctgaaaggcgtgctgtacggcatcgcggcggcattaccggtgtttcagcgtcagggcagcgggcattttattaacgtggcctccgttgcgggcatcaaggtactggcccctggcggcgtggtgtatagcgccacaaaattcgccgttcgcgcgctgagcgaaggcctgcgtcaggaggcgggaaaaaccatccgcacgacgcttatttcgccaggtgccgtcgaaagcgaacttcaattcggcagctctgacgtagagagtaaaaaatttctccatgaattttataagcaggctattccggctgatgcgattgcccgcgcggttttatttgccattgaacagcctggcgacgttgatattaatgaaattgttgttcgtccgacgcaggaagaattttag

SEQ ID NO: 124927 - DNA, 648 bp, Enterobacter cloacae
atgaataacgcagaaaaacgcgacgacatgctggcagcagaatatgccctcggcaccctgcggggaggcgcgcggcttcagttccagaaaaggcttgccaatgagcccgctctggccgcccgcgtagcgtactggcaggaaatgctcagcacgctcgatagccatcttgtccccattcctccccctgagtcggtgtggaaaaaaattgccctcgaactgccgcccaaccggccggtgcgcaactggcgaccttacctcggctggatggtggccgccggccttgccgcctttagcgtcgtgacgtggtactccacccgcacgccagcgctcgcaccgctgatggtgctcaacgatgcccaacagcgcgggcagtgggtagtgagtgcggacagccgccgtcagcagctgagtattgcacctctcggccccgccgccgtcccggcgcagcacagcctgcagctttggctgatcccgaccggacaggcccctgtctcgctggggctgctgcatagcgatatcccaacgacggtggccctcaggaacacaacgcttcctcctgacgccacgatagcgataagccttgaaccggagggcggatcgcccactggcctgccaacaggcccggtgctttacagtggaaaaatataa

SEQ ID NO: 124928 - DNA, 555 bp, Enterobacter cloacae
atggataacgcgctggctgaacagcagcagaaattaatgcaggcggtcgcgaaaggcgatcgccgtgcatttgaacaactctaccgactcacctcgccgcatctgtttgccgtcgcgctgcgcatgttgcgtgaccgggcatgggcagaagagatccttcacgactgttttctcacggtctggagtaaagccgaaacctataacgccgccctcagttccccgatgacctggcttacgcatattgttcgcaaccgctgtattgactggctgcgttgcgggcaaacccgggcagccgaccgcgagacgccgtataccgacgcgcttctgccgagcgagaatgacgagcagaacaactggcacgacgatgtgcaggcagaacggctcaggcattgtctcgaacatttgagtagcgagcagcgccagagcattacgctcgcctactatcaggggatgtctcacagcgatattgccgactggctccagcagcctgtaggctcagtgaaaagctggatacgtcgcgcaatggatcatctccgggagtgtgtggggctatga

SEQ ID NO: 124929 - DNA, 564 bp, Enterobacter cloacae
atgaaaaagctaacccgtgttgcattcgtaaccagcgctttactcttctgtgcaggcgcatcagcagccatgacgtctgacaccgtgatggtgggcggagcggcaatgttcccgagcaaaaatattgttgaaaacgccgtgaactcgaaagatcacacgactctggtggccgctgtcaaagctgccggactggtggatacgctacagggcaaaggaccgttcaccgtgtttgcgccgaccaatgcggcgtttgcgaaattacccgccggtacggtcgataacctggtcaaacccgaaaacaaagcactgctaaccagcatcctgacctatcacgtggttgccggtaattacgatatgaaagcgctggagcagaaaattaaacagggtggtggtcgcgcggagctgaagaccgttaacggtcagccgctttggatcatgagcaacggcctgcacaatattcagcttaaggatggtcagggcaatgtggcaaacatcagcacctacgacgttcatcaaaaaaatggcgtaatcgatgtcattgataccgttctgatgcctaagtag

SEQ ID NO: 124930 - DNA, 675 bp, Enterobacter cloacae
atgcacgcaacccacagcacgttcattctcgccgaccgcaccgttcaccgcgtcaccttcgaccccaccacttttaccgacgccgatctcctctggcttccccatcacgcagagctttcaaacgccggacgcaaacgcaaagccgaacatcttgccgggcgcatcgccgccgcgcacgccttaccgggaaacaccgtacccggcatcggccccagcggggaaccgcgctggccacaggggttttccggcagcatcacccacagcggcacgcaggcgatggctgtcgttacgcacgaccaccctgcgcttatcggcattgattgcgaaacgatcctccccgaaaacgaagcccgggaaatcaaagacggcattattgatgcgcaggaagagagcgtcctttcccgctcgggttacccgttcgccctcgccctgacgctggtgtttagcgccaaagagagcctgttcaaagccctctttccgcaggtgcaggcctggatgggatttgacagcgcccgcgtcacgcagctcgtcgataagacgcttacgctggcattgacctgccagcgcgcgggctatcccgaaggcaccgcctttaccgttcactggcaacagcacggcgaacaggcgatcaccctgctgtcacactctcctgtcgacgggccttcacgctggtga

SEQ ID NO: 124931 - DNA, 1197 bp, Enterobacter cloacae
gtgacggcgttaacaacgggcagtgaagcgtggtggcagtcgaaaagcgggcctgacttgaaacctgaaaaaggtaaatttcgcgtcacgttctggtggcgcgatccgaacggaacgcagacgtcgtcaccgattaaacacgtctggctcaatatcaccggcgtgaccgatcaccatcaaaatgcccgcccgcagtccctcaaacgcatcccggataccgacgtctggcagtgggagggagagttcagtcccgcgtggcgggggagctactgttttatcccttccgtgaatgaaaacgattttgccgacgcggtgtttgaaggcgagagtccggaccgtatggcgctgcgcgaaggctggggtaaactgctgccgcacgcggtttccgacccgcttaacccgcagagctggcgcggtggccgcggtcatgccgtttcggcgctggaaatgccgggcgcacccgttcagccaggctgggatcgtcctgatacgccccaccacgcgccggtctgcattgattgggaaagcgcacgcctgaaaaaccgccgccgagtctggatttttaccaccggggaggaaaaccccgagcgcccgctggcggtgctgcttgatggccagttctgggccgaaagcatgcccgtctggcccgcgctggccgcgcttacccgtgaaggcaaactgcccccggcggtctatgtcttaattgatgtgattgataccgcacaccgcagccgcgagctgccctgcaaccccaatttctggctggcggtgcaggaagaacttctcccacagatacaacgcattgcccccttcagcgaccgcgccgaccgtaccgtggcggcgggtcagagcttcggcgggctttcctccctttatgcaggcctcaactggccgcagcgctttggctgcgtgctcagtcagtccggttcctactggtggccgcaccgcggcgcacagcaggaggggctactcatcgggcagcttaaagcgggtgaaaaaaccgcacgcggactgcgcatcgtccttgaggccgggcgcaacgaaccgcttatcttccgcgtgaatcaggcgatttacgccgaattgcacgcgcagcaggtttactggcgtcaggttgacggcggacacgacgcgctttgctggcgcggtgggctgacgcaggggctgatgaccctctggcagccgcttattcaataa

SEQ ID NO: 124932 - DNA, 669 bp, Enterobacter cloacae
atgaaaaaagttgttttgtctgcaaatactagttggtatttgtataatttccgaaaaaatacgattaaccaaattatagacgctgggcacaaagtatatattgtggctccgtatgatgattataccgtaaaactgcaagagttagggtgtctttgtattaacctcaaaatatcaggtagaggtatgaaccccataaaggaggctaagacattattgtcatttgcttttatatacttcaagctaagacctgatctgatctttaattttacccctaaaaataacatctacagtgctatggctgcttattttttgtcctcgaaagtggtgaataatatagctggccttggcacagcttttataggaaactccctttctgaaaagtttttaagttttctttataaaatttcgcagaggcgtgctaacataatatttttccaaaataaagaagacaggaaaattttcattgataaaaaaatagcatgtaatgaaaaatgcaaaattattccaggctccggtgtggatttagaacgattccgttatgagtgtcgtaataatgatggagttttaaagtttattttgatcgcaaggcttataaaagagaaaggtatccctgagtatgctaaggctgctcagacattaaaagaaaaatacggggagagttcagtttag

SEQ ID NO: 124933 - DNA, 345 bp, Enterobacter cloacae
atggggctttacaggagttcatcacatgtatattggcgttgcaaataccacatagtctggacgccaaagtatcgattcaggatactgaaggataagctgggtaaggagctttacaggacaatctacattctctgtggaataaaaggttgtgaagttctggagttaaatgttcaaccagttcatgtacatctggtagttatcgtcccacctaaaatctcaatttcaacgctgatgggcatcttaaaggtcgcagtgccatcagactctacaatcgctttccacatatcaggaagaagctatggggaaaccatttttggtcacgcggctactttgtcaatacggtag

SEQ ID NO: 124934 - DNA, 990 bp, Enterobacter cloacae
atgacgcaaaacaacaataaccttgtcacgcgaagcaacgactcggagcaaattgatttacttgatcttgtccttcagttgtggcgtgggaagtgggtaattggaacatttatcgcggttttcattttcttggccggtgtctatatcatcgtagcgaaagagaaatggacttcgtcagccatcatctctcaaccagatgcggcgcaaattgcaacgtactcaaatgcgttaaacattctgtatggtggtggggcaccttcaatgcttgacattcaaaaccgtgtgatcgggcgtttcagctcatctttttctgccttatcacaggcgcttgaaaatcaagaaattccagaaaagctaacaattgaaccaactgtcaaaggccaatcactaccactaagtgtctcatataccggcgaatcaccggaggctgcgcaaaagcagttggcacagtatatccaacaagtagacgagcaaacggcgaaggaactggctcttgacttgaaagataacatcaaacagcagcttgcaacgttaaacgactctcttgaaaaccaggagaaggtcgcccaagagcaaaaagatgttcgtataaagcagctcactgaggctctaaagaattccgaagcagcaaaaatcgtatcgccgcagattcaacaaacacaagatgttacccaggagactatgttccttctgggaagtgaagcacttaaatctatgattgataatgaggcttctcgtccgttagtcttttcaagtctgtactaccagaccaagcaaaatattctggatattgccggtttaaaagttgatcctgcgactatacatgtctatcgctatgtgatgaaacccgatttacctgttcatattgatagtcctaagaaatctctcgctctgatcctggccgttttacttggtgggatgatcggcagttgtgttgtgctggtgcgtaatgctatgaataactaccgtttaagatctaataatgtatga

SEQ ID NO: 124935 - DNA, 1059 bp, Enterobacter cloacae
atgaagatagttcatgtgataacatctcttggcttagggggggcggaaaaaacagtttgcgacttagcagatcaacaagccctcaccgaaaaaaaagtatatttaatttctctcactggcaaagttattacaaaacctaaaaataatgctattgaagttatcaacttggagtgtgagaaatctattgtaggttatttgaaagctcttatattgctaagtaaaatgctaaaaacaatatcacctgatgttgtgcatggtcatatgtttcatgcggtaatggctatcagattaattccagttaaaaattctattaccattaatacattccataacctacgagaaacatctaaatctaggcgatttttgctaaaaattacaaattttttgaaagacatgattacttgtgtctgtgatgaagcctccgcaaattatggcggtatcacaatacccaatggaatacccataaaaaatttcacatttgaaaaattaggtagtgataaaataaaaagtgttcattcaatagagaaggatgaatttttattcggatatgttggtagacttcataaagataaaaatattgaatttttaattgatgccttttctaatgaaaaaaatgtaatgcctaactctaaattgctaattgtaggtgatggagaagatgcagagaaattgcgaaattatgttactaaattaaatttagataaccgtgtaatatttcatgggcgtagcaatgaaattaacggaatatactcggctattgatttgttagttataccatcattaaatgaagggttcgggcttgttgcagctgaatcaatattatgtggtaccccagttatttcaatgaacaatgctggagtgccttatgtacttgattctcctgagcttatttgcaattcattcaatgagctacaaaaaaaaatggttatgttttattctaaggagaaggttgtttctgttgataatatagcactatctattaaagaaagattttcgatggccagtattgagcgtaaatatcatgacatttatttaaaagcaaagtcttttgaccattaa

SEQ ID NO: 124936 - DNA, 909 bp, Enterobacter cloacae
atgtcggattttccacctatcgcaagtttgcgtagttttgaagctgtggctcgccttggcagcgtaacgcttgcggcgaaagagcttcacgttacccattccgccatcagccagcagattaaagtgctggaggaaatggtgggggtgaagctgtttatccgtcatgggcgaggggtgcagatcaacgaagaggggcgtctctacgcgttacaggtgcgcgaagcgctgaatcatatcgcagatgctacccggttagtgcaggtgaaaccgagaatactggaactgacgctggcgatggtgccgtcttttggttgtcactggttgttgccgcgtctggagcggtttcgggaaaaatatccacacatcacgctgcggatccaggccagtctgacgatcaccagcatgcagcaggaagggatagatgtggcgatacgcatggggaaaggtaactgggaaggaagcgactgccattatcttttttcagatgaactgattgtggttgcagcacccggttataacggcggcatcctcccggcaacgccagcagaggtggcaaagagtaaaatcatattctccatggagtcgtggaaaacctggtgtttcaatgcgggactggaaaaagatattgtgcccggcgggttatgcattaacgactcaaatttagtccttgaggctgtcagactcggtaaaggtatcgcgctggaacgtcgctctctggtacaggatgccatcacccggggcgaactggtccagcttacccctttcactgcaccttatccctggccttactggctggtgacatcgcagttaacggaagcgaaaccggaggtggctctctttagtgagtggctggatgaggaagtggcggcctggcgtcagttgacaggggcggtggaaagtaacggctaa

SEQ ID NO: 124937 - DNA, 1530 bp, Enterobacter cloacae
ttgaccgaactacgcctgattctgggcgatcagctcaatccacatcacagctggtttgatacctgcagcgcgaatgtcatttacgtgatgctggaactgcgggcagaaaccgcgtatgtccttcatcatgctcagaaaatcatcgctatcttcgcagccatgcgcgcgtttgccgctgagttaaaagagaaggggcatcgggtaaggtatgtccggctctctgagggttcaaatcgcggcgcgctggaagataatctcaacgcgcttatcgcacattaccatgctggcagggtgatgtggcaggagcccgatgaatggcgccttgatgcgcagttgcaggcgtgggcgaaaacggcgaccgtcgagacgacctgcgtcagcagcgagcattttttcacctcccgagagcaggtgagcgcgttctttgcatcgcgtaaaagctggcgaatggaatatttttatcgggaaatgcgtcgtcagcatggcgtgctgttgaccccggaaggcgagcccgaaggggggaaatggaatttcgatgctgaaaaccgcaagcgctggtccggtgaaccgccggctccggatgactctcgcatctgccacgatcgctcagcattatgggaagagatccaacgctgcggcgtacgcacctttggcgaaccgcaggccaacacttttcgctggccagtcgaccgtgctgaagctaaagcccggctggatgcgtttatttcgcacgtcctgccccagtttggtaactggcaggatgcaatgcacacggaagaaccttttcttttccactccttaatttcatttgcgctgaacaccaaaatgctcaatccccgtgaagtggttgccgccgccgagcaggcatggcgctcgggtgatgcgccgttgcctgctgtcgaagggttcatccggcaaattcttggctggcgggagtatgtgcgcgggatctactggtcgcaaatgccgggctatcgggagctgaatgcgttagagcagcacaccccactgccggagtggttctggacgggcaagacgcaaatgcgctgcctggcgcacgccattggacagtcgctcactgaggcttacgctcaccatatccagcgcctgatgattatcgggaattttagcctgctcggtggtctctcgccgcaggcggtacatgaatggtatctgggcgtgtatattgatgcgtttgagtgggtggagttgcccaatactctcggcatgagccagtttggcgatggcggtttactggccagtaagccttatgtttcaagcgcgtcttacatccataagatgagtaactactgtcagggatgtcggtatcaacacaatcaacgcaccggcgagctggcgtgtcccttcaatgcgctttactgggatttctttgagcgtaaccaggcacgtctcggtcacaatccccggctgggcattgtctttaaacagcttgcggacatgaaggacgaggagcggcaggccattgccgaacgcgctgagtacatccgccttaatctcaacgaactctga

SEQ ID NO: 124938 - DNA, 900 bp, Enterobacter cloacae
atgcccgtgaattttgacctcaacgatctctatgccttcagagcgttagtggaatacggtaacttccgtgtcgccgctgaatctatctgcctgtcccagtcagcgctgagccgcaggattgaaaagctggaagccgcgctggggaaccgactctttgaccgaaccacccgccgcgtctcgctgacgttatacgggcaaaactttgcggaacgctccgcgcagctgctcgataacgtagagtcaatgctggctgatgtcgataaagccagcgaagagcggacggggctgatcacggtggccacggtaccttccgcagcctgttactttatgcccgatgtgatccgtcgctttcagtctcgctatccgcgcgttcgcattaagctcatcgacagcaacgcgggcaacgtgatggacgccgtggcccgaagccaggcggattttggtatttgcttcgcaggaaacttgtcgtctgaaatcgaatttttcccgctggtggaggatgtgtatgttgcagcatgcagaaaggatcacccgctggcgcagaagagccagctgacgtggcaggcattttttcagcaggattacatctctctcgataaaacgtccggcaatcgcaacctgctcgatcgcctgctgggggatatcattcccgagcgtcccagcgtctgcgaaacgcgtcatgtcaccacgatgctcggtatggtagaggcggggatcggcattgctgccgttcccgccatgtcgatgccgacgtcagagcacacgctgctgacccctttgccgctggtggcgccggaggtgaagcgtaccgtggggcttatccgacgccgggggcgcatccagtcctatattgcggctgagcttgaaaaacagatcaccgagcagtatcgccggacgtaa

SEQ ID NO: 124939 - DNA, 789 bp, Enterobacter cloacae
atgaaacgtacgtctcgctctaccgccatcgcgctaatggcgatgtttctgagcgtcaatgcctgcgcagaggacgtgaaggtgatgatttcgggcggattcaaggccgccctggaaaagctggccccggagtatgaacgccggaccggggataacattgtgatcatccccggtccctcaatgggcactacgccgcaggcaatcccaaaccggctcgcgcgcggagagaaagccgacgtggtgattatggtgggcaatgcactggcaaagcttgaacaggcccgtctgacccggccgggtacgcggactgaactcgcggactctcccatcggcatggtcgtgaaaaaaggtgcggatatccctgatatcagcagcgagacgacgctgcgtaataccctgctgcaggctcgctccatcgcctactcagacagcgccagcggcaggtatgtcagtgaagaattgttcaaaaagctggggattgaaaaggaggtgacgggcaaagcgacaaaagtcgagcgcattccggtcgcatcagaagtggcgaaaggaaaatacgccgtcgggttccagcaggtcagcgagctgctgccgattcagggcgtcacctttatcggtaaaatcccggataatttgcaatacatcacgcgcttcgctggcgcggtcacccgtgacgcggaacatcccgcggagggaaaagcgctgctgaactatctcgcctcaccgccctcaaggggagtcatccgcgagacggggatgatccccgttacgtccggcgatactgctcggtga

SEQ ID NO: 124940 - DNA, 492 bp, Enterobacter cloacae
atgacggacgttcacgataaggcaacgcgcagcaaaaacatgcgtgctatcggcacgcgtgataccgccattgaaaagcgtctggccgggttgttgacgcaggcggggtttgatttccgcgtgcaggatgccgcgctggcggggcgaccggatttcgtcatcgacgcgtatcagtgcattatctttacccacggctgtttctggcatcatcacgactgttacctgtttaaagttccggcaacgcgcactgatttctggctggagaagattggcaagaacgttgcgcgcgacgcgcgggatctcaccacgcttatcgcgcagggctggcgcgtgctgatcgtctgggagtgtgcgctgagagggcggctaaaactgaacgatgccgatctgcgcgaacggttggaagagtggatctgcggcggcggacacaccgcgcagatcgacacacaggggatccacgcgcttacggtttctccaccccgcaaggcgtaa

SEQ ID NO: 124941 - DNA, 801 bp, Enterobacter cloacae
atgctttcacttcagggtcccctgctggttttttccgatctggatggatcgcttctggacattcatacctacgagtggcaacccgcgatgccatggctggacaaactgcaggattatcaggtgccggtgattctgtgcagcagcaagagtgccgcagagatgctggatatccaacaggatctgggcctggaggggttaccttttattgctgagaacggcgcggtcattcagcctgatgtgcgctgggagatggggcagcgccagatcacagggatgacgcatcgggaaattcatccgcttattgagcaaatccgccagcaggcaggctttaaattcgtcacgtttgatgacgtgaacgaacgcgtcatcagcgaatggaccgggctaacgcgctaccgtgcggcgctcgcacgcaaacacgacgcctctgtcacgctcatctggcgtgataccgacgacgcaatggtccgctttgaagaggcgctggcgcaaaggggtctgaaatgtctacagggggctcgtttctggcacattctggatgcacgctgcggtaaagacgtggcggttaactggctgattgcgcagtaccgcgagcaggaagattgtgtccccaccaccctggggctgggggatggcccaaacgatgcgccgctgctggacagcgtcgacttcgccgtggtgattaaaagcataaaccgccagggcattacgctacaaaatgatagccctgaacgggcttatcacacgcagctgagcggtcccttaggctggcgggaagggatggatcactttttctcctga

SEQ ID NO: 124942 - DNA, 1230 bp, Enterobacter cloacae
atgatcacactgcaacaactgctgatgagcgacagcgacctgtcgggcgggatgcaaacagggaaaggcaccgacggtgcgcaagactttctctccctgctgacgggtgccctgacggacgcgacgggcaagggcaaagatgcgccgctgaccctggctgacctgaaagccgctggcagtaagctgtcaaaagtcgctcaggacgccaaaggcgataccgcgctgcaggccaaaattgccgacctgctcgcgcgtcagccagccctgagtggcgatgaaacggcgcagcttgccacgcctgaaaccctgatttccgggctggtgccgctgtcaaagggcgatgccctgaaaacgcttaatgcggccaacagcaaggatgacagcaaaagcgaactgagcgaagaagagctggccggattaagcgcgctgatggcaatgctgccgcaccagcagaccagcacgcctcacgcggcgggcagtaacggcgtttccgcaacctcaacattgagttcagcgacgctttcgccaaacgcagcgggccactcccccctgaacgcggcagcgggagaccacgataaagcgcagctttccgcaccttatcagagtcaggcgaaaaacaacggcccggatctctccgccaatgcgccagtcactccggtcgtggccgctgcggcagagaagcaggaattcgccagttcctcttcatcatcctcacccacggctaccctggcgccgatcatgtccagtcatgccaccagccagcctgccgccaccgttgccaccgcgccggtgttaagccagccgctgggtactcacgaatggcagcagtccctgagccagcacatcacgctgttcactaagcaggggcaacagactgcggagctgcgcctgcacccggaagatctgggccaggtgcaaatctcgcttaaactggatgataaccaggcgcagctgcagatggtctcggcacacagccacgtgcgcgcggcgctggaagcggcactgcctgtcctgcggacgtcactggcagagaacggtattcagctctctcagagcagcgtcagcagcgaaagctttgccgggcaacagcaatcctcatcgcagcagcatcaggcttcacgttccggtcacaacggcggatttaatgaagagagcgaggagctactgcccacccctgccgccctgcaatccgcggcgcgcggtaacagcgccgtagacatcttcgcctaa

SEQ ID NO: 124943 - DNA, 501 bp, Enterobacter cloacae
gtgttcaccctgctcaccgcgaacgatttcgggctcaatgtctggtcgataatcctcaacctacctctttactccgtcacgggtgccagcccggcagattatccagcgttcgactttgctaactacggtctgaacttcgggaatagcaactttgcgaccgatgccgacacggtgaaccggcttagcgtggaacagaagagaaagcttctcagaatgcgctggtggcagatcacatctgatggctccatgccatcgataaatcaagcgcttaatgatgttttcggtagcgatgtctatgcgctggacggccatgacatgacaatcacggtggtataccagaaagtccttcctgatttgatgatgacactcttgcaggatttcgatctgattcctcgcccgtctgtcgtaaagattaaccatctcgttaagccacgcgaatctttcggattcgccaattacggcctgaacttcgaccaaccaaaatcacaattcgggaattaa

SEQ ID NO: 124944 - DNA, 666 bp, Enterobacter cloacae
atgaacggcctgttcaatttcatcacttcggctattgcagaaattcaagcctccggatgcgttcctttcattactgccgatgacaacggcggagcggcttattcctacaacaaaagggcaatgacaatccttgatggggttgtgtatcagtccctgaccaatggcaacgtcacgactcctcttggcgcttcctgggctacgctggcgaatttgagcaatgcgctttcccgctccaatccattcggggacatcaagtccgacgggacggtggacacggctttcgcaaacctcggcttgggatccggtgctaaacttagcgcggcagtagctgtgactgcaacatcgggacgtatttcaataccagcatttgtgggtggggtagagcgggttattactttgcagtgggtgtctggttttcaggccaatagttcaggtgttgctacggtcacactccctctggcctttccaaatgcacttttatatgcaaatgctattgatagcggggccgcgtcgaattcatggaatggaagttcaggcacgacctggggggtagatctctccggctcatccaaaacaacagtcgtggctcgtgtaattagaactaccaacggaacaacgtggtcagcaatggccgcagctggaagaattttctctattggatattaa

SEQ ID NO: 124945 - DNA, 276 bp, Enterobacter cloacae
atgacgaatgaaagcggcgaacctacatggggggatgttcccccactgacgggggacgaattgattgcccaagcgagcgcgaggaaggaggctcttattgaccaagccaatgcatacatgaacagtaagcaatggcccggcaaagcggcaataggaagactgaaaggtgacgagctaattcagtacaatttatggcttgatcatctggattcccttgaagccgttgataccttggaagcgccagatatcgaatggcctgtcccgccagacatttaa

SEQ ID NO: 124946 - DNA, 1143 bp, Enterobacter cloacae
atggagcaaccctggcctttctgttatctcatattgattacgagatattattttaatatattacaggagcaaacaattggtattaatgactatagaagaaaaggcactatgaatcgactagggtatatagattacataaaagcattcgcaatcttgcttgttttattgactcacgcacatgaaatggcgaaggtagattctgtaggccttaaaagcattctatattcaattgacagagtaggtgtcccattatttttgatggcatcaggaattctatccctggataaagcaaaggacaaaggattaagcatctttaaatctaaaagactgtatcagtttattttcctatttatattttatagcattacaacaaacgccattttttatcatgaagttaattttctcaactggggtgattcgacactgaaagctctagagtttaacaacattttaaactatggtaaaaatggatacgcagttcacttgtggtacatgtttttgttcatccctttgtatgtactctctccttacataagtaaaatgttatcactgtgctcaaacaaagaaatatttttttacttggtcatttgcataaccctaaatcaattacccagaacatacgatgcaataatggaacaaggcacgatactttcctcgctttataaagatttcactggggcgtgtcttacattctttatttttggtcactggtattgtaaagcatttcaaaactctaaggtaaacacccttaatctaactgttggaattatattgacgtgcctcgtgtgttatttaaagtataactacgaagtgcagagagggcaaatattatgggcgttgaattggtacaactcatcgctttccatcgcaattgccagttttggattattcgtaacaatgtatgaaataacaaaaaacatccctagcgccgggctggttacatttttatcgaaacattcattcggggtttacttaattcactacggaattttactgatagtcttatatgggttcaaagaaaacattgaaagtatgaacaccagctttaaaatactaactttattttccatcaccttaatttcattccctatctcttatttgctatctaaaaacaaatttactggttggttgactggttattaa

SEQ ID NO: 124947 - DNA, 240 bp, Enterobacter cloacae
atgccacgttattacgagatagaaccagccttcttagcagcattaaaggtcttgccggatgggaagaagaccgtgactaccgccgattttgtacgcgaactggcaaaaatgaactgggaatggtcgctgaagaaggccaacgaatggatagaggtgaacgtgcatactttcaaagacatctcgtctcaggaaggtgaagaacgcacgttcatgctcttcaatccgaacggagggctctga

SEQ ID NO: 124948 - DNA, 375 bp, Enterobacter cloacae
atgaataatcccagcgcagcgcttagccactggcaggcgttacatgctcaaagcattgctatgctaaatcttgcacattccggtcaatgggatgcgcttatcgagcaggaaatgcattacgtacaactggtggaaaggatttcgcaaacgcccatcatgtcatgccctccggctcaggttgagcaagcgcgtgcgctgctggaaatgatccttgaaaatgagaataccctgaaggcgttgctgaaagtccggatggatgaactgcgtaatctgatcgatcaaaccggtaaacagcaatccatcacgtctacctatggaaagctgtcagggaatattctttatccagaaagtgttacccgcgacacacaattatga

SEQ ID NO: 124949 - DNA, 405 bp, Enterobacter cloacae
atgtataagacctctggtgttcaatcctatcagcagataggagtagaaagcgcagtcatgaatgccagtccacaccagctgattgtcatgttgttcgacggggcgcatagcgcccttgtccgcgcgcgtttgttcatggaagccggccaaattcgtgaaaaaggtgaagcgttatcgaaagccatcaacatcatcgacaacggtttaaaggcaggactgaacatggaggttgagagcgagttgtccacaaatcttgcctccctgtatgaatatatggttcgacgcttgttactggcgaacgtcagtaatgacgtagacgcaattgttgaagtcgagggtttattaaacaacattgcggatgcgtggaagcaaatcggccccaatgcgtcctctatttcaggataa

SEQ ID NO: 124950 - DNA, 1425 bp, Enterobacter cloacae
atggctactatcagcaacctcgggataggttctgcaggactcggggatttatataatcagttagatgcagcagaaagaaccaagctgacaacgattacgacccagcaatccacgtataacgcacagttaagcgcttacggcaagctgcagagcgccatgacctcactgcagactgcgacagctgcgctgggtaaagcgtcgacatggaactcaacctccgtgagcagcaccaacactgcatttacggcaaccactacatctgacgcttccgtcggatcttatgttgtaaacgttaaccaggtggcaaaagcacaggcgctcactacgggctcctatgccaacaacacggttctgctgggcgatacgacagggacgacacgtaaaatcaccatcacccagccgggtaccaagacacctttagaggtgaccctggcggatggcgatacgtccctggcagggatcgcgagtgcgattaataaagcgaacggcaacgtcaccgccagcgtgattaaagcgaaagacggtgattaccgcctgatgctgtcatcaaaaaccaccggtacggatggggcgatgacaatcaccgtgaccggcgatgataagctgcaaagcgccatcggctacgattcaaccaccaaaacgggcgccctgacggtgaacaccgccgcacagaacgccattgtggtggtgaacgacatttcgatcgagcgtcagtcgaatatcattaccgatgcgctgcctggcatcaccttcaccgtgaaggctgaaagtaaggcagatgaaatgcttgacgtgacgcgcgcaacggatgctaaccagaaagccattacggactgggtcaccgcttacaactccctgcagtccactattaatagcttgaccaaatatgttcctgtcgatgcaggtgcaggcagccagtcaagcagcaacggcgcactcgtcggtgatgcgaacgtgcgcggaattcagtctcaactgcgcagtatattgaccgaagtacaggccggttccgttcagatcatggctcaactgggcattacccaggatccggttaagggatccgacggtactgtcggtaatcttaaagtcgataccgataaactaaaaaaagcgctaaccgacgatcctaatgccgtacagcagtactttatgggtgacgggaagactaccggtatggccacccagatgaacaaaacgttggatacgatgctcagcactagtatcggtaaagaaggcgtgatccagaacgcgaaagacggtattaacaaaacgctgaaaacgctgggagaacgttacgattccatggaagcttctattgatgcgaccatggcacgttacaaaacgcagttcaccagcctggacgtattagtcaccaaaatgaccagtacggccaactacctgacccaacagttctcacagaaatag

SEQ ID NO: 124951 - DNA, 840 bp, Enterobacter cloacae
atggcagttattaatactaacctgttgtccctgaccactcagaacaacctgaacaaatctcagtcttctctgggcactgctatcgagcgtctgtcctctggtctgcgtatcaacagctctaaagatgatgctgctggccaggcgattgctaaccgcatgacctcccaggttaaaggtatgacccaggcggcgcgtaacgccaacgacggtatttccctggtacagactgctgaaggtaacctgaacgaaatcaacaccaacttacagcgtattcgtgaactggcggtgcaggcagctaacgatacgaataaagatacagacctggcttctatcaacactgaaattactcagcgtctgtctgaaattgaccgtatcgctaactcagctaacttcaacggcaaaaaactgctggacggtagtgtcacttctctgagtattcaggttggcgcaggcacaaccggtgacgatactatcactattgataacaaagtattgattgatgctaaagctgcctctactagtggtggtactgatatcagcactgcaattacagataatgcaactgctaagaaagtaatcgatgctgtggatgtttctatcaaagccgttgataccgcgcgttctaacatgggtgcgattcagaaccgtttcgagtcaaccattaataacctgaacaattcaatcaacaacctgtctgctgctcagtcccgtatccaggacgctgactacgcaactgaagtttccaacatgtcccgcgcgcagatcctgcagcaggctggtacttctgttctgtctcaggcaaaccaggttccacagaccgttctgtctctgctgcgttaa

SEQ ID NO: 124952 - DNA, 1206 bp, Enterobacter cloacae
gtgaaacagatcgttattacccagcctaaactggtcgcagatttttcctgtgtcggtggggaatgccgtgaacattgttgtcagggctggaccatctcgttcgataaatcttccgtcaaccgctatctgaacagtaaaaatgccgccattcgtcagacggcgaaaacggcgataaaagtcaccaaaaaacagtatggcaactggggcgaagtgattttccatacggaaagtaaaaactgcccgtttatggatacggataagctctgctctattcatggcgcgatgggcgctcaggccttaagcccaacctgttcaacgttcccgcggacaaaccgggtctataaaaccgagatcgaaaaatcgcttaatctctcgtgtccggaagtcacccgacttctgttgaacgatcgggagtcgatggcgatgatggaatccatcagcgttcagcaggacgtcaacagtgcgccgatgattgatctgaaggcaaaggtcatcaatctcttctgccagaacatattcagcgttgaaggcgtgagcgttgaagaacacgtatatgccgtggtgaaaatcctgatggtggctgaaaagctcgagaatctcgaagagaatatcagcacgctcgaaacggtatattattcactggttaacgaactggtgagcggtaaaatcaagacagaattaggcggatttaatcagaactacagcctgaaattcgcgttaatttcgcttatccaaagttactttacgaaaaaagcgacagcccgcggcggcgcggtattaaaccgttattttgcccagctctataaacagtttgaatctgtcggcgacaccgtttcggcagaacaggtcatggaaaacatcgagtccgtctggcgtgatgtggcagggcgctatctggcggataacgatcacctgtttaagaacttttttaaatacaaactctgggagcaggggttcccgcagagcaatggccgcagcatgttgaataacctttatttaatcgttgcagagttctatttcctcaaaacgttacttgccggccaggccatcgcggcggggaaaattgagcaggataatatcattgatgttatttacagcttccactcgcttagccagcataatcaggaagccggaaagctctttcatcaacatatagatagcgtcaaactcggcgacgatctttcattgttacaactgttaatttag

SEQ ID NO: 124953 - DNA, 228 bp, Enterobacter cloacae
atgaaaaaagtgatcgttttttttaatggaaaaccttgcaaaactatctcggtacttaaaggggttacatcaatacgtgaagcgtatcccaacggagaagaagtcaatctacagatcatgtcggcaggtttcccgtccttaacaggtgaccatgaggttatctatgttgcatctgatcgggaactggcctcacaggaaatctttgatgcagcctctaaatatttgtaa

SEQ ID NO: 124954 - DNA, 219 bp, Enterobacter cloacae
atgtcatccaggatcttaggtctggtcaagtggtataacgaagataagcgctttggatttatctcccctctcgatggaagtaaagatgtatttgttcacttttctgccttacaggaagaaagtgtcaatacgcttttcgaaggccaaaaggtcgaattcgctattattgccggtaataaaggcccagcagcagccaacgtaatgctctgcgataagtaa

SEQ ID NO: 124955 - DNA, 2043 bp, Enterobacter cloacae
gtgagcatggatattagcgatttttaccagacattctttgatgaagccgacgaattgttggccgatatggagcaacatttgctcgacctggtgcccgaagcaccggactccgagcagctcaatgccatcttccgtgcggcgcattccattaagggcggagccggaacgtttggatttaccatcctgcaggaaacaacccatttaatggaaaacctgctggatgaagcacgacgcggtgagatgcagctcaataccgacattatcaacctgtttttggaaaccaaagatattatgcaggaacagctcgacgcctataaaagttcggcagagcctgatgccgccagctttgaatatatctgcaatgcgcttcgccagctcgccctggaagcaaaaggtgaggtcgcagcagccgttgtccctgctgcaaaactgagcgttgtcgatgcggttggtgccggtgaaaccgcgccagccgctgcgcaagcgggcaaattgcgtgttgtgctttcacgcctgaaagagaatgaggttaacctgctggaagaagagctgggtaacctggcgacgttaagcaatgtcgtgaaaggcaaagacagcctcgccgctacgcttgatgacgggattggccaggacgatatcgtggcggtgctgtgctttgtgattgaagccgaccagattgccttcgaaaccgaaaccgaaaccgccgaagcggaagctccagtagcgcaggaagaggtggccgtcaccgctcaggcgccggccccggctgtcgcgcctgcggccccggcgctgaaagcggtgccaaaagacgctgctgcacctgcccgtggtgaaaaaccggccgcgcgctccagcgaatccaccagcattcgcgttgccgttgagaaggttgaccagctgatcaacctggtgggcgaactggtgatcacccagtcgatgctggcacaacgttctaatgaactggacccggttacccatggcgatctgatcaccagcatgggtcagttacaacgtaacgcccgcgatctgcaggaatcggtcatgtccatccgtatgatgccgatggaatatgtcttcagccgcttcccgcgcctggtacgcgatctcgcgagcaaactgaataaacagattgaactgacgctgatgggtagctccaccgagctggataagagcctgatcgagcgcatcatcgacccgttaacgcacctcgtgcgtaacagcctcgaccacggtattgaactgccggaaaaccgcattgctgccggaaaatcgccggtgggcaatttgattctctctgcggaacatcagggcgggaatatttgcatcgaagtgaccgatgacggcgcgggtcttaaccgcgagcgtattctggcgaaggcgatttcgcagggcatggcggtcaacgaaaacatgaccgatgaagaagtggggatgctgatcttcgcgcccggcttctctaccgcagagcaggtgactgacgtttccgggcgcggcgtcggcatggacgtggtgaaacgtaacatccaggagatgggcggtcacgttgagatccagtctaagcagggttccggcaccaccattcgcatcctgcttccgctgacgctggcgatcctcgacgggatgtccgtgaaagtggcagacgaagtgttcattcttccgctgaacgcggtgatggaatccctgcagccgcgtgaagaagatctgcatccgctggcgggcggtgagcgcgtgctcgaagtgcgcggggaatatctgccgctggtggaactgtggaaagtgttcgaagtggacggcgcgaagacagaggccacgcagggcatcgttgtgatcctgcaaagtgcgggccgtcgctatgcgctgctggttgatcagctgattggtcagcatcaggtggtggtgaagaacctcgaaagcaactaccgcaaagtgcctggtatttctgccgcgaccattctgggtgatggtagcgtggcgctgatcgtcgatgtgtcggcgcttcagggattaaatcgtgaacaacgtgtggcgtacacagccgcctga

SEQ ID NO: 124956 - DNA, 759 bp, Enterobacter cloacae
atgaagccattgttccggcagttgtgtctggctggtgttttatcaggcgtcgcggccacaggcgaggcgcaggcggcggccaccattctgctctggcccatcgatccctggcttgccgcagatgccaacgccacggagctgtggatccagaaccagggaaacagcgcaacgacgatgcaggtgcgtattgtgcgctggaagcaggaggggggatacgaacgctacagcgcgcagcaggacgtggtcgccagcccgcccattgtcaccattcagaaaggtaataaacagctgattcgccttatcaaacagagcgcagtcccagtcggggtcgaacaagcctaccgcattattgttgatgaaattccccagcccgacgcgaaagccgaaccctccatcggccttaaattacagatgcgctattccattccgctgtttgtctacggacagggtatcccgacccttaaagagggggcgcatcatgccctggccgagacccgaaacctgagctggcgcgtgacccacgagggaggacagcctgcattacaggtacgtaatcagggggatgtgcacgtcagattaagccaggtgtcactggagcagggcggacagaaacgcaccgtagcggagggattactgggttacgtcctcccgggcagcacccgcagctggccaatacccgctggcgttcgtcagccggaccggatgagcgcgcagattaatgccagggatgaacaatggcagtcgacgcccgtcaactga

SEQ ID NO: 124957 - DNA, 1602 bp, Enterobacter cloacae
atgttaaatcgtattcgtatctcgaccacactgtttttgattctgatcctttgcggtgtgttgcaggttggcagtaacgggttgtctttttgggcgtttcgcgatggctatcagaatttgcaggatgttgaggcgagtaatcagcagcgctccgcactggcacaaacgcgtgccgtgctgttgcaggcaagcactgcgctgaacaaggcgggcaccttaaccgcgctgagctatccgccggatgacattaaagcgctgatggccaccgcgcgaagcagcctgaaacaggctggcgcacagtttaacgctttcacggcgcaggcggcgggcagcgagaaagagcacgcgctgaaagccgccatgaagaagaactttgaacagtggtacagcgatctggatcaccaggcgacctggcttgagaacaaccagctctcggactttatgaccgcgccggtgcaggcctcacaggatgcgttcgacggcagctttaacgcgtggcagcaggatattaaccagtctgttcaacgtgcagaggaagacagccgtatcagctatcacatgtcgggtgtgatctttggcgtcgtcgtgattctggcggggctactgaccggtggggcactgctctggtcacgcaaaatgattgtgcagccgctggcgattatcagcagccacttcgacagtattgcgaagggcgatctggcgcgtccggtggcggtgttcggtaagaacgaaatttcggcgatctttgccagcctgaaggcgatgcagggtgccctgcgggaaaccgtctccgatgtgcgtcagggcagttatgccatgcacaccgggatctcagagattgcggcaggcaacaacgatctctcttcccgcaccgagcagcaggcggcctcgctggcgcagacggcggccagcatggagcagctgaccgcgacggtcagccagaacgccgataacgcgcgtcaggcgtctgacctgtcaaaacaggcggcaatgacggcgaaaaaagggggcgatcaggcctctcacgttgccagcaccatgcaggagattgccaccagctcgcaaaagattggtgacatcatcagcgtgatcgacggtatcgcgttccagaccaacattctggcgctgaatgccgcggtagaagcagcgcgcgccggtgagcaggggcgtgggtttgcggtcgtggcgggggaagtgcgtaacctggccagccgcagcgccaacgcggcgaaagagattaaggtcctgattgaagagtcggtatcacgcgtccagcaaggctctgccctggtggatacggcggcgcataccatgcatgagatcgtcacctccgtcacgcgggttaacgacatcatgggcgagattgcgtctgcgtcggacgaacagcgtcgcggcattgagcaggttgctcaggccgtcagccagatggatcaggtgacgcaacagaatgcctcgttagttgaggaagcggcagcggcaaccgatcagctggccagccaggcggatcgtctcaccgggctggtcgcggtatttaatgtgaaagagcacgttgaagcagtaacagaagtcgggcggtcgcaggccgtgccagttgtatcctga

SEQ ID NO: 124958 - DNA, 1164 bp, Enterobacter cloacae
atgctcactaaaatgaaaagacgaacccttacggtttctctgaccagcacgctgatgctggtatcgacggggtctttcggcgccgtcacggtactcaaaaattgtttcggagccccacagacgtattccattgattaccatcatgaatttacatcgacggaaaacgttgcaaacaacgattatgatattccgggtcacctggtcggcgcaggtgccgacctggaagcaaactgcacgtgcccgggaaacatgttttcgtcaagcaccgtctacgaaaaaaccttggctggcagtccccttaaccccggcaccagcggtactggctatcttacggataaaattgatgcccacattactggctatgctgatgcgattaactccccggacggcagctcgctcaccccaatcccgatcaatgagtacccgaccccgcggggaaatatgcttaccgtgctcgaatcgagcctgtctaaaacagaagaagaaagcgacgtatgcagcaatgactcccggcctgacggtggtgccgcatcgaaacgcaagtttcgctggaacgtcgtggccgtgctgctgcacataaaaaaaccgatactgggtgaagaggtgatcccggcgacgctcatcgcccaaaactacgcctgcctttatattggcaccggtggaagctgcgacgccactcaggcagaacacatctctgatatctggtttggcggcaccctttctgcaccgctgagctgcaccatcaacgcaggcagcacgattgaagtccagtttggcagcatcgtcagtaaacagtttacccgcaaagggcaaccgcctcagggctatgccctaaaaagcgtcgatattaactaccactgtgacgataacgccgttggtaataatgaccggataaagctcaccctgacggccgaccagggcatagtggatagcagtacgccctacattgctaagctgcttgaaagggacgatctgggcgtgcgggtgtacgacgaaaatagccagaacgtggcgctggatgggacttatgcatttccagtaaacctggacgagcagggaaacggcagcgttaaaatacaggcggttcccgtcagcactacggatgccacgcccgcaccggggagcttcgaaggaaacgtcacggtgaagatggagctgcgctag

SEQ ID NO: 124959 - DNA, 2556 bp, Enterobacter cloacae
atgattgcaggacgtaatttcttgcctgttgggggaacctttcggctgaattcggttacacgctgtctggcgagtaccctgatgttaatgattttttccgcagatgcccgggagtatctcttttccccttcctcactcgaaggggacatgctgacgcagcaggatatcgacctctcgctttttacaaaatcgaatgcgcagttgcccggcacctactcttccgtcatcacaatcaacgatcgcaggctgaaggatgccaacattcgctacgtcagcagatctgacgggcacctgatcccccaattgagccccgcgatgctgcgcgcctggggcattaatatcgaccgttatcctccgttgctgaagcgtccggcggaggaaacgctcccagagtcgctggataactatattccacaggcgtctgcagagcttgatttctcaacaatgacgcttaggttgagcatcccccaggccgcgctggctgataacggtcgcgattttatcgatccctcgcgctgggacgatggtgttcccgtcctgttcagcgattattcgctgtcgggctcgcaaagcaaagaagatcgcgaggacagcacagaaagccgctatctgaatttgcgtaccggggcgaacctgggcggctggcgtcttcgaaactactcaacgtggagcaaatcggacggcgattcacagtgggataacatcaacacgttcctgcagcacgacatcgacgcgctgagagcgcagttcaccgcgggcgagagcagcacgcgtggcgaagtgttcgacagcctgcagtatcggggcgtcaatctcgccacggacgaagaaatgttgccctatagccaacgcggttatgcaccggtcattcgcggcgtcgcaagctcgaatgcggtcgtctcggtgcgccagaacggatatctcatctaccagcagaacgttgcccccggggcgtttgagatcaacgacctttactccaccaccaacagcggcgacctggaagtgacggtgaaagaggccgacggcaccgaacatcactttactcaaccctactcaagcatcgccattatgcagcgcccgggacacatgaagtatgaattgacggcgggccgttatcgcgcagacagcgggagtgaccaaaaggagcccgacttccttcaggggagcgtcatctacggcgtcaacaatctgctgacctggtttggcgggctaaccctttcgcaagactatagtgccctcaatacgggcgctggcattgcgctggggccgctgggttcgctctctacagacgtcaccgccgccgataccacgcttgacgacggcagcaagcatgtcggccagtcctggcgcgtactctattcggggaaaattgacgccaccgataccaatttcacgcttggcagttatcgctactcgagtcgcgggtattacagctttgctgactctaatcagaagcaggacggacacgatagtgatttgctcttccgctataacaaacgcaaccgcgttcaggccagtatcagccagaaccttgctggcgtcagtctctatcttaacggctaccagcaggactactgggggacgtcgaaaaaagaacgcagcctgtcgttaggttttaacaccgttctgtctggggtgagttatcacctggcatatacctacagtaaaacgaacgacgaggaggccgaccggatggtctccttcggctttagcgtgccgctaactcgctggctcccccgcgcgtggagtagctataacatcagcaacaccaaaaatggctacacccgacacaatatcggcgtcaacggaacgctgctggacgacgaacgtttaagctattcgctgcagcaaagccattctaatcacgatggggaggataccagcagcgtatatggtacctatcgttctcaatacgccaacctgaatgccggttattacgcctcttccggcagcgcggagcagatgaactacgggatcagcggggccattgttgcacacccgcgcggcgttacgctggcgcagccgttagggagccagtttgccattgtcaatgccaacggcgcctccggtgtacgcttccagaaccagcagggtattcagacagactggctgggtaacgccgttatcccgtccctgacgccgtatgaggaaaatgcgattcgtatcgacaccgcaagcctgcccgaaaacgtggagagcagcgatacgtcaatccgggtgatcccttcacgtaatgccgccgttgaaagccggttcgatgcgcacgttggttatcgaatgctgatcgcgttaacccgccccggcaatcaacgcgtcccctttggcgcaatcgtcaccagcgcgaacgcggacctgagcggcatcgtggacgataccagcacggtatacctggccggcgtcggcgagcccacacagctcacggtgaaatggggaaaagcgccagaccaacagtgcgtcgcccatattttacagcaggcagagggatacacggagagccctaacggtatccgttcaacccgcgcgctttgtcagcaggaaacagcttatgctcactaa

SEQ ID NO: 124960 - DNA, 378 bp, Enterobacter cloacae
ttgaatgtccgcacggtgcccgcaaccgccgcagaggatgccgataaaaacgtgctacgactcatctacaaaacgcgactgaagctgttctggcgtcccgtggggctcaacgggacgccaggcgagtcctgcaagaatctgcgcttcgttcgccagggccagcagctgacggtgataaacgacagtgcgttttacaccgtttttgactctctctcgctaggctcgcagaagctcgaaagcgccgatatggtggggccagcatcacgcgttgatatccctcttcccgacgctgcaccggcgaatgacgtcagttggcggtgcattaccgattacggcaatgcctccgaaaaatacacgttccatctgaccagggaataa

SEQ ID NO: 124961 - DNA, 576 bp, Enterobacter cloacae
atggatttcaaaaataactttatggctggcgcagtacttgcggccatttcgatgggcagttttgctgccgaaatgaatgcggggacggtccactttacgggagaaattattgaaccgagctgcaccattcagggtgatagcggcacggacagtacggtccctctggggacgtaccctaaatctctttttaaggcggtcggaactgaatcttccctgaccccgttctcgattacgctcgcaaactgcccggtaaagagcgatgggctgccggcagtacagctcacctttaacggcacgacgaccctgaccaatacctctacgctgctggatgtcagcaaaatcaccaccaccggtgagaccgccgccaccggtatcggcgtcgccgttagcccggcgggcaaagacactcaacttatcaccatggatggggcagaaggacaggtttatattcaactggccacccgtactaccgataccattaaagccgactttaacgcccgctataagtcatttgccgcaacggtgaccgctggccctgccgatgcggatatgacggtgaatattttatatcgttaa

SEQ ID NO: 124962 - DNA, 453 bp, Enterobacter cloacae
atgaaaacaatgacggctctgactattgccgctctgactatggcggctttgtctggcgccgcgaatgccgctatttccggaacccaaacatggaaaatggtggataataaacttgaaaataccagtaacggacgaaaattatgtatgactggcattgcttaccagcaggcggtgatggagccatgtggttctaatccagaattgcagaatattcgtgagctcaatttcgctatgaatgggatgctgatgctggaaacatatccagaatatgccttcgcaccagcaagcggcaaagtttatatacgcgaatatgaacctattgcgagtcattgggattatgttaacggacagctgaaaaaagttgataccgatggtattgtcaagtgtcttgatatggaaggcggtataaacgtcccaggtgccaaattgcatttagcaacgtgtaccaggtaa

SEQ ID NO: 124963 - DNA, 372 bp, Enterobacter cloacae
atggggttatccacttcccgcacggtatgcgcgctggtttttctggcatcagtcgttatctcacctactgtgctggcgcatgcgcatcttaaacagcagagcccggcagcagacagcgtggtgagcgctccgcagtcactaacgctgaatttttcggaaggtatcgaaccgggatttagcggtgtggtggtgacggatgcgcacaagcaggtcgtcaaaacgggagccgtaacgcgagacgaaaagaacaaggctcaactgatcgttccgctggcgcaaacgctggcgaccggaacctaccaggtggactggcatgtggtttccgtcgacggccacaaaaccaaaggcagctatcactttagcgtgaaatag

SEQ ID NO: 124964 - DNA, 870 bp, Enterobacter cloacae
atgctggcactggtctatgttgggttgcgctttatccatttcgcggcgctgatgctcgtttttggtaatgcgctatacagcgtctggttggcgccttcctctctccatcgtctgatggctctgcgtttcgcgctacagcagcgggtggcatctttaatcagcctggccgctgcgcttctgatgttcatgcttcagggcggattaatgggcgatggctggggagatgtgtttaacccgcaagtctggcacggcgtactggggacgcagtttggcagcgtctggctgtggcaaattatcctggcttccattacggtcgctgccgcgtggcttgcgccgctgaaaggctcccggctgctactgctcgcaatggggcagtttgtgctgctggcaggggtaggccacgcgacgatgaacgaaggtccgttgggggctgtgcagcgtctcaatcatgccgttcatctgttatgtgccgcaacctggctcggcggattactgccgctgctgttctgcatgcatctggcaaaagggcgctggcagaacgcggccatctacaccatgatgcgtttctcgcgcgtaggccactatgccgtcgcgggcgtgctgctcacagggacgatcaattcgctcttgattctgggcgtccatattccctgggaggctggctacgtgcagcttttattgttcaaatgtgcgctggtggcgttgatggtggcaattgcgctggcaaatcggtattttctggtgccacggtttcgtccggattccgggtgggcacaacagctttttatcaggatgacacaggcagaagtggtgctgggggcgctggttctggcagtggtcagcctgttcgccacctgggaacccttctga

SEQ ID NO: 124965 - DNA, 942 bp, Enterobacter cloacae
gtgtctaatacacacctgcataacgatgtgttctacccacatcgcacaaatattatttccgagctggtgaacggcgaacgtgtcccgggccccatctggcgaaaacgcgattatcggctgaagttccttttacgttcgcttctgttctggtcttccacccgtcgcatgctggaagccctttcagggcgtgacgatttcgacaaactgctcgccgctcaaattacattgcccagcaagacccatcggcagtatctgatgcgtggcctgaccgcgaacgatcgcgccgacgctatcgttaaccattattactggatcgatagcctgaaagagcgcgccctcgcccaggcgctgaccagcccgcaggaacaaaccgttgttcagttccatgcaaaagagggcgtgatctatacggttaatgcatcctctgccgggaaagccgagcgcgaaggtgagagcacgctgtggctgcgcgataacgaggatacgctgcttgccagcctgacctttagcgtagcccgcagcaacggacaacgcgtaatagtgattggcgggcttcagggcccccgccgctgcgtgtcgcgggacgtcattaaacaatccacccgcgcctgtcacggcctgtttcctaaacgcgtgctgatggaagtacttttccagctggccttacagtcatctgttaaggcgatttttgccgtcagcgacgagggacacgttttccgcgcattgcgctatcgcctcagcaaaggccgccatttccacgccagctatgacgaattctgggattctctgggcggtaaaaaggtctccggcttctgctggcaactcccgctgcagatggaacgcaaatctctcgacgagatcgcgagcaagaagcgtgcggaataccgccgtcgttttgaattgcttgatgaaattgaggcgtcggtaaaatcccgcttttaa

SEQ ID NO: 124966 - DNA, 816 bp, Enterobacter cloacae
atgtccttcagttgccccctttgtcatgcgtcgctgatgcgctcagataaaagttatcgttgtccgcagggacatcagtttgatatggcgaaagaaggatatgtgaatcttctgccggtgcagcataagcgctcccgcgatccgggcgatagtgcggagatgatgcaggcacgccgtgcatttctcgatgccggacactatctgccgctgcgggaggtagttgcgcagatgctggatgatatgttgcctgattcggcgtccgccatgctggatatcggttgtggagaaggatactacaccgcgcggtttgcggaagtggtgcgtgagaagggggccgtaacattcggtctcgacgtgtcgaaagtggccattcgcgcggcggctaaacgctacgctggcgtgacgtactgcgtggcttcaagccaccggttgccgttcgaagatgccagtatggacgctatcatccgcatctatgctccctgtaaagcgcaagagcttgcacgggtggtgaaacccggcggatgggtcatcaccgtcacacccggcccgcgtcacctgatggaactgaaagggctcatctatgatgacgtgcgtctgcatgccccccattctgaacagctggccggttttacgctgaagcaggagcagtcagtggcgtatcaaatggatctggaggggcaggaggcggtagcactgttgcagatgacgccgttcgcgtggcgggcaaaaccggaagtttgggcggcgctagcggcccggacgacgtttagctgccagacagatttcagtatccatgtctggcagcgcgacgcttaa

SEQ ID NO: 124967 - DNA, 1599 bp, Enterobacter cloacae
atgcaaactgcacaaacgatcattaaacattaccgccgaaaacgcgttatcgtctgtgtgacggttgcgatccttacgctcattctgaccctgggcgctcgctttatttctcagcgcaacgttaaccagcagcgggtattcgacttcagcagccataccgttcgctctctggataatcttctcctttcgctggaaaaacgccgcagcgtgttccagcagctggtgggtcagccctgccctcaggcacatttggccctgcgaaaacaggcggccattttgcaaacggtacgctccattgccctgattaaagacggtatcctgtattgctccagtgttttcggcagccgtaatattcccatccgcgactttctcccggaattacccgccagcacgccgaagctgattttatcgaccgatcggtggctgatgaagggcagtccgatcttgatccagtggaacccggtgtcccaggacggggaagatggcgtcattgagatcattaatattgatttgatcaccagaatgatactggagcccgagcgtccacttattgatgatgtggcgttatccgtgggcgatcgttttttgcgctatggtcaacgggtcaccgatagcctgactttcggaaaggctggcgcgcttgttcagctgtcatccacccacaaccccttctccatcatcgtcagcgggccaggtccaggagagctggccctgaagaccctgcccgcgcagcttccgttgggtcttatgctgagcctgctgctgggctatctcgcctggctggcgacggcgaacaggatgagtttcacgtgggagattgatatgggcattgcggcccgggaattcgagcttttctgccagccgctggtgaatgcccgtacgcaggcgtgcgtcggcgttgaaattctgctgcgctggaataacccgcgacaggggtggatctccccggaagtgtttattcctctggcggaagaacataatctgattgtccctctgacacgctatgtcctcgccgaaaccgtacgtcagataggctactttccttccagcgccggttttcacatcggcattaacgtcgcagccagccatttccgtcacgcggtgttgttacaggacctgaaccgcctctggttcagcgctaacccgcgtcagcagcttgtgattgaattaacggaacgggatgcccttccggatgcggaataccgtattgtgcgcgaactgcatcgcaaaggggtgaagcttgccatcgacgattttggtaccggaaacagctccctctcctggcttgaaaagctgcacccggacgtactaaaaatcgaccagtcgtttatcaccgccattggcaccgacgccgtgaattcaacggtgacggatatcatcattgcactgggtcagcgactcaatatcgaactggtggctgaaggggtcgaaacagaggagcaggcgcgatatctgcgccgccatggtgtatcggtcctgcagggattttactatgcgcggccgatgccgctgagagactttccacaatggctggcgggaagtgctcccccgccagcacagcataacggacacattgtgcccttaatgcccctgcgttaa

SEQ ID NO: 124968 - DNA, 1341 bp, Enterobacter cloacae
atgcaattaaagaaaacggtaattctgataagcgcattctattccggcgcacttttggcggcacaaccctcgatgaacgtggaagaaaagctggcgcaactggaagcgcaaattcaggaacttaaacagcagcaggccgtcgcgaagcaggcttcgccagccgttgtggtgcagtcggaagagccggtgagcaaaaccgctccgccaaaactgacgctctcagggtttggtgatattaaattttacggtgatgtggaatttaatatggatgccgccagtaaaacgggtagcctcacgtctgttaagcaaagtgctaatagtgactgggcgccgggcgataaagaacgctgggatattaatgggcgtattttattaggctttgatggttatcgtaaaatggataacggcaatttcgccgggttctccgtccagccgctcggcgacctcgccgggaaaatgtacctggatgatgcggtattcttctttggcactgagaatgactgggaaataaaagtcggacgctttgaggcctatgacatgttcccgctcaatcaggatacgtttgtggaatactccgggaataccgcagacgatctctacagcgacggctatggctatatctatatgctgaaggaggggcgcgggcgaaccgacagcgggggcaacttcctgatgaacaagacgctggataactggtattttgagctgaataccctgtttaaagacggcagcgatttgtatgtcgaccagcgttatcacggtgcagaacttgagaacgacaaaaatgtggcctacgtgcgcccggtcatctcgtggcagaatgggccgttttccagcgcggttgccatggagaccaacctggtcaacaacgcttatggctatcgcgacgatgccgggcgctgggtagaccagtcagagagaacgggctacgggttcacgatgacctgggacgggctcaaaaccgatccggaaaacggagtggtcatgaatctcaacacggcttatctggacgcgacgggcgaaaccgactttacctcagctattaatgccctctggcgtaattttgagttgggttacatctatgcccataacgaaatcgacgagtttaatacctcaacgtttgacgcagagtgtgaaaacgactgctggataaccgacccgggcgagtatgacatccatactattcatacctcgtacctgatcccgaacgtcatgaagatgaaaaacttcaacatctatctgggcgcgtatgcgtcatgggtcaatgcctccccgaaagagggtgacaataaaaatgacgatcgctacggtggtcgcgtgcgctttaaatactatttctga

SEQ ID NO: 124969 - DNA, 969 bp, Enterobacter cloacae
atgggtaaacgaagatctctctatttgcatccgcaacagcgcgatcgcatccaccatcttgcatcaggatttctgtggcgaagcgagctgcccacatggctgctgatcctgacgatttacgctggctggtttaccacgctgacgttctggcaaacgttcggcctgctgcccgccacgctgctgcttatctggtttaccgcctggtacatgtccctgcagcatgagttgatccacgggcatcccacgcgttttgcctggcttaaccagctgtttggcacgctcccgctggcggtctggtatccctatggcctgtaccgggattcccatctggcgcatcatcgtcacgacagtctgaccatcccggtggatgacccggagtcgtactattttacagaggcgagctgggcgcgcttttctccctggcagaagcgcatgatccaggcccgcaataccttctgcgggcggatagtgctggcaccgctgctggatattttgcagacgctggggatcgccgtggcggcctttcggcagcgtcaacggcgggcgatggcgatgtggctggttcacgctgtgcttctggcggcgcttttcacctggatggcgcataacggcttttcacccgtctggtttgtgctggcggtaagctatccggcgctggcgctgaccaaggtccgttccttttacgaacatcgcgcggcggacgatccgctggcgcgttccgtcattaacgaggctgggctattctggcgggtactgtttttaaatctcaactaccattccattcaccacgatttaccgggcgttccctggtatgggttacagacgatctaccaccaaaaccgcgaggcgtaccggcagcgtaaccacggttttgtggtcaggggctacggcgaatggctacgccagttcttgacccggccagtggcggtcaccgttcaccccggaaaacaagaggaaagatatgagtaa

SEQ ID NO: 124970 - DNA, 759 bp, Enterobacter cloacae
atgagtaacctgctggcgtttcccatgtatgccgttgatcgcgccgacactcgcgcgctctggctggcggtacaacaacgtctggccgaccggggcgtgtacgttgagcgtgtcccccgctggcccgaatcggacctgctgaaccactggcagcagccggcgctgattctcagccagacctgcggctacccgctggtcacgcagctcccggaggtgcaggtggtgggctgttttcactacacggcagcgggatgcgaagggagccactaccgcagctttctggtgacgcgctcggaggatcggcctctttcgctggcggattttcgcggacgccgggcggtctgtaattctcctgactcgcagtccggctatcacgcgctgcgaaaaaaagtggcaccgtgggtgacccgcgcccctttcttttcgcaaacatcattcagcggcagccaccgtcagtcgctgattgacgtcaaacgtgggaagggtgatatcgccgctatcgactgtgtcacctgggcactcctgcagcgtcatgagccggaagcgttggcgggtctgacggtgattgaccaaactccgctaacgccgggcctgcccttaatcacgtcgcctcatacacctcctgacacgcttaacgccatccgcgatgcgcttcacgcgctggtaaccgtcccggagcaccgggcggtctgtgatgcggtgctgatcggcgggtttagcgtggtcacgcggcaggcttatgcgttattgtccgcatga

SEQ ID NO: 124971 - DNA, 897 bp, Enterobacter cloacae
atggatattaaacagttaaaatacttaattgcgctcgacgagacccgtcattttggtaaagcggcctcgcagtgcaacatcacccagccgaccctctccatgcgcatccgcaacctggaagaggagctcggtctggtgctgattgcgcgcggacagcgctttgagggttttacgccagagggcgaacggatcctggcgtgggcgcgtgctttgcttgccgctcacgacggactacaggcggaagccgcgctgtgcaaaggccaggtggtgggtgaattacgcctggggatggttccgctggcgagcgtcgatccgatgatctttatccgccagttgacgcaaaaatacccggagctgacctacagcctctattccatgtcctctgcacacattgccgatggcgtcagccgcaaccagctggagctgggtatttgctatctcaacagcatcgataccagcctgtttgacattattcagttgcctgagacgaagatgggcctgctgcatgatattcgtcatttccagctggacccgacgccgctgacctggcaggacctgacggattttccgctggggttcctgacaaaagggatgcattaccgggcgcatatggaggccagctttgccgccgccggaatcgaacccagatccgttttcgagagcgactctacgttccagattattcaggcggttcagagcggcgtttgctgcgccgtgatgccgctgaacaacgggcttgaggcgctaaacaaccatttcaggattgtccccatcgccgacgcgaacattgaggcacccatcggcctgataatgcgcaggcaaaaacccctctcctccctggcgctgcgctgttttaccgacgcgcaggagatttatcatgcggacaataacgcataa

SEQ ID NO: 124972 - DNA, 450 bp, Enterobacter cloacae
ttgggaattaaaataatcgttttcagatatctaaaagcagtatttcttttgttcgctgtcttctgttttcctgctcgcagtgataacccatacgttgatttttatcagcagcaaacataccgacaggtggtaaaagatttggtcctggcgcgctgtcttgcacaggtggcagataagaacagccagttttctatcgatgcggcccgcagtgcgagtgcatttattgagtgggtgccgtttgatgctgaaaacggtattgacaaagtgaatgccattattgggaaatataaaaataaaattaacggctttcactcggagcgaaaacccgatgtcaaaggcgtaacgttaaattgtctacgtctttatcatagcgacgaacttaataaacttgtacctcaattaattatcggcaatcctgaccgcacctggcttcaggataacccgcagtag

SEQ ID NO: 124973 - DNA, 273 bp, Enterobacter cloacae
atgtatgaatcaatgcgcctgatactgctttcttttgtattttcaggtttgtttatttctttggttctttatgtttatttttatcggaagcactctcaggagcttgcaaaggtattgcacctgctgagcagtaagcagtacttagatataaacaattatcttttttatgaacagcttggattacctggctttgcacatcgcgtatttttaagggccataagccattgtaaagcagttatgattttaagcctctgtagaatgcctcctcattaa

SEQ ID NO: 124974 - DNA, 417 bp, Enterobacter cloacae
ttggtgaatatggacaacttgttattatttgttgttgtggctttatttctgattgttataattatggacctgttcagctctcgttatttcaaaaaacatgagcatgattataatcagttgcttgctgaataccgacgcaaagggtatgacctggatcttgtgacagactacgcttctttttttggttcgctgacaaattatcaaaaaataatctggtttgttcgcctttataaaggtgtcagaatgaagtttactcatgaaaggtttgtgcaggaagaagcctataagtacgtacagtccttaccgccagaaagaattagctggatgctagagttacatcatcgttataaattacaaggattgatttttactctgtggcttattgttggtttgctttttattgtggttgttaaatga

SEQ ID NO: 124975 - DNA, 414 bp, Enterobacter cloacae
atgttcatttccgggatgagcgcatcactcagttcattatccgttacaagcctaagcaatacgccgttgtcatttaagatcaccagacaaaatgaatatatcaatttctacaaagctaacgatttcaaactggatgatggaacgagcattaccgaaattggtttacgtttaagcaaagataacggcgacatggcgcctttactgaatttttcaccgtcaggtcaatgcataacgcttgataccgttaaaatgcactttccgcaactggtgctcactgactatccgcaaggccgctctgagaatgaagtgaccagttataccgcgccaaaagacagtaatggacaaaaggtgagcttcagtttcaccgtgaaaaaacctgactgtctggattctgtcgtcataagcgccgaataa

SEQ ID NO: 124976 - DNA, 567 bp, Enterobacter cloacae
atgacaattaacgtgaaaaaaaacactccggtatttcttttttctgccttgatgtttacctgtctgagcagcaatgtggttttggctcaggtgatgccttccgttctgacaaaacgggatttttctgtgcagattaaagaccagcctgtcgcattgggcgacagatggactcctgatattgcccgtaaaattgacgtgccgttggaaggccattttgtcggtgaagttccttttgacggaacaaactataaattctaccagcatcaaaaggctgggctagaaatattcagttccaatctctggtgggataaagcagaaagaagcgttgacgattatatcgtgtcccagattacgctgactgcctcagatattttaactccccgtggcgttcatgtaggttcaacaatcagagagctgaataatgcgtacggcgatggtcagttcgaaaatgattccggggagaagtggatttcctatgaattgggtaagaaattgctctcttttaaggttatagacagtcaggttgtgaaaataaccatgaattacgaaaatggtacttcagagtga

SEQ ID NO: 124977 - DNA, 1077 bp, Enterobacter cloacae
atgaccaaaaaatatttggcagtcgcattgttcaccgctttattgacaggcgtcgttgaaacgtcatcggcgcttgaattatcgcaatacaataagcttgatacggtgagccgcatcgttaacgacagcgaagtgacagacagtctcaggaagacgctaggaaagcattaccagacctttattgataactttgatgtctttggtgaaccgcataccaccacaggtggcggattgtttgttgaaggctggctaaaggatctctacctggagaatgcgtcagcgctggtcatcaatcctgacggcaaaatctttgcggcctgggtggttccggagtcggacgttattcattaccagtcttcagataatagtccggttattcatgccgatattcagcaatgggctgccagattcaatacgctgcagtttgcatcgaacagccaatcaggactcgcctttgacggggtatgggcaggcgagttcgggagcgactcgacgttaaccctgcagttagctcggtcaggcaaccgtatcaccggctcttattgctatatctcccggaaaagaaaccgcattgattgccccgaggatgatgagcgtaatcttagcggtacgattgctggcaatcgtgccactgttgagttcaattcatcgtttggcggtgtaggtgggcgggctgctctggaagtaaaggggaatgaaatggaatggcgtttagtaacgtctcctcaacatggcaatgattatgctccactgcgttatacattacataaagccgattcggatcatcacgctgaatccagaaaactggaaaccgaaaaattcgctatttctttgataaacaagtgcggccatttcgagagcgaatgtgcccagatggtttatctcggcgtgcgcaaaagcgataacagcacgatctccttaaggggaaaaacgttgcgcgactccgcaggtaaaataatcggctcaacgtacaagaatggcgaaatcgtttataccgtgacgtatgcacccgcgaaactggttgtcagcaaaggcagccaggttttagtcgaacagtcaggtcaatggcgtaaataa

SEQ ID NO: 124978 - DNA, 1569 bp, Enterobacter cloacae
gtgccagaccatcaggccgcggtcgttatagcggtattcacgcgttaccacgccggaggcatctgtcgcgctcgccagctggccgcgcgcatcgtagcgccactgcatcagcggccaggaacggttgccgtcgaaatggctcgccgacgtcacgcgctgcgggaaacgttcatcttcatagcgcaaagtaacatctattgcccgtggctcgtcgtgaagaccaaccagcctgccgtgctcatcccacgtcgtcagcagcgcgttgccgtattcgtcgctgagagatgccagacgcagcacagcagggtttgcccgggttggtttgtacagacgccacaccgcaccgtcgtcatcggctatcgccacgtcgccattttcattacggcggataatgatgccttcgctgatgctgtaaaacgcgcggtcgacaggcggcagctcgaagctcagctcacgcgcggtttcgtcgaaccaggtggcgttgttttcttccagcgtcagatagctgtcaaagggagttgcccagcccaggccaaacagcccttcgcgggtagtcaggctgttatagctgcgctgccagcgaagcgggaagcgccccggcagcgagaaatcgagctcatcgtcgtcattcagtacctttacgccggtggcggcgtgaaccggatgcgaggagccaaacacggcattcacggccatatcggccagcatcccgccgccggccgccgccagcgcgcagggcatgtttttcagaatcttacccggacgtccgcgcagcagggagagcgcaatcatccccagcgccagtcccggcgttttaccgcttttgatatcgcgaaccgtaagcgtgtcgccgccaatgatcacgttcggggagacatcgtcggaaatggtgccttcgcaggtggtgcgatcttttgcgcgcaccgcaggctgtccgttgataaagacgcttttggagccttccgccagatactgcggcccggagtgtttttcgcacgccaccttgtcttcttccagtggcgaggtccccgccgcggcagaggccacgctcggctgccacatttcgctgccaaattgtccggcggcggaaagcagcatccctgcgtaatcggcaaaactgcccggagactgcggttcaggggaaggggtatccgcaggcgtcaacgttccggccgcgcgcgcggcggggatcgcattcgtcagaacgttattcgaaccggtggtaattttgcccgcaggcgacggagggaaaagcgcattgcccaacccttccgcggcattgctgatatcgtcagtgatccctgccacgttcgccagcacaccgccgacaatgccgctcaacagacagctggatccaattgccgccacgcctgctgccgcggcccccgcaccgaggagtggcgcggcagccgttgccgccagcccaaccgccgcaccgatcaccgcataggcggcaccttccgccacaatgctggtgatgtcagcaaaaatgctggagtgaataatctcgtcgcccttacgggccgcgttgttatcgctcatgccttacacattccggttgtcgtttag

SEQ ID NO: 124979 - DNA, 507 bp, Enterobacter cloacae
atgataacggtagcgggtaatgcgcccggaacagtccgtcgcacgtaccatctgtccggcgtcgttatactcctgatagcggctgtttccggcggcatcgacctcctcaaccacctgaccaaactcatcccggtgcagcagcgtggtctgccccatcgggtcgaccacgcgcttcaggccgtgatgttcgtcgtaccagaaacgggtcgcgctgccgtcggcttcgataatggccgccggaagcgcgcggtgctccagccaggtggtggtacgggtattgccgtcggcgtcgatctcctgcacccggttgcccatttcgtcgtagacaaaggtaacggcattgccgaggggatcgacgcgacgggtcagaagttcgttgtcatcccactcgtagcgccagttttcaccgcgctcgtcaacgtaacggacaatcagattttgcgcgttccagtagtgcttacgcgtctggccgtcgtagtgctcgacggtcgtcagcccggcggctaa

SEQ ID NO: 124980 - DNA, 306 bp, Enterobacter cloacae
atgatagcgagtctgcccttccggcgtggtgcgggcgaccagctggccgcttgtactccaggcgaaggtgtgggtgatggcctccggatgaccggcggcaaaggtgcgcgctatcgtgcgcccgcaggcgtcgtagcaatactgcgaggctacgccatcaagccctgtctcttccagcagcagcgagtccgcgccccatcggaaccggtacgcttcgccgttttcgttttccagggcaaccagacgcccgcggctgtcccagcggcggcgcacctcttccccctgagtattgcgggtggcggttaa

SEQ ID NO: 124981 - DNA, 966 bp, Enterobacter cloacae
gtggaaccagaagatttccggggcatccacgccgtcgatacgcgccagcggatcgtagctgtcctgatcgctgtagacgtaggtcagcggcacatccccgtgcacttcctgcagcaggcggaatccctcccagacaaaacgggtagtgaccggcttgccggctggctgcccgcccagcatctggcgacgcgttttgctgatccgtcgtccgagcggatcgtagcggaagttgacctgcgtctgcggtttgttgcgatcccgcggctggctgatgacctccgtcaggcggtgctcgccgtcgtagcggtagtgccaccgggtctggccgttatccttctccacggtgcggccgtgaatgtcataacgccagcgaatgccgttcagctgcgtcaggcggttatgcgtgaccttctcagcagagccttccagcgggttgccagccgcatcccagcgccactgctcctgtccgggcagcgagccgtcctgaaccagcaggcgcccggcgctgtcgtactgccagcggtaccagctgaacggattatcgtcccgctcttcccgcaccaggttattgcggtaatcgtaatcccagcggcgagaccagcggcgcggcgacgggcgttgggcattgccagtgaagacatcccggcgatgcagtcgaccgagacggtcgtactcgctgcgggtggtcagcagcccctgagtgcggctggtctcccggtggagttcgtcgcgggtgaaatcagagaccgacagcttatcgagggcaataccgagcagatgcccgctgccgtagtagaactgtttcagctcgcggccatcgggcagcgtgacggaggtgcggttgcccagcgcgtcatactcccacgccagctcgccgtgttcgcccgcctcgcgcgtcacgcgaccgagcgcgtcatagtcaaaggcaagctcctgctcggcctcggtggtccacgcgtcggctga

SEQ ID NO: 124982 - DNA, 1185 bp, Enterobacter cloacae
atgacattaatggctggcatttcgccaggtgcaaccgaatggcttcagcgcgcgaggctgatgcgccgggagcagctcagcaagctggcagagctgaacgtgctggtgcacggcattagccaactggtacatatgctacagtgcgagcgcggggcatccaacgtctggctctgttcacagggtaagctctacgcgcctgaatgcaaagccagccgggcgctggtagacgaaaatcttgctgcgctgaatacgatacttggcaagcagtccctcctcccggggagcgccgtctgcgaacgtatcggtaatgcactgcatacgctggacacacttcccgcgctgcgtgacggggtgagtcaacaaaccctgacggccccgcaggccatggaacattactcccgcatgcttcgccatctgctcagtatcgtgccgcaactcaatgacagcattgacgatccgcaaatcgcgggccggtttgtcgccctttacagcctgatgcagggcaaagaactggcgggacaagagcgggccctgggggcgataggcttcacgcagggtttttttgatgacgttacccgccagagactggtagatcgcattgacgggcagcaagcctgctttgagatcttcctctcccacagtcaggctgacgttcagaccactttctcccttaactgccagcccgaccgtgagacggagcaactccggcgcgtggcctgtacccgccagcctgccgcggataatggccataccgcgctggcgtggtttgcgctgcaaacggcgcggctggagcatctgcgcgcgctggaggagacaatcatcgccgatctgatggtcgcggtggatgagcggattcagcgtgacgaggtttatccgcattccgcagatgaactggaggacccgctggcgcattacccggataaacccctgctgcctctggttcgccagcaggcgcgcgagattgagcaactctcccgtcagcttgcgtcgctgcgcgatacgcttgaggagcgaaaaaccattgataaagcaaaaagcgtgctgatgacccaccagaatatgagtgaggagcaggcctggacaacgctgcgcaaaatggcgatggacaagaatcagcgcatggtggatatcgcccgggcgctgcttacggtgaaaagcgtgtggcagataaccccaaaggagtag

SEQ ID NO: 124983 - DNA, 2478 bp, Enterobacter cloacae
atgacagaaacccggacaacatgcccctactgcggggtgggctgcggcgtggtcgcccgcttggaaggcggcgtggtcagcgttcggggagatgaaacccatccggcgaattttggtcgcctgtgcgtgaaaggggccgccctgggggagacaaccgatttacaggggcggcttttgcgcccggtccttgacggtcatgaggtggactggacgcaggcactgggggcggcaggtgaacggctccagcacattatcgacacatgggggccgcaggcggtggcgttctacgcgtccggccagctgttaaccgaggattactacgccgctaacaagctgatgaaggggttcatcggggcggcgaacattgataccaactcccggctctgcatgtcgtcagcggtggtgggttataaacgtgccttcggtgaggacgtggtgccgtgcagttacgaggacgtggagaacagcgatctggtggtactggtgggctcgaatgccgcctggacgcaccccgttctgtaccagcggctggtgcaggcaaagcaaaccaatccgcagatgaaggtggtggtgattgacccgcgtgaaacggctacctgtgatatcgctgacctgcatctggcgctaaaacccggcagcgatgcggggctgtttgtggggttgctcaatgtgatccagggaaccgacgcgtggccgatggcccgcgtggcggcgttttgcgaccttcctgtgcaggatattggtgtgttttatgactggtttgtcaccgcgccacgcgcgatcacgctctacaccatggggatcaaccagtcatcgagcggtagcgacaagtgtaacgccatcatcaacgtccatcttgccagcggaaaattcaaccgcccgggctgcggtccgttttcgctgaccggacagccaaacgccatgggcggacgggaagtgggcgggctggcaaatcagctggcggcgcacatgaactttgagccggacgatctttcgcgggtggcgcgtttctggggaacggaaaggctggcgcagacgcctggcctgatggcggttgaactgttcgatgccattgcccgtggcgaggtgaaggcggtgtggatcatgggcaccaacccagcggtctcgctgccggacagtcacgccgtatgtcaggcgctggcaggctgcccgctggtgattgtttctgaggtcatgaacgataccgacaccagccggttcgcccatatccgttttccggcgctggcctggggggagaaggacggcactgtgaccaattccgagcggcgtatttcgcgccagcgcgcctttctgcctgccccgggagaggcaaaaccggactggtggatcgtcgcgcagattgcaaaacggctggggcacggcgacgcctttgcctggcaacatccgcacgagattttttgcgaacacgcggcgctgacggcctttgaaaatgacggcacgcgggcattgaacctgcatgacctggctgaacttacccgggaagcgtgggagcggctggagccgtatcagtggtcaacgggggattttccgcgccgaaacctggtgccggtcgatccggtccagcacggtgcggcggtcagcacgctgtacccggtgatcctcaataccggacgcatccgcgatcaatggcacaccatgacccggacggggtatgtgtcccggctgatgcagcatatcgcggagccgtttgttgaggtctgcgccagcgatgccgtgcggttctcgttgtgtgatggccagctggcgcggatcagttcgccgcgcggcgtgatggtcgccagagtgcgagtcaaccgcggcatccggcaaggcgaggcgtttgccccgatgcactggaacgccgtgtttgcccgtcagggaaaggtgaatgcgctggtggaagggcgctgcgatccggcgtctggccagccggagagcaaacaaaccgccgttcggatcatgccctggctgcccgtctggcaaggggtgctctatacccacgaacagccggagttaccatcctgggttcactggtggcgtaaagcctcgcatctgacggtatcaggagataaaccgttgctgtcgtgggtcatgaactacgccagcagccggggctggcagttacaggttgctcaaaccggcgaacgcagtagcgtgctggcctggcatgaaggtcagctgatgctcggcttctgggaaggcaccacgttaccggagctggtacacccgatcattgacgctgcttttcgctccccccccacgacgcctgcagagcgtcatgcgctgctgaacgggcagggtgtggaggagacggtggatccgggacgcattatctgtagctgcttcagcgtcggagaaaatgcgattcgggaggcgatagccggagggtgtgaaagcgtcgccgcgctgggggcaacgttacggtgcggcacgaactgtggctcctgcgtttcggagttgaaaggactgtttggataa

SEQ ID NO: 124984 - DNA, 342 bp, Enterobacter cloacae
ttgatgtatttacgagctttactggttttcgccttattgattccctttcacgtgctgcccctgaatttctcttcaaccttcctgcgccttcactgtccggaaagaggacttgtcgaggttattctgcacgtttacgaccatacgcaggaacggtggcgcggccagtttgaaaccggcgcagggcacaagcgcgcgggtgacaccgaaatgatcccgtttgctaatggcgatattcttttccattcggtgtccagcgacgcatttagctatttatatgatggggaaacgaaattcaggcactgcgtaaaacttgacgagcggccggtttatccgtcgttttga

SEQ ID NO: 124985 - DNA, 660 bp, Enterobacter cloacae
atgcgcattgacaatctacagtatttttttgacccactttgcggctggtgttatgccagctcgcccgccctgaattatctggcacaacattacatcgaaaagctcacgttaatgcccagcggtcttttttgtgatgagggtgcccggcacatcaccgcccaatgggcagaatatgcgtggacaaacgatcggcgtatcgcttcgctgaccggtcagccattcagtgagagctatcaccagctcctgagctcaggtgcgcgctttgattcgacgtttatgaaccgggcacttacggcttttcatgaaatcagcccggcggcagaggcagggctgcttcgtgcactgcaacatgcccgctatgtactggggcgtgataccgcgcaaagtgatgtggtggaagagatcggtatcgcctgggctcgggaaaataacgttgacctcaaccctaatgactttgccggccggcttgatgccgataacgcgcttcgctgcctgacggacgacaggatcgctgacgtaaagcgtcttatgaatcaaaaaggtttcagcggggttccgctgctgttggttacggttgacagcactgagcacattatcagcggccacgatctctatggtggagcaaaaagcatcggcgaggcgctggcaaagcttgcgtag

SEQ ID NO: 124986 - DNA, 1257 bp, Enterobacter cloacae
gtggtgtacttggattatttattaacattcatagaaagcaatccggctctggccattggatttaatcttattctgctggtcatctccggtttctttgcgcacctgatgtgcaaattcctgctcataaaaatcgttcgtaaggtcttcttttccagccataaacaggatgtcccgctggaaaaagatcgtcgtattgccgagaagctgtccaatttcattccggttattatcgtttattacgtcctgcagtttatgcccaatatgccggcatcgctggtgacggcaataaataccatctgtgggattttattctttatttttctgtcggttttcttcaatgagatgctggatattgtcaacagctcttatttacgcaagacgaagcgtaaaaatcactctatcaaaggctatattcagatagggaaaatatttatccacatcatcgctgcgatcatgatccttgccgtcatgtcgaataaatcccctgcgatcattatttccagcctcggggccgtagcagccgtactgatgttagtctttcagcacaccctgctttcgctcgtggccaatatccagctttcgtcaaatgatgtcctgcagttgggggactggattgaaatgcccgataagaacctgagtggcgaagtgaccgacatagcgctgcacactattaccatccgtaactgggataacacaatctcgcgtatcccgaccaaaaacttcctgaccgaaacgtataccaactggcaggccatgttttcgtcaggggcgcgccggattatgcgcagcaccactatcgatcagcactccgttaaattcctcactcaggaaacgctggccccgatgctggccctgcgcggcacgaatgaaccgctggcaaagctcatcgacgggcgtgatcccatgggcgtaccggacagttggtttatggataatggcctgacaaatttaacgctttttcggcattacctgatggcatggctcgccgatcggcctgatattatcaaagatatgtatattgtcgtgcgaacgctaaagcctacgccgtcgggtattcccctggaaatttattgttttacctcatccgtactgtggatggagtatgaaaatacccagtcagcgatatttgaatacatcaccgctgtcgccggtcaattctcgctccgcttatatcagcatccggctggtcatgatttctggcgtttatcacaggaatacagccttcgggaccgcatcccgcctccgggtgaaggataa

SEQ ID NO: 124987 - DNA, 336 bp, Enterobacter cloacae
atgaagctggcggaggagctcatctacaaaggggaatcccatacggcagaatggtacgagcagcacgggctggtggatgtgctgtatgaacccgggcaaagctacgtttcggtcaggaccttcatcgacacattgcggccaaaactgaacggcgtaagagccatgctgcgtgctcgtacgcgcgttctgcagttgccacgcagtgagctgatggatattaccgaagactgggtcgatgccgcattctgccttgagccgaaagatatcgcctacatggagcgtctggtgatgttgcaaaaccgccatcatgcggcgggcttacgcaaggccagctag

SEQ ID NO: 124988 - DNA, 1992 bp, Enterobacter cloacae
atgatcgacgatcttgagcagaatttgctgtttcgttacatgggtactcacagtccgtggtggcgattgtcggcagacagcaacgctctgcaccttgccgccagcgaaaatgccgatgcgactcaggtggtgacgctggacgatgaacaagccacgttgatccgccagttaacggtaattacctccagcatttcaatgaacctctccctgtatggcgaagaggttcccgtgcatcttgtcggccgcaaaatcacccgaaacgagtgggccggcacggcatcggcctggaacgataccccctccgtagcacgcgatctcgctcaaggactctccttcgcggaacaggtggtttcggaagcgaattccgtcattgtgattctcgatcagcacggcaatattcagcgttttaatcgcctgagcgaagagtataccggtctgaaagagcaggaagtgatcggtcagaacgtgttcaaattgtttatgagtcgcagcgaggcggcagcctcgaagcgaaatatcaccggtttcttccgtaacggcagctcctacgaagttgaacgctggatcaagacgcggaaaggacaacgcttgtttctgttcagaaacaaattcgttcacagcggcagcggtaaaaacgaaatatttcttatttgctccggcaccgacattaccgaggaacgtcgggcgcaggagcgcctgcgcgtgctggccaataccgataccatcaccggtttacccaaccgcaatgccatccacgaacagatctcagacgccatcaaccatcggggcgaaacgcaggttggcgtggtgtatcttgacctggataacttcaaaaaggtcaacgatgcctacgggcatatgtttggcgatcagctcttacaggcggttgcactcgccattctgagttgccttgacgaggggcaggtcctggcccggctcggcggcgatgagtttatcgtgatggccacgaatacgtctcagggctcgctggaagcgatggcgtcgcgcattctgacccgcctgcgccagccgttcagaatcgggctgattgagatatataccggctgttctttggggatcgccctcgcgccgcagcacgggaacgatcgggaaagtgtgattcgcaatgccgatacggccatgtacaccgccaaggaaaatggcaggggtaagttctgcgtcttctcccctgaaatgaaccagcgcgtatttgagtatctttggctggacaccaatctgcgtaaagcgctggataacgatcagcttctgattcactaccagcctaaaatgacctggcgcggtgaggtcagaagtcttgaggcgctggtccgctggcagtcgccggagcgcggcttgatcccaccgctggaatttatctcttatgccgaagagtccggtttgattgtgccactggggcgctgggtgatgctcgacgtggttcgtcaggtggcgaaatggcgtgacaaggggattaacctgcgcgtggccgtgaacgtctctgcacgtcagcttgccgaccagacgattttcagcgatttaaagcaggcgcttaaggatctgcattttgagtactgccctatcgacgtcgagttaacagagagctgtctcatcgaaaacgaagagctggcgctttcggtgatccagcaattcagccgactcggggcacaaatacatctggatgactttggtacgggctactcttccctttcccagctggcgcgttttcctattgacgccattaaactcgatcaatcttttgtcagagatattcataagcagtccatctcccagtctctggtacgcgccattgtcgcagtggcacaggccctgaatctgcaggtgatcgccgagggggtggagaatgcaaaagaagacgcctttctgactaagaatggcgtcaacgaacggcagggtttcctttttgctaagccgatgcccgcagccgcattcgagcgatggctaaaacgctatcaggcgcgacaacagcgctag

SEQ ID NO: 124989 - DNA, 987 bp, Enterobacter cloacae
atggaacaacgccgtttttccggcaaaggccactggtatcacgaaacccagtcaaaccacgcgcagtcggatgcgctgcccctggtgcccgaagccgctaacgttgacgatcgttttttgctcgatttagccctgcccgatgagattgtcgccgcctgtaccggctggcttgcccctgccagagccttatgccatcagctgtttcccctctcacttcccgtcaatcgtctgcgaacgctcagcgcctatgaccggttaagtaccgcgttgacggttgcgcaggcctgtggcgttcagcggctatgcaaccattatgccgcccttcttgctccgctgccgggtcctgactcctcccgcgaaagtaaccggcggctggcgcaaatcacgcagtatgcccgtcagctcgccagctcaccggatgtcattgatgacaaggcgcgaaaccagcttgatgaggtgggtctctctacctatgacattgtggtgattaaccagatcatcggctttatcggttttcaggcgcgcgtggttgcggtctttcaggctctgcttggccatcccgttcgctggttgccgggccatcatattcagccgcacgccctgccagcgtgcgccggtaggtggatagcgcttcttcccgtggtcgagcttcgctatgcgagtgcgcatcagcttgagtccctctcccgctggcaggcagaacctgcgcttgaggcgctgacacccgtcctgtgccatgaaccgaccttgctcgacctgacgggagagatcctgataaacagccgggaagagagtgcgctttccccgccgtcgcttttggcagcagtcgacttgctgacacgctcgccggaccgctttagtgccgcgcagtttaccccactcatggaagaaggactgactgtcgcccaggcgatcaaccgcctgtctcaaagcgcgtttgagggctggcttaatcgactaaaagtcgcggctggcaaagcggaataa

SEQ ID NO: 124990 - DNA, 3063 bp, Enterobacter cloacae
gtggcgctttttattgtcctgacgggtgtcctgtctataccccggttgccggttgcgcagtatccggcggtggcaccgccggggatcattatttctgtcacttatccgggggccagccccgatatcatgaatacgtccgtggtgtcgctcatcgagcgtgaaatatcgggcgtggataatttgctctatttcgaatcatccagcgacacaaccggttctgcatctattaccgtgacctttaagcccggcacagacattaagctggcacagatggatcttcagaaccagatcaagattgtagagccacgtttgccacaggcggtcaggcaaaatggcatcaacgtcgaggcggccaattccggatttttaatgatggtggggttgaagtccacaaccggcaaatttgaagaggcggatttaagcgattattttgcccgcaacgtcagcgacgaactacgccgtgtgccgggagtcggaaaagtccagctgtttggtggcgaaaaagcgctgcgcatctggctggatcccatgcagctgcatagttacgggctttcggtgagcgatgttcttaccgctgtaggtcagcaaaatgcccttgtttcgccggggaaaacgggagacgaaccggcaactgcaggacaaggcgtaacctatcccattaccgtgaaagggcaactcacttctgtagaggctttcagaaacattacccttaaatcagatgcgtctggcgcaaggctgaaactgtccgacgttgcgcggattgagtctggcctgcaaagttacgctttcggtatccgtgaaaatggggtgccggcaacggctgcggcaatccagttgtcaccgggcgccaatgcgatgagcacggcttcaggggtacgtgcacgtatcgacgaactttctcaggtattgccggaagggatggcgtttacggttcccttcgataccgcaccgtttgtaaagctgtccatcatgaaggtggtgcaaacctttgtggaagcgatggtccttgtctttctcgttatgctgctgtttttacataagatacgttgtacgcttatccccgcgattgtggcccccgtcgcgctgctgggcaccttcacagtgatgctattgagtggatactcgatcaatatcctgaccatgttcggcatggtgctggcgatagggattatcgtggatgacgccattgtggtcgtggagaacgttgaacggctgatggaagaaaaaaacctttctccgcgcgacgctacccgggaggccatggccgaaatcaccccggcaattatcgggatcacgctggtacttaccgctgtctttatacccatgggttttgctgatgggtccgtaggcattatttatcgacaattttgtatttccatggcggtatccatactgttgtcggcatttcttgccctcacgctgactcccgcgctttgtgcgacgttgcttaagccccacagcgcgcaaaaacacggtggcggcaggttcgcggtaggctttaacgcccgttttcataccctgacgacatggtacgaatccggcctgggcgcggttctgaaacgaaccggccgaatgctgcttctgtatgttgcgctttgtgctgcgctattttttggattgtcttcgctgccctcatcctttctgccggacgaagatcagggctattttatgtcctctattcagcttccctctgatgccacaatgcagcgcaccctgaaagtcgtaaaaacatttgaacaggaaattgcgacccgaccggatattgaaagcaacattatgatcctgggttttgggttttcaggatcagggccgaattcggccatggcattcaccacgctgaaggactggaaagaaaggcacggctctacagccgaggatgaagccgaccatatgcaggccagtatggcaaacgtctctgatgccgtaacgatgagcctgctcccgcctgccatttcggatatgggcacctcgtcgggattcacctggtacgtgcaggacagagcgggactgggctacgaggcgttaaagcaggcggccgatacgctggtgctgaaagcgaatcaacgtcctgaactgagtggcgtgtatatcgacggcctgccggaaggcactagcctggcgcttcagattgaccgggaaaaagcggaagctctgggcgtctcatttgatgaaatcaaccagacgctctccgtcaccatgggttcaaactacgttaatgactacacgaacaatgggcgtgttcagcaggtgattatccaggccgatgcgccttaccgaatgcaacctgagcagatcctgaaattatccgttaaaaaccaccaggggcagagggtgccagtgtcaacgtttgcgacgctctcctggaacgttgcaccgcagcaactaacgcgttatcaggggtattctgctatccgcattatcggcagtgcggccacaggtgaatccagcggtaccgcaatgaaagttatggagaatttgtccagggatttacctcagggcttggcgggagaatgggccgggagctcattgcaggaaataaaatcccagtcgcagctcccgggtctgatcgtcctgtcgattctggtggtgtttatggtgctcgctgccctgtatgagagctggtcaataccttttgccgtcatgctggtggtgccattgggactgatcggtgcagttatggccgtgtttgttgccggcatgacgaatgatgttttcttcaaggtcggccttatcaccctgataggcctgtctgccaagaacgccatattgattgtggagtttgccagacaattgcatcgtgaagggaaccctctggtggcggcaacgatacaggccgcaagccagcgcctgcgccctattctgatgacatcgttagtctttacgttgggagtggttcccttaatgctggccagtggcgcaagtgacagcacacaacacgccatcggcaccggtgtctttggcggcatgattagcggtacgcttctcgcgatcttcttcgtcccggttttctttattgtcatcgcgcgttttatagaaagcgccaggaaagggtcactatcgtga

SEQ ID NO: 124991 - DNA, 864 bp, Enterobacter cloacae
atgtactcacttaaaaaactcgcggtacgtcaccggaaaaaactggttgtgacttttttccttgtcgtggctgaaaacgtaatgtttttactgtatcccgttctggcaggcatcgcgattaatgccattcttgcgggtaagacacttaacgccgcactgtacggactgatggtgctctgtatgtggatcataggtgcgacaagacggagtgttgatacacgaacgtttgcccgtatttatgccgggcttgcggtctccgttgtgctttcacagcggaaataccagcttaaccattcggctatcgccgccagggtcacactctcgcgcgagtatgtggatttctttgaaatgcacttgcccctgcttattacctcgctgagttctctctttggtgcggcaatcatgctgttatttatcgaattctgggccggcatcatgtgctgtgcaatcgtcatcattctgatgggatttgtctcggaatatacccgtaaaaatgaatggttattcatgcgcctgaataatcgtcttgagaaagaagttgattatgttcataaggcaggcaccgccacccttcaccgacattacgtcacgcttgcacgtttacgcattgcgttatcggaccgggaggcgtggggctatttatgggtgggtatactcgttgccctgctttttacgctgaccattatctggatgacgcaatcggctggcatcaccgccggacatatttattccgtgatgacatacatgtggatgttcgcgacaagtctcgatgacgccccgcagcttcttgagaaattttctcagctcagggatatcggtaaacgcgtatcagccgatgacgaaattcacgtatctggacgttaa

SEQ ID NO: 124992 - DNA, 411 bp, Enterobacter cloacae
atgaatctggctgagataatgaacatggaattttcgaaatatttctctactaagaaaatcggtatatatacgctgttcctgctgctgtcgtggggattactttatacctggctggtgttgatgcataaaatggatgaaaaagttgccgcgacgctgccctcctctcccattatttatggttgcatcgctttgtcggttgtctctctgataatacaaaacaaagcaggcgcattcactgaattacttgtcatcgccttctggctaatggtgatttttatatatctcataattacgttcactgtgctgctgaacgctacgccagatttcgacgatttggtgttttattacgagtgttatttaattctttttttctgcggttcgccgttgtacctcattatgagaatgatttga

SEQ ID NO: 124993 - DNA, 705 bp, Enterobacter cloacae
atgaacaaaaatactctaatccttgttgttgaagatgaagacgacattgctgaaatactgatgagttacttagagcgttcagggatgaaaacgctgagggccagacagggcgagcaggcgatagcgcttaatcgccttcataaaccggatctcatcttgctggacattcatctgcccgtatgcgacggctggagcgtcctcacgacgcttcgtcaggaaagttccgtgcccgtcattatggtttctgccctcgatcaggacgtagataaactcatggggctgaggcttggcgcagatgattacgttatcaagccttttaacccttctgaagttgtcgcgcgggttgaagcggtgctgcgcagaaccaaacccgctattcagcaggcgggggccgcgcctctcaggacgccttttattacggtctatccggatgatttctacgttgaggttaccgtgggacctgaagtgatctccccggtgttaacgacgacggaatttaagcttcttacgtatctggtcagatatccgcgaaaggtctgctcccgcgaagagttactcaacgcatgtcttcctgaaggtgataccctcgacagaacagtagatagccatatgagcaagctgcgtaaaaaacttgagctcgcggggctttacggcgtccctgagagcatcaggggcatgggttaccggcttggggagaaaaaatga

SEQ ID NO: 124994 - DNA, 1065 bp, Enterobacter cloacae
atgaacagagagtctgtcctgagtcgtcagatcttaacgtacatgatgttgctgacgtttacgatcattgccatttcaatactgggctcctggtttttttactcctttattctggatcacctccccggcggcgctgcggcgggggaagacgagcagatgaccctgtgggactgggtgtggatcgggacagcaacaacaatcagtctgatattcgcggtttttttaacgatcaaactttcctcgcggatactcaccccgctaaacgcggtcgcgtccagcctgaaaaaaatttcgcagggccaactggatgcccgggcttattgtgccagttccaggctgggagagatcaatcacctggtcatggatttcaatgaaatggcggaaaaactgcagacgctggatatgcagcgtaaatcctggaatgccgccattgcccatgaactcagaaccccggtcacgattttacgcgggcggcttcagggtctggtagacggcgtttttgaaccggatccggtgctttttaataatcttctcaggcagaccgaagggttaacccgcctgattgaagatctacgggttgtcagctctgacggtggggcgggttatacgttgtctaaatccagaacggatctcaaagggacaatacaggacgcgcttgacacgttcatgcccgaatttaaacgtaatcagtttacgataaagacagcgttgagggagcagcgttgtgtgttcgatccgttgcgtatcaaccagtgtctggccgttctgtttgacaacgcattacactattcaacctcgcggacgctcattgtcaaaaatggcgtgtctgataaaggcaattatattcttattcaggatggcggaccgggcatccctgaggccttccacgattttttatttcagccttttcagcgggataatggcgccagggcattgaatcccgaagggtgtggtttaggcttatcggtggtaaaagccatcatgctggcccatggtggcgatgtcacttataccttatcaaagcaaaaccactcaatatttaaactcacctggcccgacccgtga

SEQ ID NO: 124995 - DNA, 942 bp, Enterobacter cloacae
atgatcaccgccacttatgttctaaaatacactgagtatctcatcagaaaatgtcgttcatttttaatgacggacctgcacttccatactatgaggctcaagagaacaaccgggaaaacccctgacattaaatcaccctcgacgttgagtgaaaaaatatgccatcgtctggtctatgaccataataacgtctatacaatgcttgccgataaactcgccgttcgggaatacgtttcttccagaactacgcgcgtgaaaacggtgccattacttggtgtttacaccaggacgtcgcaaattgatttttcagtacttcctgacaaattcgtccttaagtgcaaccatgacagtggtagcacaataatatgtaccgacaaagcgcactttaatgacagggaagcctgtaaaaaactgagcctcgcgttaaagaaaaatctgtactacaccacgcgcgaatggcagtacaaaaacattacgccgagtatactttgcgagccatttgtcgatctcttcgacgatgctgacaggaatacaacgcccgaaatgttgaggatccattgctttcatggcgttgcccactatgttgaagcggattttacggatgataacgggaaagggtttatcaacgtttatgacaggcactggaacttacaacctttccagatggaatatccgaatacttcagcagatcctggcgaaccgcttttattccgagaagcattgttggcctcccaggagctggcgcagggaattgattactgccgcgttgatcttatgctaaaaaaagatgaaatctatttcagtgaaataaccctaagcccgagacgcggtaaactgacgattaccccacaggaatgggatgctaagctaggacaaatatggcatttatcgccagcaagcacatttaatctgccgctgaaactcacgggtcgggccaggtga

SEQ ID NO: 124996 - DNA, 807 bp, Enterobacter cloacae
atggtcgaaaccttactggaagtccgcaacctgagtaagacctttcgctatcgtacggggctgtttcatcgtcagactgtcgaggcggtaaagccgctaagttttaccctgcgtgaaaaacagacgctggcgattattggcgaaaacggctccgggaaatcgacgctggcgaagatgcttgccggcatggtagagcctaccgctggagaagtgttgattgacgatcatcctctgtcgtttggggattactctttccgcagccagcgtatccgcatgatcttccaggatccgtcaacctcgctcaatccccgccagcgtatttcgcagattctagattttcctctgcgtttgaacaccgagctggagcccgaggcgcgacgcaagcgcgtctttgaaaccctgcgcatggtgggactgttaccggatcacgaaagctactatccgcacatgctggcccccggccagaaacagcgcctgggtctggcgcgcgcattaattttgcgcccgaaggtaatcattgccgacgaagcgcttgcctcactggatatgtcgatgcgttcgcaactgattaacctgatgctggagttgcaggaaaaacagggtatctcctatatctacgttacccaacatctcggaatgatgaagcacatcagcgaccaggtgatggtgatgcaccagggggaagttgtcgagcgtggcagcacggcggatgtgatggcctctccgcttcatgagctgacgaaacgactgattgccggtcatttcggtgaagcgctgaccgccgatgcgtggagaaaggaccgctaa

SEQ ID NO: 124997 - DNA, 1086 bp, Enterobacter cloacae
atgcataacacaaacgttaccgttgctgaccagaacaccgttattaactccaacgtggctttgttcgattcccagtatctgaatgccatcagcacgttcgcgcagattatggcccagggcaccgctactgttcctaagcacctgcagggcaaccaggccgactgcatggctgtagcgatgcaagcggcacagtggcagatgaatccctttgccgtggcgcagaagacgcacctgattaacggtgtgctcgggtatgaagcgcagctcgttaatgccgtcatttcacgcagcggcgtgctggccagccggtttgaatatgaatggtatgggccatgggaaaaggtcgttggaaaattccatatccgcaaaggcgacaaaggcgagtaccgcgtcccgggctggaccctggctgacgaagccggaatcggcatcatcatccgcgcaacgcttaaaggtgaagatcagccgagagaactcgatttgctgctggctcaggcccgtacccgaaattctactctctgggctgacgacccacgccagcaactggcgtacctggccgtcaaacgctgggcgagactgttctgcccggatgtgattctgggtgtatataccccggatgaactcgatgatcgccgtgaagaacgagaggtaaatccggcaccggcgcagcacgtaagcctagcagatatttcaggtgagaacgtcaccccaactcaaacagctcaggaatcagctcaaaacatcgatgcacttgctgatgatttccgcgaccgcatcgaggcggcccaggatgtcgatagtgcaaaagctctacgcgcagatatcgaaaccgtcaaagcaacgctaggttccgccctgtttaccgagcttaagaacaaagcagtgaagcgctactacctggttgatgctcgcaataaggtggaagcggcgatcaactccctgccatctccggatgaacacgacgcggcagaacgctttggcgaagctgaacgcgtgctggcatcttcaaagcgtcacctgggcgatgaactgcatgagcagttcagcatcaccctggcggatatgaaaccggaatacgtgaactaa

SEQ ID NO: 124998 - DNA, 3138 bp, Enterobacter cloacae
atggaatttttctatgtagttaaggctacgcagaaatccggcaaagaagacgcagtaatttggttcactgcgaaatctgaagcccgtgccaacctgcagctcgatgttgagctggaagatgctggtattgaaaccggacgcggtaaggattacgccaaaccggttcgcacagattttccagtttataacgacctgccggaagaaagcaccgtggattacacctggtgcaaacgctatacactgcaggacgatggacgcacctggctgccaaaggctggtgctgagttgactggaccagtggacaccactaccgcaccggaaatgaccgttaaagtcgaaactaccgtcgagagtgtcccccttgaaaaccgcactccagcggtccgttttgctgtccacctgaccagcgacaaataccagtcacacatcactaaagagcagcagctggctgccagcgaaatgtcactggatgaaggcaacacctatctccagaacctgctgctggcgaaaaacgacatccctgaagttgccgaactcagcctgaacgctgagtggaaactggttcaggcgattaagcaggtatttgcgccagatgaagagcacgaagtaaagctacttgccgctttcatggccgactggttgagaatagatgcaggtgaccgcaatgagttagttagagagtggagaagcggaaagcttactctgctcagatcagaaagtgccagcgagggcggcgttacatccggtcaggttctggaacctgataacggaatccagattgacgagaatgatgacgaagccacacgttatccagtcgttcgtatgcccttccgcaagcaactactcgcccagttcaccggcgatgaactgcgccaccacctaacccgcaaagaatacgaaggtatctgcgcgctagagatggacactgataacagctatgtccagaacctgttgctggcggcagaaaactgcgaagaggttaagggttacgacaccaaagacctgtggcgctataccgacgccattcgcaaggtgttcagccaggataagcgtcacgaactcgctttggttctccgtttcaccagaatctgggcggcgactgattatatcgatcgcggcattctcgttcgcgaatggggtaccggtaatcgcatcagtaatgttcagcgcactgattctgggaccaatgcagacggtggctatgtaacggatcgaggcgaaggcgcgcatcacactctggacaccctcgatcttgagatcgcatgcgccctactgcctatggacttccaccacttcgaaattccttcgagcgtgttacgacgtgccaaagaaatcgtggcgaagaaagaagaaccatggaaatcatggagcgccatcctgcgtaatcagcccggcgtactggcggtgaaccgtgcggcaatcttcaatcttatccgcatcgcgccagaaaacatccaccacacgccagcggctcatcttgagtttgtgaataaaaccatgacggctgaatttaactctgctgtggagctactgccgctgcctactcctgaagttgagactgaagccccagctgaacaaccgcaggttgaaaatctccgcagcggcgtgttctccatcgatggtctgatggttggaaataccgccccggtcatcgatatcccctcaaatgaagtcgaaaaaacggaaaacacagcggagaccaccagcgatgtgcagatggaaacggctaagccagagaaagacgaagatgttggttcggtaccaccgagcgaaagcactgatgcagctaattcgcagacagattccgtaacgttggaagaacagcaagcagaaccggtaattgagtacccggcttatttcgagcctggccgctacgaaggcctaccgaatgacgtttatcacgcagcaaacggtattagctcaacccaggtgaaagatgcccgcgtcagcctgatgtacttcaacgcacgccatgtggctaaaactatcccgcgcacagcatctaaagtgctggacatggggaacctggtgcacgcccttgcactgcagccggaaaccctcgatgcagagttcagcgtagaacctgagatccctgaagatgcgtttacgaccaccgctactctgcgtgagttcatcgacgggtacaacgccagcctgccggcgctgctaagcgctgatgagattaaagcgttgcttgaagaacataacgcttcccttcccgctccagtgccgcttggcgcaagcctggaagaaacggctcaaagctatatggctctccctgctgagtaccagcgtattgaagaaggccagaagcaaacggcaacggcaatgaaggcatgtatcaaagagtacaacgccactctgccgtcgccggttaaaaccagcggtagccgtgatgcgctacttgagcaattagcaattatcaatcctgacctggtggcgcaagaagcgcagaaaccaaccccactgaaagtgtctggtaccaaagcagacatgatccaggcagttaaatcagttaagcccgatgccgtgttcgccgacgaactgctggatgcctggcgcgacaaccctggcgaaaagattctggttacccgccagcaactggccacagcgcgtgcaattcagtccgcactactggcgcacccgaccgcgggcatgctgctgacacatccaagccgcgccgttgaagtgagctatttcggtttcgacgacgaaaccggattagaagtgcgtgtacgcccggatctcgagattgaactggacggcgtgcgaattggcgccgacctgaaaaccatcagtatgtggaacgtgaagcaggaaagcctgcgcgccaggttgcaccgggaaatcatagaccgtgactatcacctcagcgcggctatgtattgcgagaccgcggcgctggaccagttcttctggattttcgtcaacaaagacgagaactaccactggatcgccatcattgaggcgtccaccgaactactggaactgggcatgctcgagtaccggaaaacgatgcgcgccatcgccacgggtttcgacacgggcgagtggccagcgccgatcactaccgattacaccgatgaactgaacgacttcgacctgcgccgcctcgaagtgctgcgcgctcaggcttaa

SEQ ID NO: 124999 - DNA, 492 bp, Enterobacter cloacae
atgaaggaatcactaaaggtagcaattgaaaacttggcaatactgtcagttcatttacgtaatgctaagattgaaatggatgattcatataatttccttaacattaattctattccaaggaagaatcagtcgtttagaaatgttgtaaaaattgagttaatcgaaatggttcgtgaagatgatccgaacgataaaaaactcttttattcatttctttatgatgtgggcgctcgccttgtcacacctgaaagtgatgatgatggcaaagatgatgatgcgatacttactattgagtcttgcttcgaagctatttactcagcaaaaaaagagcttggagaagaagaacttgaagcatttggtgctaataatgtcggttatcatgtttggccgtactggagagaatatcttcaatcaacatgctccaggttaggagttaatcctataagaactcctttttatgacatgaagaagtcagacatccgaaaagactag

SEQ ID NO: 125000 - DNA, 453 bp, Enterobacter cloacae
atgagaaatgacagtctttatcatactgaagttgaaatgcattctgaagaacacaagcgcctctatgcagccgaagaattaacgtttaatgtcactgaagatatcctgatccaaatggaagacagaggtgtatctaaatcggatcttgcagagaagctcggaaaaacaaaagcttacatctcacaattgctaagtggttctagaaacatgactttacgaacccttgcagatatttgttttgctttggatattaaaccaactgtttgttttgaagaagaagcaaccacctctatagaatcaaaacctatactgttgaaagaaacttgtggctggcaagatgttgttaatgaattcaatggctttactgacaccctgcttcagggaactagtacagtaaataaatccaacgttattgtaagggcccagaaagagttctggagcaaagctgcataa

SEQ ID NO: 125001 - DNA, 438 bp, Enterobacter cloacae
atgtcaagcccctggcgaatttccaagtttaagcaaaaggcttattctttaactatgaaagagaaaatcttacttaatccgacgcttgttcaacgcttgtccgaattgaacgggcgaggtatgactaaatccgatatggcaagggttgctggtgtaacaccgcaatctgttaacggctggttcaaaaaaggggttataagtaaaaaatcagcgcttgcagttgctgatgctgctggagtatcagtaccttggctgcttggtgagaatgtagatgaaaaagaagggctcaaaccggacgaacagagaatgttagagctctatagacaacttccagaagaagaacagaaaaatatgttgcgtattttttcacttcgccttaaagagctcgacgagatgtacgaaaagtacatgaaaggacggatccgttcacagcagtga

SEQ ID NO: 125002 - DNA, 858 bp, Enterobacter cloacae
atggccgacctgtcgaacgggtataccaaggtcgctaacgagattcaacagcttaagccccgtctgagaatgtcaggccgagaatggcagtgttttgaagcggtgatctggcttacctacggctggaacaagaaacaggaccgcgttacaaacacggttatcgctgagcttacagggctgagtgattcccacgtttctgatgcgctcaagtcactcgcagaacgcaaaattatcttcagtcagaagcagggcgtgatgaaaacggtcggtataaatactgacctttcagcctggattttagacaaaccgaaagcgggaaaagtcttcccgaaatcgggaaaagtgttaccgaaaacgggaaaaaccttcccggaaacggtagacacccaagactataacaagaacaatattaaaagatcctcgtctcggaattctgacgaatcccgaaaccagaaaactcaaaagtttctctcgcgccatccagaagctgccgccgggatatacacacgggcaggtaaatcatggggatccgctgacgacctcaaggccgcacgctggatttacgacaggcttctcactctcaacgcatcgctatccgaaccaaactgggctgaatgggcaaacaccatcaggttgatgcgtgtccaggacaagcgtactcactacgaaatctgtgacctgtttcagtgggccaaccgggacgagttctggagagacaacatcctgagcccttcgagtctgcgcaagcagtgggatcagctcaccaccaaacggctgcgagctaccggggcggtaaaaccatcccggggcggcattgacctgcataataccgactggattgatggagtgctggaatga

SEQ ID NO: 125003 - DNA, 474 bp, Enterobacter cloacae
atgacccttaatgatatatctcaggctgtttatgaaaacagcagtaatcatagtcttgatgaggagttaactcaggccatgcacgactctggttatcttgatcatattgacattgacaggaaagtaaattcattcagatacgactatgaccagtttaaattgatgttaaataccacatcaagtcaggaagtcatgtttgaggtgttatcgggtgaatttcaacaggtatgcttgggattttcagcgagacttaagtcttatataaatggaagagaaaatcatcgtaaatatagcctccagtatactgaggctgaactgcttatagccagaacgatgctgcagtgtctgtatgatagaattgttatcatagaaaaatgcacagcaaataaaaacttttccggattcaaagatattaataaagtttgcaatgagatgcttaaattaaatcacacatacaatctggaaatgctgtaa

SEQ ID NO: 125004 - DNA, 798 bp, Enterobacter cloacae
ttgtcaagtaatcgtgatgatttctcaccatcaaccaaaagaacccttgcggatcgtgttggctggatttgctcatttccaaattgtggacaaagcactttaggcccagcttcgcagtcagttgaggataaaataaataatggtatagcggctcatatctgcgcagcttcgccaggaggaccgagatatgatccatctatgacccctgaaatgcgtaaatctatcagtaatggcatttggatgtgccgtaatcatggtagtttagtcgatgcagatcatagtcagtatactgtcgaaacgctgaaagcttggaaaaatgatgcagaatcagcagcctacgccagactttctcagcccgcacagcatctacaagtcgggtattcctctcgtgaccagaatatactaaaagtctattgcgatctattcaattacggatacctacagcaactcaagggcgaactatttagagcaaaagtacctaccagtattcttgatcctttatatagctgcatgggtttcataggcaacccaaattataaattcaatgcagttgacctagaatctttaaggcaacaattaaatcaaaaggttattgattttaatcaacactttggtgcacagtcagcagggaatataggttattatgattatattgatttaaatataatcaggcagagaaacccagatagtgtagaatactatgtgaaatatattgaaggcacacaactgcttgcctatgaaatattcgaagtggcactaaaactattgactatccaagctgatactggaaacacctaa

SEQ ID NO: 125005 - DNA, 954 bp, Enterobacter cloacae
atgagattaaaatatgcagcactcatactcgccgttgccattacaggctgtgatgataaaaaagacgtgatcggttgttcttctgaaatgacccagtcagcgctcatggatttattaaaaaaatctgcttatgaaggactctctgaacaggtcgacaaatatcctgacgtcacaaatcagaccaaacgaagcgccctggacaagataaaactggtcatctctgaaatctccacaacctcaagtgacacgggtagcacaatgaaaacgtgtgaaggtactgtgacgatgaccctacctgcgaatgagtacgctcagctttctgatgcttatagaaaaaactttaaccgtaatcttgataagcaaatggaaagcctgtctttagataacaacgcaaacagcttttcaaaacgcatctcctacacagcacaggcgaccgacgatcagaaaaacgttttcgtaaaagcctcctctgataatccgatatctgtgggtgccgctgcacttacatcgctttcaattatcaacccgatcgttgaacagcagaagatccaacaggctaaggatgcccagcagagccaaattgaagcgcaacagcaggctcaactcagggcgcagcaacaggcccagtatgaggcagagcagcaaattgagagacagacacagctgcaggcacaagaaaaggcagaacagcaggtccaacagcaaaatactgggagccttgatcagtcccgaatggcctttgcgaatgccgactccgatttgaataccgcctggagcacattaacgccgacaaagaaaaaggagttactgccttctcagcgccagtggatcaaaacaaaggatgctatgtgtggcaaagtttcaatgcagggaactgattcagaagttaagaaaatggtcgactgtcagacgcaaatgaccctttcaaggactgctttcatcagaacacaataa

SEQ ID NO: 125006 - DNA, 603 bp, Enterobacter cloacae
atggcgctagaattacaacttattaaacaccactcaggaatactgatcccggctacgcccgagaccagcgatatcctgcaatctaaaacccggctcggcgatgtccttgttgccgagttccggcgggtacgaaacccagcatttcaccggcgctttttcgctcttctcaatctcggttttgaatactgggaaccaaccggcggggctatctcgagtaacgaacggaagctgattaccggctacgccaagttcctggcttcatatggcgggaatgagggcgcacttatcgatgctgctgagcagtatcttgagcaggtagcttatcggcgcgtcacgaatggcattagcctgtgtaaatccttcgatgcttaccgctcatgggtgatcgttgaggcagggcactttgatgccattcagcttcctgacggcacactcaaaaagcatcctcgtagcatctcgtttgccaacatggacgagctcgagtttcaacaactctttaaagctgcgctcgatgtactttggcgctgggtcctgtcccgttcattccgcagccgtgacgaggccgaaaacgtcgccgcgcagctgcttggctttgcggggtga

SEQ ID NO: 125007 - DNA, 177 bp, Enterobacter cloacae
atgcccgaccgccgacgccgcgatctggataacctgcagaaagctgcatttgacgctttgaccaaggcgggactctggctggatgacagccaggtaatcgactatcgcgttgtgaaaatgcctgtcgttaagggcgggaaattagaactcaccattaccgagctggagaccgcatga

SEQ ID NO: 125008 - DNA, 834 bp, Enterobacter cloacae
atgaatcttgaaagcaccctcaaatatcacttcgctaaatcgacaatgattagcgattctccgcgcgctacggcgtcaggctcattaagcggaacggatatcatggccgctatgggcatgacgcaggaacgggccgccatgggttacagcgcttttctcgggaagatggggataagcaacaatgatcgggagagggcgattgaattgctggcccagtacgcgctgaccaagtgcgatcgggttgctgcattacggaagcttgatgcagagattaaaccactggtgatgcaccagctggccaccttcgcgtttgaggactattcccgcagcgccgccagcgtgaagcagtgcgatggctgcaatggggaaggctttattgacgctgaggttttcagcatgaagtctcacactccggcaaaagagaagaagttcgtgaagatgtctttgcacatgggtgtcgagaatattcgaccttctgagtatgagatgcgtaggcaggtcatggaggtagcgcgcgttctctgccctcagtgcaagggtaagaaggttgtaagttgcgcctgtaaagattgccatggacgtgggaaagccgttaatcaggttcttactgaacagcagggtgtgccggttctggctgactgtaagcgctgcagcgggcgggggtatgaacgaattccttccactgaggcttacgccgcggtgtgtcagataacggatgcaatcagcctcgatacctggaagaagtctgttaagccattctacgaccagctcatcaccaagtttgatatcgaagaggcctgggctgatgcgcagctgaagctgataacaaaatag

SEQ ID NO: 125009 - DNA, 225 bp, Enterobacter cloacae
atgtatcgcatggacaaaataaccacaggtgctgcatatggcgcttcagccggtagcatcctaaacggtatgctgaatgcctatagccccgagcagtggaacgctatcggcgtgctggtgggtatcatcattgcagtgatgacgtacctgacaaacctctatttcaaaatccgcgaagacaaccgccgcagcaggagccgagatgaacccgacactcagaaataa

SEQ ID NO: 125010 - DNA, 495 bp, Enterobacter cloacae
atgaacccgacactcagaaataagctggtgggcgtcattgttggtggatccagcgcaataactattgcagcagtcatgctgggtaatgcagatggtcttgaagggcgtcgttattacgcttatcaggatgtcgtcggtgtctggactgtttgcgatgggcacaccggcgctgacgttcgccgtggtcaccgctacaccgataaagaatgtgacgctttgctgcaatccgacctgcgcaaggttgctgtagctatcgacccgatgattaaggtccatgttcccgaaaccactcgggccgcgctttactccttcacctataacgtgggaacgggagcatttagcagatcgatgctgctgaaaaaattaaattccggcgacgttccgggtgcatgcaaagaactgcagcgctggacgtatgccggtggaaagcagtggaagggactggtaacccgccgagagattgagcgggaagtttgtgagtgggcccagaaatga

SEQ ID NO: 125011 - DNA, 459 bp, Enterobacter cloacae
atgagccgattaacagcaatgatctgcgctgtcgttatgtgcctgctggtttccatgacatgggcgattaaccactaccgcgacaacgccatcacctacaaagaccagcgcgataaagccaccgagaagctcagcctggcgaacgccaccatcaaagacatgcagtcccggcagcgagatgtcgctgcactggatgctaaatacacgaaggatttagccgatgcgaaatctcagcttgaagatcttcagcgttgcgttagcactggtaagtgtgggctgcgcatcaacgccagatgtcccgcgaacggagcggccagcgcccccggcttggatgatgcaaccagccccagacttactgactccgctcaatgggattatttcatcctcagacagcgcatcgaaaccagtaggaaagtgatagacgggctacaggattacatcactactcaatgtcgatga

SEQ ID NO: 125012 - DNA, 312 bp, Enterobacter cloacae
atgaacagcagcaagtcgcttaaagaggcagtggagtcacttaaagagttcaggaataatgcgcaggcagtggctgatgcgcagataaacctactttcaactatcatagaccaagctaatcagctgtctaaaattccttctgaaaatagaaccaaagagcaagacgctgtattggatttttattttacgtttgcagataaagttgatgcctcgcttgaggctgctgataaatataacaaatcattaactaaatatgtaaaaggtatcacaaccattagtaatttagcgagctttaaaaatgaaaacaactga

SEQ ID NO: 125013 - DNA, 381 bp, Enterobacter cloacae
atgaaaacaactgagcttgaattcgcgcttgataaattaaaatctgtgaagagcgaaggtgttatcgctgacgagaacgctgatagggctgagcttgatgcggaaactcactcccagcgggacgggaaaacacggagtacattgaccctaacatttatgcgcggtttttttggtatgttagtttttgcgtgcctttttgttttgttttataactgggcggctgtacattggataatagacttgaaaacatctggccttgcggagcaatcaactaaattaaatcttttggaaattgataaaatactttcaatcattattggtgctttgggtacgtctcttggttttattatcggttactactttaaagaaaagcatgcttaa

SEQ ID NO: 125014 - DNA, 1074 bp, Enterobacter cloacae
atggcaaaaccggactggggcgagcttcagcaacggttcctgtccgaacatgccgcaaccggcgtatcaccaaaggaatggtgtgaaacgcagggactgaactacgctaccgcccgtcgatatatcaaaaaaccttatgcgcaaactgcgcaaaaacctgcgcagaaaaaaatgcgcactgcgcagaaagataaaagcgcaaatgagctggtggatgatgatggactttcagagcttgagcagaccgtggcgacggctgataccgcgctgggccagcgaatcgacagcatcagcgtgtctatggacggcatgacgggcggggtgaagaactctgcaattgcgataatccaggccaacctcgctcgggtggccacgcgtaaaaccctttctgcatcggtcgccggcaacagcgcgaatctggaccgcattgatgaagtgattgtcaacgacagggaggcaacggcgcgctcgctgctgagcctgcagacggacgttaacggcaacaaggcatccatcaacagcctgaatcagacgttctccgactatcagcaggctacggccacgcagataaacggcattacggcgaccgtgaacgggcatacctccgccatcaccactaacgctcaggcgatagccaacgttaatggcgacctcagcgcgatgtacaacataaaggttggtgtctccagcaacgggcagtattacgccgcggggatgggtatcggcgtggagaatacgccatccggcatgcagtcgcaggttatcttcctggctgaccgcttcgccgtcaccacggcagccggaaatagcgtggctttgccgttcgtgatccagaacgggcagacattcatccgggccagcttcatccaggacggcaccattgagaacgccaaaatcggcaactatatccagtcgaataactatgtggctggttctgcaggctggaagcttgataagggagggacgttcgaaattaacggcgtggccgggggcgggaggatgctgatatccagcactctcattcgtatctatgacagcaataacgtgctgcgtgtcagaatggggttatggtaa

SEQ ID NO: 125015 - DNA, 297 bp, Enterobacter cloacae
atgccacaggggttgcaatgctgggacagtgcagggcgtatagcggttgatttgagtgattatgccatccggtatatcggaagcacctcggtaacattcgctgcgggggaaacgtcgaaaaacgtttccttcgctgggataacccaggatggctcattcatatcaattgtgtcgactggcgtcactgtcaacgaataccactgccgcgcctataatggcggttttacagcttactatttgccctcaaccggcagtcctgcgatcacactcaatgtggaggtgtataactttcaatga

SEQ ID NO: 125016 - DNA, 642 bp, Enterobacter cloacae
atgagcggattcgaagtttacaacagcgatggaaaattactggtggactcgcaaaacaggtccacccttttttatgatcagcgtatgctcggcgcagtgaacaacaaaggtttttaccagatagacagcccatttgggaatggcagtaccctgggattcactccgcagtcgttctggaatgatgggagattaaggtggctgcagcttggcgcaaacagatacgggatgcctggtgcagacctgcttgaagataatgcggggagcatgatccgcactgcgcgtaacattggaatacaaagcgggtatctggatgtcttcgacagtgccggatatctcatctggagcgcggcttcagcctcaaaaatgccccgcgttgtcgggttctttgatgtgccgacgaactatgatctgcagaacaatacgctttccgtgagcctgagctttaacccctggattctggtaaataactgccccggcaatctcagcgatgatggaaccgttacgggctattcagggatagtgctcaaatggacgggctcacagctgcaggggcggtacatttcaaaaaaccagcgcagctggagccagacatttcagggaaggggattacgaatccccattgctcagtttgtcggtatttga

SEQ ID NO: 125017 - DNA, 363 bp, Enterobacter cloacae
atgaaacgattatttgctgcagtatttttgctgctggctggatgttccagtaaacacacagacaacgcattcagaatggactatccggttgaagctgcccgtttatcattgggcggtgatattcacgtgaatattgactgcgccacacgggaaatgacggttatttctgacagtagcaatggaatatttagccgacatgtaaataaacggctcagtaatatttgctataaaaaaaccgataaactggatgttgtttatcgcttcaacgcagcgaaaggggtgagacaaaatatgattgccactcagtaccctcgcgttccccctgagtcaaataccgacaaactgagcaatggggattcgtaa

SEQ ID NO: 125018 - DNA, 141 bp, Enterobacter cloacae
atgggaaagactgaaataatactcaccttaatcattttcatccttattatatttggcttgtggtttatttttagcggtgagatctggtatttcgttgaatatctggaaaataccctgtacccgaccttcgatgcgctgtag

SEQ ID NO: 125019 - DNA, 1233 bp, Enterobacter cloacae
atgtcgcaaaatggttttgatgcgctgaatgcaattaaaacgcccgtgtggctcatatctcctgtttcagaacagatcatttttgccaatgtggccgcaacacagctgatgggtaataaaacactggatggcttgcgtaaaggcacctgttccgcaagtgcgcaaagcgtgttgtcgatgtatgttcctgaactgaaaaacgatcacgatattgtcgagatctggacgattagccgtgccgggcaagatacaccgttaagctgccgcctctctctctcccacttcacgccttatggcgatgttatcgtttttgaagggatttcttctcaggccccatcaggcctgaaagccagccgttccacaacctatcagcgtaaaaaacagggtttctacgcccgttttttcctgaccaacagtgcgccaatgctgttaatcgaccctgcccgcgacgggcaaattgtcgatgcaaacctggccgcgctcagcttttatggctattcgcatgatgaaatgtgcaataaacacacctgggagataaataccctggggagaggtgtcatgcccattatgacggagattgccgcactgcccggcggacataagccgtttaattttgttcaccgtcttgccgatggcaccacccgccatgtccagacctacgcggggcccattgagatttacggtgacaaactgatgttgtgcatcatccatgatatcaccgaacaaaaaaggctcgagctggagctggaaaatgctgcgttacgtgactcaatgacaggcttacttaaccgacgccagttctacaatattatcgatcaaaccaacctgagccacctttccgcgcaacagcaatttagcctgctgctggtggataccgatcattttaaaaacatcaacgacctcttcggccatctgaaaggtgatgaggtgcttatcgccctttcccgcacgctggaagcctgcagcaggcaagatgacctcgtgtttcgctggggaggggaagagtttgtcatcctgctgccgcgcacctctctcgacactgccatgaagattgccgaatccgtccgcgcggcggtaacccgtatcaccatacccggattaccccgttttaccgtcagcattggtgtggcaaggcatgaaccggaagagagtattgatgagctgtttaaacgcgtagacgacgcgctctatcgcgccaaaaacgatggacgtaataaagtccttgcggcatga

SEQ ID NO: 125020 - DNA, 198 bp, Enterobacter cloacae
atggagcgcaacgcccatcgcttgacgttgcattcacctgcgggagtaatattgcaccttgccgggctgatgtttattgacttcgctcaattaaaagagcgttttaatctctgcaaaagggcaaaaaaacgtaaatttacagccatttactacgatgcaaccaccatgcaacaccaccaatcaaaacaactaacatga

SEQ ID NO: 125021 - DNA, 345 bp, Enterobacter cloacae
atgacgctcaatcgtttttgttttttgctcctgcttgtcgctgcgatcggcagctttttctcctcgtcttcctttgccgtgtggttcctgctgatcaatgtgctgacggtggtcatttatggcgccgataaaacggcagcacggaaagggatgcgcagggtgccggaaaccacgttactcctgtacggtgttgtgggagggtggcctggcgcgattttgggtcaacaactctttcgccataaaacgcaaaagcagccgttcaaaacctggttttggatcagtgttgtggtgagtctttcagccatgatggcgctgtattatttctctccttttaccccttattga

SEQ ID NO: 125022 - DNA, 438 bp, Enterobacter cloacae
atgaaagacatcgatgtaggcttcacgcatgttgcgtttatggtcagggacctggaaaaaagcatcacgttctatcgccgatacgccgggatggtcgttattcattcgcgtgaacccggccttcctgatgcccgaaaagtggcatggttgactgaccacacccgtccttttgcgctggttctggtgcaggcagacaacgtgaccgatacgccgctggggaattttggccaccttgggattgcctgcgctacgcgtgaagaaattgacagaaaaacggcgatggccactgaggaaggggtattacgtaaagcaccggaggatctgggtgatcccgtcgggtattacgtattttttgccgatcctgacggaaataccttagagctctcatatggtcagcgtgtcgggctgacagcgacgggtgagaacgcatctgaataa

SEQ ID NO: 125023 - DNA, 450 bp, Enterobacter cloacae
atgaatagaaaatctattgcactggcagcactggtgtttttctctgcgcctggctggtcagcgtttcaggagcgggaatataatacctggtatataaaaaatgccgttctctatgacatgacgcagacctcggacggttttcctgtcatggtgagtatattccagcctgagcgtaaatccgcaaatctggtggtgtcgtacatcactgaaggccgttgcgatgataataaccagcagcttaatgtaaatggcaaagtgctggccgcaaaatatcgctgtgttcaggttggacagaacagaatagaccatttctccgtggtggatgcgaacagcgtcaatagcctggtgacctatctaaaatccgatttcacgctactcctgcaaaatgatatcaagatttgggcggcaaatatcaaaacgcccaaatacggtctgacgccgcgtttttaa

SEQ ID NO: 125024 - DNA, 438 bp, Enterobacter cloacae
atgaaaaagctcattgcgttaagtgttatcagtcttgtcctgaccggctgcgttaatccgggcaaagcgtccgttcagccagagcagctgaagaaccatcgttttgtactggaaaatgtggatggcaaagccgtgaagggcatgacaacaccacctgagatcagttttaacgcgctgcccgctttgaacctggtagataacatcagcgtgtctggcacgatgtgtaaccgcttcaacggacaggggaaattgtccgaaggtgagctgacagtgaaaacgctggcaatgacgcgcaaactctgtactgaaccgcagcttaacgaacttgatcacaccctcggcgacatgctgcgcaaaggggcgcaggtcgacctgacggaagaccagttaacgctggcgaccgccgacaaaacgctgatgtttaaacgtgttgactga

SEQ ID NO: 125025 - DNA, 540 bp, Enterobacter cloacae
gtgaaaatcaatattatcggtaccagcgggagcggaaagagtacgcttgcccggcgcatcgcgacggaactgtcgctcccttatattgagatggacaggctctactggcgttctgagtggaagggaacgcccgatgaggagctactggagacgctggaaaatacgctcgctgccacacccggctgggtgcttgatggcaactacaaccgcacgcgcccggtgaaatggcgtgaggttgatctggtcgtgtgggtggactgcggttttgtccgtacgctctggcaggcggtgacgcgcgcgtttaaacgcgcatggcaccaacaggaactgtggcctggcaccggaaactgcgaaagcttccgccgctcatttttcagccgggaatccatcatcatctggacccttaaaacctggcgcattaaccgcgagcgttacgacgctgatatgaaaaacccgcaatacgcccacattcagtttgttcgcatcacccatcgccaggaggcggatgcgctgattgcttcgctgaaaactcatccctag

SEQ ID NO: 125026 - DNA, 1002 bp, Enterobacter cloacae
atgtcatggcgaatcagcattctggacaaaagccccatcgctgaaaacgaaacggctgccgatgcactggcgcgtacgttagcgctggcgcagcaggcagaaaatctgggctatcaccgcttctggattgccgaacaccacaatacccctcagcttgccagtccctcgccggagctgctgattgcctggatcctcgggcaaacaacgcgcatccgggtcggttccgggggcgtcatgctccagcactacagcccttataaagtcgccgagaatttcaacgtgctggccgcgctggcgcccggccgcgtggatcttggtgtcggaaaagcgcctgggggattaccgctctcgacccgcgcgctgcagctggggctggatcagcaggaaaagggcagctttgccgaacagctggcccagctcgatcgctggatccgccctgaaaaccactcagcggaggaagccgttcgcgccacgccgcagccaccggtacctgcacagggttttctgctgggcgccagcacggaaagcgcgctgctcgccgcatcactcgactggaactttgtctttgccgcgcatctgaacggagacccggaactgttacgcgaggtggtttcgacctggcgtaagaacagcgcgcgggaggtaatagtggcggtgcaggcgattatcgcgccgacccaggttgatgccgaagccctggcgcagaaggtcgaagtgtggggtgttgagctggcaaacggccagcgcgtgaccgtcgccagtgaggatcaggcctatgcctttgcgcgtcaggccgggagtgagccggtgcgcatcgcccgtcgcgcccagtcgctgctggcggggacggcggagtcggtgctggaacagctgaacgcgctacacgcgcagtgggggatcgacgaatttatcatcgacacgccgattgcggagggggcaacgcgcgtgcagtccctgcgtttgctggccgaggcgcgtctgaacagggaggttaccgtatga

SEQ ID NO: 125027 - DNA, 186 bp, Enterobacter cloacae
atggatatcgtgtccgcaggcatgcatcacgccgggctgctgcgagctaaacggcacgccgctgcgctcctcaatgggcagggcatcaatgtctgcccgcagcgcgatcagtttgttaccggtcccgatctccgccaccacaccggtcggcaggtcgtaaggcagcggcgtgatgcccgcggctga

SEQ ID NO: 125028 - DNA, 1002 bp, Enterobacter cloacae
atgacaagattaccccggttttcacctgcctttttccatcctcgatactggctaagctggacaggcatcgccgcgctatggctcattatgctactgccttatccgctgttattcagaattggacatcgcctcgggcggctggctatgcgccttctccctcgccgcgtggcgattgcccgccgcaaccttgagctatgcttcccgcagatgaaagcagaggagcgtgaagccttgctgcagcgtaactttgaatccgtggggatgggggtaattgaaaccggcatggcgtggttctggcccgagtggcgggtgcgtaaatgctttaccgtgcgcgggtatgagcatatggagcaggccagggcgcaaggaaagggcgtggtgctggttggcatgcattttctcacccttgaactgggcgcgcggatttttggcatgctcaacccggggattggggtttatcgtccgaataataatgcgttgctggactggcttcagacgcgcgggcgtctgcgttctaataaaaccatgctggaccgtcatgatttaaaagggatgatccgcgccctgaagcagaatgagattctgtggtacgccccggatcacgactatggcaagactaacagcgtgtttgcacccttctttgctgtcccggatgccgcaaccacggcagggagctatatgctggtaaaaagcgctcagcccgccgtgattccgttcgtgccgcgtcgcagggcggacggaaccggttacgaactgattattcttgaggatatcagcgcgtcgttgcagggtgctgacaaagagacggttgcaacgcagatgaacagggctatcgagcgagccgtgctgatggcaccggagcagtatatgtggctccaccgacgcttcaaaacgcgcccggaaggccagcctgacaggtatgcacgccgcaagagcgtggcatcgcgagtggatattctctccgccaacgagcttactgaccgctcgggcgtccagcactaa

SEQ ID NO: 125029 - DNA, 1497 bp, Enterobacter cloacae
atgtttaagcacgcgcagcttgaaacggttaaggcatggatttccgaccctgcaaacggttcactaccgcttcatgaaaggatccagagagcgatacgcacattgatacttgaagggaccttatcgcacggtaaggcgcttcctgcttcacgtgcgctggctacctcattgaatgtttcgcgggatacggttgaagcagcctattccagcctgcatgcagaaggttttattgagcggcaaacaggcagagggagcttcgtctcttccagcgcccggtttttaaaaccacgttcccgacagcatccgccaaccgcggaaacacgaaaagcaaaacttagcgcccgtggaaaggtcatctatgaaagtggcgggatccgcgagttttcttcaccacgtccgctggcgcccggtatccccgaaacccgcctgttccccattccaacctgggagcgtcttcagcggcaggtcctgaaggaatatcagcacaaaatactggagcaaagtccaccgcagggcatggagcgcttacggcgggccatcgcggaatatgtcaatcttgagcgcgggacacgtgcgagtgcagaacaggtgatcgttctgacaagttctcaacaggcgctagcgctctgttcacacgtgctgctggacaacggggagagtattgtcatagaagatcccacctatcaaggggcacacaaagcgtttaaggctgccggactgcaccctgtcccggttcctcttgatgaaaaaggcatatccgttgacgcacttaattcgctaaccgaacctgccagagctatctaccttaccccttctcatcagtatccaaccggggtgacgctctctcttgaccgacgactggccgtcattgactgggcaaaccgtcacgccgcctggatcattgaggatgactatgacagtgagtttcactatgaaggaaagcctatggcctgccttcaggggctggatgcttacaaccggacaatttatatcggcacgttcaccaagtcgctgttccccgggctacgtattgcgtacatgatcgtcccctcagaactgaccgagccctttaccatggccaggacattaatggacggccataccgcatcaatcactcaactgacgctggctaaatttttggagggtggacattttggtgcctatattcgcaagatgaggaacgtttatgttgctcgtcgcgacaaactggccagtctgatggacgagtatctttctgattatgttgtgtacacaacgccagcgggtggcatgcagatgccttgccacctgaggcacgggttatccgagaaggatattgccgccgcggcccgtcgcgctgatattgatatattaggacttaccggcttatatgcaggcagcccggtatccaccggttttttaatgggatttgccgcttacaccgaaagagaaatagaagacacggtaaaaaagctggccgcaattttccggtcatgttgttatctctcgcccctgtag

SEQ ID NO: 125030 - DNA, 456 bp, Enterobacter cloacae
atgaataatacgagcgtgaccattgaggcagttaaagaacgtgattttgaaagctggatgccactatggagaaaatatcaggaattttacaacgtcgatctatccggggcagtgactgaacgaacctggcaacgatttttcagctccgttgagccagtattctgcgtagtggcacgatgcaatggagaggtggtggggtttgcgcattatctttttcaccgttcgacctgggctgagagcgattattgctacctcgaagatttatatgtcagcgatgcagcaaggggcaaacacacgggcaaacagttaatagaatatgtgcagagagaagcaagaaaacatcacgccagccatctttactggcatacgcatgaagccaattatcgcgcgcaacgattgtacgactggattgcgaaaaaaagcgggatgattgaatatcgtatgcacgtaagataa

SEQ ID NO: 125031 - DNA, 324 bp, Enterobacter cloacae
atgccagctaccgtaaacaaagagaatggatttagcatggttgaggttatgctggcgatgatgctgctggtgatgatcgtaaccgcactggccggttatcacagggcactggcggcgcggtttaccctgtttaaccagtaccgccagctctggcattatgcctggaaccaggctcagctctcaacgactgcgctgcccgcaggctggcaggtgagtcgggtgcagacaacgcactcaggatgtgtcagcatcacggttacacttttttcgcctctggggcggcgcggtgagataacgcgtctgcattgccctgttagccagtag

SEQ ID NO: 125032 - DNA, 561 bp, Enterobacter cloacae
atgttgaagcgtcagcagggattttcccttactgaagttctgattgcgacggccatcagcagcctgttattgatcggcgcatcgcgctttttacccggtttgcagcgagcggtgttactgcaatccggccagcgagaacaggaagaggaggtctggcagagactgttttccctcggcaaacagctccagcgggcaggctactgtgcgggtaactgcccgggacaagggttgttaacgggcaggcaaggtagctgtgtcattgtgcgatgggatgccaacagtaacggcagctgggataacagtgcatcagaaaacgacagcaccggttttcgtctggagtcgggtgcactggaaaccctgcgtggtgcaacctcgtgtgaaggcaaaggatgggaaaagctcacggatccggacaggctggtgatcacgcactttatggtgagaaaagttgaacacgccaggtttgcgcctgagttcactatcgaactggccgctatccgcaagggcgagcaggggaagccttatcaggcggtgtatacggtcacggggtacaacttgtga

SEQ ID NO: 125033 - DNA, 462 bp, Enterobacter cloacae
atgaaaaaagagaacggttttacgcttatcgaaacgctggtggctgtgtcgctggtcgtcattctcagtgcctcaggcttgtacggctggagcagttggcaggggcagcagcggctgtggcaaaccgccggccaggtgcgcgactacctggtgtttctgcgcaaccatgccaaccggtacaaccgcgagcaccgcattaccttgcagcaggtgggggaaagggcatgcctggtgagttctgccataaaaggctgtgagcagggcagcccctttgcactgattccactctggccagaagtcgcggtcagcgaggtaacgccgtcactcgggttctatggattgagggatacggcatgggcaggtcggataagagtgcaaagccgtgcaggagcgtggctgattattgtctcagatggagggcgcatcaggatgtgtcaggtctcgcaggggggacaatgttga

SEQ ID NO: 125034 - DNA, 1194 bp, Enterobacter cloacae
atgcgtgagtcagtgcacactaacacatcgcttaggtctaaaggcatgatggcagtgattgccgcgcagtttctctctgcgttcggcgataacgcgctgttgtttgccaccctggcgctgctgaaggccgagttttaccctgactggagccagccgatcctgcagatggtgtttgtgggcgcttacattatcttcgcgccgtttgtggggcaggtggcggacagtttcccgaaaggccgggtgatgatgtttgctaacggtctgaagctgctgggggccgccagcatttgctttggtttcaatccgtttattggctacacgctggtgggcattggtgctgccgcctactcaccggcgaaatatggcatcctcggagagctgaccacgggtgataagctggtgaaagccaacggcctgatggagtcgtctactatcgctgctatcctgctcggctccgtcgcgggcggtgttctggccgactggcatgtcctggcggcgctgggcgtctgtgcggtggtgtatggcggtgcggtcgtggctaacctgtttattccgaagctgccggtagcccgtccaggacaatcctggcgcttcaaaccgatgaccggcagtttctttaatgcctgccgcgtgctctggcgtaacggtgaaacacgtttctctctgatgggcactagtatgttctggggcgcaggcgtcacgctgcgcttcctgctggtgctgtgggtgccggtggcgctgggcgttaccgacaatgcgacgccgacctatcttaacgcgatggtggcgatcggcattgttgttggcgcgggcgcggcggcgaagctggtgacgctcgaaacggtggcacgctgcatgcctgcggggatcctgattggcgtcgtggtgctccttttctcgctacagcatgcgttattgcctgcttatgctctgctgatcctgattggtattctgggtggtttcttcgtggtaccgctcaacgcgttactgcaggagcgcggcaagcagactgttggggcgggaaatgccattgcggtgcaaaatctgggtgaaaacctggcgatgctgttaatgcttgggctctactcgctggcggtgaaagtcggtgtgccagtggtgggaattggcgtcgggtttggtgcgctgtttgcgctggcgattgccgcattatggctttggcagcgtcggcgttga

SEQ ID NO: 125035 - DNA, 2160 bp, Enterobacter cloacae
atgctatttgggttcttccgtacacttttccgtattctttttcgcatccgcgtcactggcgatgcccagtcgcttcgcggcgaacgcgttctcatcacaccaaatcatgtttcctttattgatggcatcctgctggcgctgtttttgcccgtgcgtccggtgtttgcggtgtatacctccatcagccagcagtggtatatgcgctggctcacgccgctgattgacttcgtgccgctcgaccccaccaaaccgatgatgattaaacatctggtacgtctggttgagcaggggcgtccggtggtcattttcccggaagggcgcatttccgtgaccggctcgctaatgaaaatctatgacggcgcgggatttgtcgcggcgaagtcaaaagcgaccgtggtgccactgcgtatcgaaggcgcagagctgagccacttcagccgcctgaaagggctggtgaagcagcgtctgttcccaaaaattaccctgcatattctgccgccaacgtcgttaccgatgcccgatgcaccgcgtgcccgcgatcgccgtaaaattgccggagaaatgctgcaccagattatgatggaagcgcgaatggccgttcgtccgcgcgaaacgctgtatgaatctctgctttcggcacagtatcgctatggtgccaggaaaaaatgtattgaagacatcaatttcacgcctgacacatatcgcaaactgctgaccaagaccctgtttgtgggccgcattcttgaaaaatacagtaagaagggtgaaaagattggcctgatgctgcctaacgcgggcatcagcgcagcggtgatttttggtgcggtgtcccgcggccgtattccggcaatgatgaactacacggcgggtgtaaaagggctgaccagtgccatcactgcggcccaaatcaacaccgtttttacctctcgccagttcctggataaaggcaagctgtggcatctgccggagcagctgactcaggttcgctgggtcttcctggaagatctgaaggcggacgtgacgacgggcgacaagctgtggattttcgctcacctgctgatgccccacctggcacaggttaaacagcagccggaaggtgacgcgattatcctctttacctccggttcggaaggcaacccgaaaggcgtcgtccacagccacaagagtattctcgcgaacgttgaacagatcaaaagcattgctgactttaccgccagtgaccgttttatgtctgcgttgccgctgttccactcctttggtctgacggtggggctgtttacgccgctgctgaccggcgcagaagtgttcctctatcccagcccgctgcattaccgcattgtgccggagctggtgtatgaccgtaactgcaccgtcctgtttgggacctcaaccttcctgggtaactatgcgcgtttcgctaatccatatgatttctatcgtgtgcgttatgtggtggcgggggcggaaaaactgcaggagagcacgcgtcagatctggcaggacaagtttggcctgcgcattcttgaaggctatggcgttacggagtgcgcacccgtcgtctccatcaacgtgccgatggcggcgaagccgggtacggttggccgaattctgccgggaatggacgcacgtctactggcggtaccgggcattgaggacggtggccgcctgcagctgaaaggaccaaacgtgatgaacggttacctgcgtgtggaaaacccgggcgtgctggaagcgccaaccgcggaaaacgtgaacggtgaggtcgaaaccggctggtacgacaccggtgatatcgttcgcttcgacgagcagggctttgtgcagattcaggggcgcgcaaaacgcttcgccaaaatcgccggtgaaatggtctctctggagatggttgaacagctggcgacggcggtgtccgcggataagatgcacgcgacggtggtgaagagtgatgccagcaaaggcgaggcgctggtcctgtttaccaccgacagtgagctgaagcgcgacaggttacttagccatgcgcgtgagcatggcattcccgagctggcggtaccgcgcgatattcgttacctgaaacaccttccggtactgggtagcggtaagcctgactttgtgaccctgaaaggcatggttgaagaggcggaacagcaaaatgcgtga

SEQ ID NO: 125036 - DNA, 486 bp, Enterobacter cloacae
gtgaaaaagagtgtcatcctcccgctttatgaagccccgcagtatgcggagcaggttaccgactggatatggcaggcgtttggcgaggggctcccacgggcatttttccacagcatcgttgagcacagccaggcgccgggggcactgccgttgacgtttatcgctttagaagaccaacagcttctcggcacggtgggcctctggcgctgcgatttgattacccgacaggatctctgtccgtggctggcggcgctctacgttgatgaggcggcgcgcggtaagggactggcaggtaagttacagcaacacgttatcgcctttgccgcacaggccggatacgacgaactccatctctggtctgcctgccgtgacttctatgaacgttacggctggcagtacattggcgatgggctggagtatcccgataaaacggtacatctgtaccgttattcgctttgcgcttcagcaggcgacgcaacggagtga

SEQ ID NO: 125037 - DNA, 1125 bp, Enterobacter cloacae
atgtcagcaatggatttcaaaaaaaatacggatctcgattttccctcatatgctacccccgcaatctctccaaaagagatcgaccttctgggtctgttagatgttctgcttgccgcgaaaaaacgcatcgtcaccatcgtctttatctttgcgctggcaggtctggctattgcgtttatgttgccgcaaaaatggaccagtaaagcggtgatcaccccggcagagcagacgcagtggaacccgctgcgccagatgatggttgcgctgcaggtccttgacgtgaaggcgcaggtgacacgttcggaaatctttgacctgtttatcaaaaaattccagtcgcagtcattgctcaaagagtatttgacctcttctccttacgtcatgtcacagcttgaagaggttgaggttgacgcgcttgaactgcaccgtgcggtcgtcaatattgcggaaagaatgaaagcggtgaatgacgcgcaggcaaaagatgcggataaagtgccttacgtctcctggacactgagcttcacggcaccgaaagccagtgatgcgcaaaccgtactggaggggtatatcaattatatcgcggcggttgttgaaaaagagacggtgcaaaatatccgtaaccagatcgccctcaggacgagtgaggtagagcagcagctgaagctcgaccgtgttcgcctgaccaatattcacaatactaacctgcagcggctgaattattcgctggaagtggcaaatgctgcgggcattaagaagccagtctacagcagcgggcaggcggtaaaagatgacccggattactccgttgcgctcggtgccgacggaatcgcgcaaaagctgcagattgaaaaaaatctcaaagacgtgacggagctgaacgcggacttccagaaccgggaatactatctggcgcagctgaaaaatctctcctttgcagacgttaagcttgaacccttcaggtatcagctttctccgtctttgccggtgaaaaaagacggtccgggcaaacctctgattgtaattctggcggcactcctgggcgggctctttgcctgcggtagcgtgttgctgcgtgaagcgatgctctcccgtcatccgctgtcagagccgttgacacaataa

SEQ ID NO: 125038 - DNA, 1071 bp, Enterobacter cloacae
atgattgaattagcggttgacgatctgcacttaacctacggcgacaatcctgttttaaaaggggtctccatgaacctgaaacgcggcgaagtggtctccctgctgggcccttccggcagcggcaaaaccaccctgctgcgcgccgtcgcgggtctggaaaaaccgactcaggggtcgattgtcattggtcaaaataaagtttacgacggtacgccgcgcagcgaggttccggcggaggagcgtaacctggggctggtgttccagtcctacgccttgtggccgcacaaaaccgtatttgaaaacgtggcctatccgctcaagttgcgtaaagtcccggctaaagagatccagcagcgcgtacaggatgtactggaccagctgggtctcggccatcttggtaaacgtcacccgcaccagctctccggcgggcagcagcagcgcgtggcgattggccgggcgctggtctataacccgccggtgattttgctggacgagccgctgtccaacctcgatgccaaactgcgcgaagaggcccgcgtatttctgcgcgagctgatcattaagctcgggttatccgcgctgatggtgacgcacgaccagaacgaagcgatgtcgatttccgaccgcatcctgctgctcaacaacggcaaaattgagcaacagggtacaccgcaggagatgtacggttcgccgaagacgctgtttacggccgagtttatgggcagtaataaccgcctgcatggcaaaatcaccgaagtacgcgacggcaaagcacgcattgaaggaaaagactgggtgctctggggccaggcgggtgaaggggtacagagcggtaatgaggctacggcagtgatccgcgtcgagcgcgtggcggtagtcgaggggccgggggaaaatcagcttgcgctgccgctcctcaccagcatgtatcttggcgatcgctgggagtacctgttccgcacggcgggggatgattttgtgatccgcgcgtacggaaatgagcttcgcgacccgcagcattgtcatctatcgctgccagagaagcatgtctggatattcccgaaaaactag

SEQ ID NO: 125039 - DNA, 426 bp, Enterobacter cloacae
atgagcaacatcactatttatcacaacccggcctgcggtacgtcccgtaatacgctggagatgatccgcaacagcggaaatgaacccaccgtcattcattacctggagaatccgccgtctcgcgatgaactggtcaaactcattgcagatatggggatcacggtacgggcactgctgcgaaaaaatgtcgagccttatgaagaactggggctggcggaagataagtttactgacgatcggttaatcgactttatgctgcagcatccgatcctgattaaccggcctattgtcgtgacgccgctgggaaccaaactgtgccgtccttcagaagtggttctggatattcttcctgatgcgcagaaagcggctttcgcgaaggaagacggcgagaaggtcgttgatgaaacaggtaaacgattgaaataa

SEQ ID NO: 125040 - DNA, 1290 bp, Enterobacter cloacae
atgttactggcaggcgctatttttgtcctgacccttgttttggttatctggcagccgaagggggtgggaattggctggagcgcgacgctgggcgcagccctggctttaatttcaggcgttgtgcatttaggcgatattccggtggtgtggaatatcgtctggaacgcgacggcaacgtttattgccgtcattattatcagcctgctgcttgatgaatccggctttttcgagtgggcagcgctgcatgtatcgcgttggggaaacggtcggggccgtttgctctttacctatatcgttctgctcggcgcagcggtggctgcactgtttgccaacgacggtgctgctcttattctgacaccgatcgtgattgccatgctgctggcattagggttcagcaaaggcaccacgctggcattcgtgatggccgccgggtttattgccgataccgccagcctgccgcttattgtgtcaaacctggtgaatattgtttcggcagacttcttcggtctggggttcaccgaatacgcgtcggtgatggttccggtcgatattgcagccattgtcaccacgcttgtgatgctgcatctgttctttcgcaaagatatcccgccgacttacgagctgtctcttcttaagacaccggcaaaagcgattaaagatccggcgacgtttcgtaccggctgggtcgttttaattctgttgctggtaggttttttcgtccttgagccgctcggtattccggtgagcgcgattgcggcggtgggggccgtcatcctgtttgctgtggcgaaacgcggccatgccattaacacgggcaaagtgctgcatggcgcaccctggcagatcgtcatcttctcgctggggatgtacctggtggtctatggcctgcgcaacgccgggcttaccgaatacctttcaggtgtgctgaacgtgctggcggataaaggactctgggccgcgacgctgggtaccggcttcctgacggctttcctgtcttccatcatgaataacatgccgaccgtgctggttggtgcgctctctattgatggcagcaccgcaaccggtgttatcaaagaggcgatgatctacgccaacgtgattggctgcgacctggggccaaaaatcacccctattgggagcctggcaacgctgctctggctgcatgtcctttcacagaagaacatgacgattacctggggatattatttccgcaccgggatcgttatgactctgcctgtgctatttgtaacgctggccgcgctggcgctacgtctctctttcactttgtaa

SEQ ID NO: 125041 - DNA, 1752 bp, Enterobacter cloacae
atgaaattcttacagaatatcccgccttacctgttttttaccggaaagggcggtgtgggcaaaacctccatttcctgcgcgacggctatccgcctggcgggacggggtaagcgggtattgctggtgagtaccgatcccgcttccaatgtcggccaggtctttgatcaaactatcggtaacacgatccactctgttcatgccgttcccgggctttccgctctggagattgacccacaggaagctgcccagcagtatcgcgccagaatcgttgatcctgttaaggggcttttgcctgatgacgtcgttaacagcatcagcgagcagctttccggcgcctgtacgactgagattgcggcgttcgatgagttcaccggtttattgacagacgcttccctgctgacccgcttcgatcacatcatttttgatacagcgccgacgggccacacgatccgcctgctccagcttcccggtgcatggagtagcttcattgaaagtaacccggacggtgcttcctgtctcggcccgatggccgggctggaaaaacagcgtgagcagtacgcacacgcggtagaggcgttatccgaccctgcgcgtacccgtctggttctggttgcacgactgcagaaatccactttgcaggaagtcgcccgcacccatgaagaactggctgcgattggcctgaaaaaccagtatctggtgattaatggcattttgcctgcagccgaagcggaacatgacgcactggctgctgcgatatggcaacgggagcaagaggccctggcaaatcttcctgccggtttatccgggctgccgacagataccttattactgcaacccgtcaacatggttggcgtgtcggcattaaagggcctgctggacagccgttctgaggcattaccgctccctgcaacgaacgccctggatacgcctgaaaacgcatcgctctctggcctggtcgaggatatcgcccgtaacgaacacggcctgattatgctgatgggcaaaggtggcgtgggtaaaaccacgatggcggctgccgtcgccgtcaggctggcagacatggggtttgatgtccatctcaccacctccgatcccgccgcacatctcagcacaacgctaaatggcagcctgaataacctgcaggtcagccggatcaacccacacgaggaaaccgaacgctatcgccggcatgtccttgagacgaagggaaaagatctggacgaagcagggaaacggctactggaagaagatttacgttccccctgtactgaagagatcgccgtcttccaggcattttctcgcgtgatccgcgaagcaggtaagcggtttgtggtgatggatacggctcccacggggcatacgctgttgctgctggatgcaaccggggcttatcaccgcgaaattgccaaaaaaatgggcgacaaaggccattttactaccccgatgatgcagcttcaggacccggagcgaaccaaagtgctgctggttacgcttccggaaaccactccagtgctggaggcagagaatttgcaggccgatcttgaacgcgcggggattcatccgtggggctggattatcaataacagcctttctattgcggatacgcgttctccattgctttgccagcgcgcccggcaggaattgccgcagattgaggcggttaagcatcagcatgctgaccgtatagcgcttgttccgctactggcgtcagagcctgccggtatcgaaaagctcagagcgttgatgcgttaa

SEQ ID NO: 125042 - DNA, 363 bp, Enterobacter cloacae
atgaaaacgttaacggtgtttgacccggcattgtgctgcagtaccggcgtatgtggttcagatgtcgatcaggttctggttgatttttctgcggatgtgcagtggttgaaaggacgcggcgtacaggtggaacgttacaacctggcgcagcagcccatgagcttcgttcagaacgaaaaagcgaaagccttccttgaagcctcgggagcagaagggcttccgctgctgttgctggacggtgaaacggtaatggccgggcgatatccaaaacgcgctgagctggctcgctggtttgggatcccgctggaaaaagtgggcctggcgcccaccggctgctgtggtgggaagacttcctgttgctaa

SEQ ID NO: 125043 - DNA, 351 bp, Enterobacter cloacae
atgtcactaacatccttacaactcttcaaatacctctccgatgaaacccgtctgggcatcgtactgctgctcagagagatgggagagttgtgcgtatgcgatctctgcacggcactggatcagtcgcagcccaagatctcccgtcatctggcaatgctacgggaaagtgggctattgcaggatcgtaagcagggcaagtgggttcactatcgtctttccccgcatattccgtcatgggctgctcaggtgattgagcaagcctggttaagccagcaggacgacgtacaggccatcgcccgtaagctggcaacggcaaattgctctggtagcggtaaggctatttgtctctaa

SEQ ID NO: 125044 - DNA, 138 bp, Enterobacter cloacae
atgaaatggctaatcggtagcggtgttgtgttaataatcctgtggttggttttagtgacactgctactgcgtagaaccaaacacgacagtatgaaaaccatccttagctacgtgaaagacgatgaccaactcccgtaa

SEQ ID NO: 125045 - DNA, 321 bp, Enterobacter cloacae
atgcgtaataatatattggtgttattggtttctacattggttttgtctggttgtgccacccaaaaacaaatggtgccgatgggaggttcaaaagctgatggtactgtgaggatgggctttgattatggtttgtttgaaaagcctgtgctcgataagaatcaggcaatcgcagcagcggaacaacgatgtaaagcatggggttactctgggactgaacctttcgggggtacaactcaaacctgtaatcaaccctcttccagcgggtgcatgggttggcatgttgaaactgaattccagtgtatcggtgaaatcaagaagtaa

SEQ ID NO: 125046 - DNA, 204 bp, Enterobacter cloacae
atggtgatatttcatgcggaaaaacgggccgaatttccgtcacataaaaatcatgacattagattatctaatgcgaaaaatgacgtggaattagaatatttcaaacgagggaattttcccggcacagaggccgggaaaagaaagtgtgacgggggtctattttatttcagccagtccggcaggtcgttaagacccatcgcctga

SEQ ID NO: 125047 - DNA, 567 bp, Enterobacter cloacae
atgaagaagttatctaagctggcaatcctggccgttctttcaaccatcggtaccgccgcggcagcagaagatggcacgattacttttcaaggtactattagcgacgcaacctgtactattaccggcggtgacgcacagggcgaatctgaaagcccagactttaccgttcatttaccttctattagtacaaccgcgcttgcaacggatggacagcgcgcaggtgataccccattccacattacgttaagcggcgcaaactgcaccaatggcaaagttgccagcgtattcttcgaactggcgcaaagcaccaatatcgatgccaccaccggtaacctgaaaaataccgtggctaaagcgtcaggcggagctgagaaagttcaggttggtttactggattcttcaaaagcaaaactgaacctgaataccgcaaacgatagcgctaaaaccgttacggttgccggtaatacggctcgctttgattactgggcacaatatgtggcgacgggtggtgcatctactgccggtcaagtctcaaccgacgttgtgtactccattaaatatcagtaa

SEQ ID NO: 125048 - DNA, 738 bp, Enterobacter cloacae
atgttaaaaaaacttgttatatcttctgtattcatgatgacgctggccttttcctttgtggccagtgcaacgattcaaattatgacaacccgcgtggcattcaacgccggggagaaagaacaaacgattcgtattaataacgtcagcaaagcgcctgaactggttcaggtgtggctttccagcaccgataagagtgacggcatcgccaaagaagatttgcctttctttatcaccccaccggcggccagaattaacggccaaaaggggaaagttttccgcatattccagacggaaggcgccgccgcgaaatatccaaaagatcgtgaaacggttctgtggctcaatgtcctggatattccgcctgaaatggcggacgacgtagataaaaatcagctaaagatggcgttcagaacgctgattaaatttttctatcgcccggttggtctgaaaggtaatccgatgaaagcggcggatgaattaacctggcaattgaaaaaagcagccaacggttatgacgtcgttggaacaaataattcgcctttccatgtaagcatgacaaatgtctggctccgagatgctcagggtaaagatgtcatgattgatggcgagatgatcgcgccatatagcacgctggtatatcacttcccgcaggttaatgccgtgcaggggaaagggacattccaatacaattatattaccgatctgggtgcctatattaagcgcacgtataacttctga

SEQ ID NO: 125049 - DNA, 2574 bp, Enterobacter cloacae
atgtcgatgttttacaagaaaactaacattctgcgggtgattagtggctttgtcatttcggtgaccattgcgccactcgcagtatatgccagtgataccagtaagccgatgacattttctcgtgggtttatgaagtattacgatagcggaatcgatctgacacaatttgacggcgttgaaaaaatactgcccgggaaatatacgcttgaggtttacagcaacctcaagccggttaatacctggaccgttacctttgtggctgcaaataatgagcagggattcaacgcctgcatgacgcccgaaatggtcgtccgctttgacgtcgacacatcaaaacttccccccgactggaagcagaatacctgcattattctccctgagctgattaaaggcgcgacggttaattataatgcggtagaagaacagctggatgtcacgattcctcaggcaatgctgctgaatacgcctgcgggttacgtaagcccggagttatgggataacggcgtaccggcgctgatgtcctcctatacccttagcgccaccagttcacgttatcgccccgctcaggacaacgcgacctatctctacagcaatttgcacaataccctcgcactgggggcatggcgttttacgacctacgacagcctgagctccggcagcgacacggaaaataccggcgtacagcatatccaggcctatgccgagcgggccattgcgccgctgcaatcgcagatagtgctgggcgatctgaacaccaccggtgatttttttgacactaccgccctgcgtggcgttcgtctcgccacggacgatcgcatgcttcctgactcggtacgcaactatgccccggtggtgcgcggcatcgccaacagcaacgccacggtgaccatcaagcaggctggcaacaccctgtatgaaaaggtggtgccgcctggggagttcgccatcagcgatctctatgcgacaggctataacggcgatcttgaggtcaccgttaaagagacaaacggcaaagagtcctacttcgtggtcccctactccagcgtgccgcagctgctgcgcgaaggttactcccgctactctgtggctgcgggtgaaatccgcgatacctggctgaaagaggatccgaaagcggttgagggcacgtttcagtacggcttattcaataactttaccggctacgttggtggacagagcgcgttcgaaggtgattatgcggcgctgatgaccggttttgcgattaacacccgtctgggcgcattaggcgtagacgtgacgcgctctttcacccgcttcgaggggcagccggacaccgcaggctgcggcaccttctgcaatatgagcctgcgcattagcctggcgaagaccctcccgacaaccgggacgaacttcagcctgattggctatcgctattccagcgcgaatttctactccctgagcgacgcggtcagcctgaagcgctcgattgaagccgatgaagaagactttctcccggaacgctatcgcgagcgcctggaagccaacatcaaccagacgcttcccgccggttggggaagcttctacgtcagcgggtttgtgggcaacgtctggaataacgagcagggccgaaatgaaaagtcgaacttcgtgctgggctacaacaaccagtttggcatcacgacctgggggatctcccttggacgcaccaataacgacgatggcgaccacgaagatacgctctacctgaacgtgagcatgccgcttggccaccactacgagaagcaggctcgcctgggggccaactttagctataacagcgaagaagccaacttccgtacctcgctgaacggctccgccggggaacgctcacagtttggctttggcggctatttcagccagtccaacacgccggaaactaacttcggcatgaacctctcctacacgggcgagagcgcctcgggcgggatgacctacagccagtcccgggactcctttatgggaggggtcaacctgaacggcggcgtggtggtgcatgaaggcggcatcaactttgtgccaaccctcgcagacaccattggcatcgtggaagcaaaaggcgcagaaggctctcgcatctacccggattcccaggccgtcatcaaagacaacggctacggcattgtcgggtatctggtgccttacaagtacaacgaggtgtacgccgacccgaaaggcaccgcgtataccgtcgaggtcgacgacacccgccgaaccatcgtgccaacctccggcgcggcagtgctgatcaaaatggacacccaggccaatcgccagagctttgtgcgctttatgcagccttccggcgaagtgatcccatttggtgcgtcggtactggacgaatcgcacaacgcgatcggcatggtcggtcaaaacggcgtggcgatggtggcgcttaaggaaggccaaaacgtctttaccctccagtggaagaaaaataaaaagcccgcgcagtgcggtgcgcgttatgtgaagcaaggcactgaggaccggccaaccgaggaagaagcgtttaaggctattgaaattacctgtatcaataacggggcaacaccatga

SEQ ID NO: 125050 - DNA, 996 bp, Enterobacter cloacae
atgaaacggatttttacggctgcgctgattcttttatccacggcgtttatctctttaacgtgcaacaacgcctatgcggcgttgtgcaccctcacgtccccgttggcgacactgaatatcatggacgacatcacgcttaacgttataaagcagcgtgaagtcggcaaggttttatggagcaaaacctatcaggtgccggacgtcagctacacctgcgacgcgtccacccaatcttcatggcattcaagctattcgcgaagctatatccgttcgcagattgatcatgtctataacaccgaaatcccggggataggcattcgcatgcgatggcccacgcagaccgaatcttcatggctgccgggtaactcgggttcgccgaccacgtgctccaccggttgtggggtgaaaaacagtacggttctggtggaaatggtccagaccggctcgatgcctgaaggggaatactttattccagcgggtaaggtggcggaggcactggtgatcccgtccgccgatgaaagcgaaaaactgccgattatggccatcaactttggtgttgccattaaggtggttaccgcctcgtgctccatttacccctcagcgacgaacgtcgatttaggcacctataacatcgccgattttcaaaaagacgatacttttcaaggtgttaaaaaagacttcagcatcaccgtgggctgcccttctacggaacaaattggcatcactttcaactccttaattaacacccctttaggcgcgttgaccggtgtgatcggcgttgaaagcggcgatggctatgcaagcaatttcagtattcgcctttttgagaagaactcaaccgcgatcacgctgggtaaggagaaggtctataccgcctccacgctcaccaaaaactatcaggcacaaatctatgttggtggcggggtcgatcgtaagacggtcctcacccccggcaaagttgtcggcgccgttcaatacaccgttgtcattaaataa

SEQ ID NO: 125051 - DNA, 1734 bp, Enterobacter cloacae
atgcgttgtcatttcaaaatcaaaaacatcctgtttttactgcctttattacaggtggcccatgccgccatactgccctcagttcagaacaagcaggaacttgaccgcctggagcgtcagagtaaccagtatctgattgaagaggcgaaaagaacggaagcgttgctgcaacagcagcgcgcaactcgcggtgaagacgcggagaccgggctgccggcaaattcatcgtggaagttcaacgtaacccggatcgagatcctcgacgatcatctgttcgacggatcgccgcagcgcgaggagatcgtccagcgctatctgggtaaggatctgggtaaatctgacattttcaccttagtgaaagagttaacggatttttatatttcccgtggctatgccaccactcttatcagcatcgaccccggcaacatcaagagcggtacgcttaagcttcgcgtgctgtggggaaagattaacgattttaaggtgaacggccagacaccgggcctgcgtgatagcacgcgtctttttaccgcctacccgtttgccaaagacaagatcctcaatatgcaggatgtcgaccagatggttgagaacctgatgcgggtctcggagagggataatattagcgttgaaccctcaatcattaatggctattccgatcttaacctgattcatcagccctcatttccgattgacgcggcggcggggttaaataactccgggagcaaatcagaaggctggcagcaatattacggcagcctgacggcaaaaaatattgccggattaaacgacatttttaatgcgtattactcgtggaacgatctgaaaaataataatgataaacaggactcctggtcatttagctacagcgtgccgctgggctattgggggtttgataccagctattacaaatccgaatacgaaaaaggcatcgacggcggcttcggcatttacgattccgatggcacgtcagagcgtgcatccctgcgtatcagccgcatgctgatgcgtggcgcaacgggcaaaaccagcgcctggatgaaagtcgaacgccgggataactacaacggcatcgaaaacgcgcgcattgacgttagctcaaaaacctacacctcgctggcgtcgggcctgacctacgttggcgccatgggcggtggctggttctatggcgatctgagcgtcaccgcggcggtgccgtggtttggttcagcccgcgacggcgataaagaccttgagggtttcgacgtcgattatctgaaatacaacggcattgcctcctggacgcgcccgctcgctaagtttggccgactcggcatgacctacgagctgaacagcggttttcagtacacgccggatgtgctggtgagtgatgccaaagtgactatcggcgatgaatacaccgttcgtggtttcaaagacgataacgtgatgagcgacagcggcgcgtggattgccaatagcctgcagtttcctttcgatattggactggccggtatttaccagctgacgccctatattggctacgacgttggcttcacaaaagataattgcccgaaaggcgtcaatgtctgcgacagccaattcatgatgggcgcatcagtgggcgttaaagccactggcagccatttctcttcctacgttatggcagggtggcccgttaaaaaaccagactcaatggaagaagaaaccgtcgataacacggtggtttattacaaaacggaaattaacttctaa

SEQ ID NO: 125052 - DNA, 8640 bp, Enterobacter cloacae
atgaaaaacaaaaacacacgcagcggaaaaataaccacgcgcaatttgcataagcggctctgcccattatatctgtctttggccggcattttctcggccccggtcgatgcggcaaccacgcctgataatcgtcagtcgaaaggccctaccatgggccaggcggccaacggcacgcccgtggtgaatattgccgatcctaatgcgaaaggcatctccatgaataaattcaacgaatttaacgttgaaaaacaggggatgatctttaacaacagcatgcaggacggcgtaacgaaaattggcggctatgcggtaaaaaacgcccaactgcagcacgaagccagcgccattatcagcgaagtaacgggtgcgaaagcgtcctacattaacggcacgatggaagttttcggtaaaaaggccgacatcatcattgccaacgaaaacggcattagcgtaaacggcgcaaccaccatcaatgccaacagcctgaccctcagcaccggtaaagtgcaggcaaataacgacggttcctataagctggcggtcgaaaaaggggcggtatccgtcaccggtcagggcattaataccgacgggctgggctactttgacatcgttagccgcagcgcgcagctggaaggcgaaattgccggtaaagcagacatcaaagtgctggcgggccagaacgactacgaccttgcgacccgtagccacaccgtgcgtaacaaaggcgacggacgcggtccggccgtggctatcgacggtagcgcgcttggctcgatgtacggcggtaagatccagctgatcagcaccgaatccggggcgggcgtccgtcatgccggcggcattatcgccagcagcgatctcgagatcagcgcggatggcgacattacgctcgccagcctgtcgagcgagaaaaatatgtcgctctccggcaagaatatcaccctgaacaaatccacttccggcgttcaggcaaaaaacgacattatcatgaacgccctggcgggcatcacgctgaataacgacgtgatcgcctcaaccggcaaaatccgcattgatgccagctcgctggtgcaaaatgccgcctcgctggtaaccaataacaccactaccaccgtcccggcaattcagattaacgtcgcgggccagtataccctgaacggcaaactgcaggcgctggacgccaacggaaaggtcattgcagacggcgtcgtgacgctgaaaaatggcgatttcgttgtgaaggtcaacggcgttgaagtgccgtttgcctcgctgatctcggatacccaggtgatcagccacagcggtgacgtacagattaccgcaggcagcatgaataacggcagcggcagcgtcctggcgaaaaaaggcaccctgcagttcaccctgaaagaggcctttgtgaacagcggctccgtcagcgcgacgggggacctgacgattgcgtccggctcactgaagaacgacggcgtgctgtacgcatccaataaccagacgctccgcgtcggcaacctggacaacaacggccgcatcttcgcggaaaaacggctggtgatgaacgccagcgcgctgaacaaccgtggaaacatcggtgcgaccactgacgcactgcaggtcaccacgaccggcaatttgaccaacagcggcaccctcgtgggtgatgcggcagccgtcagcctgaacgtcggcggcgacgtcgacaacagcggtaacatcatcagcaacgaaaaagatgtctccctgactgccagcggtaaatccatcaagaaccagggcaaaatcgaggggaaaaacgttaccctgaccgcgtccaacgccgacgcgacgcttgaaaacagcggtacgctgaacgccagacaaaaagcgcaggtgaaagcggcgaagctgaataacaacggcggaaccctgagcgcagcgggcgatgttgcgctgaacgtcagtaagcaattaaataacacccacggcggcgagatcctggcgggagaaaaccttacgctggacggcgcgcagacgactgcactgaccaacgacaatagccggatccaggggaaaaacgtcaccctgaccaacatgtccactctcaccaacacgggcgacgccgttctgctcgcgagtggggcgatggatctgtccggcacaacaacgctgaccaactcggcctccggcattcaggcaacgtccatcctgctggaccacatcggcacgctgaataacatcagcgatgctaccctctatagcagcggcaatctcaccctgtccaacatcggtaccctcaccaacgatgcgtctcaggtggttgcagacggtgcgctggcgatgctgaacatcacaaacgtatccaacaccaacagcgccgcgatggtcggtagcggcagcgtaacaatcagcaatgtggatacgctcaacaacagcaacagtgcggtgatccagtctgagcatgccctcagcatcaacaacgtgggtacgctgaacaacagcactgacgcggcgctcctcgcctcgggcaacatgaccctggacggtgtgaatacgctgaacaatgcctcggtgatcctcagcgatggcagcattacggtgcagaacggcgacacgctgcacaataacggcgtcgtgcaggcgggcaccgatctgattatccgcaatatccgcagcctgatgaacgacgggagcgaccatgtgctcatggccctgcggaacctgacgatcgaggatgtggattccctgaccaactccagccaggcggtgatcacggccagcatgaacacggtgctgaacgccgttggcgtactgactaacctctccggtggggtgattcaggccgttgatggggcgttaaccgtcgcggcaaattcactcctcaacagcggcagtgaaaatggttcgaattcgactctggtggcgggcggcgatgtgaccgtgacgtcagagaatgtgaccaacgagagtggcgcggccattgtctcgacggataacaacctgacgctgaacgtgaagaacacccttaacaacagcgatgaagccgtgctcgcaggggcaaaaacgacctcgctgaatgttcagacaggcaacatcaaaaacaccactgaagcagtcattgcgggcacaaatattgcagttgcgaccaaaaacctgcaaaacgatgccaacgcctccatcaccgccgaccgggatctgcagctgactctcgccagcctgaacaacacggccggtattcttgaggccggacgcgatctcacgcttagcgttgacaacagcctgaccctcgacgccaataaccagaatatctacgccggacgcgcgatggcgatcgccacgcacggcgactttaccaatagcacccagatggaagcgattggcgatttgaccgtgaatgcagacggtaatttcaccaacgccgtctctatcgtgaccggaggcgatctcaacgtcaccgcgggcaatatcaccaacaatgccggtagcctgctgtggacgatgggcgatatgagtctggaagcccgtaacggtactttcttcaacggcgtgtcgggtaacgtgctcagcatgggcgatatgtcgattatcgcgaaggagatccataaccaggccgggatcattcgcgcagagaaggatgtgaatttagacgcggaatccatcagaaacgaaagtagctataccggcgacgaaatctccatgacgggttatcagaacgccagtgcggtatatagcaccgtagagcatctcgcgacgaaatctaacaccatgattaacttctcaatgccggttgtgacctcgggattgagactggatcatcaggccgagatcagcgcgggcggcaacattaatatcaaccagcgcaatatctacgacagaaaacagattacaaacaaaggtggcctgattcaggcggcgaaagatattacggttaccggtgatatctacaactcaccggaatacggtgaaatgtccatttatgattatctgcagctgccgttagagatgcagggcgggctcacctatcagtggcatttaggcgcctatcatacgtcaacgtggaattttgatactctttaccagttcctcgacttcgagtttggcaatggcgcagcggccggtaagacaggcagtgatgaccctgaaaaagcgctctggtacaacgccgtcgtgatgaccggcaacgagtccacgcttttcaacaaaatgatgtccgacatcttcggtgaaacctggcaaaccaccgactacggtacaatgtgcggtatctgggcgagcgtaacagcctccaataatgaggcattaaaaaacaataaaacctacttcgtcccttctgaaaaaggtgagataaccgcgggcggtaactttacgcataacggcggcacgctggataacggtattgcggacgctggggtgattaacagccacagcgacgtaagcgatatcgacgtgggtgaatacaccgtggatacggtcattgccggttacgatgtccaggtaaataccaagaaaattgacgagctggcgatgggcattagcccgatgccaaccatcaaggatatggtctccattccgggcatgtttgaagtctcaaccgactttaagaaaaccgccgaagcggaaaaaaatggcacggcttatccggggccagccaacaatatcgttccgatctttgaaacgcgtccgtcaatgatcgatcagagcgcttacacaggatcggattacttcttcgatcaggtgggctatgacccgcagaagccggttaacgttattggtgataactacttcacctcagaattgatccgccgtgagatcaacagctcggtgggcagtttcttttcgatccgtgatggtctggaaggcgacgcgctggtgcaggccctgatggacaatgcaggcgtggccgcacaggacagcgagctggggctggttgtcggtcaatccctgaccgaggagcagcgcaacggactggacgccgatatcgtctggttcgtcaatcagacggtgaacggcgtggacgtgatggtcccggtcgtgtacctgtgccctgaaacgcttcgtcagatggagagcggagacgttaacggcggcaccgcgaccgttcatgccggtggcgatatgaacgtcgacgcgaacagcatcaataacgccaacggtacaatctcatccaaaggcgacatgacgctggtctctgatggggatatcaacaacgttagcaacggcatgagcgcgggtatctctgcgggcggcgacatcaatatgtccagcatcagcggcaatatcaataacaacggcgcggcgattaacgctgagggcgacgtgaacatgtccgcagctcagggtgacatcaccatgacggccagcgtagggcgcgatgagagcggcaagcaggtgatccacgcctttgaggacggcgttaccgcaggcggcagcattaacatggaggctaaatctatcacctccaacgcgtcggatattacggcgggtcaggatgtaagcatgaaggccaccgacggcgacgtcaccttcaatgacctgcatgaaattgacgccacgcgtatcattgataacgacgtcagaagcgcgctcaactacacgatgtctgatacctcaaccaccacgggcaaagccattggcgcgaatgtttccgctggcggcaacatgagtatcgaggccaaaaacgacgtagtgatggaaggggggacctacaacgcccagaccggcagcatcaccgctgaaaatgacgtgacgatcaaaacgtcccaggacgttgttcacgaagaacagcacagctcgtcacgcgagtttgtcatcagcgcgggcgtcagcggcggcggccagtcggttaacaccagctacggcaccatggacggcggcagcaccgaaacgacctccggcgactatgtcagcgcaggatcagaatccgatacctccgctatcggcaagaagcctggccgtgcgccggtgaatgatacggctggcttcacgtttggcatgagcacctccagtgactcgtccgtcaccgacagcaaaaagaacaccaatgccgcaatcaactttggccagtccgggacgattgaagccggtaagaccgctgacatcggcggggcggatctcagcgcgggcgacgccctgaccatcaacgccgaggacgtcgcgaccacgaaatatgaagatgagatgaaaaacacctcatcccataaagcgacgtcgtttggtatcacgggtgaagcccacagcacccttgtagatacctttgataaagccggtaacctgattgaaaaaggcaccgaaggccagactgccaacgccggaacaacggctgcggaagtgctgggcgaggcctctaacctgctgcttaacgatctggctggcggttccgttaccattggcggcagttcgtctaaatcgcactcaacctccacctccacggcggaaaacattaaccacatcagcgccaataacgtttcgatcaataccaaaaaagacaccacgttgaacggaacagacattagcggccagaacgttgaaattaacgcaggcggcgatgtgaacatgaatgcggcgaaatccacatccagctacagcaacaccaccgaggagcactcggcgggcatctcggctggcgtgggcgtggatctctccggcgtgagcggcggcgcgtctgtcgactacagcggcagcaaagagaccggaacaggcaacagcaccagctacaccaacagcaccattacggcaggcgacgtcaaaattaagtccggcggcgacatgaccatgagcggtgccaacattgatgccaataccgcggacgtggatgttgcaggggatatgaccgtgaactcccttcaggatacggttcacacggacaacgagcgtgccaactggggtgcatccgtcggtgtagccgtgtcgacgaaaggcgtgatgcctaccggggccgttaacggcggcggcggctcagaggcttatgactcggcaaccaccgcgaagcagtccggcattcacaccacgggggacgtgcaggtgaaaaccggcggcgacctcaacatggcgggggccaatatcgtctctgataatggcaccggtaacgtcaacgttgcgggcaatatcaacgccaaagacctgcaagataccgttgagcaggacggcctgtacggcggtggcggcgtaggtatcggtggtttgccgggtaaaaaaggcggcattccatcggctaacatctacgtggatacggtcgatgagatccaccgtaacgaaacgcagaaatccaccatttccgtggggggcaccaccagcaaaggtacgactggcgagatcaacaccaacaaggatgagatgtccgttgtcacccgtgacgaaaaagaagcgggcaacaatatctcctatacccttgcggatcctggcatcggtaagaagaaaaaaggcagttacgacgtcgatacgccgagcgaccaccacaatagcggctcgtcgaagcattcgagcgatggcaccaggaagaaagaggttacgccagcgaaacctgcgcacagcgaagatgtgccagccgttacgccgtcgaaagccgacaatctgaagcctgcgccgaaaccggctgacagtacgaagaagacggataccaccccgtctaaaaccacgcacagcgaagaggcacctgccgttacgccgtcgaaagcggacgatctgaagcctacaccaaaaccggctgacagcgcgaagaagacggataccaccccgtctgaaaccgcgcacagcgaagcagtgccggccgttacgccgtcgaaagcggatgacctgaagcctgcaccgaaaccggctgacagcacgacgaagacggataccaccccgtctgaaaccgcgcacagcgaagcggtgcctgccgttacgccgtcgaaagcggacgatctgaagcctgcgccgaaaccggctgacagcacgacgaagacggataccaccccgtctgaaaccgcgcacagcgaagcggtgcctgccgttacgccgtcgaaagcggacgatctgaagcctgcgccgaaaccggctgacagcacaacgccgaagaaaaaatgggacgttccaaatacgaattacccaacgctttctccgggttctgcaaccggtaaaaccggcaaagatatgccgaaaacgcctgagcacagaaagtggaacggcgacatgaccaacggcgtggcgccgtcgagcaacccgaaaggcaccgacgtcaagctctcgccgggttcatccaccggtcagaccggcatggacatgccgaaaacgcctgagcacaagcagtggaacggcgacatgaccaacggtgtcacgccgtcgagcaacccgaaaggcaccgacgtcaagctctcgccaggttcctccaccggtcagaccggcatggacatgccgaaaacgcctgagcacaagcagtggaacggcgacatgaccaacggtgtcacgccgtcgagcaacccgaaaggcaccgacgtcaagctctcgccgggttcgtccaccggtcagaccggcatggacatgccgaaaacgcctgagcacaagcagtggaacggcgatatgagcgcaacagcccagccgaagcagtggctgccgctaatggcggaaatgccaattaatatctatgcgaaagtgaccattacgttccaggacgaacagctgagttaa

SEQ ID NO: 125053 - DNA, 324 bp, Enterobacter cloacae
atgccatcacgcaaagagattattccgaaagcgaggtacatggactggcgtgtaagcggttccaaacattgccgggtggcggcttcgccttacccggcctacaaaagcgccgtaccccgtaggtcgggtaaggcgcagccgccacccgacacaaaaaaagccagcacaaaggctggcttttttaacgctcgtgtcagtcgattatttcagaccggcagcttcacgcagcagggcggctttgtcggttttttcccatgggaaatgttcacgaccaaagtgaccgtatgccgcggtttctttgtagattgggtgcagcagatctag

SEQ ID NO: 125054 - DNA, 879 bp, Enterobacter cloacae
atgaccgaagcagaatcgttgtcgtataacgcactcgcctggcttaaaaaacttgatcatcgcctgaaagcgaaatatagcgagaagaaaaatactagcggtaaaatcgtgactcaggttttgcgttggtgtactgagctggatttgatcccagctaacagtttgttactgcctgagttcctttttacagtggcattgctgaataagatatcagatacccagcaacgtcttaaacaggcgaactttcgtgacgatcttagtttaaagagccgcattgagagcgcacagttaagtgatcaggagattaaaacggcgggagttcgaccacagcagcatcgtgtgctgctccgtcttaatcagcccttggtcaatgagttggggatgaccattgaggctgtcgatacggattggcgtaagattacgctgatgcagtttgatgttcttatcgtggtggagaatcaggattgtttctaccaactggcgctttttgattattcccaatgcgattttcgttctccgctgattatttaccgtggcgatcgggcatatagtaagggggctgttgcgttgaagcattgctggttgaaaacagggaaagctgcgatctattttggcgattttgacccgaagggagtcagcattgcaatgaatgaaggttatcattttatgttattaccttcgccagatacggtaataaaaaaatcctctccagtgatgtttcctgatgagcagttaaaattcttacctgaattattagggggtaagatacattgtcattttcgtgattatttgttggttttggaaaaacatcaagcacttaggcagcagaaaatgcagggagaaatcttgaaaatggttatgttgaaaacttcaggttag

SEQ ID NO: 125055 - DNA, 1239 bp, Enterobacter cloacae
atggcgcaggaaatttctccgctatccggcctgtttaaaaacggtgctgaacggctggcgttgttgggaaaacatcatcacgctttgatgaagggttatatcgatgggtttattgatgaaacggcttttagcgaccagacattaaaaaagctgattgcagcgcgtattgtatatcgccctgatgaacaacagccgctgaggctacgcccgctggtaagcgatctcatcgccagcatggttgctgatgagagccgacggcaaattaatgcggatgtggcagaaaaactggagcagatccgcaataaggtgcaggcttggcgcgatgcttattataaaggcgattacagtattgctgaacgacaaatgcagagactgactgagctcattcacgatcttagcgggcaatttgaagaggctattgatagcctctggcatcgtctgaataatgatttcggcttcgtcagcacgttgaatgaaaaaattaatgagaatgcgcgggcgcaaaatcaggttcgccggctgcttgatggactggctttaatcgctttccctgaattgatcgagtttgctgaaaataatagttcacttcgtaaattattagtcagccagttacaattgcgcgtcagtcttcaccatagttcactactggccgttcagcagcgtctggtggatctgatggctaaatttcgccaacagcagtcgcgtacactgttagtgacgaatatggctgcttttttgcgtcagcatcctcaatatcaaccggctagctatcctgaacgccgggaagtgccgaatatattcaacattgcgacatcactttcactgcaagcttccatttcgctcgacaggcctgtggatcgacaagctatggcggagatgttgctcgctctgcctcgtgcatcggttatgtccccacccgtgccaaaaagtgcgggttcagtaatgcctcccgttgatgaggaggtcgctgctcgtcaggttgcgcttaaaatggacgttgaggatttttatgtttttgctgccggacaatctgggccagttagcgcactgcattatctggcggaaaatcatctaagctgggacagcgaaatatggctttatcaggtcattacggaatatcattcattgccgctagtggataaaccgcgtttctggcagcgttgtgatgagcgccaggccaccccggtaaatgatctgcgtattatatcggatgtaagtattggcgtgaggggaaaatga

SEQ ID NO: 125056 - DNA, 624 bp, Enterobacter cloacae
atgctggaacatggacttttaatcaaaaggctactgacaggggaatttatttgccgtatcaacgacccggatgcttatcgtcacttacaggatgagattacccggcaagcgatggatagctatttgcgccctcttaactacagaattgtcagtaatgaaactaaaactgtctattatgcgggcttttgtgagatgaatcgcgatacccgcagccaactgatgaatcagtttaaggacatcatctcttctctgctgcctctgcttgaatggttacagctcatacaggaggcgcaagggcgggagagtacactgaccgctggtgactatatcaggtcgtcggaaatcatgacgcgtgtagaggataatcagagcctgcaacagcgtctgaatcagctttccagcgatcgttttttcaattgtaagagtgattccattgatcttcagctcaaacaaattttccggcgtttgaaagagcatggctatgtcagacaacccaacgccgagcagcagatatttattgctacgggaaaaattgattatttgattgacgtgatccgctttatccgtgatgaagagcatttaccagttgaagacaaaccgcctgttcagcaggagcttttataa

SEQ ID NO: 125057 - DNA, 3666 bp, Enterobacter cloacae
atgccacaactgcttcgcatcattcttatacacactcacctgcctggtgttgttgaaattcaactggagcagcataccaatatttgtggaactaatgcttccgggaaaacaactctgcaacgccttgtcccggttttctatggtgaacagcccaataaagtggtgccgagaacgcgaaagaagttcgacgagttttacctccctttcagcaatagctatattatttatgaataccagcgagaaacgggtgaaaattgcctggttgttcttacgggtaaaggtgaggggggcgtggaatatcgttttgttagcgcgccttatcatccagactttttccttcgttataccgaagatggcgcgaaagggatgagttataacgaatggtctgcccagatgcgctgccgggatgacgtctcagtttcagctaaaataggttcaacgacggagtaccgtagtatcattcagaatgatgtcgcctcattacgcggtaattcgacggaggcaatgagactacgccgcctggctgtatcgtttagtctggtgagcggtagccacaagctcaggcatattgagaaattagtaagcgcggttcatgccggtgaaggcaagatggaaacgctcaaaaccatgctggcggcgatttttgccgatgatggcgtgacgctcccgcaaacaaaagtaaaaagcggctttgcgcgggaatggatccaaaaaatgcgccagtcgctgcgctacgataaattacaacaggaatttgagttcatacagcgcctgggactcaagctggatgatacagaggtacagctagccgcgctccaccccttgttaagaaacgatgaacaaattcagaagcagaaacgcgcggatgcagagcagttgcttcaccagtgtcgtggggagctcgttcaattagaggatagctttaatcaacagcgtaatgcactgaatgataggttaagcgaaacgcaaagcgacctgaaaacgattcaggcatggctggatcatatccagaatcaatacgactgttatgaacgcaaagagatacgcctgttacagacgcacatggaagagttacctcaatggcgcgaggcgctttcagtgcaaagcgaacaattccggcttatgcaggagcaggttggtgaactttcccgagaatttgaacagcacaaagcaacactaaaagacagtgtttaccgccaggaacgtctgacccaacaaaaaattcaggactgccagcgagaaaaagaggcggtcaggaataaatctgacagccagaaagagatactttggcagcgcttcgaagagcgaaaacaacagcaggaaaatcactacggtgaacaactggagaagatttcaggcgatcgaatggctgttagcattgagcttaaacattcccagttaacagctcaagagcatgaagagcgccagtttgctgagctacgcattgagcaagctcaggagcgattattgcaactggctgagcagcgacaaaatgcactgacaacgctgtctgaagcccgtataaagcaagatagtgtagagcaacagcttcacaacgcccgtgctaacttacatcagactgaagaacgactgcagcggctgcatcgtcagttggatcctgaacagggtactttacgtcactttctgcgtttacattatgagggctgggaacagaatctgggtaaggttctgaatgaaaatctgctggaacgcaaagatttgctaccagaaacaggcgagctgtcggaatcgctgtacggcctgcaactggatttaagcgtgttagatatgcaggattttgcgcaagatgaggcttcaattcgacacagtcttgataaggcggagcaaaccagagcccgtgctgaagaagtgaagaacatgtccgaagccacttttcaggagcatcatcagaacgttaactgtttgaaatcacaagtggaagagtatgaaaggcaacatcagcgtcaaagccaggaagttggctatgctcgcgatgcccgatcgcgtttaatcgcaaagcatgatgcgctggagcaacaacgtcggcaggaaaaacgcgtccgtttaagggctttagacaaagcacatgccgaattaacgcagcagaaagaacaagatattggtgcgttgacggaagaatataatacgcaaaccttgcaattaaatattgacctgcaaagtgagcagcagcttattgacgagaagattgaggaactgtctagccagataaataaaaaatacgccgatatggaggagcagattaagatcttccagcaggcgatggacgataatttagcgaagaagggagtcgatccccgcgaagtcaatgtactacggcagcgtattgaaacgcttaaaaaagatattcaggaagtggagtctcgtcgggatgagttaaccgaatggctgcgttttatcaaagttgactacggaacgttgcgccaggaacaacagaataaagaaagtgcactctctcaactgaatcgtgaactgttgcagaaaaaacagcaattacaggcagattatcagaataaaaaagacaggcttaataatgagaaaaaagagtatgagatgcagatacgacaggccagtgagtttgtcggtcagttaaaaatattactggaacgattatcacctttgcctttggccgaaatgattccgactcatattgacgcagctgctgatattaatgaacggatgtcgcgtaccagcgatatgttggagcaacacgccagtttgacctgtactctggagagcaaactgaatgagtttaagtcgcgctttaatcaggacgctgaccccactttctttgaattgttggattctgagatagataaattacccgatccttcaaggacccggcagcaattgccaatacttgagaaactactacagcttcttaaagataaacagcagcaattactggaaatgggggagaatatcggtggcgatctgaaaaaattctttgatgttttcagtgatatcaatcgccggatttcgcaccaaagtcggcgtttgagcgatgcagttaccgacgatttgcaactggagggcatcaataaatcagaagttcgtattttatcgaccattgaccagttacgcttctggaaaccattaaagcgctttgctaaaaactatagtgactggcgctcgtctggtcagcaactacctcccgaaagctatttgaatgcccttatggatgtagttgaactgctgcatgccgatgagcgttttacaattgaatcgttattaaatctcgaacttcacctgaatgaaggtggggaagatattgttatcaaaaacgatcgccagctactggaagcatcaagccacggtatggcctatctgatcttgtgcaaatatcttttggcgttcacgcgtttgttaagaggcaaatcagacgccgttattcactggcctattgatgaaatcgggacgctggcttaccacaatgtggagaaattatttattgcctgtagccataataatattgtgattgtaggcgcttttccgaatgcggagtctgatgtgttaatgctgtttaagcatcgttatttgctcgatgtcgatcagcttgagccgactcagcgtaggctgaaaaggatccagccgaaagtgagccgcctttctgtccgtctggcgcagatggaacaggaggcaatgtaa

SEQ ID NO: 125058 - DNA, 2481 bp, Enterobacter cloacae
gtgttatgcaatggattcatgataaacaaatggcaaatagatatggaaagatcgcttcgcttcaatacgttattcttttatcgcaccccaggattattgttactgttattactctttcctgttctggttcaggcaacggaatccgtttatgaacaacagattcaacaggcgcgtaacggtaattacacgccgtttcttgattatctgcagcattatcagcaacagcacgccctgacgcctgaacaggtcgcagactggttacaggtggcatcctgggcaggtcatgatgatgaggtgattgaggtctggcagcgttatggcatttatatgccgctgcccgctcgcggcgttgctgccgttgcccaggccaggagaaatcaaaaagcgtggcagccagccttatcgctctggaaagaggcgtgcagccttgcgccgaataacgatgattatcgtatcggctatatcaaaaccctggccgatgcccgcatggatgcactcgcgctgcaggaagcccggcagctggtcacccaaaaccccactcaggcgcatcttcagacgctctcgtatgtctggttacgtcagggaaaaagctgggatcggcttctggcggacacgcgcgcactggctaccgcgccagagaataatgtcctgctcagcgagcttgtcgacgccctgacggataaccgcgtgaatacccccgcgctcgtactttcacagcgggtgccgctgtccccggcggagcgtcgccgtcttgagcgtaacgccgccgccgaaagggttcgccttgccgatgtgccaggcagaacagaaaaggagcgtctgcagcttgcgcaatctgcgctgaatcgttacgacgttctgctttctcgctggaaaagcgagccgcaggcggcggaagatgtcatccttgcgcgtatagaccggctcggcgcgctgtacgcccatgctgattatccgcgggtcatcagcgagtatcaggatcttacggcagcgcagcacccggtgccggactgggcaatcggctgggttatctccgcgtatctgcaggagaaaaacgccgatgccgccttctcgcttctgcaacgctatccgcaatatgccgccgatccgcaggacgaagagcacgcgcttttctacgcctggctcgataccgggcagtatcgggccgcccgccagtatgtagagcgccagacccgtaacgtcccctggacccgctacgatttcggttcccctacccctcagccgaacgatcgatggctcaccgggcagtctctccgttttaactatctgctggcgacctacgccctgcctgaagccgaaaagctgtctcagcgtctggcgacaacggcgccgggcaaccagggattgcggattgactacgccactttgctacaggcgcggggcctgccgcgtgcggccgagcagaagctgaaaatggcggaggcactggagccatcaaatctggagcttgagcaacagcaggcttacgtcgccatggatctacaggagtggcaagagatggatttactggccgacgacgtgcttgctcgcgcgccggtcgatcgcagtgcccgtcgtctggacaggctcagaacggttcatcatatgtccgagctgcgcctcaatgcgagcaagggtttgcactccgataaccccgtcagcggtacgcacgacctgaactgggacgccacgctctatggcccgccagttgcggataactggcggctgtttgccggcacccgctatgcagagggtaatttcgatgaaggcaaaggcaccagccgccacctcctgggcggcgtggaatggcggcctcgtgacctccagctcgaagccgagctctccagcaaccgctatcacggcgcgaacaagccgggggctcgcctttccacaacttactttctcaccgataactggcagctcagcggcagccttgaacgcgtatctcgcaccacgcccttacgggcattacgcaacgggattagcgccaaccggggggaaggcggcgtgcgctggtatcaaaacgagcgacgtgagtatcagtttagcgccgccgtcagccgcttctcagaccacaaccaccgtcaggaatacacccttacgggtaaggagcgtctctggcaaaccccgtccctgacgctggatctcgaaccggggatcgccgccagtaaaaacagcctgcgggacacgctctattacaacccggcgcgggatctgtccgtaacggccgctctgtccgtcgatcatgagatgtatcgccattacgacaccctctggagccagcagttcgtggcaggcggcggcagctactggcagaaaaaccagtccgccggggccatcaccctgctgggctacggacaacgcatccagtggaacaacgtcatcgataccggcgtgatgctgaactgggataaacgcccttacgacggcaagcgcgagagcaatctctccgtcacgtttgatgcgactttacgcttttaa

SEQ ID NO: 125059 - DNA, 1950 bp, Enterobacter cloacae
atgctgaacatacgtttttccgtgagtgtgatactcattggctggttctgcctcagcgcgagcatttgcgcccaggcactcccgtttattgcccccaaagagagaccccagctggaggcgagcaagccctggccaacgaatcgatttctggtgctggcctaccacgacgtcgaagatgatgccgccgatcagcgctacctctccgttcgcaccagcgcgttaaacgagcaaataagctggcttttgcataacggctatcacgccatcagcgtgcaggacattctggatgcccatgacggaaaaaaaacgctgccgccgaaagccgttttgctcagttttgacgacggctacagcagcttttatacccgcgtctggccactgcttcaggcctggaacgtccctgccctgtgggcaccggtaggcagttgggtggacacgccagcaaatcaaaaggtcaattttggtggtctgatgacgccccgcgatcgcttcgcaacgtgggacatggtgcgcgagctcagccagtctccgctgattgagatcggctcacatacctgggcctcccattacggtatcgtggctaaccctcagggaagccgcgagcctgccatcgccaatcgcttttacgataaggcgacgggccgctatgaaaccgatcggcagttcagccagcggatcggcgacgacgtgcataaagtgaccgagaaaatcacgcaggtgacgggcaaagcaccgcgcgcctgggtctggccttacggtgccgccaacggtacgtcgctcgccatcgccagacaacagggttaccagctggcctttacgctggaagacggtctgggggacgtaaatgaccctggcaacattccccgtctgctgatcgccggtaatccttcgctaaaaacctttgccagttcggtcagccagatccaggaacacgatcccgttcgcgtcatgcacgtcgacctcgactacgtttacgatcccgatccggcccagcaaacccaaaatatcaacaggctgatccagcgagtttacgacatgaaaatcagccatgttttcctgcaggcgtttgccgacccgcagggcgatggccggatcaacgcgctctattttcccaaccgtcggcttccggtccgcgccgatctgttcaattttgtctcctggcagctccagacccgtgcgggggtgaaagtcttcgcgtggatgccggtgctctcgttcgatctcgatccctccctgccgcgcgtgcagcgtcgggatcgtcaaactggccagctgcacgaggccactgaaccttatatccggctctccccgtggaacccgcaggttcgccagcaggtgacggacatctatgaagatctggcccgctatagcaccttcaatgggattttgttccatgacgatgcggtgctgacggacgttgacgatgccggacaagacgccgctcaggacacaacgcgtcagaaaagccgtctgctgatgggctttacccgtgcgctgggccaggcggtgaagcacatccgaggaccgcagatcaaaaccgcacgcaatatgttcgtcttacccatcctggagcctgaaagcgaagcctggtttgcacagaatcttgatgattttctggcggcctatgactggacggtgccgatggccatgccgctgatggagtccgttccggcgaacgaaagcgacgcctggctgacgcgtctggttaacgtggtcgccgctcgtcccggcgcgctcgataaaaccattttcgaactgcaggccagagactgggagcaaaaaccgcagcgtgccgtttccgataaacagcttgtccagtggatgcgcgttctccagctgaacggcgtcaaaaactacggctactaccccgacgatttcatcaacaaccagcctgatatctcccgcatcaggcctgaattttcttcctactggtaccctgacaatgactga

SEQ ID NO: 125060 - DNA, 432 bp, Enterobacter cloacae
atgaacgaaaataccttaattttgactgaacatcggctgttaccacgtcttttcgatgccgcgttaactctggtggcgtggggaggatttctgtttttcctgtatgccaggctgtggatgcagttaaccgaagagagtgaacaccggtggagcgtcattattgcctactttaatacggtgttgatctatttgctgttcgccgcgcttaacggatggctgctgattttgtggtatcagtacaaccgccgccgcacgcatgtaagacggcgtcagcagggctattttcaccaggaggagctggcccgcagctttaatgtctcaccacagatcatctccgagatgagccagtacaacctgctgacggtctatcacgatcggattggccgtattattgatctaaagatcagtcaacaggacgaggaagaagagtga

SEQ ID NO: 125061 - DNA, 333 bp, Enterobacter cloacae
atggctaacgttaaacactacattacagctgatggatatgatccttttgatgcatatctgcgaagtttgaaagatcccatagcaaaagccatgattgccacgcgtgtcgccagaatgtcgacgggtaactatggcgattgcaaaccatgcagagagagtgtgtcagagctcagaattgaccggggacccggctatcgtgtctattttagtgaagtctccgatccggcagatggcgcagtaagtctggtgctattgactggaacgaaaaaaaagcaaaatgcagacattgaaagggccgttgagtacctcaacgactacaagcgcagaatataa

SEQ ID NO: 125062 - DNA, 348 bp, Enterobacter cloacae
atggctaaatcagtacttcatgatgacgcaatggtacaactcctgaaagattctccggatttcgcgcccgtctatcttcaccaggctttcattgaaattgacgagccaggaggctatgaggcgttcatgctcgccttacggcatgtgatcgaagcctctggcgggatgactgttattgcaaaacgtgctggcatttctcgcgaatcactttataaatcactctcaccaaacggtaacccctcatttaagcgtatcgcagaagtggcatctgcaacgggatatccgatttcccgaattgcaacagcagggttaaacgataatacaagaccgcatcaggcggccttgtaa

SEQ ID NO: 125063 - DNA, 876 bp, Enterobacter cloacae
atgagccgaaaagtcgatgttttcggcgaccgcctccgctcgcgggcgcaccagcttacgccgcggctgctgctggtggcgcgctatatcaatgaaaatcgtgaagcggtgatggaacagacggcgatggagatcgcgacgctgcttaaaacgtcggatgctaccgtcgtccgcgccatccaggcactcggttttggtggattgcgcgatctcaagcagacgctggaacagtggtttggtccggtggtgacctccagcgaaaagatctccaccacggtgaatacgcttaccagcgacgtcaatgcgagcattgatttcgtgctggaggggcaccagcatacctgtaacgtcttgtctgaaccccacaaccgcctcgcgatggcgcaggcggtctcactgctggctcaggcgaggcaggttgccctatttggtattggcgcgtccgggattctggccgaatacaccgccagactcttcacccggatgggactccccgccatgccgctcaaccgtaccgggatagggcttgcggaacagttgattgggctccagcgcggtgatgtgctgatcatgatggcgcaaaaatctgcgcatcgggaaggacaaaccacgctgcgcgaagcgaaacgcctggggatccccaccgttttgctgaccaatgccaccgactcacaattcagtaaagaggccagcgtggtgatccacgtcccgcgtggcggagagaagggtaaaatcccgcttcatggcacggtgctgctgtgtctggagatgattgttttatccgttgcctccaccgaaccgcagcgcaccattaagtcgatgaagcgtatcaatgagttgcatcgtgggttaaagccggggaagaaaagcggttaa

SEQ ID NO: 125064 - DNA, 561 bp, Enterobacter cloacae
atgcatgcaggtaaaaaagcactgttagccgttgcgatggcaacaattgtctctggttcagcatttgccgccgatcagggctccgggaaaattaaatttaaaggcgttgttattgacgcgccttgcagcattgcaccagacagcgttgataaagaggtggatctcggtgaagtgaccaccgccgtcatcaatgcaaacaagaagtccacccccgttgcggtagatattaacctgcagaactgcgttctgtcagatcccgacgatgagacggcgacgccaataaccaaagtggaagtgacgttcagcagcaccgccacctacgcatcagataccagccttctgagcaacacctatgcaagcggtgctgaaaacgtcggtgtccgtctgctggacaacgacgaagcaaacatcacccttggctcggcaaaaacggtggatctgctgcctaattcagacacccagacgctgcactttaaagcgcgcatggaagtgccgacaggtaccactgccaccgcgggccaggttgaagctaacgccaactatgtgctgatgtataaataa

SEQ ID NO: 125065 - DNA, 2439 bp, Enterobacter cloacae
atgaaaaataaatcacaaccgataatcatcattactgccatcttgcttgcgcacgccgcctctgccactgaatttaatattaatgctatcgataaagatttacggtcgggcattgatctttctcgctttaaagaagagacgtccgttacgccaggacgttattttgtcaccgtctcgatcaacgatattccactggcaaacggctgggaactgacctggaaagaggttgataacaaagcccaagtctgtattcccgcagaactggcagacacctttggccttcaggacactattcgtaagaccctaacgcttaaacagggctgcgtggattttaccccgcaggcggatattaaattccgcttcgagcaatcaacccaaacgctgcacgtcaccgtacctcaggccatgatgcaatttcgtccgaacgactggatgcccccctccacctgggacaacggcgtggccggcgtgctgctggactacaacctctttgccagccattatcagccgcaggaaggtagcagcacggataacgcgaacgcctacggtaccgcaggtgccaacctgggtgcatggcggctacgtagcgattatcagtacaatcaaacgcatgccgagggaggatcaacccataacggccgcttctcacgcgtctatatgttccgtcctctgccgacgcttggcgcgaaactgacgctgggtgagacagactttcagtccgctatctttgatgcctttacctataccggggcgtcgctgatcagcgatgagcgcatgctgccctggtctcttcgcggctatgcaccgcaaatcgccgggattgcgcaaactaatgccaccgtcacggtgagtctcgctgaccgcgtgatttatcaaactaaggtgccacccggcccgtttgtcattcaggatttgaaccaatccgtccagggcacgctggacgttaaaattaccgaagacgacggccgcgtgagcacgtttcaggtgtccgccgcctccgtgcccttcctgacgcgcaaaggccaggttcgatacaagcttgccgtgggcaaaccccgcgaagatgcatcgcatgcccttgaagacagtgcctttatgagcggcgagttctcgtggggcctgttctccaacacctcactgtacggcggcacgctcgccgatggcgataactatcgctccatcgcagcgggcatcgggcaaaacctcgcgctgatcggggccctctccttcgatgtgacccaggcgaccagccagctcccgaacaagccctctcagacgggttacagctatcgcttcaactacagcaaacgctttgataccacgggaagccagcttaccctggccagctaccgctactccgacccgcagttcctcagctacgcacgcttcctggacagcgaaaataatgacagccagtcggaaaaacagacgtttagcatcacggccagccagtacattcccgcgctgtcactcaatctctaccttagcctgctccggcaaacctggtgggacgaagcgccatccaatacgggcagcctgaccgcggggtataacttcgatctgggccgctggaaaaaccttggcgtttcggcatcgttcagcaaaacccactatcaagatcgcgaggacgacaatcagttctacctgtctctcagcgtgccgctggatcctgaccatcgcctcagctatgacctgcgcaacagcgacaacctgagccagacagtctcgtggtacgacacctctgataagaacaacacctggggcgtttctgccggtaccgaaagtcagcagaccgatgcaggcgcgcagttcagcggaaactaccagcactactccccgctcggcgatctcaacgtttccggaagttataaggcgaatgactacagctccctcagcgccagctggaatgggtccttcaccggtacggcaaaaggcatggccctgcaccgccgcagctacggcaacgaaccgcgtgtcatggtgagcacggacggcatcagcaatattccgctcaacatgtcgcgggaccagaccaacgccttcgggatcggggtgcttccttcgttctccagctactcaccgtcgagcgtgcaggtcaacctgaacgatctccccgaaggcgtagacgtggataaccgcgtcatgacctcgacctggacagaaggggccatcggctaccgccagatcgccacccgagcgggaaatgatgttctgggcatcctgcgaaccgcatcgggcatgccgccgctgggcgcgcgcgtccagatcgcggatagcggtaaagacgtgggtatcgtcgccgacgagggccatgtctggctgggtgccgtacagcccgagcagcaattcctggtaacctggggcgacgccagccagtgtcgcttcacgctaccttcacacctcactaacctttcgcagcttatgctgccgtgtcagtaa

SEQ ID NO: 125066 - DNA, 765 bp, Enterobacter cloacae
atgatgaaactcactccactgaaaagcctgtgcctgatgttgatcgttacagcattcgccagccaggcggccattaatctggatcgtacccgcatcgtctttcccgaaaccgacaaggccagcagcctgaaggtcgataaccagagcaaaacgctcccctatcttgcgctctcctggattgaagacgaaaacggtcgtaaggaagacagccactttatggcgcttcctccgatccagcgcattgaacccggatcgtcatcccaggtcaggatcgtgaagcaggcggccaccagcgcgctgccgaaagatcgggaatcgctcttctacttcaacctgcgcgaagtgccgccaaaaagcgccagcctcgacgatgatcgcagcgtcatgcaggtcgccatgcagagccgtatcaagctgttctggcgcccgaaggctatcgtgaaaaaagcaggcgatcgttctgaaatgcgcatggaggtgacggcaacggcaaaagggctgacaattcataaccctacaccttattacctcaccctcgcctggctaagcaaaaatggtaaaaccatgctgcccggctttgacagcctgatgctggcaccctttgccagcgcctctgtcaccaccggtggctatcacggcagctattacagcattggttatatcgacgattacggcgcactgcgaaagcttgacgcgacctgtcaggggacgtcgacctgccaacttaaggatgcgaaggccacaagcgatgcgaaagctcactaa

SEQ ID NO: 125067 - DNA, 1062 bp, Enterobacter cloacae
atgcgaaagctcactaatgttttgatcgcgatgctgctggcgctgctgcccttaaaagccgcgctggcgctcgactgctatctgggcgctcagggcggcccggtggaagagacaaaaacgatcagtccgttcgcgatccccagcaatgcacaggtggggcaaaagatctgggaatctgacgacattaaaatcccggtcacctgtaaccacgatgtggccggcagcttcgaaaaagaggacgtctatgcctgggtcaacccctatccagccgcttccgacccttactacgagctgggggttacctatgaaggcatggattatgacgcgacggggcagccaaacggcgtagatacccgccagtgccttgataataacaacatcaccatgtacaccccggaacaaattaagcaaatggggtgggagaaccggctgtgctcaggcaatgccaatgatattcacaccacgcgcacgttcattgcccgactgcgcctttacgttcgtataaaggccgttccgccgcacggctacaaaagttcgctgggggactacgtcgtggtgcagtttgacggaaaaggcggggttaaccagatggccgatgcaaaaaacctcaagtaccacattaacgggttagaaaacattaccgtcctcgactgcggcgcaaccttcagtatttatcctgagaaccaggagattgatttcggtaccttcagtgcgcgcgacatcgtgaatcagcaaacgcgcaaccgcacctttacggttaaaaccacgaaagtgcaggatgcccagtgttcagatggctttaaaatggactcatcgttttacacgacggagtcgctctccgaaaacgacactgcactgttgattggaaatggcttaaagctacgtatcctcaatggaacccagccttataccttcaaccactacgaagagtatgcggatttcaccgggagtaagttgaactatgaacaaacctataccgcggagctctcccctgacgcgggaaaagccattcagtcaggtccgttcgaaacggtggtgctgtttaaaattaactaccactag

SEQ ID NO: 125068 - DNA, 1845 bp, Enterobacter cloacae
atggagcaaaacccgcagtcacagctgaaacttcttgtccaacgcggtaaggagcaaggctatctgacctatgccgaggtcaatgaccatctgccggaagatatcgtcgattcagatcagatcgaagacatcatccaaatgatcaatgacatgggcattcaggtgatggaagaagcaccggatgccgatgatctgttgctggctgaaacctccaacaataccgacgaagatgcggaagaagctgccgcacaggtactgtccagcgttgaatctgaaatcgggcgtaccactgacccggtccgcatgtacatgcgtgaaatgggtaccgttgaactgttgacccgcgaaggcgaaattgacatcgcaaaacgcatcgaagacgggatcaaccaggttcagtgttctgttgccgaataccctgaagcgatcacctatctgctggagcagtacgatcgcgttgaagcggaagaagcgcgcctgtctgacctgatcaccggttttgttgacccgaacgcggaagaagatctggcgcctaccgcgactcacgttggttccgaactgtctcaggaagagatggatgacgacgaagacgaagatgaggaagaagacgacgacagcgcggacgatgacaacagcatcgacccggaactggcgcgtgagaagtttgccgagctgcgtacccagtacgaagtcacgcgtgacaccatcaaagcgaaaggccgcagccatgccgccgcgcaggaagagatcctgaaactgtctgaagtattcaaacagttccgcctggtgccaaaacagttcgactacctggtaaacagcatgcgcgtgatgatggatcgcgtacgcacccaggaacgcatcatcatgaagctgtgcgttgagcagtgcaaaatgccgaagaagaactttatcaccctcttcaccggcaacgaaaccagcgaaacctggttcaacgccgctatcgcgatgaacaagccgtggtctgaaaaactgcacgacgtgaaggacgatgtctatcgtggtctgcagaagctgcatcagattgaagaagagaccggcctgaccatcgagcaggtcaaggacatcaaccgtcgtatgtctatcggtgaagcgaaagcccgccgtgcgaagaaagagatggttgaggcgaacttgcgtctggttatctctatcgccaagaaatacaccaaccgtggcctgcagttcctggatctgatccaggaaggcaacatcggtctgatgaaagcggtagataagttcgaataccgtcgtggttacaagttctccacctacgctacctggtggatccgtcaggctatcacccgctctatcgcggatcaggcgcgcaccatccgtattccggtgcatatgattgagaccatcaacaagctcaaccgtatctcccgccagatgctgcaggagatgggccgtgagccaacgccggaagagctggctgagcgcatgctgatgccggaagacaagatccgtaaagtgctgaagatcgccaaagagccaatctccatggaaacaccaattggtgatgatgaagattcgcatctgggtgatttcatcgaggataccaccctcgagctgccgctggactctgccaccaccgagagcctgcgcgctgcgacgcacgacgttctggccggcctgaccgcccgtgaagcaaaagtgctgcgtatgcgtttcggtattgatatgaacaccgaccacacgctggaagaagtgggtaaacagttcgacgtgacccgcgaacgtatccgtcagatcgaagcgaaggcgctgcgtaagctgcgtcatccaagccgctctgaagtgctgcgtagcttcctggacgactaa

SEQ ID NO: 125069 - DNA, 129 bp, Enterobacter cloacae
atgaaatgcctggaatcgggaatgaatgaccttgccggggaacaaagtgacagcaggttagtacctgctatcgctgtaaagcccgtggttattgtttccgagatgttatcgctacgtttaaaaaagtaa

SEQ ID NO: 125070 - DNA, 1620 bp, Enterobacter cloacae
atggctcatttagcgcagtccccttcttttattttgcatcaggtcacctgtcagtttgcgacgggggatatcctttttggtccgctgaatctttctctggaaccgtctctgtgcgcgctggtgggccgcaacggcagtgggaaaacatgtctgctgcgcctgctggcggggcttgatgaacccgcaaacgggcatatcgaacgaaccggaacacaggtttatgtggcgcagcagcaggatattttgccacacacgacgctggctgaattgctcgggtacgaggcaatcttcgcggcgcgagcgcgtgtcgacagcggagagtatcagcctgacgatctggaaacgcttgatggcttttgggatttagcagaacgcctgagcgaggcgtttgcccgggcgagactgccgccgtttgatccggataagcctgccgctgaactcagtggtggcgagcgtgtccgcgcgttgctgtgcggggcgtttacggcgcaagcggattatctgctgctggacgaacccactaaccacctggaccggcaaggccggacatggttctacgaccagcttgcccgttatcagggcggtgtactggtggcctcccatgaccgtgagctgctggcgcaggtgccgcgtattcttgaactgagtggcgcgggtcttcgcagctatggcgggaattatgcggattatcaaacccagcgcgatgctgagcaacaggctgcccgcgcggcgctggagcacgcggcgacggcgcgcaaacgtacccgcgcgcgcatgcagaaagagcatgacgacagccagcggcggtcggcaaaaacattacgcaccgtcgataccctcaatatcgcatcgttcgaacgcgtcaaatataaaggcgcggcaaaggaacgtattggcagctggaaaaagcagcataacgagcaaaatgatgccctgaacgctgccgtaaacaaggcgcgtgagcgggttgaagacgataacccggtgatgtttaccctgccggggagtcagattccggaaggaaaacaggtgctggtgatggaaaatctggtgctgccgcatgtgccagttcccccactcaactggcggatggatggtccgatgcgcgtggcgttaaaaggaccaaacggctgcgggaagtcgacgctgttaaaagcgattctcggtgaaatcagcccgcgttcagggacctgcaacgtttccgtcagctgcgcttatctcgatcaacatctgtcccggctcgatctctcgcagtcggtcatgacccacctcaacctgggcaatacgccccttgaagagggggtattacgaacccgtttagcgcagcttcagttgggggccgataaagtcgcgctcccgctggcggaactgagcggcggtgagcgtcttaaggcggcactggcctgcgtattatggcgtgctgaggccacgcagctcctgttgctggatgaaccgaccaaccatcttgatctggcctcggttcaggccattgaagcggcattggccggttttccgggagcactgctggtagtgtcacacgatgacgcttttttaaaagggttaacgttgtcgcacgagatgatctgggaagaggcgggctggcgttgcgaaagtctttaa

SEQ ID NO: 125071 - DNA, 1182 bp, Enterobacter cloacae
atgtcgaaaagcaatccgtctgatatcaaagtcgccgttccgacgcccggtgcgttcgcagggctaaaagcgctgaacctgcaggtcttcgtgatgatcgcagcaattatcgtcatcatgctgttttttacctggatgaccgatggctcatatttaagcgcgcgtaacgtctctaacctgctccgccagaccgccattaccgggatcctggccgtaggcatggtgttcgtcattatctcggcagaaattgacctgtctgtaggctcgatgatgggcctgctcggcggcgtggcggctattttcgacgtctggcttggctggccgctgccgctgaccgtggcggtgacgctggtactgggtctggtcctgggggcttggaacggctggtgggttgcctaccgcaaagtcccgtcgtttattgttaccctggcgggtatgctggccttccgtgggatcttaatcgggattaccaacggcactaccgtctcccccaccagcgccgccatgtcgcaaattggtcagagctacctctccgatagcgtgggctttacgattggcgtgttaggtttgctggcgtttgtcgcctggcagtggcgggggcgcatgcgtcgtcaggcgctggggctggcgtcaccggcatcaacctccgtggtaggacgccatgcgctgactgcggtcattgtgctgggcgccatctggcttcttaacgactatcgcggtgttccgacaccggtcctgctgctggcgctgttactgctgggcgggatgtttatggcgacgcgcaccgcgtttggccgccgcatttatgccatcggtggcaaccttgaagctgcccgtctctcggggatcaacgtcgagcgcactaagctcgcggtgttcgccattaacggcctgatggtcgccatcgccgggttgatcctcagttcgcgtctgggtgccggttcgccctccgcaggtaacatcgccgagctggatgcgattgccgcctgcgtcattggcggcaccagcctcgccggcggtatcggtagcgtggcgggtgcggtcatgggggcatttatcatggcgtcgttggataacgggatgagtatgatggacgtcccgacgttttggcagtatatcgtcaagggggccattcttttgctggcagtctggatggactctgccaccaagcgacgagcctga

SEQ ID NO: 125072 - DNA, 1401 bp, Enterobacter cloacae
atgacttccacaccgattactgaatcagacgtgacacaaggggcggcagatgaccggctgtccgtccgcgaaaaaattggctatggcctgggtgatgcgggcgggacggtaattacctgcttgatcatgaatttcctgacctttttctataccgatgtctttggcctcactcccgcgctcgtgggcacgctatttattgctcttcgtgtgtttgatgccatctccgatccggtgatgggcgtgattgctgaccgcacgcagagccgctggggacgttttcgtccctggcagctatgggtggcgctccccatcggggttattggcgtgctgacgttcaccgtaccggaagccagcatgggggtgaaaatcgcctgggcgtttggtacctatttgctgttgtccgttggttataccgccattaacgtgccctactgcgcgctgattaacaccatgactacccgacacaacgaggtgatcgcctgccagtcatggcgctttgtgctgtgcggcgtggcgggatttctggtctctgtgggattgccatggctggtcgcggagctcggtcagggcgatgccgcaaagggttatcagcttggcgtcggcgtcctgtgtgctgtcgccgtggtgatgtttctctgctgcttcttctgggttcgcgagcgcgtcccgctggcgctgatgggtaaattcaccttacgcgagcaccttgcgggcatgcgtaaaaacgatcaattgctcctgatgctggtgatgtcgtttctgctgatcaacgttttcaacattcgcggcggcggatacatgtacttcatcacctacgtcctgcagggcagcacggcctatacctcgctgtttttcacgatggtgacttttgcggccattctgggtgcggtgatcgtcaatccgctgtcgcgtcgtattgataccgtcaaactctactactacaccaacctggtgctcgctgcgcttgcggtgggcatgtggtttctgccgggaggcccggcgcaccagacgctctggctggtgattattttaagcaacggcgtgatcctcggttttaccctgccactgcacttctcgctgatggcttttgccgatgactacggtgaatggaaaaacggcgtgcgctcatcgggcatgaacttcgccttcaacctgtttttcatcaagctcgcatgggcctccagcgccgggatcatcagcctggtgtttatcaccgtagcctatcagccgggcatgggtaaccagacgccagcctcgttacagggcatcaccgccatggagacactgctgcctgcccttttccatctgctgctggcggtcactatccgctggtgcaggcttaacaatccactgatgtcgcgcattgccaccgatctgcgccagcgtcatgtcccttcctga

SEQ ID NO: 125073 - DNA, 1539 bp, Enterobacter cloacae
atgacaaacaatcctccctcttcgcgtatccagcctggcgagtatggttttcccctcaagctaaagcctcgttatgacaactttattggcggcgactgggtagcccccgtcgacggcgaatactattccaacctgacccccgttaccggccagccgctgtgtgaaatagccagctccggcaagcgcgatatcgatctggcactggatgcggcgcacaacgcgaaagacaaatgggggcatacctccgttcaggatcgggcagccattctgttcaaaatcgctgaccggatggagcagaatctggaactgctggcgacggcagaaacctgggataacggcaagccgatccgggaaacgatggcggcagacgtgccgctggccattgaccacttccgctattttgcctcttgtattcgcgctcaggagggcggaatcagcgaggtcgacagcgacaccgtggcgtatcacttccacgaaccgctgggcgtggtagggcaaattattccgtggaacttcccgctgctgatggcgagctggaaaatggcgcccgcgctggcagcaggcaactgcattgtgctcaaaccggcgcgtctgaccccgctttcggttctgctgctgatggaaatcgttggcgatctcctgccgccgggcgtgattaacgtggtgaacggtgcgggtggcgagataggggagtatctggctacatctaaacgtatcgccaaagtggcgtttaccgggtcgacggaagtgggacagcagatcatgcagtacgccacccagaacatcattccggtgacgcttgagctcgggggaaaatccccgaacatcttctttgcagacgtgatggaagaagaggatgccttcttcgataaagccctggaagggtttgcgctgtttgcgtttaaccagggtgaagtctgtacctgcccgagtcgcgcgctggtgcgggagtctatctatgaacgcttcatggagcgcgccattcgccgcgtcgaatctatccgcagcgggaacccgctcgataacgttacgcagatgggggcgcaggtctcacatggacagctggagaccatcctcaactacattgatatcggcaagaaagagggcgcagatatcctgaccggcggacgccgtaaggtacttggtggcgatctgcaggacgggtattaccttgagccgacgatcctgtttggcaagaacaacatgcgcgtcttccaggaggagattttcggaccggtgctggcggtgaccaccttcaaaacgatggaggaggcactggagattgccaacgacacgccgtatggcctgggggcaggcgtctggagccgcaacggtaatctggcctataaaatgggccggggcattcaggccgggcgcgtctggaccaactgctatcacgcctatccggcacacgccgcatttgggggttataagcaatccggcatcgggcgtgaaacccacaagatgatgctggagcattaccagcagacgaaatgtttgctggtcagctactccgataaaccgctgggcctgttctag

SEQ ID NO: 125074 - DNA, 432 bp, Enterobacter cloacae
atggggggtagtgaggccgatgactgttatgataactcggtacgatatacagatactttgatgggtaagatgtttagtatgctggacaattcgcgttcatctgtcatgtatttctccgatcatggtttgattcgtaatccgcagcgtgctgtagtttactcccacggcaatgtgaatcctccccgagaggccctgcatatccctgtgtttatctggtatgggcatcaggttaaaaaagataagcaatacaccggagagtataatactacctggtctgctgatgatgttaatacccttgctgaactgtggctggggatccatcgtcaggagcaacctttccagtcgttaccatcctggcttgacggttacgataagaatgtctcagtactggatacaacaggcaagacctattactggagcaatatacattaa

SEQ ID NO: 125075 - DNA, 906 bp, Enterobacter cloacae
atgggatctttgaccaagcaactgtatcggtatacacataagcgtaatatgcgacacaatgagaatttatggccgtttgttaagttatcccgcaatgaaacaggtgaggtatgtgatttgaaatataaggggttggctatcaaactgacctctttatcctcacttcatcaaaaattcaatggtgagatcttgatcgcggcgacaggcccctcaatcaaacatattgattttgaaaaactctcgccgacggtaacgactgcaggtgttaatggtgcctggcatcttaacgaccagcttaattttagtttctatttcattgttgacatgacgtttatcgaccgtcaaacagcacttttaaaacgattgacaggctgtaaaaatattattttatttactactgttatggggatcgttaagcttatagaccgtttctcatacgaaaacattcagtgcggaatttgtatcatcgaagatatttgttatgagacctacaaaccctcaattaagcgtggagatctgcatcatgatttagcaggcatccctggaatcgtcttctctgagacgcattctgatattgcttttagtcgtgatgtacgccatggtgtggtggatgcaggcactgtgatttattgggcacttcagataatttattttcttggctttagaaaaatatatattgctggtcttgatatgaataatttcaaccagccacgattctatgagagtagcgattcgatgttgccctcatacctcgaggacaaagtgcataaccttgttatcccctcgctaaaactgggaagcaaaattttcaaaagtgataacatcgaagttattaacctttcccctcaaagctctattcctgactccgtttttcccagaaaggattttaatgatgtattcaattaa

SEQ ID NO: 125076 - DNA, 1671 bp, Enterobacter cloacae
atgtggcgatggataagcgggttaatgctgttgtggtgtggttatggggcggcggtgtgtccggtgtggtcacaggctaaagccggaaaagagattgcatccttaagcgcacagatcaaacgctgggatgaagcctactggaagcagggcgtcagcgaggtcaacgacgaggtatacgaccagctcaacggacgcttagcccagtggcagggctgttttggccaggatctctcagagaacacattacctgcgctgacgggaagcgtaaaacatcctgttgcccatacgggggtgcataaggccgccagcaaagaagcgctaggtcagtggatgcgaggccagaaaaatctctggatgcagccaaaagtcgacggcgtggcggtgacgctggtgtatcgcaacggaaagctcgcccaggctatcagtcgcggtaatgggttaaaaggtgaggactggaccgctcgcgtgcgtttgattccgtcagtgcctaaagaggtatccggcgcgctggcaaacagcgtcctgcagggagagcttttctggatgcgcgagaatcacgttcagcgtcagatgggcggaatgaatgcacgcgcaaaagtggcgggggcgatgatgcggcagaacgacggtgcgcttctgaaccagacaggaatatttatctgggcctggccggatgggccgaaagagatggaaagtatgctttcggcgctgtccggagctgggttttccctgacggcgctctataccctgcccgcccgaacggttgatgaagttgaaaagcagcgtttggcctggcaaaacacagccttaccctttgccacggatggcattgtggttcggtccgcggagtcgccttcaggggagcgttggctgcctggcgaaggcaactgggtcatggcgtggaaatatccgccagttgcgcaggttgctgaggtcagggatattcatttttcagttgggcgtacgggtaaaatttccgtcgtggcggcgctggagccggtgcaactggatgataaacaggtacagcgggtgagcctggggtcggttggacgctggcagaggctggatattgcccctggcgatcagatccaggtgagccttgccgggctgggtataccacggtttgataaggttatctggcgagggacggacagacaaaaaccagaaccaccggcctcgcgttttcactccctgagctgtttttatgcttcgccagagtgtatggaacagttcttcgcccggttgacgtggctcagttctaagcaggtattcaacattgaaggattaggcgagtcaggctggcgaacactctggcaggcgcatcgttttgaacatctcttctcatggctgctcttaacgcaggcgcagctccagtctacgccggggttttctccagcgcgggggctggcgctctggcatcgcttcaacctggtacgtgaacaaccttttatccactggatgatggcgttgggtgcgccattgccacaagcctcgctgaaggcgttgggggatatgtcatggcaacagatgcgtgaacgcagcgcaaaggcgtggcaggccttgccgggtacgggggaagagaggacgcggcagatcgtgagctggataaatgcaccagagattgatgtgctggtccggtggcttgcccggcagcacatcaacggtttctga

SEQ ID NO: 125077 - DNA, 1281 bp, Enterobacter cloacae
atggaagcaaatgtttttataaaaatagactataaaaaggatagacctaaccccagccaactttttgaagctatgagtttgtatattgctgcgtatgagcaatttggccaaattttggcaaaatcaatcgatgttaaacaggaatttaaatttcatctcgaagatatacaaatatcctccatcaaagccaagttaattcagtctcctggcctcatacatgatttttttattaatagagtggcttctgctggctcaaaattgtttgaacagttattagaaactgatgagacagagactgaagatcaagttgatcaattagctgcaaatattgaagaaactttaattaatgatggattgggtaatgaaattgattcacatattgatcgaaaagcgctttctcatatgttaggaacagtatcaaaagctaataatcttatacttaaagatgaaattgtagaatttggaagttcatcttattcgcaaagcatcaatacaaagtggagattcgcaggggatctttcaacgatgttcttagggttgaaagaaagtgttaccgtaaaggactatttatatgtgaaaatcgcaataaatgaagggaagcaattatggacttttaaaagttctaaaatgaacaagacttttactgcacgaattcttgttagggattggataaagaattatcaatctggcttaatacctcctattgggccaaaagatactttattagcagagtttagttatgatctttataaaccttatgataagagaaaaacagcagaagtaagaaatgtaaagattataaaaatcgaggatatcgttagggggggggaagcgatgaacaattcgaaataccagcttagtgcggtgcagaaaaaaggttacgtatcagacctgaaagctgagtatttatatatttgcgtgccttttttaattctcattttagttaaggtatattttggccctttgcgtgatataatatactcttctgattggagtcttgctgcttcaataattcttgggcaaaacgcagcaaaaatttcaaggtctatttcacagattaaacaaaaaatcaatgatggtaactttagttggtatagtgccaaaagatttatttttgtgatcgtagcattatttttttattttggaatgatcttcaaaccaaatatttatattgcttgctcccaaattttgatgtttttacttgccagttggttacatttttcagatggatatacaataaaaatgcttgagtggaaagtgaaaaatgaaggagcaaaatag

SEQ ID NO: 125078 - DNA, 780 bp, Enterobacter cloacae
atgaacattacccaaattcgcaacgccaccctgctgattacctacgccgggaaacgtcttttaatcgacccgatgctggccccgaaagatgcttatccgggttttcccggcacggcgcatgccgagcgtcgtaacccaatggttgagctccccgttaacgtcaacacgctgctgaacgccgatgcagtgattgtcacccatacccatgacgatcactgggatcgcaccgcggcggagctgatcgccaaagacaagccgatctacgtgcaaaacgatcgtgatgccgcgctgctgcgcagccaggggtttagcaacctgacggtcatgaccgacgcgaccttcttcggcgatattcagattacgaaaacccacggcggccagcacggtaccgaccgggcctacgccgtgccggagctggcggagcgtctgggcgaggcctgtggcgtggtgctccgtcatcctgatgagaagacgctctatcttgccggggataccgtctggcgtgacgcggtggcggccgatctgcaaaagcaccagccggacgtggtggtacttaatgccggatatgcccacgtgcttggttttgggcccatcattatgggccaggaagatgtgctcaacgttcatttcctgctcccacaggccaaaatagtggcgagccatatggaggcgattaaccactgcctgttgacccgcagcgcgctgcgtgagtacgttgaagccaatcaggtgagtgacgtagtgaccattccccaggatggtgaaaccgttatattctga

SEQ ID NO: 125079 - DNA, 999 bp, Enterobacter cloacae
atgaaaacacgtactttatctcaaaatcttaccgtcagtgccgtcggctacggtgccatgggtctgagtgaattttatggccagactgatgacaaaggctcactgcaggtgttgcataacctcatcgatctgaacgtgacgtttattgataccgcaaatttatatggccgtggtcataatgaacgactgatcggccactttcttgccgggctggataaaagcactcgcgagcagtttaaaattgccacgaaatgcggtatcgatcgctctcctgacgagtcctatgcccgcactatcaataacacacccgactatattatccgctgctgtaacgaatcccttaagcggcttggcgttgaacggattgatctcttttatcttcacagggtcagcaacgaaacgccggtcgaagaaagcatggagtgcctgagcacactcgttaaggaaggtaaaattaatcacattggtctttgtgaagtgtcggcttcaacgttacagcgagcccatacggtacatccggtcaccgcgctgcaaaccgaatattcgctgtggacgcgtgatattgaggataccgttctaccggttgtgaaagcgttgggtatcggcctggtcccttactctcctcttggcagaggcttcctgacaggcaaatacctcagcaacgacgattttgcagacggtgatttccgcaagaataatgcgcgttttattcagtccagtctggatcataatcgccagttgctcgatgcaattaccccgcttgcacagaaatacgattgcactacagggcaaattgctctggcctggctgctagcacaatacgataagctggttccaattcctggcactaagcatacccgttatctggctgaaaacgctcatgcggcggaagttattctggaaaaaagcgatgttgaatcgctgaacaacattcatcggaagatagaaattaaaggggaacgatattcggaagaaggcatgaaaggtgtgaacgcctga

SEQ ID NO: 125080 - DNA, 1221 bp, Enterobacter cloacae
atgatttcagagaaattaccgcaaaatatgacgctaaagtcatggctcgctttagttattctggcaatttcaacattcaccatcgttaccactgaacttgcgcctatagggttattaactcctattgcagaggggctccattcttcggaatccgcggttggcatgaccgtgtctctttatgcgtgggtaggggcattaagcgcattgtttgcctccgtgttcctgggaaatgtggcgaaaaagcgtcttttgttggtactcaccgtcgttcttatgatatccaatattttggccgccacggtaagcacttacggtgctctactgagtgcgcgcgtattgggtgcacttgcgcatggtgcattctgggcaatgattggagcgactgcagtagccattgttcctgcccgttatatcggtacggcaacatcaatcgtatttggcggtgtttctgcggcaagcgtgtttggtgtaccggtttcaaattatattggcattcatttgggctggaggcaggcattctggctgatggcagcactcagcgtcgtggcctttgtgggcattactgttcttgtcccgcaaataaacaataaaagcgcgatgggtattgatgctctcaaaagagtgctgaaatcgtccacgctgtggaaaatttactttgccacgctgcttgccgttaccgcccactttgccgcatttacctacattgagccttggttacacatgcagagtttactctccgctgcttttgttccggctgtgcttttagtttacggcatcgcgggtctggccggtaatttcctgaccggcgtgttgattgataaatatctaaagatgacggtagctttatccgtgctgcttatctgtgcggtgctgatattcctcggacggtcaggttcctcactctctgtcgcgctcattttcactgccatggttatctggggcgttgcggtatcaggagtatttgtcggatttcagacatgggtgttacgtatggcggaagataaaacgtttccagcctcagcactctatgtttcgtttttcaatatcgccatcggtatcggtgcttcagtgggggcctggatggtgtcatcgttcccggtccccctcctttatatcgtagcgggcacagccattggcctttccatcctgcttgtcgcggttattcctgcgagccttacgacaaaacattctcgcgtggagaaatcgtacgagtcaaattaa

SEQ ID NO: 125081 - DNA, 696 bp, Enterobacter cloacae
atggctacagcagaacatttaatcagcaataaccttcccagtatcaaacaattgcaatgctttctcgctgtcgcgcatgagttgaacttccgcaaggcagctgaacgtctgaggatgacgcagccccctctgacccggcagattaaatgtcttgaggccgttttgaagcgtcagctcttcagtcgaaatacgcacgacgtaagcctcactgaatcagggcgcgcactggtggtaaaagctgagaaaattcttcgcgaaatcagtgaactgaaaacggattccctctcctctgaaaccaccttacggatcggactcacccggacgcttaattttgaatatattgaaccggtgaataggcagcttcaaaaactgaacgccggggatgatgttgaaacaccggacctgacatcagcgcagctgctgcaaagcttgtccaaaaatatgctggatctggtgctaacaggggaaaaagggacaggtcatgaagatattgtccagtaccgttgggtttgccaggagccgctccttatcgcaatgccttctttacaccctgcaagcctgaaagaaaaagtcgctctcgacgatatcagtgatttaccgattttctggttttccagaagtgctaatccgtcgttttacgacaaatgtgaaagctactttgacacgctgaaaacgccgctgaagcgcataaaataa

SEQ ID NO: 125082 - DNA, 207 bp, Enterobacter cloacae
atgctgagtcgtatcgcaagagggaaagggtttgcgctgctacctcagtcaaaatgcaccttcaatcaggaagggctatgctatcgcgagctaacggatgatgaggcaaagcgactcaatattgatatctatgccgcaactcgcctcaatgaaaacagagaggagatcctgaacgctcagaatatcttgtgcggcaaaaaggcttaa

SEQ ID NO: 125083 - DNA, 1020 bp, Enterobacter cloacae
atgttaacccgacgattatcctgccttgcgttgctgatggcgctggcgtcacccgcaatggccgcggataccccttcctacggcgagaagctggaaggtttcgattatggctggccggtaaaacactttacctttacctcgcaaaaccagtctctggatatggcttatctggacgttaagccggaaaaacccaacggtcgcaccgtggtattgatgcacggcaaaaacttctgcgctggaacctgggacggcacgatccgcgcgctctcggccaggggttatcgcgtggtggcacccgaccagatcggtttctgtaaatccaccaagccggagcggtatcagtacaccttccagcagctggtggacaatacccatgcgctgctcgcatccctgggtgtcgatcgcgtgacggttatcgggcattcgaccggcggcatgctggcgacgcgctacgcgctaatgtggccgcagcaggtggaacagttggtgatggtcaatccgattgggctggaagactggaaagcgcgcggtgttccgcatattaccgtcgaccagtggtaccagcgcgaactgaaagtcagtgccgacggtattcgtcagtacgagaaaaacacctactacgctggggagtggaagccggaatacgagcgttgggtgaccatgctcgccgggctgaacaacgggccgggcaaagcgcgcgtggcctggaactcggcgctgctctacgacatgatctacacccagccggtgatctacgaatttagtgagctgaagatgccggtattattgatgatcggcacgaaggacaacaccgccatcgggaaagatctcgccccgccggagatccgcaagacgctcggcaactatgcggtgctggggaaagagacggcaaaacgcattccgcacgcgacgctggtggaatttaacgatatgggtcatgcgccgcagatgcaggatcctgcgcgcttccacgaggcactgcaaaaggggcttcagcgcggcgatccgcttttagaatga

SEQ ID NO: 125084 - DNA, 1056 bp, Enterobacter cloacae
atgaaaccccaattctggctttttactctcttttttgccgctttttttttacaggcggcgcctaccggctactgcgtaccagacaatggcaaataccataactatttcactgtcgcggaacaattaacgacgcttgataacctggttggcatgcagcatatgatcgatatgaataactctacgacttcgtttaagggaacgtgctactgccagacggggaaaaatgaaagttacgatcatgcttacatcaccagcgtggttaatccagccctgcagcccaccactagcagaaacaatatctcctattattatctcaataagtatcttgatatcggtttgcaaatctacattcttggcgttggctacaccaccgttcccttcgatcacctgccaaatgacattgggggaacgtaccggtgtcataatggcgtcagttcgcaaaccacgttttacagcggcgggtcgggctttatttatctgtatgtcaaaaaacaatttaccggcacgatcaccataccgtcgatggtcatggcaaatatctatgccactatcgatccccgtaccgtctcgagcgaaatcatttcggatgtgattgtgcagggatcggtcacggtcccgcaaacctgcgagatagatgaaggccaggcgataatgattgatttcaagtctattctggcatcggaattctcagcaaaccggggccaggcgttgtcttcacgcaagattacccggcaggtcaatatcaaatgttcaaatatgatgtttaccgacacgctgggggcatccttccacgcctctgccacgacagccgacagtacgatggtggccaccgataatccggacgtgggtattaagatttacgataaacataacagggaaattaatgtgaacggcggcgagcttgaggcagaaacgacgaaaatgcccgtgactctggaaggcgagacgctggggacgctcacgttttcaagcgctccggctagcgcaaccgggtcaagacccgcgcccggtccgttcaacggcacggctaccctgacgattgaaatcggacactaa

SEQ ID NO: 125085 - DNA, 2499 bp, Enterobacter cloacae
ttgaaacgttttcactctttgattttatccctgctgtggctgggaggaagctatccgcttctcgtcagtgccacacgaccactctttaacgtgcgtctgctggagcttgatcggcccattgaggtcgatatcagccagttcaatcgcccggataacctgcctgaaggagaatatcaggttgatatctatgtgaacgatcgattcattgcgcgcagggcggtgcgttttttccgccacgatccggagagtgcgttggcgccttgttttgtggatgtaaaaaacacgctggcgatgtttggcctgaaagtgaacgcgattaaagcgctggatacggtgaatgctgaaggttgtgaaccggtgccggtgctgcctggcgcgaaatggacgctggacagcgaaaagcttgcgctgaaggcgtcgatccctcaggtctatctggacgccacggcgcgtgacgccatttcgccctcgcgctgggatcagggtattgacgctttgatgctgaactacgatttctccacgacccagacgctgaagtcagactatgacagtgacgatctttactacctgaatttacgcagcgggctgaacattggcggatggcgtctgcgtaactatagcgccttaaatgcggtcaacagccgcggtaacgttcgttcgctgagcacgtacttacagcatgatattgccagcctgcgcagccaggccatggcgggtgatacgtggaccgcgagcgatctcttcgacagttcacaggtgcgcggcgtgcgtctgtacaccgacagcgacatgctccccgatagccagaacggttttgcgccggtggtgcgcggcgtggcgaaaaccaacgccgtggtcaccatccgccagaatggctacatgatttatcagtcggccgtgccgcaggggccgtttgcgttgaccgatctcaacaccacctcaagcggcggagatctggacgtctccatcaaagaggaagacggcagcgagcagcattttgttcagccttacgcatctctggcaattttgcgccgggaggggcaaacggatgtggacatcagcattggtgagcgtcgtgataacgatcggtttatgccagaggtgatgcaggcacaggtattgcacggaatggcgtggggaatgacgctgtatggtggcacgcagctggcagacgattaccgcgtgtttgccgccggcgttggtaaagatctcggcaatatcggcgctatttcgatggatatcacccatgcccaatcgcactttacggatgatgacgagcaggggcaatcctggcgttttctgtactcaaaaacgttcgacgtcagcaataccagcctgcgtattgtaggttatcgctattcaacggaagggttttacaccctgggcgaatgggcatcgcgcacgggcgatagcgagaacttctggcatacgggcaaccgccgcagccgggtagaaggcacctggacccaaccgttttccgaggggtacggtaatgtctatcttacgctgagccgggagcaattctggcgtacggacgatgtgcagcgcctgatacagataggctacagcaacagctggaagcaggtcgtgtggaacctgtcgtggaactataccgatacggtgtctgacagcatgggagagtggcaacaagaagatgaaagcgagcatctcgttatgctgtcgctgtctctgccgctttcggcctggttacccaacagctacgtcaactacaactacgcccacagcaaccatggcacaccttcccaccagattgggttgaacggcaatctgctcgacgataacaatctgagctggaacatacagcagtccgtgtatgaaaaccgcggcacctcggcgggaaatgcgggactggtctgggatgcgtcctacggctcgctaaagacgaattatgcctggagcgacgaaagccagagcctgaactacggcgtcagcggcggcgtgttgatccacgacgaaggcatcaccttctcgcaggagatgggcgaaacggtggcgctgatcaaagcgcctggtgcggcagggttatcggtagataacgccagcggcgttgccaccgactggcgcggctacaccgtgaagacgcagctttcaccctacgatgaaaaccgtattgcgcttcagaataaggattttgtttcaggcaacgttgagctggaacgcagcgtgcaaaacctggtgcctacgcgtggcgcggtggtgaaagccgagtttgttacgcacatcggctatcgggtgctgtttagcgtttcacttgcgaacggcaagcctgcaccgtttggtgcggtgggtaccgctgcgcttgatgtgggaagcgcaacgggaattgtcggtgacaaaggtgaactctatctcgccgggatgcccgaatcggggcaattttcgctgacgctcagcagcggcaaggcctgtctggctgattatcacatccatcagaaacctgattccgggctggtgcaactgcctgtcatttgtcgataa

SEQ ID NO: 125086 - DNA, 681 bp, Enterobacter cloacae
atgcgcaggcgttttataattttatttgttgctcttcttttctcattcgctaccgggacgtcaagtgccgggattgttattggtggcacccgcgttatcttccctggaaataaagcagataccaccctctctgtcttaaataaagatacggcactgccttaccttcttcaggcatgggttgagccttttaacaatgcggataagcaccagccgccctttacggttattcctcccgtctcccggctggagcccggccaggagcgtgtcctgcgtatcattaaaactcagggcgaattaccgtctgacagggagtccgtgttttggctgaatattaaaaatattcccccgtcgacaactgaagaaagcagcaagctggaaattgccatcaaaacgcgcattaaactcttctggcgtccggcgggtgttaaggaaacgcctgaaacagccgctctgaaagtgaaatggcaacggcagggcagcatgctggtggtcaccaacccgacggccattcacgtcaatgtgatcgacgtggctattgatggcaagccgctcgacctggcgatgataatgccgtttgagacacgtcggctggcgctgcctgctggcgtgagcaaaatgctcacctggcacagtattaatgattacggcgcgattagcgacgctattcagcaacctctttaa

SEQ ID NO: 125087 - DNA, 522 bp, Enterobacter cloacae
atgaaaggaaatacgttaaagagcattgttgtgctttcctctttatttttcggtgcgcagacacatgcggccaatggcaatggtactgtccatttcacgggcgaaattatcgatagtacctgtgaggtgtctaccggtactaaagaccagaccgttgatttaggcaaagtgaataaatcaacgtttaccggcgtggggtcaatggcgtcggttcaggcattccagatcgatctgctgaactgcccggatacctacaaaaaagccagcgcccgttttgacggcaccgaagacggtgacgggtacctgaagctgtcttctggcggggcgagtggcgttgcgattgcaatttataaccgcgccgataacagtctgcttaagctttacaatcagtctacgcctgccactatttcatccggcaaggcgtcgttgccatttatggctcgctatatcgccacgtctgcaaccgtaacggcgggcactgccaatgcggattcggaatttacgattacatacagtaattaa

SEQ ID NO: 125088 - DNA, 1899 bp, Enterobacter cloacae
atgaatatatttcaacatggaataaagaaaactttttccatcgcagcactactctgtgcgtctgtttcttccgcttgttatgcggcggagacggtctctactaaccaaacgatgtgggacgagtggaaaaataatccgggatttactgaagcactcgatgaattaggtattgactacaataatttaatcaatccagcttatgcatcaacctatgatgtacaaaatgtcaataaccccctgttctggctcaaccgtactttaaaagtttacggtgaggctgaacaaggtcgctatcaaattcctgttaccgaagttcatggcaatggcacgaacagaaccaccaacggtggacgtaataattacttcttaacgcatacatggggcgtcaagggtgaaaacgttaccctccgtctcggtgatgttccgcaaaatgtttcctgctatgctgccgtggatcctaattacgagggtattggcggtccgactaacgaacttattttgaacgcaagcggtgacacaacctacacgttctcacagaacgcgctgcttgtcgttgggtgtcaggataaaaccaaaaaaatggagaatgttgataaattcgtctccgtggatattgttaacggcggtacgtatcaccctctctttatctttggtatgaatgacagagccgaatggcgcgcacaggcacaggctacaacgccatcaggctaccactttatgtttgatggcaggacacgcttcgttgcaagtcaggtaattgcgcaaaactcggcagctaaaaatatagagcagactctccgccagtcgctgctgcgaaccatcacttatgacaaacttgatggtctggatggctccagctggttgcaccagcctagccgcggtttactcttcgccacttatcagagctgctgctgggcaagtggtggacaagggctgactggcataggtggtgacagttcaatccctgagacgccgagctggctcgactggcacgaatacggtcaccagttccagatgagctggtcctggagtgaccagggagaagttaccgtcaacctttattctatcgctgcatgttacaccacactcggcgataccgatttcaaaaactgtcatagtaatgaaggcttttacggtttcggttgggatcaacaagctattggcactctgctgaaatccgggcacacctggaattttgctaaagaagatctgttccgtcgggcgtctttctttggtgaaataatgacgagctggccacagctttacccggcactggcgaaagcttaccgtgaagttaaccagaatgacccaaccctggttaatagcagccagaaaaaaatcgactggtttacgcttaatgccagtaaaatcgccggcttaaatctgaatcagtatttccagcagtggaatattcccctttccgcagaggcggttgcagcgattaatgcgctgaatttacctcagccgaataaagtggagaaaacctttaccggtagcctgaatggctcttccccagccaatattgaagtaccggctgaagataaaaatttcaatattgcttttgtaaccaacacacctgaagcaggtcctacctctctggtctgggttgaggatgttgaaacaccactgtatgcgcaggttgttgataatcgtaacagaaccttcatcgtgaaactgcgtggccagaacagccatggcgattgcaatattcattccgttaataccgcggttaactgctccgtaggaacaagtgcacatttaagagtcacttataaagcagaagataacccgcttctgcctcagggcagctacaccggtgtccttcacctgattgcgcgtgactggcacaaaacggactggacggcaaacgtgaatgtcgatctcttcattgtgaagtaa

SEQ ID NO: 125089 - DNA, 1902 bp, Enterobacter cloacae
atgaatatactgaagagtggcatacagaaaaaatgtgttgctgctgcgctgttatgtgcatcggtaacgtctttgcctttatacgctgaaaccacggccaactggtgggaaagatggcaggataaccaggccttcaatgaagctctggatgaactcggtatgagttatcaactgttatctgaagatccacaaaaaaccctcacccgttcagccgacccgactgatgttctctactggcaaaagcgcaccatgcaaatttatggtgatgctgacaaagacatttattatattccagccattgaagatcatgatgaagctcgtgccagaacaggcttcacaggtcgcaatccctattttaatacctattattatggtgaacagggtgatacgttcacattgaccacctcttcccaacccgatgatgtggtctgctacgcaggactggaaaatcaatacagcggtacaatcaccactaaatatcaggtgcagttaaatgccaatcactcaacgcaatataccctgagtgaaaatggattaatgctgctggcctgctgggataaaagtggtacctatagccatatgaacacactcgttcgtgtggatgtcacatcgacgaccgcgaaaaaacacccgttatttgtctttggtcttaacacaaaagaagagtggaaggcccttagccagcagagtacaccgactgggcaaacgctgctctttgacgggcgctctcgatatgttgtgaataattccaccgccaaagcatcgcagaataccaacgtgctgcaaatgctgcgcgaacaattaagctacgttatggactatgataaagttaacgggcttgatgggtcatcgtatttacatcagcctctgcgcggtttgaatttcggtatttttaacagctgctgctggtctcagggcggtgccggacgtattgggatcggctttggcaacagcttaccaacggaaaccagctggggtcattggcatgaatatggtcatcaaaatcagatgacctgggcatggaacgggttaactgaagtgacaaataatattatgtccctttcagcctgccgcctattacgcggagaagtcacggataaatcctgtcacgaaaacctttattacaacaatttctcctgggatcagcaggccgtaggttctttcctgaactctggcgaaacacaccagtttgatactgacactgacgtcttccgtaaattaatgatgtttgcgcagctgaaaacatcgtggcccgatctcttcgcttatattggcaaagcctaccgcgaaacctataacgagggtaaaggtaaatctctggttgcaaccaatcaacaaaaaattgatttctttgtggtcaatgccagcaaagcagcgggacgtgatttacgtgaattctttacacgttggggtttaggctattccgctgatgctgactcacaaattgctgctctgaaattacctcagccgaacaaagtgacgaaaacctttaccggtagcctgaacggctcttccccgataacgattgaagttccggctgaagataacactgtgaatattgcttttgtgaccaacacacctaaggctggccctacctctctggtctgggttgaggatggtgaaacgccactgtatgcgcaggttgtcgatagtcgtaacagaagcttcatcgtgaaactgcgtggccagaacagccatggcggctgcaatattcattccgttaataccgcggttaactgcaactcaggaacaagcgcatatttaagagtcgcttataaagcagaagataacccgcatctgcctcagggcagctatacgggtgttcttcatctgattgcgcgtgactggcacaacactgactggacggcaaacgtgaatgtcgatctttccattgtgaagtaa

SEQ ID NO: 125090 - DNA, 684 bp, Enterobacter cloacae
gtgaaaaaagtattactcgctaccgccctttctctgtgtgtaacatcagcatttgctgctaaccctaccgctgttctgaaggttaagggtacgctgacaaatgcagcatgtacgccaacattaagtaatggtggtaccgttgactacggtacaattaatctgggcactttgagtgctacagcggttaaccagctgggtcagaaaaatatcgacctgaccattaattgcaccgcggcaacgaaagtctcctggaacatggttgacgatcgcaaagattcaaacgcgaaactcgaagttgagaatggcatgtttggtggggattctcagacttctgaaagccagctttatggtgtcggtaaaactgcaggtgcaacaccagtaagcatcggttcttattcactgtttgttaaaactgacagcgtagtggctgatggcgctactgttgatccaatttaccagcagggctctgcaggtgtatggactaagagcatcaacggttctactcagggcgacaactatcgtgatttcaccgttgcgactgttggctctttggctcctctggcgttcgaaactgcaaccttcccactggtaacctccctggcgatccaggataccaccacgctggcgatcactgatgacacccagcttgacggtcaggtaacaatcagtctgcgttatctgtaa

SEQ ID NO: 125091 - DNA, 774 bp, Enterobacter cloacae
atgaactcatttgagcgaaggaacaaaatcgttgacctcgtcaacgctcagggtagcgtgatggtgcaggatctttctaacctgttcggcatctcggaagtgaccattcgaaccgacctgcgcctgctggaagaaaaaggcttagtcacgcgcttccatggaggcgcagcaaaaccgggcagtaacctggctgaaagtgagaatcaggaagtcatacttgaggagcgttaccagctggcaagcgacccgaaaaaacgtattgctcaggccgctgctgccctgatcgaagaaggaatgacgattattttagacagcggcagtaccactatgctgatagccgaagccctgtcgagaaaagccaatattaccgtcattaccaacagcttgcccgctgcgtttgctctttcggaaaataaagatattacgctggtggtttgcggcggcacggtacgccataagacgcattcaatgcacggtaccattgccgagcgttcgcttgcaggtattagcgcggacttgatgtttgttggggcggacggtattgatgcgacaaacggcatcaccaccttcaatgaaggctattccatcagcagcgtgatggccgccgccgcccataaagtgattgccgtactcgatgcgagcaagtttaatcgtcgcgggtttaaccaggtactgccaatggagaagattgattgtgtgattacggatgatgggatcggaaaacatgataaagatctgctgagcaaaacgggcactgaggtcattacggtttag

SEQ ID NO: 125092 - DNA, 1044 bp, Enterobacter cloacae
atgaaatcagtggtaattcacgctgagggcagcgtgcgcgttgaagaacgtccgatccctcaaatacaggatgcggatgaagttctggtgcgcattgtttgctcagggttatgcggctcagatatcccgcgtatttttgccaaaggggcacactattatcctatcatccttggtcatgaatttagcggacacgtcgaagcctgtggtgcagatgtaaaggacctccaggcgggagatgctgtggcctgcattccacttctgccctgtttttcctgcccagagtgtgggcaaggctactactcgctgtgtaagcagtaccagtttgtcggctcacgcagtgacggtggcaatgccgaatatattgtcgtgaagcgcgcgaacttgttccgcctgccagcagagatggcaatcgaagacggggcatttatcgaacctgtcaccgtaggtttgcacgcgtttcatctggcttcaggctgcaaaggtaaaaatgtcattatcgtcggagcggggacgatcggtctgctggcgatgcagtgcgcgttggcgctcggggcaaagagcgtaactgcgattgatatcaacgacgataaactcgccctggcgaaaacactgggtgcgactcaagtattcaacagccgtaccttgagcaccgatgacattctcaacgcgcagagtgacagtcgatttgatcaactggtgctggagaccgcaggaacaccacaaactgtctcgcttgccattgatattgctggccctcacgcacaagttgcgctggtcggtacattgcatcatgacctgaatttatctgccgcaacctttggtaaaatattacgtaaggaactgacgcttttgggtagctggatgaactactctgcaccgtggccaggggaagagtgggaaacagcagtccgcctgctcaccgggaaaaaactgcaactggagccgctcattgctcatactggcgacagtgaaagcttcgctcaggccgtgcaggcactgaatggggcaccgatgcagggcaaaattatgctgcgtttcgcctaa

SEQ ID NO: 125093 - DNA, 1374 bp, Enterobacter cloacae
atgtttaccgaaatcatgcggtatatcctcgacctcggtcccaccgtcatgctgcccatcgttatcattatcttctcaaaacttttggggatgaaactgggcgattgcttcaagtccggcctgcatatcggcataggcttcgtgggaattggattggtcattggcctgatgctcgactccattggtccggcagctaaagcgatggcggaacaattccagattaaccttcacgtagtggatatcggctggccaggttcttcacccatgacctgggcctcacaaatcgcactggtggcgatcccgatagcgatcggcgtcaatgtcatcatgctggtcactcgtatgacccgtgtagtgaacgtggacatctggaacatctggcacatgaccttcaccggcgcaatgctgcacctggccactggctcttactggctggggatccttggtgtggtggttcacgcagcctttgtctacaagctgggtgactggtttgccaaagacacgcgagacttcttcggcctggaaggaattgctattccacacggctcgtcggcgtatctcggtcccgtcgcggtgctggtcgatacgattatcaaccacattccaggtcttaagcggatccactttagcgccgacgatgtccagaaacgttttggtccgtttggcgaaccggtcaccgtcggttttgtcatgggactggtcattggcatgctggcaggctacgacgcgaaatccgttctgcaactggcagtgaaaaccgctgcagtgatgctgttgatgccgcgggtcatcaagccaattatggatggcctgacgccgattgctaaacacgctcgcaaacgcctgcaggccaaatttggtggtcaggagttcttaattggtcttgatcccgcactgctgctgggtcatacgtcagtggtttccgccagtctcattttcatcccgttaaccattctgattgcggtgctggtgccaggtaaccaggtgctacctttcggcgaccttgcgactatcggtttcttcgtggcaatggcggtcgcgattcaccagggtaatctgttccgtacactcatctccggcgtcatcatcatggggatcacactatggatcgccacacagaccatcggcctgcatacccagcttgcacagaacgctggtgcgttaaaagcaggtgggcttgtggcatccatggatcagggtggttcgccagtcacctggttgctcatccagctccttacctggcaaaacgtggtgggattcattgtgattggcgcgatctacttcacaggcgtactgctcacctggcgacgtgcccggacgtttacgacggcagagaaaaacgccgctaacccgcaaagccagacggtatcttaa

SEQ ID NO: 125094 - DNA, 285 bp, Enterobacter cloacae
atgaaacgtaaagttattgttgcctgtggtggtgccgtagcaacctcaaccatggcggctgaagagatcaaagaactgtgtgaagcccaccacatagcgcttgatctggtccagtgtcgggtgacggaaattgaaacctatatggacggtgcagacctcatttgcaccacggcaaaagtcgacagatcgtttggtgacattccggtagttcatgggatgccgtttgtatcgggcgtcggtatcgaagccctgcaacaaaaaatcctcactattctcgaggggtga

SEQ ID NO: 125095 - DNA, 468 bp, Enterobacter cloacae
atgagtcacgtttttgtccgtaccggaattgagtttgaaaactgtcagcttgcgctggcgcacattggtgaggagatgctggcgaaaggtgttgtgcatgccacttacccagccgcacttctcgaaagggagatcaactaccccaccggcataacccttgaacgccatgcggttgcaatcccgcattgtgaggcggtacatgccaaaatccccgcgatttacctgattcgcccggacaaaccggtgaattttcagcaggctgatgatgatggagaggtcgccgtttcactcatcatcgcattaattgttgaaaaccctgcggcgcaaataaaactgctgcgccgtcttttcagcgagctacaaaacccggacacgctggacctgttgttggtcacaccagccgatcgcctggccgagcaattccgggagacgatccttgagcctgactcctgtgcacaggcttcataa

SEQ ID NO: 125096 - DNA, 1272 bp, Enterobacter cloacae
gtgaaagatattattgcccgccataaagcgggagagcatctcggtatttgttctgtctgttccgcacacccgctggtcattgaagctgcattgcgttttgatttgaataccgacaataaagtgctgattgaggccacttcaaatcaggtgaatcagtttggcggctataccggcatgactcctgctgattttcgcgattttgtattgaatatcgccagggacgttggttttccccgagaacgcctgattcttggaggggatcacctggggcctaactgctggcaaaacgaaccggctgaagccgcgatggaaaaatccgttgagctgatcaaaacctatgtcgctgccggatttaccaagatccatctggatgcttccatgtcatgcgccgacgaccccgtcccgctagcaccagtagtggtagcccagcgggctgcacagttatgcaaagctgcagaagagacggctaatgaggaacaaaaagcggcactaacctacgttattggcactgaagttcccgtaccgggtggggaagccagcagtattaactgcgtgcatgttacctgtgttgaagttgccgcacagacgctcgatacccaccgcgctgcctttagcgcactcggtctggaagatgctatgacacgcgtgatcgctatcgtggtgcaaccgggcgtggagttcgaccatacccaaatcattcactatcaaccccacgcggccgaagcactatccggctggatccgccagacaccaatggtctatgaggcgcattcaaccgactaccagacccgtcaggcttatcaggccctggtgcgcgatcacttcgcgatcctgaaagtgggtccggcgctcacctttgctctgcgtgaagccatctttgccctggcacaaatggagagagaacttatcgcccctgagcagcgcagccacgtgctggaggtgattgacgaagtgatgctgaacgagccggattactggaaaaagtattaccgtccaacctggagccaggcgatggtggatatccatttcagtctttctgatcgcattcgctactactggccgcatccacgtatccgtcagggcgtggagaaattactcaccaacatgagtaatacctccctaccgctgggtcttattagccagtttatgcccgttcagttcgaacgattgtcaatgaatgagatcgttgcaacaccgcacaatctcatcatcgacaaaatacaggatgtattacgtgcctatcgatttggctgtacccctgaatacgtctga

SEQ ID NO: 125097 - DNA, 855 bp, Enterobacter cloacae
atgtatatcatctcgtcaaaagcgatgctgataaaggcacagcgtgaaggttacgcggtccccgcattcaatattcataatctcgaaacactgcaggtagtcgtcgaaacggcctcagagatgcggtctcctctgattgtcgcgggcacgcccggtacgtttagctatgccggaaccgggaatgtggtagccattgctggcgatctggccaaaacgtacaaccagccactggcgatccacctcgatcatcacgaagatttcgacgatatcgcgcagaaagtacggagcgggatccgctctgcaatgatcgacggctctcatcatccgttctctgaaaacgtattgctcgtaaagaaagtgacggactactgccaccgctacgacattagcgtagaggctgaacttggccgtcttggcggtcaggaggatgaccttgtcgtcgacagcaaagatgcgctctacaccaatccacaacaggctcgcgagtatgttgagctgacgggtatcgactcgctggctgtagccatcggcaccgcgcacggcctgtataaagctacgccaaggctggatttcgaacgcctggcagagatccgtaatctggttgatatcccgctggtactgcacggtgcctcaggattgtcgacagaagatatccgtaaggctattagcctcgggatctgcaaggtcaatgtcgccacagaactcaaaatcgccttctcgaatgcgctgaaaacctatctcgcttcatatcccgatgccagcgacccccgtcattacatggtacccgccaaaagtgccatgcaagaggtcgtacgcaaggttattgccgattgtggttgtgaaggaaagctctaa

SEQ ID NO: 125098 - DNA, 144 bp, Enterobacter cloacae
atgtttttttgtgattggcatcttagaaatgaaagattcgaaatgaaagataagaatgcgaaagaaacgaaagcaaaaaaaagcatggccgaagccatgctgaaagaggtttatagtgaactcacgtcactggtgccgggttaa

SEQ ID NO: 125099 - DNA, 384 bp, Enterobacter cloacae
atggttatctctcccctcgccctgcgccgttctgcctgtgcattcattgtactgatgttcctctgcgcccttctgctggcctggagcgcgctttcacatgaggaatctacgctggccattcgtccggttaatcagggcgccagcgtgcccgacggtttctctgtctggcatcatctggacgcgaacgggatccgctttaaaagcattacgccgaaagacgatgtgctactgatcaagtttgactcccgcacgcagagcgccgcggcgaaagcggttcttgaccgtacgctgccgcgtgggtatatcattgcccagcaggaagatgacaaccagccagcggcgtggctgtcattgattcgcgatacgtcgcatcggtttggataa

SEQ ID NO: 125100 - DNA, 849 bp, Enterobacter cloacae
atgtttcacgggttaagtgcgtttccgttaacgcccctgaaagaggggaagtttgacgagcaggcctttatcaacctgcttcgccccctgatcgacgcgggggtggattcgctgggtattctgggttcaacgggcagctatgcctacctcacggttgaggagcgcacgcatattacccgttgcgcggtggaacatgccaatgacattccggtcatggtcagtattggcgcactgagactggatgacattctgcgtctggctgagcgcgcgcagaaggcgggagcatccagcgtgctgatggcaccggtgtcgtaccagcgtttgacgacggacgaggtctattcgctatatgagacggtaactcgccagctctccgtcccgctgtgcgtttatgataatcccgccaccaccgggtttgagtttagcgacgagctgatgtttgccgtggcggcgctgcccaatattggctcggtgaaaatgggccacatgccggaggatgtgtcgcaggtgcgggcgcgtcttccgaagacggtcacgctggggataagcggcgactggcgggcagcatccgccctgcaggccgggtttgacgtctggtattccgtcgtcggcgggctgttccctcaggcggcactggcaattgcgcactcgaaagacagcatggaatcagaacgtctggagccactgtgggcgctgttccgccgttacggcagcgtgcgggtgatggcagcggcagccgagatgatgggaaaagtggaggcaccggcgctccccttcccactgcaggcgattcagggtgagccgcgcgaggcgcttgctgcgatcctggcggacctgacgctggcctga

SEQ ID NO: 125101 - DNA, 1170 bp, Enterobacter cloacae
atgagcacaccgatcaaacggctagaaatcattaaaaatgccattgaactggaagatgacgacatcatccagagccagctggcacggctgaagaatgaagcgtttgacgatgagctacaggcaatcgtcgtggcgcttgagcagaagaattacaccgccgccatcagggccattaccgcctggctgcagggccagcgcgccatcaccccgtggcgcgacccgcaagtggcagccagcaagctggagctgaaggcgctggaagagcgtctgcgcgatctcatcgatcgccgcaacgcgcgggtgcagcagcttgatgagttcaacgatctctatttctcccgtctgggtcccctgatgcagcagatcctcgccctgcgtaaaaccctggcggagctgaacctgcgtcgtcagcaggcggaggcgcgtcgtcgcgaggaagattaccgtcgctgccagcgctatatggcgcaggcggtagaggtgctggcgacgctcacccagcgctggcgcgatctgccagccgactccgtgcaggcggctgaagcgcgcaagcatctggagcagcaaagtaatttgattgctaatttgctggccgaggcgctggagctggagagcggcttaacgcgcgaagaggagcctgctcgccaggcgcgtgacgaagccaacgaagagtacgagaagtatcgcgagcaacatcacgatgtcgaaatgcggctgcgcaaagggaagctcctctctgaagaagatcagaacgaactcaagcgtctctggcggcaggcgagcaaactctgtcatccggacctggtggcggacgacctgaaagaggaagccaacgcgatgatggtgcagctcaaccaggccaaacagcgtggcgacgtcaaggctattcgctcgctggtcgcccgcctgcagcagggcttcgagccgctgatggccagcgacaggctgaacgatctggaacgtatccgcaaaaaaatggcgcaggtacgcgagcaaatcgacaccttagtgaacgagctggcggagctggagaaagaagagtcctggctgctggtgtcgtcgctgagcaatatggaggcgtactttgctcagcaggagaaagccctgcacgaggttcgcgcctcgctcgaacaccaggtgaacgaagcgcagatggattcagcagcctga

SEQ ID NO: 125102 - DNA, 339 bp, Enterobacter cloacae
atggcgatagaggctgcccgtgcaagcgttccactcagcgtgggggctcgtcttaacgggcttaaccacatcgcagagctgcgtgcccgatacgggaacgatagcggaaaagagctggcacggtttatggcagagatgcgcgataagcgcgatccctgttttgaggaaaacggcagggcgctggccgccatctttttcctggcgagattacccgtcgcccgtcatgagtgcgatatcagtgagctgacgacagaggagaaaaaggcgctgattaatgccatgaaccattttcgtgctgtcgtgagtttatttcctgaacggctgaccatgccgatataa

SEQ ID NO: 125103 - DNA, 228 bp, Enterobacter cloacae
atgcgaaacagtgaaaaccgcccttatccgaccggaagtgaggaactgaaacgcctgctggcggaggcaaaaacagaggaacgctgcgcgcgagccctcgcggtctccctgcgcctggaggcgctggcaagccatatctataaaaccggcatgagcggagaagacgttgccgaactgctgtgccacgaggcggcccgctacgaacgtgaatcccaggagctgcactga

SEQ ID NO: 125104 - DNA, 222 bp, Enterobacter cloacae
atggccgattttatcgatcttgcgcaagcgcgcgagcaggaagacagagagcggcacattaatagcgcccgcagacggcccgcaacgccttcgcgttttctgtgcgaggactgcgaggcgccgatacccgaggtgcgccgaatggcggtgcccggcgtggccttgtgcatcacctgccaggagattgcggagatgaaaaataaacacgtccggggaggataa

SEQ ID NO: 125105 - DNA, 2190 bp, Enterobacter cloacae
ttggctacgtcatttgcgtatccgtggaacgcttcacggtcggccattgccagcccttacctttcccatgcccagcagcagcgccgcgatcgttttttcgcggcgctacgggaggcaaggattgccctctccctgcaacctgactgcgtgcgtttcgacgtctggcgcacggttgatgacctcgaacagcgtcagggcagcccgcatgccaatgcctttttggtccgcttctgcaacaggatgttaccccgtctgcggctggtctctgaacgctatgcctgcgcaggcctgcatgacacggtcgccagggccgtgtttgacgaccattttgacactccgcttcagcaatatcttgcctcccgcatggttgatctggttgcacgctttaaccgacttgcggatatgtcccgcgcggatatcgacctgctggccgcagatatcgccagctttattcgcggtgagctggcgaatataaatgatgctgacctgggtgaataccagacgctttacgtctggtatcagcgcgccggcctgatcgcccgacagttcaaggtgtcacctccacactgggaacgggtgtcgaagacgtttttcaacaaagacgatgttgccgcagcggtgatccgcctgttttcagagacgtggtggcgcgggcgattgcgtcggattgcgtctgcctggcgcgagcatttacagatagcccttggcaacgtcagcaaaacgagaacggcgtatgcgagcaagcgctgcgtgaccgaatggcgcgagcagaagcgccgcacccgtgaatttcttaagggcatggaactcgaagatgaagagggcaaccgcatcagcctgatcgaaaaaatcgatacctcggtcgctaacccggcgatacgtcgctgtgaactgatgacccgcattcgcgggtttgaaaatatctgccaggcactgggctatgtgggcgagttctataccttaaccgcgccttcggcatatcacgcgacggtgaaatcaggctaccccaacgcgaagtggaacggggccagcccggcggatacgcaaagctactttacccgtctgtgggcgcgcatccgcgcaaagctgcaccgtgaggggcgccgaatttttggtatccgcgttgcggaacctcatcacgacggcacgccccactggcacatgctgatgtttatgctgccggaagatgtcgggcacgttcgccaaattatgaatgattatgcctgccaggaagaagccacagaactgcgtagcgaaagtgccagaaaggcacgttttcacgcggaggcgatcgatcccctgaagggcagcgcgaccggctatgttgccaaatacatctcaaagaatatcgacggctttgcgcttgatggtgagaccgattatgaaagcggtgggctgttgaaggagacggcttctgctgtttcagcctgggcgggacgctggcacattcgccagtttcagtttatcggcggggcgccggtcacggtctatcgcgagctgcgccgtctggctgataacgaggccgtgcgcggtttgagcgtggagtttgccgctgtccatgaagctgccgacgctggggactgggcgggttacgtcaccgcgcagggcgggccatttgtccgtcgcgatgatttacaggtacgcacgctgtatgcgccgcgcgtcgggtttaaccagtacggcgaggaaacgatctgcatccgcggcgtgtacgactccgccgtcggcgcgggcagcccgattttaacccggctcacgcagtggaaaattgtgccgaagcgggccgtggatcgtcaggatgttctcgtgctctctcggagttctgtcaataactgtacggtgaacgatctctcacagccccttaaccggcgtgcgagacgggcattaaccgaacgcatcaaacgcgttcggcccggcgcgagaacccccgttgtctatgagcgggatccacagaacgggatacccgagagggtgattgacgagatacgcctcgccaccgggatcgtcattagccgtgccgaggcgctgcatcttatggcgggcggcgtcagccgctttcacaccaaatggtgtcgaggcgcagctgacggagcgctatttccggcagcgtgtacttatcaggaaaagaggcggaaaatccttgaacgtattgggcatttaacggatctgttaacccagcgagcatgctaa

SEQ ID NO: 125106 - DNA, 447 bp, Enterobacter cloacae
atggtgcatgaaggggctgtcgtgaaagccctgatgctgttgctggctggtctgctggctatcacgctgtggcttcgtcatgacaacctgacgctgtcccgttccttagccagcgcgaaccgggttgccagtgaacaaaaaaacgccctcgccacgcttaaccaacagctttccctgtcgcaacgggttgcccgaacacatgaagtcgcccaggtcaggcttcgtgaagaactgctcactgcgagtgaggaacgcgcgagacgggaagcgactatcgggagattactcaatgaaaatgacgcgttacgccgctggtataccaatcagttgcctgatgctgtccgccggttgcacacccgcaccgcctgcgcctccgcagcccattgtttacaacgcctgcccgaaggtgagccgctgcccgatgccgggaagcgaacccgccactaa

SEQ ID NO: 125107 - DNA, 468 bp, Enterobacter cloacae
atgcacaaactcaagagcctgcgtcaggcattaattgacgcgattccccaactgaaagcaaacccggatcggctgcagatgtcggtcggcagcggcaatatcgattcccggctggcctcctcgctctcctttgaaaagcactatgagctgaatgcgaaggtcaacagcttctccggcgacagcgagggcgttttcgtcccggtagtggcctggcttggggaaaaccagccggacatttttaccctcgatgaaggccgcaaaaacggctgttccttcacgatcgttttaaacgatgacgatacgatggatatcagcatcaaagtacaattaaccgagcgcattcttgtttctcaggaagagggcggtttgcacgcaacgtattcccccgaaccgccgctgccggagcccgtcacgcgtccgaaggccctatacatcaacggggagctggtcagcgagtgggaggcgtaa

SEQ ID NO: 125108 - DNA, 432 bp, Enterobacter cloacae
atgagaaaattttttagcaacgcagatagcagtttttatcttgaagatacgattcaggtttacgaagctcaaggtatttttgttcctctggatttgagggagatttcagacctggaatatgaatctttcatggtgtcacctgacagaaagacacctcattacaatattgatagaaattgcatggagtggattgatatcgctccgccatcacaagaagagtgtatatcgatagccaggtcaactaaggagaggttattgtctatagcgacacaggcgatctctcccctacaggatgctgttgatttatctatggcgacggacgcggagatcgcctctctgcagcagtggaagagatatcgggttattcttagtcgcattgatactaacaacgctccggatattatctggcctgaaacgccgcctaacagttaa

SEQ ID NO: 125109 - DNA, 2280 bp, Enterobacter cloacae
atgagtaataatgtcagacttcaggagctgcttaaggcagtcgaccgggcaacccgaccgcttaacgctctccataacgcgagccgcactctcgcaagcgatatccgtgattcacagacggcgctgggggcgctcgatgagcaggcggggcgcattaacggcttcagaaaagcaaatgcccggctcgccacgacggagcagtcgcttgctcaggcgaaacagcaggccgcggcgctggcggtgcagtttaaaaacacgcaaaaccccagccaggcgcaggctgatgcgctgactgcagcccgaaaatcggcggccgaccttaagcttgagtacaacagcttacgctactcgttacagcgtcagcgcgctgaactcgctcaggcgggagtcaacacgcgcacgctctcgtctgatgagcgtcgtttacgaactcacatcagcgaaaaaacgcagcagcttaaccggcagcgggatgcgctggcccgcgtcaatcagcaacaggagagactgagtgccgttcagaaccgctacgagtcaggcaaacgcgttgtcgcgcgggtgaaccagctggcgactgcgggggtgggaatggccaaagcgggctttgaccagacgtcccggtttatggcgcctggcatcagctttgaaaagcagatgtcggccattcaggcaaaccttggcctggcgaagggggattcccggcttgaggcgattcgccagcaggcgcgggaggtcagcgccaggaccggagtacctgcagatacggtcctccgggcacaaaccgaactgactcgttcaggctatgacgccgatgggctgcttgcggccacagcgccaacggtcaacctcagcctagcggggagtgtcgacgcggctaaagcggccgatatgatcgccagcacgcaggccgcgtatagcctggccgatacggacgcgggacgcatcgcagatgtgcttacgcgcggttctacctcttcaaataccagcctcgctgagatggtggcggccgtcacctccgctgcgcccgctgcggatgcatccggtatggggcttgaagagaccaccgcgctgctgggcgttctggcggaaaaagggatgaaaggcgccgccgccggggacgcgctcagtgcgatgttgcgtcacgttcagacgccggatgccataaaagccgcgggggcgctggcttccgctgcgggtgatggatcgcttgatgaaaaacgccagcagttgcagggggcaaaaggcagtaccgcgattgcggcgtccgtgcagaccgataatcttgacggcgatatcaaccgattccaggccgcgtggaacgggttgaagattgatgtatttgataaagcggatggcgctctgcgcaacctgataacaaccgcaaccggctggcttggcacggcctccctttgggtgaatgccaaccctgagctgacgcagactctcgccagcatcgttgtcggcgcacaggcgtttgctggcgtactgggtggcgtaggcacggttatcggcccggttctgacaggcgtcaatatggttgttaccgtagccgggatgttgggaacggtattcagcgtggtgggcggcgccatcatgacggtgctgggtgcccttagctggccggtgattgcccttggcgcggcgattgctgccggcgccttactgatttttaaatactgggagcccatcagcgccttctttggtggagtgatggaagggctttcgacggctttcgcaccgctgggggcgctgttctcaccggtgatggcggtgtttgactctatctcggagaagctgggcggtatctggcaatggttcaccgacttgattacgccgatcaaggcgacgcaggaaacgctggatggctgtaaaaatgcaggcgtgatttttgggcaggcgctgggagaggcgcttttggcaccgctgaatctctttaacagcctgagtggcaaggccagctggctgctggagaagctcggtattatcaaaagtgagtcggataatctcgacaccgcagcggcaaaagcagaagcggcatctcctccagtaggcagttcgtctgttccaggcgcggggttctatggcggcagcctggggtatcagccaaccgttgctgctgcaggtcgttcttacgtcgatcagagtaaaagcgaatataacatcacgctgcagggtgacatctcttccggaacggatctgactcgtcaaattcgtgaggccatagagaatagtgaacgtgaaaaaatgagacggcagcaatccagctatatatatggttga

SEQ ID NO: 125110 - DNA, 372 bp, Enterobacter cloacae
atgaccacggaagagctggcggagagtttaggcgttgccaggcaaacggtgaatcgctggatacgccagcagggatgggagaccgaaggtctcaatggtgtgaaaggcggtcgggcgaggctcatacacgtcgatgcgcgcgtgaaggaacatatcatgcgcctcccggctatccgaaaccgtcaggcagtgtaccacctggcagagacaacagcgccatacattgtcccctcctctactctgcgaccggatatcattgcgacgctggaaaacctgacgccgtctgaacaggaacgtctggatgcattcctgaagcgcgaagggttacgcggctttcttacccgtctgaatctggctgaatatacggcataa

SEQ ID NO: 125111 - DNA, 2190 bp, Enterobacter cloacae
atgaatagaaaaacgcacaataatgtaaagatatttataattgccctggcgatatgcctgatcgcggttcctttctcccgttatctctccccgcgcgcgattgtgaatggtcacgacgtttatttagcgtggttacccctgagcgttatgctggcggtaattctgttatttggtcgtcgggcaattcttcccattctgttaggttttactgtcactaatttattctatattaatttagcaccgctacaatattcagtattgctgttttgtcagacctttgcgttgttcgcggcgtgcggcttgttgcgcctcatgctgggcaggcgctggcgctactgcattcctaacaagcacattggattacggatattctggctcggttttattgtgccactcggcattaaaatgtcgatgtatttagcgggctatttgtttgatttcccggtaactatctccaccttcttcggtgaagggacggtaatttataacgtcgtggatattcaaagtctgataggcgcggcgctgatttttaccatgatgttctattacccgttaagaatgataattaatcctcgttatgccattaccttctggcgacgaagcgtgaagcccatttttttccataagaattcattgtttatatttgtctggctcatgcttctaggcttcattctcgctgttttatgtggcccttttgaatcccctgttatagcgggctatttaatgccgctgatttttattctctttaccttagcgataagccgcctgacctatgcacttatctctctgctttgggctgcttcagcgcttctgctgttgacctacaactataacttcctgaatggtgtggagtcaggccattcactttcctttatcctgtccgtgctgatctcgtttgccatctgcttgctttacatgtcgcggatttaccagcgtagcgagtggctgaagcggggatggcagggcagagcgctgaccgatccgctgaccggtttgcccaatatccgtgcgctggaggagtatcttgagattcaccaggatgccaaagtgtgcattctgcgcatggataacctggaatttttaagccgccattacgggatcctgatgcgggtccactgcaaacgcacgatcgcctcgtcgctgcagccccttctgcaaaaggacgagatgctcttccagttgcccggaagcgagctggtggtggtcttgctggggccggaaattgctgagcgtctccagcatatggttgatcggttgaacagccggaaaattttctggaacaacaccgggctggatattgagtttggtgcctcctgggggatggtcgaaaacggtgaaaaattgcatcacacgctggggcaactaagctggctggctgagcaatcttgtgcaggacagaacgtacttgcgctgacgaatagcctggaggctgcatcaggacaaacaacagagcgcgtcctgatgttagcgcggattaagcatgccctggaggcgggtcagttccatttatacgcgcaaccgatccagaaggcagacggtagcggttactacgaaattctgacgcgtatggagagcgagggcgaaatcatcacccctgatcgctttattccgctgattgcccagttcaaccttagccaccggtttgatatgtgcgttatggaaaaattactgctgtggctgcgagatcatcctgcgacgcagcctggggcccgtttctccgtcaatctgatgccgctcacgctgatgcaaaaagaggtggcgaccgagatttgtgcgctgtttgaacgatacggcgttgcccctcaaaccgtggtcattgagatcaccgaagagcaggctttctccaattcaggttgcagcatcaataatattcagcaactgcgggattgtggattccggattgctattgatgattttggtacggggtacgccaactacgagcgtctcagacgtctgcaggcggatatcatcaaaattgacggctgctttgttaaagacatttgtactgatgacatggatgcgatgatcgtccagtcgatgtgtaatctggcgaagacgaaatcgctatgtgtggtggcggagtatgtcgaaacacccgcacagcgggagatgttgcttcgcttcggcgtggattacctgcagggctacctgataggtaaacccaaaccgctggaagaaattcgggcataa

SEQ ID NO: 125112 - DNA, 498 bp, Enterobacter cloacae
atgtctgacagttttcagaatgaagtgcctaaggcacgtattaacctgaagcttgacctgcatactggcggagcaagcaagaaaatggaattacccttaaaactgcttgttgccggtgatttcagtaatggtcaggatgctgcgccaatatctgagcgtgaaaaagttaacatcaccaaaaataatttcgacagtgttctttccgaatattccccaaaagttaatctgagcgtcaaaaacaccctgtcagatgatggtggtgaggacaatattgagctgactttccagagcatgaaagatttcacgccagagcaggtggctgcccagataccacagctgaaggcgatgctggcgatgcgcaacttactccgcgatcttaaggccaacctgttggataaccagactttccgaaaagagctggaaaaaatcgttcttgaccagtcacttagcgctgaattgcgcaatgaattatccgcactggcacccaaaaaagcttaa

SEQ ID NO: 125113 - DNA, 231 bp, Enterobacter cloacae
atgctcgataaagccagcgtaaaagcatatccgggcgtgggcagcagctacagcctgagctggaaggccccggacggtcgcatgctcaattataccctgcgtactgaagcgggtgaggggccgctggcgctgctgaagctgcgtaacttccgcctcccggaaaccatattcagcacgaccggcgctgcggcatcaggtcaggtcgccagcgatgcagaggaggtctactga

SEQ ID NO: 125114 - DNA, 1593 bp, Enterobacter cloacae
atgagtacgctgaacacgttactgagtgcctgtcaggcagaagaggaaccattacttgtagcaacccgtgagcgtgtggcgcagtgggataactggctgcagccgctgtccggaccctcgcccgctggcgaagacccaggctatgacgatgacttccagcagatgcgagaagaggtcaataaactctccggcgcggatatagaactcatctgtcgtctggcggagaagctgctgaccaccactgccaaagacattcgcgtcgcgacgtactactgctgggcaaagctgcatcgtgaaggcgagcaggggctggctgagggccttgaactactgaccggactactggagcgctttggaccacagctgcacccgcagcgtgaccgcagccgtaaggccgcgctggaatggctgggcggttcgcgtatgactgacagcctctctctctacccggaagtcgtcagggaaaatgcggaacgtaccaccggtgcactgctgttgttagcacatcttacggagaaagaagcggaagaaacccgcccggagctcaatgcgctgtatggcgcgctagaaagccggttgcagaaaggcgggggcgtggatgcggtggtgccacagaatgtctgcagcgaaccgcaaaacccgatcggtcacagcgatgccccgtcaatcgggcggatcacctccggtcaggatttgctggcccaggcccgcaccctcaccgaatacctgcgtgaacagccggatggctggctgtcagctcaccatctgatgaaaagcctgcgtcatgacaccctacgggccattccggcaccggatgcacaggggcgtacccgtatcgaaccgccaagagcagaccagcgtgcgttgctcaagcgtttgtatctgcagcaaaactgggctgagatgctggaaacggcggacagcaccttttcccgcggtgccaatcacctgtggctggatttgcagtggtacattcaccaggcgctgacgaaatcaggtcaggacactctggctggcatcattgctgccgacctgaaaggactgctgacccgcctgtccgggctggagacgctggcgttcagtgacggtacgccgtttgcggacgaagtgacgctgaactggatccagcagagcgtgcttgataccacgggcgggtggggcaacgacacgccatcagtcccggtcaccgccggtaacgatgacattctggcgctggagccggaagccgtggcactggccgacagtgaaggcctggatgccgcgctgggctggttgcagacccggccgggcatgaccaccgatcgtcagaagtggctgttgcgcctgctgatgggtcgcattgctgagcagtacggaaaaaatgacctggcggtgcatctgtttgcagagctgggtgagcgtgcaagagaagtgaccctcagtgagtgggagccagagctgctgtttgaggtacaggcccgccatctgaaactcctgcgcctgaaagccggtcgcagcgaggctgacaaagcacgccttacgccggtgatggaccagctgctggccggactgataaccgttgaccctgctcgcgccgccgtactttgcggttag

SEQ ID NO: 125115 - DNA, 372 bp, Enterobacter cloacae
atgttgtggccggagcaggctaagcctctggttcagcagtggcagcagcaacggaatgccgcggcgttaccaacagaacaactgaacggctggcatcagggaatggcgacgctggagaagttgagtcaccgcctgaacggtctggatgagcagaaggggaaatacattaccgtcagtgagctgaagtcagtggttttttccgctatgcagtcatttaatcaatcgataccggctgaagaacagctccgacgactgtcgcagtatcctgctggaaatgtacttcctgaaggggagaagactcaacttgagctgcatttaaaacaactggcaacacgttatgctcaaataaaacaggacgcctctgctcaatga

SEQ ID NO: 125116 - DNA, 204 bp, Enterobacter cloacae
atgatcttcgttaagccgttcctgggcattgcgtggctgctgaagcgcgacccactgaacagcctgatgaatatcccggcgatcctctcccgctttgcaggtaaaggcctgctgtacagcgagaacggttacctgcgctggtatgtggcgtccatgagcatcggtgcggttgtcgtgctggcgctgctgatggtgttgcgttga

SEQ ID NO: 125117 - DNA, 462 bp, Enterobacter cloacae
atgatccagtggcaagatttacaccatagtgagctcaccgttcagtcgctctacgcgttgctcaaactgcgctgcgaagtgtttgtggttgaacaaacctgtccatatcaggatatcgacggtgatgatctcacaggggaaaaccgtcatatcctcggctggaaggataacgagctggtggcgtatgcgaggattctgaaaagcgaggacgattttgagcccgtcgtgataggtcgcgtcattgtcagcaacaaagcacggggcgaaaaactcggttatcagctgatggaaaaaacgctggatgcgtgccgggaacagtggccggacaaggcgttatacctgggcgcgcaggcgcacctgcaatccttctacggccattttggttttacgccggttaccgacgtttatgacgaagatggtatcccgcacatcggcatggcacgggaagtgaaacaggcgtaa

SEQ ID NO: 125118 - DNA, 1296 bp, Enterobacter cloacae
gtgaattcgattttccttgcgctggagcaactgcatacccagctttcgcaagcgttacccgccacacccggcctgcgtcatttcgacgtctctttcccgttaaacgacgccttcgatcctctcgcctggcttggcgagcagcagtgctatccgcaattttactggcagcagcgtaacggtgatgaagagctggctgcgctgggggcggtcacccaattttcctctctggcgctggcctcacagtttttgcgtgcagaacatgcgccaaaagagactcgcatctgcggcctcaacgcattcagcccggagcagggcagtctttttctgccgcgcctgctctggcgacgtaccgctggcaacgccactctccgcctgcagctgtggagcgatagctcgcttcaggacgacgcgcgcactgccctggaattactccagcaactccgtccagccagagccattcgtccgctgtctgtccaggttgagcgcgaaacgcatctgccgcaaaaaccggaatggttgaccctgatcggcaaggcgacggagactatcgcgcgcggcgatttcgaaaaggtcgtgcttgcccgggccaccgatctgcagtgtaaacagcgggttaatcctgtcgcactgatggccgccagccgcgccctgaatctcaactgctatcatttctgcatggtattcgacgcccgcaacgcgttcctcggctccacgcccgagcgcctctggcggcgacgtggcaagctgctgcgcaccgaagcgctggcgggcaccgtcgccagccatacggatgataaacaggcgcagcgcctgggcgagtggttgctgaatgatgataaaaaccagcgtgaaaatatgctggtcgtggaagatatctgccagcgtcttcagcaccatacgcagacgcttgaggtattgcctgctcaggtcgtccggctgcgtaaagtccagcatttacgacgctgtatctggacggagctaaaacaggccgatgacgaattgtgtctgcatgtgctccagccgacagccgccgttgccgggcttccgcgacagcccgcgcgtgcgtttatccacaacgtcgagcctttcaaccgcgaatggtacgccggttcggccgggtatttatcgcccgatcaaagcgagttctgtgtggcgttgcgctcggcgcgcgtccaggatgacgccctgcggctctacgccggggcgggcatcgtcagcggatctgacccggagcaggagtggcaggagatcgaaaacaaagccgctggcttgcgctctctgctccttagggattaa

SEQ ID NO: 125119 - DNA, 693 bp, Enterobacter cloacae
gtgagcaacattgagagctggctggaactgcatccggcggaaaaacgtcaaccctgggcggtggcaatccccgaattatctcgtcaggcgtgggaaatcaccaaagcgcactgtgagacattcagcgaagccggtctggcgcaccgtattcgtcagtatctgcctgaacagggccagctgtttgtcggtaatagcctggtggtgcgtctgattgatgccttttcgaagctgcctgcgggctaccctgtttacagcaaccgcggcgccagcggcatcgacgggctgatctcgacggcggcgggcgtgcagcgcgccagcgcgaaatcgacgctggcgatcgtgggcgatctctccgcgctctacgatctcaacgcgctggcgctgctgcatcaggcttccgcaccgtttgtgctgatcgtcgtgaacaacaacggcgggcagattttctctctgttgccaacgccccagagcgagcgtgagcgtttctatctgatgccgcagaacgtgcagtttgaacatgccgcggcaatgttcagcctgaaataccaccgcccggagagttgggaacagctggaagccgcgctaagcagcgcctggaagcaaccgggcgcgacgctgattgagctggtcgtgaacgatgccgacggtgcgcagagcctgcaaagcctgctggcacaggtgagccagctgtga

SEQ ID NO: 125120 - DNA, 777 bp, Enterobacter cloacae
gtgatcctcgcaggcgtgcagcagaccggaaaacccggctatccctggctggtctttttgcacggtttttccggagactgccgcgagtggcaggttgtcggggagacgctgagcgagtatccccggctctatcttgacctgccggggcacggtgaatcccggaatattaccgtgacggggttcgaggagatgagtacgttacttacccgaacactgattagttacaacatacttaactactggatggtggggtactccctcggcggccgcattgcgatgtttcacgcctgccagcagccgaaggggctgttgggcgtgatggttgagggcggacatccgggcctgcagaacgccgacgatcgccatgcgcggcgggtatccgaccaccgctgggcgacacgttttcgcaccgaaccgctggataaggtctttgctgactggtaccagcagccggtgtttgcctctctcccggacgctgagcggaaggcgcttattaccctgcgcagccaaaacaacggcataacgctggcgaaaatgcttgaagcgacctcgctggccgggcagccggatttacgtcccgcgctcagtacccgccatttctcttttgattacctctatggcgaacgtgataaaaagttcgcagcccttgccgctgaactgcacgccgttcgtcatgaaattccaaacgccggacacaacgcccaccgggaaaaccccgctgcggtcgccgcgagtctggctcagatactgcgtcttcgaacaaaggacactctatga

SEQ ID NO: 125121 - DNA, 1059 bp, Enterobacter cloacae
atgaaaaatccaacctatatgaccgatgaggatcgctggcaggctgtactggctcgcgatccgcgtgctgacgatcagtttgtctttgccgtgcaaacgacggggattgtctgtcgtccgtcctgccgggcacgtcacgccctgcgtaaaaacgtccacttttatcctgatgttcaccatgccattgaggcagggtttcgcccgtgcaagcgctgtatgccggataaacgcgatccgcagcagcagaagctggcgaaagtggagcacgcctgtcgccttctggagcaggatcctgcgttaacgctggacggtctggcgcagcaggtggccatgagtccttttcacttccaccggctgtttaagtccgtcaccggaatgacgccaaaagcctggcagcaggcggcgcgcggtcaacgtctgcgcacggcgcttgcccagggggataccgttaccgatgccgtgctggccgcaggctttcccgacagcagcagctattatcgtaaagccacggatgcgctgggtatgacggcgaaacagtaccgcaaaggcgacgtggcggtgcaatacgccatcgatgactgctcattaggacgctgtctggtcgctgaaagcgagcgggggatttgcgcaatattgctcggtgacgacgatgccgaattagccggggagctggcgacgctgtttccaaaagcagagcccgcgccgcaggaagatgccttcgcgcagcgtatccgccaggtgattgccagtattgataaccgcgcagcgccgcttgaactgccgctggatatacgcggaaccgcgttccagcagcgagtctggcaggcccttcgtgaaattccctgcggtgaaacggcaagttatcagcaggtggcgcaggcgattggacaacccaacgcggtacgtgccgtcgcgggagcctgtgcggcaaacaggctggcgattgtgatcccctgtcaccgcgttgtccgtaacgatggcgcactgtcgggttaccgatgggggacggcgcgaaaagcgctattgctaaaacgtgaggcgaaacgccaggagggataa

SEQ ID NO: 125122 - DNA, 726 bp, Enterobacter cloacae
atgctgaacgttatgacaactcgatttcccctgatattactgcttaatgtcgccggtctggcgctctttttctcctggtatatcccggcgaatcacggtttctggttcccgctggattcaggcctgtttcatttcttcaaccaggcgctggtgaagagcgatgcgttcctgtggctggtggcaatcaccaacaaccgcgccttcgacggcatttccttgctggcgatgggcggtctgatgctctctttctggctcaaagaggatggcacagggcgtcgccgtatcctgatcatcggtctggtgatgcttctggctgcggtggttattaatcagctggcgcaacatctgatgccggtaaaacgcgccagcccgtcgctctctttcccgaatatttaccgcgtcagcgaattgctgcatattccaacgaaagatgcgtcgaaagacagttttccgggcgatcacggcatgatgctgcttattttttcaggtttcatgctgcgctatttcggcaagaaggcattcactattgccctgcttattgtggtgatatttgccttcccgcgcgtgatgattggcgctcactggctgacggatattgtcgtgggttctctttcagcagtgctgattggtctgccgtgggtgctgatgacccccttgagcgatcgcctgattgccgtttttgatcgctatctcccgcgcagaaagcaacaagtattaaacaaataa

SEQ ID NO: 125123 - DNA, 1419 bp, Enterobacter cloacae
atgaaacgttttcttattttatctctgagtgctccccttgtttttatgctggctgcgtgcgcaccggaacattccacggtagcgccaataaaaacgcaggcgacagctgcatctgtaaatacccgacttaaccatgcggactggccgaaaaacgaatggtggaaagagtataacgacccgcagctaaatgcgcttattgcgaaagcgatagcggatgccccggatatgcaaattgcccggcaacgtattacgctcgcggaagcacaggcgaaggccgctattgctgccgatggcccacaactggatttttctgcggatgttgaacggcagaaaatgtcggcagaaggcctgatgggcccgttcgcgctgaccgatccggcggcgggaacgaccggcccatggtacaccaatggcacttttggcctgacggcggggtgggatctggatctctgggggaaaaatcgcgcccggattgccgcgcgtatcggtaaagtgaatgcgcaaaaagcggagctggagcagactcgacagctgcttgccagcagcgttgcgcgcctttactgggcgtggcagacccaggccgctgccggggatgtcctttcccaaattaagcaggagcagaaaaatattatcgatgccgatcgtgaactgtatcagcacggtattacctcctcggtggagggcgtcgaaaccgatatttatgccagcaaaacggatgaacagttagcggacgtgaagggcaaaatgaaggccattgaagcgcgactgactgcgttgaccggtacatcggccatagcgcttacgcgccatgcgttgcctgcgacagaagcctcgctcccttcaacgctgggatatgaactgctggcgcgccgtccggatcttcaggaagcgcactggtatatcgaagcctccctgagcgaggtggaggccgccagagccgcgttctatcctgacgtgaatcttatggccttcttgcagcaggatgccctgcacctcagcgatctgttccgctcttccgctcagcagatgggcgtgaccgccggtttgaccctgccgattttcgacagcggcaggctgaacgccaatctggatagtgcccaggcgcagaataacctctctgtcgcgaactacaacaaagcggtggtggaggcggtgaatcaggtggcgcgtacggccagcgaagtcgaaaccctgacggcaaaaaaccgtcaccagcagcaggtcgaaaaagacgcggcacgagtagtggcgctggcgcaggctcgttttagggcaggtatccttgcggggtcgcgggtcagcgaagccagaatcccggcgcttaaagaacaccttgagacggtcatgctgaaaggacagtatatcgacgccacgctgcaactgacgtcggcgctggggggcggctatcatcacggataa

SEQ ID NO: 125124 - DNA, 1158 bp, Enterobacter cloacae
gtgccaataaaatgtcataaccgcgtactgctgctgttggcctgcacggccatcgcggcggtcgcgttaccgtttgtgaatgtcgcccctaaccgcctgatgtcgggggagggaaaagcgctctggcaggtctggtcgtttacgccggggtggctggcggcgtcgctgggcgcgtgggtgatcctgtcgctctggcagggacgcccggcgcagtggctgacgctgctcctctccgaagggctgtttattatcctgttctggagtgccggactggcggcgacgcatatggcgtcggcggaaagtccactggcgaggacctctataggcagcggcctctggctgtggctggcgctctgtttgctggcctgcagcgatgcgattcgtcgactcatctccagtgccgtctggcgctgggtactgaatgcgcagatttggtgtatacccttgttcctgctgttcagcggggagctgaacaatctctcgctgttaaaagagtacgccaaccgccaggaggtatttgatgatgccctggcgcaacacctgacgatcctcttcggcacgctccttccggcgcttctgctcgggatttcgctgggcatgtggtgttaccgccatccttcccgccagggcagcatttttgccgtgctcaacgtcatccagacgattccttccgttgcgctgtttggcctgctgatagccccgctggccgggctggtgaagtcgtttccggtgctgggcgcggcaggcatcgccggaacgggattaaccccggcgcttatcgcgctggtgctctatgcactgttgccgctggtgcgcggcgtggtcgcggggttaagccaggtcgcgccggatgtgctggaaagcgcccatgccatggggatgagcgcgcggcagtgtttctggaagatacagctcccgctggcgctacccctgctgctgcgcagcctgcgggtagttgccgttcagaccgtgggcatggcggtgatcgccgcgctgattggcgcgggtggctttggtgcgctggtgttccaggggctgctgagcagtgctctcgatttggtgttgctgggcgtggtgcccacgattgcgctggcggtggttgtcgacgcgctgtttgccttatggctcgcgctgctcaggagaagcgccaatgattga

SEQ ID NO: 125125 - DNA, 738 bp, Enterobacter cloacae
gtgaaggctctgcgtgatccgctcctctggctggtagcgctgtttgtcgccttactgtttttgatgcctcacagcgcggtactgttcagcgcacttttccctgggctgccgcgcccggtgtaccagcaggagagctttattaatctcgccgtggcgcatctctggctggtggcgctctccagcactgtcgcgattgtgctgggcacaggtgcgggtatcgcggtgacccggcctgccgggcgggagtttcgtcccctggtggaaaccatcgcggccattggacagacgtttccgccggtggcggtgctggccattgcggtgccggtcatgggatttggtcagcagcctgcgcttatcgcgctgattttatacggggtgttgcccattctgcagggcacgctggcgggtattgcggctgtcccggcatcggtgttaagcgtggcagaagggatggggatgagtcgctggcagcggctgcgcaaggtggaactgccgcttgcagcaccggttattattgccgggatccgcacgtcggtgattattaacatcgggacggcgaccattgcatctacggtgggggccaatacgctgggaacgccgatcattatcggcttaagcgggtttaacacggcttacattgtgcagggggcggtgctggtcgcgctggcggctatcgtcgtcgaccgcctttttgagcggctggcgatgtacctcagccgacaccgccacgaacaataa

SEQ ID NO: 125126 - DNA, 741 bp, Enterobacter cloacae
atggcgctttacacgataggtgaagtggcactcctttgtgatatcaatcccgttaccctacgggcgtggcagcgacggtatggattgcttaaaccgcagagaacggacggcggacatcgccttttcaacgatgccgatatcgaccggatccgcgaaatcaaaagctggatagacaacggcgtgcaggtcggtaaagtgaagtccttgctgagccacgacgatccggacacgcagcacctctggcgcgaacagcaggaaaccctgctgcggctcctgcaggcgggtaatgtgcagcgcctgcgcgcatggatcaaagagcagggccgcgattatccggcacagacgctcatcgcccatcttttcattccgctccgtcgacgcctgcaatgccagcagtccaccctgcaggcgctgctcagcatgctcgacggcgtgctgattaactacattgccgtctgcctcgcctcggcgaagaacaaggccggaaaagatgcgctggtggtcggctggaacgtgcacgacaccacccgcctgtggctggaagcgtggattgccacccaacagggctggcgcgtggatgtccttgcgcactcgctggcgcagcttaagcctgagtttttcgacggccagactctgctggtctggtgtggcgaagtgccgtccgccacgcagcaacagctgctgacggaatggcgtgagaatgggtatccggtttattcccttggcccggatgagccataa

SEQ ID NO: 125127 - DNA, 129 bp, Enterobacter cloacae
atgatcggaaaaaggtgtgataacggacacgattttgcgcttttttgggatgcttcaaagaaagcaaacctgcaacagtgtatgttacgcgtttttagcgtgtgcggttttgagtatgtacgagtttaa

SEQ ID NO: 125128 - DNA, 996 bp, Enterobacter cloacae
atgatgcgaaaacccgtctgcgcgaccctggctgtgatgatgagtttgctgttctctcctctctcgcaggcgggtcaggcctgggagagttacaaggcgcgctttttcaaaccggaaggccgcattgttgataccggcaacagcgacgtttcgcatacggaaggtcagggtttcgccatgttaatggcggtggctaacgacgataaagccacgttcgataagctctggcaatggaccaacaggacgctaaagaacaacgaaaatggtctgttttactggcgttataaccccgcggagtctaatccggtcgctgataaaaacaacgccacagatggcgatgtcctgattgcatgggcgttgttaaaagccgatgcgcgctggcatgacaaacgctacagcgccgcatcggatgcgattacgaaagcattgattgaccacaccgtaatccgctatgcgggttaccgcgtgatgctgcccggcgtacagggatttaagcttgaggatgaagtggtccttaatccttcctattttgtgtttccggcctggcaggcctttgccggacgcagtcatttgccggtctggcgtgaattgataaaggacgggaaacgtctgctgggaaaaatgggatcgggtaaagcgaatctaccgacagactgggtttcgctggcatccgcgggcaagctgacgccggccaaaggctggccaccgcgaatgagctacgatgcgattcgtattccgctgtacatagcctggtctgataaacaaagcccgctgctgacgccctggaaagcctggtttggtcagttcccacgggaacatacacccgcctgggttaacgtcacgaccaacgaatacgcgccctatatgatggaaggcggtctgctggcggtcagggatttaacgatgggtcagccatccggcgaaccggaaatcacctctaaagacgactactattcggcaagtctgaaaatgctggtatggatttcagcgcaataa

SEQ ID NO: 125129 - DNA, 753 bp, Enterobacter cloacae
atggccatactcggattacagggtgtccgtggcggtgtgggtaccacatccgttaccgcggcgctggcgtggtcattacagcttttaggtgaatcggtgttggtgattgacgcctgcgccgataatttgctgcgtatgtcgttcaacgtcgacttcactcgtgaagcgggttgggcacgcgcgttgcttgatgataaagactggcgggatgcagggctgcgctatacctctcaacttgatttactgccttttggtcagctcaccaccaccgaacgtgagaatgaagccgcttatcagcggctgttttcgcagttcacgcttgcattgcaaagtctgaaagaaaaaggccactaccagtggatcctggtggatctgccgcacggcgccgggacgttaacccggcagcttatcgcgcagtgcgatcatgttctctccatcgtcaacgtggatgcaaattgccatattcgtctgcatcaacaggggctgccgcaaaatgcgcacctcctgattaatgacttacgcatcgggagccagatccaggacgatctctaccaggtctggctacagagtcagcgtcgcctgctacccattgtgattcaccgggatgaaggaatggcagaatccctggcctccaagcagccgctcggcgagtaccgtagcgattccctggcggcagaggagatcctcacgctggctaactggtgtctgctgaacttcgccaacgcggcggagccggcagggagttcggtatga

SEQ ID NO: 125130 - DNA, 2616 bp, Enterobacter cloacae
atgagtcgactcgccagttggttccttatcccgccggttaatgcgcgtctgagcgaacgctaccgacattttcgtcggcatggtgcgtcggcattcagtgccgcgcttggctgtttctggatgattatggcctggatgttcattccgcttgaacatccgcgctggcagcgcatacgtgcgcaccataatgaattatatccacacattaaccctgaccggccgcggcctttggatccggcgcgttatctcattcaggccgtctggctggtcgtcacctcgtcacagcgagaacgccagacgccgcactggcgcagtttctcccgcgttcaacagctgcgcgagcgctatcaccagtggctggataaattgcctgacagcgtgaccgacaaaaccagccatctggataaccaaaaagagctcgggcacctccacccgggcctgcggcgttttatcctcggcgtgattgtcgtgttctcactgattctggcgctggtctgtattacgcaacccttcaatcccctggcgcagttcaccttcctgatcctgctgtggggcgtggcgttgctggtgcgtcgtattccgggccgcttctcggcactgatgctgattgtgctgtcgctgaccgtttcctgccgctatatctggtggcgttatacctcaacgctgaactgggacgacccggtgagtctggtctgcggtctgattctgctgtttgccgaaacctatgcctggattgtgctggtgttggggtatttccaggtcatctggccgctcaatcgccagcccgtaccgctgccgaaggacaccacgacgtggccgactgtcgatctcttcgtcccaacctacaacgaagacctgagcgtggtgaaaaacaccatttatgctgcgctcggcatcgactggccgaaagataaactcaaggtctggatcctggatgacggcaaccgcccagcgttccgccagttcgcggaagaggtcggcgtcgaatacatcgcccgtccgacgcacgaacatgctaaagccggtaacatcaataacgcgctgaagtatgccaccggggagtttgtctcgatctttgactgcgaccacgtacctacgcgatcgttcctgcagatgaccatgggctggttcctgaaagagaaagagctggcgatgatgcagacgccgcaccacttcttctcgccggacccgtttgaacgcaaccttggccgtttccgtaagaccccgaacgaaggcacgctgttctatggtctggtgcaggatggtaacgacatgtgggacgccacgttcttctgcggctcctgtgcggttatccgccgtaaaccgctggatgaaattggcggtattgccgtcgaaacggtgactgaagatgcgcacacctcgttgcgtctgcaccgtcggggttatacctcggcctatatgcgtattcctcaggccgccggtctggcgacggaatcgctctcggcgcacattggtcagcgtattcgctgggcgcgcggcatggtgcagattttccgtctcgataatccactgatagggaaagggctcaagctggcgcagcgtctctgctacgtcaacgcgatgttccacttcttatccggcatcccgcggctgatcttcctgaccgcgccgctggcgtttctgctccttcacgcctatatcatctacgccccggcgctgatgattgcgctgtttgttctgccgcacatgatccacgcgagcctgacgaactcgaagattcagggtaaatatcgccattccttctggagtgaaatctacgaaacggtgctggcctggtacattgcgccgccaacgatggtggcgctgatcaacccgcataaagggaaattcaacgtcaccgcgaagggggggctggtggaagaggagtacgtcgactgggtgatctcccgtccgtatatcttcctggtgttgctgaacatcgttggcgtcatcgccggtatctggcgttacttctacggccctgaaaatgaaatcctgaccgtctttgtgagtatggcctgggtcttctacaacctgattattcttggcggcgcggtggcggtgtcggtggagagtaaacaggttcgtcgcgcgcatcgcgttgaaatctgcatgcccgcggcgattgcccgtgaagatggtcacctcttctcctgtaccgtgcacgacttctctgacggtggtctggggatcaaaatcaacggccaggcgaaagtgctggaagggcaaaaagttaacttgctgcttaagcgcggccagcaggagtatgtcttcccgacgcaggtagcgcgtgtggcgggcaatgaagtcggtctgcaactgatgctgttgaccaaaaagcaacacattgattttgtgcagtgtacgtttgcccgtgcggatacatgggctctctggcaggacagcttcccggaagataaacctctggaaagcctgctggatattctgaagctggggttccgtggctatcgtcaccttgcagaatttgccccgtcgtcggtgaaattaattttccggtcacttacttcgctggtttcctgggtcgtgtcgttcattcctcgtcgtcctgagcgggatgaggcgaagcaggcggacccggttatggctcaacaatga

SEQ ID NO: 125131 - DNA, 2385 bp, Enterobacter cloacae
atggggatgagtgcgctccccgcaacaatggctaacgcagagcctgataacgcagcggcaacgcctgcgccaacagtgcctgtggtcgcgcaggcaaccgatccggttattactgccgcgcccggtcaaacagaaaatgtcattccgaaccagccaacggaggggaacactctacccgccgagaacccggttatcggacaggtgatgccgggtgttcggggggcggatgcgcccgttgtcgcggaaaatgccccgtcacgcgacgtcaagctgaccttcgcgcaaatcgcgccgccgccgggcagcatggtattgcgcggcatcaatcctaatggcggcattgaatttggcatgcgcagcgatgaagtcgtctcgaatgccgtgctgaaccttgaatataccccgtcgccgtccctgctgccgacccagtctcagttgaaggtttacctgaacgatgagctgatggacgtactgccggttaccaaagaacaactgggtaagaaaacgcaggcgcaggtgccgattaacccgctgttcattaccgactttaaccgcattcgtctggagtttgtgggtcactaccgcgatgtctgtgaaaacccggccagcaacacgctgtggatggacatcgggcgtaactcctcgctgcagatgacctatcagtccctggcgctgaagaacgatctctccgccttcccggtgccgttcttcgatcctcgtgataaccgtccgctcacgctgccgatgatgtttgcgtcgtccccggacgtaaccgagcagctggcggccaccattgtggcttcctggtttggttcgcgttccggctggcgcggtcagaatttcccggtgatgtatgacaaaatgccggacagaaacgcgattgtatttgccaccaacgcgaaacgtcctgccttcctgcgcgatcatcctgaagtcaaagcgccaaccattgagatggtcagccacccggataacccgtacgtgaagctgctggtggtctttggtcgtgacgataaagatctggtccaggcggcaaaagcgattgcccagggcaacgttcttttccgcggcaacagcgtcgtggtggacgaggtcaagccgctgctggcgcgtaaaccttatgatgcgccaaactgggtgcgtaccgaccgtgtcgtgacgtttggtgagctgaaaacctatgaagagcagctgcaggcgtccgggcttgaaccctcgccaattagcctgtcactgaacctgccgccggatctgtacctgctgcgtaccaacggcatcgatatcaatcttaactaccgttataccgcgccggcgacgaaagacagctcgcgcatggatatcagcctgaacaaccagttcctgcaatcgttcagcctgcaaagtacccaggacactaaccgactgatgcttcgcctgccggtgctgcaggggctgctggacggtaaaacggatgtctccattccggcactgaagcttggggcaatcaaccagctgcgttttgacttccagtacatgaacccgatgcctggcggttcggtggataactgcatcaccttccagcaggttcagaaccacgttgtcatcggcgatgagtcgaccatcgacttctcgaagtactatcacttcctggcgatgccggatctgcgcgcctttgctaatgcaggcttcccgttcagccgcatggccgatctctctgagtccatcgttgtgatgccaaaagcgccaaacgaaggtcaggtgacaaccctgcttgataccatagcaaccgttggggcccagacgggattgccggcaattaacgtcacgttgacggacgatggcagccagatccagaacaaagacgctgacatcatggtcatcggtacgattccggataagctgaaggatgataagcgtatcgatctgctggtgaaagccacggagtcctgggttaacaccccgctgcgccagaccgatttcccgagcatcatgccggatgcgaacgatcgccaggccagcgcgcagacggccgtcacctctcagggggcgatggctgcggtagtgggcttccagtcaccttataacgatcagcgtagcgtggtggcgcttctggcggacagcccgcgtggctatgaactgctgaatacggcgatgaacgacagtggtaaacgtgccgcgatgtttggctctgtgtcggtgatccgtgagtctggcgtcaacagcctgcgcgtgggtgatgtgtactacgtcggccatctgccgtggttcgaacgcctgtggtatgcgctgtctaaccatccggttctgctcgccatcctggccgcggtcagcgtggtcttgctggcatgggtgctgtggcgtctgctgcgtatcatcagccgtcgtcgcctcaacccggatgagtaa

SEQ ID NO: 125132 - DNA, 1287 bp, Enterobacter cloacae
atgaaaacctcactcttcaaaagtctctatttccaggtcctgacagccatcgccatcggtattttgctggggcattactaccctgagctgggcgcgcaaatgaaaccgcttggcgacgcgttcgtgaagctcatcaaaatggtcatcgccccggtaatcttctgtacggttgtcacgggcatcgctggcatggaaagcatgaaagcggtaggccgtaccggtgctgtggcgctgctctatttcgaagtggtcagtacccttgcgctgattattggtctgattatcgttaacgtggtccagcctggtgcgggcatgaacgttgacccctcaacgctcgatgccaaagcggtcgcggtctatgccgagcaggcgaaggatcagggcgtggtggccttcctgctggacgtgatacccggcagcgtcattggcgcatttgccagcggaaacattctgcaggtactgctgtttgccgtcatgtttggctttgccctgcaccgtctgggcagcaaaggccaacttatctttaatgtaattgagagcttctcacaggtcatctttggcatcatcaatatgatcatgcgcctggcgccaatcggtgccttcggtgcgatggccttcaccatcggtaaatatggcgtaggtacgctggtgcagctgggccagctgattatctgcttctatatcacctgtattcttttcgtggtggtggtgctgggctccattgcccgtgcgacaggtttcaacatcttcaaatttatccgttacattcgtgaagagctgctgattgtgctggggacctcttcttcagaatcggtgttgccgcgtatgctcgacaagatggaaaaactcgggtgccgtaagtcggtggtcgggctggtgatcccgacgggctactccttcaaccttgatggtacgtcgatatacctgacgatggcggcggtgttcatcgctcaggcgaccaacagccatatggatattttccatcagatcaccctgttggtggtgctcctgctctcctcgaaaggcgcggcaggcgtaacgggcagtggctttatcgtgctggcggccaccatttctgcggtggggcatctgccggtggcgggcctggcgctgattctcggtattgaccgatttatgtccgaggcgcgcgcattaaccaacctggtaggtaacggtgtggcgacggtcgttgtcgcgaaatgggtgaaagagctggatcacaaaaaactcgacgatacgctgaataatcgcgtgtctgatagcaaaactcctggtttaacctcctaa

SEQ ID NO: 125133 - DNA, 603 bp, Enterobacter cloacae
atgcgagtaatcatgtttgacaggcagtcgatatttattcatggagcgatacacggtctgcaggagttaattcctgaaataaatataacgggcgcttgtcaggcggacgatttatgggggcaaatatctgcttcaccgtctgctatcgtgatgattgacggcaatttgatccaggaagaggagagtgctttcctggaagagcttatggattccttcccggcgatacgggtgattatggttctggcaagaaaagaggccagatgggttgagcagctcatgcagcgaaacgtgatggccattatcccccgtaacgctaaccccgaacggtttgccgccgtgctggattccgtgtccagagggatggtctgctttcccggggagtgggttagccagcaatcatccgcgcagccgttactctgtttaagcgagcgtcagcgcgaggtactcaaactgctggctgcgggggagtcaaataaagagattggccgcaatctcaacatcagcgcggccacggtaaaagcgcatctggaagcactttttcggcggctggaggtgaaaaaccggacccaggcggccatgtactatacccgggcgatagcctga

SEQ ID NO: 125134 - DNA, 339 bp, Enterobacter cloacae
atgaaaggtcatgcgctgaatatctcttatgccgccattgatttaataaagaagcatcaggggctttcactggagaaatatcgtgatgaaaatggtttatgggtgatcggctatggacatgcgatccatgaggaggacaattttcacggaggcattactccgctccaggcagaatgtttgcttcaggaggatattcagttatgtgagaggctgctgcgggaaaatataacacgcccattaacccaacagcagcatgatgcattggtagtattgatattcagtttcgccgagacgccttcacgtctgaacgcgctgtatcaggctatcgcccgggtatag

SEQ ID NO: 125135 - DNA, 540 bp, Enterobacter cloacae
atgccggttttaatgacttcacgcctgaactgctcgcctctgcaggagcatgactggcccttttttctggcgttgcagcaacatcctgacgtgatgcgctttgtggcggaaaaccgtcccgttgccgcgattcgtgaggcgtttgattctcgtctgcccctctggacgccgggcagcacgcactggctgtgtctcgtcgtccgtgatgccacctctcaggcaccgctgggcgtgaccgggtatattcatcgtgaggacgattgcgctgaagtgggctttctttttgcacccgaggcgcaggggaaaggttacggtttcgaatccctgcaggcgctttgcgattacgcctttcgtgagggcggactacgtcggctcaccgccaccgtcacggcgggaaatgtcgcctccagacgtctgctggaaaaagcccactttcgtctggagggggagcttcgcgagagctattacctttccggacgctggcaaaatgactggttattgggtttattgcggcatgaatatctgaaccataacgcctga

SEQ ID NO: 125136 - DNA, 471 bp, Enterobacter cloacae
atgagttttcaactgcccgcatcgatgatctcgatgaattctgcgtttgcggaatcacccgcgaaatcgacgctgtttcatcaggaaacgggcccgctgcgctcgcgcattctcgatcaataccagaagtggaagggaacccagtatcagtggggcggcacgagccaccgcggcgtggattgctctgcgctgatgcagcacctgttcagcgatgcggcgaatcttaatttgccgcgcacgaccagcgagcaaatccatcgcggcgtgcaggtggcgcagtaccgtcttaaggccggcgacctggtcttcttccagacggggccaaaccgcaagcatgtcggtgtctacatcggtgacaaccggtttattcacgcctccagcagccagggggtgacggtgtcaaccctgaccgataactactggcaagcacattacatcacggcccgccgcgtgacgggcagtgcggcgtaa

SEQ ID NO: 125137 - DNA, 405 bp, Enterobacter cloacae
gtgaaaggcgcgttctgggcgttatgcagcgtgctgttagtcagcgccgcacagctgttgctgcgcgatgccatgcaggcactgccgccggtcagcgatgttcgggcgcttatttccgcgctgtggcacttctcatccggcacgggcgcgctgctgctggggttgatggggtatgtggcctcaatgggctgctggtatctggcgctgcatcgcatggcgctcagcaaagcatatgccttgctgagcctcagttatattctggtgtgggccgcggcaatcgtcctgcccggctggggggaacacttctcctggcacgggctggtgggcgtcgggtttattatgctgggtgtactaacgatttttaggccagcacgtcgtcagcagaatggatcaggccggcgttga

SEQ ID NO: 125138 - DNA, 597 bp, Enterobacter cloacae
atgtaccaggtttttctgggaaaaatctcctcgctgagcaccaaccgctgggctcaagcgctctcccgacacgcgcccgaaggcgcccatcgcgcgcgctggctcgctggacgcgggttgctttcgcgtctgttggcgccgacgccactcccggagattatccacaacgaacaggggaaacccctttttgccggcgactatccgctgtggttcagccttagccactcgggagatgagattgcgttaattatcagtgacgagggtaacgtgggctgttccctggaacgtattcgcccgcaggataactggcgcacgctcgccaatgccgtcttcagcggcgccgagcatgaagagctggaaaaggaaacgccagagcgtcagcttacggcattctggcgtatctggacgcgaaaggaagcgatcgttaaacagtgcggcggtcacgcctggcaaatggttagcattgacagtaccgccagcgcgtttcattcagtcagccactgccgcatagactcgctgagccttgcggtctgtaccgcaacacccttcgaactcaacgccggcctgatccattctgctgacgacgtgctggcctaa

SEQ ID NO: 125139 - DNA, 774 bp, Enterobacter cloacae
atgaagacgctgtggtggcagaccgttgggacaggaaattgccatcttgtgctgctgcacggatggggcctgaatgcagaagtatggcattgcataaacgaggaactagcctcgcaatttacgttacatctggttgatctaccggggtatggccgtagccacggttatggtgcgatgacgctcgaagagatggcgcaggaggtgctgaacgcggcgccacaacatgccatctggctgggctggagcctgggtgggctggtggcaagccagattgcgctttcctggcccgagcgcgtaaacgcgctggtgacggtggcctcatcgccctgttttagcgcgcaggagacgtggcccggaataaagcctgacgtgctggcgggtttccagcagcagctgagtgacgatttccagcggaccgtagagcggttcctcgcgctacagacgatgggcaccgaaaccgcgcgacaggatgccagagcgctgaagcaggtggtgctctctttgccgatgccggacgttgaggtgctcaacggcggccttgaaattctgaaaacggtcgatctgcgtgagccgctggccgcgctgacgatgccgcatctgcgtatctatggttatcttgacgggctggtgccgcgcaaagtggtgcccttgctggactccctctggccggacagcgaatcgcaggtcattgccaaagccgcgcatgccccgtttatctcgcatccgacggaattttgttcagcgctcattgcgttaagtcaacgtttagactga

SEQ ID NO: 125140 - DNA, 777 bp, Enterobacter cloacae
atggctttcaaaacatggcaaacgggcgttcatattcaacaggatagggtgctgattgcggcgctggcccgggagagaggcggctggtgtttacgccgttggtgggcattcacgcttgctgaaggcacgattcgtgacggcaaaatttgccagccggaacagctggttaatgcgttgcgcgactggcgaaagacgctgccgcattatcaccgggtctatctctcattcccagccgcgcgcactctgcaaaggtcgcttccccgcccggcggttgcgctgcgcgacagcgaacagctctcatggctgggcgcgtcgctctcgcgcgaactggagatgtccgcagataccctctgtttcgattacacccaggatacgttcagcaatacgtatcacgtcactgccgcacaaaacaaggaggttgaaacgctgctggcgctggcgaaaacactgcatttgcggctggcgaccatcaccccggatgccagcgcgctggggaacctgctccctgcggtagcaccgacgccgtgcgtcgcctggcgggatcagcatcaatggctgtgggccatgcgccaccagtggggacgtcgatacaccactgaagcagaaaacgtcactgagctggcggcgctgctggccctcaacccgaacgacatcgcgctgtttgatacccaacggacgccatgggaaaccctgcaacgctgccatgctcctctccccgaatgcggagctgactttaccgtcgcgctggcactggctatgagtgaggagcctgaatga

SEQ ID NO: 125141 - DNA, 495 bp, Enterobacter cloacae
atgaacgtcaccaatttcctgccctggcgtcagcagcgtcgcgcgcgatgcctgcgtttctggggcggcatgtttatcagcacgtcgctgctgatcctcatgatcgttttcagtctgcgaatgaagcaccaggtaacgctgcgcgcgctgcaaagtcagcttgtgggaacccagtccgtgcagcgtggccttatgtctcgccagaaactgaccaccgtgacgcagaagcctgcgggcacgctgcaacgacacgcatggcaaccggtgctggaatcactttcccgcgccatgcccccacaggtctggctgacagagctgcgttatcagcctcccgcgctgatgatgatcgggtatgcctccacccttccggctctctctgcgctgcgcaacggggttggacaactcgccggctttacgcccgggcctgaaggggggcttcggcaggatagccaggggcgctggatgttcacgctgtacctgaaaagcgaggagtag

SEQ ID NO: 125142 - DNA, 456 bp, Enterobacter cloacae
gtggcgactttgttagaacgctggtgtgatagccgcccctggtgtcggctgatctgcatgtgtctggggattttccttgtgggactggcagcatggagcacggtgcttcggccagttgagaggcagtgtacagagcgacagcagcagctggtccaggaggtgcggactaacgcgtcgctgtggccttccgccagtaagacaacgcttcgtccggaaacccagacggcacgggagatgatgccattttcgccgctcgattttcagggtgaaggaacaaagctcctgcactggaagccgtttcagaacggcggcgaactggcgctggaatcggcgtggcaggcgatccccgcactcttttcccggctggcacagcgggatgtgcaggtcgctgcttttacgatttcgccccaaagtacggtgttacgcctgcggctggagctggaacatgcgaaatag

SEQ ID NO: 125143 - DNA, 1098 bp, Enterobacter cloacae
atgttcacactctacatgaaatgggatgctggctgtgatttagcaccggctgatattcagttcatcctcacgccacgcgatgcactggaaatggcgagcgtattttacgaactggattatctgaaatatgcccctcaaacccgttttcaacatttcaccatccccagacgacgtgacggcgtataccaccgcttcgcggcgcaaccatacaaccgcaagcaccacacggaatacgacggcctttatgatgaagtaaaatggaatcttgagcagggctggatggttggcgtaaacaccgcagagaagtgggaccgtttccgcaaccccttcttcttcgatgacgacggtaatctggtttatgactgtttcatggacagctatagcgacagtttccagcgggaagtacggaatatttacgaacattgcctgaacgcacacccgggacgaaaacctgctccgaccattaaacagtataattccgatgctcccgtacagcacgcacaggccaccaaaaccatcaacagcaaagcagccggacgattactggcggcaggtggaatctacagcggcaacattgaaggctttaggcaaacagcggagcaacttggtggtgatgcgccagccggatacactgaagtcatggacaataaggggctaatcattgctggcgcttctgtcgctgcgggatttggtcttagtcgattaggtacggcaagtgagctttctgaactggagaatctccatgttcttggaaaggtcgagggcgaatattcgatgatcaagcctggaccattgagtaatagatttgctgaaacgttctcaggaggtgtatataaagaaataacgctttctgaagatacagttttctatcgaggcggccagaacggtactgatttaggacgtttttttagttacgagaaacctcaaggtattatccaaactcgaatcgataaagcagttctgcctgaatggcctgatggaagcaaatcaataattgatagttactttgaagtagaaatacctgctggctcaaaggtctatattggaatttcggttaccaaacgggtttctatgcgggtggttcagaacaggttttaa

SEQ ID NO: 125144 - DNA, 207 bp, Enterobacter cloacae
atgataagagaagagtttgagatggttgtgttagcggaagatttgccggtggaagggttaactaaaggcatgctgggtgccatagtattagtacatgaaaaaccccatctggcttatatggttgaatttgttgatgatgctgggcgaactattgcaatgccttcactgttacccagccaggtggcagattatatccaaccgaagtga

SEQ ID NO: 125145 - DNA, 1806 bp, Enterobacter cloacae
atggaaggatcgaatttgctcctcgccggggtactgtttttatttgcggccgtcgtcgcggttccgcttgccgcccgtctcggcatcggtgcggtactgggatatttgctcgcggggatcgccattggtccctggggactgggattcatcagcgatgtggatgaaattctccatttctccgagctaggcgtggtgttcctgatgttcatcatcggtctggaactgaatccctctaaattgtggcagctccgacgctctatctttggcgtgggtgccgcgcaggtgttgttcagcgccgcgattctggctggcctgctaatgctgacccacttttcctggcaggccgcggtgattggcgggattggtctcgccatgtcgtcgacggcgatggcgttgcagctgatgcgcgacaaagggatgaaccgcaatgaagccgggcagctgggcttttcggtgctgctgtttcaggatttagcggtgatcccggcgctggcgctggtgccgctgctggcgggttctggcgacgatagcttcgactgggcaaagatttccatgaaggtgctggcttttgcgggcatgctgattggcggacgcttcctgttgcgtccggtgttccgctttattgccgcatcgggcgtgcgtgaagtgtttaccgctgcgacgctgttgctggtgcttggctcggcgctgtttatggacgctctggggctatcaatggcgctgggtacttttatcgccggggtgctgctggcggagagcgagtatcgtcacgaactggaaattgccatcgatcccttcaaagggctcctgttagggttgttctttatttcggtggggatggcgctcaatctcggcgtgctttatacccatctgctctgggttgtggtcagcgtcgccatcctggtggcggtgaaaatgctggtgctgtacgtcatggcgcgtatttacgggttgcgcagttcggaacgtatgcagtttgccagcgtgttaagccaggggggagagttcgcgtttgtgctgttttccgccgcgtcctctcagaagctgtttaaggacgatcagatggcgctgctgctggtgacggtgacgctgtcgatgatgaccacgccgctgctgatgaagctggtggataaactgctgtcgcgccgcttaaacccgacggacgatgaagatgaagcgccatgggtagaagacgataaaccccaggtgatagtggtgggctttggccgcttcgggcaggtgattggtcgcctgttgatggcgaataagatgcgcattacggtgctggaacgcgatatcagtgcggttaacctgatgcgtaaatatggctacaaggtgtattacggcgacgcgacccagcttgagctgctgcgctcggcgggcgctgaggccgccgagtccatcgtgatcacctgtaacgatccggaagacacgatgaaactggtggagctgtgtcaacagcacttcccgcacctgcatatactggcgcgtgcccggggacgtgttgaagctcacgaattgttgcaggcgggtgtgaaacacttctcccgtgagacgttctccagtgcgctggagttaggccgcaaggcgttgatctcgctgggcatgcatcctcatcaggcgcaacgtgcccagatgcacttccgtcggctggatatgcgaatgctgcgcgaactgatgccggtacataccgacacggcgcagatctcccgcgtgcgggaagcgcgtcgcgagctggaggagatcttccagcgagagatgcaacaggaacgacgccagcttgatggctgggatgaatttgaataa

SEQ ID NO: 125146 - DNA, 342 bp, Enterobacter cloacae
atgacgaccattcaggcttcaacccagcccattcaaaccagcggcggcgggagtgggggttcaggcagtaacaatatcgctgcgcaaatcagccgtattctcgacaatatccaaaagctgactcagcagttaaaagagctggcgaacagtcccattagcgtagatgagaagaagaagcagcaggagcttattcagacccagctcaaagtgctacaggcgcagctcgccgcgctgcagcgccagcaggctgaagaggcgcagaagaaacaggagcaagcgctgggtaaagtggaaggggtgaatagcccgacagacgatcatcagatcgatatctatatttaa

SEQ ID NO: 125147 - DNA, 1947 bp, Enterobacter cloacae
atggtgtcgtttgcacatctgatacgcgagcttgagcggaccgggcaccgccgtctggtggtgctcacgggcgatgagccgtggacgctgagccaggccaccgccctgcgtgatgctttaccgggagactggctgtggctgaatgaaaacccgtctaaagccatcggcggactgttgggacgcgaatacctgcatgctgtgtttgacgcgcatgccgggtttgacgtctccgcattcgccgcactcagcggaacgttgcgcgccgggagcctcctcgtactgcgagtaccaccgttctctggctgggccgacaggccagacagcgattctttgcgctggagtgacagcgcagagccgatcgctaccccgcactttgttcaccatttttgccggacgcttgccgccgatacggatgcgatcgtctggcaacagcatcatcccctgacgcttcccgctgcgccagatttacccgcctggcagcccgccagcggtgagccgcagcgtgagcaggcggcgatcctcgacgcgcttttggtcatgcctgcgggcatcgctgccgtgacggcacctcgcggacgcggaaagtcagcgctggcggggatgctgctgggcagcatccaggggagtgcggtggtgacggccccggcgaaaggcgcagcggatgtcatcgcgcgtttcgcgggcgagcgttttcactttatggcacccgatgcgctgctggactccacgctgcaggccgactggctgattgtcgatgaagcggcagccatcccaggcccgctgctggagaagctggtgacacgctttccccgcgtattactgaccactacggttcagggttacgaagggacgggaaggggatttctgctgaagttctgcgcccgattcagtgggttgcagcgttataccttatccacccccattcgctgggcggccggatgtccgcttgaacggatcgtggcgaatacgctgctgtttgacgatgcgcttatcgaccacaaaccggaaggtgaggtgtctgtaaggtctctggagccacaagagtgggagagcgacccggcacgagtggcaagcgtttatgaactgctctgtgctgcccactaccggacctcaccgctcgatttacgccggatgatggacgcccccggccagcactttgctgttgcggacgcgggggctgatattgcgggcgcgatctggctggtggacgagggcggattatcccccgaactcagccgggcggtgtgggcgggctctcgtcgtccacgcgggaaccttgtggcgcagtcgctggcggcgcacggcggaacgcctcttgcggcgacgctgaaaggccgacggattagccgcattgcggttcatccccgtcgtcagcgggaaggcattggtcagcggctgatcctgaacgccagcggtgaagattatctctccgtgagttttggttataccgacgagctgtggcgtttctggcagcggtgcgggtttgtgctggtgcgaatgggcagccatcgggaagccagcagcgggtgttacacggcgatggcgctgctgccgcagagcgaagccgggcatcaactgtgtatgcaggcacatcggcgtttatgccgcgatatgcgcgtcctgtcggcctggaatggcgaaaagatcccggtgactgatgcctgggaagctacccttaatagtgacgactggctggagctggcggggtttgcttttgcgcaccgggcgttttcaacctcggtagccgcgctgacgcggttgctgttagccacagatatgtcgcttccggcgctgcgcgggaaaatcgaggggagaagcgaagcggtcgggcgaaaagcgttactggcaaagcttcgcgaagaaaccgcgcaagcgcttgagagccttgattattcgcgctgtcagcagttgaaagcagacattttgcaatggcaattttttcaatga

SEQ ID NO: 125148 - DNA, 570 bp, Enterobacter cloacae
ttgacaacctcatcacaacattacctggttatcactgcgctgggtgccgacaggccgggtatcgtgaacaccatcactcgtcacgtgagcagctgcggctgtaatatcgaagacagccgtctggcaatgctcggcgaagagttcacgtttatcatgctgctgtccggaacatggaatgccattacccttattgaatccaccctgccgctgaaaggcgcggagctggatttgctgatcgtgatgaaacgcactaccgcgcgcccgcgcccggccatgcccgctaccgtctgggtgcaggttgaagtcactgattccccgcatctgatcgagcgttttaccgcgctgttcgacagccatcagatgaacattgccgagctcgtttcccgcacgcaaccgggcgacgagagcaccgttcccacgctctttattcaaatcactgcacacagccctgcctcacaggatgcgtcaaatatcgagcaagcgttcaaagccctctgtacagaattaaacgcgcagggcagtataagcgtcgtcaattattcgcagcacgaacaggatggagttgagtaa

SEQ ID NO: 125149 - DNA, 1230 bp, Enterobacter cloacae
atggaaactcctgccctgcctcgtcgactcgccctcactgccggatgtcatcaactcatcaactgggggatctcgttttatatgcccggtaccttcgcgctggcgatatcagccgatcgggggtggtcatcaccacagatttacctcggcctgacgctggcaatgctggtgatggcggcggcctcccctttcgtcgcccacctgctggaacgctttggcggccagagggtggtgatgagtggcacgttgctgatcgccgcaggctgcgcgggtatggcatatacccagacgttatttggttggtattgcgtctggctgatcaccggcatcgggatgcgcctgtcgctgtacgatgcgctgttcgccgcgctggtgaacctctacggtcagcaggcacgaagaacaatctcacgcgtcacgctggcgggcgggctggcatccgccgtcttctggccgctgggtgatggcctgctccaccttatgagctggcaagaggcgctaagggtttatgccctctttggcctgctgagcgcggcgctgatccgctcgcttccccggcagcggctaacggtgacgacaaaggtcaccgcgccacctctgcgcaacgaacgacgaaacggctggctttatgcagccttcatcgcccttttcacctttgtctccagcggtacgtctacccatctgccagagtttatcgccagcttcggcctgccggtcacgatcggcatcctgtgggggataggccagacgggggctcgctcgctggaggtgctggcgggtgcccgcttaacgccgttcaaactgacccttttcaccgcccttgccatgccgctctgctttctgattgggctaagcagcacccggtttgtctggtgtgccgccgggtttgtgctgggtttcggtgccatcaacgggctaatgacgatagtcaaagcgaacctgccgctggagctgtttagcgtggagagctatgcccgccgcaccggtatgctgcttattcctggccagctcacagcagcggcttcaccgtttgcctgtgcatggttaaacaaaacgctggggatcgccggaacaatgtgggtatcaacgggactgacgctggtgattgccgggctggcgatagcgattgtgcgccgtcccggcaggcaaactgtaacgcactgtatccagcgcaccacgcagacaaacgggtacaaaacaccgcctcaggcaaatatcaccgatacataa

SEQ ID NO: 125150 - DNA, 312 bp, Enterobacter cloacae
atggaatattttgaagctaaattatatttattaggaaagtggcgaattattgcattattacttaatgctatgcttttccttggtagttgctacgggttgtacctcacggggatctttacaaggtcatggtataatgaaggtaatgctgcggtgtgcttattgattatgtttacctcggcattaagcatcatgtctatcaatcagccagtcattatggataagactgatgacgaggcatcttcattgctatctttatggtggaaacgaaagaagctcgaacatttatcaaaaataaaagaatataaaaaataa

SEQ ID NO: 125151 - DNA, 234 bp, Enterobacter cloacae
atgtttcagtacaaaatggtccaggttccacccaacatttcagtcagggctaaagacaacaaaatcggtattgctgcgcaataccttgaggacgtggtcaacgagtgggcagcgcagggctgggaatttcagcgagttgatactatcggtattgaagaacgaccaggctgttttggcggcagtaaggtcaaatttatgcagtactatgttattaccttcaggaaagaggtgtaa

SEQ ID NO: 125152 - DNA, 438 bp, Enterobacter cloacae
atgagcacatatgaacttgtacgcaaaacaaaaatcgatggtgatttcgaagggtttgatgacgaggttttattcaggtttgttgacgggacatactggatacaggcgcaatacatgtactggtatcattatgcctatcgacctgatgtcaatctcttacgagcgaatgggcggttttatctgcagatagatgggaaagacaaagttgtacccgtcagacaaatcactgatgtcatccaatcacgaattgatggcgaatttaaaggatgggaaggcgaaaccgtttacaatctcactaacgggcaggtgtggaagcaatgcacctaccactatgaatacaagtattcatacagaccggaggcattaatttacaatagcagaacaggttacaaaatgcaggttgaaggtactacagcagatgtgcgaagagttaagtaa

SEQ ID NO: 125153 - DNA, 1002 bp, Enterobacter cloacae
atgggtttaattggaaaactacgcagtatcttagggcatcaatctggcaagagagaaccttcatctacgcatgaacgcaacacggaactggagggtaaatggcttaccgtggatcacccttacttcttcggtcacgcaaatatttcgccggataagcgctgggtggtgggctgcgatgattcggatggtggcagccttggaggccacaggatgaagggcaatggccgtgtcattcttgtcgattacccctctgacaggattgtgtatgagctaaaatgttttgcacgccctgtcgatgccgctgtttctgattccggtagtttcatagtccacgattgtggtttcggtagtgcacttagcggggatgtcatcgctatcaacaccagcggtgatgaaatctatcgtcggcattactgcgccaatatctttaatattggtttgtcccaatgtggccggtacgcagctgtccagacagcaaatgcagataataaagacagtaatattttggaggttctcgatcttcaaaaaagacagcaaatgtttacagttcgccccgtcgggacctgggcagattgctatttattcgatacaaacgctgacggagagttatgccaactacgcgtcaatcttcgtgatcttggatacttccgttattccaccgctggtgagttccttgatgctgaatcactacagatagcccagttgaacaagggtgattacgccacaaagattatggccgcgcaggagttgcttaagacggataccaccgaggaaagcgccaggaaagctctgagcgtcgctgatacagctcttacgcagggagcccgagaacgatatgactggggagcgctagctcacaggatcagaggggagtcgtttgaatcgcttgggcagttatctgacgctttggaagcctatgaacaggcacttgcaatgaatcctaaagtgggtgtattgcgctgggcaaccactctgcgtaaaaaactttctgcaaagaaataa

SEQ ID NO: 125154 - DNA, 1035 bp, Enterobacter cloacae
atgcagttaggatttgttggtcttggtgcggtagtggagacagcgtatctgcccgcattgcgtaacctgtatggccgcccggttcgttgtttcgggtttgatgttctcccggcaaaacaccctgaaggcgtgacgcgctgcgcctcgcttgcggaactgcttgccaccccgcttgataccctctttatcactaccgcatcgctgcaccatcttgaggtgcttgagcaggcgatcgcctcaccgatctcccggattgtgatagaaaaaccgattgttgccacgcttccccaaatagataagcttaatgcgctgctggccacgcccggtgcggcatcccgcgtgctggcgctcgaccactggatggcgcgcaccgaaacggcgaagcgctcgctggtcgatcatttttctgacgtcgtcagaatcgaaggctttttgcaggagccaagcgggtataacgctgtcggcgaacccatcgcgcttaatttcgccaccggtgaaccggataccagaacgcttcgtcaccctgatggcgtgattctggatatcggtacgcatgtgctggcgatgctgcgtgaaacgatgcgctttctggggggccatgacgagatgacgctacaggtcgttgccgctaaagaccgtctgggccgcgttattgcaaaaggagacctgaccacggcagaaggtgaaacgcatcttcagggaagcatcagcggcgtaccgttggacatctggcttaacaaatacgcaggacctgcgggcgggcaaaaaggcttgcgtctgcatctgcgtgacgggcgcaccatcagtcacgaccggcgcggcgcggaagatgtgctggaggtcattgagggggatgatatccagcgctggtctctccccggcacaatctacgagcactgtcttgcgggacatattcttggcgataaaagtctgtttgagcgggatccgcaggaggtgagccgtaccacgcgccgtcggatcgaggaagttgcgctgctgctgaccttgcagcaacagttgcgtggtccgcactga

SEQ ID NO: 125155 - DNA, 297 bp, Enterobacter cloacae
atgcaatcctctgttaatcaaaaagagagccgaacgttcttcggccatccgtatccgctcggttcactgtttttcaccgagatgtgggagcgtttctcgttttacggcattcgtccgttactgatcctgtttatggccgccaccgtctatgacggcgggatgggcctggcccgtgaaaacgcctcggcgattgtcggtatctttgccgggaccatgtacctggccgcgttgccgggggctggctggcggataactggcttgggcagcagagagccgtctggtacggttcaattctga

SEQ ID NO: 125156 - DNA, 876 bp, Enterobacter cloacae
atgggcgaattgtcattatccccggcgatagaggtgacgcatgcgtgcgtgcgtcgccgttttcgtcatgctgcctgcagtgcctgcgcggacgtttgtcccgcgcaggttttttcttttactgaaatgggtatctcgattgatgaacagcgctgtataggctgcggtgactgcctgttcgtctgccccaccgaggccattaccgacatcacgccgcgaaaacgctttctgcgtggcgataccctcgttgggccttttactgaacatgcctcaggggtgaatgagcttctgctatggcatgcgcaacacggcgtgcgttttatcagtattgaagcggaacactacccggcctggttactggcgcttgcccggcttaatcttgtgcttcgtcgacggggtgaagcggtatgggcttttaagcctgacccgatcaacgaggtgaatattgcccgccgtgcgcttatgtatgttccgcgggaggatgtgcgccgctgtaacgtcgtgccgggccagcgtcagctgcgcagggcattcgcaggatttagtgagtcagatatcgttctcgacatcggaaaatgtatgttgtgtggggcatgctggcgaagctgcacggaaaacgcaattcgttttgagaatgccacgctggtggtggaaaccggacgctgtaccgggtgtggggggtgcgaagcggtgtgtcagcatggcgcgataagcataacgcagacagaacagagcgcgaaaagcagcgtgacgcctgcctgtgaggctgtttgcctgacgtgtcatcgtcatttctggtcattcaggatggatgaaaagcactgccccctctgttcacgccatcacttcgctatgcgcgattcggcctgttgctaa

SEQ ID NO: 125157 - DNA, 846 bp, Enterobacter cloacae
ttgaacaactggtcaccagagcacacaaaagacatcaagagttggtttaagattgatacatatcgcaaatttgaagacctctcattgctccagttttaccatgagatatgggctcgtaacttgttctttaaggagtatcgggaagagtttgagagcagaactcttatgggttacttctcaaaaattttcagtggcaatccttttttaattgaagaagggcaactgggatacatgactcctgccaacaaactttttcagcctccccatttttttctaacaactcttgatcgccttgctgaaacgagcatcattgctatgcaacgcggaggttttgtttgggatggtgatgacaattattcaataaacagagatcttcgggaagaatcactttcagatattatgccagatcagttttcacgaacagtcatgttcgagattgatttggcaagtggcacagacgaagagattgcagagtcgcttaaagctgcattaccgcagtggcgtaaaatcaaaggtatcgaaccagatcctttagaatcagttcgctttgggtatggaactatcaagaaactcatcagttatcgtgtgatacctatgctggatatcttggtgtgggcagccgttaaaaaaatccgtgtctctgacgacaggttatccagactgctatatacagacgatgacgaagaaagcgaaatgaggcagtctagccaaatcaaagataccgacaggcctttggctcttaaatcctgcacaactgactttatccgacaattccattacttcatgaacaaaaatagccatttgaagcaaatgaaagtctctgatgtaatgaaactatcggattag

SEQ ID NO: 125158 - DNA, 246 bp, Enterobacter cloacae
atgccgacgctgcggccagaagaattgccgaagctaatgcgttctttaatcatgtcaaacctgtctattccgactctctgcctctttgaatggcaactcctgacacttgtgcgcccttctgaggcctcagatgctcggtgggcggagatcgatctcgatgcaaaactctggactattccagccgagcggatgaaagccaagcgtgagcatattttccaagcagaaatgatccaaagcaagcgatga

SEQ ID NO: 125159 - DNA, 927 bp, Enterobacter cloacae
atgagttcatgtgcttacactgttgatagctatatcacatcattgagcatgagctctaaaaagcggttgttggtagaagggagacatgaccgttcacacttatatcaattaatttataaatttaatcctgcgtccaaggttaaaattgacacagcgcaagacattaaagcatctgacaaagctatgtctaaaaacaataggttgaaaatagagactattcattcgagggttaaaagtaaagataatatatcatttctatgcgatcgcgaattcagagggttcacttttaatgaccaggttgaagatttattgaattcacattattgtgacgattctttgtattggactttagggcattcgcttgagaattatttcttcaatgcctcagtaataatggatgcttttcagtttctttcgccctctgaatataagtataaagctatcgaattattctcgaagctaatatcctcatcttttgctgttctagctgcaatttctgttgcagccaagaatattgataagtctggattgccggctgcgttgattgattggaaggatatagtaattaatgaaggatatatcaatctggttaggcgtgacgcttatgatattgacccggaatgtgtaaacagcttttttaatgcttttgatgcagtattacccagcgtcatagcttcagagattggggtttgctccagagtagttagggggcatacaggcatcttacttttacaaaaactattcgcagcatgcttgtattatgttggtaaggaagatgatcctatactggctgatgcaagcgcaaattacttttgtaatatatcagaattatcacttacaactgcattagctgagagttgggtaagaaaaattggagtacttgaggatgtatattttcctgactcacttttgaaggatattgagtga

SEQ ID NO: 125160 - DNA, 1395 bp, Enterobacter cloacae
gtggctgtcagaacaataagtaaaatagaactttcaaaaatccataatagatataatttaagcgtggatttttttaatgatcttaatgttattcatggtaagaatggcgctggaaaatctacactcatacatgttattgctaatatagttaatggcgattttattagatttgcgttcttaacttttgaagaaataaaggctacatacagcgatggcttggaaatagaaatacgcagagataaaatagaagaacaatcttatatctcggtggtgctttccaacgggaagcatatcaacttcgcagttgatgaagctatggcagcggtgagagaaattgaaagtgaccgccatatgagggatcgagatgttaaatcaatgttggtaattgatataaatagatttgttaaggagaatgaactgcaaaaggtaagtgcatcttacttccctgcatttcgaacaatgttagaagcatggagttcttcttcggatgcggcatatgagagaagagctcttcgcccctcattttataatcgtaaagccagtgtttttgcgcgtgagctgtttggtcattttttacctagtataaattatccatctccaatggagatcgaagaacgtttgagagaagaaatcaggcgagcgcaattgggtatagcagcttatgaaagtcgaactttttctgaatcatttgttaaagttttttcggcattgtttgataattcagctgtagaaggagaaattactggggatttattaaaagaaatagaagggttagcaatagcacaagatagttcaattaaaaatgattattatgcggagtattcaaaggtatatgaagagattaggtctttaattaatagaaatctaaagggcaaggtcgagaattctgtttcaggtgctttggttgtatatcgcgatgcgttgagggataggcaagattatcaagaaaaagctttttctgaaattgataactacatgtcatctgttaattcgtttttagaagataaagagatggcttatgattttgacttaaggcggaagtatccaaaagtcggacttaaattcccggatggttcatggagtcctattagagttttatcctctggggaaaggcaacttttgactatgctttatgcagcatctaagatgggagatgatgcaattgtacttattgatgaacctgagatttcgctacacatcgattggcaagaagatctattaaaaagaatgctttcccaacttagtggccgacaaattattgtgtgtacacactcgccatctattgcaacaggctacgaagattttatgataaatatttcaccggagtttatttcttcgcgtgatgacgataatcataaagactcagaagaaatggaagaggatgaatctttatga

SEQ ID NO: 125161 - DNA, 144 bp, Enterobacter cloacae
atgcaggtgcatgagcggcctcagggcgcgccagtgctggcgctggcgggggattcagtgtcggtaaaacgcatgcaaaaccatgcaccttatgcatgcatgacttttatacgtaaaaatggcgggattttctgggatttttaa

SEQ ID NO: 125162 - DNA, 723 bp, Enterobacter cloacae
atggatacgacgttgctgagcgcattagataccgatggacgcgataaattcgaaagcgcaatgaatgctttgcagggcgatgtttccgctgctgccacgaggttgtcagttgatccccgcttacgccttgagtactcaaaacgaatcaaagaaatgtccgctgacttaagggcaaaggccaatgcaggtgtgatctcatgggaaaaggcggcgcaagaagcccagacaacccgaaatcttataatggatatggtgagatcgcgcagcacttcacttggacgggcaatggccgaacgtataaaaagtgagggtaaaacgcttaatgagttggtagcgaaaaaagcgaaagctttattcggccctcaggcaaattttaatagcctttcggaaacacagaaaaatcagatatatgcaagtatcgttgaatccgcaggcaagtctaacccacaagtaaacatgaaaatgatgcaactctctcgcattggaaggggcctgattgttctttcaatcgcgatttctgtttacgaaatttataccgctgatgataaggtttctgaatcaggcagacagatagctattaacggtgcaggtattgctggtgctgctgcaggtggcgcaatggccggattaatgtgtgggccaggcgcgcctgtttgcgtgctcatcggtggcttcgtcggcggcgctcttgctgcatgggaaatgggacgtttgtggaattga

SEQ ID NO: 125163 - DNA, 468 bp, Enterobacter cloacae
atgcaacaggttaattcaatatctttggtaaaggttcgcaacgctaccgatgtatctcaggctcaatctgacgttgtgctaaatggtaaaagcaccggcattattgtaccggggcaagtgtttgaagcagcggtccaggttaatgagcagcgttacatcctgtttcttacggatgacattattttcgaggaatccctgacgattgcccttattgacgttcatgacggacttaaagaaattgttcgtattggaaatgagtactcgacagggagttttgcggatttccaggtcaatgacgatagcgtagatttcacgtttattggggacaatatctggacactgaaagtatcagattcacctcgcctgcgacttccttttgtttccgatccaaaaggtgttaaacgggagtctggtctgaaaaagtacataacgatttctgccacaccggcgtcggaaaacataagctga

SEQ ID NO: 125164 - DNA, 561 bp, Enterobacter cloacae
atgtatcgcctttttgccattctgaccgcccttctgttatgtccttccctgtacgccgccccaaaaagctatcttatcgacagcgataacaccgctattcggctatcgtggcatgccttcggcggcattctctcctgggcgacgttcagcggcgtgacgggtgccgtgacgctcaacccggataacgacgtcgacgaccatattcacgtcaccattcccgtatcaactctggtggcttctaacaaattgctcacctggcagctgaaaagcgacatgttttttgaatccgagcgctacccgaccatcgagttcattagctcacgcgtggtcgctcagagcgccgggcggttcagggtatttggcacgctgatcgtacgaaacattgcccggccggtgatcctggaggccgtgttgaaagacccgcatgcgcaggccccccggcttgatgccaccacggcgatctcgcgcgcatcctatggaatggataagtttgcgctggccgtggacgatcgtatagccattgccattgcaatcaagacgaacgatgtgccgtcatcctga

SEQ ID NO: 125165 - DNA, 792 bp, Enterobacter cloacae
ttgaacgcgcaccgttttgcaccgccctataacgacgacgctatcgtggcatggatagatggcgagatgtgccgcgccgacgcacagcaatttgaagagcatttaaacagtgacgaacgcctctccgggcgaaccgccgaactgatgaaaagcagccaggattacgccggggcgtttgcctccctgctggatgatgcgcctcttgagacgatgcaggcgcgtctgacggcgcttcctgacccacggccctccacgccggttggcgtcagcaggcgggcgctgattgccgcgtcggtcagctttttgatggtcggctccgggctgggctacctgttgcggcccgcttccgcgccagcggatgagaacgcccatattcgcgacctcgaagcgcaatatatgtccctgtacagcgtcgagacgctgctggatatggacagcgcagcgccggtcctgcagcgcgggctcgaacgggcggcgcaggatatcggcatgaagctaactatgtcgcagcttattctgcgaggggctgagcttaaaatggtgcgcatgctgcgctatgaaacgacctctatcgcgcagattgcctggctcaacgccgactacggcccaatggcgctctgtatctcgcctgtcgatgagaaggcgacggcctcgctccgccaggagcagcggcacagcatgaacctggcgtggtggcaggatgcgggctatcagtttgtcctgattggccgcaatccgccgtctcacctgcgggcaaacgcggagcagctacagcgcctcatctcaggatga

SEQ ID NO: 125166 - DNA, 1404 bp, Enterobacter cloacae
atgggaatgaagatgccttactggtggctctcgtgctgcctgatatctgtgcccgctctgtgcgcgaatccggcggcgaccatcaataccggacaactgcgcgaaacgcaggaactcccctcactgaatggccgtgtcgcccctgcggctggcaacgccgcgcccggctcattacagcttggcgaggccgtcaaccgtgccgttacctggcatccggcgatcggtgaagccgtgggcaaactctacgaacagagcgaagaagtcgacgtcgccaaatcgaaatactatccgcaaattaacgcgggcatggacaacgggtactcccacgacggcgatcagaacggctttacgccgtcgctggtgctctctctttcacaaatgctctacgacttcggcaaagtggccagccaggtacgggccgaaaatgccggggttgcccagcagcaggccaacgtgctggtgagcatcgacaccattgcccatgataccgccgtcgccatggtgcaggtgcaaacctggcagcagatggtcgacaccgccaaagagcagctcgatgccctctcctcaataggcacactgacccgtcagcgtaacgacgaaggggcgacctcgctttctgacgtggtgcagaccgacgcacgtattgaaggggcgcgcgcgcagctgatgcagtatcaggccagcctcgacagcgcccgtgccacgctgatgagctttctcggctggaacagcctgaacgcgatcagcaatgattttccgcaaaagctggcccgcagctgtgacatcgccgagccggacgatcgtctggttccgtctgtccttgccgcctgggcccaggccaacgtcgcccagaccaacctcgactacgccgacgcgcaaatgacgccaaccgtctcgctggagccggaggtccgtcactatctgaacgatcgctacgcgggcagcgaaacgcgggatcgcacgcaatattccgcctgggtgaaggtgcaaatgccgctctatcagggcggcggcctcaccgcccggcgtaacgccgccggacacgcggtggaagcggcgcagtcgaccattcagcgcacgcggcttgatgtccgccagaaactgctggaggcccgcagccaggtgatgagcctgcaaagcacgctgcaaattcagggccgccaggaggcgctcagcgcccgtacccgcgagctttaccagcagcagtatctcgatctcggctcgcgcccgctgctggacgtgctcaacgccgagcaggaggtctatcaggcacgcttcacccagcaacagacccttggtcagttgcaccagttacagctcaactgcctctacaacaccggacaattgcgtcatgcgttcgatcttgataaccgcaccatccagaccgtggagatccagccatga

SEQ ID NO: 125167 - DNA, 1542 bp, Enterobacter cloacae
atgccaacgaaaatcgtgattaaaaagaacacttattttgactccgtctcattaatgtccgtttccactaaagccaataaattgccgggggttgaacaggcctttgtggcgatggcgacggagatgaataaaggcgtattaaaaaaccttggactgctgacgccggaattagaaaacgcgaaaaacggcgatctgatgatcgttattaaaggcgatgcggcgaatgatgaaacgctggcggccatcgaagcgttattcacgcgcaaagagcgtgccggctcccacgaagcgcgctacgccacgattgccagcgccaaaacccatcgcccggacagcaaccttgcggtgatctccgtcaacggcaccttcgccgcccgcgaagcacgtcaggcgctggaaaacgatcttaacgtcatgctcttttccgataacgtgtcgctcgatgacgagctggcgctgaagcagctggcccaccagaaagggctgctgatgatggggccggactgcggcaccgccattatcaacggcgcggggctgtgcttcgctaacgcggtacgtcgcgggacgattgggattgtcggcgcatccgggaccggcagccaggaactcagcgtgcgcattcatgaattcggcggcggtgtgtcgcagctgattggcaccggcgggcgcgatctcagcgagaaaatcggcggcctgatgatgctcgacgccatcgacatgctggaggccgatgaaggcacccaggtgattgccctcatctccaagccacccgcacccgcggtggctgaaaaagtcctcgcccgcgcccgcgcctgccgcaagcccgtcgtcgtgtgtttcctcggccgcaacgtaccgcccgctgatgaagacggcctgcagtttgcccgagccaccaaagaggcagccctgaaagcggtactccttaccggcatcgacaaagcgtctctggatttgcacccgctcaactggccgctgattgaagaggtgcgcgcccgcctgaccccgcagcaaaaatacattcgtgggctcttctgcggtgggaccctgtgcgacgaagcgatgtttgcggcgctggagaagtacgacgacgtctacagcaacatccagccggatccggcgaagcgtctgagcgacatcaacgtcagccaggcccataccttcctcgactttggcgatgatgatttcaccaacggcaaaccgcacccgatgatcgacccgaccaaccgcatcagccgactgctgcaggaggcgcgcgatccgcaggtgggggtcatcgtgatggattttgtgctcgggtttggcgcgcatgaggatccggttggcgtgatgctcgacgcgatcaaagaggcgcaggcgatcgcgaaggccgacagccgtccgctggcgatcttaggctatgtgctcggtaccgaccaggatccgcagaagcttgctcagcagtgccagctcctgaccgatgcgggcgtcatctgggccagcagcagcaccaataccggattactggctcgcgaatttgtctgcaaaggggagaacgcataa

SEQ ID NO: 125168 - DNA, 522 bp, Enterobacter cloacae
atgtcacttccgctgattacaccgcaacaggccaaagcccgcgtggccgagggcgccagactcatagatattcgtgataccgacgaatatgcccgcgagcatatttccggggcagagtcagtaccgctagccaccttacccggcggacttaacgcacgggcgggtgaaatagtgctttttcactgtcagtccggtgccaggacgtccgggaatgctgaccgcctggcccaggcggcgtcacccgctcaggcatttgtggtcgaggggggcattcagggctggaagcaggccgggctgctgaccgttgaaaataaatcccagcctctcccgctgatgcgtcaggtgcaaatcgcggccgggctgttgattctctgcggcgtggtgctgggctatagcgtctccagcggctttttcctgctcagcggttttgtgggcgccgggctgctgttcgccggtgtaacgggattttgcggtatggcgagactgctcaaggtgatgccatggaaccggcgtacctcataa

SEQ ID NO: 125169 - DNA, 2217 bp, Enterobacter cloacae
atgcgcgttaacggcatacagcttcgggtgcgtggcaaagtgcagggcgtggggtttcgtccctttgtctggcagctggcgcaccagatgatgctgacgggcgacgtctgtaacgacggagagggtgtcctggtgcgtctcgcgggtaatgggggggactttaccgcgaggctgcgccaggactgcccaccgctggcgcggattgacgacgtagacacgcagccctttagctggtccgctctgccaacggattttaccatccgccagagcgagagcggagcgatggacacgcaaatcgtgccagatgccgccacctgtccggcgtgcctggcggagatgcgcgatccccgcgagcgccgttatcgttacccgtttatcaactgtacccattgcggcccgcgcttcaccatcatccgcgccatgccctacgatcgcccggccacgtcaatggccgacttcccgctgtgcgcaccgtgtgaagccgagtatcgcaacccggccgatcggcgttttcacgctcagccggtggcctgcccggactgcgggccagcgctgatgtggcgagccggggaaagcgtcgccacgcgcgaaccggcattacgcgccgcagtggagaagctaaaaagcggcggtattgtcgccatcaaggggctgggaggctttcaccttgcctgcgacgcgcttaacccgcaggcggtggcgacgctacgggcacgcaaacagcgcccgacgaagccgctggcggtgatgatccccgatgcggatgacctgccggaggcgatgcagaccctgctacgctctcctgctgcgcccattgtgttgacgcccaaagcctcgcttcccgcgctgcctgaggccattgcgccggggctagattgtgtcggcgtgatgctgcctgcgaatccgattcagcatttactgatgatggactgccagcgtccgctggtgatgacctccggtaacctcagcggccgcccgcctgcgatgacgaatcaggaagcgctggatgcgctccgcgacatggctgacggcttcctgctgcacaaccgcgatattctgcaacggatggatgattcggtggtggatcgggatggcgcgatgctgcgtcgcgcgcgcggttttgtgccggatgccatcacgttacccgccgggtttgacgatatccctgccatattgtctaccggggcagagatgaaaaataccttctgcctggtgcgcggaaatcaggctgtgttgagcccgcattttggcgatctcagtgacgagggggtcgacgcacagtggcgttcggcgctggcaatgatgcaacaggtttatgcctttaagcccgcgcgtgtcgtgtgcgatgcccatccggcgtatcacgcccgtcagtgggcgctggagcaggggctgcccgttgaaaccgtgctgcatcatcatgcccatgcggcggcgtgtctggctgaaaatggctggccgctcggcggtggggacgttatcgccctgacgctggacgggatcggcatgggcgagaatggcgcgctgtggggcggagagtgcctgcgggtgaactatgtcgactgcgaacatttgggtggcctgcctgccgttgcgctgccggggggcgatctggcagcgaagcagccgtggcgcaatttgctcgcccacagcctggcctttgtgcctgactggcagcagttcccggagacgcgggcagtgcagggccagaactggccgctactggcgacggcgatccagcgtggcatcaacgcgccgcgggcctcgtcctgtggacgcctgtttgatgcggttgcctgtgcgctgggcatcgatacgcagtgctacgaaggcgaagcggcctgcaggctggaggcgctggcggcacggtgcaacggtgtgaaacacccggttacgctgtcggtggacgaccttgcacttttctggcaacagtggcttgcctggcaggcggagccctgcgagcgcgcgtgggcgtttcacgatgcgctggccagagggctgtcggagcatgccgcatcccatgcccgacgcttatcgctttcaacaatctgcctcagtggcggtgtgttacataaccgcctgctgcgcgcgcgcctgcggcattatctttctgactttacgcttctttttccttcgcgcctgcctgcaggtgacggagcgatctccttcgggcaggcggtggtcgccgctgcccggtcatgttcacaaaggatttaa

SEQ ID NO: 125170 - DNA, 888 bp, Enterobacter cloacae
atgattaacttacagcggacgcagatgtttgttgcggtggcagacaccggcagtttcactgcggcagctgaggcgatggggctgacaaaagccgtggtcagcttcaatattcgtcagctcgaagccgaactgggcgttaccctgttgctgcgatccacccgccgcctgacgttaaccgacgcgggtactctttttcatcaacgcagcgtcgcgcttctgaaggatgcagaacagttgcaggatgatgtccgcgcgaatcatgccgggctcaccggggagttgcggatcacgaccacgcctgagtatggctcacaggtcgtggtgccgatgctggcaaggttcagccagcagcacccggatcttcgcgtgcgtcatgtttcatcgtcactgcatgccgaccttatctcagagcgctttgatgtggctatccgactgggaacgcttaccgattcacgctatcacgctgcattgatcgcacacttttcgatcctgcccgttgcgacacccgagtggctcgttactcatccgatcgcatcgctggcgcagcttgcccatgcggactggattatccacgagcgcttaacctcgccgctgcgctggcaggtgaaaaatgccggtggtttgcccgacacgctggagataaaaaaagcgccgcgcctgtttgccgacagtgcgcaggctcttatggcctttgcactcgccggaggtggagtggcattactgccggaatggctggtgcgcgatgcgttggatacgggaaaactggtgccggttttaccggaatataccttcgcgcggcagggcatttacgcggtttatccggatgcccggcacgtgccggcgaaagtacgcacctttattgattttatgcgcgccagcgtgaattaa

SEQ ID NO: 125171 - DNA, 1209 bp, Enterobacter cloacae
atgacctatcgcagcaaagtcgccgttgtctatctgctgggcttttttcttgatttgattaacatgtttattgccagcgttgcttttccggcaatggctcacgcctttcacgccacgccttcagcacttgcctgggtcagtaacgggtacattgctggtctgacgctggtgatcccgtttagcagcgtgctcacgcgccgaatcggaccgaagcgcgtcatcctgctctcgctttttctgttcagcgctgcctctgctgcggcaggcttgtctgccacgctggaaagcctgattgcctggcgagtgttacagggggtgggaggaggcttattgattcccgttggacaggcgttgacctggcaacagtttaagcctcacgagcgagccagactctcctcagcggttatgctggtcgcactgcttgcccccgcctgctcccctgctataggaggcgtgctggtgcaaacgctaagctggcgatggatatttttcgccacgctcccggttgccatcgtgacctttgttctgggctgtttgtggcttaaacacgaacagcccgcgatgaaagcaagccggctgctaaacctgcctttacttgcggacccgcttttgcgtttttccatgctggtctatgtctgtgtaccaggcatatttattggtgtgaacgtcacgggtatgtattaccttcagagcgaggccaatatgacacccggcgcaacgggaatgctgatgctgccgtggtctgtggcatcgtttgtcgctatcacggcaacaggacgctattttaaccgtattggtcctcgtccccttgtcgtcacaggctgtctgctccaggcgctgggcgttctgcttttactgagcgtcagtccggccagcacagcgctgttacccacccttgcgtttgtgttgatgggtgcagggggaagtctttgcagcagcacggctcaaagcagcgcttttctgacaacgcgccgggaagatatgccggatgccagtgcgctgtggaatcttaatcgtcagttgagtttttttgtgggaaccctgctgctggcgcaggtcctcaaccttgcgcaggcctggctacccccgctcgccgcgtggcacgggatgtttatttttgccgcaggcatgaccttactgcctgtactgtacgtttttcgtcttaacaatacgcaggtgctcacccagctgcgacaggagaattcatga

SEQ ID NO: 125172 - DNA, 378 bp, Enterobacter cloacae
atgacgcctttcgaacacgagattatcgacctccacattgcacttgaaaactggctaggcaaaggcgaaggcgattccgacgccctgctcgcccgttttcggtctgattttctgatgatcccacccggtggggtccatatagactacaacgggcttgttcgttttctggataaccagcgcggaagtcgtccagggcttaagatcgtcattgacgaattatcgacgcgacagagctgggatgatggcgcggtgcttcactaccgggagacgcaaacccgcccggatcaccccatcaacgtgcgctggtcaaccgcagtgctgaatcaggaagatggcaggatcacatggcgtctgctgcacgaaacggcgcagccatag

SEQ ID NO: 125173 - DNA, 705 bp, Enterobacter cloacae
atgaaaaagagtctccttgccgctgcgctggcgctgacagcgacctgtgctcatgcgggagatacggcagtgctgaaagtgaaagcctcactgaccagcaactcctgtacgccggaactcagcaacgatggcgtgattgacttcggtaccgttcaggttggcgatctctcgccaacccagaccacgcagttaggtgaaaagggtctgacgctgactatcacctgccctacccctaccaaagtgggctggagtattgccgacaaccgtacggattcgaacgccagcaccggaaccgactcaaacctgaaggtgcagaacgccacgtcaaacggcggcgaactgcgcggcagcatgacgacctttggccttggcaaaacgcacgatggcaagaatatcggtgcctattccatctataccagcacgggtgaagtgacggcaaacggggcgacggttgaaccgattcgtacggcagtcactgctggtgtgggcatgagtcgctggcaaaaagccaatggtggcactatcgccaataaggatctgggcttgatgagcgtcgcctctgcgggcaaaacggctccgatggcggtgaccagcgtctctttcccgctgaacatctcgctggcagtggaaaacctgaagaaactgtctctgacagaagataccgagtttgatggtcaggccaccatcagcgtggtgtacctgtaa

SEQ ID NO: 125174 - DNA, 558 bp, Enterobacter cloacae
gtgaaaatagttaacgcagtgctcatcagtgcagcatcacttttttcgtcttatgtcgtggccgaagcgtgtcaaattacgctgtcgcaaccgaacgtctcctttggcagattcaaacaggatgacattatcgcctcgcgtaaaaactggaaccgcatgccgggcaaagaggtcaccgccgcggttttttgcccgcagccaagggtgatggcgctttttctgcaatctacgtccggcagcaacgggggcgttctgtttggtcagaagagccgactggcgctggttgccagcaatattctggtcgatggtcatcactataatctggtcagaacctctgaccgggtctcgttcacctctgcggaaacccccaaggaaaaagtctttctgaggaataatgacggcatccttgcatatcaaaatggcctgccggtgcgtggcaaacaaatgagtgtgacgataaaaattatacctgtcattaatgacgatcagctgcgcggcattccagataataccgagctggaaagcgcactcgcctgggagctattaacgacagagtaa

SEQ ID NO: 125175 - DNA, 2418 bp, Enterobacter cloacae
gtgataccgcgcgctttgcaaaacacgatgcgtcgaacagcagtggcggtcgcttttctgccgtcgtcggcgctgcatgcatccgatctggatttcaataccgatatactggcctcgcggggaatcagtactaatctcgcccattacttctctgatgcacaacgctacctgcccggccagcatgccgtgcaggtcaaaattaacggcgttgagaaggggagcctggccattcgggttggagaagaggggcagctttgcattgatgatgacttcacccgtgcagctggcctactgccattgaatatcggcgaaaaagagaaatgtcataacctgctgaaagattacccttccgcgacggtaacgcttctaccgaataccgaatcactggagattttcgttcccgcagaggcaatggacactggattttatgccgcgaaatattactcgcacggcggtgttgcgggcttaatcaactatagcgccttcagtaacattaacgagtacggctcgggcgggagcagccgttatgcccagggaaatttgggggcaggcattaatcttgcgaactggacgctgcgcagcaatttcattttgacggatgacaacgggactcgcagcacagagaacctgtacacctacgctgaacacgtttttgaagagcggaaaatgcgggcgcaggttgggcagatcaacgtcaattcggccctgtttagcggcgcgcaaatcaccggcgttcagctaatgcctgaaaccggccttcagcctaatatccaggccactgaggtgtcgggaattgcccggacgaatcaggcccgcgtagaggttcgccagtcgggacagctgatctactcttccctggtcaacgccggccctttctccctgacggacgtgcccctggtgcgcggaaatgtcgatcttgacgtcagcgtggtggaaacggacggttcgacaacgcaatttagcgttccctcttccgccctcaatatacagggaagtaatcgtgccgaagggttaaacctctctctcggacgggttcgcgacagcggggatgagtcaagtacgccctgggtatttacgctctctgacggaacgatgctgaatacgcgcatgtccgccgtagccgccggcgtactggcagaaaaatatcaggctaccggtgccaaactcgacgtttccatcaacgaaaactgggcgatctcaccgagctttttactgagccagtcccacttttacgatcgactgaaaggcagcaagactgaacttagcagcaatatcttactgcccgcccagctgacgatgggggtaagtgcgtcccagctcagcggcggcttccgcgaactcacggaagccatggatgaagaggcgcagacctacgaaaataactggaacgccagcctcacctggaacaatgagtacattggcgcgatctcaatgcaatacagcgtgaattccggtgatgaaaacagcggtgattcacgctatctgatggcctcctggagtaaaagtctcgggcgtacctcgctgtccgtaaactggcagcatgccatgagcaatagtgatacccagaaccagagcagcaccagccgcgatgacgatctcttttatgtcagcctgatcgttccttttggcgaggatcgcgtcagtacctacatgcgcgctcagggggaaaaacaaaattatggcgttcaggaaagcggctctatcggtcaaaaccttaactacaacgtctccgcagaccgcgataatcaggataagagtaacgcctttaacggcaatatcaccaccaaccttcactatacgcagctcggtttatccgctggcctgaatgacggcaatcagcataactacagcgcatccttaaacggtggcgtagcgctgcatcgtcatggcataacgttttcgccctatccggtaaaagagacattcggcatcgcccggttaagcgaaccggaaagcggtattgaaatcaccacccccgatggaaccgtctggacagatcgctggggacaggccgtggttcccggacttcgggaatggcaaaaatcgcaaattgtgattaatgccagctcgttacctcagggaatggatttatcaaacggtattcagaccgtctccgccgcgtatggctcttttgcgctgatcgatttcaacgtgctgaatacgcgtcgcgtcatgctggacgtcaagcgagtcaacgggtcatggctggaaaaagggctgagcgtggtggatcaggacggtaactatattgtcagcgtaatggataacggcagcgtatttattcccgatgcgtcggatacgcctgcgctttatgtggtggacgacaatttaaccaaactctgccagatcgcttacaccctgaaagacgaaaaagataaagacgcctattacgaaaaagcagaaggagtttgccagtga

SEQ ID NO: 125176 - DNA, 702 bp, Enterobacter cloacae
atggaaagaattgtgaaaatttcccctttggtctgcgctctttttctcacccttccagcgacagtctatgctgcaggcatggtgccagaaaccacactgctgatgattgatgaagccaaccacggcggtgtcatgagtgtgaaaaacacggactccatccccaccctgctttatacctccattaacgacatcgagggggagaatggggtcaagctcaacgtcactcagccggttgtacgccttgagccaggccaggaacagcaggtgcgctttattcttgaaaccaaagaaccgctgaccgttgaacattataaacgcgtgatctttgaaggcattccgcctaaaactaaagataaaaacgttaaagtcggtatcaatcttcgtcaggatttaccggtgttgatccatcctaaaaatcttcctgttgtcacggatgcatggaaattactgacctggtccgtacaagagaaagaggttcaggtccgtaatacctcgccgtacgttgtacgtttttccacatcagtgacgctactgccttcccacaccgagggagtggttaataaaacctttatcctgccgggtgagaccatgaaggtgcagacaaataccccgatcggtagcggcgataatgccgtcgagttcaaccctgccagtcgctacgggattgaagtggacaagttcactgccgcgcttacacgctga

SEQ ID NO: 125177 - DNA, 717 bp, Enterobacter cloacae
atgaaaaagtgccttctcgccaccgttatcatgatggcggcgacagcagtttatgccgaacctactgcaatgttaaaagttcacggtacgctgaccagcgcaggctgcgttcctgaaattagcaacggcggcgtggccgattttggcgaagtgggtctggactcactctcctccggtgtggcttatcaggctgggcataaagatgtcactctgaccatcacatgtcagtctgcgacccgcgtcggctggacaatcaaagatgaccgcaaagactcaaacgcgggcgcacataaaacgtcaagcgagttccatgtggataacgctaccgcaagcggcgcgcaggcatacggcgattaccagctcaacggtgtcggaaaaaccagcgctggcgaaagtatcggtgcctattcagtttcaacatacatgaacgcggtcactgctgacggtgcaaccgttcagcctatcgccgcagcgatgtataccggcggcaccatcagcagcagaagctggatcaacctgtgggccaccggcatcctcactaacgatggtacagacgtcatgaccgttgccaaaaccggcgaacgcgctccgctggccttcacgacggcggccttccctctgaagatcgcgctggcgattgcgccaagcaaaaatctgaccctgactgacaggaccgacctggacggtcagtccacaatcacgctggtttatctgtaa

SEQ ID NO: 125178 - DNA, 711 bp, Enterobacter cloacae
atgaaaaagcttcttctcgcaacgctgattgcgatgacctcttcggctgcattcgccgaaggcagcatcgtcatgaaggttcagggcaagatgaaccatgcatcctgtacgccggaactcagtaacggcggatcgattgattttggcacaatcgcgctggaccagctttctccaacccagaccaaccagatgggtcataaagatatgtctctgacgatcaattgcccgtcagcgactaaagtggcatggagtattgctgataacaaagaagattccaatgcggcgacctacctgaactccagcgagttttacattcgtgacgccacagacaatggtggggacgtttacggttcaggtaccacctacggcgtaggtaccaccgctgctggcgataaaattggcgcctatgcaatcagtacccgtatcaatgagatcaccgctaacggtgtgcctgctcaggcgatctttgcgccaaacttcctcaacagcaaaggcgaatatatgtggcgtaacctggccaccggtgtgattgccaacggtaacgccgagatcatgaccgctaccagaccaggttataccgcaccgctggccatcaccagcgttgtctacccgttcaaagtctctctggccattgttaacactgaccgtctgaccaccacagacgaagcgcagctgagcggcgaaaccaccatcactctggtttatctctaa

SEQ ID NO: 125179 - DNA, 153 bp, Enterobacter cloacae
atgctttctttttattcaactcgtcatcagcccttcataaagcaggtgcattcacaggcacttaccactattctggcgcttacggaagtcacctccgcttttttcggttcgtttaaccgtaaagaaataaatacagaatatggattttcataa

SEQ ID NO: 125180 - DNA, 732 bp, Enterobacter cloacae
atgtctttaaagaaagttgtgggaattggcttactggcgtcagtcatgacgctgaccggatgtggcgcgatgacgacagccgtgaaaaaacgcaacctggaagtgaaaacccagatgagtgagaccatctggcttgagccttccagtgaaaaaacggtctacatccaggttaaaaacacctccgataaagacatgagcaacctccagacgctgctggcaaacgatctgagcgctaaagggtataaggtaacgtcctcacctgacagcgcatactactgggtgcaggctaacgtccttaaagcagacaaaatggacctgcgcgagtctcagggctacctgaaaaccggctatgaaggcgccgccgtgggggccgctctgggtgccggtattaccgcctacaacagcaactcctctggcgccgcgctgggcgtgggtctggcggctgggctaattggcatggcggcagatgcgatggtagaagatgtgaactacaccatggttaccgacctgcagatctctgagcgtagcaaagcgaaagtcaccaccgataacattgcggcgctgcgtcagggtacgtccggcgtgaagctgcaaaccagcagcgagcagggcgatcgcgcgaagtatcagacccgcgtggtatcgaatgctaacaaggtcaatttgaaattcgaagaagcgaaaccagttctggaagcgcagttggcgaaatcggtggcaaatattctgtaa

SEQ ID NO: 125181 - DNA, 972 bp, Enterobacter cloacae
atgacaattcgaattctttcctggtgtgctgactcctttacgcacgaggcagacgacctgcgaggggcggatgaagatctgctggcacacgccaaagagcggatggaattccgcctgagtcaggtcagtgctcagcttaaaacggtactggaaaccgactccggcagctgggaccatacctttgtcacgcttccagaattcttctggaatacccgctggagtaatgtgaacagtgaagatgacatcatgaagctcggtgatttctacatgagcaatgtcagcgactacgttaacagactgattgatgccttccctgcccgttccggggatccctcctctgccatcacctttctggcgggaacctgtgccatcctgtatcgagacgatgacgagagtgaggagacgccctgccacgacgccgtttttcacgctgtgaactggctgctgtgcgggcaaaatacccgtagcgataaatccctgacgatgtggccgaaacgctacgtttccacgattgatttctttcctcagacgggcggccacgcgatcccggggcatatttctgcccaattgccggatggtcagatcattcatatcggcgacagcagcgaagtgtcggcagaatcattgcatgggatcgttgtcaccgattacttcaccaatacttatgcgggcgataagccgttcagcattgatatctgtctggattacttcacgcaggggaatgttcgcccggcgggctgggagcaacggatagcggagctgcagagcaaaaacagcgacattgattttctgatcgcctgcggaatgccggtcagcgatccgccgcaaaacccgggtggggtgaaattccttgtacgtaacgacggtatgccagtcgcgtctcaatgccaggcgtggtcgttcagcgccgggagggcaacgcccgttgcagcgaccaaccctaccgctaattttgtgagatttttactgtag

SEQ ID NO: 125182 - DNA, 1599 bp, Enterobacter cloacae
atgctcaaaagatcgcctgctggaaataaggaaatgaacatgcaacgtcgtgattttttaaaatattccgttgcgctgggggctgccagcgcactaccactctggagccgcgccgttttcgcggctgaaagacctgccttacccatccctgatttactgaccgctgacgcccgtagccgtatccagctcgttgttcagtccggtcaaacatcctttggcgggcacaacgccacgacgtggggctataacggcaatttgctcggtccggcgcttcagctacgtaaagggaaagcggtcacggtggatatccacaacacgctcgcagaagagacgacgctccactggcacgggctggaagtgccgggtgaagtcgacggtggaccacagggcattatcaaggccggtggtaaacgtagcgtgacttttacgcccgagcagcgtgcggcgacctgctggttccatccgcatcagcatggcaaaaccggccatcaggtggcgatggggctggccgggctggtgctgattgaagacgatgaaagccgcctgctgcgtctgccgaaacagtggggcatcgatgatgtgccggtgattgtgcaggacaaaaaattcaccgcagacgggcagattgactaccagctggacgtcatgagcgcggcggtcggctggttcggggatacgctgctgaccaacggtgcgatttaccctcagcacgccgcgccaaaaggctggctgcgtttacgtctgcttaacggctgtaatgcgcgttcccttaattttgcgaccagtgataaacgccctttgtacgtggtcgccagcgacggggggcttctgcccgagccagttaaagtggatgcgctgccgatgctcatgggggagcgctttgaggtgctggtggatatcagcgacggcaaggcgtttgacctggtgaccctcccggtcagccagatggggatggcggttgcgccatttgataagccccacccagtgttacgcattcagccgttactggttaccgcatcgggcacgctgccggatacgttaaccacgctgcctgcactcccgtcgcttgacgggctcacgcaacgcaagcttcagctctccatggacccgatgctcgacatgatgggcatgcaggcgctgatgaagaagtatggcaatcaggcaatggcgggaatgcatcacggtcagatgatgggccatatgaatatggaccacggcaaaatgggcggcatggatcatggcggccatggctttgatttccacaacgccaataagatcaacggtaaagcgtttgatatgaacacgccgatgtttgccgctacaaaagggcagtttgagcgctgggtgatttcaggcgaaggcgacatgatgctgcacccgttccacatccacggcacgcagttccgcattctttctgagaacggtaacgcgccggatgcgcatcgcgcaggctggaaagacaccgtgagagtggagggcggcgtgagcgaggtgctggttaagtttgaccacgacgcgccgaaggagtttgcctacatggcgcattgccatctgctggagcatgaagatacggggatgatgctcggttttaccgtataa

SEQ ID NO: 125183 - DNA, 1158 bp, Enterobacter cloacae
atgacctggcaggcacgtatccagtcggcgctcgacgagcgtcgggcgactgatgcgtttcgcgtacgcaaggtggtcgaaaacggcgcaggccgttttctgacccgcgacagtcggcgttaccgtaacttctccagtaacgattatctcggtcttagccagcatccggctatcgttcgcgcctggcagcagggggcagagctgtttggcgtgggcagcggtggatcggggcacgttagcggctacaccccggcacatcaggcgctggaggaggcgcttgccgactggctgggctacccgcgcgcgctgttgtttatttcgggttttgccgccaatcaggcggtgattaccgccctgatggggaaggatgaccgcattgtcgccgaccgcttaagccatgcctcgctgctggaagcggcaagtttgagtccggctcagctgcgccgctttgcccataacgatgcggggcaactcgctgcgctgctggataaaccgtgcgaggggcaacagctggtggtcacggaaggggtattcagcatggacggcgacagcgcaccgcttgccgtactgcacgaggctgccaggcagcaacatgcctggctgctggtcgacgatgcccacggtatcggcgtgacgggtgatgaagggcggggaagtgttcacctgcaaggcgtcaggccggagctgctgatcgtcactttcggcaaaggttttggcgtgagtggcgccgccgtactgtgcagcgagtccgttgcagactatctgctgcagtttgcccggcacctgatctacagcaccagcatgccaccggcgcaggccgtggcgttgtctgcgtccctggccgtcattcgtagcgcagaaggggaggaacgtcgccagcggctggcagagcatatctgccgcttccgtcagggactggcggcgcttcctttccgcagtactgattcgcaaagtgccatccagccggtgatcgtaggggaaaacgcgcaggcgctctccctggcacaaacgctgcgcgatcgggagatgtgggtcacggctattcgtccacccaccgtaccgccgggcacggcgcgtctgcggctcacgctgacggcggcgcacgagaccgaggatattgctgcacttctggaggcgctgcatgttgccagtcaataa

SEQ ID NO: 125184 - DNA, 756 bp, Enterobacter cloacae
atgttgccagtcaataagcaggccattgcggcggcgttcggccgggccgcgcgcagctattcacagcacgatgaactgcagcgccagagcgcacaggggctgatgacgttgctcggcgagaggcgctttacccaggtgcttgacgccgggtgcggccccggcgggaatagccgactctggcgcgaggcgggaagtcacgtaacggccatcgacctgtctcccgctatgctggatgaggcacgccagcagcaggctgcgcatcgttatctggtggcggatatcgaggcgattccgctggcggacgcgcaattcgatctggtctggagccatctggcggtgcagtggtgcagcagcctgccgcaggcgttgagcgagctttatcgcgtcacctgcccgggcggcaaggtggcgtttaccacgctactggaaagctcgttacctgagctcaatcaggcatggctggcggtggatgaacagccgcacgccaaccgctttttgtcatatgagcaggttacgcaggccctggcaggctggcgctatcgcagtacggagcagaccatcactctcgattttagcgatgctttaagcgcgatgcgctcgctgaagggcattggcgccacgcatctacatgccgggcgcgagaaaaaaccgctgacccggggccagctgcagcgccttgagctggcctggccgcagcagcggggccagttcccgctctcttataaactttttcatgggattattgaacgtgactga

SEQ ID NO: 125185 - DNA, 990 bp, Enterobacter cloacae
atggcttcacaactgactgatgctttcgcgcgtaagttttattacttacgtctgtcgattaccgatgtgtgcaacttccgttgcacctactgcctgcccgacggttacaaaccgggcagcgtcaccaataacggctttctctccgtggatgaggtgcgccgcgttacgcgcgcgttctccgggcttggcaccgaaaaggtcaggctgaccggaggcgaaccttctctgcgccgtgatttccccgacatcattgccgccgtgcgtgaaaacgaacatatccgccagattgcggtgaccaccaacggttaccggatggcgcgtgatgtggcgacctggcgcgacgcgggcttaaccgccatcaacgtcagcgtggacagcctcgatgcccgccagtttcacgccattaccggccaggacaagttccgccaggtgatggacggcatcgacgcggcatttgcggccgggttcgagaaagtcaaagtcaatacggtgctgatgcgtgatgtgaaccatcatcagctcgataccttcctggcgtggataaaatctcgccccatccagctgcgttttatcgagctgatggaaactggtgagggcagtgacctgttccgccgccatcacatttccggcatggtattgcgcgacgagctgctcaaacgcggctggatccaccagatccgccagcgcagcgacggcccggcgcaggtcttctgccacccggattacgagggtgagattgggcttatcatgccctatgagaaagacttctgcgccagctgtaaccgtctgcgcgtctcctccgtgggcaagctccatctctgcctcttcggcgacggcggcgtagatctgcgcgatctgctggaagacgatgctcaacaggaagcgcttgaagcgcgcatttctgaagcgctgacgcacaaaaaacagacccacttcctgcatcagggcaacaccggcattactcagaacctgtcttatattggcgggtga

SEQ ID NO: 125186 - DNA, 519 bp, Enterobacter cloacae
atgaaaatgaagaaacgtctctttgtgctggccgcgctggccagcacgctcacctttctggcccgggctgacgatattcagctgcaaatggtcggtaacatttatgccaacacctgcctcgtggacagcgccagtaaggatttaaccgttgatttaggccaggcggcttccagtgaattccacgacgtgggggataccggcgcgtggaaaaccttcagcctgaaggtgacacattgtcctaaatccctcgccctggcgaccgccttcttttacggtcaggcggatgctacccacccaaccaagtttgccaacacgggcagcgcgaaggggctggcgctggagctggcggacagccaggaccatatactcatcgcaccgcaggccagctttaacgcgctgattgaccagaacgaccataccgccaccttcccgctggccgcacgctattacgccaccgctatgccggttaccgcaggcacgttcagcagcgtcgttcaggtgaccttcacttaccagtag

SEQ ID NO: 125187 - DNA, 990 bp, Enterobacter cloacae
atgcagcttgtaaaacaatgctttttcttactcgtactggcgaccgcatcgctgtttatgccgcatgcgaaggccacctgtacgtcaccggatatgccaaaaaccattaacctggccacggtttccgtttccaccacgcttcccgtcggctcgaccatccccggcaccgaacagacggtacacgtcgcgggccactgtgataatgctgcagataagggtctggagatcgtctcctgctactacggctacggcacggaaatccccggcctttccggggtctatgaatccggcgtgaagggggttggcattgcgctgatgaatgacaaaggtcagcgcatcagcggtgcgggcggggtcacctgcgactcccgcggcacgcctattggctatgtctcaactgacggcaaccagacgttcgattttaacgtcacgctggagctggtaaaaacggataccgcggtagaatccggtacgctaaatcaaagccagaccgtttttggcattggcgtttttggtcacgaaggcatcggttcacctaacaatgttagctatgctggtaacgtaaaccttgaaaacgtcacctgctccgtactgccaaaaagcctgaccgtcaacatgggcgatttcccggtcagcgatttcaacatggtcggcacgctggcgatgcccgcgaaggagttcaacatcacggtgaactgtaactccaccgttcagccggaatttaaggtcaccagcagcgacggctacgtacccggttatcagggggtgcttaagctcacgccggaggatggcgtggcaacgggggtcgggattgaaatggtgatcgacaacgagctggcaacgttcgatacctacaccccaactgaaaccctggcctatgccaaccagacgatggatatcccggtcaagctgaactatttgcaggtggcagatgaagtcacccctggcccggcgaacgccgtcgccaccattactctggcctataagtga

SEQ ID NO: 125188 - DNA, 2511 bp, Enterobacter cloacae
atgcttacgctgctgaccctgctatgcgggttagcggccgtgggtttttcgcagcaaacgcgggcggatgattattttaatccagcgttgttggatgtggataatccacagcagggaaaaaccgatctctccatttatgaaaaagggccgggacaggcgccagggaaatatcaggtcacgatctttatcaataataataaaattgatacccgcgacgtgacctttatattgcaaaagcaggataatggagaaaattcccttcagccctgctttactctgtccgatttaaaaagcctgggtattaaaactgacgactatcctcagcttgccgtgaaaggctcatgcgcggatttgcacgccataccggcggcgacggcgacatttcgcgtcagcaaccagcagcttctgttgagcattccgcagtccgcgctcggtcaggttccccgtggctatattgacccaacagaatttgatgaggggatcacggcgggcatcctcaactacagcgccagcgccagccagagccacgcccgtcagcagggcatgcaggacaacagcagccagtacgttaacctgcgtccgggcctgaacgtcggcgcgtggcgcctgcgcaactattccacctggagtcgcagcaccagcggtcacgaagaagagcaatcctttaactcggtctacacctatgcccagcgcgatatcgtggcgttaaaaagcgatctgaccgtaggccaaagcagctccccggcagacgtatttgacagcgttccgtataccggcgcgcagctgaactccgacaacgatatgctgccggacagcgaaaaaggctatgccccgatcatccgcggtacggcccacagtaatgcgctggtggtggtacgtcagaacggctacgtgatttatcaaaataccgttgcgccgggtgcatttgaaatcaatgacctgtatcccaccggcagcagcggcgatctccaggtcaccgtgaaagagacggacggcagcgaacgtcactttgtggtgccctacgcctccgtaccggtcctccagcgcgaaaagcatctgaaatacagcgtcactgccgggcgctaccgctcttatgacaaagacgtggaaaaaacgcccttcgctcaggggagtgtcatttatggcctgccgtacggattcaccgcctacggtggcgtgcagcaaagcagccattatcagtcacaggcgctgggcaccggtaaaaactttggcgatcttggcgcgttttctgtcgacgtgacgcgcgccaaagcgctgctcaaaaaacagcaggccagcaaggggcaatcctggcgtctgcgctacagcaaagatttcgcgggtacgggcacaaacttcgctctggctggctatcgctacaacagtaaagggttttacaccctcgaagacaccatggagtcctatacccgcgccgatgactggtcagcaccgcagcagcgccgcgcgcgtaccgaggccaccatcgatcaaaccctcggcgaaggctggggatcgtttacgctgagcctggtcaaagagacctactggaaccagggtcaggacatgacctcgatgagcgtcagctataacaacagctggaagggaatcacctacagcatgagctatagcctcaacaaaaacaccaacagccgtgatgacgaaggcgattcggtcagtaacgataacctgttcgcgctgagcgtgtcggtaccgctggatcgctggatgagcaacacctgggcctcctacaacatgaataacaataaagacggcaccacgcacacgctgggcctgaacgggacggcgctggaggagaacaaccttaactggaacgtgcaggaaggctatgactcatcagagaacggtacctctaccagtctgaacgccgattataaagccacctacggggaagtgagtggcggtttcagccaggacaaataccagcggaccaccaacgtcggtctgcaggggggcatgatagcccacgctaacggcctgacgctgagccagccgctgggcgagaccatcgcgctggtgaaagcgcccggagccagcggcacgcacatcgccaaccagacgggcgtggaaactgacttccgcggctataccgtggtgccctttgtcaccgcctatcgccacaacacgatttcgctggataccgaaacgctgcctgacgaggctgacgtgacgcacgcttcgcagatcgtcacgccaacccgcggtgcggtggtgcgggcaagcttcaatacccgcgtgggtcatcgcgtcctgatgacgctgacgcacaacgggaagccgctgcccttcggcgcaacggttaccaccgaggataaggacagcgaatttatcgtcggcactgatggccaaacctatctttccggaatgcccgatcgcggcaagctctccgtctcatggggacaggaagccagcgaccactgcgttgcggaatacacgctcacggatgaaaaagagaaaacagacattattaacgctgccgcgcagtgtcagtaa

SEQ ID NO: 125189 - DNA, 537 bp, Enterobacter cloacae
atgaacaagattgcgttaggtctttttatcgcgtcggtgattggctgctcggcatccgcttttgcagcaacagacggtgaaggacagatcaactttacgggcgaaatcatcgattccgcctgtcaggttgtgaatgatttaagtaacccgttgaacgtgacattaggcaaagtctccaagacggtctttaccggtgccggctccaccagcaccgccacgaagtttgatattgagttaaaaaactgcccggaaaccgttacggcggcggcaatcaacttcggtggaaccccggatgccaataacaacagcaccctggcgttaacccccgatgcagatgccgcaaccggcgtagccattcagctgatcgactcttctgagcagcccgtcagtttatatactccgtcaaaagagtatccgctggcctccggcaccgcagtaaacgatctgcagtttgccgcgcgttatattcaaaccggtgcggccattaccgctggcccggcaaactctgtttcaacattcacggttatttataactga

SEQ ID NO: 125190 - DNA, 153 bp, Enterobacter cloacae
atgccatatattctgcatggctttgtggccatgcagaataaaggccagatcgtcaggcgttataatttcttacatactttgtcatattatcgaaatatcctgccaggcctgttttctctgtcctcaattaagattgatctgtatcaattctga

SEQ ID NO: 125191 - DNA, 1662 bp, Enterobacter cloacae
atggcatttgtaaacagaggctgcactgttcacggtaaaaatgttggactacatggagataaaacctctacaggtgcacaatgtattgccgcccgccctggtatgtcggttatgggcaagtggaaactttacattggcgataagaccacaccttgcccgaaatgcggaaaagttggcgttattgttacaggagatcaccgtcaaacaaacagcgaagctgtcgccgtagacggttcaatcatccactgtgattgcccgatggggtcgaactttctcattgcgcctggaaccgtggagatcaatgagccattcgccgcgtcagagccaccagtaaataaaactatcgcagcagcgctaagtacattacctgtttatgcaaaatcctgccttcgtggtgtaggttgcaccgatgcaggcacagagcaagagttactcgataattttggtcatgcaggctattaccgtgcagcgcctcaggcagagcaaccaaaagaagaacctgttcagcacgcgcaggcagcaaagaaacgtaaaccagccgaaccagccccaccatcagaagatactcgcccttggtacaaacgcctcttcagttcaccggatacaaccaaagccgctgcgacagcaggaatggcgacagcaagagccgcgacaactaccgggatcacgacaggcacagcaaccgaagctggatatgctgcattgcaaaaaatcggcggcaatctttctactgctggtcgctggattgcacccagccccccaacagtactcctcttcggtatattctactcgccaaagctcaacagcggtgagcaggattatatcgacaggatgcggcttgagcaggccgcccggaataaggaagatgtgccgacccgtgttcgctttcgttgggaagcagaccagaacgggatgataaggccgaaaggttttcatgtcagcgtcggaggtgggcaggacaaagttccggttcgaatgcttcagaagaacacaaccaccgggaactatgaattctgggaagatggtgcaagcaagccaacaatcgtatggacaccagacgatccaggatatgtgtcgccatctaataccgggaatcgggacaatgtatacgtccctccgagtgtgctggtttaccccgaaagtgaaatcaatagcccgtggtcaacagaaacgccagcaccgggagagcgtccattcagggattacattctggtgcacccagcaggaacgtttgacccaatttatgtttatcttcgcaatctaccggggcaggtcacaggcaagggccaaaaggttactggcacctggttagctgatgcgggtcaggggaacggatcaccaataccgtctcagatagccgataaattgcgtgggcgtacattctccaactttgacggcttcagggaggcattctggcaagaggtcagcaaagatcctgagctttctaaacagtttattccagcgaacgttacacgagcagcaaatggcagagcacctcgcgctagatttgcagatactgtagggaaacgacgctcttttgaaattcaccatttaaccccgattagtcaggggggcgaagtttataacgtagataatatgggcgtcatgacacccaagcatcacattgttacacactcaggcagaggaaatagcagtgagtaa

SEQ ID NO: 125192 - DNA, 252 bp, Enterobacter cloacae
gtgagtaaattgctcagtgattatacaaaaaacgaatttatcagcctcgttgctgaaatcattagtgatcaaggtactgaagagcaccaagataatctcttggaattgttcatccaactgacagagcatcctgaaggttcagacttgatttactatccccaatcagcagcagatgcaacccctgaagctatcgctgataaagttcaggaatggcgtaaaaccaacggtaaatcaggatttcgtgaagattga

SEQ ID NO: 125193 - DNA, 723 bp, Enterobacter cloacae
atgacacccacgattgacctgctcctttcccaccgttccattcgccacttcaccgatgagccgatcaccgaggcgcagcgtaccgccattattaacagcgcaagggcgacctccagctccagtttcctgcagtgcagctccattattcgcattaccgacccggcgatgcgtgaacagctggtgacgctgaccggcgggcagaagcatgtggcccaggccgccgagttctgggtattttgtgccgactttaaccgccatctgcagatttgccctgaagcgcaactggggctcgccgaacagctgctgctgggcgtcgtggataccgcgctgatggcgcaaaacgcctttacggcggcggaatcgttgggactgggcggggtctatatcggcgggttgcgtaacaacattgaaagcgtcaccgaactgctgaagctgccaaaacatgtactgccgctgtttggcctctgcctcggctggccggcggataatccggacctgaaaccgcgtattcctgcggcaatgctggtgcacgagaaccactaccagccggtcgatcgtgatgtcctcaatcactatgatgaagagctggcgaattactatctgacgcgtgacagcaataaccgccgcgatacctggagcgaccacattcgccgcaccatcattaaagaaaatcgcccgtttattctcgattatctgcataaacagggctgggcgacgcgatag

SEQ ID NO: 125194 - DNA, 639 bp, Enterobacter cloacae
atgtctaccatctgtcttgcggctcagcgcagttacaccaccggcgaggcggtctggttttcataccgcctcccccgtctgagaaacatcgttagccatgcctttttagggatggtggctctgtgcgccatgatcatggcagggctgtacgcgcatgtttactggaacctgcgccatccggcgccggaaccggtcaaagcaagcgccgcgaaaccggaaacgcagctttcagatatgcactatgtgtatgtgagcaagccgttcccgcatccccatccgcatccgcagccaaaaccggctccggtgcaggcggatgttcctgccatgcaggatctgcccatcaacagcgatgatgccgactggcagcaggcacctgatggtgacgtgccccatgatacttcccgggatacgttacccggaaccgaagcacacgaagccgcctccgccaacacaggcagtgatgacgcttctataagcgagttacttaagcaggcgttaaaagaacaagagcaagattattcgcaaggcaaaattcccgcgccgccggttgacgaaacgcaggataattcgcagagggatgtgaatcataaagtggatgcccggtcccctttgagtgagaaaggagaccggctggagtag

SEQ ID NO: 125195 - DNA, 1566 bp, Enterobacter cloacae
atgtatcagaagcactttaattttaaaaatccgccctttcggaagatcgtccgctcaaacggcgattttctggtgccttatcatcaggatgttttcaacctgctgaaggagaaaacccaacaggcgggaattatcgggctcttttccgacgatgcccctctgctggggcagttcagtgacgccctcaaatctgcccaccccgacgtgcttgctattaatgcgtttccaaaactgagtgccagtagcctgctgtacaagctcagcccgggaaccaaagagaacaagaaccggattcaggcggtggatgccgtactgcaccagtggcaggcggataaaaaccaggcgaaggtactgatcgttagccattgcgaggcgatgaaagagagctgtcacgaggtgctggcgatgctactcacccgtgcccaggagctggcgtttcgcctgtcggtggtgctgacgggcgcggcggatcgggacgttgttctgatgcagcaatctgaactgcgtgaatatgtgcatacccgccacactttgcgtccccttacctgccgggaatatctcagctatgtacaggcgcagtgtgaagaacacgggtgcgagagcgcaccgttatccccggcacgcgtgcgtaaaatgcatgcgctgaccaaggggaatatcagcaaactgaatgaactgtcgcatctgtcgatgctggctgcctggaccgaacgtgcagcccaggtcagcccgcgtcatttacggctggcggcaggtgagatcctcccggcgaaaaaacacggtaagcgcctggcaaccgtggggctttttgcctcagtgctgttcgccgcctgcggctggtatttaacgtcgtcgatcgccggaaaacttccggttcaactcccggtacccgtcagctggaaacagcaggcgccaaaagttgaggcaccagtggtgccggtcatcgacaacgaaatggttaatcagccggatgccatgcaccagctctacctgatgtgggggtatgacgcctcggcggatgatgccctgtgccagaacgccgcgaaggtgaacctgatgtgtaaacaggggaatgcctcacccgatgcgctggcacaggaggggtatccgtgggtgagcgagctgaaaaccggcgatcatcttaactatgccgtggtcgcccgcgtcggagatacgtcactcgacctgctgatgaataaccgtacctggcaggtaagccgccgctggtttaaccagcatgcgaccggcaactttacccagttgcaccgcctgacgccggaaggtaaagacgctatcagtgccgccagcgacacgaaagacatgggctggcttgaccagcagttgagcctggcgcttggccagccagaaacccattcgcagacctggacggcggagatgatgaaacgcacccgcgaattccagcaaaaaatgcatctgcatgtggatggcattcctggcgaagatacgttgatgcagttgatgcgtgaaacccataccgcgccgagcgtactgctccagaccacgcatgccacacccgacgccaacacgcaggagaagcattcctaa

SEQ ID NO: 125196 - DNA, 381 bp, Enterobacter cloacae
atggctaacggtaagaaaaagcaaacggggatgacgctgctggaggtcatggtggcgctggtcatcttctccaccgccgcgctggcgctgatgaactcggtgtctctgaacgtgcgtttcacccacggcctcgccgatacgctgcaggccagctgggtggcggaaaaccagctggcggaagtgcaactgactaaaagcgactttcccgatgccgaagaacggggaagcgaaaccatgggcgggcgcggctggacgtggcgtaaacagcgcatcaaaacggcggacaaccgctgggcaaacgccatcagcgtttatgcggaaggcgacgacagccagcctgtgatatcgctgcagattgtgccgccgggagagatcaagtga

SEQ ID NO: 125197 - DNA, 1134 bp, Enterobacter cloacae
atgaaacaggtactttttgttcgtcccgacagcttcgagggcgggaaaataatgtggtgtgtctccggcactcagcaggtggaaaccgtggctagcctggaggcactggcggatcatccgctggcgacgcgcgtatgtctgctgttgccggccagcagcatgatcttccgccattttacgttgccgaaaaaggtcgcttctctggcgacggcgttctcgtggatggccgaagagacgctgattggtgacgtggactcgcttcactggaccgtgcttagcaaaaagggcgcagaggtcgacgcggtggcgatcgatgccgacagtcttcaggcgtggttaacccgctgtcaggaggcgggtctgacggtggtgcaggcgctaccggatgcctggctgctgcccgttacggcgggcggcagcacgctggttgccgaaggtgaaacctggtggctgcggttatccccgcacgtcgcgggtgaaatggaggccaacctgctgccgctgctgatgcagaaagccggagagggtgaggtctgctgctacggtgatgcacctgccggtgtggatgtcggtgttgtgctgccctggcagcatccgctggtgctgattcagccccagtggcaggcctgccgcgtcacgcttctgcacggggcgttcagcgccaaagccagcaatggcaaagccgccagacggttaaacgtggcgatggccgccgtagggctgctctcccttagcctgctgctggggccgcgcattgcgatggcctggatgctggtacagcaggaaaatcagatccagcaggagatccagcaggtctacgaacaccatttcccgagcatgcgtcacaagaccaatattaagtaccactttggtcaaaacatgaagaagcagggtaaagggatctttcttcagtttgacgatctggagaaagcccgacaggccgttccggcaatggaaatcgacctgctggagtacgatgcgcggcagaatacgttgacgctgagcgtcagcgcacaaaaccagaccgcattacagacgtttgtgaaccaggccagtgagaaatttgatttcaccctgcagcccgtgtccacgtcagcaccttataccgccatgatcgcagggaaatataaatga

SEQ ID NO: 125198 - DNA, 486 bp, Enterobacter cloacae
atgaaacagcgaattgcgcagcttaagtctcgttaccagaattacagcgccagggaaaaagtcattttaaaaatatgtgccgccgccctgctgggggccgcggtctattacgccggggttatgccgctggataatatgattcaaaatagtgcttcgaccctggccagacaaaaagaaaccctgaactggatgcgcagtgaaatagataaaaaccatttgcaggttcaggtaaccaaaacaaataacccgcgtgcgctggtggaaaatagcgcccaggagatccatcttcccctgacggatgtgcatcaggatggacaaacgttatcgttcgtggtcagccgcgtgaacgtttatgaattaaagaactggctgcgggaaattaatcagacctccggcgtcaggctgcagaaaatgaaccttacgccggtggatcatctcagcgacgtgaaggctgaagtgcaactcacgtggggtaaaaccgcatga

SEQ ID NO: 125199 - DNA, 798 bp, Enterobacter cloacae
atgaacagcgttgcgctgatgcgggacgtctacccggtggggttcgcgatcgcgagcgcggtgttaggcggcatggtgggcagttttctcggcgttgtcgccgaacgcgtgccggccatggtaagggaagaggagggatgcggaaacctgctctttccgtcctcgcactgcccggtgtgccagcacgcgctggcggcctgggagaatattccgctggtgagctggctgcttctgcgcgggcgatgcagccagtgcaaaaccgctatcccgctgcgaatctttctggttgagctggtttccgccctgttttttggcctgacggcgtggtgtatgcccgacgttcaggcgctgttttctctgtggctgctggccggctttttactcccgctgacgatgattgactggcggcatcaattgcttccggattgtctgacccagccgctgctctgggcgggactgttgcttcatgcgttcgatcaccaactgccgctacgcgacgcgctgctcggcgcggtggcgggctatatgtctctttggttgctgtactgggcgtttcgtctggctaccgggcgggaaggtctgggatacggtgatttcaagctgctggcggcattaggtgcctggtgcggctggcaggccctgcccacgattgaactcgcggccgcgttgagcggtatcattgggtattttgctttaaataattcaaataaaaataacctcactatttctttcggaccttacctttcttttgctggaatagttgtgtttattgggcagcagtttgctttcatattttaa

SEQ ID NO: 125200 - DNA, 435 bp, Enterobacter cloacae
atggttaaatcattgttaattgctgttaatgaaaagctatcgtgcgacgatcttggcaaactcttgttacgacttgccgtcggtgggttgatgctctttcacggtttgcacaagttattcggcggcgtgggctttatcagcggcatgctggtggaaaaagggttgccggggtttatcgcctatggcgtgttgattggcgaagtggtggcaccgatgttgattattgtcggcctctttacgcgaccggccgcgctgatgctggcgtttacgatgattgtggtatggcttatggtaggaatgggtgaaacgttcgccctcgataaggttggggcatgggcgattgaaagcctggtgtacttctttattggctcgctggcggtggcatttttaggggctgggcggtttgcgctggggaaagcaccggcgtggcgttga

SEQ ID NO: 125201 - DNA, 1221 bp, Enterobacter cloacae
atggaaaagcattacgtcggttctgaaattggtcaattgcgtagcgttatgctgcaccgcccaaatttaagtctgaaacgtttaacgccatcgaattgtcaggaactgcttttcgatgatgtgctctcggttgaacgggcgggcgaagagcatgatatcttcgcaaacacgctgcgcgagcagggtgtggaagtcctactgttgaccgacctcctgacacaaacgcttgatattacagaagcgaaagcctggctgctggagacgcaaatctcggactatcgcctcgggcctacctttgcgggcgacgtgcgcggctggctggcggacatgccgcaccgtgaactggcgcgcagattaagcggcggattaacctacggcgaaattccggcggccatcaaaaatatggtggtagatacccacacggccaatgactttattatgaagccgctgccgaaccatttatttacccgcgacacttcctgctggatttataacggcgtgtccattaacccgatggctaaacccgcccgtcagcgtgaaaccaataaccttcgggcaatatatcgctggcatccggcatttgccgacggcgattttattaagtatttcggcgacgaaaatattaattacgaccacgctaccctggaaggcggcgacgtattagtgattggtcgcggggcggtattgatcggcatgtccgaacgcacgacgccgcagggcgtggagttcctcgctaacagcctgttcaaacaccgccaggccgagcgcgtgatcgccgttgagctgccaaaacatcgctcctgcatgcacctcgacaccgtgatgacccacatcgacgtggacactttctccgtctacccggaagtagtgcgcaaagacgcccagtgctggacgctcaccccggacgggcgcggcggcctgcaacgtacccaggaaaccgacctgctgcacgccatcgagaaagcgctcggcattaaccaggtgcgcctgatcaccaccggcggcgacgcctttgaagccgaacgcgagcagtggaacgacgccaacaacgttctgaccatccgtcccggcgtggtgattggctacgagcgcaacgtctggactaacgagaagtacgacaaagccggcatcaccgtgctgcccatcccgggcgatgagctgggacgcggccgcggcggcgcacgctgcatgagctgcccactggaacgcgacggaatttaa

SEQ ID NO: 125202 - DNA, 1452 bp, Enterobacter cloacae
atgaaaatctccagaattgcattggctatggccactcttacggtagcctcttctgcgctggcacatggctatatcgaatcccctgccagccgcgcttatatgtgtaaacagggacaaaacattgactgcggtctggtggaatatgaaccccagagcgtagaacgtgcctccggtttcccgtcagggagcctgccgccggatggcgaactcgccagcgccgggattgccaactactcgcagcttgataagcaaagccagaatgcctggaccaaaacgccgatgacagccggggtacatcagtttgtctggcaccacaccgcgccgcacaaaaccaccaactggcgctattacatcaccaaacaaaactggaacccgaataagccgctgacccgcgaccagttcgacttaacgccgttttgtacggtaaacggtaacggccaggcgcccgcaatgacccagtcgatgaactgtaacgtgccggaacgtaccggttatcaggtgatttacggcgtgtgggaaattgccgatacgcccaacagtttctatcaggccatcgacgtggacttcggtaacggcggcaacgtcacgccggatgaaaccccggccgccgcctccgtctggagcaaaacgctgagcggccaggttgcaggtaacaacctcaacgtgggcgataaagtgattgctcgcttcttcgatgccaacggcgaaatcgcctccatggccaccgagctgactatcgcctcggctcaacagggagatgccaaccagtgggcctacgatctggcgcaaaaaattaacagcgctcatcacgacgtgcgcgtcggcgtgaaggatgaaagcggagacgttagcccggttcacggcgcaaacagcgtcttcgtaaaagaagacagtacgctaaagtcagtggctatctcttatgaagagcaaaaagcggtggttaatgaatccattgccgtgactgacctgcattacagcaaagtgactcacggtgccgcgacggtgacattccacgtcaatacgcagggtgacgtgaaccttgaagcacacgtattgaaccatcccggagcggaaaaaggctatctgaagcaggatatgaataacagcgaccaggatgtgaccatgaacctgacaaacgtcacgccagggcaccacatgctgaaatactacgccaccaataaagccggcaccctgttcgcgcaggacgtgctggatatgatgctcgaaggtgaagcaacctccggcgataccggtaaatctgattttatcttcccggataaccttgcctcttataaggcgggcaccgtggtgttgcagcccaaagacggtaagacctacgagtgcaagccattcccgtacagtgggtactgcaagcagtacagttcgacctctacccagttcgagcccggcgtgggttcagactggaaagaggcgtgggtgttgaagaactga

SEQ ID NO: 125203 - DNA, 573 bp, Enterobacter cloacae
atgaacttgcttgcattgacgcaccccgatttggtttttatcaacccgccgcaccgtacccctgaagcgctgatccgctggctcgccgaaccgctcgtcaggcgaaacgtcatcggcgatcaagagacatttatccagagcgttttacagcgtgaaagtgaaggtcccacggctctgggcgaagcacttgccgttccacacggtaaaaccgagacggtgcatcaggcggcgttttgtctggcgctctttgacgacccgatacgctggccggggctggagggggatgaagaggtcagaatggtcttcctgctcgccattccccctgcagaagcaggcagcacgcatatgcagctgctcacgacgctaaccagcctgttgacggaagaccgtgtgcgtgagcagcttctggcggcacgcacccgggaagaggcgctgtctgccctgagtacggaagaaccgcacattgaggatgcggtgcccgcgcgttcccttctcatcccactggtgctgggcactgtcgctatcgccgcctttttacaggcaggtttaagctgggtgcgcggcatccattaa

SEQ ID NO: 125204 - DNA, 1002 bp, Enterobacter cloacae
atgataaaacgtaatttaccgttaatgatcacgctgggcgtgtttgtgctggggtatctctactgtctgacccagttccccggttttgcctcaacgcgcgtgatttgcaacatcctgaccgataacgcctttttaggcatcatcgccgtcgggatgacctttgtgatcctctccggtgggatcgatctctccgttggctcggtgatcgcgtttaccggcgtgttcctcgccaaggcgatcggtttctgggggctctcccctctggtagcgtttccgctggtgctggcgatgggctgtgcgtttggcgcctttatggggctactgatcgacgcgctaaaaattcccgcttttattattaccctcgccgggatgttcttcctgcgcggcgtgagttacctggtatcggaagagtccatcccgattaaccacccggtgtacgacacgctctccagcctggcgtggaaaatccccggcggtggccgtctgagcgcgatggggttattgatgctgggcgtggtagtggtaggtatcttccttgcccaccgtacccggttcggtaatcaggtttacgccattggcgggaacgccacgtcggcaaacctgatggggatctcgacccgcagcacgaccatccgcatctatatgctctcaaccggcctggcaacgctggcgggtattgtcttctcggtgtatacccaggcgggctatgcccttgcaggcgtaggcgtggagctggacgcgattgcctctgtggtcattggcggcacgctgctcagcggcggagtggggacggtgctgggaacgctgttcggcgtagcgatccaggggctgatccagacctatatcaactttgacggcacgctcagttcctggtggaccaagatcgccatcggcattctgctgtttatatttattgccctgcagcgcggtctgacggtgctctgggagaaccgtcaaagctcgcctgttactcgcgtaaacacctcggtaacagagcgataa

SEQ ID NO: 125205 - DNA, 1023 bp, Enterobacter cloacae
atgtcccgttcgctttcgcaaaccggtgagtcaaagcgccgctttaactggccaaccggcacgccgcaaatcgcagcgctgctggtggtgttactggtggatagccttgtcgcaccgcatttcttccagattattgttcaggatggtcgcctgtttggcagcccgatcgatattttgaaccgtgccgcgcccgtcgcgctgctggcgattggtatgacgctggtgatagccaccggcgggattgacctctcagtcggcgcagtgatggctattgccggggccaccgcagcctccatgaccgtggcgggccatagcctgccggtggtactactggcggcattgggaaccggcgtgctggccggactgtggaacggcattctggtggcggtactaaaaattcagcctttcgtcgccacccttattttgatggtggccgggcgcggggtggcgcagctgatcacctccggacagatagtcacctttaactccccgagtctggcgtggatcggcagcggcaatttcctgttctttccaacaccggtgatcgtggctctggttacattagtggtgttctggcttttcacccgcaaaacagcgctcggcatgtttattgaagcggtggggatcaacattcgtgcggcacgaaatgccggggtcaatacgcggctgatggtgatgctgacctacgtgctgagcggcgtttgcgccgccattgccggggtgattgtcgcggccgatatccgcggggccgatgccaacaatgccgggctctggctggagctggatgccatcctcgcggtggtgattggcggcggatcgttgatgggcgggcgctttaacctgctgctctcggtcattggcgcgctgatcattcagggcatgaacaccgggatcctgctctccggttttcagccggaactcaaccaggtggtaaaagcggtggtcgtactctgcgtgctgatcgtccagtcaccgcgctttgtcagcatcattaaggggatccgtggccatgataaaacgtaa

SEQ ID NO: 125206 - DNA, 585 bp, Enterobacter cloacae
atgtcatccattaacattgatgttgcccgcccaactggaatttattttatcattgaacgactgtattcccgcgatggacttatgccttctattggggaaataagcccctctttgacacaggtgcatcgtacagtcattcagctaaaacgtaagcaagatatgtttatggatggtataaaagtaatcccaaaagatattaccctttggcaacagataaaatatcttacgggttcaaaagtcacgactaaagataccgatgcgttagtgtatacgaccgattttatcggctcccttgttgccactacacctttaggcaatattgagcatgaaagcattcctcgcttcctcacgacagagtctattcactcccttccgcaagcagtgagttatgggcgtgatcccatcccacaggtacttctttatggtcgtaaggatattgtcttctttatggacaatggtggtaaaggtacgccaaccgctattgcaaagtataaccacaatactcgtgaccttgccataatcaaagatcagctggaagctggtaaaacaatgaaggaactgctttctaagggagcaaaattatga

SEQ ID NO: 125207 - DNA, 471 bp, Enterobacter cloacae
atgagtaagaaaagccatatcttgagtctattcatccttattattgctgcctttatctttggcagaagcacgtatgttgaatacctggcatggtactatggaagcgataatttagtcttcaatgaagttaatatcgccttactatcaagtttatttaacggactctattttgctctttcagcaagtattatctacgcatcacttatgttattaaaaagaattcccaaaaatatcgtcgcttcttgtctacttcagttctgtatcaacatcgggctatatacactttttgttgcagtagagagaggatatagtaaattgcatactttaggctcgggtgctactgatatcacccacagctattttttaggggcgttgctgacgagcacactcctgaccgtcgcgatcgtgagcgttatacatgctaagtttctttcttcaaagcataaagatgggttacataaaggcgtttga

SEQ ID NO: 125208 - DNA, 1845 bp, Enterobacter cloacae
atgccgattcaggttctaccgccgcagcttgcgaaccaaatcgccgccggtgaggtggtggaacgtcctgcatcggtggtgaaggaactggtggaaaacagcctcgatgcgggagctacccgcattgatattgatatcgaacgcggcggggcgaaacttatccgcattcgcgataacggctgtgggataaaaaaagacgagctggcgctggcgctggcgcgtcatgcaaccagtaaaattgcctctctggacgatcttgaagcaataatcagcctcggctttcgcggcgaggcgctcgccagtattagttcggtttcccgcctgacgttgacctctcgtaccgctgaacagcaggaagcctggcaggcatacgccgaaggacgcgacatggatgtgacggttaaacccgcggcgcatcctgtcggtaccacgctggaagtgctggatctgttctacaacacccccgcccgacgcaagtttatgcgtaccgaaaaaaccgaattcggccatatcgacgagatcattcgtcgtatcgcgctggcgcgttttgacgtcaccattaatctcagccataacggcaaggtgatgcgccagtatcgcgcggtggcggagggcgggcagaaagagcgccgtttaggggctatctgcggaacgccatttctggaacaggcgctggcgatagagtggcagcatggcgatctcgctttacgtggctgggtggccgacccgaacgccagcagtgcggctttctctgaaattcagtattgctacgtgaatggccgcatgatgcgcgaccgcctcattaaccacgccattcgtcaggcctgtgaagacaagcttggggccgatcagcaaccggcttttgtgctttatctggagatcgacccgcatcaggtcgatgttaacgttcaccccgccaagcatgaggtgcgcttccatcagtcgcgtctggtgcatgattttatctatcagggcgtgctgagcgtattgcaacagcaggttgagcctgcattgccgctggaaaaagacgattcctcaccgcgtcccatcccggaaaaccgtgtcgctgcgggccgcaaccattttgcgcagcccgctgtcgcgcgagagccggaaacgcctcgattctcaaccggtgcgagcacgacgcgtccgacgggagcaaactatccgaacgctcaacccggctataaaaagcagcagggggcgttgtaccgtaagttgctggaaacgcctgctgttgagcgcaaagatcacgttgcagtggcgacaccgtcccttgaagggcacagccagagtttcgggcgagtgctgacgattatcgcaccggatatggcattgctagaacgcgacggcaaattgcagcttctggcgttaccggttgccgaacgctggctcaaacaggcgcaactgacgcctggggaaaatgcggcctgtgcgcagccgttattgatcccggttcgtctgaaaatatccgctgaagaaacacgggtattgcagcgtacagaggccctactggcgcaaatgggcattgaaatggtgctcgaaccacaacatgtgacaattcgcgcagtgcctttacccttacgccaacaaaatttacaaaacttgattcctgaactgataggctacctggcgcagcaaacatcgtttgaggccgccaacaccgcgcagtggatcgctcgccatctggccagcgaacatacaccgtggagtatggcgcaggcgattaccgtgctggcggaggtcgaacgcctctgcccacagctggtgaaagcgccgccgggtgggttattacaacctgttgatttgaaaacggcgatgaccgccctgaaacatgactga

SEQ ID NO: 125209 - DNA, 600 bp, Enterobacter cloacae
atgttcaaaatacttttgattgaccgttgtcactttacccgcgcggggtttgaagcatggctcaatcattccggtttattcccgggacattacgttgtgaccgggctgaacaatcttttcctcgccagagagcacattctgcaatggaaaccctcactggttatcgctgacctgcatggtttcaggcaggatactccccatttccagcaattctcttccttactgaatgccagcgaaaaactcccctttattatgttgcaatcgggagaggacagagacatgacggcctggctggagaacttcccggtctggtcttcactcatgaaaaatgcccgtcttgaggaactcgccacggttattaatgacgcgttaatttcgggctcagacacgcacagaccaacagtggccacgccgttgctgacccgccaggaggagaaagtgctgacaatgtggatggacggcgcaagcaatcaaaaaattgccgctcacctgagtatcaatgggaaaacggtatatacctacaagcgaaatatccgcatgaagctgcatatggacacgcgcttttccccgtttttatctccgcagggtacagaaaactga

SEQ ID NO: 125210 - DNA, 318 bp, Enterobacter cloacae
atggagcaatattttgcttatgagaatgaaggtaaggggaaaactgcctatccctggctaatcaatatgcagcatcccgtggccaatgtgatgaagcatgttctggtcgcccccgcagttgagcttagccacctgggaggcattcagccgcctgcgaaagtgtgccctgtcgttgagatagcgggtaagccctgcgtggttatgatgcacatgatggcaggcatatcgccaaaagagttaggcgagcgtgtcgccgatcttactcaagaccgggcctcattgcgggatgcactcgattttttgatcaacggttactaa

SEQ ID NO: 125211 - DNA, 480 bp, Enterobacter cloacae
gtgctttaccgtcctgtcgacagcaactgggcatttgggattgatgccaactacgtgaaacagcgtgactggcgcagcgcgcaggacatgatgaagttcaccgactacagcgtcaaaacgggccatctgaccgcctactggacaccatcattcgcgcaggacgtactggtgaaagccagcgtcggccagtatctggcgggcgacaagggtggcacgctggatatctccaaacacttcgacagcggcgtcgtggtgggcggttatgccaccatcaccaacgtctcgccggacgagtacggggaaggggactttactaaaggggtctatgtgtcgattccgctggatctcttctcgtcaggcccaacccgcagccgtgcggcagtgggctggacaccgctgacccgcgacgggggccagcagcttgggcgtaagttccagctgtatgacatgaccagcgataagaacgttaacttccgctga

SEQ ID NO: 125212 - DNA, 1344 bp, Enterobacter cloacae
atgatgattactctgcgcaaacttcctctggcagttgccgtcgcagcgggcgtaatgtctgctcaggcaatggccgtggatttccatggttatgctcgttccggtatcggctggacggggagtggcggcgaacaacagtgcttccaggcaaccggtgctcaaagtaaataccgtcttggtaacgaatgtgaaacctatgcggaattgaagctgggccaggaagtgtggaaagaaggcgacaagagcttctacttcgacaccaacgtagcgtattccgtagcacaacagaacgactgggaagccactgacccggcgttccgtgaagccaacgtgcagggtaaaaacctgatcgaatggctgccaggttccaccatctgggctggtaagcgcttctatcagcgtcatgacgttcacatgatcgacttctactactgggatatctctggtcctggtgcgggtctggaaaatatcgacgtcggtttcggtaaactttctctggcagcaacccgctcttctgaatcaggcggttcttcctccttcgccagcaacagtatttatgattacaccacccgcaccgcgaacgacgtctttgacgtgcgtttagcgcagatggaagttaacccaggcggcacccttgagctgggcgttgactatggccgtgctaacccacgtgatgactatcgtctggttgacggtgcgtctaaagacggctggatgttcaccgctgaacacacccagagcatgctgaaaggctacaacaagtttgtggttcagtacgccaccgactccatgacctctcagggtaaaggcctgtctcaaggttctggcgtaggcattgatggcaataccggttttgcctatgacatcaacaacaacggcagcctgctgcgtatccttgaccacggtgcaatctctctgggcgatcgttgggacctgatgtacgtcggtatgtatcaggatatcgactgggataacaacaacggcaccaagtggtggactgtaggtgttcgtccaatgttcaaatggacaccaatcatgagcaccttgctggaagtgggctacgacaacgtcaaatcccaggaaactggcgaaaccaacaaccagtacaaaatcaccctggcgcaacagtggcaggctggcgacagcatctggtctcgtcctgctatccgcgtcttcgcaacctatgcgaagtgggatgagaagtggggctatgactacaacggtaacccagcgaataaccctaacttcggtaaagcggttaaagatggcttcaacggtggttccttcggtcgcggcgacaacgatgagtggtccttcggcgcccagatggaaatctggtggtaa

SEQ ID NO: 125213 - DNA, 954 bp, Enterobacter cloacae
atgaaaatgaacaaaactcttcttgccctttgtttatccgcagggctgctggcaagcgcgcctgccgtcacgctcgctaacgtgaacttcgttccgcagaatacaacatctgcaccagccattccggcggcgacactgcaacagctggtctggacgcctgtcgatcagtctaaaacccagaccacccagctctcaacgggcggacaaacgattaatgttccgggtattagcggtccggtcgcagcgtatagcgtacccgctaatatcggtgaactcgccattaccttgaccagtgaagtcaacaagcaaacaagcgtatttgcgccaaatgtgctgattcttgatcagaacatgacgccatccgcctttttcccaagcgaatactttacttatcaggaacctggcgtgatgagcgccgatcgtctggaaggtgtcatgcgtcttacgcctgcgctgggacagcaaaaactctacgtgctggtctttaccactgagcaagatctgcagaaaaccaccacgctgcttgacccggccaaagcctatgcgaagggcaccggcaacgccgtacctgatattccagacccgattgcacgccacgtcaccgacggaacgctaaagctgaaggtgaaaacgaacagcggttccagcgtgctggtcggcccgctgtttggctcctccggtagcggcccggtaaccgtgggtaataccgctgcacctgcctataccgcgccagctgccaccgcagccgcaccggtcgctgccgctgcaccagcaccggcgaagaaagctgagccggtactgaacgacaccgaagaatacttcaacaacgccattaagcaggcggtgaagcgcggcgatgtcgataaagcgctgaaactgcttgatgaagccgaacgtttaggttcaaccactgcccgttccacctttatcagcagtgtaaaaggcaaggggtaa

SEQ ID NO: 125214 - DNA, 1341 bp, Enterobacter cloacae
ttgagtacattaacgctagttttgacagcagtgggttcggtattgctgctgctgtttttagtgatgaaggcgcgtatgcacgccttcgttgctttgatggtggtttctattggtgcaggtctcttttccggtatgccgctcgacaagatcgctgcgacgatggaaaaagggatgggaggcacgctcggcttcctggcgatagtggtcgcgctgggcgcgatgtttggcaagattttacatgagacgggcgcggtcgatcagattgccgtcaagatgctgaaatccttcggccacagccgcgcgcactatgcgattggtctggcgggtctgatttgcgcgctgccgctgttcttcgaggtggcggttgtgctgctgattagcgtggcattctctatggcgcgtcataccggtaccaacctcgtgaagctggtcattccgctgtttgcgggcgtggcggcagcggcagcgtttctgttgcctgggcccgcgccgatgctgctggcctcccagatgcacgctgactttggctggatgatcctgattggcctgtgcgccgcgatcccgggaatgattattgccggcccgctgtggggcaacttcattagccgttacgttgagctgcacattccggatgacatcaccgagccgcatttgggcgaaggcaaaatgccgtcctttggcttcagtctgtcactgatcctgctcccgctggtcctcgtgggtctgaaaaccatcgcagcgcgttttgtgccggtgggctctaccgcctacgaatggtttgagttcattggtcacccgtttacggcgatcctggtggcatgtctggtggctatttacggcctggcgatgcgtcagggaatgccgaaagaccgcgtgatggagatctgcggtgccgcgctgcagcctgcgggtattatcctgctggtgattggtgccggtggcgtgttcaagcaggtgctggtggattctggcgtgggcccggctctgggtgaagcgctgaccggaatgggcctgccgattgcggtaacctgcttcgtgctggcggcggccgtgcgtattatccagggttccgccaccgtggcgtgtttaactgcggtgggtctggtaatgccggtgattgaacagctgaactactccggtgcgcagatggcagcgctgtctatctgtatcgcgggcggttcaattgtggtctctcacgttaacgacgctggcttctggctgttcggtaaatttaccggcgccaccgaagcgcaaaccctgaaaacctggacgctgatggaaaccatcctcggtacgacgggtgcgattgtcgggatgattgcctttacgttgctgagctga

SEQ ID NO: 125215 - DNA, 1338 bp, Enterobacter cloacae
atgtcactgctgacggcatccgataaggcattgtggcgtcttgcactgccgatgattttctccaatatcaccgtgcccttgctgggtctggtcgacacggccgttattgggcatctcgattcccctgtctatcttggcggcgtggcgattggcgcgacggcaaccagcttcctctttatgctgctgctctttttgcgcatgagcaccaccggactcacggcacaggcgtatggtgcaaaagatccgttacgtctggcgcgggcgctggtgcagccgctgattcttgcgttgggcgcgggcgcgttaatcgttttactccgtgatcccctgattgaccttgcgctccatatcgttggcggcagtgaggcggtactggagcaggcgcgacgttttctcgaaatccgctggctcagtgcgcccgcttcgctggcaaatctggttctgctgggttggttactgggcgttcagtatgctcgtgcgccagtgattctgctggtcgtgggaaacctgctcaacatcgtgctggatctctggctggtgatgggcctccatatgaacgtgcggggcgcggcactggcgacggcgattgctgaatacgggacctttgtgatggggctgtggatggtctggcgcgtgctggcgatgcgcgggatctccctcgcgctgctgaaaaccgcatggcgcggcaatatccgtaagctgctggcgcttaaccgtgacatcatgctgcgctcgctgcttctgcaactctgcttcggcgcgctgacggtcttcggtgcacggctggggcctgaaatcgtcgcggtcaacgcggtattgatgacgctgctgacgtttaccgcctatgcgctggacggctttgcctacgcggttgaagcacattcggggcaggcgtatggagcgcgtgaaagcgggcagcttcatgatgtctggcgggcagcctgccgtcagtcaggactggtagcgctggtgtttgccgtggtctatgcctgcttcggcgaacagattgttgctttactgacctctctccctgcgctgcgcgaactggcgagccactatctcatctggcaagtcatcttaccggtggtgggtgtctggtgttatctgctggacggcatgtttattggtgcgacgcgcggggcggaaatgcgtaacagtatggccgttgcggcggcgggatttggcctgacgctgctgacgcttccctggctgggtaatcacggtttgtggttggcgcttgcggtctttctctctctgcgtggcctgtcgctggcttttatatggcgccgccactggcaaaacaatacctggtttccttcgcgtcacgatatatcgtga

SEQ ID NO: 125216 - DNA, 567 bp, Enterobacter cloacae
atgagtaaagataattctaaaatacctgtttttgaacccattgcagatggcgcaatatcagcaccgtttacagcagatggaaggttgataccggtcgtgattatagatactttagaggacgtcacactgtgcaatgtaatatccatccataatgacactccacccggagatgtaatctctatttggggatatcataggttctcaaaaaaaaatgttttcttagagcttatttttaaacaacctttagaatatcacatggttattaaattcgatctaagcaaatatcttcttctcgttgattgcataattcaatcacgtgcaatctaccttcaaccaggaaagcctggtcataagctaagcaatgatatcaacgcaccaaaaattttaattgaaataccggctagaaccacctttgagaaatgggactcaatattacataagcatcttcacaagagattcgtaaaaaaaggaatcagccgaagtgagataaaaaatgcggttgatgaatttatatcagtccgccgtgacacttgggggccacgaatgtatacagaaaagaaacgttaa

SEQ ID NO: 125217 - DNA, 555 bp, Enterobacter cloacae
atgccggaccttatagaatactcaacttggagtttgagcgataaaattgcactagcatcttttttcgttgcttttatctcggcaataatttcagtatgctcattaatatacgctggcaaatccttacgaataagtaaacaacagcatttagaacgttacggagttgttgggatatatctaatcgatgtttataaatggaataaagacgatttcagttacatttcttttgcgctgaatttcgttaatgattgtactatacaaaacaccatttcaaaattacaccttcaattagactgctatgataaaaacaaagcgaaatacgtaatcaaacttcccccttccccatcaatttccccagtagatcttaggaattattctagtttactggaggaaccaatatgcttgcaagaaaaatcagcacgttcaggatggataacattcaaactcccggatataattaaaaaagatcttttcgttgaattatataccatcatagccactaccactgatggaaaaacctcaaccgtcgacacgcacataattaataaggtttaa

SEQ ID NO: 125218 - DNA, 1959 bp, Enterobacter cloacae
atgagccaaatacataaacacgacattcccgcaaacattgcggaccgttgcctgatcaccccggagcagtaccacgagaaatatcagcaatcagtttcccaccctgacgccttctggggcgagcagggacacatccttgactggatcaaaccttatcagaaggtgaaaaacacctcctttgcgcccggcaacgtctccattaaatggtatgaagatggcacgctgaacctggcggtgaactgcctggatcgccatcttgccgaacgcgggaatgaaaccgccatcatctgggaaggcgacgatgcctcacagagcaaacacattacctataaagaactgcatcgcgacgtctgccgtttcgccaacgtcctgctggaaaaaggcattaaaaagggcgatgtggtggctatctatatgccaatggtgccggaagccgcggttgctatgctggcctgcgcgcgtatcggcgcaattcactcggttatcttcggcgggttctcaccggaagccgttgccggccgtattgtcgattccagttcaaaactggtgatcaccgcggatgaaggcgtgcgcgccggacgcggtataccgctgaagaaaaacgtcgatgaagcgctgaaaaacccgaatgtcaaaacggtcagtaacgttatcgtgctgaagcgtaccggcggcaagatcgactggaacgagggacgtgacctgtggtggagtgacctgatcgagaaagcgagtgaccagcatcagccggaagagatgaatgctgaagatccgctgttcattctttacacctccggttcaaccggtaaaccgaaaggcgtgttgcacaccaccggcggttatctggtttatgcggccacgacctttaaatatgtcttcgactaccacccgggcgacatctactggtgtaccgccgacgtgggctgggtgaccgggcacagctacctgctctacggcccgctggcctgcggtgccaccacgctgatgtttgagggcgtgccaaactggccgaccccggcgcgtatgtgtcaggtagtcgacaagcaccaggtcaacattctctacaccgcgccaacggcgatccgcgcgttaatggcggaaggcgataaggccatcgaaggcactgaccgctcttcgttgcgcatcctcggttccgtgggtgaacctattaaccccgaagcctgggagtggtactggaagaaaatcggcaatgaaaaatgcccggtgatggacacctggtggcagaccgaaaccggcggcttcatgatcactcctatgcctggcgccacacagctgaaggccggttctgccacgcgcccattcttcggcgtacagcctgcgctggtggataacgagggcaacccgctggacggggccaccgaaggcaacctggtgatcgtcgactcgtggccaggccaggcgcgtaccctgttcggcgaccacgaacgctttgagcagacctatttctcgacctttaaaaacatgtacttcagcggcgacggcgcgcgccgtgatgaagacggttattactggatcaccggtcgcgtggatgacgtgctcaacgtttctggccaccgtctggggacggctgaaattgaatcggcgctggtgtcgcatccgaaaattgctgaagccgccgttgtcgggatcccgcacaacatcaaaggccaggcgatttacgcttacgtcacgctgaaccacggcgaggagccatcacccgagctgtacgccgaggtgcgcaactgggtacgtaaggagatcggcccgcttgctacgccggacgtgctgcactggaccgactcgctgccgaaaacccgctccggcaagattatgcgccgtatcctgcgcaaaatcgcggcgggggataccagcaacctcggtgatacctcaacgctcgcggatcctggcgtggtggaaaaactgctcgaagagaagcagtccatcgcaatgccttcctag

SEQ ID NO: 125219 - DNA, 585 bp, Enterobacter cloacae
gtgaatcttagccaggaaatcattggggtcgttctggcaggtggcagagcaacgcggatgggagggaaagataaggggctccagctcctgaatggcaaacccttatggcaatgtgtcgctgatacgctcgccggccaggtgacaaccctggccatcagcgctaacaggcatatcgacacgtatcagcacagcgggtatgccgtgtatcaggataatattgaggatttcccggggccgctggccggtatgctctcagtgatgcagcagtcgaacggtgagtggtttctgttctgtccctgcgataccccgtttattccatcctgtctcgttgagcgtctggttcagcttcgtggcacagcatccgtggtttgggtacatgacggcgagcgcgaccaccctgctattgccttaatgcaccgctcgcgagcgccttctctggaggagtatctggcggcgggagaacgcagagtgatggtgtttatgcgccagtctggtggccatcctgttgattttagcgatttcaaatcggcttttgtgaacgtgaatacgagtgaagatttgcagaggatgcaggagaagagatga

SEQ ID NO: 125220 - DNA, 579 bp, Enterobacter cloacae
atgaataaatactacagctttgaacgaaacaaatccgggctcgtaattatattattattgagttttttgcttttgggttgttttcttgcctatatcatttgggtgagcatgatttcaatgagaactgttctaatgaactctgttccagaatggttaacgtatataacgataggctctatttttggtctcatattctccgggagagctacctattatagacctattggtaaaacatcaaattatgtcattgaacgtttttgggtggggtttagttgtggctttattctttcattagggatttatgatgttttcgtgtttatgtcgaagggaaacgttattacatacgaagcggcttatgaaataacatatcctggcccaagaaaggggcggtttggtcattgtgaagcagggttgtggtttaaggactataacacaaagcgttggattcaattgtgtacaaataaaaaagcacttcaagcagcgggtgaaccaggagcagatgctgtaagggttagtgctcattcaaatggaatagggtcttatataattgattacaacttcataaaatccaagagttaa

SEQ ID NO: 125221 - DNA, 147 bp, Enterobacter cloacae
atgaaaaagaaaatgacacttcatatatttattcttatttttatctatatgactaccgcttttttttgcactgggtgtagttaccaggattgtaacggcagttatttatactggggaggtttatttaccgttatccggtgttattaa

SEQ ID NO: 125222 - DNA, 1371 bp, Enterobacter cloacae
gtggtggttcgcgataaggagcatcagacgcaggacgtggcggacctgagccgcgacacggcgaatgcaaacggcagcatcgacgccatcttcgataaggagaaagagcagcgcaggatggaggaggcgcagcttatcggggaaatcggcagcaaggtggcggatatcgcccgcacgcagggtgaaatcgcgaaacaggaggccatgaacgacccggcagcgctccgcgccgcagaggagaagctgagggctgaaggcaagagcaaccctacccctcaggagatagccgaccaggccggacgcacggcaattgaacagtacggcacgggcagcgacatgcagcgcgccatccaggcggctaccgctgccgctcagggtctggcgggcggcgacatgaccgccgcactggccggagccgccgcaccgtacgtggcggagattatcggccaccgttccgggctgaacgacgggatggaaaaagccgccgcccacgcggtggcgaatgcggtgctggcggcaatgcaggggaaagacgcgcttgcgggtgcggctggagcggcggtcggggagctggcgagcggaattgcgctggagatgtacgggaaggatgttgctgcactgagtgaaggtgaaaaacagaccatcagcgcgctggcgactcttgccgcagggatagcaggcggcgtagcgggagacggcacggcaagcgccattgcgggggcgcagtccgggaagatgacggttgagaataactcgctgagtctgccgaaagggatgatggactatggcatggcagcaacgtcctggaatcagtatgcagaggacaacgggctatcagcagaagagaaacaggcggggctggataaactgtcgaaaggggatttacctgaagaggctaatatcactaaagcgatagtggaaggttatcaggatggggtatttatggctggagccatttatcttggcccgacagtcgcagtgggaaaatgtgttaccggtgcggttattggtggtggtgctaactctttattccaatacatgagtatgtcgccaggcagtgagtttagttactacagcgctgccgtagcggcaggtgctggttatctggcgccaggatataagattggtggtaacactcttattaatatgggtggtgcatttatgactgatggacccagcttaactggtcagggtggcgccattgcggggtcgctggccgggggttattttgggaagtatgctccaaagctgattgcgccatacgtgggggcgttttccggtgtgataggagatattggttctgcttctgtctttgaaatatccaatgatacagttaaagaattaataaaaaacaaggataaaaaacaatga

SEQ ID NO: 125223 - DNA, 546 bp, Enterobacter cloacae
atgatttttggtaacccatatcgatttgccatttggacggactatatccctcagtggggagattcctataagaatggtttgtttcatctaataattaatgggaatttatacccacataatattagaacatcaacgttgtcttctgatctcttagagattacagataatgactgtgctctgatatcacatcctcaaaacgaggatatattctccttatctactgaacatgcttttaaggaactgctaaatttagcctatccagaaccatctcaagaggacgaatacccggagcaaacatttgattatattatcacttcatcaaacatcagtgaatcaggtggacgtttttttgctatcgcagatggtaaatcattgagaatcattgggggcgtaacagaacgcctagtagaagatagatctggcaatggaaatagatgggagtatattaacaaaccatttatagaagatatcacgctatctaaaaaagaggttgatattattatggctgatgttaaaaaatatgccgaggcttttttaaatgaataa

SEQ ID NO: 125224 - DNA, 8733 bp, Enterobacter cloacae
atgaataaacgtctgtaccgtatcgtctttaataaagcccgcggcatgctgatggtcgtttccgagctggcgcgcggctgttcgggcggatcgtcttcctccgggatcgggcacgcgcttcagcgtcttgtctgccgcgtcggcgcactcagccttgcgctgtggctggcctctggtgccgtcacggtgcaggccgccgggattgtggcggacgcctccgcgcccggtaaacagcagcccaccgtgatcagcaccgctaacggcacgacgcaggtgaatatccagaccccgtctgcaggcggcgtgtcccgcaacacctacagccagttcgacgttggccgggacggggccatcctcaataacgcccataaaaatacctcaaccgaactcggcggaatggtgaccgccaacccgtggctggcgaaaggcgaggctaaagtcatcctcaacgaggtgaacgcacgcaacccgagccagctcaacggctacattgaggtggctggacaaaaggccgacgtgatcattgccagcccgtcgggcattacctgtgacggctgcggctttatcaacgccgggcgcgccacgctgacgaccggcaccgcgcagatgcaggatggccggataaccgggtatcaggtggagcgcggtgagattaccgtgaacggcaacgggctggatacctccgggcaggcgcacaccgatatcatcgcccgggcggttcaggtgaatgcggcgattcacgcgcaggatttacgcgtcactaccgggcgcaacacggtggatgcggcgcatgaaaaggtgaccgcccttgcggataacggtgcggcaaaacccgtcatggcgctggatgtctcccaggtcggcggcatgtacgccgggaaaatccgtctgatcgggacggaaaaaggcgtcggcgtgcgcaacgcgggcaatattggcgcagaagccggaacagtcacactctccgccgacgggcgtattgaaaacagcggcacggtctggtcttccgctgacgtcgccctttctggcaccgacgccatacaaaacagcggctccctcgctgcacagcgcaacgtcagcctgacgggcaaaacgattgccagcaccggcacgctggcggcaggcgtgcagcccgatggcaccacgggccgcgacggcgatctgacgctcaacgccagcggcaaacttgagatgcatggactgaatgtggcgggtggcaacatcaggtccacgggacaacagggggtggatgcatcaggcagcgtgacgcaggccaacaccattacccttaacgccggacaaggcgacctcagcaccgccggtgcggaagtcatcgcgaatgacgccctcagcgtcacggcaaccggcacgctggataacagcagcggcctgctcgccgccgaccagctcacgctcacggcaaaacgcctgcaaaatcataaaggccagataagccagagcggcacgcggggtctgacgctgaaccatcaggacggcatcgataaccgcgaaggcgtgattgccgccaacgccacggtaaacgtcaacgccgcgtcgctggataaccgtaaaggccagatcgttgccgccgataccggcagcgccctgacgataaaaacggctggcctgacggacaaccgcgagggtgaactggcagcagcaggcagcatcagcatgagcgccgacactctgaacaacagcagcggctttatcagcgcggaacacggccacgtcgggctaaccagccgcaacgcgctggctaacgtcggcgggacaattgccgcccacgataccctgacgctcgacagcgccgggttgaacaacgacgaagggttaattcagtccggggcggacatgatcgtcgacactcacgggaaccgcctgtcaaacaagacgaccctgacgaccggcggcatcgtcagctttggcaccctgaacgtcaacgccggcagcatcagcaatcagcacggcatgctggccagcgcgaaagaaaccgtcgtaacggccgcggacgtggacaaccgcagcggtaccctgagcgccacaggttcgctgaatcttcatgtcgggtcgctggaaaatacgcaaggcacactggtatccggtgaagatgcgcggatagacgcctcccggatcgccaaccagaaagggatgattgtcgcccagggcgatcttgccgtcacggcacagcgtctggacaacgacagcagcgggctggtccagagcggaagggatctcacgctggccgttgacggtatcagcaaccgcaacagcggggacacgggcggcatcgttagccagggaaacctgagcataaccacgaccgatctgcaaaatgatgcgggcgtactgctcgtcgaaaaacgggccacgctggacgccgcgcgctttagcaacatcgccgggacgctgtatgccctggatacgctgacgcttgccacgcgcagcgataccgacaaccgtcagggggtcattcagggaagcgggctcgttcttgatacgcacggctggcagctggataaccgcgaggggacgatttacagcctggcggacatgcagctcgccaccgccgcgctgaacaaccagaacggcacgctgggcgcaaaaggggagttcacgctgcgggcaacctcgctggataaccgttccggcgggcgtctggtgggtgagcaggagatgaccctcaacctcgagcgtcttgataaccaggacgggcagatccagtctctcggtgaactggcggtgaacgccgtttcgggtgcaatcgacaacacgctgggcctgatacgcagtggcgcaacggtgacgctcaacgcagcctcgctgatcaatcgcaatacgcaggctgaagataagggtattgaagggctggatgtgaaaatcaacagccagcagttcgataatgctctgggaacaacgcgggcaggcaatacgttatctgtcaccaatgccggaaccctggataacacgcagggtgagctgtccgccgcgggggcgctgtcgctgagcggcccggctttgcggcttctcaacgctgacggggtcgttattggcggggagaacgtcacgcttgaagccgacgcgctaaccggagacggtcagcttctgtcgctcggcgatatgacgattcacacgcagcagagttttaacaacgcgggtgatgtgattgccaacggcagcatgaccttcaccacgccgggtagcgtgaccaacagcggtaacctgctggcgggcgcaaaactggatctcagcgccgccagcctgttcaatgccgcgtccggcgagattaccgccggcgcgacctggctgaccctctcctcaagcctgagtaattacggtcttatcgacggcagccagacgtggctgcgtgccgaaaccttaacgaacgcgggtaccggccgcatctacggcgatcatctgtcgattcaggcgacaacgctcaataacctcgcccaggacggaacggcagcgaccctcgccggacgccagcgcgtggatatcggggcacagacaatcaacaaccgcgaccacgcgctgatctacagcgacggggcgatggccatcggcgggcgcgtggacgacaacggctttgccatcgggcaggcgcaaaccctcaacaaccacagcgcgaccattgagtccgcgggcgacatggcgctctccgtcggccagctcaacaacttcaacgaccatttcagcaccgaagtggcgctcatctccacggagcagatccacgagtaccagcaaaagggatcgcccacccgctgggatgcggatgctgacggcgtgttcgtcgaccacaactcggccgaccacctgcttaacctcaacaccccggacgataccggggccaacaacgacaacttttacgagtacacctacacccgtaccattgaagaagaggtgattgccgaaagtgacccgggcaaaatcctcgccggcggcaatatgctgattacggcaaatcaggttctgaacgataaaagccagattatggcggggggaacgctcgggatcttcgcaaattcggtggataacgtgatgccggaaggcagccgatggatcaccgatgcaggctcggttacacactacagccgtaaatccagaaagggtggcgactcgcagggaaaaagcacctcggactacgccccgcctgtggttatccagtcgatcaccctgtcgccgggcaaaatggaaggcaacagccaggccgatggcagcggcatgaccctttcccccgccagcgcccacaaaacagatgccacgctcagcgggacgggtagcctggcggtaggtgtggacaccacctcaccgggttccgctgccctgccctccggcaatgcgcctggcaaatggattgaaacgcccgccagcgatgcgcagggcgtggtggtacgtgccgcagggccggacatccgtctgccggacagcagcctgtttaacaccctgccggatccggatgcgcactacctgatcgaaaccgatccacgcttcaccaacaacaagacgtggctcggcagtgattatatgcagaatgcgttcaccacagatccggataacgtgcacaagcgccttggcgacggctattacgagcagcgcctggtacgcgagcagatcatcgccctcaccggcggccgctacctcggcgactaccgcgacgatgagacccagttcagggcgctgatggatgcgggcattgctttcgggcagacgcatcagcttgtaccgggcgtagcgctcaccgcagaacagatgagcctgctgacggaggacatggtctggctggtcaacacccgcgttcagcttgccgacggcagctggcagacggtgatggtgccgcaggtgtatgttcgcgtacagcctggcgacatcgacggctccggcgcgctgatggggggccagaatctggtcatgaacctgaaccgcgacctggtcaacagcggcaccctgcacgggcgtgacgcggtgcagctcagtgccgacaacatcaccaacaaagcaggaacgatacagggggctgacgtcagcctgttcgcccgcacggacatcaacaacaccggcggcacgatttccggcaaaaatgccgtgctggccacggccgggcgcgacatcagcctcaccaccaccacccgcagcgcacagagcagcagcgggaaaaacagttttgagcgcaccaccgtagagcgcgtggcggggatatacgtccagggcgatgacggtaagctggtgctgaacgccgggcgcgatctcaccctgaccggcgcgcaggtcgttaacaacggcagtggcagccagacggtgctcagtgccgggcgggatctgaacctcaccaccgtcaccacctccgccagcgataacctgacgtgggataaaaataactggctgaagcagtccaccactcaacaggttggcagtgaggtggccagcggaggcgatatcctgatgatggccggacgcgacgtgaatgcgcaggccgcaacagtggaggcggacagcagcctcgccgtcagcgcgggacgcgacatctccgtcaccgccgccaccgacagcagcacatttgagtcgcaccatcagtccaccggcagcagcggcgcgttgtcgaaaaaaaccgtgaccacgcacgatgtggtgaaccgcgagaccgcccagggcgccctgttcagcggcgacagcgtcaccctgcaggcgggcaataacctgcgggtgcagggcagcgatatcgtgggcgataacgatgtccggctggcggcaggcaacagcctgaccgtgaccacggcggaggagcacagccaggagagccatcagcgccaggagaaaaaatccggcttctccggcacgggcggcatcggcgtcagctacggcagccagagcctgaaggtcaccgacaccgcgcaggacaccacccatcgcggcagcaccattggctccgtgaacggcagcgtcacgctgagcgcgggcaatgacctgagcgtccacggctcggacctgattgccgcgcaggacatgacgctcgccgggaaaaacgtcagcatcaccgccgccacggagagcggcacgcagacccacaccgtggagcaaaaatcttccggcctgacccttgcgctctccggcgcggcgggtggtgctctcgacagcagcgtgagcacccttaagcaggccagggagaccggtaacgaccgcctcgccgcgctgcaggcggtgaaaggcgccctgacccttggacagggcgcgcagtccgtcatgctcgaccaggccaccggcaaccagaagggtaacgacaacaccgtcggcatcagcctctcttacggcagccagtcgtcaaaatccacccagaccagcacgcaggccaccgcaaaaggcagcagcctcaccgccgggaataacctcaccgtggtggcaaccgacggcgacctgctggttcacggcagccagcttgatgcgcagaacgacctgtggctacaggccagccgggacgtgaacctgatttccgcactgaacacctccacgctcgacggcaaaaacgagagccacggcggcagcgcgggcgtcggtatcggctacggctccggtggcgcgggcatctccgtctccgccagcgtgaacggcggcaaaggaaccgagcgcggcaacggcaccacccgcaccgaaaccacggttaacgcgggggatacgctcacaatcgtcagcggccgcgatacgaatctcaccggggcgcaggtcagcggggagagcgtgctggccgatatcgggcgcaacctgaccattaccagtgaacaggacaccgaccgttacgacagcagacagcaaaacgccagcgcgggcggcagcttcaccttcggcaccatgagcggctcggccagcgttaattacagccgcgacaggatgaacagcgactacgcctccgtgaaggagcagaccggcatcttcgcaggctccggcgggttcgacatcaccgtcggcggccacacgcagctcgacggcgcggttatcgcctccaccgccacggcggataacaaccgcctcgacaccgggacgctcggctggcgggatatccataacaccgctgaatacgacgtggagcaccagagcgcgggcatcagcaccgggggcagcaccggcggcagcatcgcggggcagttcgccgggaatatggcgagcaacctgctggtcggggcggacagcagcggcagcgcggagggcaccacgcgtgcggccattgaaaacggcacggtggtggttcgcgataaggagcatcagacgcaggacgtggcggacctgagccgcgacacggcgaatgccaacggcagcatcgacgccatcttcgataaggagaaagagcagcgcagaatggaggaggcgctgcttatcggggaaatcggcagccaggtggcggatattgcccgcacgcagggtgaaatcgcgaagcaggaggccatgaacgacccggcagcgctccgcgccgcagaggagaagctgagggctgagggcaagagcaaccctacccctcaggagatagccgaccaggccggacgcacggcaattgaacagtacggcacgggcagcgacatgcagcgcgccatccaggcggctaccgctgccgctcagggtctggcgggcggcgacatgaccgccgcactggccggagccgccgcaccgtacgtggcggaggttatcgggcaccggatggggctggacgacgggatggaaaaagccgccgcccacgcggtggcgaatgcggtgctggccgcgatgcaggggaaagacgcgcttgcgggtgcagcgggtgccgccgccggggagctggcaggtggtattgcgctggagatgtatgataaagacctcagcgacctgagtgaaacggagaggcagaccatcagcgcactggcaacccttgccgcagggatagcgggcggtgtcgcgggcgacggcacggcatccgccatcgccggggcgcagtccgggaagacggtggttgagaataactatctgagcagtaagcatatagatgcctggtccgccgaaatgaagtcctgtcaggccagcggtggcgactgcagcggcattatcaaaaagtacgaagagttgagtacggcacagcagaagcaactgataagtgactgtgcagcccacccgtcgacctgccagcagaaatacggtgatgtactgactgacagtctggcggtgaaacaggcaatagatcgtgctctgggtgaagatatcccgatcaagatggtctacgatctgacggcgacttttgcgcagcaaatgcaggcggaaggggttgtcgcgaccaacaaagtctcggaagcactccagaaagaatacggtctggatgaagttcaggcgggaatagtcgcgagcgctgcggcatcagcatttggtggaattagtaaagcaggtaaaagtagcccgctaccaacgccctcggcaacttcagcaaaaaatggtttgagttatcagtccaaccctaaacatactccggggcaacaaggctatagtttcaatgccgggactgaacctaaaaattctatagatctatttggagtatctatagttggtggtaaaaaacggtatgcaatggatgccgaaggaaatgttcatcaatttactaatacaaatgatgggacatggcattggtctggtagtacaggagacaaaaccgttccaatgaaaaaaagcgatgtaccgaacagtgtaaaaaaagaattcggcctaccaggaaaatggagataa

SEQ ID NO: 125225 - DNA, 513 bp, Enterobacter cloacae
atgcgctatggcgaattgacggttcattgtccgcagctcgaggacgtcgcgctaagtgaagccgaagtgctgggcgcgtcggtctggctctggatgcattcccttaaccaccgtgacgcgccgctgcacgtcctgcccgtggtgctcttgcccatcattaaacgccagcagtacgtgctgatagaggagaaaggacgcccgatctttttcctgagctgggcatggatgagcgaagaagccgaacgccgctatctcacccaggagacggtcgtcctgccggaagaagactggtgtaacggcgatcggatgtggtttcgcgattttattgccccctttgggcacgcggaagccctgtttcgcctggtacgcgaggagatttttccgcatcacgttgcgcgctttctgtggcatcgcggcaatgagaaaggccgtcgtatcaaaacgttttatggcaggcaggtcacgcgcgaagcgctgctgaactggaaacacacgcacccgctgcacggataa

SEQ ID NO: 125226 - DNA, 1695 bp, Enterobacter cloacae
atgttgaaaagggaatttcgaccagtcgcaacgaagcgcaccggcttttttatctgtgctgttctcagcctttcatcgggtgccagcgccgcaccgggtgatgaaccgtttatcctgcaacagcagcgtcagcaggcgctggaaacccaactgacgccccaggcgcctgacgttcggctgcaatctccggcaacacgtaacgaaagcggcgaatttgccgccgaaacgccctgcttcaccatccatgacgtgacgctgacggggcataacgccctcccgcactgggtaccgctgcagcgcatcgcgaatcagtccgtcgggaagtgcctcggcgcacggggtatcaaccacgtgatgagcctgctgcaaaaccggctgatcgcccacggctggacaaccgcacgcgtgctggctcccgctcaggatttaaaaagcggccatttaacactggccgttattccggggaaaatacgccacgtcacattgaccgataacagccgtcgcgggttatggctttacagcgccttcccggcacatgacggtaatctgctcgacctgcgggatatcgagcagggtctggagaacctccagcgcctgcccaccgtccaggttgagatggatatcgttccggctgaacagccgggtgagagcgatatcgtgataacccgccagcagagcaaattctggcggcttggcctgtcgcttgatgattctggctcgtcgtcaacgggccgctaccagggtgggctaacactgtcgctggataacccgctggcgctgagcgatctcttctggttttccatgaaccatgacctgcaaaccgggccggaaaaaggcaaccaaaacctcagcgcccactggtctgttcccgtgggctggtgggcattttccgttaccggcagcgattaccactatcaccagaccgtggcggggctaaacggcgacattcgttacagcggcaaaagccagagtctggtggcgcaggccagccgggttctgcatcgcagcagcgcccaaaaaaccacgttcacctgggacgtggagagccggacaacgaaaaactacatcaacgacacggaagtggaagttcagcgccgccacgtctcctcctggaaggccgggcttcagcatcgccactatatcggcccggcaacgcttgatgcaggcatcaactatcagcgcggcacgcgatggtttggcgcccagccagcccccgaagaaacgttcgatgaagccacggcgctgggccgaattcttcgcaccaacgcacgcctgagcctgccgttcgcactcagcacgcagcacttgcgttatgacgtggcctggcagcgtcagaccagcaacacgccgctcacttcacaggatcagttcgccatcggcgggcgctggacggtgcgcggcttcgacggtgaacgcacgctcaacgccgatcgcggctggctggttcgaaacgatctctcctggcagaccccgcttgccggaaccgagttctatctggctgccgactacggcgaggtcgctggcaacggcacggagtacctgacgggcaaccatctggccggtggcgcggcgggcttgcgcggtgcgctctggaaagtgggatacgacgccttcgcgggcgtgccgttctcccgcccggacggttttaaaaccagcccggcaaccttcggcttcaacctcaacatggatttctga

SEQ ID NO: 125227 - DNA, 1470 bp, Enterobacter cloacae
atgacctttcgccattgtgtcgctgtggatttaggcgcatccagcggccgtgtaatgctcgccacctgggactgcgaccagcacaccctttcccttcgcgagatgcatcgttttgcgaactgcctgcaaaaacaggacggctttgatacctggaacattgatgaacttgagacggagatccgtaccgggctcaaaaaagtctgcgatagcgggatcctcatcgacagcatcggcatagatacctggggcgtcgattatgtcttgctggacagcagcggcgctcgcgttggcctgcccgtctcctaccgcgacagccgcacggatggcctgatggcgcacgccatcgcccggctcggtaaggatgatatctacgggcgcagcggcatacagtttctgccgtttaacacgctttatcagctgcgcgcgctggtcgagcagcagccagggctggcagcagacgttgcccatgtgctgctgatcccggactacctgagctatcgcctgaccggcaacatgaactgggaatacaccaacgccaccaccacccagctggtcaacatcaactcggataactgggatgagcacctgctggcctggacgggcgcatccccggcgtggttcggtacgccgacccatcccggcaacgtcatcggccagtgggtgtgtccgcaggggaatgcgatcccggtcgttgccgtggcgagccacgataccgccagcgcggttattgcctcaccgctttgcggtaaagatgccgcctatctctcttccggcacctggtcgctgatgggctttgaaagcaaaacgccttacgtcagcgaggaggcaatggccgcaaatatcaccaacgaaggcggggccgaagggcgctatcgggtgttaaagaacattatggggttgtggctgctccagcgggtgcttaaggagcagaaaattaccgatctgcccgggcttatcgccgacaccgaaaagcgcaaagcctgtacgttcctgattcatcccaatgacgatcgctttatcaatccggcgcacatgagcaccgagatccaggccgcctgccgcgaggccggacagcctgtaccatcaagcccggccgaactggcgcgctgtatttttgacagccttgccctgctttatgcggatgtgctgagcgagctggccagccttcgcggcagaccgttcgacacgctgcatattgttggcggcggttgccagaacgcgctgttaaaccagctttgtgccgatgcctgcggcatcaccgtggtggcgggcccggtcgaggcctccacgctcggcaatatcggcattcagctgatgacccttgacgaactggccagcgtggacgatttccgctcggtagtcaccgctagcggcagcctgaccacgttccttcccgatccctgccatgaaattgcccgctaccggacgcagtttcagcaaaaccgactgactaaggagctttgcgcatga

SEQ ID NO: 125228 - DNA, 834 bp, Enterobacter cloacae
atgaccgtactgcacagcgtggacttttttccggcggatggctcgcctgtggcgatagagccgcggctgccgcaggcggctttcccggagcatcatcatgattttcatgaaatcgtgattgttgagcatggcacgggcatccatgtctttaacggtcagccctacaccatcagcggcggcacagtctgctttgtgcgcgaccacgatcggcatctgtatgagcataccgacaacctgtgcctgacgaacgtgctctatcgatccccggacgcattccagtttctcgcggggcttcatcagctactgccgcaggagaaggaaggacattatccgtcgcactggcgcgtgaatcaggccacgctgcagcaggttcgccagattttgcttcagatggagcagagtcaggacggacaggagatgcatgcgctcgccacgcgcgagatgttgtttatgcagctgctggtggcgttgcgccgcagtaacccggtggagggggagagcagcgaagcccgcctgaaccagctgatggcctggctggaggaacattttgccgaggatatctgctgggaaatgctggcgagtcatttttcactctccctgcgcaccctgcaccgccagcttaagcagcgaaccgggcagacgccccagcgttaccttaaccgactgcggctgataaaagcgcgccacctgcttcgccacagtgatgaaagcgtcacggatatcgcttatcgctgcggtttcggcgacagtaaccacttttcgacgctgtttcgtcgggagttcagctggtctccgcgtgatattcgccaggggagggacacctcactacagtaa

SEQ ID NO: 125229 - DNA, 849 bp, Enterobacter cloacae
gtggccgcaccgttaattcttcgcaaagatgacttttttgcctccgctgaacaagctgttgcggtggcggatcgctatccgcaaaacgtctttgctgaacacacgcacgaattttatgagctggtgctggtgtggcgcggcaacggtctgcacattctcaacgatcggccttaccgcattacccggggggatctgttttacattcgtgccgaagataaacacgcctacgcctcggtgaatgacctggttttacagaacgttatctactgccccgatcggctcagccttaacgttgactgggcagcatgcattcccggcttcaacggcgcgaaaggctcgccacactggcgtttaagcagcagcggcatgactgccatccgtcaggccatttccctccttgaacaggagagctataaaaccgatccgctggctaacccgatggcggagatcctcttcgcacagctggtgatgatgcttaaacggcatcgctacgagacggataacccctctgccacgcagcaggagaccctgctcgataagctgattgccacgctggcggccagcctgaataaaagctttgttctggaaaagttctgcgagcaggagcagtgcagcgaacgtgccctgcgtcagcagttccgtacccagacgggcatgatggtaaatcactatttgcgccagctgcgcatttgccacgcccagtatttgctccagcatacagagttcatggtcagtgacgtggcaatgcgctgcggctttgaggacagtaactacttttcggtggtctttaatcgcgaggtagggatgacgccggtgcaatggcgtcatcacagtcgcagggcggcgtaa

SEQ ID NO: 125230 - DNA, 1374 bp, Enterobacter cloacae
atgataggcagcttaaccgcccgcatctttgccatcttctggctgacgctggccctggttttaatgctcgtgttgatgttgccaaaactcgactcacgccagatgacggagcttcttgacagcgagcaacgtcagggcgtgatgatcgagcagcatgttgaagcggagctggcaaacgatccgccgaacgatttgatgtggtggcgcaggctgtttcgcgctatcgacaagtgggcgccgcccgggcaacgccttttgctggtcaccagcgaaggccgcgtcattggggccgatcgcaatgaaatgcagattatccgtaactttattggccaggcggataatgccgatcacccacagaaaaagaaatatggtcgggtagagatggtcggtcctttctcggtacgggatggggaagacaattaccagctctatttgattcgccctgcgagcagttcccagtccgatttcatcaacctgctgtttgaccgtccgctcctgctgctgattgttaccatgctggtcagctcgccgctgctgttatggctggcatggagtctggcaaaacccgcacgtaagctgaaaaacgccgccgatgaagtggcgcagggtaacctgcgacaacaccctgagctggaagcggggccacaggaattccttgccgccgggaccagttttaaccagatggtcagcgcgctcgatcgaatgatgaccgcacagcagcgtctgctatcggacatctcgcacgagctgcgcaccccgcttacgcgtttgcagcttggcaccgcgctgctgcgccgccgcagtggggaaagtaaagagctggaacgtattgaaacggaagctcaccgcctggacagcatgattaatgacctgctggtgatgtcacgcaaccagcagaaaaacgcgctggtcagcgaaacggtgaaagccaatcacctgtggcatgaggtgctggacaacgcggcgttcgaagcggaacagatgggcaaatcgttcaccgtcaacttcccgccgggtccatggccgctgtacggcaaccccaacacgctggaaagcgcgctggagaatattgtgcgtaatgctctgcgctactcgcataccaagattgaggtggcgttctcggtagataaagacgggatcaccgttatcgtggatgacgacggtcctggcgtcagccctgaagatcgggagcagattttccgtccgttctaccgtactgacgaagcgcgcgaccgtgaatccggcggtacaggtttgggtctggcaattgttgaaaccgccatgcaacagcatcgcggctgggtgaaagctgacgacagcccgctgggcgggttgcggttaacgctgtggctgccgttgtataagcgttcgtaa

SEQ ID NO: 125231 - DNA, 762 bp, Enterobacter cloacae
atgttccacgatattacgcacatcctcacggctctgattaaaggcgcattccccctggatcaagtgcactttgtcacgcctgccgagaataaccgcacatcaccttgtctctcagttatcctggaaacccgctgcgaagccttcttttccgcatccgggaacgtcccgctgcattcttcaaactcgctcagaataagcttcggcaaacagcagctgacgcttcagctctaccggggcaacgctcttatacaacagcagcagattgccagaagagggccccggacgggcgcgtttctcctgcaaacgctcaatgagctgcagatgcagccaactgagcaggacacggccaggctggtgatattaagtctgctcagccactgccgcgatctgcttggcagtgatatccacactgatagccgcagtcgcgcattattcgaagccgttcgtcgctttattgacgaaaagcatgcctcggcgctgacccgggattccgttgccggggaattttatatttcccctaactatctctctcacctttttcagaagaccgggaacgtcgggttcaatgaatacctgacgcagacccgtctggaacacgcccgccagctgctgaaaggctatgacctcaaaattaaagatatcgccgcacgctgcggatttaccgacagcaactacttttgccgtctctttcgtaagcacaccgagcgctccccttccgaatatcgtcgtcagtatcacagccagctgatcgccaaaaaatag

SEQ ID NO: 125232 - DNA, 1383 bp, Enterobacter cloacae
atgacgcaattaaccatgaaagacaaaattggctacgggctgggtgacaccgcctgcggcttcgtctggcaggccacgatgtttctgctggcctatttctataccgacgtcttcggcctgtcggcgggcattatgggcacgctttttttggtctcccgcgtgctcgacgccgtcaccgacccgctgatggggctgctggttgaccgcacccgcacgcggcacggccagttccgcccgttcctgctgtggggcgcgattccgttcggcatcgtctgcgtgctgaccttctacacgccggacttctcggcgcagggcaaaatcatctacgcctgcgtgacctacattctcctgactctggtctacaccttcgttaacgtgccgtactgcgccatgccgggcgtcatcaccgctgacccgaaagagcgtcacgccctgcaatcctggcgtttcttcctggcggcggcggggtcgctcgccatcagcggcattgccctgccgctggtgagcatcatcggcaaaggggacgagcaggtgggctatttcggcgccatgtgcgtgctggggctgagcggcgtggtgctgctctacgtctgcttctttaccaccaaagagcgttacacctttgaggtgcagccgggctcgtcggtggcaaaagatctcaggctgctgttcggcaacggccagtggcgcattatgtgtgcctttaagatgatggcgacctgttccaacgtggtgcgcggcggggcgaccctctacttcgtcaaatacgtgatggatcacccggagctggcgacccagtttttactctatggcagcctcgccaccatgttcggctcgctctgctcctcccgcctgctgggccgctttgaccgcgtcaccgccttcaagtggatcatcgttgcctactcgctgatcagcctgctgattttcgtcaccccggcggagcatatcgccctgattttcgccctcaacattctgttcctgttcgtctttaacaccaccacgccgctccagtggctcatggcctctgacgtggtggattacgaggagagccgcagcgggcgccgcctcgacgggctggtgttctccacctacctgttcagcctgaagattggcctggcgattggcggggcggtagtgggctggatcctggcgtacgtcaactactccgccagcagtagcgtgcagccggttgaggtgctgaccaccatcaaaattctgttctgcgtgatgccggtcgtactctacgcgggcatgttcatcatgctgtcgttctataagctcaccgacgcccgcgtggaggccatcagccagcagttgatcaagcaccgcgcggcccagggggaagccgttcccgacgccgcgacagccgcatcccattaa

SEQ ID NO: 125233 - DNA, 1611 bp, Enterobacter cloacae
atggaaatcactaacccgatactcaccggcttcaacccggacccgtccctctgccgccagggcgaggactactacatcgccacctcgaccttcgagtggttcccgggcgtgcgcatctaccactcccgcgacctgaaaaactggtcgctggtcagcaccccgctggaccgcgtgtcgatgctggacatgaagggcaacccggactccggcggcatctgggcgccgtgcctgagctatgccgacggcaaattctggctgctctacaccgacgtgaagattgtcgactcgccgtggaaaaacggccgcaactacctcgtcaccgcgccgtccattgaggggccgtggagcgagccgatcccgatgggcaacggcgggttcgacccgtccctgttccacgacgacgatggccgcaaatattacctttaccgcccgtgggggccgcgccaccacagcaacccgcacaacaccatcgtgatgcaggcgttcgatccgcagaccggcaccctctcgccggagcgtaagacgctgtttaccggcacgccgctctgctacaccgaaggtgcgcacctgtatcgccacgcaggatggtactacctgatggttgccgaaggcggcaccagctacgaacacgccgtcgtggtgctgcgttcaaaaacgatcgacgggccgtacgagctgcacccggacgtgacgatgatgaccagctggcacctgccggagaacccgctgcagaagagcggccacggttcgctgctgcagacccacacgggggaatggtatatggcctacctcaccagccgcccgctgcgcctgcccggcgtgccgctgctggcctccggcgggcgcggctactgcccgctggggcgcgagaccggcatcgcccgcattgaatggcgcgacggctggccgtatgtcgaaggtggtaagcacgcgcagctgaccgtgcccggcccgcacatggcggagcaacctgcggccgctcagaacagctggcgggacgatttcgacgccagttcgcttgacccggagctgcagaccctgcgcattccgttcgacgacaccctcggctcgctcaccgcgcgccccggctatttacggctctacggcaacgactcgcttaactcgaccttcacccagtcgaccgtggcgcgccgctggcagcacttcaccttccgggcggagacgcggatgcagttctcgccggtccacttccagcagagcgccgggctgacctgctactacaacagcaaaaactggagctactgctttgtggactacgaggaggggcaggggagaaccataaaggtgctccagctcgaccacaacgtgccgtcatggccgctgcacgagcagccgattccggtaccggagagtgcgcagagcgtctggctgcgcgtcgatgtggatacgctggtctatcgctacagctactcgttcgacggcgagacgtggcacaccgtgccggtaacctatgaggcgtggaaactgtcggacgactacatcggcgggcgcggcttcttcaccggcgcgtttgtggggctgcactgcgaggatatcagcggtgacggctgccacgcggacttcgactacttcacctacgagccgctatag

SEQ ID NO: 125234 - DNA, 207 bp, Enterobacter cloacae
atggcgcttacagatctcgcaatccggcatgcccggctgcttggcaaggcatataggctctctgattgtcaccgtctttatattcaggttaaccctagcgaactgcgctttgctcgttgggatgagaaaatgtggcctcttaaggttgatactttcgctgttcaagaaacgtcagacctcgtggggctggttatctggtttggctaa

SEQ ID NO: 125235 - DNA, 669 bp, Enterobacter cloacae
atgacttcactccatgatttagaatcagcttatcaacagcatcttaaaaataacataccggttagttcctcaggtcaagcgaatgatgcttttgaaatttatgcactttccttagtactcactgctgcacagcaagaaggtgctactatttcttttggaaccgtcaatagaaccattagccctacaaaacttatttttagatcttctccgggtcgtatttattctcaagctgctgattatgcccatgctcttataagctttccggatgagctttattttgaagcccatgttggagtttttgttgaagggttagctggcgtcgtgcacgaatgtgatgttttagtcatcgacgcaggagagggagatttctgtagacgaaactttgttcatccaaaaaaaacacatactatattaactgctgagtgtaaattttactctggtaaccttggaatttcattagggcgggaattccttggcacaacaattgatttagggaaagaagatagatttttcctgagcaatcgagatggtaaaacactggatagggtattagctcatcacaagaggcaaagatatttaggacttacaccattagatccagacgccgaattacagaccatatctcaatttaggacagcatttcgaaatcaaaaatcaaagaaaagataa

SEQ ID NO: 125236 - DNA, 468 bp, Enterobacter cloacae
atggaaaatatagatacttttttacgagaattgaaagagtcgtcagattcaaggtggattgcaaatgaggttgacgaaactttatctgaaggcatatcaatgaacgtaaaagaagctgcggaagatagtaaattcgatgagctagttatttttcaaaacctcccagcacaggaaagaaataaacgacaaaaatatgaaacaagtcgaccattttcagatgatgaaaaattagatgtagtaataaaagcgtttgaggtcgtgtacgtcgaactacctgctattagaaaatcagcaatattaaatctgactaaatttgatagcaacattcaaactatagttttttcatcatctgatgaagaaatcattgaaaagagaccaactcatgaaattgatagagaaaaggtaatcgaagaatccatcagatataaagaattactttctaactttatgacggaaataaagagatga

SEQ ID NO: 125237 - DNA, 177 bp, Enterobacter cloacae
atggatgatcgtggacggtatgtcagcaccggcgggttcagcaaagatgcgcgttgtgaagtagatctttcaacgatttcgctgacgctatggacgccgggcgatttggtacgtgtgttagtggaaaactacgaacaagtagatattgaaattaatcttttgattttacttaagtaa

SEQ ID NO: 125238 - DNA, 309 bp, Enterobacter cloacae
atgatgcaacttaatcttgccaaagtgctgttacttggggacgaaactaaggggtatattcgttatgaaatattctcaaaagagggagaacgccctgattatcctgaaaaaatagtggtttatcatgaaaaggtgttagaagcgaatggctataagtattgggctaaaatggatgaaatcatcagtctggatcatctcggattccagcaagagggatttcaaatgtcggtatcgccccacatgcgacctaatcgagatatattttcggcgatagaggaatgcaaaaaacattatcgtaaaacgtgctaa

SEQ ID NO: 125239 - DNA, 984 bp, Enterobacter cloacae
atgaccactctcgttttttcctattcccatgcagatgaagcactacgcaacgaacttgagaagcatctctccccgctgaagcgaaccgggaagatcacaacatggcacgatcgccgcatcgtcccaggccaggagtttgaacgtcagatcgaccactatttttcgcaagcagatatcatcctgctcctgatcagcagtgactttatcgcttcagattactgctatcaggtagagatgaaaaacgcactggagcggcataaccggggcgaggcggtggtcattccggtaattttaagagactgtgcctggcatcagttagaattcggcagcattatggcggcgactatcgacggtaaacccatcactaagtttgccacccatgatgaaggctacgttcaggtcgtcgaggccgtctcgcgtgccattgcccagatggaagcaaaaaaaacacagcaaaccaaacttatcccttcaccggctcagtcgaatccgatgtttcagggagtagattccgtttttacaccgcgttcaagcaacctttctctacccaagaagtttaccgatctggagaaagatcgcgccagacgtgagggctttggatatgttgctcgctattttgagaattcgttagacgaactcaaaaaacgtcatgtcggattagacatcgattttaatcgacttgatacggattctttcacctgtgctgtgtatatcaatggcagtaaggtcggccaatgtggcatctggcgcggcaatcaacatcatggaatgggagatatctgctatagccaggataatgttgttcgaaacagtgttaacgaaagtctgagccttgctgataacggccagactcttggtttccgtgctctgatgggtggcttcagtcgtggaacttcacgagacgaactattgaccaatgaaggtatgtcggaacatctctgggaaatgttttttggactaatcaagcaaagaatgtctcgataa

SEQ ID NO: 125240 - DNA, 1500 bp, Enterobacter cloacae
atgacactgattaacctaaaagatctcgaggcccatctttggcatgcagcccatatcatcactgggcctattgatgcgtcagattacaaaacgtacatttttcccatcctgttcttcaaacgcatttgtgatgtatatgacgaagaatttgccgatgcgatggagagcgttggggatgcagagcttgccaaagggaagatgtttcaccgtattcagatacctgaaaattgccactggcgcgatgttttcgctgagaccaaagacatcggtcaggccctaaaagactctttccgtggtatagaactggcaaactctaaactgcatggcatttttggcgatgccagctggaccaataaagaacgcctttctgatgagttgctggctacgttacttaatcacttcaataaggtgaaccttggcgtttctactgtccgtgacgatgatatggggcgcgcatacgagtatttgatcaaacgctttgcagacaaagctaacaagaaagccggtgagttctataccccacgtactatcgttcgtttgatggttaacattcttgatccaaaagccggtgagagtgtctacgatcccgcctgtggtactggtggtatgctgcttgagactatccaccatgtaaaagataacggtggcgatccgcgcttgctaaaaattaaaggtcaggaaaaaaacctgaccaccgaagccatcgcgcgaatgaacctgttcctgcacggtcaggaggatttcgatattgttcgcggggatacgctccgtgaacctaagtttttacaaagcgatcgtttagaaaccttcgactgcgttgttgccaacccaccatttagcttgaaggaatggggatacgatctgtggtcgaacgatccctatggccgtaagcaatatggcctggcgcctaaaacaaacggtgattttgcctgggttcagcatatgtttgcctcacttaacgacaatggacgtatggcagtcgtgttacctcatggtgtgctgtttcgtggcggagctgagggagtaattcgaaccaaattgctgaaagaaaatcgcatcgtggcgattattggtgtcgcttccaacctgttctatgggactgggattcctgcgtgtattttggtgctgcgcaaatcacgcccggcaacgcataaagatcatgtattgatcatcaatgctgaagaaatctataccaaggggcgtgcgcagaatacgctgtcaaacaaacaggctgatgacatataccaaatataccatgaccaagctcaacaggggccagatgcaaaagaaatcgaaggcgttgcacgctgggtatctctgaaggaaattgaagaaaatgacttcaatctcaatattactcgttatgtgcaaaagccacccgaagaagaaaccatcactgtggaagaggcgctcaaagattttcaacggaagctggctgagctggaaaaagccgaagaggagctggaagccctgcttatcaaagaagggttcgaggtatga

SEQ ID NO: 125241 - DNA, 1485 bp, Enterobacter cloacae
atgagtaataaaaagctggaagagctgctctggggagctgctgagtttcttcgcggccaaatcgacgcatcagactacaagcagtatgtcttccccttgctgttttataaacgcctgtcagatgtctatctggaagaatataatgaagcgctggaactccatgaaggcgatgctgaatacgctgccatgccgatgtttcaccgtttcaacattccctctgaggcagcttgggaaaaggtccgtaataccagtaaaaacattggtgaagcgattcagaatgcacttcgattaattgaagctaataacccgcgtttacatggtgtcttcggtgatgcacagtggaccaataaagagcgcctgcccgatcatctgctggctgatctgattgaacatttcagtaaaattccgctcggcattaaatctgttgcccaggatgatcttggtgaagcctacgaatatctgattaaaaagttcgctgatgattccggccatacggctgcagagttttacaccaaccgaacagtcgtgcatttaatgacgcgcattatgcgtttaaaaccgggtgaaactgcctatgatccaacgtgtggtactggcgggatgttgctaaatgcagtgatggatcttcgtgcaagaggggaagagtggcgctctgtgcacctttatggtcaggaagtgaacctgctgacttccgctatcgctcgtatgaatatgtttctgcacgatatcgaagaatttgatgtgctacgtggtgacactctggctgagcctaagtttattgaaaacgatcggctcaagcagtttgatgtaatttttgccaacccaccatattccatcaagaagtggaaccgggacaagtttgcagccgatccttatggacgtaatctctatggcgtaccgccccaaggatgcgctgattatgctttttacacccatatcatcaaaagtttgaaacccaataccggtcgcgctgccatgctctggccgcacggtgttctgtttcgcgattctgaacaagccattcgtaaacaggtgattgaatccgacataatcgaagcggtgattgggttggggccgaacctgttttacaactcgccgatggagtcttgcgtggtggtgcttaacagcaataagccagctgaacgcaaaaacaaagttttgtttatcaacggggttgagcatgtcacccgtgaacgtgctcatagtcgcctatccgatgaggatttggaggtattatgcgaggcttattttaatccggagaaaaaaagcgatataaccgctttagtggatatcgaagctattaaagaaaacctttataacctgtcaattccactgtatgtgcaagcaaaaaataacggcgaagtacatgatattgaacaggttatcgagacatggaaggttagtcgtttacagttgaaaaaacatgtaaataaattatttgataacctcgtgcagttaggttatgaggtgaagaagagtggctaa

SEQ ID NO: 125242 - DNA, 1161 bp, Enterobacter cloacae
gtggctaataaaaatatagttagatttggtgatatttgtcgagaggtgaagctctcttctaagtgcccaatcgctgatggttacgagcgttatgttggtttggagcatttggattcaggttccttaaatataaagcgttgggggattattgaggatgataatcctagctttacacgcgtctttaaaaaaggacatatccttttaggaaagcgccgtccatatttacgaaaggcggctatcgcggattttgatggcatttgttccggggacattattgtcttaactggaaaagattgtgtttcgaatgagtttttagcaagattaattcatactgataacttttggagttgggctgttcaaacttcttctggatctctttccccacgaactaaattcagcgctctgaccagcttatctttatctgttccggaattaaataagcaaattacttcaaataatattctaaaaaagttagatttatatttagatcggaaggaagaattattacttagtgcgcagcaattattaaaagctttactcactcgtgaaatatgggagaaacgaggggttgtaggttggaaagagtatagcatttcagaattaggggatgttaaattaggtcgacaaagaacacctaaatatactacaggaaattacacaaaaccttaccttagggttgttaatgtcttagatggtgaacttgatttatctgatgtggaagaaatggattttaacgacagagattttcagttgcacaaattatctgttaatgatgttctaattactgagggggatattacaagtgtatttaatgttggtagagtagcaatttataaaggggagatagatggttgttgcattcaaaatactttaattagatttagagctggcaaaaatattaatccttattttgcgttctttttatttagggctgcatattataatggtatttttgcttatcatgcaaatatgactacagtagcacatttaggtgctgagagatttagtaagataagggtgtttgttcccgatttaaaaactcaagaatatataattgagaagataagcggagttgattgtttaatatccactcttcagcaggaaattaaatttattaaaaacaatcttcgctcagccataacaaagaaattcatagggtga

SEQ ID NO: 125243 - DNA, 3063 bp, Enterobacter cloacae
atgtttaacgaacaaaacgtcacggaaaatggaattatcgatcgtttaataggtttaagcgaggtcaagtggacatactgccatggcgaaaacttgcccaaacaagcgcaggatatctttgttgatgagtggctaaaagacgcgctttgttcgttgaaccctgatatcggcagacaacctgactatgccgatgaggtcatttacaaactgcgaggagtggttttagaagcccgacataccggtttggtaaaggccaatgaaaacttccaggaatggttgatggctgagaaaaccttgccttttggcgagaatggcgaccatatcaccatcaatctgattgattttgacaatatagagaacaaccactttgtggtggcacagcaggtccactatgtcgcggccactgaagtctattttgatattgtcctttatgtgaacggtataccactggtagtaggcgaagttaaaaccgccacacgccctagcgtgacctggcaagacggcgccgccgatttcatgggcggcaaaaagtattactggaaaaacgttgaatctttctttgtacctaacttgatgtgttttgccagcgaaggtaaaacctttgcctatggtgccattaatgcccgagttaaagactgggggccttggcataatactgagcttcgtgatgagattctgccgggattggcctcggtactcaacagctgcgagagtttgttaaatccacagaccttattgcagctgctggaatcttttgcattattttcaaccgtcaaaacgggcaaaaatactccgcctaaacgcgttaaaatcctgccgcgttacccgcaatttgaagcagcaaaacaaatcgttgagcgtgttcggagaggctatccaaaaaaaggtctgatttggcatttccagggatcgggtaaatccttgttgatgctttacgccgctaaaatgctgcgtgccgacaatgcgttgaaaaacccaacagtactcatcgtagtggaccggcgagatctggacagccaaattaatgaaacctttggtggcgccgacgttaagaatctgattaaagtgcaaagctgcaaaaaattgggtgaatacattgagcaggatagccgtggcattttaatcaccaccatctttaaatttaaagatatcgaaattgacgataacaaccctaatggcctgaataaccgtgacaatatcattgtgttggttgacgaagcccaccgtacccaggaaggtggattaggcgagaaaatgcgctgggcattacccaatgcccacttctatggcctgactggtactccgatttctggcattgatcgtaatacattcaagttgttcggtgccgaagaagatccgggtcgctatatgagccgctatagctataagcagtcgatccgggatggcgcaactaacccggtgaagttcgaacctcggctggcagaactccgagtggatcgtgatgctatcaacgaagaattcgagcaattggctaccgaaaacaacctggatgaagaagaaaaagcagcattgtccaggcgtgcaggcaagctggctatcatgctgaaatcccccagacgcatggctgcagtaagtaatgatattgttgagcattttaccagccatgttatgccgaaaaagatgaaaggcatggtggtagtatatgatcgcgaagcctgcgtacagatgtattacctgctcggggaaaagcttggttttgatgcggttgaagtggttatgaacgttgaccaggctccggttaaagctgaagagggtggtaaaaaagataagctcaacaaggattggctcaaatggcatgacgaattggagctacctgttaaacaagccgatttcgaacgctggcagcacatcgatgcggaagagcaggtacagaaggatctgattgaatgctttaaagatcctgagcatccattacagcttattattgttaccgccaagctgcttacgggctttgatgcaccaatttgctactgcatgtacctcgataagcctttacgtgatcatacccttctgcaggctatgtgccgaaccaaccggctgtacgaaaccgatgctgtacgcaaggacatgggattaattatcgactacctcggcgttttcgaaaatctgcgtaccgctctggcctacaatcctgaagaaattgaaggggttgtagagggaatcgaggcatttaaagagctattgccgttacaactgaataaatgtctggccttcttccctggtgtggatcgttccatagaaggttttgaaggtattatggctgcgcaagaatgtctgccaactaacgagaagcgtgatgaattcgctgccagctttggagtgttatccaagttatggtcagctatcaatccagatccttttttgaccccttatcgtcaggactataaatggctggcgcaaatttatgaatcggtgcgtcctgtggggcagaccggtgcgcttgtttgggctgcccttggccccgaaacaattaagatgatccatgagcataccgatattaatcgtattcgcgatgatattgatgagttgatcatggacgagcacgctatttttaccctgaccactaaagaacaggaacaacgcgccaaacgcctggagattgatcttatggggcgtttacgcggtagccatgatcctaaatttgtggcattgggtgagcgtctggaaaaactgcgtcaggattatgaagctggtgttatcaaggctatcgactggttgaaaggtctattggatgctgcgaaagataccgtacaagccgagcgcgaaacgggtgagcgtcctgtaactgaagctgataataaacaggcgttgaccaagcttttcctggaaacacgtccggaaactacccctaagttaatcggtgatgttgtagagcaaattgataaaatcgtgaaagctacccgctttgatggctggcaaaattccaacagtggcccgcgtgaaatacaaaaagcgttaatgctcactttggcacagttcggtttaggaaaagatggtgagttatttcaaaaagcttatgggtatattgaagagcattactga

SEQ ID NO: 125244 - DNA, 1041 bp, Enterobacter cloacae
atggaacttatgaagtttgatgaggtaatcaaacatttaattaaacaaaaaagaacgttctctttattaatggggaatggttttagtatggcatatgatagcgaaatattttcttataatgcacttagtagatttttgtcatcaagggatgatccattaattaataaattatttgatgttataaagactaaaaatttcgaagtcgttatgcaacagctagatacaacgcttgcattgctcgaagcctttgactccagtaaagctcttcaagaaagcattagaaatgcgagcgaaaaactaaaagcaggattgcttagctcaatacatcaactgcatcctgagcatgtttttaaaataccagagcacaaggctgaagcatgtgctaattttttaaagttgtttgttaatagtggtggccatatattttcaactaattatgatatgcttctttattgggttttaatgcgtcaacatattgagaatgcaactgatggatttggacgagaacttgaaaatactgaagaggtgcttcgtggtgcagatgctgagtatggtgatttaatttggggtcctaataaagatcatcagaacatccattatttacacggtgcgttacatatttttgatgtaggggttaatattgaaaaagaacagtatagtaatgatgggtttctaatagaaaaagtaaagaaacgccttgaggttggtgactatccaatattcgtaactgctggtaatggagacgaaaaacttaatcatatccgtcataacagatatctatcacattgttttgaacagttgtcaaatttgaacggctcattgataacttttggttttaatttcggtgaatatgatgaacatattattgatgcgataaataaagcagttcatgctccttcaaaaagagaacctaaattgtggagtatatacattggtgtttactctgaagcagatgctaaacatattttaagcataaaagaaaaatttcatgcgaaagttactctatttgatgccaaaaccgcttgtgtttgggggggataa

SEQ ID NO: 125245 - DNA, 912 bp, Enterobacter cloacae
atgaaaacagcctggtacaacaaagcaccagcgttgaataaacccttacttgttctgtacgttctttcccagtacaagaaaggccatgagcgactattccagtttcaggatgaaatacaagatcaactacgagatttgctaaaacgctacgggccaaaacgcagcaactatgaagttcttatgccattctggcgcttaaagcatgatggcttctgggcactggaaggaacagaccctgctttacttagaagccctgaggaaccgaggctgcagatggtcttagataacaacgtgcacggtggctttgatattacttccttttcgctggtacaaaatcagaaatccttgatagattcactggcaaaacaggttgttgaacaatacttacctatagaatttcactctgcgttgttcaaggaactggagtttgaaacacctgggccatttgaggtaaatgaaagcccgaacgaccgtatagctctcgttcaaccagacatcgaaattatcactcaggatctctcgatagacgaaacaacccgaacagcattgattgaggccagaatcggacagggtaatttccgggcagaatgcctgagactgtatcccgcctgtcctgtaacaggtattacctttcagccattactgagggcgagccatatcaagccttggtccgcatgccaaactgcgaaagaaagattagatccgcataacggtctcatgctggcagctcatattgatactttatttgactctggctggatttcattcgctaatgaaggtgacgttctgataagcaatcaccttgattttgtaacatgcgataaactgaatttaccagagaggatcattgcattacctaaaccttcatacagctatttacaatggcatagggaatatattttcaagggctga

SEQ ID NO: 125246 - DNA, 753 bp, Enterobacter cloacae
atgaccgatacccgacacatcctccagacttttcaccgcgtctcaggccttgagctgcgcagcacatggcagagcacgcaggcctacaaacgtcactgtcatccccaactctctattggcgcgattgtggaaggccagacctgctgcgtgtgccatgacagggagtacatccttcatcccggggatctgattgtgatcccggcttatgcgccgcacagctgcaaccccatcgccgggcaagcgcgcagctaccatatgctctatatcgacaccgatcgtcctctggcactccaggtgatccgtaacgctacgttctttaagcacttccttgatattgttgagacaatgtcgcctgcatccgtggacaggctgctttctgcccttccccaccgtgcggataaccctgatgcgctgcgttcaaccagccagcatattcagcaggcacttcttgccgatctggctgcaccgccttcgcttgatgaacttgctcaacgcttctcgctacgcaaggagacgctgattcgtaccttccggcaggacaccgggctgacgccgggcagcttccttaatatctcccgcgtggaatacgccaaagcacggctgcgcgccggggatgatattgccgacgtaagctaccagagtgggtttgccgatcagagccatttccataagaccttcgttcgctatagcgccgcgacgccgcgccagtacgccacaggacgatcaatatcagacaataatcaggatacgtaa

SEQ ID NO: 125247 - DNA, 507 bp, Enterobacter cloacae
atgaacattcgcattcgccctaccaccttcaacgatgctgccaccctgcccgccattgaacgcgcggcgggcgagcgttttcgtgaaatcccccctctcgcctggcttgccgggggtgaggtgatttcaactgaagagcatctcaactatgccgaacgggggctaagctggctggcgctggcgaacgaccatcccgttgggtttatcctcgcagaggcgcacgcgacatcgctgtttattgtcgaactgtcggtgcatctggactggcagggaaaggggattggtcggcagctcattaacactgtggctgaccatgcccgcgaaggggggctgtcgtcgctgacgttgacgacattctgcgacgtaccgtggaatgcgccgttctatgcgcggctggggtttgactacgtcactgaactcacgcctgaactgcgtcagaaaagggaagatgagacagcgcacggcttagcgtttgactcccgctgcgccatgcgtctgccgctttga

SEQ ID NO: 125248 - DNA, 474 bp, Enterobacter cloacae
atgaaatacataaaaatctggctcattctggcccttaacctgatgattaccggcgctgcactggcgtggtatttctacacgccaccgctgtcggtggcctgcaatggatatctgaccttctccgacaaacgtgacagccacgatttcacgtttgacggggaggtcatcatgcagtttcaccccaacaaaaccgggtacatcacgctaaacggtaacgtggagaatgccccaaaccactgggaagtgtcccgccaggagatgtttaaatggcgccacgtggaaggagaactgtatgagatcgttattcaaaaagtggagcgttttggccatgacgccatgccgccgggcgtatttgagaaatacgtcgcgggcctgacccaggggaaaaaaaggctcctggcgatagagcgcacgccgcatgatgcactggttatcagcaatttttactcgccggtgctggtctgcacagaataa

SEQ ID NO: 125249 - DNA, 741 bp, Enterobacter cloacae
atgaaatacctgcttgctgacgccatcgtctacaacgacgaggacggttctgtttctcttatcaatgtgccgcctgaggatgcgcagatcctcacctgcacagccaatagcattatgaagctgctggtgcagcatcatgggaacgtggtcgagcgggagaccttcctgcatgacgtctgggatcggcgtgggctccaggggtctaacaattcgttaaaccagtacatcagcatcttgcgcaaaatgctggccagcctgcttcccgacgtgctgtttatcgtcaccgtccccaaaacgggctttatgctcagcgcagacgtcacggtaacagccctggaggaagaaacaccggccgccgaaacggcgaaaactgcagtacccgcccgaccggagcggctgctctggggcgcgcttacgctggcggtcgttgcgctgtgcctctggataacggctatcaaacccgaaacccggcagaaggacattcatctgttgacccatatcgggaactgtccggtctatacctttacgccgctggcggatgtgtttcatgagcgggcggctgcgctggcgcaaacccttcagcaggacggtcaccttccgtgcctggaaaattcaattttctacatgcacattcagcgaacgcttttctacggccacgagggacgactggtgctctcccaatgctcgctcacgcaggggaaagcgagcgcctgtcgtacgctttactattacgagtggtga

SEQ ID NO: 125250 - DNA, 957 bp, Enterobacter cloacae
atgtcattaaaagcaccgttcttgttgctgcttgcggtgtccgtgaaggcgatggccgccgcatgctggataacatcacctgccgtcatcaactttggcaatgtcgtggcgggcaatgccgcgtcgaccaacaccgaagttaaatttagctgtcaggctgacaacaacggcacgacggaatatatcaacgtctgtctgagcagtatcgacgcaccgccctttcagatggtctcaccgggagattcggagggtaaacagtacaccctgcttttccgcctgcttaacggcgacgcgcgcgctcaggaactcggtcccgtcagcagcggggagctcattcagcagactctgaccgccgacagcaatgccaacatcagcgggagctttccgcttatcgccaccgtcccggcagggcaaaaccaacttccggcgtaccactattacaactacaacatgaatctgcgcatcgcctggcacagcgctagccgtcaggatgcactgcaaaactgctcggatggctctgcggagggggagcaggtgcagggcggtaccaatgcgcaggccgaaatcagccagggctgctacatagaacgcgtcaccccgcttaacttcggcaccctgaacagtaccgccacgctgcgcccgacgcgttccaccgcaacccttaccacgcgctgtccggccggcacagcgtttacgcttggcatgggcaacggcaaccatgccatcgggaatcagcggcagctgtgtaacgatgagggtcagtgcctgcgctacgggctctggcaggatgcgggtgccacgcaaagctggggcgatctgcacagcggcgatgcgctgcatgtcacccatcccgctggcggcacccagaacttcaccgtttacggggaagtccccgctcagcccctgagcggtacaggggaatttattgatgacgtgataatcacgctgacttattaa

SEQ ID NO: 125251 - DNA, 2220 bp, Enterobacter cloacae
atgctgtcagcccggactgaacccgccgccgataccctgcaatggctggcaatcaccgtgaaccacgacccgcgcggggatctgtgggcctgccgggtagtgggagatgcgctgtggatggaccaccgcgacctcaaaaaactggggcttcgcgccccggataacgccaacgagtgggtcgcgctgacgtccctgccgggtctgaaagtcagtctcgatttgcatgctcagcaggtctccattaccgccgacgcaaaggcgcttgagggccaacagcatctgtctgtcgggaggccgacgccgcagtatcgctatcctgaggcgcagcccatcagcgtgttgacgctcgggtatgcgctttatggcagcggcgcagaggggaaacgccagcttaacgcgcaaacgtcgctcaccgcatccggggcgcttcccggaacgttcaacagcagcttttcgagccatgccggtgaggaaaacagcgcaggtcggccccgccacacacgccttgaaacccgctggcagtgggacaacacggactcgctcaccagcctggcgctgggcgacaacatcaccacgggctcccgctggagccgacaggtacgctttggcgggctgcactgggcgcgtaattttgagctcaatccgcagctcaacaccgaaccgcgtagccgttacagcgacacggcggttctgccttctacggtcgatctgtacatcgacgggcttaagcagagcagccagcgcgtcacgccgggcgattttctgctggataccctgccctcatttaccggaagcgggcaggcccaggtggtcattaccgacatcaacggtcagcgtcgtaccgtacagctcgatctctacggtgcgccggggatgctggcggaaggactcagcagcggctcgctggatatcggctggatgcgacaaaactacgccctgcgatccaatgactatgccgcctcgcccatgctcgacgcagggtggcgctacggggtgaataaccagctgacgctggcgctgcacacggagcagcagagtaaactgcgcaatgtcgggacaggggtcgactggctgatctcgcccgggacagggattatcagccagcatgtcgccatcagcgacagcccctacggtcagggaaaacagtggggccttggctggcaatggaacggtcgcgggacggggatctctgccagtaccgttcgtaccgatgccacatttgccgataacgcccgcatgagcggtaccctccccgtcagacgcagcgatagcgtttgggtcagccagtcgataccccattcaggtaccttcggtgcgggctgggtacagcaaaacattcagggcaccaaacaacgctatctcaacgcctcctggtccgcctcgctgccggcacacatttccaccacgctgagctacacccgctcgtttacggatgcgtcgagccacgttcagctgatgctttcgatcccgttagggcgtgaggataccctctccgttcaggccagccgcgatatgccgcgcatggattatcgccatcagccggacgatcaggtcggcggctggtcatggcagctggggcgaggctttggcgagcaccgggaaacctatgcggacgtgggctatctgggccacgcaggtgagtggcacgtcgggatggcgcagggcgctaactatgcctcagccgagggtagcctgacgctgctggatggcagcctgcacacgctgcgctacagccaacaaagcctggcgctggtctccacgcacggtgtcggacatgtgccggtgatgctggaaaaccgcccggcaggcgaaaccgacgagaaagggtatctgctgctgaccgacctgcctcgttaccacgccagcaaagtcagcatcaatccgctggatctgcctgccgacgtgattgcccccgtcaccgacatgcaggccagaccgggcaacggcggcgcggtaaaagtcgattttaacgtccatcacgccgtcacagttcaggcccgactggtggaccgccaccacaatccgctcccgctcggcagcattgtctcaacgccacgcggtgccaccattgtggggcgtgacggttttatctggcttgaagacccgcctctgccgggtgagctggtggtaaaaaccggtgagggagagtgcagggtcaggcttccggccccccgtactgcgtcacccatacagaatattggagaacaacaatgtcattaa

SEQ ID NO: 125252 - DNA, 777 bp, Enterobacter cloacae
atgcgtcgttttctcccctgcttcattctgtggttcatgatgctggcgctgctgtcacgctacgcgctggccgccacgcttcaggtggccccagtgacgctcgacctccagagcgggcaaagcgcctcggcggtctacctcactaacagcggtaaagcggccatccatgcgcagatacgggtttacgaatggacccagcaaaacggtaaagatgtattaacggccaccgacgaggtggtcagcagcccggcgatgacctcactggcgccgggccagcagcagctggtgcgcataatcgtgatgcagccagggatccgtgaacaggagcaaagttaccggctggtcattgatgagctaccggatgcaacgtcccgtgcggccaatcccaacgcgatacactttctgcttcgctactctattcctgtcttcattgccggaaaccagaatatgcccgtcagccgcgatgccctgagctgcgaacaggcggacaccccgggaacgattcgctgttataacgccggaaacagccatatccgcctgagccacctgcaggccctgacggccgccggtcaggtcgtcgggtcgttgaaagggctggcaggttatgttctgccgggacagaccgcgcttataacgcttaagcacacttcgcgccacacgttcagcgcgttgcgcgcctatctcaatgacgaccaccatgccagccagatacccctgcgcccgcttgcttctcgcgctcctgttttggctaccgctgatgctgtcagcccggactga

SEQ ID NO: 125253 - DNA, 498 bp, Enterobacter cloacae
atgagaattatccctgttgttatatgttgttccgttctcctgcttcctgctgctgcaatcgccgcagacagcaccacaagcgcgacgatgcacgtttcacttgaggtggtgaagtcctgcacgctcaaagccaacgacctcaatttctcgcgccacggctcggacgaatcaagcgaaattcaggccaaaacgcaggtcgatatcgtctgtaccaacgggacgccgttcacgctctctgctaccagcaacgatagcagcgacaacggcaccttctggctgaagcctgaaaacggtgaaacgggcgcacagaagattgcctggaaactttttgccgatgagggcaaacagacgcaaattaccagcaccgatggactcaccgacaccggcaacggcatggaacagcaagagacgctgtatggcgtgattgacgcaggtgccctgacgaccgcgcaggctggcgcctatagcgatgatgtcacgttgaatctggtgtattga

SEQ ID NO: 125254 - DNA, 543 bp, Enterobacter cloacae
atgacgcctttcatcgcaaatgccggctatcaggttatcgttctgagcagcaacgcttttttatggcttggcctgaattcgatcctgtcgacagccgtatcaccccgtcctgaggtgtactggattaacaacgttaatccacaagggcttatgcgtctgcagacactgctgctcaatacgcacgtcgggggaaactggctgttattgacggacgcggcccgggtcaacgacattaacgcctggctacacaacgcgcgggtcagagtggttgcggacaatgtgtctctcgcgcagctaagccactgttttagcgacacaagcttctctttcgagaataccgccacgctcacctgtcaggagatgcgggtttgcatgctgttccataaaggattcagcccgatacgtattgcgcaaatccttaataagtcacctaaaacgatctacacccacaaacgtaacgcgatgaacaaattttgctgccagaacctggcggaattccatcaaaaactctgcctgctggacgcgctcccctcttctttgtaa

SEQ ID NO: 125255 - DNA, 639 bp, Enterobacter cloacae
atgctaaccggctataagttcgaatccatccgggcactgcgcagtgaacatgtgattgcctgggaggtattgtccacggcaaaaccccacgtcaatctcgaagactattttgacgccatgccttcgacgcagcgtaaacaacttttctttgcgcagcttcgccatgccatgttttgcgaagagggcgacaaatattatctcaacgcgacatcggatttgctgctggaaacggacttcctcgacaggctaaaagaagcaacaccctgtccggagaggcttgctatcgaagtgaccgatctccatacgatggtacaactcgatgatacgcaaagccgggccctgcggaactgcattgcgaaacttcatctttggggaattgatgtgtgggctgatgatgtctgtgaagccattcttcccgaactgcttgccagccagatccgcttctgtggcgtcaaaattgacaaacatactttctggagcgggcgcacagagcaggcgaagtttctgcatctcacccgtcaatgtaagcgtgtcgccagtaaagtccttattgaaggcatcgaaacggcgggcgatttcgcactggcccgggcgagcgcggccgattacggccagggttatctgtggggtctaaaatga

SEQ ID NO: 125256 - DNA, 687 bp, Enterobacter cloacae
atggaaaaaaccgattcaacacgacatatcgccatcatcgaaaattgcacgatgagtgccattgggctgcagcatctttttgcgcagtccgaactcagtcaatatcagctgcacctgttcaatgatttcgatggctttaagaaggcgctttatcacgttaattttttctcgctgatctattccctttccgatgcgcgagaagcgcgtcgtaactgcctggcgcacctgagggatctcgcgtttacgcatagccatattcagcgcattatactggtatctgatgagatggaggcgcggctgattagccatctttccccttctcgtcttcacggtgtggtcagtaaatcagtgacgcttgaacacctgcggaaagaattcatggtgctgttgagcgaaacgctgcgcataaacgacaatatgcttaatcactggtactgcagccagaaccggatgttaagcccgacggagagggcaatattgcgttatatgtcgtgcggctattccatcccagaaatcgcggcgcagcttaagcgcaacatcaagactatccgcgcacataagtttaatgcgatggtgaagctgggggtgaattctgacgtcgggttgctcgatgccgcggatattcttacgcatttgccggtaagagaaacgcgtagtgtggggttaaacaaaccgacatttttgtaa

SEQ ID NO: 125257 - DNA, 231 bp, Enterobacter cloacae
atgttgaacagggtgctgggaagtgcatggggggtactgctgccgggcgtcgtgcttggcggtttgatgttcgccgatctctccattgatgtctggaagaccattcttgtgtcgggattgctggtgacttcatgcatgatctggcataagcaactacgtcactttgttttactgccatccggtatggcactgatcggtggaattctggtaatactgatgagtttgaaataa

SEQ ID NO: 125258 - DNA, 678 bp, Enterobacter cloacae
ttgagtgaactccacggcgtgcttgaatcccttgaatgggaaagcactttttttgctcgcccctcggcgatagtgcgcttgcgtgaggatgcgcctgctctgcaggaagctgacttcagcgcctggcagcgcgtgcaggctaagatcccggcggaccgcgccgattggcttgatgcgctccagcaacacggttttcagctggttgaaggtgaggcagacctgtctattgcccttacccgacacgatgcgtgcggggcggaacttgcaacggaacaggatatccctgtattacgccagttggcggctaaggcatttgctcagagccgctttcgtgcgccctggtatgcacctgatgacagcggacgcttctatgcccagtggattgagaatgcggtcaaaggcacctttgaccacgtctgtctggtatgtcgtgccgcggacggtcagatccagggattcgtttcgctgcgtaagctcaaagagcgcgaggcgcgtattggcttattagccggacgcggtatgggggcaaaactcatgcaggcggcgctgcactgggcgcagcagcagcagagtgtgacgctgcgggtggctacccaaatgggcaacactgccgcgcttaaacgttatattgcgagtggtgccaacatcgacgccaccgcctactggttatacaggtga

SEQ ID NO: 125259 - DNA, 1083 bp, Enterobacter cloacae
atgaccgccctttcattacgacatattcataaaaagtacgataaaaacgtcatcgtggcggatctgtcactggagatagcatcaggagaatttatcgttcttgtgggcccctccgggtgcgggaaatcgacgctgctgcgcatgatcgcgggattagaggcgccagacagtggcatgctgatgatgggcaatgaggatgtcacccacctggcggcgggcaagcggagcttgtcgatggttttccagtcctatgcactttatccgcatatgaccgtacgggagaacctcgcctttggcttacgcaatatccgcaccccggaggccgacattgcgcagcgcatcacccatgccgccaacatgctcaggctggacgagctgctcgacaggcttccgcaacacctctccggcggccagcgccagcgcgtggcgataggtcgttccattgtccagcagcccgcgctgttcctgtttgacgaacccctttccaaccttgacgccgctctgcgggttgaaatgcgccaggagatccagcaactccataataccctgaaaaacaccatgatttacgtcacgcacgatcaggtcgaggcgatgacgctggccgaccgtatcgtggtgatgtgtaaaggcaatattgagcaaacgggtacgccgcttgaactgtacaacaccccggcgaaccgcttcgtggccgaattcatcggtacgccaaaaatcaatatgttacccgccgtctggcagcagggggcattgcatatcgaccctgataccgtcttcccgctttcgcgtcagcccgcagacattcaggagggggaatcggtatttgtcgcgatccgccctgaacacctgggttatcagcagccgggggattttagcctgagcgggaaaacgcggttatgcgaactgcagggagattcaaccctggtgtggctggacgtggcagggcatgccgtgtgcctgaaatccttccagcaactgagtctgcctgcgcagcaacgtatcacgctgaccgtgcaggaggcttatctgcatctctttgacgcggcaggcaagcggattgcaatgacggaaaatgccgcctga

SEQ ID NO: 125260 - DNA, 1389 bp, Enterobacter cloacae
atggatgaactaacgtgctttaaaacctatgacattcgtggcgaagttgacgtcaatctcacccctgacattgcgcgtcgcatcggaagggcgtatgccgtctggctgcatccccggcgcgtggtagtaggcgctgatgtccgcctcagctcggaggcgctaaaaacggccctgatcgacgggcttaccgcaggcggcgtcgatgttatcgacctgggcatgaccggtacggaagaggtctatttcgctacccgggaattgcgggcagacggagggatccaggtgacggcgagccacaatcccgcccattacaacggctttaagctggttggccttgaggcgcgcccgatcagtaatgacaacggtctgctggagatcaaagcgctggcagaacagaaccgctttccaccctgcgtgcgtcgtgggggcatttttcccttcgacaatcgcccggcctgggtgaacgctctgctgcaatttctcactgcgcccccaacgcgaacgttacgcctggtggttaatgccgggcatggcaccgcaggtccggcgctagatgcgcttgatgagggcttaaagcgtgccggtgtaccggtcgagtttatccgtattcatcaccagccagatggccgctttcccgctggcgtacctaacccgatgctgcctgaaaaccggcaaagcacccgactggccgtcatcgaacatcacgccgatgctggcatcgcctgggacggcgatttcgatcgttgctttttcttcgacgagcgcggggattacgttgagaactattatctcgtggggctgtttgccgaacattttctgcgacgctatcccggcagccgcatcattcttgatccccgcttaatctggaacacgctcgacacggtcgcccgttgcggcggtagcgcaatcgtgagtaaaaccgggcatgccttcctgaaagcccggatgcgaagggaaaatgccatttacggcggcgagatgagtggccatcactattttcgcgattttggcttctgcgatagcggcatgatcccgctgatcctgatgctccagatcctgggcgcagccgcgcagccgctctctcatcttatgcgtcacgcacagacccgctatccggtgtctggtgaaatcaacctgacggtcaacgagcccgccgcactcctcaatgacgtcgccgcgcactatgccccggtcgcatgcgaacgtgacaactgcgacggcctgagcctgtccttcacagactggcgttttaacctccgcgcctccaacaccgagccgctggttcgccttaatgttgaagcgcggggagataccgctctgcttgtccataaaactcatgaagtgctgatgctgatttctgccctgcaaggggctcaggagacattatga

SEQ ID NO: 125261 - DNA, 1041 bp, Enterobacter cloacae
atgcctaattcatttagcaaaagaaagaataaaaacgtgacgattaaatcgctggcagcaaagatgggtatttcacataccacggtatctaacgcgtggaataatcccgaaaagctgtctgctgaattacgtgaaaagatacttgggtacgcccgtcaggttggatttcaggggccggataaactcgcccgggctttacgcaccggaaaatccggggccataggcgtcatttttaacgatgccatgagctatgtttttatcgatccgcatgacgtcagcctgatgcgcggcgtcgcgacccgctgcgaagaccgtaatattaatctggtgctgattccgcttcaaaaagggccttcatcgctcactaccctggtggacgggtatattctcaacgccacgcataacagcgccgccattattcaacaaaccctggcccgcaatctgcctgtggtgacgctcgattttcagcttccgcagttcagcagcgtgtcggtggataacacacgcgccatgcgtgatatcacccactacctgatacaaaagggtcatcgccatttcggcattattgccttcccgtctcacccgaacgcgcgcgggatgcggcctctgacgcaccgcgtgacgggggataaccaactcatgctgacccgcgtgaatgcctgccgcgacgcgtttcaagagcacggtattacgctcagcgactgctggctgtgtgaaacccatcacgatgagccacacggcgaacgggcagcggaagcattgctgacggcacaccctgagatcacggcgctgatctgcttatccgatcgttttgccatcggcgcggtgaattattgccagcgacagcatcttgctatacctggccgggtcgccattaccggattcgacaataccgcccggcggtataacgggcctggacttaccaccatcgcgcaggatgccgaacgcaaaggtgaaatcgcggttgatctgcttctgaacaatggccccgtcacccacgttgcgctggaacaccggcttatcgagcgtgatacggcatga

SEQ ID NO: 125262 - DNA, 1290 bp, Enterobacter cloacae
gtgagagttgcagaagcagcaaaattaatagcatcggtaatattcctcttttttcttaccggttgcgggcctgatgataaaaaagagacacaatccggggcgcgtgaaacaatcaaaatgtgggtcacacccaccgtcaatgaagaagccttctggagtaaaatagtggcggaatggaataaagaccctgcccatatgcccgtcgaatttaccgctattcctgccgcaaacagttcagaagaagcgataatgaacgcgctggcatcagggactgaaccggatatttcaaccaatatatttattggttttgccagccagcttgttgatgtcgggcagatagaagatctctccagaatgccgggttttcaggaaacgattcagaaacggcaaatggcttctctgctgtcagcctgggaattaaacggcaaacaaacggtactgccggtatatatcaacccaattgtctggtggtggcgcggtgatttactgaagcaatacggttttgatcgggtaccggttagctacgatgaactttacgcgctggcgaagcgtcgggcggcggataatcacggctatgtgatacagcttacggcaggtaaaaactggtgggaacgctggttcgacttcattccgctgttctacgcccagagccacggcaagccgtatctggtcgacaaaaaacctgcgctgaccacgcctgctggcgaggccgtgctgaccttcatgggcaacgtttttaacaataagtggagcagctacgacttcacctctgccgaggatccgctcgcaacggggcaggttatcgcctcagcgcgcggaccgtgggatttagcccgctatcgcaagcagtatccggacatattaaaaacgattcagatcggtccgatgctgaccgagacgggcattgaacacccctatacgttcggcgacagcaaaggtctggtgatcttcagttccagtaagcgaaaggcgcaggcctggcagtttatgcagtgggtcttcagtaaccctgaacatgaccggctgtggcttgagttgacagggatgccgcccgcccgcgcggatttaatgagtaatccgatctttgtcagttacttcaaacaaaatccgctagagaaacagatcgcctcgtgggtggacgtcgcgcttcctcctgcagcaacaaaccagacgacagaagtacagcgcagcatgacgcagatgcttgagcgcgtgatattcaaaaccagtacgcctgccgacgcgctgaaacaatctcagcaggaaatcagcgccctcacgggccagtag

SEQ ID NO: 125263 - DNA, 870 bp, Enterobacter cloacae
atgatggctggatatgaatcccgaaccggaggcctgctggcctccacctggattggctattcgctgctattttggttctacccgcttgcctggctggtggtgctaagcgtgacccgctggcagtttatcggcgtgccgcaatttaccgggttgcagaacattattggcgtactgcacgatgcgttattctggacatccatgtggaacatttgccgctttttaatgtggtatgtcccgatcgtgtttattaccgctctgctttttgctgccgggttacgcaggattaactatggccgggggtttatcgccctgagttttttactggcaaatatctcgtcaggggtggcgtactcaattgtcttttcccgtctttttaatgagtatggcccggttaaccgcttattgtctgcgtggtttgggatttccgtgccgtggtttaccaaccctgactgcgcgatgctatccattgcgcttatcgtgacctggaaatttgtcggttattacggattaattctctattccggcatgcaggctattccatcggatatttatagtgcggctattctcgataaaaccgggcgttttcagaaaggttgggcaataacgcttccgatgatgaatccgcaaattgtgatggtgatggtgctggctattacggtggcgttcagtatttttacagagccctatttaattaccggtggcgggccactaaacagtaccaccagtcccatggtggtcatgtacgaagccgcgtttcaaaatatgaaacctacctgggctgctgccatgtcgattatcgtcgctgcctgcagtttcctgatgatctggctatttcgtcggttattcgaaaaacacattgagattgtatga

SEQ ID NO: 125264 - DNA, 828 bp, Enterobacter cloacae
atgaaaaaactcacgcccctgagcctgctaattcatgcgctgatgtttattctggcgttaagctggctctatccgtttgtctggatggtcgtgtcatccctgaagcctacagcacagatttataccacggatctcttttcgggcacgctgacgctcgaaaattacactttccttttcgataacagcaaccgggccgataagccgtttctgcgcacgctgtttaactcgcttttcgtctctgtcaccgtgaccgcgagcgtgaccgtcacctccatgctggtgggctatgcactggcaaaaacggaattctggggcaaaaacgctttccgtaatctgttgattgtgcagatggttttcccggttttcatgttcatcattccacagtttgtgctgatgcgtgagctcggtctgatcaaccgttacagcgccatgatcctgccttatgcaatgagtgcctgggggatctttatggtgtcccagagcttcaagggtacgcccaacgattacctgtacgccgcgcgtctggatcatgccagcctgtgggccattctgcggcacgtcatgatgccgctgaacaagtccattctggcgatcgtggcgctatttaccttctcaagctcgtgggacaacttcctctggccgctgattgtcatgcgcgatgtcgacaaaatgccgttttcggtgctgctggccaccttcagtaaatcctacggcgtttatctggggccagtgatggcgggagccgtggtgcaaatgctgccggtcatcgtgttgtttatcctgttccggaaatatttcctgcagggcatgtcgttatcactgaaataa

SEQ ID NO: 125265 - DNA, 1584 bp, Enterobacter cloacae
gtgaacaaacaaccctggtggcaggcctgtacctgttaccaaatttatctgccgtcgttttgcgatggtaacggtgacgggctgggtgatttcccaggcctgctctcaaaagtggattacctgagcgcgttaggcatcggtgccatctggatcacgccgttttacccctctcctctggtggataacgggtatgacattagtgattactgcgccgtcgacccacgattcggcacgctgaccgattttcgcgacgtcgttcatcgctgccatgaaaaggggatctgggtcattatcgatctggtgcttaatcatgtctcttcgcagcatccgtggtttcaggatgcctggaataatcccgcaagccgctatcgggactattttcttttcagcgcgcaccctaacaactgggagtcatttttttccggcagcgcctggagcccggagccggacaccggcgagttttactaccataaattcgcgcctgagcaggtcgatcttaactgggcgaaccccgcggtagagcaggaaatgcttcaggtcattgatttctggcaggcacagggcgtggatggcttccgcttcgacgtgattaatttcctcagcacgcgcggcatcgggcctgacaatccggagaaagcgggagtacagcagcatgagcatgacgtgaaccagccgggactcatcggcacgctgcagcgcgtatgccaacatgccaggcagcaagaggatgttttcctgatcggcgaaatcggcagcgaggagagggagaccctggcccgttatcaggccccgtcgctgatggacgtggtctttaacttcaatattggcagccagaaaaccttcgatgcggcacgcctgtgcgacgagattaacgccacgctggcgctgcagtctggcctgccgacgctattcttttccagccacgatatgccgcgcatgattagccgctttggtgaaggcccgcatgacgccgcccgggcgttggccgttctggcgctacagctgaccgtgcgcggcgtaccgtttatttttcagggtgacgagttggggatgcccgactatgtgcctcagacggtcgggcagatttttgatattcagggaaaaaccttctacgacatggccatgcggcagggttgcagtgccgccgacgcgctggcgcaggccattgaacattcacgggatggttcccgcgcccccttcctctggtgcgacgccccgtttgcgggcttttccacctccacgccgtggatgcccgtcagccaggactatcccttgctcaatgccgaacatcagatatcgacgcccggttcgttgtggcgtcagtaccagaccttcattgcgcttcgggccgccatcggggcgctacagcatggggagtgcagcccgctgaaacgccataaggcgtgcgtctggtttacccgaacaacgacgcaggaacaggtctgggtggccgtgaattttggccagccggtacaaaacccattgtgggccattgaagcggatgtcctttacggccaaaacgcgcagcagctggacaaaaatcaaattctgataaaaaggagtgtatatgaacagacacggtaa

SEQ ID NO: 125266 - DNA, 1059 bp, Enterobacter cloacae
atgaacagacacggtaagaatccgttgatcacccccagcgacgtggtgccttctctgcctggacggaaagtggagtgcgtctttaacgccggtgtaacggagtatcatggggagattatcctgctgcttcgggttgccgagagcgtgataaatgatgacccacagaagatcgtcgttccgcttctggtgcagcagtccggcggctggcaggcggcaacaaaaacgttcgaccgcaacgacccgcgctatgattttagcgacccgcgtaccattgtgctaaaaagcgacccggctcaggtctggctgacgtcaatgtcccacctgcgcctggcgcgaagccaggacggtgtaaatttcaccatcgatcaacagccgtttattaccgccgacagccgctatgaggaatttggctgtgaagatgcgcgtatcaccctgattgacgatgtctggtacatcaattactccgccgtgtcatcgctgggtatctccaccgcgctggcgaccaccgttgattttatctccgtcgacaagaaagggctgattttctgccctgataaccgcgacgtctgtttcttcccggagaaggttggcggatccttccgggcgcttacccggcccgcgccctgccatttcggccacccggaaatctggatctgcgaatcgcccgatatgctgcactggggaaaccaccggcatctgctgggacgctcgggagacgaatgggatgcgctgaagtcgggtggcggcgcgccgctgatcaagaccgcgcgcggctggctggagatttatcacggcgttgacgctagccagcgttattgcctgggcgctctgcttctggatcttgaggatccgctcaccctcatcgccaaatcttccgtaccgctgctggagccgagcgcaccctatgagcgtaaaggctttttcggtaacgtcgtctttacctgcggggcgctggtgcgtaatgacacgttgcatatctggtatggtgcggcggatgagcgtatcgccctggccacgctgccgatggacgagctgtggaaacatctgggcctggagtaa

SEQ ID NO: 125267 - DNA, 975 bp, Enterobacter cloacae
atgggtgatggctatggcggtacaacaaaactggtcaactctgaatactcgggggcaacaattcgcttacccgatcagggggcgtatatcaatgaaatctttaccgttaacctgacgccgggcatccagataaattgtagtccggttaaggggaatgacggctacaatctgatggcgcaaaccaaccctgagctgctggcaggcagcaagtacaatgagggcatgtttgcgaccaatatccccggcatctattacagcgtgaaggttaaaacgtccgacaccggaatcggcggcctttttggcacgaatactaccggctggtatacgacagcagcatgggggccaaatacaccgctggacggaaagtggcttaatacgtacatatttctctacgtcggttatgactaccagggtaacccaaacagggaaaccgttataaaaccgagaccgggtaccctggggaaaatgtcgataggcgatcccgcggacagcaataaccagccctggacatttacaatagatgagaactcattccagatccccgtcgtattgcctacctgtgatatcgttatgctgggtaacggcacgcacacggtggatctgggagattattttgtttccgacatcagatacaagcgcgtcaaagacgtgccttttagcataaatttcaacgactgcaccagcgtggcacgatataccactaagctcacgacaaccaaactgacgggtatagaccatgaccttctcggcaatacgctttcaacaggggcgcaaggtgcgggcgtgaagatcttgtataacaacgggaactcgcagcttattcccaatgatgcgaactcgtcgtatgacatgacggaaacaggcgtccccacgtcgacgcagataaactttgtggcccaactgatcgcagatggcagcatgattacccccggcgcgtttagcgcttccggcgtgttcaccatctcctacaattaa

SEQ ID NO: 125268 - DNA, 603 bp, Enterobacter cloacae
atgcaacaattaccgattctctttcgccagcccggtcttgtgttgcttgtcggcctggctggtgggcttttacctgacgtaggccgggcaaattcaggcctggatacgaacattaccgccaacattgttaatagcagttgtaaggtaaccgttgataatggaggagaaatctatctccccacggttatacgtagttggttttataacgctgatggtagcgatcgctatgttcctggcgatgatgcaggcggcacaccttttaagattcatgtcgatgactgctatggtgaaagcggcaaccctgcaaagctgaatttcagcttctctcctcaatcaggattctggccgggacaaaaccaggtatttaaaagcgatgatagtgctgcaggaacggcgagaaacgtcggcgtggtgattttttccggaaaaaataaagccaacgtattaaataacgacggaacgtcaaaagtcgtttacgacgtgagtggtgagggttctgcatatataacggattatgaattctacgtcagatatcaaaacacaggcgttgttactggcgggacggtgaccagcaaaatacgcgttgacgtcacttatgaataa

SEQ ID NO: 125269 - DNA, 564 bp, Enterobacter cloacae
atgaaatttaactcaactttactcgccctgtccgttgctgcccttttcgctaccgacacggcaaatgcagcgattacaggcacccccagcgccaagctaaccgtccagtcaaccatcaccgctggcacctgtacggcgaaagtgaccaacagcgcgggcgcggatgccactgaggtgaactttggtgatgtgtataaagctgatctggaaaacaaaagtcgcgtagaaccgctgaaaatctcattcacgggctgcgctggcgtgaaaaaagccatggtgtctgcggcgtccggtacaggcggctcatgctcaggtaataacctggacggggacgcttatgccgccggccagaacaccgcctttgagctctggtctggcgcggtggattccggccttcaactgaactgtaaaacaccccccgcagcgcaggcggttaccatcaccagcggcgtgggtgagttcccgatgaactcccgtatcgtgatcgcgaaggataagaccatcgctgatgtgggtacaggctcggtaactgcgcctgtgaccttcaccgtaacctatcagtaa

SEQ ID NO: 125270 - DNA, 573 bp, Enterobacter cloacae
atgaaaaagatgcttctcagcctgtctgtcattgtcatgacagcgctgacgctttcagggacggcacacagtaccgatcttacggttaactttaccgccaaccttcgtgaaacgacctgtgatatgaagctggttggcggctcaggttccaataccgagcagacgcttaaaatcggagactcacagggcaaaatccgtctcgaccaggtgcaggccggtacagcgacagctgaattcaagctggccatcgttgaatgtccgtcctcgctgagcgacctgaaaaccacggtgaagggtacgcagaacaccgatctgttaacgggtgtaagtaactcgaaaacgaccgccagcggcggtgcagattatgcagccgtcaccattgcccgtgcatccgccccggacgcaccgttcaccattaactcgaccaacgatgctcagcgtctggtctggtccgcggcggaaatcaccagcaaggaaatccccctggtggcgactctgaaagaaacccaaaccggcaaaatgaccacaggcgatttcgaagccatagtgacgtttgaattcagctacgaatga

SEQ ID NO: 125271 - DNA, 2598 bp, Enterobacter cloacae
atggtgttccgacgttctcttttatgccttgcgatcggcacggcattccccttacatgtttgtgcagacagtcacgcagctaatgacaccgcgcaggaaaacgaagatgcggtcgaatttaacgaacagtttcttctctcaagaagcacaaatattgacgtaagccgctttgcgcatggtaacccggtggcgccgggtacgtaccgtaccagggtcaatttaaacggcacgttaaaatcgacggttgacattatctttaaagataacgggacgccgcgcgcgacaccctgtattacgaggcttttgctctcgcagtccggtgtggatacccgcgcactcggagacgagctggacgacgacgacaacgagacctgcatcgatgtaaaaaaattctatcctgaagcgtcggtcaactacgacagtgctaagcaggtgttgaacctcaacttcccgcaaatttacgtggttaagcgcccgttaggctatgtcgacccgtccctttgggataacggcattccggcggcgcttctgtcttacgatctcaacggctggcacagcgaaaacagcggttcaacctctgaaagcgcctatgcgggcctgcgctatggtctcaacatgggaccatggcgcctgcgatcgcgcggcagtctgaactgggataaagacaacggcacgcactacagcagccaggatatttatcttcagcgtgacatcacctctcttgacgcgcaatgggtactcggtgactcctttaccaacggagaagccttcgactccttgagcctgcgcggaacacgtctgtatagcgacgaacgtatgctgccaaacggttcaacggggtatgcaccggtgattcgcggcgtggcaaacagcaatgccaaagtcagcgtcacgcagagcggcaataaaatttatgagacctcagtgccgccgggcgcgtttgagatcaacgatttgagcaccacgggctacggtaacgatctgctggtcaccattgaagaggcggacggcagcaagcgcacgttcacggtgccgttctcgtccgtgacccagatgctacgccctggatcctcacgctgggacgttggcatgggtgaactgaacgacgactcgctgatcgacaagccccaggtaggctacggtacgctctactacggcctcaacaataccttcacgggctatgctggcgcccagtacaccgacatggacttctatgcaggcatcctcggcctggccatgaacacccccatcggtgctttcgcgctggacatcacccagtcgcacgcggatatcgaagacctgggcacgcgcagtgggcagagttatcgtctgacatacagtaagcgcattgaagccacgaacacctcgttcaacgtggcggcctatcgcttctctaccgaagactatctgagcctgaacgatgccgcgcaactgcgtaacagcatcaaacagcagaactatgccaaccgtagctatgagtcaaatacggctctttacgatgactaccagcgtactaaaaaccagatccaaatcagccttaaccagcctctgagggcggctgaaaaggattacggttcactgtacgtcagcggaacctggcaagattactggaacggggatggctctaactctaactacaacgtgggctacaacaacagcttcgcctacggtagctatagcctgtcgttacagcggacttacgaccagcgcggtcaacaggatgacagcgtttacctcagcctgagcgtgccgctgagcgtcttctcgcaggacaactcgcgtttagctgggttctcgaacgtcaacatgggcctgcgttccgatcttaaaggcggtactaacttcaacagctccgcgagtggcaacactcaggataacaaggtcagctactccgtcagtacgtcgtccagcagcggtaactacggcaacctgaaccaaatcagtggttatagctcgctaaatagcagctatggtccgctcggcgtttccgcctcgtttggtgacgacaatagcaagcagttctccgcctcttacagcggcgggatggtcgcacacgcgggcggcatcgccttcgcaccgggcagcattggcgataacgatgccatcgcggtagtcaaggccagcggtgcgaagggcgcgggtgtgggctacggcgcaggcacaattgacgactcgggctacggcattttgccgtatatgtccgcgtatcgggaaaaccgggtttcgctggatatcaggaccctcgaaaacgacgttgaagtgaaaaataccaccaccaccaccgtaccgcgcagcggttctgtcgtgctggtgaattttgaaaccgacgaaggacgttcggtcgttcttgagcttaagcgtaacgataacggctttattccactgggcgctgacgtgctgaatgaaaaaaatgaatcggtgggttccgtgggccaggccggtcaggcctatgttcgcggtatcgagaacagcggcgtgctccgcgtggtctggagcggtgacaaggacggctcctgcacagtgcgctatcagctgaaacccgatttagagaaagccgggctcattaccctcctcaataaccaaacatgtgaaatgtaa

SEQ ID NO: 125272 - DNA, 744 bp, Enterobacter cloacae
atgtttaacgcatccgtaattaaaggattaaagatcgcgctgtttactgctgctttattttcagcatcacacgccagtgccgatattgttatttccggcacccgcattgtttaccctgagtcatcaaaagacgtcatcgttaacctggataaccgtggtgcaaaacctctgctggttcagtcctggctggacgacggtcgcgacgaaaaaagcccggaagaacttaagctcccgttcgtgatcaccccgccagtttcacgtatcgaccctaagcaaggtcagtctttgcgcatcacctacatgggtcagtcgctgccaaaagaccgcgaatcgttgttctggtttaacgtattagaaattccgccaaaacctaaaaatgccaacgccgaaaatacaaaccagcttcagttggcgttccgcacccgcattaaattctttttccgtccagacggactgaaaggctcagcgctggaagccgccgaccatgtcacctggaccatgaagaaagacggcaacggcgtcagcctcgtcgcccataacgagtccccgtacaacgtagcgatttcaatggtcaaacttaagtcgggccaaaagacctatgaggtagcccaccagtctgttctgcctttcagcgagaaagccatgctggtcaaaggattaaccaccaccacaaccggcaaagtggcatacgaaacaattaacgataacggtggggtcgacaaccacgaaaccacgctgaagtaa

SEQ ID NO: 125273 - DNA, 612 bp, Enterobacter cloacae
atgtcttttaaaaaagttagcatgggtatggcaattgcactggctctgagcgcaggttccgcagttgcagctgttccaggagacacaggtacgattactttccacggcatggtgtctaacaccacttgtaaagtttccctggatcagaaaattgaccagagtggtaacgatttcgatgtcaccctggacaccgtatctgttgctgattttggcaccactgcactgggtactaccagcaccctgggccagaaaaaattcaacctggcgctgaccggttgtgatactgctaccgtggctaaagcatctgcacagttcaattcctgggcgggttctacttctaccgaaggcggcctgctggttccaccagcaaacgctcagggttctgcgaagaacgttaacctcgtactgagcaacgatggcaacaccaaaaccgatctggtgaaaatcgaccagactaacaacactcaacaggccactgttgatacaagcggcgcggctaagctgtactacaaagtagcttatacccagggccagggttgggatcaaaccactaacccagtatccgccggtaccgtgcaggcacaagttgccttcaccatgaactacgaataa

SEQ ID NO: 125274 - DNA, 573 bp, Enterobacter cloacae
atgagtaagtatgttctttcttcatttttggctgcaagcataatggcatcgctgtctctgccagcatttgccggaaacgattctggcacggtgaactttgccgggaaagtggtggccgacacctgtgaaattaatgttgatggctccggtacgacctcgtcaaccgtcacgttccccgatacctatgcgtcggactttggcactgatggcgcagtgggcaccagcaaaacgtttaatattgaagtgaaaaaatgtgacccgctggttgccaaactcaacctcaaattcagcggaacgacaacggatgccgcgcataaacgtctgaagaacgacctcagcggcgccggtaatgccaccaacgttggcatcatcgtcagcaatgaaaacggcacgaaagacgatgtggtatttgatggctccctgccttcgacgggaacggatgtggctaacgatgcgacgggaacaaatgcctcagtctttaactacatcgcgaaggtgattcagattggtgatactgcacccaccgcaggccgctattcttcttcggcaactttcgaggttgtctatcgctaa

SEQ ID NO: 125275 - DNA, 2478 bp, Enterobacter cloacae
atgtcctctccctctcgccaaaaacaggtatggtccgggatcgtgctcgcactgttcgtcgcgatcccacctgcgtgggctgatgacgaattcaacctgcggatccttgagctggatacgccgctggaaaataccgctacgctcaaaaacttcattaatgataacggcttgctggcagggcgctatctgaccaccatcatgtgggatcgggacgtcgtggataaacgcgaggtcacctatgtgctttctgacgataagcagcagcttctgccggagctgaccaaagcggatctgcgtgaattcggcgtaaacgtcgacgcggtgccggatctcaacgatctgaacgacgcggcctgcattcgggatatctcccatttcatcgaacatgctcgctacgattacaatcaggataaccagaccctgacgctggtcattccccatgcctaccgcaaccgcgcggctgcgggcgccattaacccgaaattttgggatgacggtgctccggcggcctggacaagctatcagctcagcggttctcagcagcattacagcccgggccaaacctcatcaacctggcttggcctgacatcgggtcttaatctgggcgcgtggcggctgcgcaacaacagtacctggagtgactcttcgggctgggaagccatcgccaccaccctgcagcgcgatatcaaagcgctgaaaagccagcttgaactgggccagacgtacaccaacagcgagctgttcgacagcgtgcagatgaccggcctgacgctggaaacggatacggcgatgctaccggtcagccagcaggggtttgcgcctgtcgtgcgggggattgccaacagcgatgcaaaagtcaccattaagcaaaacggctacaccctttatcaaaccaacgtctcgccggggccatttgagatccgtgatttaagccaggtcgcctccggcgcggatctggaagtcaccgttgaagaggcggatggctcggagcatagcttcatacaggccagcgcgtcggtgccggtcctccagcgtgagggcgggtttaagtattcgctggcggccgggcgttatcgcggcaatgaaggggaagatgagcccacctttgtgcaaggtacggctatttatggcctgccgtatggcgtgacggcctacaccggcgctcagggtgcgtcgatgtatcatgcactattgctgggggttggcgcggatttgggtcacctgggctccgcctcggtggatatcactaccgcacgaaccgcctttgatgacggacgtgatgacgcaaatggactctcatggcgagcgcagtattcaaaagatattcccgacacagataccaccgtcacgcttgccagctaccgctattccacctccgggttttatacctttcaggaggctatcgatcagcgcgacagcgagattgatgacggcatttatacctatcgcagaaccaacaaccgccgaagccgcatgcaggtaaacctttcccagcggctttctgactggggctcggcgtatcttaactgctatcaacaggattactgggatatggacggccacgagcgcagcgtcagcgccgggctgagctccagctggcgggatattacctggtcgataagctacaacctgacccgcacgccagatgccgattccgatcggcaactggcgctgaacgtcaatatcccgttatcgcactggctctctaacgcgtgggcaaactacagcgtaaataccgcaagcggcgggtatgtctcgcaccaggtggggatcggggggaccgcgtttgaggataacaagctgagctataacctccagcagacctacgccaacaaagatacgggctatggcggcagcgtatccgggcgctatcgcggctcgtccggcgaagttggcatggggtacagctacggcggggataaccggcagtggaactataacgctcagggatccatcgtggctcacggtcagggcgttacgctggggcagcccgtgcgggacgctttcgcgattgtacacatcaacgacggagaggatgtcaacgttcagagcggccgcggcatttataccgatgcgtttggtaatgccatcgtgccgtcgctaactgcttaccgacacaacaccctcacggtaaacacgcaggaacgcagcgatattgatattgacgcggcaacgttagatctcgtgccgacaaaaggcgcggcgatactggcgaacttcgaggcccgcgttgggcgtcgcgcgctggtcactctgcgtcatcagggtaaaccagtgccgtttggtgccatcgtggcgcttgataacaccaccgcgattgtcggggatgatggcgaggtctacctctcagggcttaacggacacacatcgttcagcgcgcagtggggagaggcgggcgacgaacagtgtcatggcgtcatcgatttaaccgatgacaatggcgagggaatcattaataccgcggtcaattgccaatga

SEQ ID NO: 125276 - DNA, 1005 bp, Enterobacter cloacae
atgcgcgtgactattctggtgagaaccgttatctctgccgtactgctggtcgccgccgcgcgggtacatccggcatttgctcaatgtactttcagcggcggggatggatctggcggcattgttacctttcagcttccagcggtctttatgctcgatcccgatacccctgtggggaccgtaatttatgacaatgccgtcgaatccaatgaaattacggtgcactgtggcggagctgacgcgcaaatccggcgcggctatttgaccctgacggatgccgacgcgcgtgaggacgttctgccgggagtctataaaaccaacgtgccggggattggcatccgtgcggcggcgtcaagcgaacggttgcccgactatatagaggaggacctcattcgtccctggcagtattatggctacaaacatggcgggtctgatggcacccacgtctttcgggccgccgctcaactggtggtcatcggccaggtccaggacgggatgctggatacctcgcgcctgacctcgcaggatacgctcggcggtgtcgtggtcggtgaaatgcgtttttcgcccaccagcgtccatattacgaccaatacctgtaatctggttgaccgtaacatttttgtttctctcaaaacggtcaattctcaggattttgacgggcaatactcagagatactgactgacggtggttttaagattgcaataaacgactgcgcgacgggaacaaagattgactatcagttcacccgcacggggtcgacgggggtgaccaacggctcggttttgggcattgcatccggtgatgctgccgcacaagggttggggattcaaattctcgacagcaacgataccgtccttcagtttgaccagacctatactgcgatatccgctacgcaggacaaggtgcccgcagagatccccctgaaggcccgctacgtaaaaacgggggaggtcaaacccggaaaagtcgaggcggtcgccacgttcgagctgttttaccgctaa

SEQ ID NO: 125277 - DNA, 633 bp, Enterobacter cloacae
atgtcaggacgcattgattatcaaattgaaaaatatagctttggtgccgtagaagagaaccaaagactcacgcatcagtgggcagaagtcgccgccgaatgccgccagcttcaggcgggggcggaggagcgtttacgcattgccttgctcaacgtggattatgtcaccagcttcgaactgccatttcggctgatactgacccgcgccccgcagctcatcgccgggctgcgcgatgagtttcagctaaaccagaagaacgtcatcttcaacggcaagcgctttggctgcgtttacagcctgaagggcgatctggatgcgatccccgacgcttttcaataccgcatgaccacccgcattcgacgggtcgatcccaccgggcttacggcggagccattccggcagattgccagagaggtcaaagcgccgcgtgagcgactgaagctggcgctggaatcgggtctggctgtgactgcgcttgacgggcttttctggttggggagccagcgtatggcggcggatattgcagggttgagaagaaagggaatggtaatcgtgactgcggaaacggacgtctttgatgattacaccgggacgcacaggcgggtcccggtgtatcaacgggtcagcgattag

SEQ ID NO: 125278 - DNA, 2133 bp, Enterobacter cloacae
gtgaacatcattgccattatggggccgcacggcgtcttttataaagacgagcccatcaaggagctggagcaagcccttcagtcgcgcgggtatcagctcatctggccgcacaacagcgccgacctgctgaagtttattgagcataatccgcgaatctgtggcgtgatcttcgactgggacgaatacgatctggagctgtgcagcgagatcaacaagctgaacgaatatctcccgctgtatgcctttatcaatacccactcgaccatggacgtcagcgcgcatgatatgcggatggcgctgtggttctttgaatattctctcggcgtggcggaagatatcgcgacccgcattcagcagtacacgggtgaatacctcgataacattacgccgccctttacccgcgcgctttttacctatgtgaaagaggggaaatacaccttctgcacgccagggcatatggccggaacagcctatcaaaaaagccctgtaggatgtctgttctatgattttttcgggggcaacacgctgaaagcggacgtgtcaatttcggtcacggaactgggctctctactggatcataccggcccgcatctggaggccgaggagtatattgcccgcacctttggcgctgagcagagctatatggtgaccaacggcacctcgacctcgaacaaaatcgtcgggatgtacgctgcgcctgcgggcagcacgctgctgattgaccgtaactgccataaatcgctggcgcacctgctgatgatgagcgacgtggtgccgctctggttatcgcctacgcgtaacgcgctggggattctcggcggcatcccacgccgggagttcacgcatcaaaccattgaaaagaaagttgcggcgatccctggcgcaagctggcctgttcatgcggtgatcaccaattccacctatgacggcctgttatacaacaccaactggatcaagcagacgctggacgtgccgtcgatccacttcgattctgcgtgggtgccttataccaattttcacccgatttattcgggtaagagcgggatgagcggcgagcgcgtgccgggcaaagtgttcttcgaaacgcaatcgacccacaaaatgctggccgccttttcccaggcgtctcttattcacatcaaaggcgagtacgacgaggataccttcaacgaagcctttatgatgcataccaccacctcaccgagctatccgctggtggcatctatcgaaaccgcggcggcgatgctgcgcggcaacccgggtaaacgcctgataaaccgctcggtggagcgggcgctgcatttccgtaaagaggtccagcggctgaaagatgaggcagacggctggttctttgatatctggcagccggaagagatcgacgaggccgagtgctggcccgttgcgcctggggagagctggcacggcttccgcgatgccgatgcggaccacatgttcctcgatccggttaaggtgacgatcctgacgccaggcatggacgagcagggtgtaatgggtgatgaaggtattcccgccgcgctggtggcgaagttccttgatgagcgcggcgtggtagtggagaagaccggcccctataatttgttgttcctgttcagtatcgggatcgataaaacccgggcaatgggtctgctgcgcgggctgatggagtttaagcgtgcctacgatctcaacctgcgggtgaagaacatgctgccggatctctacgcggaagatcctgacttctaccgcaatatgcgcattcaggatctggcccaggggatccacagattgatccgccagcacgatctgccgcgcctcatgcttcaggcgtttgacgtcctgcctgacatgaagctgacgcctcacaaggcctggcagcggcaggtaaaaggtgaggtagaaaccgttgagctggaaaatctggtcgggcgcgtgtcggccaatatgattctgccttacccaccgggtgtaccgctgctgatgccgggggaaatgatcaccgaggagagccgggcagtgctcgattttctgctgatgctctgttcggtggggcgtcactatccgggtttcgagacggatattcacggtgcgaagcgcgatgagcacggtgtttactgggtgcgagtcctaaaataa

SEQ ID NO: 125279 - DNA, 126 bp, Enterobacter cloacae
atgatggatgtgcatagcccgaagctggacgtcaggctcccggtcgcgccagcgtttcaggcgatggagcagaacggtggaatccaggccaccgctaaaccccaccagcagctggcggtacggtga

SEQ ID NO: 125280 - DNA, 1107 bp, Enterobacter cloacae
gtggcgcactgtgaagccttgtgtgcggcctgggcgatcccgttcatcgttgagcgcgtcacgctcattgatgaggggaagggcatcgaggcacaggcgcggaaagcccgctatgccgctttttccgcggcattacttcctggcgaagcgctggtcacggctcagcatctggacgatcagtgcgaaacttttttgctggcgcttaagcggggaagcggaccggcggggctgtccgccatgcctgcacgatctgagtttgccgggacgcaattgctgcgcccgctgctgggcgagacgcgggcgtcgctggaagcctgggcgcgggaatatcagctgaactggatagaagacgagagtaatcaggacgacagttacgatcgtaatttcctgcgtctgcgcatcctgccgctgttgagcgagcgctggccgcatttcgccgacgcgacagcgagaagcgccatgctgtgtgctgaacaggaattgttgctggatgaactgttgagtgcggatctggctgacctgatttctgaagacggagcactggcgatagcgcccctggaggcgatgagcccggtgcgtcgcgccgcactgttacgccgctggctggctactcatcatgcagcgatgccgtcgcgggcgatgctgagccggatctgggacgaagtcgcgcaggcgcgggaagatgcttccccctgcgtgtatctgaatggttttgaggtcaggcgctataaaggcaaactctggtgggtcaaatccacgccttcactgaccgaggtggtactcgactgggcgtcgccagaggtaccgctgatattgccatgtgatgcagggagcgtctctttgagcccgtccggtcatgtgcgtctgccgaagcctggtgagccggtaaccgtacgcttcaaggctggtggtttgctgcatattgtcgggcgcaacgggggacggaagcttaagaagatatggcaggagtgcagcgtgccgccgtggcgacgtcataccacgccactgctgttttacggtgaaacgttgatggctgctgccggggttttcatcacggaagagggatggtcagaagaaggagtcagttttgattggcagaaaatgtaa

SEQ ID NO: 125281 - DNA, 834 bp, Enterobacter cloacae
atggtgttaattttctttttacttaaagtgaataataaagaaaatcttgtatttaactatccgttagcgaaaccctataatataattttggattatatgcttgccattcgtaaactgaaagtgctatttataattcatgaccttaattcattaagacgaaatgtcgatgaagatgatgtcttattcaaagcatctaagattattagccataatgcttctatgaataatcatcttgttaatatagggttctcccgcgataaaatcattacattaaatatttttgattatttgctagttaagggaataccgcctacaaataataactttaaagatattggacttgtgattgctggaaatttatctcagcaaaaagctggatatctctatcgatgggatacgaacttcccggtagatttattcggtataaactacaacggcattaatgaaaattttatgtaccatggagtatttgaggctaacaatcctgaagtaatattaaatttaaataaaaagttttacggcttagtttgggacggtgattcccctatgacttgtgaaggaatatatggcgagtatttgaaatataataatccgcataaagcttcactatatttatccttaggtttaccaatcattgtttggaaagaatcagctctttcagaatttgtagtgaaagaaaaatgcggtgttataattgaaaaactttctgacttagaaggattctttgctaatacaaatgatcacgagcaatattttgaagccgcaaggcgggttgggcaacaaattgcaaatggatactatttggaaaaagccctaattgacgccattagttag

SEQ ID NO: 125282 - DNA, 1098 bp, Enterobacter cloacae
atgtacgactatcttattgttggagcagggctgttcggttcagtttgcgcacacgaactgaataaaatgggaaaaaaggtgcttgttgtagaaaagcgtaaccatatagccggaaatgcattcacagaaaataataacggaatacacgtccacaaatatggtgcgcatatcttccatactaatgataaaaaaatctgggattatgtaaattctttcgtcgagtttaatcgatttactaactcaccattagctaattatcagggcgttttatataaccttccttttaacatgaatactttttatcaactttggggtactaaaacacctgcggaagctttagctgtaataagcgagcaacgaaaagagttaggtgataaagaaccaagtaatttggaggaaaaagcaatttcattggtagggcgagatatctacgaaaaacttattaaaggatacactgaaaaacaatggggaagaaaagcaactgaattgcctgcatttataattagtcgtttacctgtccgtatgacttacgataataactatttcgcagaccggtaccagggtattcctatcggtggctatactaaaatggttgaaaaaatgcttgaaggcattgatgtgaaattgggagtggattttttaaaaaataagaatgaattaagcacccttgcagacaaaatcatatatacggggccgatcgatgaatactttgactactgctacggtcaattggagtatagatccttacgttttgagacagaaatcgttgatgtggataattatcagggtaatgctgtgattaattacactgaagctgacatcccttatacgcggattattgagcataaacacttcgatcctgtcgaaactgcccacagtataattacaaaggaatatccatcagaatggtctcttggagatgagccttattatcctgtgaatgatgggaaaaatatggaactttataaaaaatataaaatgcttatcgacaaaaaccataacgtttcatttggtggacgtcttgcagaatataaatattatgacatgcatcaggttattgcctcagccttgcattttatttctaaacaagaacattaa

SEQ ID NO: 125283 - DNA, 747 bp, Enterobacter cloacae
atgcagtatctcgtgcttttaactgattatggatttaactggaccgctacacagaaagttgcgaaaaataaaaatgataaagaagaattaacgcaaatattttggagtgtaatatttgcaaagattttacttgcgtgttgcgcttttgttattttattaattgcatgtcttataattcctcaatataaaaatgtttggtatgtccttttagcattttcaccgttagttataggaaatataatttacccggtatggtttttccaaggagtggaaagaatgaagtggattactttatgcaccatttcagctaggctttgtgttataccactcacattcattttcgtttcttcaaaagcagatatttggctagccgcattgattcagggctcggtgaattttattgctggatgtataggcctgtttttaatccttaatcgaggatggatttctggagcttgtttcaacgttaaacgcatcaaacagagccttatagaagggtggcacgtatttctttcgacatcagcaataagcctttatactattagcacaacagttattcttggttttattgctggccctgttgctgtaggtattttcaatgcggctaatacgatcagaaatgcagcccaaggattacttagcccaataacacaagcaatttaccctagaataaactcgttatttgataatcagtatcctctggctttagtattaataaaaaaacaattcgttatgtcggtggtttag

SEQ ID NO: 125284 - DNA, 3123 bp, Enterobacter cloacae
atgcaggttatgcctcccgtcgctacaggtgggccgtcacgcctgtttatcctccgtcctgtcgccaccacgctgctgatggtggcgatcctgctggccgggattatcggctaccgcttcctgcccgtctcggcgctgccggaagtggattaccccaccattcaggtggtgacgctttatcccggcgccagcccggacgtggtgacgtccgccatcaccgccccgctggagcgccagtttgggcagatgtcgggcctgaagcagatgtcctcccaaagctccggcggggcctctgtcgtgacgctacagttccagctgacgctgtcgctggatgtcgccgagcaggaagttcaggccgccatcaatgcggccaccaacctgctgccgtcggacctgcctaacccgccggtctacagcaaagtaaacccagcggatccgccgatcatgacgcttgccgccacctcctccgccatgccaatgacgcaggtggaagacatggtcgagacccgcgtggcgcaaaagatttctcaggtctccggcgtcggtctcgtcacgctggcgggcgggcagcgcccggcggtgcgagttaagcttaatgcgcaggcgattgccgcactggggctgaccagtgaaaccatccgcaccgccatcagcagcgccaacgttaattcggcaaaaggctcgctggacggcccaacccgcgccgtcacgctctctgccaacgatcagatgcagtccgcggatgaataccgtcagctgattattgcttaccagaacggcgccccggtgcgtctgggcgatgtggcgacggtggagcaaggggcggagaatagctggcttggcgcatgggcgaacaagcagcaggcgatcgtaatgaacgtccagcgccagccgggcgccaacatcatcgaaaccgccgacagcattcgcaccatgctgccgcagctgatcgaaagcctgccgaagtcggtcagcgtgaaggtgctttccgaccgcaccacgaacattcgcgcgtcggtcaccgacactcagttcgaactgatgctggcgattgccctggtcgtgatgattatctacctgttcctgcgcaacgtcccggcaaccattattcccgccgtcgccgtgccgctctcgctggttggcacgtttgcggtgatggtgttcctcgatttttcaatcaacaacctgacgctaatggcgctcaccatcgccaccggcttcgtggtggacgacgccatcgtggttatcgagaacatctcacgctatatcgagaaaggcgaaaaaccgctggcggcggcgctgaaaggggcgggtgagatcggctttaccattatctcgctgaccttctcgctgattgccgtgctgatcccgctgctgtttatgggcgatatcgtcgggcgactgttccgcgaatttgccgtcacgctggcggtggccattttgatctccgccgtggtgtcattgaccctgacgccgatgatgtgcgcccggatgctgagccacgcgtccctgcgtaagcaaaaccgcttctcgcgggcctccgagcggatgttcgaacggatcattgcggcgtatggtcgcgtgctggccaacgtgctgaaccatccatgggccacgctcggcgtggcgcttggcacgctggcgctcagcgtgatgctgtggatttttatcccgaaaggcttcttcccgattcaggacaacggcattattcagggaaccctgcaggcaccgcagtcggtctccttcgccaatatggcgcagcgtcagcagcaggtgtctgagatcgtcatgaaagacccggcggtagagagcctgacgtcctacgttggcgtcgacggcaccaacccgtcgctgaacagcgcccgtctgcagatcaacctcaaaccgctggatgagcgtgacgatcgcgtcaatgccgttattgaacggctgcaaagcgccgtcgctcgcgtcccgggcgtggagctttatctgcaaccgatacaggatttgaccattgatacccaggtcagccgcacgcagtaccagtttacgctgcaggccaccacgctggatgctctcagcacctgggtgccgcagctggtcgataagctaaaaaccctgccgcaacttaacgatgtaagcagcgactggcaggacaaagggctggccgcctatgtgaacgtcaaccgcgacacggcaagccgtctcggcattaccatggcggacgtggataacgccctgtataacgcgtttgggcagcgactgatctccaccatctacacccaggcgaatcaataccgcgtggtactggagcacaacacggaaaatactcccggtctggccgggctggattcggtgcgcctgaccagcaaagacggggggattgtgccgttaagcgctatcgccacggtggaagagcgctataccccgctgtcgattaaccacctggatcagttcccgtccaccacgatttccttcaacgtgtcggacaattattcgctcggcgaagcggtggaggcgatccaggcggctgaaaaagcgctcagcttcccgtccgatattcagacccagttccagggcagcacgctggcgttccaggccgcactgggcaacaccatctggctgattgtcgccgccgtcgtggcaatgtacatcgtgctcggcgtgctgtacgaaagctttatccacccgatcaccatcctctctaccctgccgacggcaggcgtgggggcgctgctggcattaatgctggcgggaagcgagctggacgtgattgccattatcggcatcatcctgttaattgggatcgtgaagaaaaacgccatcatgatgatcgactttgcgctggccgccgaacgtgagcagggcatgtcgccgcgtgaggccatctttcaggcctgtctgctgcgttttcgtccaatcctgatgaccacgctggcggccctgcttggcgcgctgccgctgatgctcagcaccggtgtcggcgcggagctgcgccgcccgctgggaataggcatggtcggcggtctgctggtgagccaggtattgaccctgttcaccacaccggtgatttatctgctgtttgaccgtctggcgctgtggacgaaaagccgcttcccgaaacgtgaagaggaggcgtaa

SEQ ID NO: 125285 - DNA, 765 bp, Enterobacter cloacae
atgagtaactatatctctgaagcacttggtgattacaaattgtatttgctggtcttttttgcgctgttgttttttatgaaattaccaagcattagcttctttacaggactgattctaaaattatttagaattaagtactcagataaagaatactgcgaatatgacgaaaaaaattacaatcagcagctattcagacttaaaaacggagtaagagtagcatcaactgacgatgcaaaattaatatccaaggctctgaatgaaggaaaaattgagcgatcggtattgcgtttcacagggctgtttggagcggtgggcgtcaaaagaacgatgcgactggaggctgtcagcaccatgttctttggtgttctgttcattatcaccgcatgtagcatcctctatgatgcaccgtacatgaaagcaggatatgtcacatacaatattagcgatagcgaaaaactctatgtttctaaacaccgtgtatatgataagaagaataaccagtcctggaataaaattgaatgcatggagatcatcaaagatccagtttctgctcaatatcttaaagatgtatgcatttatatcacgacagatgatggagatcttcgtgcagaattacaggatgcaattgactctgaagcaaccgggaaaaagatacttgctggaatcatcacccttctgattgtcacgggtggagtgataattgtaggttttaataatttccttaagttaaataaaactgtatgtgatttaaaaggtattaaatag

SEQ ID NO: 125286 - DNA, 954 bp, Enterobacter cloacae
atgaactcgtttgcccgacgtcttgaaaccttgtatgccacacgcccggtgacggtgctgggcgcggcggtgattgacgtcatcgccgacgcctacgccctgccctggcgcgggtgcgatatcgagcttaaacagcagggtgtgaatatcggcggctgcgcgctgaacattgccatcgccctgaaacgactcggcattgcggcacaaaacgcccttcccgtcggccacggcgtgtgggcggatattatccgcaacgcgatggcaaaacaggatctgcacagcgccgtggaggccgaaaccggcgacaacggctggtgtctggcgctggtagagcctgacggcgagcgcacctttatgtcgtttagcggggtggagaaccagtggcagccgggctggcttgatacgctgtctgtaccatcacacagcctggtttatttgtccggatatcagctggcctcaccgtgcggtgagctgctgacgagctggctggaagggttacatgaggtgacggcattgatcgatttcggcccgcgcatcggggatattccagacccccttatggcgcggattatggcctgcaggccgatcgtgtcgcttaatcgtcaggaagcagaaattgcggcagaaagactgggggtgaagcctgaaaacctcggcgtggcatggcagaggcgtttcggcgccgcgctgattgtccgtcatgataaagacggcgcggcctggtatgacggtgacgcttcaggcgttgttccggcgtttccggccacggtagtggataccattggcgcaggcgacagccatgcgggcggtacgctcgccgggctggcggcaggatggtcactggcagatgccattctgttggggaatgccgtggcgtcctgggttgtcagccaccgcggcggtgattgcgcccccactcgcgaggaactactcctcgcacacaaagacgtatag

SEQ ID NO: 125287 - DNA, 516 bp, Enterobacter cloacae
atggataaccgtaaattgagtcgactgcgccgttgggcgcgggaagggatcattttctttttgctcgcgctggccgtgatgtggggcgtggatcaataccgcaagcccacactccccgccagttttagcgccaccccaatgcaaagcattgacggaaagcgccacgatatcgaagcactcagccaggagcggccactgctgatctacgtctgggcaacgtggtgtagcatctgccgttatacgacaccggcggtggataagctggcagaagagggcggtaacgtcatcagtattgccatgcgttccggtgatgatgcgaagctggctcgctgggtcgagaagaaaagcctgagtatgccggtgattaacgatccaaacggtgcggtgtcacaacagtggcaggtgagcgtaacgccgacgctggtgattgtatcgaaggggaatgtggtcagtaccacaacgggctggacgagctactggggattaaaagtcaggatgtggtgggcaggtctgtaa

SEQ ID NO: 125288 - DNA, 2181 bp, Enterobacter cloacae
atgtcgtcttctaaatcagacaaatttggtgccgcgacaccgcagaataatgaaatcgatctcattcagttgcttgctgagatgtttgatcaccggatcatgattgcgtgtatcacactcctgttcacggtatgtgcggggatttatgcattcagcgccacgccagtttatcaggctgatgccctggtgcaggtcgaggcgaagcaggataactcgctacttaaaagcttaagccagttcgggtccgatctctcccctgatgtcgccccagaacttctactccttaaatcacggatgattctgggagagaccgttgatcaactcgggctaacataccacgttaagcggcgcgtactccctgttatcggtcctgtgtgggaacagattcggggacgaaaatctgatgaaataacgattggcgcactgactattccgcttctggaaggtgagccacaaacgcttttactcaccgtacaggaccaggggcgatttcatcttgagggaaagacgctggctgtagacggcgttgtggggaaagcgctggttaaagatggggtatctctgctggtgacatccctcgatgcggttccgggtacccaatttatcctcaaaaccgtcacgaaacttgaagcgatcaacgccattcaaaagaggcttacggttgctgaatcggcgaaacagagcggtatgatcgcgttaaccatagcgggtgaagaccccggtaagatcgccagagtgcttaatacaatcgctgaaaattatctcagccagaatatcgcgcgtcaggaagctcaagatacccggagcctgacgtttttacagactcaattaccgaagatcagtcgggagctggatgaagccgaagcacgactgaatgcctacagagagaagcgtgattctgtcgacttgtctctggaggcaaagtcggttcttgatcaggttgttaatgtggaaaaccagcttaacgagctgacattccgcgaagcagaggtttctcagcttttcaagaaggatcaccccacttaccgcgcgttacgggaaaagaaacaaacgctcgagcaggagcgtacgcgcctcaacaaacgcgtttcagccatgccctccacgcagcaggaaatattacgcctgagtcgtgacgtggaatccgggcgtaccatctacctgcagcttctgacgcggcagcaggagctgaatatctcccgctccagcgcgattggaaacgtgcggatcattgacccggccgtgacgcagcccattccgattaaaccgcgtaaagcgcttattattgtgctgggcatgctgatggggttaatgctctcgaccggaacggttttcgtgcgttcggcctttaagcggggcattacgtcatctgagcaacttgaaatgcagggaataccgcttctggcgacgctcccgcgttcagtctggctctggaaaaagacgcatctgcgcaggcggaacctgtttgcttcccactggaaacacagaacatcaaacgtacctttcctgcctgttgaccggccgaccgatatgtttatcgaagcggtgcgcgggctccgtaccagtctgcattttacgatgatggatgcaacaaaccggatcgtagtggtgtcaggtcctacgcaggactgcggaaagaccctggtcagtacctcactggcgtcgattgcggctcaggcgggacagcgagtcttgtttattgatgcggatatgcgcaaggggtatgtccacaatattttcaaactgaacaatcatcttggattgtccagcgtgctcggaggaaacgtagaatggcaggacgcggttcaacgctttgagaaaggcggttttgatgtcctgacctgcggaccccgcccttcacatcccgttgatttgctcatgagtgaacgcttccagtcggtaatgtcacggatcgacacactttatgacatcgtcattatcgacaccccacccgtacttgccgtgacggatgcattgctgatcaccagagccgcggccaccacgctactggttgcccgttttggaaaaaccagcggtaaagaggtcgagcactcactgaagcgtctgcggcaaacgggcgtgcaggtgaatggcgctatcctcaacgatatcgtgaaatccgctgcgctctattacaactcgggctatagccactacgactatggctacacccaggaataa

SEQ ID NO: 125289 - DNA, 450 bp, Enterobacter cloacae
atgttcaattcaatcttagtggtttgcacaggcaatatttgccgttcgccaatgggtgaacggctgttgcgccagcagttacccggcaggcaggtgacctcggcaggtattttcggtctcgaaggatgcccggcggatgccgctgcgcaggccgtggcctggcgtcatggtatttcgctggaggggcatgttgcccgcaaggtgacgcgtagcctgttacaaaaatccgatttgattctggtgatggagccgaaacaccttcgttttatcgccactatggccccggagaaccggggaaaatcgctgctatttggacaatggctggaaaccaaggacattcccgacccgtatcacaaaagtcgtgaagccttcgaatatgttttcaaccaattgggaaaagccagtcaggaatgggctcgtcgtttgagtcaacaaggaatgaagcagtaa

SEQ ID NO: 125290 - DNA, 717 bp, Enterobacter cloacae
atgggcagtaaaccgatgtaccggcagatagccgacgcgctgcgtgaaaaaatcgccagcggtgagctgaagccaggcgatgcgctaccgacggagtcatcgctccagcagacctttggcgtcagccgtgtgacggtgcgtcaggccctgaagctcctcaccgaagagcacatcatcgaaagcattcagggcagcggctcgtatgtgaaagaggagcgcgttaattacgatatctaccagctcacaggcttttacgagaaactggccgacagaaacattgccacgcacagcgacgtcaaaatttttgaggtgataaaagctgatgcgtggctggcccaaaaactggatctgatgcctgaagagaaagtctggcacgttaaacgcgtgcgctttatcaaacataaaccggtgaatctcgaagaaacctggatgccgctggcgctgtttgccgatctgacctgggaggtgatggaaaattccaaataccactatatcgagcagatcaaaaagatggtgatcgatcgcagcgagcaggaaatcgtgccgatcgtccccgacgcggagaccgtcaggcttctcggaatcgatccgcataaaccggttctggaaaaaatttcccgcggttttttacaggacgggcgtctgtttgaatacagccgaaatatctttaatagcgatgactatcatttcacattagtagcaaagcgtttgcattag

SEQ ID NO: 125291 - DNA, 828 bp, Enterobacter cloacae
atgaaatatacaaaaatggctttattcgtcgctggattgattgggagcggttacctgtatgccgaagacaccgccccacccgcttcggcctacacgaaagagatgaacgccgccgtatatcagcagctcaacttcaacgataaacaggatatagaagacgcaaaacggggatttatcgcctcgctgtccacgcaaataattaaaaacgaccagggcaagaccgtgattaatctcgacaactggttgtttttaaaaggcgaagccccggacaccgttaacccgtcgctgtggcggcacgctcagctcacgaatattgccgggttgtttaaggttaccgatcggatgtaccaggttcgcgggctggatgcgtccaacatgaccgttatcgagggcgatagcgggcttattattatcgacccgcttgtcgttccggactcagcgcgggctgcgcttgaactctattatcagcatcgcccgaaaaagcccgtggtcgcggttatttactctcatagccatcttgaccactttggcggtgtgacaggtgtggtgtcggaagccgacgtcaaagcggggaaagtaaaaattttcgccccggaaggttttatggaggaggcctccagcgagaatctgttggccgggaacgccatgagccgtcgggcgctgtttatgtacggcatgatggtgaagccggggccacaggggcacgttgacgacggcatcggtaaagcatcgccattgggcgtaactcgctcatccctcccacctatattgttaacgaatcgggtaaacaggtcactatcgacggcgtggaggtggagtttattttag

SEQ ID NO: 125292 - DNA, 1101 bp, Enterobacter cloacae
atgatgctctggttcccgcaaatgaaggttctgaatggttcagaactcttcaacgccacgatgcacaacttgtataccctgcgcggcgcgaaggcccgcagcgcggttaactggtggaaatcgctcaattatgcgctcgataaatatggcgatcgggcggaaatcgccgtcagtcaacatctgtggccggtatggaataatgcccgggtgaaatcgtacatcgccgctcagcgcgatatgtataaatacatcaatgaccaggcgcttaacctcatcaacaagggctacaacatggaggaagtcgccgagaacatgacgctgccggattcgctggcaaaaaactggaagaaccgcggctattacggctcactcagccacaatgccaaagccatgtacatttactatatgggctggtatgacagcaacccggcaaaacttcatcccctacccgatgtgaagtccgcccctcgctatatccatatgatgggcggcgcgaaaaaggtctttgagggtgctaaacaggcgatgtccagcggcgaatatcgctgggccgcgcagctgctgaatcacctcattttcgccgaaccggataacaagcaggccaaagcgctgcaggcagatgtcttcactcagcttgcttaccagagtgaaaacgctatctggcgcaatgagtatctctcaggggcgaaagagttgcgtaatggcgttacggctattccggtctcaagtacgctcgacagcgaactcacggcgcgcattgaacctgaagcgctgctggattatatgggcgttgcgcttaatggaccgaaagccaacaataaaaccctccactttaactggcaggttacagagggttcaacctatgggatcgagttaaataatagcgttattgtttatcacaaaaataagctatttagcgacccggcatttaccctgacctctgacgtcgtcaatttctcgcatctgctcacaaaagccaccacgctaaatgaggctatgcgtaataaatcggttgaattaaagggcagcacggatgcctgtgaacaactgctttccctgatcgacgtattcccttccatgtttaatattgtgaccccttaa

SEQ ID NO: 125293 - DNA, 924 bp, Enterobacter cloacae
atgcgaagctccagtaaaagtctgattgtcgcactgattgttttattatgtggattactcctcattttattgccgctggttgcgaaggccgataatgcgcgcgactggcaaaatttaccgaaggataaaaaccttatttttggctattacaataacgttaaaagcaacaccgatatcagcagtgccctgcccgtcgatggcgttagcgtggatgcggacgtttatatatttcgttacgcgcgcacgtttgacattgacgggcgaatttcagccatccagatcgttcagccttacgccagcgtgagcgcctcgctggataattcccgctatttcaccggctcgctggagcatgaaaatatcggcgatacgcaggttattttcgcccataacctgtttggcgcgcccgcgcttagcgaagaacagttccgtcagtggaagccggagaccttcctcagcgcggcgttctggctcacgctgcctaccggggattatgaccgtaataataccattaatattggcgccaaccgctggggctttaagcccgaactggcgttcggcacacccgttggtcacagctggatcgagctaaacagctgggtcaatttttatacggataacaaggagtatcagcaaaacagcaggcttgaacagcgtccgctgtacgccctggaagggcactggagctactctctctcccctgccttctggctttcactggatggcagctgggccaaaggcggcgaaacccgcgtagatggcgtgcttcaggacgatgaacaggaaaacgttctgcttggcggaacggtaggctttatgcttagcccgcatttcggcggcatggtggcgtataccgataccgtcgatcggcgtgagggatcgccggatgtggctacctggacattcagactccagtatctctggtaa

SEQ ID NO: 125294 - DNA, 771 bp, Enterobacter cloacae
atgcgctatttcttaccaggcctcgtcacgcttcttataccgctatcaagcggtgccgccaccgatgacgcgatagaaaaggctacaaatccgctgcacctttccacctccgtggcgctacaggactactacacgcctgaactgtacggcagcgaccgccataccaacgacactcttttccgtatgaccacgccctttgcagcgaacgaactggtgccggtaccgcagattttacgcatgacggtgccgctcgccacacgaccccagcccggtggcggctacgcaacgggactcggtgatatcaatctgtttgacatttttctgctcaagcaggacggcattaagctgggtatcggccccctgttaaccgccagctccgctgcgcacgacgaaaccggcaccggcaagtggcaggcgggcctttcggccattgccatcaaatcgacgcccggctggatggcgggcacgcttgtccagtggcaaacgagcgtggcgggcgacagcgatcgcgacgacgtccaaaccggaacgtttcagccgatcatggtcctcaaaatgccggaaggctggtatctgcgaacatcggggatttggacctggaacatggagaccaatgactacgccattcccgtggggcttggcggagggcgagcctggaacgtgggggcaaaggtcgtgagcgcgttcctcgagccgcagtggacggtggcacataaaggcgagtatcagcccgaactgacgttttttgctggcgtcagcgttgtcatgtaa

SEQ ID NO: 125295 - DNA, 1413 bp, Enterobacter cloacae
atgcccacccatctggtttggtttcgcgcagatctgcgcgtacatgacaacatcgctctcgcggcagcctgtcgttctgaggatgccagcgtgctggcactgttcatcgccacgcccgaacagtggcagcagcatgatatggcaccgcgccaggcagcttacctcaaatcacatctgaacgttctgcaacactcgcttgctgaaaaaggtattccgctaatctacaaagaggtcagtgattttgccgcgcagcttcagatgctgcaggcgatctgtcagcaaaacggcgtcacacaccttttttataactatcagtacgagctgaacgaacagcggcgggatcgccagctggaaaacatgctggacggggtagtttgtgaaggatttgatgacagcgtcatgctggcgccgggcagcgtcatgaccggcagtcacgaaatgtacaaagtgtttacgccgtttaaaaatgcgtttgttaaacgcctgaaagaggcgctgcctgagtgcgtggccgcgcccgctgttcggggcgatgccataaccgatctgcctgaattaacgtttaactatccccaacagtcgttcgacgatcttctgttccctgccagtgagaaatcggcgattgcgaagctgcgccagttttgcaagcagggcgcgggagagtacgacgcgcgcagggatttcccggcggttgaagggacaagccgattatcggcctgcctggcattgggcgtgctctctcctcgccagtgtctgcatcgtctcctggccgagcagccgcaggcgctggacggcgggacggggtcggtgtggctgaacgaactgatctggcgtgagttctatcgccatctgatgacttatcatcccgatctctgcaagcatcgcccgttcattccctggaccgataacgtaaaatggcagcacgacgaggcgcgtttactggcctggaaaaagggggagacgggctatccgattgttgatgccgcgatgcgccagttgaatgaaaccgggtggatgcacaaccgtctgcgaatgattaccgccagcttcctggtgaaagatctgcttatcgactggcgtgtcggggagcgttattttatttctcagctgatcgatggcgatctggcagcgaataatggcggatggcagtgggcggcctctaccggtaccgatgcggctccctatttccggattttcaatccgaccactcagggacaaaaatttgatgctaacggcgactttattcgtcgctggttgcccgcgctcaggcatgttcctgcgaaagcgatccacgacccgtgggcatgggcggataaacagggcgtaaagctcgattatccccgcccgattgttgaccataaacaggcgcgcgtcgccacgctggcggcctatgaagccgcccgtaaagcttaa

SEQ ID NO: 125296 - DNA, 627 bp, Enterobacter cloacae
atgcgacaaagaataatcaacgaaatcgaaacgtaccttcagtcacttcctgaagaggaccaaattaacgccattaatgcctttcgccaggcactgcataaatatagcccgtttaacgatcaacccatcgactgcgtattgtggatcaaacaggacgctatcacggctaacgattacaaccccaataatgtggccccaccggaaaaacggttgctcattaagtcgctggaacttgatggattcacccagcctattgttgtaacagaaaacgaaccccaacattatgaaattgtggatggttttcatcgtcatgagattggcaaaagtcgggctgcgttaaagcgcaagctgaaggggtacctgcctgtcacgtgcctgcgtcaggaacgactcggtaaatatgaccgcatggcctcgaccatccgacacaaccgcgcacgcgggcggcatcaaatcaacgcgatgtctgaaatcgttcgagaacttgcgcagcttggctggagcaatgaaagaattagcgaagagctcggtatggatggtgacgaggtgctgcgtctcaaacaaatcaacggcctgctggaactgtttgcagaccgtcgttactcagaagcctggacggtgaaataa

SEQ ID NO: 125297 - DNA, 903 bp, Enterobacter cloacae
atggcaaatctctacgatcttaaaaaatttgatctcaacctgttagtcatttttgaatgtatctatcaacatttgagtatcagtaaagcggctgagacgctctatattaccccctcagcagtgagtcagtcactgcaacgtctgcgcggacaactcaacgatcccttgtttatccgttcaggtaaaggcatcacccccactacggttggcgtcaaccttcatcatcaccttgaacaaaacctcaatcagcttgagcaaaccatcaatatgatgcacagcaacgggttgaagaagagctttgtcatttacggtccgcagtttatgacgcctaaaatcatgctggatccgatgaaaatcctgatcgagaagtataactatcaggttgagctgcatgatgtcttccttgccccggactcagcagaagacctgctggcataccgaaaagcggaccttgtcttctctttcgccccgctgaatagccgttcaacggcctgctgcttgttccagcagatgtcttttacgctggtttgccgtcaggatcacccccgtctgggtttacaggcgacgcgtgatgaaattcttcaggaaaaatttacggcctacctgagtgatgagttgagcgtgaagaattttcaggagcatactgagcaactgcttcccgaacgaaatatcctcttccgcagcgactcctttatctcactactgtcgatgatagggaattccgaactgattggattagcccctacgccagcctttaagcagtatggcccggcattaaatctccgagcgattgagactgacattaccttcccgacagtcccgatttatatgatgtacaatcgctcagcactgaataatgcttccttctccaattttattgatgacttaaacttaccccaataa

SEQ ID NO: 125298 - DNA, 507 bp, Enterobacter cloacae
atgcttcgtgattttttcaacgcggcggatatgacctcgcgatgcgcctcgttacgctattttttccctgagagtgagtcctggccgcaggatgaggcgttaaacgtcgagtatgactttaatgcgctgtttgtcggcccggcgacgctgctggcgccaccttatgcctcggtttatctggacgacgaacctctgctaatgggggcgacaacgctgagcgtgcgcgaattcctgcagagcattgggctgtccgtcaccgcggaaaatagcgtccccgacgaccatatcagctatgaaattgaactggccgtgatgctactagtgcatgccagacattcaccgcaatatcatgaagcacttacccgttttgtccgcgcgcatctcgaattatggctcccggcatttatcgcaaaaataaaggattgtgcgaaaacagccgtaattaaatgcctcgccgtgctactgactaattggtttgatgaattaaaaacgagagtaatattatga

SEQ ID NO: 125299 - DNA, 2277 bp, Enterobacter cloacae
atgactattgataaagggcagcttaaccggcgctcctttttaaaaggactgattgcgctaggtaccgtcgccgcattacccggcggattattatcctcccgatgtgccatggcacaaccgcccattccgtttaacccgaaaacctacaaaatcttccgtaacgcctgtccgcgtaactgctatgacacctgcagcttaaaaacgtgggtgaaagatgacgtgattaccttcgtcgagggggcaagcgaatccacctttacccacggtgcgccgtgcgtgaaagggctgacctacccacgccgggtctactcgccggaccgtataaaatacccgatgattcaggacggacgcggcagcggcaaatggcgacgcatctcctgggatgaggccatgcagcggatcgccagcaagatgctggagatcaaaaagaaagatggctccctgcttggcctggcgctgaccaaatattccggcaacctgggggtgatgagctatgccgtggaggggatgatgtcctcgctcggctacaccacgcgttttgccggtacgccgtgctggcctgcgggcattgacgcacagcactacgacatgggcgacatgtggtgtaatgacccggaagatctggttaaagccaaatacattatcctctggggggcgaacccggcctggtgctccatgcacaccatgaagtacatctatcaggcccgcgagaaaggggcgaaagtggtggttatcgatccgctgttctcgcaaactgccgcgaaagccgacctctatctgcgcgtgcgttcaggttcagacggtgcgctggcgctgggtatggcgcgccatctggtggacaccggccgcgtggaccaggagttcgtcaatcatttcgcgcacgggtatccggagtttgagcagtacttgctcaacaacatcacggtagagtgggcatcggaaatttgtggtctggcgccggatgtgattcgccagcttgccgaggagttcacggcggttaagccttccaccgtctggattggctacggtatgcagcgccacgtgaacggcggcgcgaacgtgcgagcgattgatgcctttgtcgccatgaccggcaatatcggcgtagaaggcggtggcgctcgctacggccatctgcagacctggggctataactaccatgcaatgacgcagacaccccctgtgggttctgtagggatggaaggggtatcaggcccggtgggcgagtttgtcagcgatagcggcgaaaaacgcaagtactctgaccgcgcgctcaacctgaaccagactgcgcaaagcattctggacgccaacgatccccctatccgcatgctgtgggtggcctgtaagaacccgtttgcccaggacttcgaccgcaacaagatgaaaaaagcgttcgacaagctggaaatggtggtgtgcgtggatcagttctttaacgagacggttcagcacgcggatatcgttctgcctgtcaccaccaccttcgagcactggagcgcctcttcgtcttactggcactactggctgacggtaaacgaacctgccatcaagccgatgtacgaatgcaagagcgacctggatattgccgtgttgctctcccgtaccatcaacaaaatggaaccgggctcttgcaccttcccacaggatgttgaccagaaaaaatggctggatctggaattcaacgacgggctggcgaagcagtttggcatcagttcctgggacgatctgctgaagggcccggtgaaggccaaaatgccgagcagcgcagcctggcacgatcggaagttcaaaacgccgtcaggcaagtatgagtttttatccgcgcgctgcgaagagaacggccataaagcactgccggaatatctgccagccgcagaaggtaaactgccgttccagctctttacgccgcacctgcagtacggcctgcattcgcagttcgttaaccttgactggatgcaggtcttctggccggagccctttgtctatatccacccggttgctgcgaagaaaaaggggatccgagacctggcgacagtgcgggtattcaacgagatcggcgaggttcaactgcgtgccaaagtcaccaccaatgtaccggaagatttcctggtcatgtacgaatcctggttcaacaagctcagctataacgtgcagaacgtggtgaaagataccccggccgatatgggtaaaatggccaccggtgcaccgggcgcggctattcacgatcagtttgtcgatattgtcctcattgccaatgaaggagcggacgcatga

SEQ ID NO: 125300 - DNA, 558 bp, Enterobacter cloacae
atgagacgcgcatttttagtgaacagtgataaatgtattggttgccgcggatgcgccatggcctgtaagagcttcaaccagctcgaacccgaacgtttctggcgctatgtctacccgctggataaagaaatttacccgcatgaggagcgtgcgttcttttcgctggcctgtaaccactgtgaaaaccccgcttgtctggcggcgtgcccggtggaagcctacaccaaacgtgatgatggcgtggtggtgcataatcctgagcgctgcatcggctgtaaaaactgtatccgcaattgtccgtatggcgctccgcgcttcaatgaggaaacgcagaaggccgagaagtgcagcatgtgctatgagcgtctggatatcggcttgaatcctgcctgcgttaacgcctgcccggttggggcgctgaccctgatcgatctggatgccgatccgctgccaaataatgccgtgcagtatccgccgggcttcccaaaaatgccgcagcttaatccgggtacgcgcttcattctggcacgccagccgaaacagccgggggacaaataa

SEQ ID NO: 125301 - DNA, 768 bp, Enterobacter cloacae
atggaaaagtacgaactgccgttggtgatttttaccgtgctgagccagatgtccgttgggatgacgctcctgttgagctggcgcacgctgcgtggcgaagtgcagggcaaccgtcttcactggctgatcacggggctgatcctgggggttgcctccatcgccgcggtattgcatctggcgcacccggaacacgcttataatgcgttaatcaacctgaaacatgcctggctgagccgtgagattctcggcgcgacgctgtatggcggcacaattggcctggctttccttacgaaaggcaacaaaggcgcagcgctgctggcgtccctgttcgggatactgctggtggtggtgcaggggatgacctacgccgcgccggcgatgcaggccattgccaacggcatcaccatgatgctgttctttgccaccgtctgggtgctgggctgtgcagctacaccgctgctcgggatgaaagcgtcagctgtcgcactgcgtcagggcattatcgccctgatggcgctgctgattgccgcaccggtactctggctcagcggcggcaccatcatgaaaatgaccgctcacgcctggttaagctcgccgctctatctgggctgcctgctgtgctgcgtcgtggggttcacgttgtcgctaaggcgccatccgatgcagaaagccgtatttgttatcctgctggtgggcgtggtgctcagccgcctgaccttcttcggtgataccgtcagtaccatcgtcaatattggtcatctgtactga

SEQ ID NO: 125302 - DNA, 789 bp, Enterobacter cloacae
atgtatgtggcggtagggcagtttgcagtcacgcctgactggcaggttaatgcactacaatgcgtgaacctgatgacacaggcccggcagaagggcgcgtcgctgttggttctcccggaagcgctgctggcaagggatgataatgacccggatctgtccgtgaagtccgcgcagccgcttgatggcgactttttacagccgttgctcaccgagagcgtgggtaacgcgatgacgaccatcttaacagtgcacgttccttcagtgccggggcgcgccgtaaatacgctggtggctatccgtgatggcgtgattatcgcgcgctatgccaagcttcatctttatgatgcgttcagcattcaggagtcacggcgtgttgaccctggtgaccgcgttgcgccgttaattgatattgacgggtttaaggttgggttaatgacctgctacgacctgcgttttcctgagctggcattgcatctggccctgcaaggggcagacgtgctggtattgcctgctgcatgggttaagggaccgctgaaagagcagcattgggcaacgctgcttgcggcgcgcgcgctggacacgacctgctatgtcgttgcttccggggagtgtggcaataaaaatatcgggcagagcagggtagttgatccactgggagtcacggttgccgcagcagcggaagcgccggtgctgctgatgacggagatatttttagaaagaattgcgcttgcgcgtcagcaattacctgttcttcgtaaccgacgctttgcgccaccgcaattaatgtga

SEQ ID NO: 125303 - DNA, 1941 bp, Enterobacter cloacae
atggctcaacgtgataatctgtatcgccgtagcagcggtatttatgttgtccgtattgcagttcccgcccgataccgtctctacacgggacagcgtgagattcacgcttcaacagaaacaaacgacatcagaaaagcgcgagcgattgccgcaggtctattggttgtttggcagcgatgtctgggtgagtatcaagaattggatagagaaaagttggtaagcagtgcgcctgctttggctggcgaaggaatgatcagcctcgctgaattttgcggtttaacgagcgcttccctgcaacaagtggcgcagcgactacttgatacaaatatcccgcttttttggcttgctgatgggcgtcctgcctactatgtagaagatctttcactcgttgataaggatgatcctgaggcttctggatttatcatcgatagtgccattaacatcgggatcagaggttctctgaccggttatgttcagcccctggttttatcacgtatattacgtcagatgatcgctggcgagctgctggatgcagaaaccgcatttaaatcctcagaggcttcatccaaagccgcttggtttgttgactttcccggtgtcgaaatctcgcctagttcattaatgattcatcgtgtgcaagctgagcgcttacgattattttggctgtcacatagcgcagcggtttctccaatcatgcctgaaaaaccaaaagcaattccccctgtattattgccctcatcaataccggataatgaatatgtaaatcgtaaatactactcagtgaaaatgagcgagttatgtgaaaaatatattcgctacaagcgtggagggaaattcacggaaaaggcagaaaatcgagttcgggaaggttttggcttactccttgaagtcatgggtgattcaacgcttgaaaaagttgaccgtgacttccttcgtaaatatgagagcttactaaggtcgatacctgcaaggcgcgatctggcaaaaataagatataaaatcaatgatgttcatgaattgattgtcaaggcaaaagagaatagtgatcctctaatgagcgataatgccgttcgtaaatatatgcgaattctcttcgaggctttccagtgggctgatggagaaggcatttttattaagtctcctgcgaataaattctttgcacctattgaaaatgaaaagatggatcaggatttcaaatctaatttcactgatgaggatttgaaagctatttttggtatgtcttggtataaacgtgggactgtcgataaaaatagtcaggggcaattccatcattatcgtgcatttcattactggctaccgctaattggcttttttaccggcgcgaggataaatgaattatgtcagctttatcttgacgatattaagcaggatgcggtcgggttttatttcttcgaaatcagcaatgagcgtgccgatcagtcgctaaaaactattcattcgcggcggaaaataccgttgcatccgacattgatcaaacttggattagtccgctattgcgaagcattgaagaaagcaggccatgaacgtttatttcccgagcttccttaccaccctgtaaaaggatatggcaataaagcttcggactggtttaatcgctcgttgctcaaagaacggttaggctttgaaaaagagagcaaaaaatctttccattcattccgtcacacgttttctactagacttaaacaagctggaatcgacagcgagacgcgtgcgcagtttgttgggcatatccgcggttctggcgagacagagaaccggtatagcaaagatcatccaccagcagccctctatgctgtgcttgagagcgttacgttagggctaccggaagttgctccatttgtttgcgaagatggtgtggttgctgtagctgatgcgctacggattaaacagagcaacaaatcgcgaaaagaaccgcaatag

SEQ ID NO: 125304 - DNA, 1125 bp, Enterobacter cloacae
atgacgtctaccgagatatggttacggcttatccacacgggttctctgtgtggtgatgggatgctggaagccgctgcacggttgctcaagcagacaaatatagatgttcctgctgtcatagacgccgggctgtcagcaaaacaggctagccggttctttgccctagaggaaagtgaactggagcgaagccttaagtggcttgaaatgccgggaaatcatttgttgacggcaaaccatcccttttatccccctttgctgcgaacgattcccgattatcctggggcattatgtgtaaaaggtaacttagcgacacttaatactgtccaactggctgtggtggggagtcgggcgccgtcatggtacggtgagcggtgggggaaaatcctgtgcgaacagctttcacaaagcggtttcacaatcaccagtgggttggcctgcggtattgacggtgtcgcccatcacgctgcgctgtccgcaaaaggacgtagcgtggccgtgctggggaacggcctgtttagcgtttatccccgtcggcatcaggctctggcgatgcagattattgaatctgacggggcgatagtgtctgagtttcctctctcggcacagccccgaccggcaaactttccgcgccgtaatcggattatcagcgggttaagccagggcgtcttggtcgttgaagcggcagtgcgaagcggctctctggtcacggcccggtgcgcacttgagcaggggcgggaggttttcgccttgcccggtccgataggtaaccccggctgcgaagggccacactggctgataaagcagggcgcaacgccggtaaccgaggtaggggatattcttgaaaatttgcaacatgggttgcaatggctgcaggaagatcccgaaaagcgacattattcgtcagatcagggaaaggtggcattgccatttcctaagctcctggctaacgtaggagatgaggtaacacctgttgacgttgtcgctgaacgtgccggccaacctgtgccagtaacggtagcacagctactcgaactggagttagcagggtggatcgcagctgtacccggcggctatgtccgattaaggagggcatgccatgttcgacgtactgatgtatttgtttga

SEQ ID NO: 125305 - DNA, 369 bp, Enterobacter cloacae
atgtggttgctcgaccagtgggcagaacgtcatattcgcgatgcccaaaataaaggtgatttcgacgatctccccggaagcggcgaacctcttgtgctggaagatgattcgcatattgcgcctgaactgcgggccggataccgtttactaaaaaacgccggctgtcttcctcctgagcttgagcagcgcagagaggccgttgaacttatcgatttgctaaaaggtattcgccgggacgatccacgacatactgaacttagccgcaggcttgcccttgtcgagctcaagttacgtcaggccgggttgagtactgaatttctgcatggcgaatacagtgaaagattgatgcagaaaataaacgaggagtag

SEQ ID NO: 125306 - DNA, 366 bp, Enterobacter cloacae
atgagcgagcaaacggaaacctctttgcagtccaaagtacgctttgtccggccagatatgccgcgcccgctttgggcggggatatgcatcgcattgtcctggcttttatatagtgtgggttgcgcgatggtcgggtattacctgtaccgcgggattactctgcacgcgtcttcatcaccagagcctcagcattatcggctttctgagaagcactatatctataagaagcgtcccttgccggtgccggtggaagagacggatgttagtgtgtcggaggaaagcgacgctgagcatccggttgctgccggagaaaagggcgatcttgaagcgcgtgttaagcaggcgatagcagatattgaccagtag

SEQ ID NO: 125307 - DNA, 1476 bp, Enterobacter cloacae
atggatgagctaaatactttttatactacgcggcattgtctgattcgggacagcatgttttccacgttaattcaggaacaatggctaatattacagggcggtaaagggtcaggaaaaagtgtgcttgcgcaaggggtgattagcgcgtggccttatcgcgcgctcaccatcagccctttgaaccgaaaaggttacctgtgggagtgggtgattattgcggattcgcagacggataacagtctggcgggaaaaatattccctgttgagaagctctgggaggagctgtacagcgcggggaccgtgacacacggcagtatgccgctgtttgtcctggaagatggacaccgaatctccagggggcttgtttcaacgattctggcgtttatgaccatgatgccgcaagcccgattgctacttacagggatattcaaccgtcgtcagcagcgtgagttacgggtattacagccggtatggtttgagatacccgcgccggacagtaaagattaccgcaaggtgatctcctctcatgcaggcattggccctgagacaaccaacactcttccggaacaatttatcagacgatgcatgagacgttgcgatggcaatcttcatcttgccgcgcgactgggaggggttattcgtcgtaataagatggagggggaggaacatgccgcctctattattgacgcttctcttcagcgtgaggcgttgcgttacctgcccgcacctggccgtcagggcgtaacctggttgctgctgttggtgttaacggtgctatgtggtggtggaggcgcatacttcgccaggcctctttcccagtggctgccaccgctcacaacgttgcttcctgtagaattctcaagacctgtctcaactcatgcgcgactgatggcagagacgatgtctaccaatgaatcgctcagtttactgtttagcgtctgggggtatgaggtagacaaaggggaagcctggtgcgatcaggcataccggggcgggatggcctgcctttccggcaccgaaacgcttgaaacactgttgtctgacggacttccctgggtcgccaccctggaagttgatagcgccagtttccctgtcgtcgtgatcgggggaggagagaacacgcttaccgtgctgtcaggaaatcaaacatggatccttgataaggcatggttcagccatgtctggacagggaatgtgacgcgaatgtggaagccatcgcccgacggcaacgcaagcataacaaagaagagtagcaccgatgacattgtctggcttgatacgatgctgagccgcgtgctgaatgtcgaggcggaagggacgggagaatggagttcgctgctaactgagaaggttcgccagtttcaggcgcaaaataagattaaagtcgatggtgtgatgggacagttgtcacttatcaggctatggcaagccctgggtgaaagtccaacgttgattcaggaaagagggacgatatga

SEQ ID NO: 125308 - DNA, 816 bp, Enterobacter cloacae
atggcaatcatctctcccttagtgaaaaatgcgttatcgtatcgcaccctgagccttatgattatattgactagcgctatgggtatctttatcttcatttactcagcatatatacagtggggtaataacaaagcgtcgctgattaatgaggatatcatcacgccattgaataattttaatgaaaaatataaatggaatttatcatcgtcagtcaataatcgcattgacgcgcccccattagtgagtggcaacgtagatactctgtcccatatccatttaagcggtattattcatagttcggataaattatcgtcccgggccattctgcaggaagggggggaacagaatgtctattctattgatgatgtgcttaaatcatccaacagcacgcgcatcattgatatcactaagaaccaggtgtttttctcctcaggcggaaacaccgcgcagcttacgctgcttaccgaactgacgccacctgccgcaacgccagaaaaagtgaacgagcagccggcaccaacagatgtcacattgtcagattttattgaagcgattcctgtcgttgataaaaatgtcttgcgaggattgcgccttttacctcgcggtaatacagaattattttcacggacagccattgcacctggtgacattgctattcagcttaacaatatgtctttaacgcaacaggtgaatataccccaggcgcaggaggcacttacacatcttcagacggctcagattaccctcttgcgaaatgcatcaccaaaactaattaatgttgctgttcaacaattccaggacggtcaggataaataa

SEQ ID NO: 125309 - DNA, 1986 bp, Enterobacter cloacae
atggatggaacctccgcaagccagcgactgaaagcgctttcgctgttttttttgctcatcgctaccgctaagcccggatattcagctgattacacggcgaattttaacggtgcggacattcaaacgtttgtcaacatcgtgggacaaaacatggggaaaacgattctgattgatcccgatgttaaagcatccatttccgtcagaagcgtagatacctttaataaagaggaatactatcaatttttcctgagcgtgctcgacctttatggcttttcacttatcactcttgataatggcctgctgaaagtcgtgcgttcagaaaccgtgaaaaatcttccaggaaagcttaccagtaacacgcagcccggcaagggtgatgaactggtgacacgtattgtttctctggaaaatgttccagcgcgatcgctgtctcctctgcttcgtcaaatgctcgatggcggtaatgtcggtaacgtctcgcattatgagccctctaatgcgctggtcattaccggcaaagcatcaaccgtcaatcgcatgctggaagtcattaaacgtgtcgatgtcatgggtgacgagcaagagcaaattatcccgctgaaatatgcttccgctgtcgatcttgccgatgtccttaacacgctgtcgcgtgagaacgcaaaagaggcacaacctgcgacactccagacgcacatcgttgccgataaaagaagcaatgcgctgattatcagaggctcagaacgcgcccgcgcaagaattactgagttggtaaaacgtcttgatacccaggagcaagggcaaggaaacacgcgggtatggtacctgaaatatgccaaagcggataagcttgttgacgttttaaccggtgtcacgcaaaaactgaaagatggcaaaagtggcacaaccaatacggcaaccagcagcagccgcgatatctctattactgcagatgaacaaaccaactcactggttgtgaccgccgatcagggtattctccagcaactcgatgaggttatcgctaagctggatattcgtcgtgcacaggttctggtggaagcgattatcgttgaagtgcaggacggtaaaggtctgaacctgggtgtacagtgggctgagaaaaacgttggtggacaacagtttaccaaaactggcctgccaatctttaacgcggcacagggcgtgggtgaattcaaagcaaacggagggatcaccagcgataacccagcttacaacctcttcagtaattataacggccttgcggcaggttttttcaacggcgactggggggtgctcctcacagcactcaataccgacaacaaaaacgacatcctgtctacgcccagcatcgttacgcttgataataaagaagcagccttcaacgtcgggcaggatgtgcccgtactttccggttcccagacgacctccggcgataatatttacaataccgtcgagcgtaagacggtggggaccaagttaaaagtcaccccgcagattaacgagggtgattctgttctgatggagatcgagcaagaggtttccagcgtcgacacatcgacaagctcttcctcgctcggcccaaccttcaacacccgaacaatacagaatgccgtcctggtgaaaagtggcgaaaccgttgtgcttggcggtttgatggatgacgccagtaagcaagaagtttcaaaagttcccctactgggcgatatccctttggtgggacagcttttccgctacacatccaatgagaaaagcaaacgtaacctgatggtctttatccgcccgaccattatcagagacgatgaggtctatcgttcactctcacgtgagaaatacaccaatttcaaagatctgcaaaaagagagacgagaaaagcaaagtgaaacactgattaacgtcgacaacatcaaagagcttgaagatcgggcttttaataatgcaccggcaacaccggacgccaaaaatccgttcagggaaggtcgaacggaatga

SEQ ID NO: 125310 - DNA, 1476 bp, Enterobacter cloacae
atgagtcagcacgcatggaaaaaagcgcagcgctatggcattgccttacaaggagagactctcttctactcgacagatgccacacttgagcatctgctcgagttcgcatccgttgcgccagagtgcacctgttttacccggctccccccgcagcagtttgccgaaaagctggaacttatttaccaacagaacagcgggtcagcccagttaattgccgaagatattaataattccgacgatctcaatacgctctctgaagagatcccaacgaatgaagatctgctgaacgagcagtcggacgcgccggttatcaggcttattaatgccgtgctcagcgaagcaattaaagaacacgcctcagatattcatattgaagtgtttgaaaaagcgatgagtatccgcttccgggttgatggcatcttgcgcccggtggttcagccgaataaaaaactggcggccttactcatctcacgtatcaaaatcatggccaaactggatattgccgaaaaaaggctgccgcaggatggacgcattaccttaaaaattggtcagcgaaatgtggatgtccgtgtgtcgacgctcccgtcgcagcatggcgaacgtgttgttctgcgtctgttggataaaagtagtctgcgcttatccatcgataaactggatatgtcagcggcagacacacacagtctgaagaatctgcttgcccttccccacggtattattctggtcacggggccaacgggctccgggaaaagcaccacgctctacgccattctctccgcgctaaatagcccagaacgcaatgtgcttacggtagaggacccaattgaatacgaactggaaggtatcggacaaacccaggttaatagccgcgtagatatgtcattttcccgcggactacgcgctattttacgtcaggatcctgatgtcgtcatggtaggagaaattcgcgataacgaaaccgctcaaattgcggttcaggcttctttgaccgggcatctggtgctttccactctccataccaatagcgcgtgcggtgccgtaacgcgattacgggatatgggcgttgagccgttccttctctcttcctcgctcgttggggtgattgcccaacgtctggtcagacggctatgcccccactgtaaaacggctcacgccgtgcggcctcaggagcaacagctcctgcaagcccatgggattaatgcatctcatctctggcaagcaaagggttgcaccgcttgcagacaaagcggctatcaggggcgcatggctatccatgaactgctgctcgccacgccagaactgcgtgacgctattcacaatgagcgtcatgaaagggagcttgaacagatccagcgtcgccatcacctcagcctgctggcaaacggtcttcgcgttgcggcagaagggatgacctcacttgaagaaattctgcgggtgacctctgaaggtcagactccagcggatgggcgccaatga

SEQ ID NO: 125311 - DNA, 1200 bp, Enterobacter cloacae
atgaaatttcactggacggcgacggacgcgcggggaaaccgccatacggggctgagtgaggccgcgagtgaaagagagatggtcgcgcagttgcgtagccaggggttattaccgcaaacgctaaaacggcagcggcccagggtcaccctcagggctttttcgacacgaatcagccacagcgaattaacgctttttacgcgtcagctggcgacgctgatcgccgcggcgttgccgctggatgaagcgctcgccgttgttcagcagcaaaaagaaaataaaaaactggccgacgtcatcacttctctgcatctcgccgttctggagggacagcccctctctgtggccatgcaagcccaccctcgtctgtttgatacggtcttttgcaccctggtaaaagcgggagagacggtcggccagctgggcgccgttcttgaaaggctggccgaatataatgaagcacgtcagcaaatgcgcagcaaactcacacaggcgttgatttaccctgccctgctcaccacggtcgccattctggtcgttatcattttgcttaccacggtggtaccgaaggtcgccgcgcagttcactcatcttaagcatgagctaccgctttccacccgaacgttactggctattagtcactttctgtcgacatacggtccctggatcgcactgacgctgatctgtggtggaacgctattctctttctggctgaagcgcgggaaaaaccgggatcattttcatcgctggctcatcgcgtttcgcattacctccccgctggtctgcgcgatcaatagcgcccgttatctgcgcgccctgagtattctcaatcgcagcggtattccactcctggaagggatgtcgctctcagcagaaggtgtgggcaaccgtgaaattggacagcggctcagcgacgcagcagaaagtgtgcgccagggaaatagcatcagccagtccctgaagcagacgcaaatatttccccccatgatgatttacatgattgcttccggggaaaaaagcggccagctcggggaactcatgcagcgtgcaacaaataaccaggaggtgcagctgcaaaatcgcatttcgctgaccctggcgatttttgaaccggcgctgattgttgtcatggcagcgatcgttttgtttatcgttgtctcgatcatgcagcccatattacaactcaactcattgatgaattaa

SEQ ID NO: 125312 - DNA, 444 bp, Enterobacter cloacae
atggaagcgcagaaaaaggaaaggcagcgtggtttcacgcttatggaattgatggtcgtcatcgtgattatgggggttctggccagcctggtggtgcctaacttaatgggcaataaggatcgggcagaccggcaaaaagccgccagcgatattattgctctcgaaaatgcgctggatatgtacaagctggataatcatcgttatcccacaacagaacagggcctggaggcgcttattaccgccccagcgcaagctccccgggccgaaaactacaacccggacggttatatccgccgtctgcccgccgatccgtgggggaatgactacatcctgattagcccgggtgagcatggcgcgatcgatatcatgtccacaggtcctgatgctgaaaccggcaccgaggatgatatccacaactgggacaacgataaaaagtcacgctaa

SEQ ID NO: 125313 - DNA, 501 bp, Enterobacter cloacae
atggcccatcagaaaggattcacactgctggaggtgatgctggttatggtcatcatcgccctggcggcagccggcgttgtcgctatgcaaagtgacaggctgagcgctaccggaaagctactgcggcagatcgatgtcctcagacagacagcaaaatacatgtcagacgtggcgctactggaaaaacatactgtcggccttcagctcactactgacggctggcttttctatgcaccgaaaaaggatcgcaccggtgaatggcagtggcaggaaatagcaaacaatgacaatttgccgttacgcggcgattgggacgcaccggccaggcctgacgtgacaccgtcgtcggaggaggccaagccgcaaatcgtcatcctgcccgatggacaagtcactcccttttcagtggttttcaacgccaaagatggcgaaaaaatcgccattctgcaatcacacggcgcgctgccgcttgaggtcattcgctttaaggaaccgcaatga

SEQ ID NO: 125314 - DNA, 369 bp, Enterobacter cloacae
atgaaaaaacaaagcggaatgctgctgcttgaagtcttgctggcaatggctatttttgcgaccgccattattgcactcctcaacagtatgcaatggcagctttcagcactggaaacgttaaaacaggaaacgctagcgctttgggttgcagacaacgtactcgtgacctcgacttacggacaactcgccgccaaagagggagcctcttctcaattaaatgagaccttctcctggcaactggttgaagggaaaaaaagttcgtctcctttgcttcagaaagaggccagggtgataacgtctgatggccgaaccctcagcctgtatgcctggtcttcagatagtaagaaaacggaggcgaagcatgagtaa

SEQ ID NO: 125315 - DNA, 582 bp, Enterobacter cloacae
atgagtaaagtccccaacggctttacgcttctggaagtgatgctggcgatcgtcattttctcaacgctcagctttctggcctctcaggtgttctcccaggcaaccgaacagtaccagcgagccaagaagactggcgatgattttgaggccatccagcacaccgtgctcatgcttgaaaatgatttaatgcagtatgtcccgcggaaaaaccggcaaacaccgctccccttcttgagtgaaaaagagagcgtaattttcacaacacaaacccgggatcccgcaatgccttttggggcaacgttcgttttgacgaccgtccactggtatgtcgaaaacgacacattattccgtgcagtacgctactcatccgacagtgaaaaggacgtggcaccacagccactgctggatcatgtctcccatttttctgcaacaatgacgccggcggatgaaaagagcgtgtcaacgacagccacgataacgctggagcgtgacggtaaagcggaaataacccgacacgttgtcctgcccggctggtttccggaaaaaaaagccgccagccaacctgcaggagcgacgcaatga

SEQ ID NO: 125316 - DNA, 960 bp, Enterobacter cloacae
atgaacgcgcaaaaaggttctgcattgctgatcgttttaatgattctggcgctgatggctgcgctggcagcagagatgacgataagttttcaggttcagctccagcgcacccggcgcatcaatgatagcctgcaggggaaatacgctctgctctacgctgaagcacaatctatggcacgttttcaggagaagcctcgagacgtactcacccactcggagagtcctggcgacgacaccgacgtcagctggcagataaacgatctgcaccattgctacaacctgaacgcactgaagaatacgccggaagaaccactggcgacgccaccgtatgaaatcagcgtgttttacgccctactggagaagctcgccgttgaaaaataccgggcagaagagatcgcacaatccatcgcagactacatcgatgataacgactcaacgcgcgttaaaggtgcagaagacgaatactatcaacatagtcagccaggctacctgaccgccggtcaggtgctctttttacccacagaagtgcgcaaaattaaagggatgactgacgcgctttatcaaaaactcgccccttttatctgcacccgattcagcagtgacctcgccattaatatcaatacccttactgagcagcaagcgccgcttctggcagccctcttcctcaacaatatcagcttgtcagatgcaaaaatgctcctgaaaaaacgtcctgtaaatggctgggaaaaggtagaggattttctttaccaggcccaacaggatttcagcgcagcaaaaccgctggtggattcgcttaaaaaacagattacaaccagcagcagttattttttgaccacatccacggttcatgagggtgaccttacctttggtatgcgcacatttttcatttatgacgaaaaaactaaaacactcaaactctatttacgccagcttacggatggcagtagcgaacaataa

SEQ ID NO: 125317 - DNA, 1161 bp, Enterobacter cloacae
atggcagtagcgaacaataaagcagttaacgtccctgcgacgaaactgcttatccgcctttctggatcgacgccgaatgcccttgaatgggtggaatatgatggatgtggctacagccaggttcagagtctgacaacagaacagttgccggagattgccgcacgcccggcatcaggatgcactcatctcgttattccggcccaaaaggcaacgagcagaataatcgtcatcccagacgaaaattacgaactgaccgatcaaaaacttcagtggcttgcggatgaaacactggacgaaggcatgcccccgctgcactggacgctactctctcgggagggaacgcgagtttccgtcattggcgttgacgccgactggcttatgtcccagcttcgtctctttgccggggctggttttaacgtcacgcatgcgacgattgacgcccttcgcttgccagcctgtgaaagcggctggacggtattatcagacagcggtggatggttgctcagaacgcatgagaacagtgttgcccatctgacagaaccctggctagcacagctgctagcgcattatcccccgcaagaggtcgtcagctacggtccactgccaactggcctttccgcgaaggaaacgcgtcccgcatgtcatagtttgatactccatccacaggaaccacccgctaaccttttgcacgggaaaatgcgcccgcctgccccgtgctctttctggaccaccaatatcatacgcgtggcgctttgcagcattttactgttagccgtgagtgcgtgtctggctcaggctgtcgtgtatttgcaacttcgggagtatgaaaaacagctgagccacacactgacgcagcaatggcaacgttatattccagaaaacaggcatacccgtaatctgcgtacctatttacccaggcagctacagcaacgatcgcctgccccctatttgctcttacaacagcttcaggctcatctgtccgctttcccgggactggcgctggaaggggtgagttataacccggcacgtaatgatttacgtctttttatttctacccgcgatgaccaacagatccaggcgtttttaaatcaaaaactggctggctactcactcaaagtcgataaacatgaacagggattatggacgattcgaaatgattaa

SEQ ID NO: 125318 - DNA, 474 bp, Enterobacter cloacae
atgattaaacgcgctcaggaatggtttcaccaaaaagatccgcgtgaacagcggctgctactcgcactgcttgtctgcggtgtcagcattcttttctggtttgggctctaccagcccctgaagcaggctacggacaccatgcaatcccgctatgctaaggtgcaacgcgatctgcagtggttgcagaaacaggtatcggctgcagctcttcttccggaaaagagaccatcaggctccctggagaatcaggttaaaagcagtttgcacatgctgggcactgccgcaaaactccagcgcaccgatagcggagaactgactgtatcggccgacgctctcaggatggacgcttttatgaactggctggcagtgctacagggagactacggtctgcggattgcggaacttgaattccacgccagtgaacagggtacggacactgtaaccctgacgcgcctgacgctcggagtgaaataa

SEQ ID NO: 125319 - DNA, 780 bp, Enterobacter cloacae
atggatagctcactggttactctgtttctcatcattggcctgctgtcaggaaccgcaatgggtatactcacctggcgtttgcctgccgagattttacgaccgtcttcgacaggcgaggcgggttcaacgtcagagtttacgttctctggctcccggtgctgccagtgtcaaaccccactgttctggtacgacacggttcccctgctcggctggatgcttctcaaagggaaatgtcgccactgcggccagcctgtttcaacacgctatcccttgctggaagggctttgtgcgatgatggccgtcatttgctatgccctccatccagcatcaatgataatgtcactggcgctttttctgttcttttggtttgtactcgcactcagcgtgatcgatctgcagcattaccttttacccgacaagctcacgctaccgttactgtgggttggcctgttgtttaatgccttttttggccctgtttcctcccaggacgccattgtgggtgccgctgccggctatttaattctgtggctgctctactggctggtccgcttaatctgtcacaaagaagggatcggttacggggatttcaagatgcttgcggcagtgggcgcctggtgcggctggcgagaggtacccgtgatcctttacgtagcgtcaatcgcagggatcttttacgggcttctgctgtgggtaaaaaaagggcatttcggtgacccgatacctttcggtccggcactggcactgagcggctggggctgtttctgctgggcaacgctgtga

SEQ ID NO: 125320 - DNA, 1692 bp, Enterobacter cloacae
atgaagttgcttaggtttttattggagatagatggaaaagaaatacgctcgataccgtttttcgagaatttaaatataataacaagtaaaaaggagtctgatgaccccggtaatagtgttggtaaatctacgttgggaagggttctggactatttgtttgatggctcaattaagcctatctatattgatgaagagtttcaaacacctaaaaaagaaattgaacaacttttcactagaaatgaagtgcacgtatcattagaatatttaggtttagacaaccagtatagtattattaagcgtaggctctctactaatgtagacttgcaaagttatattttaaatgggagagaagtaacaagtaaagaatatatccatcatatcatgggtagtgtttttaatgttagctctgctaaaccaacgcttagaaaactcgctccaaaattctttagaacaacgcaacaccgtatgacaaaaacagttaactttgacaatggcaggaacgtttcaaagtcagatgttagtactgtttttttatatttgtttaactttaatgacactgaaatacttaccaaaatacataaactaaagactgctataaaaggttatgaaagaaacctaaaagcgtttaatagtgttatttctcaagataagattgttagttcgataacccatatgagacgagaaatttctaagttggagaggtctcttttatcgtctgaaaaaggaatcgataagctagaaatagtctctaaaattaatagggtagatgatgagcagaatgccttgtctgatgaaatattgtcgttagatttaaagataaaaaacatcttagaaactaatgaaatacttaagagtaatgaacaagttcatttgttagatgaattacaggcaatttatgaatacgcatcagttaagatagagtctacccttcaggattaccagcaagcacttgcgttccacgcacatcttctaagtactaagcgtgaatttgtttctcatgggttggataagcttcaagctgaacatgaaaaagcaacggttaagttcggtcagttaaaaaatcagaagcagagtcttttcgacgagcttaaatctaaaaagaaaatagaagagatttctgatgcaatgaaggaaatcggtaaactagataaagaattagccaagctgacagccataattgacaaaaaagatgatattgattcaaagttggctatagaaaggcaaagcttaactgaattatcagggcagctggaagctgaacttactagcgtaacctctttcgaagataaattcatagataatttcaaagaatacactcgtggtttttatggtgttgagtacaaattcagtctcaatttagatcaagaaaagggcgaatgtaccccacatgtagatgatgtggagtcaaataacgaaggtgggttaaagagacttgaggttgttactttcgatctagcatatatcaagaccgtttgtgataaaaaagctttgagacctaattttgtactacacgattctattgatgaaatcgatattcaacacgttcgcaaaatttttgatgagtcgattaaattgtcagggcaacatatagtatctatgctgtctgataaattaataaaagaagattaccagaaatataatcgttatattattcttgaattatctcaagataataaattttttaagatttaa

SEQ ID NO: 125321 - DNA, 237 bp, Enterobacter cloacae
atgctaccaactaaaggatctcatccagagatgaacgtgctctacatcggtggattcattttgaagcagctacaagagtgcaaaagagggcgtataaagatcactcaactaatgaaaactggggaaaaagagctttctgtttctgtagaccatataattttagcgctggactggctgtatataatttcagctattagctacgatcggaacgaggtttttattaatgaagttgcttag

SEQ ID NO: 125322 - DNA, 552 bp, Enterobacter cloacae; identical to SEQ ID NO: 82268

SEQ ID NO: 125323 - DNA, 363 bp, Enterobacter cloacae; identical to SEQ ID NO: 82269

SEQ ID NO: 125324 - DNA, 1197 bp, Enterobacter cloacae
atgaagcttaatgcacgacaggtagatgctgctaaacccagagagaaagcctacaagctagcagatggtgcaggcttgtatcttgaagttgttccttctggttctcgatactggcggatgaaatatcgcttcaatggaaaagagaaacgtttggcttttggtgtctatccggcagtgtcccttgcacaagcgagggcactacgtgatgaagccaagaaaaagctggccgaaggtatcgatccatcgtttgccaagaaagaagaaaagttggttcgcgatgtgcagctcaataatacgtttcaggctgtggcacttgaatggcacggaacgaaggtaagccggtggtcagaaggttatgcctccgacattatcgaagccttcaataaagatattttcccttatattggccaactgccggtgaataacatcaagcctttggttctgctgaatgtgctacgtcgaatggaaagccgtggcgcgacagagaaggccaagaaggttcgccagcgctgcagcgaagtttttcgttatgccatcgttaccggccgcgcggaatataatcctgccgcggatctaaccagcgcgatgtcagggcatgaatcgaagcattatcccttccttactgtagaggagttaccagacttctttaaagctctcacaggctatacaggaagcccgttagttgttcttgccgctcgtctgctgatccttacgggagttcgtactggcgagctccgaggtgctttctggagtgaatttgatcttgagaaagcggtgtgggaaatccctgctgagcgtatgaagatgaaacggcctcaccttgtccccctatctacccaagcgctggaaatcgtacaacaactcaaggtgatatctgggcaatatccactggtattcccagggcgaaatgatccccgcaagacgatgagtgaagcgagtattaatcaggtattcaaacggattgggtatacggggaaggtaacggggcatggtttccgtcacacgatgagtacgattttgcacgaggaagggttcaatacggcatggattgaaacccagcttgcgcatgtcgataagaatgcgattcgtgggacgtacaaccatgctttgtatctggaagggcggagggagatgatgcagtggtatgcggattgcattgataacattagtaaatttaatctaatcatagcatcataa

SEQ ID NO: 125325 - DNA, 915 bp, Enterobacter cloacae
atgtcatcagaaactagtttacgtagtcagcttgagcttccaaatgatcagcaaattgatgtccttgctgcgattctcgacaaagagaacgaacaggcgacatcagcccgtagtatgtctaccgaacctcaagaagttcttgagaaacaccccggtattactccttttaaagatctcgtttcaaaagcatcagagctcgttttgacaaaaaatggtaatgatatagcgcaatgtctacgctctatccttgaaaacaaaaatgattacctaaaccatcgagatgaagcagtgtcattgtcaattgcgttgaatatttcacaatacatagctccgagatttcgtgcgcttcctccatcacctaaaagaacgtctgatgatgaaccaaaccaattaagcattgaccgccaagtcatcgatatgcactggacatggatacaaggacaaaaaaaagcggtaggtgcagaagagtttgagcacctatttcagcgtgaagaatttgactggatcttggcagaaaaatttgcgcgtctaaattggacaactgacgtaaaaatcagggcattacagatcaatgtaaaccttcaatgggagttagcacagtatcaatctaaaaaacaccgtgattcatggcggaaacttcaaaaaggagatgtccgaggtggcaagttgcattcattggggattgcacaagtcacggagagacttgaagtttcagtaacaaaacggagaaatctagcaaaacatattcctcattgggttaatgtttggcttgcttcccgcatatccgataaatcatacatgagtttagcgcagataatgagatttatgacaggggaaagccacgatgagaagaggcttaaatcatcattaaaagctgttttacaacgtttagattcatatgagaaaaagatgtga

SEQ ID NO: 125326 - DNA, 465 bp, Enterobacter cloacae
atgaaaaaatccctaagaatacagtttggcgagcgggtaaaagagttgcgcgttgccaccggaatgagccaggaagcgtttgcggatcggtgtgggtttgcacgtagctatatgagccgcattgaacgtggcggttctaatgcatctctcgatgccattgaggtgctggctagcgctctcagtgttgaaccgtggcagttgttagtattcgactcatccgaagaaaacgacccagaactactggttccctatgcggcggatgggacgtgctttaatcccgaactggcgagtagtcgcgatggttcatttgcagtaggagataaagccgctcagaagcgttttggctcgtttatcgaagcccttgaatatctccgtagcatggagacggcaaagtggcgtaggccgaattctgcgggcaattgggggattgtgtctgctgttaaatgggataagcttaggaagtag

SEQ ID NO: 125327 - DNA, 498 bp, Enterobacter cloacae
atggcgggatcagattttatattacctatgatagcgggagccgtgctcagttgggccagttacagcatggtcgcgcacgttacatcaaaacggcagatcagcactctacgagcaatctcatggggtgttctgggaacgctctcactagtgctgggattaagtgcattcgcagctgttagcgctgaactcccgggagaaaaacaaaatgccttgtgcttgattaacgagccagaatgctatgcaaaagcacatcataaccccgtcaaaaagtgcaaacaggtaatggatgagaaagcgacatttcgccatgtgtggctagatagcgaagagcaaccagttttcagcacctacctctggcacgacaagagcaaacaaactattcaaatattcgggcaacaagctaaggcgattaatagccttgggattcaaacaccactccaatatttttgtgtattcaacgccaacaccggggaagtcatcgcggcttcatttgagtaa

SEQ ID NO: 125328 - DNA, 558 bp, Enterobacter cloacae
atggctacttttggctacgggcgtgtttcaacaacgcagcaggatactgagaaccagcgactggagcttgagcaagctgagtggcaaattgactattggtttgccgatattgtcagtgggaaggttccggctatgcaacgtaaagcgttttctgaaatgcttagcaaaattcgcgatggtgaaacgttggtagttgcaaaactagaccgtctgggacgtgatgcgattgatgttctccagacggtcagggcactggcagagcgtaatatcaaggtgatcgtccaccagcttggaactactgacctcacttctgctgccggtaagcttctgttgtctatgctggcagccgttgcggaaatggagcgtgacctacttattgaacgcactcaggcggggctgtcacgagcaaaagctgaaggaaagaagctgggcagaccgtcgaaaatcgcaccagaagcccgtagggcgattatagagaaaaagaatagcgggaccagtatcagtgcgttagcgcgtgaatacggtgtttccagagcgactatagccgcgctgctttaa

SEQ ID NO: 125329 - DNA, 2265 bp, Enterobacter cloacae
atgaaaataaatttcattgaaattaagaatttcagaaagttgaagtctgtccgcatagatattgcagaaaaaaccactctctttgttggtgctaacaatagcggtaaaacggctgcaatggaggccttaggacatttcctcgttgatgcctcgcggtttagcgtaaatgatttgacactttgcaattgggcaaaaataaaaaatatcactgaacaatggttaactgaggaaaatatagaccttgctaaatcacaggaagctttctcagatctttttcctttcatggatatttggatcgaagcgaaagaaaatgagctccaatatgtcaatcatatactaccaacgttagagtggaatggaggtttaattggagtaagactgagatatgaacccaagaaatttgatgttttctttgaggacttcatatcttcccgccaaaattcattagatatacacgaccgaatttctgagcggattgataaagaaaattacacaatagcattgtggcctaaagatatttatgaatatctttcaagaaagttgaactcaatgtttacaattaagtgttatagcttagatccttcgaaattagaatcatctgataatggaatagccaaaccccaaagaatagatagtcagcaaacattacttgatggcatacctctcaaagatctaataagaattgatgagatcaatgcacaacgtggctttggaagcccctctgctgccgacaaagagaatagcaaattaaacacacagttgagagattattattcgaaacatcttaacccaatagaaagccctgaactatcagatatcgaagctctacaagccattcgtgatgctcaggatacatttgatgaaagattaaaaaactgtttctcccaagccataaaagaagttgaaggcctcaactatccaggagtaactgatcctaaactaaaaatctctacaaaaatagaaccaattgatggcttaaatcacgactcagcagttcaatatgagttaactaatgctttaagcaatgtatctttagactatttaagattgccagagagttataatggactaggttatcaaaacttaatctcaattgcatttagactaatggggttcagagatagttggatgaaagttggcaaagctacaaataaaaaattagcagacgacaatcaagaggattttccagctcccctgcatttggttttgattgaagaacctgaagctcacttgcatgcacaagtgcaacaaatcttcattaggaaagcatatgatatattgaggaatcataataatttaggcgataaagaagagcttcatacacaactcattataagcacacattcgagccatattgcgcacgagtgtaaattttcttctttacgatactttagaagaattcctgcttgtaaagaacatgagatccctgtatcaacagtaatcaatctttccaatgtttttggtgtaaatgatgatacggaaaaatttgtaataagatacctaaaggcaacacattgtgatttattctttgcagatgcagtaattcttgttgaaggcccagccgagaggattttagttcctcacttaattagaagacactaccctttcttaaatcaaagctacattaccttattagagattggtggtagccatgcccatcgactaaagaatctgattgttagtttgaatcttttaactctgattattacggatttagaccctaaggattcacaagatggcaaggttaagccctctaagaaaggcagcggtttcgttacaagtaatacaacgcttgcaagttgggttccagaaattaccggtgtcgatgaattgtataaactcacggaagataagaaagaaaagaaatataatgatttcttttatgtttactcagcttttcagattcctgttttggctgcattcaaaggtgttaaccaagaatttttaccaaacacgttcgaagactcattagtctacaataatctagattttttcagtaatcttactggtaatggtttagtgaagaaattcaaagcatcaattactaattgcaaaaatgcagaggaatttggagaggaatcatttttacacttatctaaaggtaataaagctgaatttgcattagatatactttaccatgacgaaagcgataaattaaacacacctaattatataagtaatggtctaaagtggctcgaagaaaagataaaaataaaacaattagagcttgtttctgatttagccagtgatggagaaaacaaatga

SEQ ID NO: 125330 - DNA, 381 bp, Enterobacter cloacae
atgaaattaactaatcgactgaagaagaagatattagtgctggatggtattgataatgactttatagattacggcgcaaaaatagcatgccctgaatgcgagggcttaatagtctactctgtcgtaaactcatatgagtttgacacgctctctgaagaggtaaaatgctttttggttaagaaaatgagaggtgtaaagcttgttagtgaaaataagaaatatagctatgatgaaagccaattagatgtttcgaaaaactcatgttcaaagtgtttaaaagagttttccactgtattaacgtataaagaagtgcagccagcccgataccgggtatatcttgtggggctttttgacggtgatttgaaacagttcaaactttaa

SEQ ID NO: 125331 - DNA, 339 bp, Enterobacter cloacae
atgatggaattaaaatttaaaccgattacaggtgaactaaattttgatggtttgcctttggaaattgatactaaagaaggcttttgtaaatgtgatttatactacgaattagttaagtacaaagctataaagaaaaccatgcctaatcactaccttgttgactcagtagcgtttttcgacaaagaatttcaagttactatacgcacagtgtgctatggttttccttttatgcttcatcttgttgataaaaacagtcaatactataacgcattaaatgattggaacgctcgaactaatattcgcatgctaaatgaatcagtgaaaagtttgtctgattga

SEQ ID NO: 125332 - DNA, 141 bp, Enterobacter cloacae
atgtttggagatgaaattggtgcaccattagaacaatttacgcatgcttatccgcaatacggaaaggggggcgtagaacaaatgcatgcagaaaaacggacaattattttcgataaaattgatattcttccggaggaataa

SEQ ID NO: 125333 - DNA, 237 bp, Enterobacter cloacae
atgatcgctgacttcaattttattaaagaaaaagaggtgctcgagtggatatgctgtacaagaagcttacgcataagtataccttgcttagatctcgcaatggtcgactcaacacgccagttagtctttacgttaactgagccaaagccactaccaaccgttttgacaattttcaatgctcaggcgaaaaactattttggtctgcacctcctgaaggtgcggctttctattacttaa

SEQ ID NO: 125334 - DNA, 150 bp, Enterobacter cloacae
atgaacatttgttattattcggataaaatacttacccctaaattaaattgcgatgtcgttttcaaaaataaagaagtcaaatctcttcggcatctccagaacgctttggtaagtgacgctttatataatatttcgggcttcaaactataa

SEQ ID NO: 125335 - DNA, 228 bp, Enterobacter cloacae
atgtatttcttagaaagaaaagatgctgaaaaacttctccataaagttttaaagagcactttaaaaaaacagtctgatattgatttattaatggatatagcacttaatcatgaatctggtattcctatgaaaggaataatttatgaatatgataaaatggagaaaaataaaccaactaaacaaaatttagatgatcttaacacattgatgcatttttatgggccgtaa

SEQ ID NO: 125336 - DNA, 1182 bp, Enterobacter cloacae
gtgaagggtatgcagaagatcaaaaggggtaagagcttcacaggtgttgttcaatatgcattgaagccgggagcacatcataaaagtgatcccatcatcattggcgggaacatgttaggtgattcagccctggaactgatagttgaatttgatggcaccaaacagcttcggccagatgtccagaaaccggtttggcacaactcgcttcgcctgcctagtgtagaatccctaacggctgaacaatggtccagcatcgcagatgactatatgaggagaatgggattcagtgatactcaccttcgttgctatgtgcttcatgacgatccggctggtcagcacatacacattatcgcaagtcgcatagacctcaatggagggaagctctaccttggcaggaatgagaaccttataagtacccgcataatcagtgagcttgaaatcactcataatctaacagtgaccaagacagcaccttccattacaccaaagcaaccgaagcggaaaagaatctctcgcaacgaacagatgctatcagaacgaactggtgttccctcccctaaaaaagctctacaacaaatacttgataaaagtttgaatgatatgcccgaccttctttcttttgttaagcgactcgaagatgcagaagtcggttggacggcgaatgtcgcaagcacaggtaaaatgaacggcttctcattctcttaccgcgatatagctttcaaagcttcgcagttaggtaagggttactcctgggtaaatctcagtaatcggcttaactacaaccccgaccacttagaagctttacgaaccaacacaccggcaaaagaccaccctgctcctgctcctgctcctgctcctgctcctgctcctgctcctgctcctgctcctgcaaaagatgttgcaacaacggatattccaagggaaagcataagtgaaaaaattgctgaactcgaactgcgactcagagaagacagaagaaaagaaatagtagaaaagattcttcaaaaaaacgcagtacaacagcaaaagcatctcagacttatcggctggcttccatttcttagaaggcttgcagagcttctccggagctatggtaagagcattcttcacaagcccctccctggattctcaaatctctatgtaacccgacctttacataaagaaaggaaaattcatttataa

SEQ ID NO: 125337 - DNA, 1179 bp, Enterobacter cloacae
gtggttgaagattctctggattacaatggctcaggaaagattgatgatctgagtcttggtggagcaaacttaatttatcttgctttaaagttatatgaatatgaagaaataagggatagtgaagagcatattactcacttcttgttaattgaagagcccgaagcacatattcataaccatatccaaaaaacccttttcgataacttcaattttaaaaacacgcaagtgtttgtttctacacattcaacacaaattagttctgtatcaaaaatatcatcaatgaatatattatcacgccaaaaaggatttactgatgtatatcatccatcgtttggtttgacgccgaaagaaatttcttccgtagaacgatatcttgatgcaattcgtagtgaccttttgtttgctaaaagtgtcattctggtagaaggcgatgcagaacttattttaataccagcaatggtaaaagaaactttgggaatcagattagatgagttgggcataagtctgatcaaagtagatggcactgtttttaaacatatttctaacctttttcatgaaaaaaggctgaaaagaaaatgtgcaattctcacggatcttgattcggcctatgtaaaagtagctgatgatatttttgatgcggattttgtcgaatctctggtagatgccgaagatgatggattacgaagaaaagaagagttagacaaatatattgaaggtaatgagtttattacggttcattacgcagaaaatactttcgaaactgagcttgttcgctacgatgaaaacaataacttgtttttagaggttatgaaaacagagtataaaaaagaagcgtattttaaaaaggctgaaacagatgtaaattcatctgatctcagagttcgatataaaagagtattaaagtttgcaaagaaaatagggaagggatggttagctactgaaatggtagagcatcttagtgttgataatcgtgttcctgattatattttacaggcaattcaatttgttcttcgggatagaaatgtcgagcctatatatcaaaaaatgcttgattacaatatgtctttaatgggggttaaagaagttgactgtataaatgccaaaaaggatttttctagtaaaatgatagaatataagaaacatttcaatgacagttttgtaagactgttggagttatag

SEQ ID NO: 125338 - DNA, 429 bp, Enterobacter cloacae
atggacaaaagcaacatcaatccagaatttactctggaagagcaacttatcattatcatcgataagtatatctcaaaaagataccagccaggcgataaaagtttctcataccaactatatctactttttgttggctatcatttaaagtatttctatcctaaaatgatttattccaaatccaatcgtaatattgataacataatggctatgtttagctcagtatacaaaagcctgacaagcaatctactacaacgattaaataacaaagaaggggttctaagagagctaaactcgcttgttaattacatagataacaatcaagaaaaagcagaggaaatctatgctactgtcagggcacaatatgaagttaaggttatcgagaacgagctaacccatgaagcagttcgcacaagaaccgtcagattatag

SEQ ID NO: 125339 - DNA, 1143 bp, Enterobacter cloacae
atgccctgggatgcgagagataccatgtcattacgtaccgagtttgtactgttcgcctcgcaggacggggcgaacatccgttcgctgtgccgtcgcttcggcatttcacccgccaccggctacaagtggcttcagcgctgggctcaggaaggcctctccggccttcaggaccggccccgcgtgcctcatcattccccgaaccgctcatccgacgacatcaccgcgctgctgcgcatggcgcatgaccgtcatgaacgctggggggcccgcaagattaagcgctggctcgaagaccaggggcaccgtatgcctgccttcagcaccgtccataacctgatggcccgccatggcctgctgcccggcacggctcccggcattccgcccacgggccgcttcgaacacgacgcgccgaaccggctctggcagatggattttaaggggcacttcccctttggcggcggccgctgccatcctctcaccctgctggacgaccactcccgcttttccctgtgcctcacacactgtaccgatgaacggcgtgagaccgtgcagcagcagctggtcagcgtgtttgaacgctatggcctgccggagcggataacgatggacaacggctccccctggggcgacaccaccgggacctggacggtactggagctgtggctgatgcgccagggtatccgggtgggccattcccggccttatcatccgcagacgcagggcaagctggagcgttttcaccgaagcctgaaggcggaagtgctgcaggggaaatggttcgcggacagcggtgaactgcagcgcgccttcgaccactggcggacggtctacaaccttgaacgcccgcacgaggcgctggatatggcggtgcccgcctcgcggtatcagccgtcttcgcggcagtacagcggcaccgtgacatcaccggaatacgatgatggtgtggtggtcaggaaagtggatatcagcgggaagctgagcttacagggagtcagtctgagcgcaggaaaggcgttcaggggagaaagggtcgggctgaaggagacacaggaggatggctgctatgaggtgtggtggtacagcacgaaagtgggggtgatcgacctgaagaaaaagtcgatcaccatggggaaaggatgttaa

SEQ ID NO: 125340 - DNA, 294 bp, Enterobacter cloacae
atgagcacggtttacattgtcattttaacctatatcaaaccactcgaagagattgacgcagcgatacatgctcatgttgagtggctaaaaaagggggattcagaggggattttcctggcgtccggtagacggatcccaagaaacggtggcgtcattcttgctaaatctgagagtcttgcctctcttgaggagcgcttgcgcgaggatccttttcaggcgttaaagctagcgactgttgaaatcattccctttgaacccagcatgaaaacagaactattagaaaatgtgttttaa

SEQ ID NO: 125341 - DNA, 2274 bp, Enterobacter cloacae
atgggaagcaattcttctttttttgcccgtagaacggcactggccatggccgttgcgctcttttgcgcctggcaatcccctgtttacgctcacggcagcgaggcgcatatggtcccgatggacaaaacgcttcaggcgtttggcgcggacgtgcagtgggatgattacgcccagatgttcaccatcgctaaagacggtgcctttgtggaggtcaaacccggcgccaacaccgccatcgttaacggcaaaccgctgacgctccaggtgcccgtggtgatgaagaacaataaggcctatatcccggagacttttatcaacgatgtctttcagtccggtcttgatcagacattccaggttgaaaaacgcccccacccgttaaacgcgctgaccgctgatgaaatcaaccaggccgtagccattgtgaaagcctctgcggattttaaacccaatacccgctttacccagattgcgctggcggagccagaaaaagctaaagtctgggacttcgtgcttaacggcacggcggtggatgcgccccgccaggccaatatcattatgcttgacggcaaacgcatcatcgaaagccgggtggatctgaaggacaaaaagatcctccgctgggagccgatcaaagacgcgcacggcatggtgctgctggatgacttcaataccgtgcagcagatcatcaatgaaagcccggagtttgccgccgtgctgaaaaagcgcggcattaccgatccgaagaaagtgatcaccaccccgcttaccgtcggcttttttgacggcaaggatgggctgaaacaggaagaccgcctgctgaaagtgatcagctatctcgacgtgggcgacggtaactactgggcgcacccgatcgaaaacctggttgcggtggtggatcttgagcagaagaaaatccagaacattgaggaaggcccggtcgtgccggtgccgctcaccccgcgtccttatgatggccgtgaccgcgttgaaacggtgaaaaaaccgctggagattatcgagccggaaggcaagaactacaccattaccggggatatggtgcactggcagaactgggattttcatctgagcctggactcgcgcgtcggcccgatgatctccaccgtgacctataacgacaacggcaaaaagcgacaggtgatgtatcagggatcgctcgggggcatgattgtgccgtacggcgacccggatatcggctggtactttaaggcctacctggactccggtgattacggcatgggtaccctgacctccccgctggtgcgcggcaaggatgttccgtctaacgccgtgatgctcaacgaaaccatcccggactataccggtgcgccaatggagatcccccgggcgatcgccattttcgagcgttacgccgggccggagtataagcatcaggagttaggtaaacccaacgtcagcaccgagcgccgcgagctggtggtgcgctgggtcagcaccgtgggtaactacgattatatcttcgactgggtattccacgaaaacggcaccatcggcattgatgcaggggccacgggcattgaagcggtgaaaggcgtgcagacgaaaaccatgcatgatgccaccgcgaaagatgacacccgatacggtacgctgatcgaccataatattgtcggcaccacccaccagcacatctacaacttccgtctggatatggacgtggacggcatcaacaacaagctggtggccatggatccggacgtcaaaccgaacaccgctggcggaccgcgcaccagcaccatgcaggttaatcagtatgatattgataccgaacagcagggggcgcagaagtttgatccgggcaccatccgcctgttgagcaacaccagcaaagagaaccgcatgggcaacccggtctcgtatcagatcatcccttacgcggggggcacacacccggtggcgacgggcgcgaggtttgccccggacgagtggatttatcaccgcctgagctttatggataaacagctgtgggtgacgcgttaccatcccgacgagatgtacccggagggaaaatacccgaaccgttccacgcatgatacgggcctcggccagtacagcaaagataacgagtcgctgaacgaccaggataacgtcatctggatgaccaccggcaccacccatgtcgcccgcgccgaggagtggccgataatgccgacggaatgggtgcacacgttactcaagccgtggaacttctttgacgagacgccaacgctcggtaagaaaaaagagcagaaataa

SEQ ID NO: 125342 - DNA, 885 bp, Enterobacter cloacae
atgctgacttctcaacagaccctggaattgcgtgacaacagtcagcagcagcatgccatacaacagcgaatagtttccctgaaacctcaggttaaaagtgcagaaaagcgtctgtcacttgccgtgcatcaggctgcgctggccgtgtctgttatggagcgctataagaaacttgctgatacgcattacgtatcagatatcgaataccagcagaagcagattgacgtttcaacgtcacagcaaaacgttgaggatcagcgtcaggggcttctgcaactgcacaccgcgatggaggctgctaaagacgaccttgaccatctcatcgttcagggtgaaagccggaaggctgaaaaggacaggcagttgcaggttatcaggcaacagcaggacgaactggcaggtaaggaaaatttcacgctgacttcaccggtatccggaaccgttgctgccgtgctggtcagacagggacagtctgtcagggcatctgaacctgtcatgaccctcattcccgacaatgcccgtttgcagatagaactctatgctaccagtcagaatgctggctttattcaggcggggcagcgtgttgccctgcggttctctgccttcccctatcagaagtttggtgtgcagtacgggactatccgtgaaataagccatacaacgctgacatcttctgatttactctccgtatctcctgtgacctggaaggagaatgaaggtcattaccgcgtcatcgttgaacctgaaaatacttttattctggcttatgggaaacaggaagccctgcgccccggcatggttcttgagggggatgtcagcctggatacccgcaatttgtgggagtggctgactgagccgctctggagcctgaaaggaaagctgtga

SEQ ID NO: 125343 - DNA, 312 bp, Enterobacter cloacae
atgttcgccacaatttatggaatgaatgaactgagcaagaaacatctggggattcaagaaaacattctgtgttcgctgcgtttcttttacgtctattactataagaagcacatacgaacatttgactacgatttctataggtctggctacaatatctcctgttttatcacgcagcttgatggcttctttacctacctgctcgggaagcagcactttgttgatggcaagaaaactgaagacgtgaagtcatggcgcgcaactgcagtatttgagcctggcaggctaatgacttctcgtcctgacgacacataa

SEQ ID NO: 125344 - DNA, 804 bp, Enterobacter cloacae
atggatatcgcgcttttttccggacaaagtcggcgtcagtgggctgatacgatgatcaatctggaagcccggaagcttgttaataccgcaaatatggtcgcggccatgcatctcagcgattcactgaaccgactgaaattcgtggatgaaataagacaggttgtaatgcaacagtttgacgtggcgaggcgagcaaggaacgatgaagaatgcattacctgcatgaaaaaccttagagctgagaatgagtacctgcttgaacagtcgcgcatgctgaaaacaggctatgcccggatctacgctgatattcagcatgtaacagagcagaataaaatagtcgggtatttcatatccggaattaaggtcgttcttgccggcgttcaggcagtgtttggcggtgttatgatcgccaccatgacgcctgctggtatgcttgccggtgccgttctggtcggtgatgctcttaatacggtatcacgggaggcagcccgtcagttcctgaatgaaccggcttcagaggggataatagcggacggcgctatgtccatagcggaatttatggggttcagtcgcgatgttggcctggggatctttaacgcaaccacgcttgcagccagcgtttatggggtgtttggtatgactggtaaagctgatgcctggcgtcttttccgttatcttcccggagactattaccgcaaggtggaaaccatgtctccgggcaaactgacgatgaaggttatgggatggggggtgagcgcgaaggtggtactggaactccttacccgtgatgaccggagtcgctga

SEQ ID NO: 125345 - DNA, 330 bp, Enterobacter cloacae
atgacagtgaaaaaccaggaactcatagcggcaggattcaccagtaaggatatcgagcgaatcaaacgtcaccaggcgacgggggaatcgcaggaaaaggttctgaaggatctggccggttatttcctgtcggtagcctggatcaccggcgggatggccatcatcaccttgttcaccgcgatctttggcagcgccagccatgttatctcctgtgtggttgccgtcgtctttttgctaattgttctgcttctggtgatgccggtcagacttggctataaatcatggaagctgatgagaacacagatcagcgactccggtcatcacgggtaa

SEQ ID NO: 125346 - DNA, 483 bp, Enterobacter cloacae
atggcaattccagcatacctctggctaaaagatgacggtggcgcgaatattaagggctctgtcgacgttgtaaatcgtgagggaagtatcgaaattttgagttttgggcacggcctgtatctccctaccgacaacatgaccggtaagatcacaggtacccgtattcatagcccacttaattttgaaaaagagttcgacagctcaagcccctatttgtacaaagcagtagcaaaaggacaaaccttaaaaagcgctgagtttaagtggtatcatatcaataatgcaggccaggaggtcgaatacttcaacatgctactggagaacgtgaaagttgtctctatctgcccactcatgcatgatataaaaaatcccgcgactgaaaaacataaccatctcgaaagtatcgcacttcgctacgaaaagattacctggaagcattgcgacgggaatattctcttctctgatgaatggaaagacagatga

SEQ ID NO: 125347 - DNA, 480 bp, Enterobacter cloacae
atgattcgatgtacttttcatttaaacgggggacaactttcaacgctgagctgtcctggcctgggttttttccccgcatattcaggaaactcaggtcacaacagaaacaatcctgatgccgtttcaacgcctgaggtagggccattaccacccggactctattatatcgttacacgtcctcgaggtgggttagctacccactggcatgatgttatcaaagagtttgaaagcggatcgaaccgtgatttttggtttgctctttatcgtcatgataatcacattgacgatacaacctttatcaacagagttgagcgaggatcttttcgtctacaccctgcgggacagtccggtattagtaatggatgcatcacattaccaaaccatgctcacttcagaatattaatgcatggactactggcgtccggcacaataaaagtcgctgctggattaaatgcacttggcaccatacaggtatattga

SEQ ID NO: 125348 - DNA, 231 bp, Enterobacter cloacae
atgaatgcaagaaaacatgcccttacgtgggtggtcgaaacattgatgcttttcattatttattcgctggtatgctacatcatgccggatgttttgctttatcacctctacaccagacattttggatttgtaactgaacttgaatggagtgaaagctacacattattactttttattttttcctttctgcttaacgccgtattgatctacctttgggcgttacgaaagtga

SEQ ID NO: 125349 - DNA, 312 bp, Enterobacter cloacae
atgatgacttaccagtcagatattcttaaaacgacaagagtactttttagcaatatgagtgcagaggaagcttcagaagtttcggggatattaagactctcatctttatctatgaatgttgaatgggagtgtgagataatgcatttaaatttgatgctgggtaatttaaatgagcaccatttttggttggtgtttactctggcacttttcatatcagaaaaaaataatgagccggttttaatggtcactggcgttggtgatgaataccttttaaatgtcattaagccatttgataatagcaaggagcattaa

SEQ ID NO: 125350 - DNA, 1506 bp, Enterobacter cloacae
atgaacgaactggttagtgcaattaacggtgttatctggagccctgcgttaatatttttatgtctgggtgtcggtctctatttctcactgcgtagtcgttttctgcaattacgtcatataaaacatatgattaccctgatgtttcagggcggggctaccgatgccggcgtatcatcgtttcaggcgttgacgatgacgctggcgggccgcgtagggacagggaatatcgccggtgtggcgaccgccattacctttggtggccccggtgcgcttttctggatgtgggtagtggcatttttaggcgccagctctgcttttgttgaatccaccttaggtcaggtttataaagaaaaaattaacggcgaatatcgtgggggacctgccttttatattgaaaaagggttgggggtgaagtggtacgcatggttatttgctattgtgaccattttctcctgcggtttattacttccgggcgtacaggcaaactcaattgccgccagcctggatattgccttcggtcttaacccaaacgttacggcggcaatactggctgtactgttaagcttcattattttcggtggtgtaaaaaggatcgccagctttagcagtatggtcgttccgtttatggcgctcggctatattattgttgcctgcgttattatcgcgatcaatattgaaaaactgcctgctgttatcctgctgatctggaaaagtgcttttggccttgaagcgggatttggcgctattctgggccaggctatcatgtggggcgttaaacgcggcgtctattccaacgaggcggcgcagggcaccgggccacatgcatcctcggcagcagccgtaagtcatccggtgaaacaagggctggttcaggcgttctccgtatatatcgacacgctgtttgtctgctccgcgaccgggtttatgctgttgatcaccgggctttataatgttcagggcgtcgacggcgcagccctttataccggtattgcaggcgtggcggccggtcctggctatgtgcagacagcgatggaaagtatgatgccgggctttggtaattactttgtcgccatcgcgctattcttctttgccttcaccaccatcattgcctattactatatcgctgaaaccaatatcgcctacatcaaccgtaaaattcaccgtccgtggctgacattcctgcttaaattatgtctgatggcttccacggtatatggcacaatccgcaccgcggatctggcatggggattaggggatatcggggtagggctgatggcctggctcaacattattgccattgtcctcttgcataaaaaagcctttgccagcctgaaggattatgaaacccagaatgcgcagggaattgatccacagtttgatccggttcggcttgggattaaaaatgcggattactggctgggggagcgcagagatgaagaggggggattgccggggcaggtttcttctcctgaaggaaagcagccggcggggaagttgaataactga

SEQ ID NO: 125351 - DNA, 906 bp, Enterobacter cloacae
atgcaggatctcaatgatttcgtatggtttgtgaaggtggtggagcatggcggctttgcggcggcggggcgggcgctcgatcagccaaagtcgaaactgagccgtcggattgcgcagctggaagaacgcctgggtgttcggttgatacaacgtaccacgcggcagtttgcggtgactgaagtggggcagacgttctatcagcactgtaaagccatgctggtggaggctgaagctgcggaggaggcggtggctgctttacaggctgagccgcgcggtatggtcaggatcacttgccccgtaaccctactgcacgttcacgtggggcccatgctggcgaggtttatggcgcgctatccggggatcaacctccagcttgaagccaccaaccgccgggtcgatctggtgggggagggggtggatgtggcgatccgcgttcgtccgcgcccgtttgatgacagcgatttggtattaagggtgctggcggacaggggacactgtctggttgccgggccgacactgattgaacggatgggcaacccggcgatgccttctgaactcagccaatggccgggtttaagtatgggcgctggtaaacacctgcataaatgggagctgagcgggccggagggggcgaaagcagacattcacttcacgccgcgcctggtgactaccgatatgctggcgctgcgggaggcagcgatggcgggcgtgggcgtggtacagttgcccattttgatggtgaaggatcagctggcttcaggtgagcttgttcgggtgctgaatgcctgggaacccagaagggaagtgatccatgcggtgtatccttcccggcgcggcctgctgccatcggtcaggacgctggtggattttctaaccgaagaatatgcccggatggtggaggagtaa

SEQ ID NO: 125352 - DNA, 11424 bp, Enterobacter cloacae
atgagccaaatatctgttatatctaaattaactggcgtggaaacgaccacggaagggacacagataacactcgatcactcctcaatcgttaagcttaacgtggatcgagccaacatcgcagattactcccgcagcggaaacgatctggtgattaccctcaattcgggcgaagtgattaccctcaagaatttctacgtcactgatgcgcagggcgtaagccagctggtgcttgaagagagtgacggagcgctgtggtggattgaagatccaaccggtgccgcgacctatgaatccatcgcctccaccgatgcattactggcggcgtcagggagtgatgctggtggcgccgctgcgtggccctgggtgctgggtggcctggccgccgcaggtgggattgctattgcggcgggaaccggcggtggaggtggcggagatgacgataacaacaacccgaatcccggtaatccgggaaatccttccgaacctgatactacgcctccgaatgctcccactaatcttcaggtctcacctgacggcaaaaccgtaacaggtacggctgaaccgggcagcacgattacccttaaagatgccgatggcaacaccattggaacgggcaaggtcggcagcgacggcaaatttactatcgatctcggtacgccgctcaccaacggggagcagatcaccgccacggccaccgacccgtccggcaataccagccagggtggtcaggtcacagcaccggatctcaccgcgccggatgcacctgccaatttggaggtttcgcctgacggcaaaaccgtctccggtacggctgagccgggcagcaccgtgacactgaaagatgccgatggcaacaccatcggaacgggcaaggctggcagcgacgggaaatttactatcgatctcggcacgccgctcaccaacggggagcagatcaccgccaccgccaccgatccgtccggcaataccagcccgggcgttcaggtcacggcaccggattcaaccgcgccggctgcccccgagattgtcaccgtcaatgataacgtgggcaccgaagcgggcccgctgagcaacggacaacgcacggacgatgcacgcccgacgttcagcggcatcagtgaagctggcaccgttattaccttctatgacaacggcaggccgatcggcaccgccacggtcgatgctaccgggaaatggagctttaccccgtcgaccaacctgtctgaaggaaaccacgccattaccaccaccgcgaccgatgcggcaggcaataccagcccggcgtccacggcggtgaccttcgtggtggatactgtcgcaccaggtgccccggccatcaccggtatgaccgatgacgttgcgcccaataccggcgtgctcggaagcggaagcaccactaacgatccgcgcccgcagctcaccggcacggcggaagcgggctctacggtcaccatctatgataacggcattgccattggcacagcggttgtaggcagcaacggaagctggagctttacgccgtcggttaacctgagcgaaggcagccaccagcttaccgtacgcgccaccgacatcgccggtaacaccggtccggcctcgccggcctttaccgtaacggtggatgtcaccaccccgccggtgccgacaggatttatcgttaacgatgacaccggagggctgaaaggcacgattaccgccgggcagtttaccgacgagtcgcagccccgcctgacgggccgaggagaaccaggcagcacgattacggtttacgataacggcgttgtgattggcagcacaacggttctgccgaacggtacctggagcatcacgccgacaacgccgctggcagagggtgcacattcgattaccctgcgcgaaaccgatgcggcaggcaaccagagcggcctgtctcagccgatcaactttaccgtcgatcttacgccgccagacatgccggaggcgacgctcaattcgacaggcacgcaaatcaccggtactgccgagccgggcagtaaaattgtcatcaccaacaacgccggggtgcaaatcgggaccgccactgccgacagcaacggcaactacgtcgccaacctgaaccctgcacaagtgaacggcgagatcatctccgtggtcgcctccgatgctgcaggcaaccagagttcaccggcgctggttaacgcagcggacatcaccgcgcctgccgcaccgggtaacctggtggtggcggaagacggggcaagcgtcagcggaaccgccgagccaaacagcacgattattattaaagcgccggacggtacgattatcggccaggccaccgccggtccggacggcacctttaccatcccgatttcgccagcccagaccaacggcgaagcccttgaagtgacggccaccgacggcagcggcaacaccagtccgtccggctttgccgacgcgccagacagcacgccaccgctggcaccggaaaacgtggtgatctctgccgacggcaccacggtaaccggtacagccgagccgggcagcaccgtcaccattcgtgaaaatggcgttaaggtcggggaagcggtcgccgacgatcagggtaatttcagcgttgatctgatcccgccgaaagctaacggcgaagccctgaccgcagatgccaccgataccgccggaaacaccggcccgaccgcgccgtttgacgcgccggacatcaccgcggcacaaaccccggtcatcacaggcgtggaggatgatgcgctcgacgtcaccggtcctgtcagccagaacggtctcaccaacgacaaaaccccgaccatcaacggaacgggcgagcccggcacgacgatcaccctctacagcggcaccactgaaatcggcactgcggtggttgggcctgacggccagtggtccatcacgctggaaacggatcttcccgacggcgggcacgtgctgacggcgacggcggttgacgccaacaataacctcagcgggacatcgaacacctggagcatcacggtggataccgccgcgccgggcgctccagccattacgcaggtcattgatgacgtaccgggccgcacggggccgctcgacaacaaccaaatcaccaacgacacgctcccgacgctgaacggtaccggcgagccgggctccaccgtgacgatccgcctggacggacaggatattggtactgccattgtgaacaacggtggcgcatggaccttcacgcccactaccgcattagggaacgggcagcatacgttcaccgtcgtcgcgagcgatgcggccggcaacaccagcgcatcatcacccggctttacctttaccgtcgataccactccgccaccggcagccacccttgacaccgtctccgataacatcggcactgtgcaggttccgcttaacagcggggatactaccgatgacacgctgccgcagctgcagggaaccgcaccggaaggcaccaccatcactatctatgacgggaccaccctgctcggcacggccgtgcttgacggcagcggcggctggagctttacgccaaccacgccgctgacggacggcccgcattcgctgacggtccacgcgacggatgaggcgggtaataccaccatctcgccaccgtttgagctggcgatcgacacgaccgcgcctgcaacgccggatattcctgagatcaccgtgaacccggacggcgccacaccggggacggctctgaatcctggggagaccacccgcgataccacaccaaccctgagcggctcgggcacgccgggagataccgtaagcatttacgatggcgcaaccaaaataggtgaagccgagatcgatggcgacggtaactggagctggacaccggaagatccgctccctgacggcacctacgatctctccctgacggtgaccaatcaggacagcgccgggaacgaaagcgcaccgtccacgccagtgaccattagcattgataccgacgcgccgggccagccggggatcccgacggtgacagacagcgtaagccagatcaccgggccagtggacaacggcggaaccaccaacgatccgcgcccggtactgagcggcaccggtacgccgaatgacgtcattaccatctatgaccaggtgggtacaggcgagccgcaggccgtgggcagcgtcacggtggacggtagcggtaactggagctggcgtcctgagagcaacattggcgaagggacgcaccaatacacggcgaccgccaccgatgaagccggcaatgaatctctgccatcaaccggtatcacgataacggtcgacaccctcgccccggataccccgctcatcggttccattggcggcgctcagaatggaggctcaaccaacgataacacacctgtcattggcggaggcggcacgaccggcgaaacggtgattatctacaacaacggcgtggaagtggatcgcgttgagatcgccaatggcgagtggtcatacaccctgccgacacaaaccgatggtccgctgaatatcaccgtcgccgcggtggacgacgcgggtaacctgagcccggtcagcccggtctttagcgtgacggtcgatacgcaggcaccgaccgtgccgcaaattgacgccgtctctgacagccaactgactaacagcgtgctttacacccgcgacggtaccccaaccctcaccgggattggcgagccgggttcgagcgtaaccgtttctgttgatggcacgccgtctccggtggtcgtggtggttcagccgaacgggacatggtcctggacagccgaccccgcgcttgcggaagggccgcacaccttctcggttgccgcaagtgacgcggcggggaatacctccgccagctccggcgatctcagcgtgacggtggatacgctgcttcctgcaacgccaaccaatatcaccattgccgcagagggcacgccgctgaccggtacggcagatgacggaaccacggtgacggtgcgtgacgccggcggcaatatcatcgggaccggggtcgcgacgggaggcatcttctccatcgccctctccccggcccaactggatcccgcgacgctgacgctgtccgccacggacgccgcaggtaatgcaagcccgacaaccacctttgacgtaccggactccccgcttattctgccagcggtgccggtgattacggcaatcaacgatgacgccgatcccgtcactggcgatgtgaaagataaaaccaccaatgacaccacgcctacccttaccggcaccgccgatccgggtagcgtcatcaccatttatctggatggggcgctggttccgctgaccgaaattgttgcggatacagacggcaactggagctacacgccgctactgccgctcgcggaagggccgcacaccttcgccgtcaccgccacaaacaccaccaccggcgcgaccagcgggcagtcgccgatcgcgactgtcaccgtcgacctcaccgatccgaccgcaccagccatcggtgcggtgaccgatgacgtaggcccggtcatcggcccaatcgctgacgggcagagcaccaacgacaaccgtcctaccctgaccggaacaggcacggccggggacaccattacggtgtacgatgacggcgacccgctgggcaccgttgttgtcggtccgaccggcacctggagctacacgccgcctgcgctggacgatggcagccacaccctgaccgtgaccgccaccgacccggcaggcaatgagagcgccccgtcggccgggatcaccatcgttgtcgacaccgtctctaccacgccggtgattaccagcgtgacggataacgcaggcaatgcggcaacgcctgtcccaagcggcgatccaaccaacgacactacgccaaccctgaccggtagcgccgagccgaacagcgtcgtcgccatttttgatggcgctacgcaaattggtacggtggcagcagacggcaccggtgcctggacatttacccctgaaaccgccctcggcgaagggacgcatgactttaccgtcagagcgacggatccgcagggcaacgtcagccagccgtccaacgcctggagcgtcgaaatcgatctgactgcgccacaggtgccgacgatcgttacggtcagcgacaacgccccgggaggcgcaaccggcccgcttaccgccgggcaggtgaccaatgacaccacgccaaccctcagcggcaccggccaggcgggtaccatcattcacgtgctgaataacggcgtggagattggcaccaccacggtcgacggcagcggcaactggacctttacgccggatccggtactgactgacgggacgtataacctgcgcgttaacgccagcgatgatgtcggaaacgtctccgccaactcgccagtgttcgcctttacggtggataccgccgggcctgcggccccggtggttaccacggtaatagacgatgtcagcccgggaacgggaaccctcgccagcgacggctccacgaacgacacccgtccaaccttcaacggtacgggggaagtgggcgcaacggtacacgttattgtcgatgatgtggaaattggcacggcggtcgtcaacgcccagggtaactggaccttcacgccgaccactgaactgggcgaagggccgcacgttattaccttcaacgccaccgatgccgcaggcaataccggggtcacctcaccaccgttcaacctgacggtggatacctcggtgcccgaagcaccggtctttaccccggccactgacgatgctggtaccgtgctgggcccggtcgcctcgggacaaagcacagacgacaccacgccaacgctgaacggcaccgcggcggccaacgcgaccatcaccatttatgaaagtggccgtgaagtgggtaccgccgtggcggacgcaaacggcgtatggagctttaccaccggtacgctggcaaacggcagccacacctggaccgccacggtaaccgatgccgcgggcaacgtcagccctgcctcaccaggctttacgctggtggtagatacggctgcgcctgtcgcgccggttatcacccaggcgattgacgacgttggcaccatcaccggggcaataggttccggccagaccaccaacgatcctctcccgcgtctggtggggaccagcgagccgctggccaccgtgaatatttatgagggcaccacgctggtgggcaccggtactgccgatgccgatggcaactggaccgtcgatatcaccgtgccgctggacagtgggtcacacacctttaccgcagaagcaacggatcaggcgggtaacaccagcacgtcgtccgccgacttcagcctgaccattgacaccacaccgccagcgctgccggtgctgaccagcatcaccgacgatgtcggtaacgccgctgcgcctgtcgccaacggcgggttaaccaacgacgcgcggccaacgctcaccggtacggcagaagccggcgcgacggtcaccatctttgataatggggtacagattggcaccgcagtcgccaccggcggcgcgtggagctttacgccttccaccccgctggctgacgggccgcataatctgaccttctccgccaccgacgcggtgggcaacgccagcgcgcagaccggcggttacaccattaatgtggatgccaccgcccctgtcgcaccggcaatcacctcgattgaggatgatgtggggaccgtcaccggacctgttactggcaccaacccaaccaacgacacccgtccgaccttaaacggtacggcagaagccaatgccaccgtacgtatttacgacggcacgacgctggtggggaccgtcactgccgatgccaacggcaactggacgctgccgcaaactagcaccacgctgacggaaggcgcgcataacttcaccgcaaccgccaccgatgccgcgggcaataccagcgtggcttcaccgattatcacgattaacgttgacctgacgccgccaccagccccaaccgggctggcggtgatcaccaacgggacgcaggtcaccggtacagcggaagcgggaagcaccgtcaccatcaccagcagcaccggaaccgtgcttggaacggccgtcgcggacggtagcggaagcttcagcgccaccatcacccctgcacagaccgccggtgaatccctgatcgtctttgctaccgataaggccggtaacgcgggtatcactacctccgtgattgccccgatcaccacaatcccgaacgcgcctgttatcgccaatattgacgataacgttggcacggtgacgggcaacctgaccaacgggaataccaccgatgacaccacgccaaccctgagcggcacggcgcagccgaacacgaccatcaccctctataacaacggggtgctgatgggcacggtcaccgcgaatgccagcggcaactggagcttcaccacgccggtgctgagcgaaggcccgcatgccttcaccgccacggcgagcaacggctcgggcaccagcccgatttccacgtcaaccaccatcattgtcgatctcactgcgccaacggctccaaccgggaccttcaacgcagacggcagcgtactgaccggtagcgctgaagcgggcagcaccgtcaccatccgcctggcggataattcaacggtcaccgccacggcggacagcaacggttcctggagctacaccttcctcaataaacagacggaaggtcagacgctgcaaatcaccgccaccgatgcggcaggcaacgtttcgctgcccggctcagcccttgcgccggtggtgccgctctctgccagcaccaacgctgaagaactggcgctcacgaccaccgccacggtgaccaactcgcagtacagcgactatggtttcctgctggtaggcgccttaggtaacgtgctgacgctgctcggcaacgacaccgcgcaggtaggtttcaccgtcggcaacggcggcagtgcggatattgccgtgaacgccaacgccacgggtgccgttctttccctgctcaatacccttgagctggtagtacagcgcttcgacgccgccaacaacacctggaccaccgtggtcgataccgggcagccgcagttcgctgacctgttgaccctcggcgcgacgggggtgtcgctgaacctgaccgggctggcgaatggtcagtatcgcgtcctgagctacaacactaacctgctggcaaccggctcttacaccagcctcgatgtggcggtgaaagagaccagcgcaggcaccgtgtccggcgagaccagcgttgtcgggaacgtcatcactgacgtggatccaaccgcaggcagcgacaacgccccggcgggcaccaccgtcactacggtcaccaacgcccagggcaccaccaccagcgttacggctgacggcacggtgattcaggggcaatacggcacgctgaccatcaacctggacggcagctatacctataacctgaccaacaccagcgccgccgtcattggccgcacggagaactttacctacaccatcacccataacggcaccagcgcctcggcaaatctggttctgtcgctgggcgaaggcactaccagcagcgggatcgtggccgtggacgataccgcctcgctgaccttcgacaccaccgtggaggcgatcaacaacggcacctcgtcgcagggcggctttaccctggtggggatcaaccttggcaataccctggggctgaacctgctggacgatctggccaacccgatcatttataacgtggaagaaggcaccacccgcaccatgaccgttcaggcctccgtgggcggcgtcgcgctggcctcggtgttcgacctctacatctataagttcaacaatgcgacgcagaccttcgagcagatgcgcgttgaacccggctggctgcgcgcgccgctgctgggcggcacctccccgcagctgacgttgaacctgcccgctggcgagtacctgttcctgctcaatacggcggcggggatcaccgcgctgacggcctacacgctgaacgtcttgcaggatcatgtctacagcgtggcaagcgtgagcgagagcacgaccggggatgtgctggcggatgatattgcgccagcaggtaccgtggtctccgacgttaacggcgtagcagtgaacagcagcggcctgacggagatcaccggcgagtacggtacgctgcggatcaacgcagccggggagtacacttacaccctggacagcggggtcggcgctgacagcatcagcacgccggataccttcgtctacaccatcaccgcgccgaacggctcgaaagacacggcatcgctgaacatcaccccgaccgcgcagccaatggacgcggtgaacgatgtcagcacggcgatggacgtgaactcggtgcaccgcaccgccgcatactcggataccaccgtcgggtcggcgagctggaacgccgcgctgcttgcctcaacccagggcagcgggagcgggaccttcgtggtggatcctaatactgcactgcataacgtggttctgtcgtttaacgtcgcctcgctgctgacccttaccgggttaacggtcgactggacgctgaccaacggcaccaccaccctcagatccggctcatttaacggcgggctgctgctgggcggcagggcgacgatcaacctgacgggcctcgatctggaagcgggaacctatacgctgaactataccggcagaatgggaccgctgggggtgggaaatatcaccgttaccccaagcgtcaccgggaccagctactccctgtcgcagtttgacgccacgggcacccacaccgttgacggcaatatcttcgacggcaccggctccgcgggcgcgatggaccagctgcattcggtggatacccgtctcagcattaccggctacgacggcgtaaccaccacgctggatccttacaccggcagcacgcaggtaaacatcacgggtcactacggcacgctggcgattgccgcagacggcagttacacctacacactcaacccggggatatcgttctctaccatcaccagcaaggaggtctttaactacaccctgaccgacgccaacggcacccgggataccgcctcgctgaccatcaatatggcaccgaaatttgtcagttcggaacataacgatgtgattagcggcacggcctacggcgacacgctgatttatcaggtgttgaacactacggcgggtaacgccaccgcaggtaacagcacgggtgaccactggacgaacttctccttgtcgcagggagacaagatcgacattggcgatctgctggtgggctggaacggtagcgcgtcgacgctggggaactatgtctctgtttcacaaagcggtaccaatactgtgatctccatcgaccgtgacggcacgggagccgcctacactaaatctacgctcgttacgctggacaacgttcagaccacctacgacgagcttgtaaaccagcaacacatcattacctga

SEQ ID NO: 125353 - DNA, 777 bp, Enterobacter cloacae
atgataaaaatatctgaattatcaattaattgcctatcccatccatcattcgaagatggggtgtttgatgattttttagctaaacaaggtatgcaatgggtacgcagaggacaagggagtaactctgagcatcttgttgaagcggccggtagactttgctacatgtcgtttggagagagtaaacaatctcctagggacacaaaccaatatatatttaatttgatatcccaagggcatgaaagtgtattagaacatcttaattggacatttttaatatcaggtgtttcgagagcatttactcatcagttagttaggcacagagtaggattttcatatagtcaattatcacagcaatatcatgatgagtctgaggcagaattcgttgttccgattgaagtaaaaaatgatgcagctttatttcagtcatggtgtgaacatattgaaagtagtctagaattttataaaagatcgctaaaggccatagaagaaagcgaactgtatgatagtcgaaaagagaaaatgcgtgctcttagaagtgcatcacgctcaattttaccgaatgcaacagagactaaaataatcgttaccgctaatgctcgggcactacgtcatttctttgaaatgcgaggtgcaatagaaggagattacgaaatgagaactgtatctgaaaaattatataacattgttaataatgacgctccagcactattccaagattttgaaaaaatcgctggcgaaaccgatcaagtaaaaataatgaagaaacataaactctga

SEQ ID NO: 125354 - DNA, 795 bp, Enterobacter cloacae
atgctttcagaacatgatttaaatatagagatacaaaatggaagggtattcgatccagcttctgtagcaaaaaatgcctacaaagttcaatcctcaagcattgatctttcggtcaaaaaaatccatatacctgactgtaaaaacaataataaaaccagaaaaagtcaccttcttcaaccgggtgaaactgtaattcttgagttaaacgaaaattttaaacttgccaatgacttaggtggtattgttttcccaagaaataccctttctaagaacgggattgtgatgacgaatcctgggcatattgaccctggttataaaggtataatatcagtttatttagtcaatatgtctaaagaacctttccaaataagtgaaaattctgcagtagcaaaaatgcttctcttcaaaacaactacattgactgcggggtatcaaggtaaaatagttacaaaattagatgatgagcagttggatagaatgggtaaggactttgcaggattagagtcgagaatcccttcagaaattacaaaaatacttagaaagtggacattcggcttgctcacaattgttgcagtcatgatttcagtgataagtatcgccatccctcttctttttcaaacaatttctaatagcttcgataaaacaaaagacttacaagtgatcatttcgcaacaggaaaaagaaattaataacctaaaaactttaacatcaaggtttaacgatcaaatttcacgattaccgggagcaaatgatacaattcataaagaccaaaatcagcaagggaataataaatga

SEQ ID NO: 125355 - DNA, 633 bp, Enterobacter cloacae
atgatacaggtgaaggctggcgagaatacaggaggtagagaggctatccataggttgatggctgcctatgatttcaagtccagacagcagctatgcgatcacctaggcgcatctaaaagcaccatggcaaacagatacttaagagacagcttccctgcagaatgggtgattcaatgcgcccttgaaacaggagtttctttactctggctaactacaggacaaggcgaaccaggaacaaaaattgatgataaaaaaagtatcaatttcgtgaactccagcaaggtaaaacctctttctgagcttgtatcgccagagatcgacaaagctagccttataggaggttcgttggttgaagccgggaaggccatcattgatagcagcctacttccccctgactcaagcgagctgcttcttgtaaatactaatggcgattcatatttagttgaccgtaaccagacaccaccagtgaatgggatgtggttggtcgatatcgacgggataaaaagcattgttaagctaactcgtcttccgggaaacagattagttgtgcatcaagatgattcttcgtttgagtgcagcctggatgatatcgaggttgttggccgcgcattgaaaatcatcaagagcctttga

SEQ ID NO: 125356 - DNA, 228 bp, Enterobacter cloacae
atggctgactctatggacctcgtacagcagcgcgttgaagaacagctgcagcgccacattcataccgcgcgcaacagggcgccgggcatttcccgtgtgctttgcatcgagtgcgatgcaccgatccctccagcgcgccgccgtgcccttccgggcgtgcagtgctgcgtaacatgtcaggaaatcgttgagctgaaagggaagcattacacccgaggcgcggtgtga

SEQ ID NO: 125357 - DNA, 471 bp, Enterobacter cloacae
atgtctatacaagaaaaattcttccgtgatattgacttaaatgaccgttttttcaattcattgaaagctgactatgatggctttgatacttggtttatctctaaatcaggcagtaaagcctatgtttcgtacaacgatagcggcgagatggatgggttcttgtatttaaaagtagaagatgaggcgattacagatacggttcctgcatttgagagaaaagctagggcaaaattaggcactttcaaaatagatgcgcacggaacaaaattaggtgaaaggtttgtccggttagtctttcagtttgctatgaacaataatctcaaagaaatatatgttacaatttttgataagcatgaaggattaattaatttattaaagcgttatggtttcgagttgcaagcaagaaaaattaaagaaacaaacaatggctgtgaaggtgtttatttcaaaaatttggagtggagagattaa

SEQ ID NO: 125358 - DNA, 582 bp, Enterobacter cloacae
atgagttatcctaattatccgttaattaaattaagaaatagaaatttccttcttagtatatacccttcatggcatactagattgtttcctgaatctaagctgaataatgaagatggaagtttaattcaagatatttctcatacaaatagtattgaaaaagtatatcttacgaaaatggatggtacgcaacatctccagttcggtgacaatcttttgatctatcgaacttcagatggccaaggaccggcacgttatcgctcagtggcaacttcagtatgtgtggttttgagcgtcaggaatattcatgagttctcgacctacaaagacttcagggattactgcgcgccatttagcgtttttgatgaagatgagcttaaactcttgtatgcaaagaaaaattacccttacattattcgcttcacttataacttcccgttaacgaaaagaataattagggatgatattatgaccataaccggatatactgatgctaattattggggtttcctccctctgagtgatgcagactttaagaaaattattactgatggaggcgtaaatgaaggttatattgtcaattaa

SEQ ID NO: 125359 - DNA, 372 bp, Enterobacter cloacae
atgaaggttatattgtcaattaagcctgaatatgctgagcggattttatccggcgaaaaaaaatttgaatttaggaaaagcatttttaaaaacaaaaatgttgatactgtcatcatttatgcgactatgcccgtgggtaaagtaattggagagtttaaggtcggtgatattttagtaaattcaccttcagagttgtggagtttaaccaaaaattatgctggaataagtcataagttctttactgactattttcatcgtcgcgatagggcatttgccatttcggttaaaagccccagaagatacagctctccattagatttagaagacatatcacctggggcaaaagcacctcaatctttccgatatgtttag

SEQ ID NO: 125360 - DNA, 537 bp, Enterobacter cloacae
atgttgatttttatcgcgggagtccacggtgtcggtaaaggttacttatgtaaaaagtatgtagaaagtaatcaggccatacataaaagtgcaagtcaattaattcgagagcatgggaaaatagagctacctaccagtaagctaacagaaaatattgacagaaatcaactgatactcttagcagctgtagataatcttacacaaaatggatgtatattgttacttgatggacatttcgcattagcttccaaagatggaacaataactgcaatagaaagcgatgtatttaaaggattgaaacctgatggtgtgattttattacagaatgatattgatttaattacacaacgaatcaatgaaagagatggagacacaataaaatataacattagctctttaattgaagaagaaaaaaacaatgcaaaaaaaatatgttctgaactagacattcctttaaaagaaatatattccgcttctattacagattttagtgatgccattgaagagattaggcgcgagtctaatgctcgcgcttaa

SEQ ID NO: 125361 - DNA, 381 bp, Enterobacter cloacae
atgaaatatcaagcgttatctatccttaagcctgcagtagatctcatactagatggcaaaaaaaatattgagataagatcatggttgccgccagaaatcccgatgaaaaatgttgtgattgttcaaaatcaaaaatatttatctagcgatgaagatatggatgatggggtcgctttggctatcgtcgattttacagagtttaaagtttggacagaagatgattataatgaacgcgggccttcagtgagtttggggagaacctggaaagaaggttactttacttggaaaattgaaaacataaggaggttaataaaaccaatcagatgtaaagcaatgaaagggatttatcaggttgagctgaaagatattgatttagtgtaa

SEQ ID NO: 125362 - DNA, 777 bp, Enterobacter cloacae
atggtgaaaataattaattatctgaaaagattatcttttatattaatttttgttcttattacttgttcattcatcgttttcgctttatacaaatactggactatttttggtgccttgcctgtaagccaatctgtggagaaatgggggcagtttggagattatatcggaggtgtcctgaatccaggtttaagttttttatctataattttagtttgtttcacactgtacaccacatccaaacaatccatgactcagtcatttgagtcggtcctttttgaacttcttcgataccacaaagaacatttgtcgaatattaaggtggtatatgataaagagtcattcaaaggagtggatgcgctcgattggtatataacggaagtgaagtttaactttctgaatttgtcaaatgatgatatgttgattcaggagagggttaagttttcaattgaccttgtgtatgaagaagataatttcttctcaaatacggggcattattttagaaacctgtatcacatatttaaacatatagatgaagctagtttccttcgtaaaaaggaaagagtcaaatatgctaaattagttagagcgcaactctcatcgatagaatctggtgcactaatgttgaatggattgtcaagtaagggtgttaaatctaaagtttatattgaaaagtattctttactgcaaggtttcactttaagtaaatcttttaaaaatgagttgaaatctgcaggagcgatgaggctttacaatcctgtagcgtacggtgataaatga

SEQ ID NO: 125363 - DNA, 1365 bp, Enterobacter cloacae
atgaatgaaaagttgaaccaactaaaagaaaaactggataatttacataccactattagtgcaataagttttccacagcaagattttattgatcttaacaattatcaatatcccttcttacattcagaagatttagtatctttcccgaaaatgctatctgaaaagataggcaagatgactaagtttgaaccttctgaacatgacgttgaaattatagattctataatttattcgttagataaagcacaacccaatttaaaccatttaaaccacagcaatagtaatgtatcggggccagccattgcatcgtatttggtttctatgctttatataagtacggaaataaatgagctattttcgtttgaagttttaaataacaaagaacttcttccaaaaaaaataataaacagactaggtttgtatcaatcgaatcttcaagctattgaggagaaaagtggtgacctcgatagcaagataaatgtaatcaatgaagcttatgatgctgcagagagtttacccacaaccttaaaatctcttagagagacaaatgaggaaattaatcaattaaatgatctttcagagaaaaatgctgattcaatcaatgaaagattagaacaggcaaagctagatggtaaagagttaaatgacataaaaaatacgattgcacaattacataaaaatgtagcgaaagaagctaacgattatttggctgaacttaaagttgaagctcaaggatatatcgataaatgtgaggaggcctttagaacaacgacatctaaaggtttagctggagcttttgaagataaagcaagaaaacttaacgccagtatcaggctatgggtagcaggcttaatcgcagcccttggggctggagccgttgttggttatactcgattgcatgctctggaggcatacttatcgaatcctaatgcctctggtatcaaactaaccatacagcttatcttatcgattctcagtgtaggtgccccgctttggtttgcttggttagctactaagcaaattggtcaacgattcagattggccgaagattatgaattcaaagctagcgtttctaaagcctatgaaggttatcgtagagaagcgatgcaattagactctgatttctcacagcgtctttttggcaatgcacttactcgacttgaagagccaccgttgagattcgttgaggaaaccgctcattcatctccaataatggaaatgttatcctctgatggtttcaaaagtttggtggaaaaaggtggtgacaaaatggatgctgttctgggaaaggcgggactgacaagaacgaagaagataaatgaagatattcccgaaaaaaaagttgtacatgatgaagaagaataa

SEQ ID NO: 125364 - DNA, 672 bp, Enterobacter cloacae
atgagcgttggattaattacggacgagccaggacgtttctacaccttccagtcaacattaccagccggtgaatacttcgaatttcgcccccgcaatcctccactgaattcaaaacccattgttgatgacgaaaccgggatgtgtattggctattcagtctctcaggctcccggtttatggcagatttatgataccgacggcatgtttgtcaggctggaagaagcgccactagaagcccccctgattgacccaacagacatcgtattaattgccttgggtgcatttcgtctttttcgggctggtaaagcgttactggagagtggagttaaaaccgctgtaactgtgaggctcagtgaggctactatcagtctcttacgtggtcggctgaaaatggggttatctgcacgaacccttaaaatgaccgcaactcctgctaaacatatgcttaatcccgcgcgatatgtgcccttgcaacttcaggaaaaagttattcgctacggcaaaagaacgccagatcctcaaaaggctcaaggtctttttcgttacgaatctgagatatataaacttgttgagaatcgggcgaaaaaaggaacctattattataaaaaatatatgatagaagtattggtgcgtgagaaagactggacaataactcattttttatacaagtga

SEQ ID NO: 125365 - DNA, 318 bp, Enterobacter cloacae
atgcagtcggccaaggcggtcgtattcgctgcgggtggtcagcagcccctgcgtacggctggtttcacgatggagttcgtcgcgggtaaagtcggagaccgacagcttatcaagggcaatgctgagcagatgcccgctaccgtaatagaattgtttcagctcccggccatcgggcagcgtgacggaggtgcggttaccgagggcgtcatactcccacgccagctctccgtgttcgcccgtttcgcgcgtgacgcgtccaagcgcgtcatactcaaacacaagctcctgctcggcttcggcgctccaggcatcggctga

SEQ ID NO: 125366 - DNA, 657 bp, Enterobacter cloacae
atgcttcaccggcagaccacgttcgttccatttgagcgactctgtccacccttccgggcgatcgagctgcaccggacgccccgcggcgtcgtagcggtaacgcgtctcttcgccgtcggcgcttatctcagccaccagccagcccagcggatgataacggtattgtgtcacacggcccgaacagtccgtaacacgcaccatctgcccggcctcgttgtactcctggtagcggctgttgccggcggcatcaacttcttccacgacctgaccaaactcgtcccgacgaagcagcgtggtctgccccatcggatccaccacgcacttcagcccgtgatgttcgtcatacaggaaacgggtggcgctaccgtcggcttcgatgatggaggccggaagcgcacggtgctccagccaggtggtggtgcgggtattgctgtcggcgtcgatctcctgcacccggttacccatgtcgtcatagacgaaggtaacggcattaccgagcggatcgatgcggcgcgtgaggagttcgttgtcatcccactcgtagcgccagttctcaccgcgctcgtcaacgtagcgaacaatcaggttttgcgcgttccagtaatgctttcgcgtctgaccgtcgtagtgatcgacggtcgtcagcccggcggctag

SEQ ID NO: 125367 - DNA, 252 bp, Enterobacter cloacae
atgatcacgttcggggagacgtcgtcggaaacggtgccttcgcaggtggtgcgatcatttgcacgcaccgcgggctgcccgttgataaagacgcttttcgagccttccgccagatactgcggcccggagtgtttctcgcacgccaccttgtcttcttccagcggcgaggtcccggcagcggcagaggccacgctcggctgccacatttcgctgccgaactgtccggcagcggcaagcagcatgcccgcgtag

SEQ ID NO: 125368 - DNA, 1077 bp, Enterobacter cloacae
atgaccaagaaatttctggcagtcgtattgttcactgctttatgggcaggcgtagttgaaacgtcatctgcgcttgaattatcgcaatacaataacctcaatacggttagtcacatcgttaacgacagtgaagtgacagacaatctcaggaagacgctgggaaatcattaccagacctttattgataactttgatgtcttcggtgaaccgcataccaccacaggtggaggattgtttgtcgaaggctggctaaaggatctctaccaggagaatgcgtcagcgctggtcatcgatcctgacggcaaaatctttgcggcctgggtggttccggagtcggacgtcattcattaccagtcttctgataatagcccggttattcatgccgatattcagcaatgggctgccagattcaatgctttgcattttgcaacgaacatccaggcaggtctcgcgtttgacggggactgggctggcgaattcgagaacgactcgacgttaacactgcggttagctgaatcaggcaaccggatcaccggctcttattgctatatctcccagagaggaaaccgcatagattgccctgaagatgatgagcaaaatcttagcggtacgatcgctggcaatcgtgtcaacgttgagttcaactcatcatttggcagcgtaggcggtcgggctgttctggaaataaaggggagtgagatggaatggcgtttagttactcctcctcaaaaaggaaattattatgctccgcagcgttatacgttacgtaaagccgcttcggttcaaaacgctgaaaccagaaaactggacaccgaaaggttcgctatttctcttataaataagtgcggtcattttgatagcgaatgtgaccagatggtctatctcggcgtgcgcaaaagcgataacagtacgatctccttaaggggaaaaacgttgcacgactccgcaggtaaaataatcggctcaacgtacaagaatggcgagaccgtttacaccgtaacgtatgcacctgtgaaattggttgtcagcaaaggcagtcatgttttagtcgaacagtcaggccagtggcttaaataa

SEQ ID NO: 125369 - DNA, 510 bp, Enterobacter cloacae
atgacgattaacgtgaaaaaacgcctttctgtctctcttttttttaccctcatgtctacctttctgagcagttatgaagtagtagctcacactatgccgcccagtctggctaaaaaggatttttctctacagataaaagaccagattgtggcactgggcgataggtggactcctgagattgcgcgtaaaattgcagtttcagtggaaggtagatttgtcggtgaggttccttttgacggaacgagctataaattctaccagcatcagaagactgggttaaaaatattcagttccaatctctggtgggataaaaccgagcgaagtgttgacgattatattgtggcgcagattacgctaactgctacggatggcaaaacagctcgcgggatccatattggttcaacattaaatgaacttaataaagcatatggtgctggccaggtcgaaaatgattcaggggagcagtgggtttcctataaattgggtaaaaaattactctttttgaggtga

SEQ ID NO: 125370 - DNA, 435 bp, Enterobacter cloacae
atgcaaaaacaggatctttggcagttcattgcagaaatgagcgcatcactcaaaacgttgtccgttaacagtctggataacgctccgttgtcattcaagctaacgaaacagaatgaatatatcaatttctacaatgccgacgatatccaactggcggatggaacgaacattactgcaattgatttacgtttaagcaaagaaagtgaaggtatggcaccgttactgaatttttcaccgtccggccagtgcatcactctcgacacggttaaaaaacattatccgcaactgacgttaactgattatccacgaggccgttcggagaacgaagtgaccagttatacagcgccaaaggatatgaatggacaaaaagtaagcttcagtttcacagtaaaaaaaactgactgcttgggtggggtcgctattagcgctgactaa

SEQ ID NO: 125371 - DNA, 2541 bp, Enterobacter cloacae
atgctcaaccgaattaccgttcagctcccggttgaggggctgcttttctggaaactctccggccgcgaggcgatgtccgagtcgtacgcgctgacgctgaccctgctcggcacggacgcgcgccttgaccgcagcaggctgctgggtcagccggtcacagtgaccatccccacccagagcctgcttactccccgctttatcaacggcaaggtgacgcgcgtggcggtgagcgccgtggagctgacgggcacccgctatgcggtctaccagctgactgtagagccggacctgtggccgatgaagcgcgaccgtaacctgcggattttccagggccagacggtaccacagattgtcaaaaccctgctgggtgagcatcaggttaacctcgaagacaaactcaccggcagctaccgggtgtgggactactgcgtgcagtatcaggagtcgagcctggacttcatcagccgcctgatggagctggaggggattgcgtatcacttcagccacgaggcggacaagcacaccctggtactgaccgacgccgcgacgcagcatcagccgttcagcggctatgaggtcattccttaccatcagacgccgtccggcggcagtacggatgaagagggcatcagccagtgggcgctggaggacagcgtgacgccggggatttacagcctcgatgattacgacttccgcaagccgaacgcgtggctgttccaggcgcagcagaacccggcgtcaccgaaaccgggcagcatcgacgtgtacgactggccggggcgctttgtggagacaggccatgcggagttctacgcccgtatccgtcaggagcgctggcaggtggagcatcagcagattcaggcgacggccacggcggcgggcattgcgccgggccacatctttaccctgaccaacgcgccattcttcagcgataacggcgagtatctggtgacggcggcgggttaccacttcgaggagaaccgatacgcgagcggcgagggggaaaccattcaccgcaccgatttcaccgttatcccggcggcggtgtcgtaccgtccggcgcagagcacggcgtggccgcggacctacggcccgcagacggcgaaagtcgtggggccgcagggggagagtatctggacggacaaatatggccgcgtgaaggtgaagttccactgggaccgtctggcgaagggtgacgacaccagttcctgctgggtgcgtgtctccagcgcatgggcgggccagggctacggcggggtgcaaatcccgcgcgtgggcgatgaggtggtggtggactttatcaacggtgacccggaccgaccgattatcaccggccgcgtgtataacgaagccagcatgccgccgtgggcgctgccggctgcggcaacgcagatgggctttatgagccgcacgaaagacggttccgtggacaacgccaacgccctgcgctttgaggacaaggcgggcgcagagcaggtgtggatccaggccgagcgtaatatggacaccagcgttaaaaatgatgaaacgcacagcgtcgggggcgcgcgcagccattacgtgaagaaaaatgagctgcatcgtgttgaagcgaaccagatccaggccgtgaaaggcggaaccgagatcctgacgggaagaggcaagctggatgcagcggtagagcagtatgtcattgcttccgggaccaagctgcggctggtctcgggtgagagtgctattgagcttaacgctaacggcaaaattaacctgattggcaaagagtttaactttttcgtggaaggggatggttatatcaccacgggtggtaagctgcatctgaatacctcgggaaccaagccgggcacaacggcaccgggatcggggcataaaggggatattgatgcggcggtgcaggagaagtttgcgccgggaaaggagagtaaggcaggtgcggctgcaagcgcgcctgccgaaacctctaaaactgcaacacccccatcatcaggtgtgccttcaagcggatatggtaaggatgtggatggtcttgtagacaaatcaccaaccatgaaaaatgacattgcgactttaaagaaacgaggctggacattcgaagagggtgaagcaggcaagggaacgtttgctaatcgtcaaacgcgagttattaccgttgataaaaatgagcttggtaatccgaaggctgttgttcagtctctgtcgcatgaaagtggccacgcgttatatgaacctaacattgatgtttcatcgcgcgatgcctacctgaacagtgcacttagtgatgaaggcgctgcaacactgaataatatccgggtgcagcgtgaaatcctggccaataagggaggggatatcggtattgcaggcaatccagcaaatcagacacaatataatcgtatctatgattctctcgaacgtggggctataaaggaaagtgaagcgcgtacgcagataggccgtatctttggcaaaggcgaacaaacgtctaccacagggcaatattacgaagattattatggcggttggtatgataaaaattatccatag

SEQ ID NO: 125372 - DNA, 450 bp, Enterobacter cloacae
atgtggtatgttatgatgcattggcttttctttattctctttatgatttggacacagacgcttatatggaatggaaaagacttgttcagtaaaaaacaatggttcctggccgggttgatgtttgttctggtgctggtggctacggttgttattggttttacgttgaaatggttagctctgtcaatgtcattattctccgtcgcaacggcgaaacaatattcaattatcttttccatgtctttactgtgcgtatggggactaaaagttaccgttgtgctgctctgcacgatcttttccgggattataggaaggcacaaaaaatacaatgcgaaaaattatgaagcaatatcgtctataacacccgtcgttgcgcctggcttacttatcgttgcaaaatgcctggtttccctgggtagcgtccttatgttttcaggtttatggcttaaataa

SEQ ID NO: 125373 - DNA, 1335 bp, Enterobacter cloacae
atgtccgaatgtctggccgctcgcgaagatgatgagattgctcatacagcctcaaaaggctggatgattgcaggattggttggtggggccattctgggcgctgctgccgttgtcgtcactggagggaccgcgctggttgctgtttctgccgttgcggctggtgcatgtgctgcgggtgggttaggagaactcctcggcagtatgtcatgggctccacgccacacgacaggtacgctgaaagaaggttcacccaatgtttttatcaacagccgaaaggctatccgcgctcatctgtcagccggagagtgtgacgagcacagcggtagcttgcaacgggttgcggaagggtcgataaaggtttacatcaacaactttcccgcctcccgcattggcgataaattgacgtgtagcgctgagattagtcagggatcgcgtaatgttattattggtggaagcaaagttcagaccgatgaaataagccctgaaatccctgaatgggtaaactggacgatgctcgccgttggtgccggagcgatggcggtgctggccagtccggcaatcgcacttctgagtaccctcggtgcgatgggcggtggcactgttggtagctacgcgggtggaatgctgtttggcgaaggtagcgacgggcagaaatgggggatgctgatcggctctgttatcggcggcggggctggcatgaagggtggtgcaaggtttgatgcgtggcgggctggtaaatcaatgccgcgcgttagtgcggaacccgttatagcccctgcttcgccaaggatgagcttaagcgaagccgtagggaaacaacgagccgaaaaatggatcactcgtggtagagaattagcggagaatcgtgatcctgctttgtctgctttactcagtgatgagcaagtaggcgcattgtatggttatactaccgatcctggctacaaaatggtaaacccagcattacgaggtatgaaaccaatgactaaagaaatggaagcatttactcaacatataaatgatggcttggaccagcttcctgcttttagtggagagacataccgcgggatgaacagcttaccttcacacatattggaaggatatactccgggcaaaacagttatcgatccagcctttgttagtactgatgttaatcaaggcttcagcggtcctatccaaatgcgtattgaaggtttttccggtcggaaaattgacttcctttcagaattcaatgcaacagagactgaagtgctatttaagcctaatacatcgtttgaggttatcagcaggtcagatgagcttgggataacaaatatagaattaagggaaataccatga

SEQ ID NO: 125374 - DNA, 1017 bp, Enterobacter cloacae
atgacacatcgttcaaccgttagcccgggctactgtgtggtccaacatcctggaactttagattatcaagctcgattattgtttaataatgtcaatagcgaagccgctagatactttatgcaaataaacaatgacacaccttggttgaaaccagggcagttactcatcgtggctgacccagacaacacgaatcagtcatcgcaactgagtattctttccagggcaaaacagaaaattaaccatgcgctggcatcattaaacacatcggttgcagagtatctccacgctaattatgacaatatttctgcattgacttctttaggtgataaactagctgggaatgctggtgatttaggtgagaaatatttcaggcaaattgaaaatatactcattaaaattgagaagacttatcagaatcagtttatatcccaaggttctttaattggtcagcagttttatatggaaagaagggcgttattctctcagctaaaacctttattaaataacgtaagcaagctaacacttaagattcaaacctacgaaaatattaaaaaagcattgaacttatcaagccgctctatcgtccatgaatggagtacggttggtatcggcgcgatccctggatattcagattatattgtacgctcttctcgcgcggctagtattatgaaagcagggggctggatctcactaggtttctcttttttgaatacttctaatgatgtttataaagcctgtactgtcgatcgtgaagatgaatgtggaaaagttgctgttactgaatatagtaagtttggtggaggtacgcttggtgctgcgggaggagcctgggctgcgtctttaggtactggcgctctttgcggtgcaatgggaatacctacgatgggtactggtgcccttgtgtgtggaattgttgtaggactaggcgctacttctgcgggagcctggatgggtactaaaggaggggctgaattgggtgaagggattagtaacttgattttttctggggacgaataa

SEQ ID NO: 125375 - DNA, 1500 bp, Enterobacter cloacae
atgagcaaccagacccaacaacacgatcagcaggcgggccaggccttcagccaggacgagttcagcgcgctgctgaataaagagttccgcccgaaaaccgatcaggcgcgctctgccgtagaaagcgcggtaaaaaccctggcgcagcaggcgctggaaaacaccgtgaccttttcaaacgatacctaccgcaccattcagaacctgattgccggtattgacgagcagctttcacagcaggtgaaccagatcattcaccacgaggagttccagaagctggagagcgcctggcgcgggctgagctatctggtgaacaacaccgaaaccgacgagatgctgaagatccgctttatgagcatctccaagcaggagctgggccgcaccctgaagcgctacaagggcgtgggctgggaccagagcccgatcttcaaaaaaatctacgagcaggagtacggccagttcggtggcgagccgtttggctgcatcgtaggcgactactacttcgaccacagcccgcaggacgttgagctgctgggcgagatggcgcgcatcggctctgcggcccactgtccgttcattaccggcaccgcgccgggcgtgatgcagatggagtcctggcaggagctggctaacccgcgcgacctgacaaaaatctttcagaacaccgaatacgccgcctggcgttcactgcgtgaatcggaagatgcccgttatctgggcctggtcatgccgcgcttcctgtcgcgtctgccgtacggcattcgcaccaatccggtcgacagctttgactttgaagagcagaccgacggcgcgaaccacaacagctactcctgggcgaacgcggcttacgcgatggccgccaacatcaaccgttccttcaaagagtacggctggtgcacctcgattcgcggcgtggagtccggcggggcggtggaaaacctgccgtgccacaccttcccgagcgatgacggcggcgtggacatgaaatgcccgaccgagatcgccatcagcgatcgtcgtgaagccgagctggcgaaaaacggctttatgccgctggttcaccgcaaaaactccgacttcgccgccttcatcggcgcgcagtccctgcaaaaaccggccgagtatcacgacccggatgccaccgctaacgcgcgtctggcctcccgtctgccttacctgttcgcctgctgtcgttttgctcactacctgaagtgcatcgtgcgcgacaaaatcggctccttccgcgagcgagaagagatggaacgctggctgaacgactgggtgatgaactacgtggacggcgacccggctaactcctcccaggaaaccaagtcccgtaaaccgctggcggcggcggaagtgcaggtgcaggaaattgaagacaacccgggctactacgccgcgaagttcttcctgcgtccacactaccagctggaaggcctgaccgtttccctgcgtctggtatctaaactgccgtcgctgaagacgaaggacgcgtaa

SEQ ID NO: 125376 - DNA, 303 bp, Enterobacter cloacae
atgaccttcggtaaagacccgcgcctgatcccggacggaaaagccgtcatcgagaaattccgcgccggtaaatttgaaccagaaggatacaccctctacgcctatgcgtctgtgcaggctatcgcagcggcattcaaggccacgaaagggacggattccgcaaaagccagcgagtggctgaaggccaaccctgtcgacacggtgatgggtaaaaaagcctgggacagcaaaggtgacctcaaagtgtctgactacgtggtctaccagtgggacgacaaaggcaaatataaagaagtgccataa

SEQ ID NO: 125377 - DNA, 324 bp, Enterobacter cloacae
atgggatttgcatcaccagccacagattatgtcgagcgccagctctcgcctgaagtgatttgcaacataggggctgagagcagggtgcttgaaactgatgttggctttgccatcattgaacctgcggccaaaagcgcgcccggcgatgtgcttttaattttatgtgaaggcaggactcatttcgccaagctcatgggtcaagctctcatcacggacgacggtgaagcgatagaaggggtagcgctggaagaggttgaggtgctgggccgggtatcgttcttcatcaatcgtgcttttaatgatgacggttgcccggtgatgtga

SEQ ID NO: 125378 - DNA, 2304 bp, Enterobacter cloacae
atgtctgagaaagcaggcgagatttattacgacatcgaggccgatgtatctggcttgctcaaggcccagggaaaggccaataagtcgctcgactccatcggcaactcggcgaccaatgcagccaaaaagatggatgagttgcagacgaacatcaaccgcgtcgccggggcaattgccgcctcactcgtagttgactggggtaaggcgtttctcgttgctgctgacaacatgagccagctcaacgcgcgtatagagaggctaactggcagcgcagcgacagcctcgcaaactatgcagaatctgatgcgcatcagttcggcaacgggtggttcgctacaggatacagcaaagctgtgggaaaccctcagcactgcattgcgcgataccggtgcgacgaacggccagatcatccaactcaccgaaacacttcagaaaataggtcgcattggcggatcctcggcagaagaaatggcgaatgctcttcgtcagttcggccagtcaatttcctccggcactgtccgggccgaggagttcaactccatccttgagcaaatgccggaactggcgcgccagattgccgccgggatgggtgtaagcatcggagagcttcgtcagctcatgctggacgggaaactgacggcagaagatgctctcaacgccattcagaagcaaaccggctcagtgaatgcagagttcgagaaactcccgcgcacgctttcacaggctaataccgcgctgacaaactcattcctgtcgatgattgactctgttaaccaggcgactggagcaagcacagggctggttgcggttatcgattcaatgactgctgcactcgaccggctggtgggtaaagcggcgtcggcagatgctcagatatcggatctgaacagtaccgctgaaatgtttactcgccgcgcgcgcacctggtcatggcttgggcttgatggctgggaggcgcaaaacaaagcgctggccgggctgagtaataaagccgccatgctggttggcgacctggccgctgtttccaaagcatcgcagaccgcggctaacacaaagccgatcgagattaaaacgaccgcctcagctactggcagcaaagctaaaggcggaaagtctgcggcacagaaagaagctgagcaatacgctaaagcgcaggactcgataaacgaaaaattggaagccctgagacaagaatctattcttgcagcaggttcaaccagcgaattaacacgtgagcagcaactgctaagggcagagatgtctcttggtgctgatgcaaccgatgagcagcgacagaaggcaagggactacaaagcacaagctttggatactgctgaagcattgaaaaaacaagctcaagctgaaagagctaagcagtctgctcagtccaacttcagtagcttacaaagccaggcttctcctgtggctggcgttgaaagtcaatttcagcagcagatggaccaactcaaccagtacgctacgctctaccctcagaaaatagctgaggtagaggctgtaagggctagcattgaggagcaatatcgccaaaaaagacttgaggctcagtggcaagaattaagccaaatgaatatcggcttcggcatgctaacgagtgccgtggatgcctttggcgggaatgcatcaaacgtcataaccggactgatcaccggaacgatgtcagcgcaggatgctatgcgttcgctcgggaatacgatgctgaatagcgtggtaaatgcgctagtccaggttggggttgaggctctcaaaaacttcattatcggtcagacattgggcgcagcttctaccgctgcttctgtcggtatggcaaccacgacggcggccgcatgggctccagccgcagcgctggccagcctggcatcctttggcgcaaactcagcgcctgcgatggctggtattgcatctaccgttgggcttgctcaagggctggctttggctggggccagatacaatggcggacctgtgtcagcgggaagcatgtatcaggtcggtgagcgagggaagccggagatttaccaggccagtaccggtaagcagtacatgataccgggcgacaacggcagggtgatcagcaataaggacatgacttcgggtggagggggcggtgctccgattctcaacatctacaactactcatccgcgtctgttgatgctcaggctacgcagaacggcgatggttcatggacccttgaagcttttatagctgacatgaataacggtggcccagcaagcaacgccataaccagcaacatgaatgttaaacgcacgccaagggggcagggctga

SEQ ID NO: 125379 - DNA, 249 bp, Enterobacter cloacae
atgaaaatacgatgggttaacgtctactatccacacggtgagtggaaagacgagtcaggggaagttgttgcggttcctgatggttttcgagcgacattcaatgataaaaacctcatcgtcatcatgaggaattcaacctcgcctggtggtcatggggaaccatccatcactgccaagaggcctgaattcattgatgaagataacctcgagtttttgaaagtcgatggtgagttcatcgtaataaaataa

SEQ ID NO: 125380 - DNA, 174 bp, Enterobacter cloacae
atgaagtacaaatcagtgacggaaggcaagcctaagccgctcacccgcgtatgggttgaaaccgacaccgggcgggagactaccggctacgtgaaatccaatggcgagtggttcatcaactgcccgcgcatccgggcgacgggcgcgaaggttctgcgctggaaggagggctga

SEQ ID NO: 125381 - DNA, 1230 bp, Enterobacter cloacae
atgaaacctgttagacaaaccgtcatcgctgtcgctattatcggtgctctttttgctggtacaatgaacgtagctaaagctgctgatgtaaatgtaactcttaacgataatgttaccaattcaggtacttttattcaggttcaagggactaacaacaccgcatataaccttgataacatcaaggctagcaacactcaacaagacggacaaatctataatctgcaaggggatgttgagaaggcaaacattgctatcaataatgcgcaagatactgctaacactgctgtaaataaagctgatgctgctcaagctggtgttaatgctaatgcacaatttaactctactttgaatcagaaagtagatgacaacaaagctgatcagatctccaccgacaacaaacaaaatattttgattaatgacattaaaaacaaagcagacactgctttacagggtgttgttaacaatggttccgatattaaatcattgcaagatgaaagcgcgttacaaggttctgtattgattaaccatgatcaacggatcaccgctttagagaaccaaacaccacctaaagacggtgttaatggtaaagatggtgttgacggtaaagacggggcaacgggtgctacaggcgctgcaggtgcaactggtgcgcaaggtttaaaaggtgatacaggcgcacaaggaatagctgggaaagatggtgctccaggtgttaagggtgagaaaggagataaaggagattccatcaaaggtgataagggcgacactggcgctaaaggtgataaaggggatgcaggtaaagctggctctaacggaatcacaactaccatcactaagaaagaagttgatactaaaactatcaatctggttaagtcactcaatacccaaactacagcacaagctaaagatctgaaagctgctcaacaagtgttcgcacaagcgcaagctaacactaactctcaattcaagagcctgaaagatgaagttgatagcaataagaaagaagcccgttcaggtgctgctagcgctgtagctatcgcctctatgcctcaagtagagaaagaacaggctgtcatgttctctgctggtgtaggtagctttaaagacgagcaagctgttagtgtgggtgcatccttccacgttggtagcaacaccatcgttaaagctggcgtaagcgattctacaaataatgatcttgctatgggcgcaggcatcgggattggcttttaa

SEQ ID NO: 125382 - DNA, 303 bp, Enterobacter cloacae
atgttaaatgatgtaaagaaaaaaataattgataatgattttgttaataatgttagaattaatatggttttcaatgatgaacagtataatgacttggtttctagtttagatgagcttgctaacctattgaaaaataataactccatagataaagaattagctttgtatttatatacaatacctcaaatgataagaaatgcatatgctagttttgataaagtggaaaacaaaccagatttggcttttaaattagaagatgcatggatagagttagactcgctagtaataaactgtttaagctaa

SEQ ID NO: 125383 - DNA, 255 bp, Enterobacter cloacae
atgaaaaaaagcggtagagtggcaatttatgttctagtggtgattattttctttctaactattccagagatcgtcgttcgtgtactcactccggagcagtttgctcgattgggtgattttacaagctttggtggcttgtttagtcatatcctttctttattgattttccttggcttagcttcaattctgctgggcatactcgccatttttgtaacgaaaaaaatttaccgccatgtcactcgatacaaaagctaa

SEQ ID NO: 125384 - DNA, 711 bp, Enterobacter cloacae
atggcagacggctatgcaaaaatgaagttgcaatcagaaaggaatctagccctggcgctaaccaaagcattgcgagaaatacaagctaccaatatgagtgctatcgaaaatctaaagcttggtacacaacgtataattaactatggttcgtgcctgataccagacgattactaccgcaatacctgtcgcgagctaataaatgaagaccgccgtctcacattagcacttgccgaaatctataaccgaaacgatgttgctcttgatatggttgagatttactttcagaaaactctcaaaagactgggagagcaaaaaagtaacaatctcgctgcatttcttaaaaaggaattaggcgataaggcttatgagtacgctgagaaatctagcaaactagcgctgtccttaactattgcaaagctgataatcagtagcggcgattttcacgagtcgcatatcagaatggttaattcattatcatcaatgtatgttaacggtgctataatctattcgaaagcacaggtggcggcgctagcagctaataagctcaaatttcaggaccctgcatattaccaggcattgtaccaacagaatctggagatgctttactttcttattgaaccgcaaatgacaaaaataatttatcaaattgaatcaggtggcaacaatgaggaaataatcggcgatgctttatatgagttattaaaaagatga

SEQ ID NO: 125385 - DNA, 162 bp, Enterobacter cloacae
atgcaggaaaagaaatgcgcgtactgccgcaagccgatcgagcaagggaaggaagttaaaaacaaactgctcttcatccacggctcgcagttgaaacgcgaacaacgtgattactgttctgtgcgttgcgcttcgttcgaccagatggctcacgaagcataa

SEQ ID NO: 125386 - DNA, 210 bp, Enterobacter cloacae
gtggagggtgtagttcagtcagatctgcgagtgaccataaccgatgggaaaggaagggagctgctgtccttcaagttgggggcggaagagcgctatataatttccaccaaagatagctccataactcacagaaaactaagcagggacgatcgttactggtccaaagaaaccattatggaagttgtaagggaaatggcttctaaaaattga

SEQ ID NO: 125387 - DNA, 210 bp, Enterobacter cloacae
gtgacgggaatgaagaagacctggttccatcataccgattgcacaacccagcaggccgaagaactcattgcggaataccagcgccgcggcgtgaaggtagagcgcaacctgaactcagattatctcacctggaccgtcagcgcccggctgcctgaaggcaagaaaccaccgcgtataaatcgccggtggcaaaaccggatatgggggtga

SEQ ID NO: 125388 - DNA, 357 bp, Enterobacter cloacae
atgaaaatttacgaaattacgccgattggcaagccccgaatgactcagcgtgatcgatggcataaacgtccagcaacagcagcttactgggcatacaaagaacaggtccggttgctgggcatccgcctgccagattccggatatcacgtcacgttcgttatccccatgccaaagagctggagtaagacgaagcgggcgcaatatgtcggtcggcctcatcaacaaaagcctgacaaagacaatctggaaaaagctctgctggatgcagtgtttgacgaggatagccacgtctgggacggacgggttaccaaaatctggggagaaaccgggcaaattatcatcggggaggccacatga

SEQ ID NO: 125389 - DNA, 138 bp, Enterobacter cloacae
atgaagccagaaacgcttgaggtactccgcgcgcgctggcagcgccttcgcatttatcgctaccggggatcggtgctggtggattaccgcatccttcgtaattttgttcgcatctatcattcagcaggagccgcataa

SEQ ID NO: 125390 - DNA, 816 bp, Enterobacter cloacae
atgaacctcgaaaacaccgtgaaataccacttcgccaagtcgacgcttattagcgactctccgcgcgccactgcttcagattcactgaccgggacggatgttatggcggccatgggcatgacccaggaacgcgccgccatgggatacagtgccttcctcggaaagatgggcatcagttacaacgatcgggcaagggcgattgagttgctggcagagtacgcgttaactaaatgcgataaggttgccgcgctgcgcaagctggacgatgccattaagccactggtaatgcggcagctggccaccttcgcttttgaagattattctcgcagcgccgccagcgtgaaacagtgtgattgctgctcggggcagggattcattgaggctgatgttttcacgatgaaatcgcactacacaatgaggcttccacagtgggcaaaagaccttaagcaatctccgagtgatttcgaggttaaacgcaaggtgaaagaggtggtgcgggttctgtgttcggcctgcaaaggtaagaaagttgtcagttgcgcctgcaaagactgccacgggcgcggtaaagcagtgaatcaggacctcactgaaaagcagggcgtgccggttctggccgactgtaagcgttgcggcggacgtggatatgagcgtatcccatccactgaagcatatgcggctgtttgccgtattaccgatgcgatatctgttgccacctgggaaaagtccgttaagcgattttacgaccagttgatcactaaattcgacattgaagaggcgtgggcggaggctcagcttaaacagataacaaaatag

SEQ ID NO: 125391 - DNA, 387 bp, Enterobacter cloacae
atgtccgatccgatttccggcacggggtttgccggtgtagctttgaccggggccagtgtttacgggcttctaaccggaactgattacggtgttgtttttggttcatttgcaggcgccgtattctacatcgcgacagcagctgacctgagtgtgttgcgccggctggcctacttcgtcgtgtcctatatcgtcggtattcttggctctggtctggttggttctaaactcgcgtcctggacggaatatagcgataaaccgctggatgccatcggtgccgtgattgtctctgcgctggccgttcaaatccttacgttcctgaacaagcaggacatcggctcgctggtggcgctaataacgcgccggggaggttcaggtggcactaaatga

SEQ ID NO: 125392 - DNA, 282 bp, Enterobacter cloacae
gtggcactaaatgatccatcggcaactatcaacgcgctgctctgcgccggagttgtgttaaccctgatgttttatcgccgaggtgattctcggcatcggccatggatttcgcgtttagcctggctgattactgtcacgtacagcgctgtgccgctggcgtatctgtgtgggatttacccgcattcatcatgggccaccattgcgggaaacatcatattcctttccgtgctggtggccgtcaaaggcaacgttgcacgcctggttgatcatctgaggcactaa

SEQ ID NO: 125393 - DNA, 195 bp, Enterobacter cloacae
atggctgaagaaaaaagaagagtaaaagtaactggcttatatgataagcccgagggaacttttatcaaatttgcaccaatgaaattttatgatgacgctaaccagctgcacactgcggaacaagcgattgtagaactcgataacggcaaagttatcaatgtcgagcctagctctattcaattcatcaaagattaa

SEQ ID NO: 125394 - DNA, 249 bp, Enterobacter cloacae
atggcatttcgttattttgaactaactgaaaatgttccttttgaagatgaaagagagcttcacgcacagttcaaacatcacttagaacatgttgtaaaagcatcattcatgcccggcaaacatgaaaagcatgtaattgttgcgggcagggatggcgaatcgataacacagatttttggtgggcctgacgaaaaattcatacatctttatcacattgatgaatatgtaaaacgcgaagacttaatctaa

SEQ ID NO: 125395 - DNA, 306 bp, Enterobacter cloacae
atggccggattaaccagagaacagcgcgctcagcgtgacgcggaaaagcttgcagctcagcaggctgctgataataaccctgcccagcaggaacagcagcaggaacagcagcaggaacagcagcaggaacagcagcaggaacagcagcaggaacagcagcaggaacagcagcaggaacagccagatattgagctggtggtcatggtgcgttatatcccagagttccccggcggtccgctgcgcgctgatgttcaccctgatgaagtggataactggctggcgctggactggcgtctggaggaataa

SEQ ID NO: 125396 - DNA, 687 bp, Enterobacter cloacae
atgaaatatttatcgctacagcaggcgatgctcggcatgcgcgtcatcatgaccaacgatggcctcattttgaaaagcccggcaggtagtgcgcattacgatccgaagggtcgacgtcacacagttaaaggtaatgctgaattcttcccaatacatttacgggtgaaggataagcgcaaacccaggctcagcagtatgtctacgagtgataaacaaataaatgtttatggggatgatggaaggttgcgtgtcagaattggccagatacctggcgaggagcgggtatgtattgaagacgcgaagattggcgatgccgtattgtctacgaactatagcgtgaagatgaacgtggattttggtggcaaacggtacgcagctggaatgagcatcggtcagccaagcgagccgcaggcaacggttaagtttgatcgctttaaggtacatgaagccgcttcatccattattgaaaacgccaaggcagccacgaaggcgaagatttctctctgtgaagaaatgaaacaggccatcattgatgccgtgcgtgaaagcgatttgttcgcagccccccaggcaaagattgatgcgcaatcagcttcagtagctggcttgcaacaggcgatgcacgatgcggtgaacgatgctatccgcaatgcgctgaagccaggcggtctgctgtacaaacgataa

SEQ ID NO: 125397 - DNA, 963 bp, Enterobacter cloacae
atggaacgcaatgggtgggaagagcttggtccatttaacctgagcatttctggttataacaaggaggaagatgcaagaaaggttggggataatgttggagaaattataagagcattatctaagttcattgatcttagctatcttgatggtgtcaccataagttatttttacgaaaatgctcttctttccttggatcgcggcattgaaaccgatactaagttgcaaccttcatcgggggaagttgttggtgttgcaatgacgccaatggttttgcgcaacggaacggtaaaaagtcatattgttcttaatgcggcttttatcgagggcattcttgacaatgaccttcgtggtgatgcattccagcaagcccttgccatcattgctcatgagtgcggtcatgtctccaattgtggcgcgctagataggtcatttcctggtagagccctaaatcatagatattctgatatccatgaaaatcttcgtggtgaatgttggttgtcagtcattgaagagtattgtgccacaaggattaccggcacaattggttttgataataacaagctatatgaagaaacgttcattggttgcgctgaaaaattacgcactaatattttcaacgcaaaatttgattataggtttcatcgtaatgtagataaggttttgaaagaggtttatgatttaatttcaacgtcgctaaaatttgcagcctatttcttgggggattgtgaggccaaagggattaattatgctaataatgaagcgctgaaaggaaatgaaatcatctggttgcatccatatattgaaagcctaaatgaagtctgtctgaaaatttttgataactacggaaagtgggagtcagtcagagaaatggagttaatttctgatgttcttgatgctatggcgaaggattgcggaattattattcgcaaggttgaaaaagggttttgggttgatgttttataa

SEQ ID NO: 125398 - DNA, 387 bp, Enterobacter cloacae
atgcttaaaaagatgctaagaaaaaccttaaagacaataggtatgttacttcttcttgttgttgtgattattgtcgctgcgttggttaataaaccaactgagcaagaaaagaagcaaaaagaagccaaggaacttacggataaaaaactggatgagcttcgcgatgcctgtgaatcatacgtaaggatgtcagttattaacaaaagcactctggatatgtcggtgtttggctcgaacagatggctcggtgacgacggtaagttttacgccacgcaggagtttagcgccaaaaataaatttggtcttgaacagaaattcagggccgaatgtattgaagacaaggatgggaagactgattaccggctcgtagaaatgaatggtagttaa

SEQ ID NO: 125399 - DNA, 1278 bp, Enterobacter cloacae
atgctttataacactggcaccatcgccattaacggaaacaccgcaaccggcaccggcacgaactggacggcaccggccagccagattcgggttggccagacgttgtttgttctttctaacccggtacagatgtttcagatcaccgccatcaacagtgcgacgtcactgacggttacgcctgccgcgtctccggcgctgagcggccagaagtacggcattcttgttactgatagtctctcggtcgacggcctggcgcagagcatgtctcagctcatcaacgagtatgacgaaaatatcggcgcctgggagacgttcgccaccacctcagcaaaccagagcatcaccgtgaccatcaacggcgctcgtgtaaccattccggcgatcggcaaactggtccagaaagggagcaatggggcggttggagtttcggacggcgggaccggggcaacgaatgccgctgacgctcgcacaaacctcggtttgggaagtagcgcgactaaggacgtcggaacggactccggaaatgtcatgcgggtgggggcttttggggttggttctatccatggtgatggaccactactggacgctatggacgcgtttacaccgacctgtttcacctctcactccaatgatggacttacccagcttgggctaactgccaatacaggtattacgtcaatagtcgtcaaccgtggaagccgtccaacacgtattcatcaggcttacattctgagacgaacgtggttctcgtattacagtggctcatcctggtcatatcaggaggcttacaccacgggcaataccactaaatccagtgatggcaccctgaaagcagcgtctccggtcgctcgtatcgttgcgagtgctgatacctgcctgcgctcagatatcgctgaggatggttttacctggtgcggctgcggtgcggcgaacgccgaggctgagggcattactatttcacggcttgatgtcggcgtttatgttctcacaggttcggcaggcctggcgtcagagggatggcagttactgccgccaatggaccctggcggcatgggggaactgggtgtagttgaggcagagcaaaccgaaaacggaggactgactatccgcctgtttaagcgaaaatacctgctaggcgatgacggggagatcgtcaaaacgaaaggggaaccgatggacgtgccagcgaacagctggatcgatgttcgcctggatatgcccactgattcagttttcaggcgtgaacagtacagtctgcaaagtgacggagaagattag

SEQ ID NO: 125400 - DNA, 831 bp, Enterobacter cloacae
ttgggagatgaggttacagcaaactttggaagcctcgaaattggtgccaaaaaaccttcttctgcgagctttgtggatttccatttccttggcactaacgactatgacgcgcgcatactgtgcggtggtaattctaatggtgctatggggaaaggagacttcacattttacgccggaaaatacgtttttatcggtgatagctttgagtttcgtaaccctattacctgtcagaatagcatcagcgcatctgccaaaattgcgactacgtctgatatggaatgcaaaactaaaatcgctgttttggccccagctgacaatcaaaatgctcatgtatggttttatggtacaggtggggcgtccagaggagtaatctattccagccaaacagggattattcagatccgccctgacaataatgataacggcggctccaatggatattcttttgcatttggtgccgacggtaagtttacctgcgtcacgatgaaccagacttctgatgagcgagtgaaattcgataaagagcccgtcagtaaagcactggagaagatttgttccctgacgggctacacgttcggcattcagctcacagaatcggagtcggtacgcagcgcaggcatcatcgcccaggatctggaaaatgttctgcccgttgctgtaagttctggcggaactggcactacgccagcaggagaggaaattaacgatcttaaaacggtggactacagtgccatgagcgccctgtatgttgaggccattaaggagctggacgaacggttaaacctcatcgaaaaagaactggctgacctccgcggctcgacagttgcctaa

SEQ ID NO: 125401 - DNA, 768 bp, Enterobacter cloacae
atggctcaggttcatcgcgattacaggtcactcgcttcgtacgatttgattactcaatacccgctgggcatgtctttcggcatccaactgggggcgaatgcctggggaggtggaagtggtgcagatgtctataccggcatgttaacgctgcggggatggcatgatgcaacagggggcggctacacgtcatggcagttagcctctacgtcgcagggcctcaagtatcgtcagggaaacgggactgtttccgggctaactaacgttggcttttctactacgcataccctttattcaacgcagaacaccacgaaagccagcgacggaacgcttaaggctgcatcgccagtgatcaaagttttttcagatggaacataccagactaacgacgaatcagaaggctgcactgtaactcgtctggccacaggccagtatctgattgaaggatgccagggtctgaactcagatgcagcatggggcggcatcgatggcggttttgacatccccaatgatcgcaacaagcagccgcttatctggctggattatgaggttagcgccgatggttctgtactggtgaaaacctatcaccgtactcaccctgatgcgccagcattcgccaggaacgaaatagacggcgtaagtgatggtgatccggtcgacattcccggcgatcagtttgtgtccgtgcgtgtcgaaatgcctgccgattctttatacaaccaaaaacttagtgcggcagagctggccatgactgctgatgcgggtgaataa

SEQ ID NO: 125402 - DNA, 681 bp, Enterobacter cloacae
atgtgctggatcgagaaaaagctgcgcgcggtgctgccaggctcgattgagctgatcctcaacccgctgctgaccacattgattaccgggagcgtggcgattgtggcgctgcaaccgttaggcggcgccatctctgaagccatcgcccacggcgcgtctctggctatcgatcgcggtgggttattggtgggggctgtgctgtccggaaccttcctgccgttagtgctgaccggtttgcatcaggggctagtgccgattcacgtcgaactggtacaggcgcacggctataacgccctgctgccgatcctgtcgatggcgggcgttgggcaggtcggcgcggccatcgcggtgctgatgaaaacccgcaacgcacgtctgaaaaaggtcattaaaggggcgttgccggtcgggttgctcggtatcggcgagccgctgattttcggcgttacgctgccgctgggcaagccgttcctggccgcctgtctcggtggcgcggtgggcggggcgttgattagctactggaaagtggcgaccgttatcaccttcgggatttccggtttaccgctggcattaaccatcgtgaccggaaaagtgatgctctatctgttaggctatctggtagcggtgatcgccgggttcctgtttacctggctattaggattcaacgacccagaggagtaa

SEQ ID NO: 125403 - DNA, 645 bp, Enterobacter cloacae
atggatattaaacaggttgcattagggattctcgatgggatctcctccataccgaacacagcttacatgggcgttgtaagaagctgggagggaagcgggcttgccggggatagcgctaaacaaagaaaccaggctgagacggagcgttttttctatatgctcaagagcctgggtaatgctgagtcaccattacgcagactgataactatcgttttcacgtcgttctatcagaaactcaatgatgatggtaaagaggccgtaaacaataaattgggttacggagccgggagcgttggtgggcgagcagcagggcaaatagctttggcacagacaaccgcaagtctgatgttgaatcgtctggcgattgatcaggcgtacaagcattttattcggttcagcgcttcagcagcgttaaacgtcgtgatgtttcagggaatcattgaagaatcagccagagcgtcaagacggatgaaagccaaatatccctctacatacgccagggtgtcaaaagagagtctggatatggtctactttctcgttgaacagcagttagagccttacctggtgttcattgaaggacaccctattgattgcaaaggaatacagaatgaaatttgtaaaatcgttaatgtcccacgcaattga

SEQ ID NO: 125404 - DNA, 186 bp, Enterobacter cloacae
atgaaatttgtaaaatcgttaatgtcccacgcaattgagggaactatcacctttctggctgtgctttttgctatggggtcattcttctggtttgaaagtacatggatgaaattcaccgggtgttttggggcgttgatagttggctatgtgctttcatacggagccgcaaaaattagaggcgggtga

SEQ ID NO: 125405 - DNA, 1392 bp, Enterobacter cloacae
atgagcgaagtactgtcagtaaaagagaagattggctacggcatgggagacgccgccagccatatcatttttgataacgtcatgctttatatgatgtttttctacaccgatatttttggtattcccgccgggtttgtcggcaccatgttcctgctggcccgcgcgctggatgcgatctccgacccgtgcatggggctgattgccgaccgcacccgcagccgctggggcaagttccgcccgtggattttgttcggcgcgatcccgttcggcatcgtctgcgtgctggcgtataccacgccggacctcagcctcaacggtaaaatggtttacgccgccatcacctacaccctgctgaccctgctctataccgtggtcaacatcccgtactgcgcgctgggcggcgtgatcaccaacgacccgacgcagcgtatctccctccagtcctggcgctttgtgctggcgacggcgggcggcatgctctctacggtgctgatgatgccgctggtgaacctgattggcggcgacgataaggcattcggcttccagggcgggatcgccgtgctgtcggtggtcgcgttcctgatgctggcgttctgcttcttcaccaccaaagagcgcatccaggtgccgccgagcaccacctccatgcgtgaagatctgcgtgatatctggcaaaacgaccagtggcgcatcgtcggcgtgctgaccatcctcaacattctcgccgtttgcgtgcgcggcggcgcgatgatgtattactgcacctggatcatgggctcgccggaggtgttcgtcgcgttcctgaccacctactgcgtcggcaacctgattggctcggcgctggcgaaaccgctcaccgactggaagtgcaaggtcagcatcttctggtggaccaacgccgcgctggcggtggtcagcgtggcgatgttcttcgtgccgatgcatgccaccgtgctgatgttcggcttcatcttcgttatcggcgtgctgcaccaactggtgacgccgattcagtgggtaatgatgtccgataccgtcgactacggcgaatggaccaacggcaaacgtctgaccggcatcagctttgcaggcacgctgttcgtgctgaagctcggcctggcgctgggcggggcgatgatcggatggatgctggcaggcggcggctacgacgcggcagccaaaacccagaacagcgcgaccatcagcatcattatcggtctgtttacgctggctccggcgatctgctacgtgctgagcgccattatcgccaaacgctactacacgctgaaaacccccttcctgaccaaaatcctgcgcgagctggcgcagggtgcgcgccgcaatcagcaggagtttgaaaacctgccggtcagcaaagaattgcagaactaa

SEQ ID NO: 125406 - DNA, 1176 bp, Enterobacter cloacae
atgagcgagattgttattattgcagcccgccgcacggcgacgggcgcatttcagggcgcgcttgcggagcattcagcctctgacctgggaagccgcgtcattcaggcgctcctgaaagaatctggcgtagaagccagtcatatctctcaggtcattatgggacaggttcttactgcggggtgcggccagaacccggcccgacagtcggcactgaatgctggattgcccgtagatacgcaatgcctgacggtaaacaaagtgtgcgggtccgggcttaaggcggtccatcttggcatgcaggcgctgaagacgggtgaagctgagtttgttatcgccggtggtcaggagagtatgtccaacgcgccgcatatcgccacgacgtcgcgtagcggaacgcggctgggtaatattactctcaaagatagcctggtttctgacgggctctgggatgccttcaacgattatcacatgggtatcaccgcagagaatgttgcgacggagtttggtatcagccgcgaaatgcaggatgaatatgcccttgtctctcaccacaatgcgcttgaagcgcaggcgcgtggcattttcgagcgtgaaattatccctgttgagtggcagacgcgaaaaggtgaaacgataagcgtggagagggatgaaggaccccgtgcaaccagtatcgaaaaattgacgaaactgaagcctgtcttccgaaaagagggtacggtgacggcgggaaatgcttcatcgttgaatgacggtgccgctgcggtcctgctttgtacgcgtgagactgccgaagcgcgtggcttgccggttctggcatcgctgggcgtattttccaattccggtatccagccggcattaatgggtgcagccccgattcaggccattgccgactgtctttcccgctcgggatggaagcctgaggatgtcgatcatcttgaatccaacgaagcgtttgccgcccaggcgctggccgtgattcagcagaccgggatttctccggatcgtatcaatccatacggcggggcaatcgcgcttgggcatgcgataggtgcatctggctgccgaattttggtgacgctggttcattccctgatccgtaatgatgccaggcgtggcgttgccgcactgtgcgttggcggcggggaaggcgtcgcgttgagcgtttatcgctaa

SEQ ID NO: 125407 - DNA, 414 bp, Enterobacter cloacae
atgagtcaaattaatgaccgcacgcgttatggcagagagattatggaccgtcttgaagcggggctcgcggataaagtcacccgccgcctgagcgagctggacccggggctgcccgccctgattaccgactatgcgttcggggatgtggtgggtcgtccgggactggatctcaaaacgcgcgaaatgttgaccgtcgcctcgcttgtgacgctgggtaatgccatgccgcagctagaactgcatatgagaggcgcgctcaataccggcgtgacgccggaagagctgcttgaaattgtgatacagatggcggtatatgctggcgttcccgcctgcatgaatggtcttactgcataccgcgcggcaatggccgcgacgggccataccttgccaggactgaagggaagtgacgcatga

SEQ ID NO: 125408 - DNA, 1221 bp, Enterobacter cloacae
atgacttcagaactctctccgcaaaatatgacgttaaggtcatggcttgctttattcattctggctatttcaacctttactattgtcaccaccgaactggcgccagtcggattattaacgccaatcgcagaggggctacagtcttcggaatctgcggtgggcatgaccgtgtcgctttatgcttgggtgggggcgttgagtgcgctgtttgcctccgtctgtttaggaaatgtgtccagaaagcggcttttacttgtgctcaccgtggtgcttctggtctctaacgttatggctgcgacggtaaacgtctatagcatgctgcttagcgcccgcgtactgggtgcgctcgctcacggcgcattctgggcgatgatcggcgcgacggcggtggctatggtccctgccagatatataggggccgcgacgtcaatcgtatttggtggtgtttccgcagcaagcgtttttggcgtaccggtatccaactatattggtattcacttcggctggcgtcaggcattttggctgatggccgcgctgagcgtaattgcctttgtgggtattagcgttcttgttccccggattaccagcaaaagcgcgctcgggctggatgcgcttaaaggcgtgctgaaatcatcaacattatggaaaatctactcagcaaccttgctggctgtgacagctcactttgccgcctttacgtacattgaaccctggctacacacgcagagttcactgtccaccaccattattcctgctgtgctttttgtttacggcatcgcgggacttgcaggtaatttcctgaccggcgtgttgattgataagtatctcaagctgacggtctctttgtctgtactgctaatctgtgcagtgctgttgttcctgggcctgtctggttcctcgctctctgctgcgttgatcttcacaagtatggttatctggggtgtcgccgtatcaggaatatttgtcggtttccagacgtgggttttacgtatggcagaggataaagccttcccggcctccgcaatctacgtttcgtttttcaataccgccattggtatcggtgcgtcagtcggtgcctggatggtttcatcattttcaatgccgctcctgtatatcgtcgccggtacggccatcggtctgtccgttctgcttgtcgcggttattccggcaacgttgaccgcaaaacaatcccgtatggagaaatcttatgagtcaaattaa

SEQ ID NO: 125409 - DNA, 651 bp, Enterobacter cloacae
ttgcgtaaacatgccgctttttttgatgttgatgaaacgcttataaatattaaaagcatgtttgatttctatgatttctggtgcagggaaaataatcaaaacgatcgtcttcaacgctatatgtctcgttttcgcgccgacgtaaaaaacggtgtgctaagggagactctgaaccgagaatattatcgccagtttaaaggtgtgtcttgtcgttatctggaagaaatgggtgagaagtggttcaggcgtaagctggaaagcgagttttttattgagagtgctgtttcagcccttaaaaaacatcagaatcagaacatgtataccgtatttatatcgggctctatgcttccgattctttcacctattgcaaaatatcttggggtaacggaagtactctgtgcgccggtgataataaatgacgcaggtgagttgacgggtgaaatcggcctgcctcaaacaattggaacaggtaaaaaagacgcgcttttagccttttgcgatgataaagagattaaccccgcggattgttatgcctacggcgacgatctttcggatattccaatgcttgaagccactggccatcccgtgtgtgtgggaaagcattccgcgcttaccagatatgcaactgaaaaaaattggcacattatttaa

SEQ ID NO: 125410 - DNA, 834 bp, Enterobacter cloacae
atgcctgaattgcgtagccagaaataccgtctggctgctaccacgcaggggccgctttacccccctgcggaggtcatggacgggaagggtaattttgtcgtggttggcatggtgccaggagataatggactgcagtggcgaagcgtcattgtctctccggacagcccgcttccggcatttggggaagtcgcaccctataacattctgtgcgatctgaaaaagatgactcaggacgcgttgaaggacatcattcttcatactcttcctttacccattccgatgaacaactatcggatgattttctccccagaacagcggccgcaggccaataatgaaataaggcctggcctgccacttcatgaaggctatatcgcggattatcgaagcagcgatggaaagcgagagatcgagccagtgaccctcgctgcctggctagaggcagagggcacctttgaggtcacattgtccgaagataagaaacgagccaggttcacgttttcgttccggagccttgttccggatagcgtttacaccgtgatgagtctcagggaaaacgatctagcctcggaggatccgagcaggccaggtccgctgggaatacccaacgtatttataaccgatagcgaaggtaatgccgaatattgggcagagttgaccgatccttttccggctccggcgaggaaaggaaacagaattattaacgtagtcgtactttatatgagctcgcgtcagagctacggcggtgcaattggcttttacggtcttggtggcgatatccatgcccaattaaaactcaaaggccgttccttcgatgaatttacaactatagagtga

SEQ ID NO: 125411 - DNA, 777 bp, Enterobacter cloacae
atgaactgtaaaaagttggtagttgttggcgataaatttaatgaatttgccaatggtaaagatgtactgactatatctcagctagaattattgactcaaatccctgcgaatatcattgataaagaacatgaaattattgttgggcagggcgtgcgcaaggattttgctggaaaggtaatttcaaatcaggcaagaaatgcgatccatggtaataagttgaaaatatgctctctggaaaaactggttagcgacaaaaaaaatgcttattgccataaaagactggaacagaatgtacttataggacctgcggaacaagctgagcataaccacgatctttatgcgatgccgctgttaatcgatgagcgttgcgaattgatggcggatcatcagacggggcagcatattcagggaatgctcctggttgaagccagccgacaggcctttattggcgtcaccgaagaatttatttaccaacaggaaagcggacgctattacgtcattaacagcatggcaatcaatttcgccagtttcctgttccctttaccggcgctggtccactttgaatttcttgaaaaagatattaacgaccgccgggggcgtttcaaggctcaggttcgcgtcactcagcaccaaacgctttgcgcgacaatggatgtctcgttcaccgtttatccttccgccctgattacagagagagagaaatctctggctgaggttgccatgcaggcgaccattgttgagcagcaaggggtgactcagggggtaacgcatgcctga

SEQ ID NO: 125412 - DNA, 612 bp, Enterobacter cloacae
atgtcgtctaaatatgtactggtatcacgcttcccattaaaaaacactttttctgaaaaagaatttacttccttaaaaagcagtgaaaccgttcgctactatacctgtgaagaaaacggcgttaatgagttgttggaattacgcgcattcaatgatattaaagagattgcatgggttgagaatgaaatggaatccatgttccatcgtttctctgaggttctttctgccgatatccgtcgcgaactgcttaagtttgttgaatccccaattgataataaaaatagcttgccagaatcaaattatattcaactccgacacgtcgaagtgcctgcgcataactatcagcagtaccgtcagtggcgcgatgaaaccatttttaatgttgtaagagataacaaagataagattgaaagtttcgaagcgtttcattcactgatcagcggtgttccgggtgtaatgtttatctcctcattcaacggcgataaatcagcatataaagaagcatttaccaatgcgcgttatcaggaaattattcaacaggccggcgataacttcattactggcggtaacgacggcctttatacacgtatctatcgtgcttgctgttgttga

SEQ ID NO: 125413 - DNA, 939 bp, Enterobacter cloacae
atgaccgatacgctgaaggatatacctgtatttgtggccgccgttgaggcgggaagttttgcgcaggccgccgtccgtctgcatttgtcgcgctcggcggtaggaaaaagcattgctcgtcttgaagagcggctgggggtacgtctgtttcaacgcaccacccgcagccagagtcttaccgataacggcgcccttttttatgaacgctgcctgcgggcgcttgaggagattcggggtgcggaatcgctgcttgaaaccggaaaacagcaggtcagcggccgcctgcgcgttgccatgccggtgctgtttggtcgccagtgcgtcgcgccactgctgatagaactgacgcaggaacatcctgggcttgagcttgaaatgtcattcagcgaccgtgtggtggatctggtggaggaagggtttgatatggcggtgcgtaacggcacgctacaggacagcagcgtgctggtcgccagaaagctgggcgaacaccgcatggtgctgtgcgccgcaccggagtatctgctgaggaaaggccagccacaaagcgttgatgatttaccccaccacactgccattaactatctgcgatcaggcagagtgctgccctggcagctaatggatagcgaagggagatcgcacacctttactccccgctcatcactcaatatggatgatttacaggcaatctgcgacgctgcgctggccggacacggccttgcgtggttgccctgctggatggcccgcagagaaatacatcagggaaaactcatcccgcttttaaagcaggcaccggacgtgcgcttcgacgttcatgcagtctggcagcagacgccgcatctgccgctgagggttagaattgctgtcgatacgcttgccagccgtttaccgtcagtgctgtcgctggactttcctgcaagccgcgtcgaaggtgcaagttaa

SEQ ID NO: 125414 - DNA, 705 bp, Enterobacter cloacae
atgagcagcaggagcgatattatcggggccgatgaatggcaggtaacgacccgcagcggcctcgtctacagtgaggtcctcggttggatcgacctggggcatgccaggggcgaagatatttccctgcttctggctgatttcagcagcggcgaagccagtggcagaccttattacacgattgcatacaatcagagaatgaatatcgggaaaggactggccggaacgggtaagtttgttcgctgggaaataaaacgtgggcgctcgatgtcagaaattaacagcattgccctggctatgatgatggataccgcgagaaattttgaaaattaccagtcccgcgcttttttcagttggtacaccgatagcgggttcagcggagaagacctggtgtcggatctgctcggtttttacagggcgctgattccttcggattaccgggctcagttgcggcctgtcagtcgtgaaagcgcactacgccgctgggatcattacggaccgatcggtaatttcaagaaccggggttttcttccattgatttttcccgaccctgatgaccttaatatccggcatgaaccctataaaggcccgcttccccgctttatgaggtgggtaacgccgtttgataacttcagttcagacattgttcgtattcttaacgataacggcacatatcattccttctttacccactcaggacgacgttga

SEQ ID NO: 125415 - DNA, 303 bp, Enterobacter cloacae
atgaagatcgtgtggtcaaaaacagcagagaagcaattttctaaaatcgatacgcgatatcagaaccgcattaaattcaggctggagaagatggatgataaaacatcacctgtcgcggatatcaagaaattatcttctcccgaaaaccactacaggttgcgattaggtgattacagggtcatttacaccttcggggatccgccgggtgatatctgctacgtagtggcggtaaaacgccggacaaccaccacctaccttcatgaggagcatacggaatatgactgttcagttcatcaaggatga

SEQ ID NO: 125416 - DNA, 1263 bp, Enterobacter cloacae
atgaaactcaatgctcgccagatagagaccgcaaagccgaaagagaaagcctataaaatggctgatggaggcggcttgtatcttgaagtctccccaaaaggttccaagtattggcgcatgaaatatcgccgcccatctgacaaaaaggaagatcggctcgcttttggtgtatacccgacgatcactttggctgaggctcggggtaagcgcgatgcagcaaagaaattgttgtctcatggcattgaccccaaagctgagcaaaagggggcacaagctgaaattgagggggcatatttatttgaaactatcgcaaggcaatggcacgcaagtaacctaacttggagcgaagatcatagccgtcgcgttctgctgacgcttgagcagtatattttcccctcgataggtcaaattgacgccagaacgttgagaaccagccagcttctcaatccgatcaaagctgtcgatacggcaggtaaacatgatgttgcgcagcgactgatgcagcgcgtaaccgcaattatgcgtttcggtgtgcagaatgaccttcttgaatcaaatcctgccagtgatatggctggagcgcttttaagcgttaaggcaacccatcacccagcactacccccaaaaagaatccctgagtttcttgaaagactatcacgctataaagggcgactaatgacacggcttgccgttgaattaacgctactcacatttattcgttcaagtgagatgcgttttgctcgatggagtgaggttaactttgaacgaagcgagtggacgatacccggaattcgtaaacctattcccggcgtaaaacactctgagcgtgggatgaagatgaaaactgaacatattgttccgcttagcaaacaagcatttgatatttttaaacgtttacatgccttgagcggtaaaggcgaggttatatttcccagcgatcatgatcctaaaaaagtaatgagtgaaaatactgtaaatagcgccttacgtgtaatgggatatgatacgaagacagaagtatgtgggcatggttttagaactatggcgcgtggtgcgctaagtgagtcgaaactatggaatgatgatgccattgaaagacagctaagtcacgttgaacgaaaaaacgtgaaaggttcatatatgcatacttctgaatatcttgaagaaagaagattaatgctgcaatggtgggctgattacattgatgctaacaagaatggatctatcacaccatatgattttgcgcgtgtgcatggaaaataa

SEQ ID NO: 125417 - DNA, 639 bp, Enterobacter cloacae
atgaataacacacaatctgataatgatttgttttattttaataggttaacgtacattacgccacacgaaatggcgcttgctatgaatggttttgactatgataccgaaaatgatgaattgactgagattcaattaaaagaggttatcagattaagaaaggcaataaccagaaatctacaactgattaatgaatataaaagcatatccgccacgcaaaaagtggaagcgaacttagtactaactgccgcttatatctttcagagggaagatattgtacccgtggagattaaggaaagaattgagaacgcattgcaacaacaggtaaaaaataaagattggggcgatattttaatgatgctaggaggaagtgaattatatgaaattggtaaaaaattaaggagtaatggcagagggcagtatagaaaagatgacgaggataattatagttgtaaattaatctacctactaattgaattacttaagaaacatggaaaggcaaattatagcgataatagtgttatatataatgatattatttctttttgtaatgagaatgagattatattgaaaggaattaaaaaagctactttttataagaaaataaagttgggcaaagacattataaaatacggagagtga

SEQ ID NO: 125418 - DNA, 231 bp, Enterobacter cloacae
atggaatatgcaaacaacctttcagataatcagactcttatctcagcaaaagaggtgttaagacgcgttcagcgtagcaaggcatggctttacaaacagctttcaaacaatacatttccccgcccggtgaaaataggaactcgtgcaatttcatttgttgaaagcgaagtcgatcactggattcaagagcaaatatatgcctctcgtggtgaacggcatgaaaatcactaa

SEQ ID NO: 125419 - DNA, 684 bp, Enterobacter cloacae
atgcctctcgtggtgaacggcatgaaaatcactaataaaaaagcccgacatattgagtttgtgggcttaaaaatattgtcgcttgctgaaattagcatggagcctgagagagcgtctgttagcttctctattcagcttccttgctctggcttaactttcctgcgctggcggcgtttaatctcactttgcatggatgtaatgatgaattgtgacgtactttcgtcctcttctttcaccatttccattgcttcaactacgtcatgtggcactcgtgcctttaaggcttgtgatttagcattctttgtaccggtagccattactgaatctccgtatgtttggtgggccacagtatacacgagaaaagaacaaagaaaagcattgacgtgggccacacctagaatctatagtgggccacaccttaagtgttctagggtgaaaaaggcgaagcccggcagtgcagcaacactaaccgggcctctgaccaatccgctgtatgaggaaacgaagatggctaaacagaagtgtacctggttatttgcggcgatcaaccgcagtcaacgcaatgcccgccctgtgatgttaaggataaccgcagataatgagcgctcagcgcggcgcagacttgccccggactatgtgctgagctttgccggtcgcattccctgtggaggtgaacatgcgtaa

SEQ ID NO: 125420 - DNA, 360 bp, Enterobacter cloacae
atgcgtaattatccgcaacccggcgaacgctggcagcatgagcgtggctggactgtcacgattatcagattaactgaagcctcgccctccgtggcgctggttaaccctgaattcagctgcgaagtattgatacgtcatgacagcgacaaccagctttcttcctgtcctctggcatggtttaaacagcggtatacgcgcctgtttgatgcgccgctcgttaaaccttcaccagctccggcaggcggtagtggctccggcccgctgacactgcatccgtctgtggtatttacccgctggcgggagcgcagcatacggcgttctgctgaacctgacgacagtcactattcaaaatttctctga

SEQ ID NO: 125421 - DNA, 285 bp, Enterobacter cloacae
atgaatatttcaaacgggcacaactgtgctcagggccacactttgcctgaaaaacacaataccggtgcttttgcctatggattgtcagaggacggtttcggaaagctgacccgcgcaagaaatgcctgcgacctgctccagcttctcttttctgaatacccgtctcaggtcggagcgctcgatacaggctgtgcgccgggcgtcgccgcgctgatggagtacctgcgggcagatttgacggatattgcgcacagctgcgcactgattgaaggaggtgccaaatga

SEQ ID NO: 125422 - DNA, 384 bp, Enterobacter cloacae
atgaaccagccgcaggtttccattttcccggcagaaatgaccactgcgctttaccggcgggctattgcatcggcctggcgccagaaagcgctgaccgaaaccggctgcgatcactatggtccgcacagcctgacggttgaacgtattgaaatggccattgccctgcatatcgagtgcgcactgattaacgaatatggcgaagcacagggagcagcggctgcactggcgctgctgactgacatgctggagccatcattgctgaccgcgccaccggtactgactgtgcgcggctgtgaagtgatggcggagctgtaccgcacacttccggcggcatttgatgacttctgcagcacaggtgtatcgctgtatcagggggaagtatga

SEQ ID NO: 125423 - DNA, 2673 bp, Enterobacter cloacae
atgacaacacagacggttacgcagatttcagccgcagcgcggggaaaatggcccgtcattctgcagatgctgcgtattgatgtacctgaaaacggcaggcacggtccctgcccgaaatgtgggggcaaggatcgcttccgcctcgatgacctcgacgggcgcgggacgtggatttgcagccagtgcggcaatggtgatggtctggatctggttaagctcataaccggttacggcgtcagaaaggcagcgcaggaggtggcgcaggtgcttaatgtgccggatgtgcaggaactgcccgttaagcccgccaggcaaaaagcccctaaacgcgatatgagccttaccgtggcggccctgatgaaagagagtcacacgggagaaagcccctatctgaccggaaaagggttcgccggatacccggcctccctgaccgggagcgtgcagcatatcagtggtaaggatttccctgccggttccctgctgttaccgctcacgacgaacgccggagccgtgaccggtgcacagcttatcgccccgacgggtgaaaaaagcatactgcccggcagcacgatgaaaggcgcgtttgtggcgctcagcccgttaccgtctgaaccgccggtacaggtggtgattaccgaaggttacgccacggcgctgacggtaagccagctcaccgccggatgcgtagtggcggccatatcggcgggcaacctgcccaacgtcgcacaggcgctgcgggcacgctggcctgaggtaaaaattatcatcgccggtgataacgattttcaggacgggggcgagaatcccggcagatcctttgctgaacgggcggcaaaatcagtcggtggctgggtgacgctgccaccgggagaaattaaagctgactggaatgacttccaccgtgagcacggtattacacgtgcccgtgaagcctttcgtaacggtcttgtactgtgcggagaaggccgcacgcagttgccgaacgggttccgtcttacccaggaatatctctggtatgaaaaacaggtacagcgcaacggtgagacggagatccagaacgtcaaaatatgcaacccgttgcgcgtgacggcaatcacctgcgatgccgatggcggtaatttcgggcgactgctggagtgggaagatacatggggagagagccgccgctgggcgatgccgatggaaatgctcagtggtagcggtgaggaactacgccgggtactgctggttaacgggctgtcctatatcagcaccaccggtgaggcccgcgcccgcctgatggaatatatctcgctgtgtaaaccggaacgccgcgtgacctgcgtcagccgcactggctggcatggtcaggtttacgtcctgcaggatgaggtcagcggtgaaggtgcagagggtgtcattctccagaccacttccgtgcaggggcgcgatttccgtgtgtcaggtacaacggaggaatggcgggagcacgtttcccgttactgcaccggtaactcccgcgtggcgtttgccgtcagtctggcctttgctgcacccctgttacggctggttgggatggacggcggcggctaccacctcaagggggaatcgactgacggtaagaccaccaccatgaaagcggcaacctccgtttgtggcgggcctgattactggcagacgtggcgggcaaccggcaacgcgctggagggatgcgccagccgccgcaacgatgccgccatgatgctcgatgagatccgtgaggtagacggacgcgaggcaggtaatatcgcctacatgctggcaaacggtcagggcaagggccgtgccggtacggacggtgagctgcgcacccgtaagcagtggcggctgctgttcttttcaaccggcgagctgtcactgactgaacatgcggcaaaagccggggagcgtacctttgccgggatggaagtcaggatgatccagatccccagcgattccgggaagtttggcgtatttgaggagctgcacggcttcgacagcggcaaagctctggcggaacatctggagtgggccacgtccagctactacggttcgccgttcagggagtggctgaaagccctgaccgctgaccttaacgggctgacggcacaggcaaagtcactgatgaaggaatataccgccgccctgaccccgaaagatgcgggcaatcaggtgggccgggctgtgaaccgctttgcactggtggcgatggcgggcgagctggcaacccggctgggtatcaccggctggcctgagggtgaagcgctgcgggcaacccgcgtctgcctgaacgcatggctgaaagatcgcgggcacaccgccaatcaggaagatattgccgcactggagcaggtacgcagtttctttaccgcgaatcagtacagccgctttgctgactggcacgacgagcgcaaccgccccggcaatatggtgggctggcgcagggtggagaaaggcagtaccgcgcagggcacggaagctgtcaccacgttctacgtcatgccgtccggctggaaagaaatctgccggggatttgacccgcgcaaggtggcgcgtctgtgcgcggatcgtggatatctgctgccctccaccgatggcaagctgcagacaaacattcgcccgccagagatgaatccccgcaggctctatgtcttcaacagcgaggtgccgggttaa

SEQ ID NO: 125424 - DNA, 762 bp, Enterobacter cloacae
atgaacaacaccgcagagaataacaacctttccacttttccggctgtcacgcagcgggcactggaaaccctgaacacagccagaaacgcatggcttgaagcacgtcgtcggcagaaagcggcagcggataatattgcgacaatccgccagcgccgggctgaaatggaagccacgacgaacgcgctgaatgaggagtggcgcacgctgtttcgtgaaagtcagggcgtagtctcaaaggaaatgaaaaaactgcgcacggaaattgcgctgggacgagaaacgcttgaggattttgatgaactgctggcagctcaggaatgcgaaaatgcacttttgccgcaggagactgcggaattagccggaaagtatatccacgcgcacgatacccttgtggggattcgcgcaaaacaaatctgggaagattttatgcagtcgcatggtaaggcgctaatccagacactgagcctgctcaaatccactatgggtcgggaagccagtgccgttgtgggtgtggtgaattcagttaatgacccgaacacagtactgaaagactttattcacaaacatattaccaaaccggctcttactaacgatgcgatgccggaacaggatccggtgtttaaactggcgggcgttgcgccggattatgcggctcgtgtcgatttaagcaaaagcccgtcaccggcggcccttcacaaaatgaagatccgtcaggaacgtgaagagctgcagaaacgtaaccgtgatatggagggtatctga

SEQ ID NO: 125425 - DNA, 273 bp, Enterobacter cloacae
atggcacttaaatgtcccgaatgcggcacggttgcacatgccagaagcgccgcctatgaagcgccgtcggttaaacgctcatggtatcagtgtcagaatctggaatgttcctgcacgtttacggcgctggagagtgtggatacgataattatgaagccccggcgcaatgaacaggaatcagacaaggcacaaatgccggaaaaacaacagcaaacgctcaatcgctatggctccgcgtcaaagctgtcaggccgtcagcaaatccctgtctga

SEQ ID NO: 125426 - DNA, 363 bp, Enterobacter cloacae
atgggatggatcggcgttgatctggacggcacacttgcggtgtacccgccagagaacggagcgctaataggtgatgcggtccccggcatggctgaacgggttcgcaaatggcacaaggatgatattgaagtacgtatttttaccgtccgggcgggttcgcgtgccgggattaagcaggttaaagcctggctgaaagccaatgaactaccggacctgatggtgacaaacgttaaagacagcggcatggtggaattatgggatgacagagcgatacgtgttatccgtaataccggatcagtgtgcgcgggatgcaacggcacatcgaagtttcaccatcattccggggatttcaccaactgctga

SEQ ID NO: 125427 - DNA, 1056 bp, Enterobacter cloacae
atggataccccggacataatttccgtaccagaggtcactgcagcgacagagtcgcagtcctctgcagaatgcttcacctttggcgatcccattcctgtactggaccgccgcgaactgctggattatgtggaatgcgtgcagatggatcgctggtatgagccaccggtaagttttgcagggctggcacgtacctaccgcgccgccgtgcatcacagttcaccaattgccgttaagcgcgatattctcagcagtacctacatcccgcaccgcctgctcagccagcagtcctttgcccgtttcgttcaggattatctggtgtttggtaatgcctatctggaaaagcgtactaaccggttgggcggtgtcctcacactggagccagcgctggcaaagtacacccggcgcggcgttgacctggaatcctactggtttgttaactatggcctgacgacgcagccttatgagttcaccagaggcaatatttttcacctgatggagccggatattaaccaggagatttacgggctgcccggctatctctccgccattccgtcaaccctgctcaacgagtccgcaacgctgttccgccggaagtattacatcaacggcagccatgcgggcttcatcatgtacatgaccgacgcggcgcagaatcaggaggatgtgaacaacatccgcaaggcaatgaaaagcgccaaagggccgggcaatttccgcaatctgtttatgtactcacccaatggcaaaaaggacggcatccagatcatcccgctgtcagaagtggcggcgaaagatgagtttctgaatatcaagaatgtaagccgtgatgacatgatggcagcacaccgcgtgccgccgcagatgatgggtatcatcccaagcaacaccggcggctttggtgatgtggaaaaggccagccgtgtttttgtacgcaatgaacttatgccattgcagaagcggctgcaggagctgaatacctggctgggcgaagaagtgatttgcttcgagccttattctttacaacttgatgaaaatgctgataacggcagggggtaa

SEQ ID NO: 125428 - DNA, 888 bp, Enterobacter cloacae
atgccacttatgcagcgtctgagtggtacacacggggtcgggccggtatgtcgcgaactggatattgccccgtcgacatattactggcatcagcaacgccagctacatcctgagaaatgtagccaacgagaaaagtgcgatgctcaaatcatccaggagataaaacgcgtttacggagaaaattacagtgtctatggggcacgaaaagtctggcgtcagttgctccgcgagggctttagcgtcgcccggtgtactgttgaacgcctgatgaaaataataggtcttcggggcgtactccgtggcaaagtcatcaagaccacgatcggtcgtaaaacagcggcagcagcggatctggtaaaccgccagtttgtggcagaacgtcccaatcagctttggtgtgcagattttacgtacgttagcacctggcatggcttcgcctatgtggcgttcatcatcgatgtgttcgcaggcacgatcgttggctggcgggtctcatcgtcgatggaagcaaggttcgtgctggatgctctggaacaagctctgtgggcacgtcgcccctcaggtacaatccatcactcgaacaagggctcccaatacgtgtcactggcgtacacccagcggctgcaggaggcggagctgttggcgtcgacaggcagtacaggcgactcttacgataatgccctggccgagagtatcaatggcctttacaaagcggaagtgatccaccgtaaaagctggaaaaaccacacggaagtggagcttgcgacactggcgtgggtggactggttcaacaatcgaaggttactggaacggctaggacacataccgccggtagaagccgaaaaagcttattatgctaccagtacaaataatgatctggcagcctga

SEQ ID NO: 125429 - DNA, 354 bp, Enterobacter cloacae; identical to SEQ ID NO: 86582

SEQ ID NO: 125430 - DNA, 1068 bp, Enterobacter cloacae
atgaacctcagacaacagcaacagcaggcgtttgaccgcagcggagaagcccttattgtaggcgacgtcagccactgcccgctgccaccggagaccctcgccgcgctgggccccgattcaccgtatgtggtgcaggtatacggttctggcctgaccggtgaggtttaccggttgcgcatcggctgcgaggagtataatttaaaaaaacgacgcgctgtcgctggcgttgccaaccttaacggccagctgtcgtttttaaatgaagtgcagagccggcaggcattgctgcggctgaaggataaccctgtcaccgccccgagcttcgcccacatcgtcccaacgctgtatgctgattatcgtctcggcattcttctctctccgtggatcgatggcgagctgattcaccaactgaccccgtcgctgatcgcccagctatttactaccctggaagcttgcgaagaacaggggttgatggagtgggatctttgtaatggaaatctgttggtggaccgggaggagcatctgtggctattcgattttggctatatgtatcccttcgatccgctcagggaattcaacagcaacggtctggccgatcccctttttcactttgtcgagcgctttgagacccgcttcttttttaactggctgatgacccaggtccccggcgcggagcagcagctggcgcactatcgcgatttgaagcgactagcggttgaaagctaccggcgtaagctcgcctggctacgcgcccggtgggctgccccgcaggtgcaggctcatttacagcagataacggcacgctgggaatcagcgctggcggactctgccgcgctgagccagttatttttcctggaggccttccgctcccacgtactggatatcgaagatgatctgcatggccagtcttgtaccttgctcaccttgcaacgcattgactgggttataaaccagattgaacaccattatcgctttatcgccgataaaggcggcctgttttacgacaacgaagggaaatcaaagcaagtgctgctcagcaactatgcgcagaagcggcaacaggcgtag

SEQ ID NO: 125431 - DNA, 522 bp, Enterobacter cloacae
atgcgatggctgcgcaactccagattctgcaggtgtagtggcgaagaccttatcacccgtgaaaaaagcaatctcgagcgtatcgtcgccacgctcgagatgaaggaaatgactcagggaacgctgatccgtaaattgtgcacatatacaacggcgtatccgacaagacaggcggtatttgaatatgaccggctggtacgcaacacctatacgctaagatatttgcgcgatccgcagctggaacgcaacatccggcgttccttgaagtggattgaatcttatcaccagctacgtgccgccatcgctaaagtcggtggaaagaaagagttaacagtgaaaaatgacattgaagcagacatcagtaatcggtgcgggcggctgatttccaacgagatcgtttattacatctcagcgatcctgtcacgattgcaggatggtctggaagccgaaaacagtgacaagggtattgaggcactaacccggatattaccggtggcttgggagcacattttgttaaactga

SEQ ID NO: 125432 - DNA, 807 bp, Enterobacter cloacae
atgaacgaactggtaaaaaaacttatgggttttggctttacaaagacagatgccaatgtatacatcaacttgctaaaaaacggtcgttctagcggctataagatagcaaaagaaatatcattatcacgttctagcgtctactcatcaattgatagtctatataaaaatggcttcatttttatggccgatggcaatactaaagagtatcaagcaaaatctcccgagcttattttcagcaacatagaaaagcaaaccattgaaaacatcaatgtattaaaaaaagaactctcacgtatgatgctacaggaagagaaagagttcatatataacgtctctggttttgataattcactacaaaaagccagagaaatgctcgaactggctcaaatcgaagtttacctgaacactgacttccatcttgaactcattgctcaagaactcattaatgccgttgagcgcggggttcggattatcgtgttctcatttaaccgactcgcgctaccacatgaatctatcgaattgtactctcgatttgaaatagatgaaaagatttatccatcacatcgtttcatgctagtgattgatatgaaaaatgctctaatgctttcccatcgggaagaaacacatggcttatataccaataacaaattactagttaaaatcatggctgaacatattcatagtgatatttatctaactgaatacgaaaaaatggcaccggaaagaaaatgccggatattaaccgttcatgagcttgaaaatgatatggtcaatgatgaactatcgatatcatcaaaaaaaatgtaa

SEQ ID NO: 125433 - DNA, 906 bp, Enterobacter cloacae
atgaaactcggtatctcacttgcgattgactggatacgtggcgtgttaatagacgatggtgaagtttgttatcgtactcaggtattaacaccaatagactgccagcaaagtgtagataccgtattacatatgatttttagtatccagcggacctatggaaatattgactttgtcggtatcagcattatgcaaagcaacgtgtcccgctgggggccgttagatagaataaccaattttttcgaaatggctatagataagaagactggtattcattgccagtctttcggcccagcacttgttgttttacaaaacctagatacgtccttattatcagggctaaaaggtaatattatgagtattgtcgttgattttggctgtgaactttgtgtagtcgataaatacaacgatgatagcgtatttgaccatgcaataaatgtttcctgggctcatctcccattgaaaaattatcagccactcattgatggtatatctccggtttgcgaatgctgcgggataggatgcgttcatcaattcatttcgacatccgggatcgaaagacagtattttcagttctctcttcagcggaagagtgccttagaaataattcagggagttgatggcagtgatgcatgggcgcaaaaagtctaccgaatgtggatggatcaactagccagagccttacttgatccaataatggtttttaaacctagattgttagtgctcagtggattagcaacaatacactcagactttccgttaagtctaaaaagtgtattaagccgacactgtccaaataattatctaccagaaataattcgcttaaattatgaagaatatcgttttgcctatgatgcggcgatggctaataaggaaaaggcgcaatacacctctacccttgcgttgtaa

SEQ ID NO: 125434 - DNA, 1797 bp, Enterobacter cloacae
atgattacaattagttcattaagccactccgcaaagagtgccgatagctacgcttataataaagaaaccctacatattagatttcgcacagtcaaaggcgaggtcgcgaaagtctctctgtggatcggcgatccctatcaatgggaggaaggtggcctagatggtggaaaccttggcggcagcgacgcgcatggatggagcggcggcaacgaagttcacatggaaaaagagggacaaagcgagagctatgaccactggtttgccgcatttactccgtgcaaacgacgtagccgctatggttttatattatacggaaataacggggaaaaattattatttggtgaacgacgctgtgttgatataagtaaaccacctgtagcagagacagaactgagtaacttgtccaactttttttgcttcccttatatcaatccaggtgatgtactttctacgccagaatgggttaaaaaaacaatatggtatcagatctttcctgaacgattttgcaatggcgatccatcgatatcgccagaaaacgtacaaccgtggggaacgcctccagattcaaaaaactttatgggcggtgatttgcagggcattattaacaaacttgattatttgcaagatcttggcgttaacggtttatacctttgtcccatatttacggctaacgctagccataaatatgataccgtagattattttaacgttgatccccatttcggtggcaacgatcggtttaaagaattggtgcaaaaagctcaccaacgaggaatgaaggtcatgctggatgcagtgtttaatcatattggtaatcaatcaccattatggttagatgttgtaaaaaatggtgataaatcaccttacgcagactggttctggattaaaaaattcccggtatacccatctggtgataaaaatgagtgggatttccgtaatttcaattacgaaacctttggtaatgttattgaaatgcctaaacttaatactgaaaaccccgcttgtcgtgattatctgctgcaggtggcgagatattggattgaagaatttgatattgatggctggcgccttgatgttgccaatgaagtcgaccacgaattttggcgagctttccgtagaacggtaaaaagcataaaacctgattgttatattctcggtgaaatttggcatgaaggcatgccatggctgcgcggagaccagtttgactccttgatgaactatcctctaatgcaagcaactactgactatttcgctttacaagcatatgacaaaaaaacatttatagatattgttacccatgcctatctttgctatccacgtaacgttaatgaagttatgtttaatcttcttgaaagccatgatacttcacgtttattaagtctgtgtggtaatgataaacgtaaagcccggttagcctatctctttatgtttagtcaggtgggttctccttgtatttattacggtagcgaagttggtatgaatggcagcagagcaatgggatcggaagataatcgtaaatgtatgatatgggatgaacaaaagcaggatttagagtttaagtcatttattaaagatcttattctatggaggaaaaaacattccgaatggaatgatcctaaaatacactggaataatgtcgaccatccggcagttgtcgcttttagcagaggagaagtacatttcctccttaataatagtgatgaatctttagctattaattatcagggcagaacactatctctgacaccttttgggttttatattatcggtctggaccataaggacatcatatcatga

SEQ ID NO: 125435 - DNA, 834 bp, Enterobacter cloacae
atgagaaacattattagcaagataatgacgattttagtctatcttttcttattattaaatgcacttgttgtccttgggccagtaatatggacagttatgtcatcgctaaagcctgggaacaatctttttagttctggttttactgaaatatcatttacattagaacattaccataatctacttacgggaacgccttatttaaaatggtacaaaaacacctttatactcgcaacctgtaacatgcttatttctttggtagtagtaacaataacggcatttattttttcaagatatcgtttcaaagccaaaaaaaaaatactcatgagcattttagtgttacagatgttcccggcatttctttccatgaccgcaatttatatcttattgtcaaagatgaatctaattgatacatacattggtttgctattagtctacgttactggttccctaccttttatgacatggctggttaaaggttattttgatgcaatccctacgtcattggatgaagcagcaaaaattgatggtgcagggcatctaactatattttttgaaattatattaccgcttgctaaacctattctcgtatttgtggcattggtttcattcaccggcccatggatggactttattttaccaactctaattttacgcagtgaagataaaatgactctggcaattggtatctttagctggatatcctccaactcagctgaaaactttacgctatttgctgctggtgcattattagttgctgtaccaataacgttacttttcattgttacacagaaacatattactaccggactggttagcggtgcggtaaaagaataa

SEQ ID NO: 125436 - DNA, 1284 bp, Enterobacter cloacae
atgttattgtctgagggaaaaagcatgcgtatatttccggcatcttttcttattatgggcgctacgcagctcatttctggtcattggataaaaggctccgtttttttattattccagattgtagttattagcaacatcaatttattactcaacgcaacgcagggactcatcactttaggcaccgtggcccaaacacgtagtgggtttgatattgtagctggtgacaattcaatttttatgttggttgaaggtgttgttgcattcatttttttatttttttcaatttttgtttattggttaaatattaaggatgcgcaggtatgtgaaaagtgccatcagagctttacggaacagttacgaacgatttacgataatcgttttgctactatcatgttggctccggcatttattgcctgcattgcctttattattatgccgatgatcatcaccgttttggtatcactaacaaactactcggctcctcatcatatcccacctaaaaatcttgttgattgggtcggattgaagaatttcattaccctctttgagcttcggatctggtctaaaacgttcgttggtattggtgtgtggactgtgctatgggctttttttgcaactctatgcacttgtagctttggatttctgttagccctcgcgttagaaaacaaaaaaattatagcgaagaaagcctggcgagtcgtattcatcttaccctatgcgatcccggcgttcgttaccctgcttattttccgtctgcttctgaatggaattggtccagtaaatagtacattaaatagctggggtattgattcaattggttttctttccgatccattaatagctaaaatgactgtaattgcggtaagtgtatgggttggcgctccctactttatgctgctaatcaccggagcaatgaccaatattccccgtgacctatacgaagcaagtgaggtggatggtgctagtaaattccaacagttccgtgaaatcacgttaccgatggttctgcaccaggtcgccccttcattggttatgacctttgcacataatttcaataactttggtgcaatatacctgctaacagaaggtgggccgataaacccggaatatcgctttgccggacatactgatattttgattacgtggatctataaattaacccttgattttcagcaatatcaaattgcttctgtcatctcaatcattattttcctgttcttatcgatatttgcgatctggcaatttaggcgaatgaaatcattcaaagaagatgtggggatgtaa

SEQ ID NO: 125437 - DNA, 1230 bp, Enterobacter cloacae
atgaaaataaaattgctagacgctgttctgctcttcggtctgacggcccttgttcccgcagcttggggagagagtattgcacctgaaaaacaagcaaatcttctaatatggacggatatttctacgctagattatatgaaatatgctgctgaaaaatttaataaaacatataacagccaggtaagatttacgtttaggggattggcgccaatagatgccgcctcgcgaatgatacaggatggtggatccacgcgcgttgctgacgttgccgaaatcgagcacgatcttttaggccgactggttgttgccggtggcgtaatggaaaatctgatctcggcagaacgtataaataaaaaatttatgtctaatgcaataaatgcttcacgctatgaaggaaataattatggttttccagtaagttatgcaaccgtcgcattattttataacaaggatatccttcggttgccgccagataaatttgaagagttgatccagctaagtgctgaatttaataatgttaaggaaaataaatataccttgttatgggatgtacaaaactattatgagtcaagaatgtttctaaccctgtatggtgcttacgaatttggtcaggaagggacaaacgtcaaggacctaggaatcaactccgaattagcccaaaaagggcttgcagcgatgaaacgacttaaaactgcaaacccatctaatccggtagatatgcgtaatccacaggtgcgtcgaggcttattttctgaaggcaaagtagctgccatcatcgacggtccatgggcaatccagggatataacaacagtaaaattaattttggcgttgttcccatacctactcttgaaggaaaacagccacgttcgttttctacggttcgcctggcggtcgtctcttcttatagtaaatcgcctaaggcggcacaacttttcgctgactatctctcatctgatgaaatgttaatgaaacgctatgagatgacagaatctatacctccggtaccgaatctgatgaacaaaatcctaccaactgcaaatgaagcgacgagcgcaattattaaacaagggcttcactctgatgccatgccatctattccggaaatgggttatttatggtccccactggcaaatgcgattaccgatatgtggatcaatgaccaaacgccaaaagcagcacttgaccgtgctcgtaatatcattgatgagcaaatcaaatttcaggagtaa

SEQ ID NO: 125438 - DNA, 879 bp, Enterobacter cloacae
  misc_feature (832)..(841): n is a, c, g, or t
atgaaaaaaaaattactctctgcctctattgctcttgctctcacagcgcccgtacattcatttgcagccagcgatcagcgtgggtacaaacctgaagacgtcgcttttgatgaaagttttttttcgtttggtggccatgtagggacttctgttgaatatgaagataaggtaactcgtggtttcaataacacggataaaaaggagaagacgattaccaatgaggttttcaactttttttataacaatccacaatggaattttatgggtttttactcttttaaaatagaaaatagagagcaaaaggagcctggttattatgagaatgaagatggtattaagcagcttgtttcattgaataaaggtcatgatcttggtaacggttgggctactggtttaatttatgagctagaatatacaagaagtaaagtttattctccggatgttagtggtctacgtaaaaaccttgccgagcacagcattagaccatatttaacctactggaataatgattataatatgggattctattctaatcttgaataccttttgagtaaagaagatcgcaatgcatgggggaaaaggcaagagcagggatatagtgcattgtttaaaccctacaagcgttttggtaactgggaggtcggtgttgaattctattaccaaattaaaactaatgatgagaagcaaccagatggaaccattaatgagaaaagtgattttaatgaaagatatatagagcctattgttcaatatagctttgatgatgccggcacgctgtacacgcgggtacgtgtcgggaaaaatgaaactaaaaatactgatcgtagtggtnnnnnnnnnncattagaaaagctaccgttggttctgaacaatcaatag

SEQ ID NO: 125439 - DNA, 1008 bp, Enterobacter cloacae
atgttcagtgttatggaaatcgccactctgttatccgggagctataccggtgatggagcaattcgggttaactttatacggccaattcgcagtcctgatgtcggcggcctggctattgttttcgccaaacaagacttgcaattcttatctggctcacatgctgacgtgctgataggacctgatgaaatactggatagcccagcgaaggcacatattgttatctcacatttggatgttgagcgccttaatctttttcttcgttcttataaagtaaaaaggtttcatctcaatgatcaagggaatacgtcggcactctcagatgtttatattggaaaacattgccaaattggtgatggctgcatttttatgcctggtgtgaagatcatgaatggggttattattggggataatgttgctatccactgcaacactgttattaaagaaggaactatcatcggaaataatgtaactatcgactcaaacaattcgattggtaactacagttttgagtatatggcttcaagaaatggtaagtatcaacgagtagaaagtgtggggcgagtcattatttacgatgatgtagagatcgggagcaacaatacaatagatcgtggaacattaggtaacacgacgattggtcggggaactaaaatagataatcagattcagattggacatgactgtcatattggtgaaaactgcttaatagtatcacaggctgggtttgccggtcatacaactcttggtgaccatgttatcgtacagggacaggttgggacctccggccatatagcgattggtagccattctattatcaaggcaaaatcaggtgtaagtcactccttccctgagaatagcgacttatttggttacccggcaaaagatacccgtgcttattacaaaaacattgccgttcttaacattttaacaaaaaatcatcaatttaaaaaaaatcgatctatatcggacacatggaggaatcgtttttttaattttttaaactcctaa

SEQ ID NO: 125440 - DNA, 1131 bp, Enterobacter cloacae
atgttactgaatgcggtagggtttctgtcacgcagtagcatgagaatgctacttgctattttatttttcatcatggtgaatttcccattggcagcattggcagcccctgtttgcgataatgccaatattgggcacaaggagctagtattgcgtggaagtagtatttcgcctggtgtggacttgtcatctatcaccatagtatcaggtggtggttttggcccggatgatattgcaggtccacctcctaccaattatcaatgtcacacaaccagtggagacaatgaagattatcttttagagatttttcttgagccattgagttcatatggtagttcttattatttaaattttggggtgtcagggatttacagtagtgtcgttgcaataaatgctccagcatttgggatcggattcactccaggtccattttcccgacctggtatggggatgactacggttcgtacagtattttttaacaaaagcggtagtattgatactggcttatttggtggtatttattatatatcattagttaatggctctctgttacagccaggagttttatcggggagtgacctgcccaccttcggcatatacggcatgatttttaagaatgatggaacagtctatgacggaaagaaaatattgatggggtctttatcttttagcggttcagtaaatattattccgtttacatgccagacacctgatgttgtcgtgccaatgggaaaatacaagacgacagattttaccggcgtgggaagtaccagtcagtgggtggatttcaatattgaattagataactgcccggggaattatccaggatattatcaggctaaaaaccaaatgagtttattgattaatcccgtttatggcaatccgacccctgattcattcagtctcaaatcaggtactggcagcgcaacggggatagatatgcaggtcagaaagcaaaatgataccagcatgataacaatgggaacaggttttgaccccctgggccccgtcaccggaaatacaggcgttaagcaattacgcatccctctgcaggccagatatatacagtcaggcgggcaggtgactcctggtttggcggagtcagcgctaacgttcacaataaattattattag

SEQ ID NO: 125441 - DNA, 1512 bp, Enterobacter cloacae
atgatcaaatcagaaaacaatatgagcgttagtcttaagccgttaataattatttttggcttgatttttttatgttattacaatgtgttatctacaaattattattacattgatgacttagggcgctcccttgaaggttattctggatggtcacgcaatggcaggcccctagctgatctgtttttttatgtgataagctttggcgcaccgctgcctgatatatctccgctgcctcaaatattaggaattgcgttgttatcattaggggcatatctgacaggaaaaacatacttagggcattctgaaagggtgggcgggttaagttttttactatgcctaccactggcgattagccctttttattttgagaatatgtcatacaaatatgacgcattcccgatgtcactttccgttctttgtgcgatgcttccttttgttgttagaataaatgggtcaataaaatttttaacagctagtattgtttcaattctgttatcactatgtttatatcaagcctctttaaacatttatataatttatacaatgctatatgtattaaatagatttaaagaaggtaaagaccttgatggcttcaaagctatagggctatcgatagcggggttgttaataggttatattatctactctttgttaatttcacctaactttattgagggtgattacaatttacaacatagccaagtaagctcgtttgaattaaatttcttgatggatgctatttttggcaacttcaaggtattctattatgtgcttagtacttctatgagcacaacaatgttagccctagtattgattactgcctgcatggctttaattggtgcagttagactgtgtcgtgaaaagtcagagtctacaggcatcataaaattattacgcaattctattattttagtatcacctttccttgtcttgctgatgattgctggacctatgctgttgctgaaatcagcggtagtttccgctagggttttcgttgcattcggagcggtactagtattttataatatccttgcatgctggatgcttggcttacgctctaagataatgtggtccttatccatcttgtactttttttatatgcttggggccgcatttagctatggaaatgcgttggacaatcaagaaaaatacgataacgaagttattaccacaataattagcgatttgaacagcaacaatcttgcgaacgctaagcatatatcttttatcgggatgcttccgatttcaccagagggtcgtttagctattaaaaaatatccgttctttgctcaccttatccacccaaccattaacggaagatggtcgtgggggttgaggcatattaagcattttgacatgaatcacgattttaactcaggtgattttcattcagctttaaaggacaacttgtgtgtatatacctctataacaaatggggtggtttttaattcatattatgacagggaaagcgacagcgtgatctatgactttacaaaaaggtcatgcaaataa

SEQ ID NO: 125442 - DNA, 2274 bp, Enterobacter cloacae
atgtcggtacccaaccagacgccctatattatttacaacgccaacggtctgacgacccttttccccttcgagttctatatcatcaatgctggtgatattcaggtatcaatcaacggtactgtcgttaccagcggatattccgtatcaggtgtcggtaacgtcggcgggggtgacgtggttttcgttactccacctgcaagcggtgcagtggtcatgctggaacgtgttgttcctacctaccggttaacggattaccaggacaacggcggtctgttggccgacacaatgaataaggatttcgaccgcctctggatggcaatacagcgtgcctttatttatctcgggctagcgctgcgccgtccgctatttggtggtccgttcaatgcagaaggttataggatcgcgaatctcggtgacccgataaatgcgcaggatgcagcgaccaagaactatgtcgataatgtcagcctggtgcgtacgctgcgtgttcctgagtcttcagtctccattctgccccctgttgatcagcgcgcaaacaagctgctggcgtttaacgctgcagggcaaccaatcgtcgttctgccagcttctggttcggcgtccgatgtaatgatagaactggctaaacccgatggcgaaaagtacatcggcgaatgtccagacattgcaacgctacggacaatcgagccatctttcgacaagcagcgcatcaccgtgcgggagcacaccgcaggaacatgcaagggtgggggtgagtttcgtgcggtacttatcggttctgcatatgcagataataacggaacgataataaaaacttccggcggtgcagcatggttgcgcctaaatgcggaacctactaacccactgatgtttggtgcgattgggaatggtgtcgcagatgacagcgcaaaaattaccgcagcacttagggcttgcacctaccattgtgatggtctgggcttaacctatggtgtagggggcaccattcttcaggaccagactgttccaactcttttcacgaaggctaaactgcagtacatcacggctttaggtactcagcctatgatgcgcatgaaaaacgctgcacatattatgcgtcgtttaagttttgatgggggtggtggtacaactgggtcgggtctaatctgggagggtgcaaatacacgtgatggtggtgcggtagagcggtgcgagtttaaatatattggaggagcaggtattcgcatttctggtgattatacaaaccgagtttttgcccgatatgcagccatcaggaattgccgtttcattaagtgtggtaacacaggcgtcgcaaatgatcgcgcatccgttattgccgatggagtgaacaacttcacattcgacggtcttatcatgaccgagtgtaactggggtctgtatgttcgcatggacacccaactagcggataaagcgcgtgcacctaataacctaattcagaattgccacatattcggtagcgggcagaatcacccgacatttattgacgctcaggggttatccgctaacagacaggatagccttaaagtggacaactgctggatcggtgatttccgtgataacggatttgattgcggatcgtcaactggcactcagattactaacttccgagttaataactgcaaggacgctatcttcattggtgatattgactgcgatagctatgttattgacaacgtagtggccagagactgtgagcgcggtgtgcgaattgtcatggatggtaatattcagtctgatggtattgttcgtaatgtaagaatcacaaatatgcttgttacaaatccaaaatatcaaggcctatacattggtaatactggaacaaatacaggtgtgttcgacatctatcttgccaacgtttatgtggatagcgttagctcatggagtctcagttcgttcactcgacctttccatatcgaggggattgatgggatatttatggataactgcggcacgagatatgcaaaaacaaacagcgtttatttcaaaaaatgtgaccaggctcaactacgtggtggtagattccaggaaagcgatcaaagtggaggagggacttatgccatcacagtagaaaatgactgcgctcgcataagtatttcagatgctataatctatgggaaatctacaactggcgctgtcttacttgcaggaggagcaggccacagcgtgaagcatattaggtggagaagcgctgctaatggtgtttcttcctccagtgcgacaactccgtatctcttggataatatggcattctaa

SEQ ID NO: 125443 - DNA, 678 bp, Enterobacter cloacae
atgccggtatacgctacccctgaagaactgaataacggattcactccggcaggcaatgtcctggcggcaccttccgggtttgatgtccctttgcctgaaggtaccaatccggcacctcagcaggatgagccgtccgtatggggcgctgcatttcgtcagaataacctgctggggcagatgttccgccctgcgaagcagtttgagccggtagacgggtacaatccgtatgttgataaaaacgagctgcacggttatgaacaatggggatccgcttttgccgactcccgctcgccggaagaaactgcctggctgaaacagcagatcgacgacgaaaacgaggaccgtcgggtactttccgaggctggcggggagggggttctcgccagcattgccgccggggttgtcgacccggttacagtggcttcgatgtttatccccggcgctcaggggggcgctgtggcccgtattgcgtcacaggctgcaatcggtgcagctgcaacagcagcgagcgaggttgcgctgaataaccagcagattacccgtacgtggggggaaagcgcttcccacgtcgccgccggtgcgttgatagcggtgtatttgcggctgccggtgctgcgctttcgccctctgttcgcacagcggccacgcgtgaagtggctgacgcgctcgataatatga

SEQ ID NO: 125444 - DNA, 2709 bp, Enterobacter cloacae
gtgagaattccaacgggtaattttggaaacgttacgccgcaggctaatccaacccgggtcggggtcagtaatgttggtcagataggtaatgctgtagccgggttgggggctgctctgggtcagactgtagatgatttgcagcgtacgcaggataaagctgacgtggccgctacccaggcgatacttaccgatctcgatgcgaaatccagcaaccgctgggagaacccggagaccggcgcactggtaacccggcaggggtttaagtcctctggcgttggtgtggacatggacaagctggattcgtccgactatgaagaggctcgcaaacgtgtaccgcagagccagcagcagtattttgacgcgcaatggaaagcgggtcagatccgccgcgccagcacctacaacagctttgagcgtactcaaaccgaacaggcccagcgccagcagctcgacgcaacggtaaaatcgtccgttgaacaggaggcgggggcgtttgacgatccgcaggctgctgcgttaattcgcggagcacgacagcactccatttcgttgtatggtcaggcacaaggctggtcgcaggaacaaattgaccaggttgtttccgaggccaatttacgtgcgatggaccagcgagcccagaactatgccgttaccaaccctcagggctggctaaatggcgattttccggtgaaagataccggcgctatggatatgcgtgctatcggtatcgttgagtctggcggtaagcacttcagtgccgacggcagcgttataacctctccagccggtgcgcagggtaaataccagcttatgccggacacgggcaaagagctggcggcaaagcgcggtgttgaatataacccggcagacgaggagcaaaacgctctgttggcgagtgattacgcgaatcagttatacgggaaatacggctctgaaacgctggcaggtgccgcgtataactggggaatgggtaacgttgacaagctgatcgcgaaagccggagacccacgtaaaggcgaaatatctgaggctgattttgttcgacagctacctgcggaaactcgcgggtggctggctaggtaccgtaaaaataaaaccggtctcgatccggtgtcggtcaacaaaatcgataacatcgccgagtctaaaatccgtgagcaacgtacggccctgcgcgagcaaattgatcccattctgaataatacgatggcgcagctgtataacggcgaagtacctgacgctatgccagataaagcctcgatcatgtttgcgtacggtgatcagggggcaaaggcggtcaagcagctcgatatcgcgatcaacaacgctaaaaccttccaggcgatacagtacgtttcgccagaacagcagcagtcagaaattgcgaaattaaaaccccaggcaaacgaccctgattatgcgctcaagctcgacgcgtatggcaagctcggcgcgctggtgcagaaaagcaacgaagcaatacagacgcagcgtgatgcccgtcgttttaatgaagcgctgtctatgggcgagaaactcgaccccacgaacaaatccatgcaaaaagccgccgacgccacgccaacggcgcgaaacttccggattaacgataccaccacccatgacgggatcgtgcagcaggtggcccagaccgggattattccttctcaggtagccactcagttatcggcgatttcccgtgcgcgcagtcccgaggtggttcgtcagggtgctgagttattcaaccgtctgtatgacacagatcccgcatctgtcggcgatatgccaaaggatatgcagggcttttatctcaccgttaagcaactgaccgattccggcatggcatccgaaaccgctatcgagcaggcgcagaatctgacctacaaccagacagacgccctcaaagcgcagctggcatcaacccagagcactaaggagtacaaaaaagaccgcggcaaagcgatggattccgccgtgagcagtatgtcgggcttctttagctggggtaatccgtccgccgacgaccagacaccggaggccgcacgtttccgcaacgattatcagtcgctgtacgacatcaactaccgtaccacaggcggcaacgctgatgctgcgaagaaaatgaccaaccagcagatcgcccgcacctggagtatcagcgaggttaacggcgacgcaaaacttatgaaatacgcgccagaggcgctctataactacggtccgtcaggctggcaggcggcacagtggaaagaagaaaaagagagcctgatgtatggcgaacgtaagggcgacataaccaccagcccggcccaactggggatcacctccggtaacgcagcacctgttaccagcaaaacaccggagtcgcgtattggtggagacctggagataactcctgatgtgctgacggcccgcaatggcgattacgccatcatggtgcggacaaaagataaggatggtatcgaagcggtgcagccgttctacgattcgtacggcagacctatgcgctggaaaccgtcactggaagagtgggcgccatataaaaaaatgcaggaagagcgtgaagaacacgatcgtaatgagctgcagcgcggtcaggacattcgcgggttcaaagataaacaccgtgcgctcgacgaacaatataagcgcctgcacaacgagcgtatggacagggttaaaaattacttttcgtggagcactgaataa

SEQ ID NO: 125445 - DNA, 468 bp, Enterobacter cloacae
atgtgtaccgggttagaggtggctgcaattggtgcgtccgttcttgcggcgggtggtgctgtctatagcgggcagcagcaaaagaaaatgtccaactatcaggcgtcgcaggcggaagcagatgcagaagccgcgcaggcagctgcacgcgtagaagctgatcgcatccgtaaggcaggcagggcgcaggcagcacaggcgaatgcgtcgctggctgcgtcaggcgttgacactggagagggtaccgcgttgcgtattcagtccggcatcgtgggtgacgcagagcaggatgcgtaccagacgattttgaatggtactaaccagggcgcacggctcaacgcgcaggcatctgccgaccgtatcagcggccgtaatgcttcaacatctggctacatcagcgcgggcagctcactgctgagcgcgggtggcacagcgtacaacggctggaaaaaagcagggagtaaataa

SEQ ID NO: 125446 - DNA, 450 bp, Enterobacter cloacae
atggtacgtaacgcaaaagccggggatatcccggcgctgatcgaactgggcgcgcggatgtatatcgagtcccgctattcgcagaattcgccttttgatgaagaaaaatgcgcagagctcgcccgcactctaatttcatcacctgccggctgcctgctggtggcagaaaaagacggtacggtaatcggctggctggccggggggattgctgaacagtggttcagccgccagctaatggcctttgaatatgggctgtttatcgcgcctgagcatcgcggcggcacggctggcccgcgtctcgctaaagcgtttatcacctgggcggaagagcacggcgccgcgatcataaatatgggtatcaccacgggcgtacacgaagagcgcaccggtgatttgtattcacgtctcggcctgtcccgtaccggtctgctttattccaaagaggtgtaa

SEQ ID NO: 125447 - DNA, 1989 bp, Enterobacter cloacae
atgcgcgcgaacctcataaaaaccaatttcaccgcaggcgaggtgtccccgcgcctgatggggcgtgttgatatcgcccgctacgccaacggcgcaaagattatcgaaaacgccgtagtggtcgtgcagggcggcgttattcgcaggcctggtacacgctttgcggcggctactaaatacggcaataaaaaatcccggctgattccctacgtgttcaaccgatctcaggcttacatgctggagttcggtgacggctacatgcgcatttttcagaacggcaagcagctggtaaacgaagacaacacgccgtatgaaatcgccagcccctataccgctgacatgctgcccgctgtgaattatgtccagggcgctgacaccatgtttctggtgcatcagtctgtgaaacctcaccgtcttcagcgccgcggtcaaactgactgggtgcttgagcctgcaccgttcattgttgagccgttcgacgaggtgcgcgatacaccgcagaaatggtgtaagccatccgtcaaagagttcgtgggctctgaaattacgctgaccctgagcgatgcggatccgggtgacaatccaaacccaccattcactggcgcgggctgggttgctcaggatgtgggctcatatgtccgcctcaatgatgggctggtactgataaagagtattaccagtgcacagattgccgtcggtaccatccgcagcgatttgacggcaacgcaggcagcatcaccgggttcgtggacgcgggaggataaagtctggacagatgcgtttggctatcccggtgcagttacactttatcagcagcgacttgtcctggctggttcgccgaagtacccgcaaacaatctggtggagtgaaacgggcgtttatttgtccttcgagatcggcactgaagatgatgacgctataagcttcacgctatcttctgaccaactcaacccgattgtgcatctggcgcagatgaacactctgatcgcgctgacctacggcggcgagtttacgatcacctccggtaacgatgcagccattacgccgaccaacatttcggtaaaaaacccaagcccatacggctgcaacgggatccgccctgtgcgtgttggaaccgaaatcatgttcgtccagcgcgctggccgtaagctttacgcagtagcgtacgaccccgacagttttgtttcctattcagccaacgacctgacggtgctggcagagcacatcacctctggcggcgtactggatatggcataccagcaacagccggatgcgtttatctggatggtcagggcggatggcgttgcggtcacgatggctatcgatcgcgctcaggatgttattgcctggtcacgtcaggtcactgacggtgcgtttgagtcggtggctaccatcccgtcagatactgacgatgtggtctacgcgattgttcgccgtgagataaatggccagagcgttcgttatgtcgaggtattcgacagcaatctttataccgatgctgcggtgaccggcaccagtagcgccggttctgccacgtggtccggtcttgctcaccttgaggggcagacggttgatgtggtggccgatggcgctgttatgccgcagcacacagtttcctctggtcaaatcacactgtcccgcccggcgaaaagcgtggagatcggcctgcacttcgaaagtacgatcgaaacgctttcgccagaggttcagaccactgagggtacaacgcagaacgcgaagaagcgcaccagcgaagtgacaatgcgttttctcgaaaccactggcgcagagtgtaacggccaggttattccgttccgcaggttcggtccaaaaatcctcaaccagcccgcaccacttttcaccggcgatcactactggggaaaactcggctgggagcgcggggaagacaccctgcttatccagcagcgccagccgctgccattccaccttctcgcaattattttcacattcaccagcaacgggggctga

SEQ ID NO: 125448 - DNA, 564 bp, Enterobacter cloacae
atgacttcgagtgtttctatctgctcaaatgcacttctggcgctgggcgctcacccgataaatgatttcgacgaagacacggatcatgcccgtctttgcgccaacctttaccccactgtccgtaataaattactccgcgcgcacccctggaactgcgcgataaaacgcgttgtgctctcgcctgtcagcgccgcgcctgtctttggatacggttatcagttttccctgcccggtgatctgatccgcgtcctgtccgttggcgaaccacgtgacgatattgattaccggattgagggtagccggctgctggcaaatgtcgatgtgattcgcctgcgttatatcttccgtaacgaggacgagtccacatgggacgccgcgctggtggatgtggctgaaatgatgatgcagtccaagctggcatacgcggtaaccgggtcagctagcctgcgtgatagcctgactcaggaagccgcgtttctgcttaaacaggctaaagctgttgacggccaggaagacccgccggaagagcttggcggctaccctacttatgagtcgaggttctga

SEQ ID NO: 125449 - DNA, 912 bp, Enterobacter cloacae
atgtcatttgataccaataagaacatgatcaccgctgcgtttatcacgcagtttcatgattctttcgaaatcgccgcgcagcagaaggattcccgcctgcaggctgcggtaaacgaccgtgggatgatcaccggcgaagcgttcaccatcaacgacatgggcaccatcgaaatgacgcagatcaccacgcgtttcggtgacaccgtatgggacctgcctgaggctggtacccgtaatgcgttgatggctgactacggtgtgttcgttcctgttgaaaaacgtgacctgcgtaaactgcttgccgacccgcaggggccttatctgcagctcaccctggcggccgccaatcgcaaaaaagacgatgttgtatatcgtgcgctgctcgataccgtgctgcgtaaaacgtccagcggcggggcatatgcgccagtggcgctgcctgcgtcgcaaaaaatcgttgctggtggtacagggatgaccaaagccaagctgatcgctgcaaaagcgatgttccgccgtaacgagtgtgacgagcagaacggtgaagagctgtatatcacctacaacgccgacatgctgacgcagatcctcagcgataccacgctgacttctgccgactttatggcggtgaaaatgctgcaggaaggtgctgtgtccggcaattggctcggctttaagtggctggcatacgaaaaactggattctgtgaccgatggcgatccggccgtaaccaccaaaaccgccgttgcatggtgtaaatctgctgtgcatttcggtaccggcgcagagtacagcgtcgatatcggcccacgtcgcgataaaaacaacacgattcagatctctgttgatgcgtcttatggcgctggccgcgccaacgagaaaaaagtcgtcgccatcgattttgttgcttaa

SEQ ID NO: 125450 - DNA, 837 bp, Enterobacter cloacae
atgtggaagcttaaacacttattcatgaacgctgagcagggcgcagaacagccgggcggcggtaacagaggtggtgaagatggtggcaataatcagggtactggcgaaccttctggcaattctctgctcagcaccggtgcgggcgaaccgggtgctaatgactggattcctgagaaattccgcgttatgggcgaggacggaaaactcagtattgaaagctctgcccgcaaactggcggaaaattacactcaccttgaaaaacgcatgggcagcggcgacgcaccgccgaaaacgtcagatgagtatgcgcctaaggtagaggtcgagggattcaactgggaagaattcaaagccgatccgcgcatgcagagcttcatgaaaacagcgcacgccaaaggcatcaccaacgatcagatgagtttcatcctgggtgaatacgcacagcgtgctcctgagctggtgggcggtgccgctgagctggattcacagtctgccaccacgcagctgcgcgaggtgtggaagactgacgcagagtttaagcagaacatcggtctggctttccgcgcgtttaattcgttggctgatgatgccgacaaaggccgcatcgacgagatcggcaataacccaatggttatccgcatgctggcaaaagtcggcgcggaaatgcaggaagatgcgccggcgggtggtgatgtgaacctcgaagagcagcagaccattcgcgatctgatgaaatccccagcgtacatggacccgaaacacgccgaccacgaacgcgtatccgcgacggtcaaagcgtattaccagaagcgttacggcgatcaaaccgtagcgtga

SEQ ID NO: 125451 - DNA, 234 bp, Enterobacter cloacae
atgagaataaaacaggctacgcctcaggactttaagcgcattttcgaagagatgcctggcggttctcaggtgctggaagaattaacgcgccgcttcgggcgtgcggcgtatgtccccggcggtaccgagggcgaccgcgaaacgtgttacagggcagggcagcgatccgtactggattacatcctgcgcgaaatcaacaaggccgatggagtagaagacgatgtggaagcttaa

SEQ ID NO: 125452 - DNA, 1626 bp, Enterobacter cloacae
atggatgaactcgccgttaagctgattaagcgttccgacacgctgaaagccaaccgccagcagcatgaaagcgtctggcgcgagtgctatgactacacctatccgctgcgcggcgcgggattctctgacgaagtgctcgatgctcagagcgcaaaacataaggtggcgaagctactggacggtaccgccaccgacagcgcccgtatgctggcctctgcgctcatgtccggcatgaccccggcgaacgcgcaatggctgaacctcgacagcgaatcgctgccggacgatgccaaagcctggctgtctgagtgcgccacgctggtatgggaaaacatccacgcggccaacttcgacgctgagggctacgaggctaatctcgacgtggtgtgcgccggctggttcgtcctgtacatcgacgaagaccgcgaagagggcggctataccttccagcagtggccgctggcgcagtgctatgtcacctccacccgcaaagacggcatcgtggacacgatataccgccgctaccagctgaccgctgagcaggcaatcaaagaattcggcgcggacaaggtcagcgagaagatccgcgacgcggcgaagaaaaagcccgacgataaatttgatttcctgcactgcattttcccgcgcgaaacctacatggtcgatgcccgcctggcgaagaacatgcgctttgcatcgtttaacgtcgacgtgagcaacaagcaggtggtgcgcgaatccggctaccacgaattcccgtgctgcgttccgcgctggatgaaaatccccggcggctcctacggcatcggcccggtatacgacgcgctgccggactgcaaagagctgaacgaaaccaaacgcatggagaaagccgcgcaggacctggctatctccggcatgtggattgccgaagacgacggcgtactcaacccgcgtacggtcaaggtcggcccgcgtcgcatcatcgtggcgaacagcaccgacagcatgaaacctctgctgactggtgcagattttcaggtagcgttcaccgcagaagatcgcctgcaggcatcaatccgcaaaatcatgatggccgaccagctgcagccgcaggacggtcccgctatgaccgccaccgaagtgcacgtgcgtgtcgcgctgattcgccagctgcttggcccggtgtatggcaggttccaggctgaatatctccagttgctggttgtgcgctgcttcggcatcgcttaccgcgctggcattttctccccgccgcctgagagcctgcagaacgccaatttcaacgtgcgctacatctcaccgctggcacgcgcccagaagctggaagacgtgacggcaatcgaacgcctcggcgttaacgtgcaaaacctcgcgggcatcagccaggacgttgttgatctcatcgataccgacgaggccacgcgcgttgtggccgatgcgcttggcgtcccggctaaggttattcgctcgtccgatgcggtggcggatctccgtgaccagcgccagaaagcacagcagcaggcagcacagcagcaactcatgatgcaggcgggcaacgaggcggccagtgccgcagggcagaccgctggcgcggcaatagggcaacgactggcaggcaaccaatga

SEQ ID NO: 125453 - DNA, 231 bp, Enterobacter cloacae
atgtgtggaggtggagcacctaaggtcgtacagaccgacccgcaggccgaagcggatgcggctgccgacgcagcggcaaaagcggcaaacgcagatgctgcagcgcgcaagaagcgcaagaaaggctcgtcccttctcgccagtggtgctgagggtgcggctgattctggcagctctctgctgtcctctggcgcgcaggcagcgcaacagaaaaacactctgggggcgtaa

SEQ ID NO: 125454 - DNA, 438 bp, Enterobacter cloacae
atgggtcgaccaaagaaacctgtcgaagtaccagggcaggaacctgaaacgggcacagagctggttactggcacagagcttgttactggcacagccagcgaaccggcaatgcaggaccagcaacgcgctgagcctgaggtaatccagcaacgcgttgccagcctgctggacgatgctgctcttaccgaacgtaatacgctgctgggtaccatcaacgagcagggcgcggccatcatcgcccgctttgaaacgctgggttacaccgacctggctgaccagcagctgaccgacaatatcgaattcctccagctcgtcaaaaaggccaccacggcggagcccgccgcgccgctgggctacgtgacgaacgacgagggcaaacgccagccggttacgggtaagcccgttctgactgagcacggctggcacgttccgggctaa

SEQ ID NO: 125455 - DNA, 2169 bp, Enterobacter cloacae
atgccagagaaaaagatctggggggcaacgcctgacgaatggttccacttcgatctggtgctggggcgtactgaccagctgctgccggtcgtgtgcaacccgggcgcgaccatatccccgaatagcaaactcaaaatgcttggcaaaacgccaagcctgtataaccgcgatcgattggctaccgggatcaaggactggaccgagcacgtagtaaccgagcgtgactttgcccgctggtcgaacgaaccggattacggcatctgcgtgcgtaccggtcatggctggctggcgctggattgcgatagcgaagacgaagatattcagaccgatattcgcaaaacgctggtgcagctgcttggtgagctgccgccgcgtcgctggcgcgccaacagcaacaaatgcctgtacctgctggctgtagagggtgatttccgtaagcgcatccaccgtctggcgggcgatatgggcatcattgaactgctggcgaacgggcaacagttcgttgcctgcggtacacacagcagcggcgcgcgtattgaatgggacggtgggctgccggacgagcccccggtcataactgctgaccagctcgaaacgctgtggcagcgccttgctgagcagctgcctgtgtcggtcaccaccgaagcgggcagcacgaagatgcgcgaccgctcaaccttcacgcccggcgccacggatgatacagccgaatacctcgacgccaacggctggacgctgctggatggcgcgaacggcgagcgatacatccgctgcccgtttgaggatggccacagctccggtggcgacccgaccagtacggtttacttcccgggcgggaccgcgggctttgaacaggggcatttcaaatgcctgcacgccagttgcgcgcaccgcgacgacggcgatttccttaatgccatagggatccgcaacgacgatttcgaagacctgaccagcaccgaagtggccgagccattaccgctgccggcgttcgaacgcgataagtggggccgcatcgaggccaccatcagcaacgcggccaaagcagttgtgcgtcctgacttcgtggacatcgatattcgcttcgaccagttccgcgacgaaatcatgttcgccccggcaggctccggccagtggcaggcgttcaccgatgcggactatgcgcgcctgcgcatcacgatggaaaagcgcggctttaaacctgtggggcgcgaactcatccgcgacgtggtgctgctggccgctgacgaacagccgttcgactcggcgaccacctggctgaacgggctggagtgggacggtgtgccgcgcatcgaaactttctaccatacgcacttcggtaccgccgacacgccatacacccgcgcggtgtccatgtacatgtggacggcgctggcaggcagggtgctggagcccggcgttaaagccgatatggtgccgatcctcgtcggtccgcagggatgcgggaagtcctccgacgtggaagcgctgagccccgacccggcgttcttcaccgagatatcattcgctgagaaagacgacgacctcgcacgcaagatgcgcggacgactggtggcggagattggcgagctgcgcggcctcaataccaaagagctggagtccatcaaggcattcgtgacgcgcacgcatgagaactggatccctaaataccgcgagttcgctacccagttcccgcgtcgcctggtgttcgtcggtaccaccaacgaggatgaattccttgctgacaagaccggtaaccgccgctggcttcccgtggaggtgtcgaaagtcgacgtgaaagcgataaaaactgacctccttttgctgtgggctgaggcccgcgagacgtttaagcgcctcggcggcatccagttccgcgatgctgagcggctcggtgcgagtgtccacgagcagtacaccattaaggacgcgtggctcgaaacggtcgagaaatggctcgacacgcctgacctgatgactaacgacattccgcgaaattgcgaatttttacgcgctagcgacgttctgcgtgatgcaattggcttaaatccaagccatatcggaaaacgtgaagaaatgcgaattagcaatgttttgcaaaattgcggttattcgcgagttttgaggcgtgttaacggcaaagtgcagcgagtttgggtatcggcgtaa

SEQ ID NO: 125456 - DNA, 213 bp, Enterobacter cloacae
atgactctggctacccgattaaaagagcgacgtaaagagctcaaaatgacgcaggtcacgctggctgagctaacaggggttagtcagcaggccattaataggattgaaagcggtgtaatctcccgccctcgctatcttcttgaattatccgttgcgcttgattgcgaccccaactggctgctgcacggctcacaaaacgagaaaaaggcgtaa

SEQ ID NO: 125457 - DNA, 624 bp, Enterobacter cloacae
atgtctctcgcagcacgcttcaaagcccgccgtatcgaactcggaatgacacaaacagaagtcgcaaactctgcgggagttagccagcaatcaattgagtctatagaaagcggacgcacccgaaagccacgtaaccttctcgatctggctaaggctttgaagtgcagtccggactggcttttgaatggcaaaaacattatgcccctggcagagataagcacccgccgcatcccggtacttagctatgtacaagctggcgaactcacagaagtaagggacgtaacagaccttactggtgacttcgaatacgttctggcggattcggacgtcccggaaacatgctttgcattgcgcatagatggtgacagcatgcagcctgaatttaaggaaggggatatcgttatcatcgacccagatctatgccctaccccaggagaattcgtggttgctaagaacggcggccatgaggccacattcaaaaaataccgcccgttgggaataggtgttgatgacttcgaattggttccacttaacccagactatcctgttttgcgcagtgctgacatgaagttacagatcattggtgtcatgattgagcaccgcatttaccgccgtaaacgctaa

SEQ ID NO: 125458 - DNA, 150 bp, Enterobacter cloacae
atgaaacctgaacacctccaccggctgacggggcgcgacgtgctccgctggcgccgtaaacatttcgacattatcaccggtctggccctcgctactgcgttcggcctggctattaccttcattctccttgtagcgaggaccgcagtatga

SEQ ID NO: 125459 - DNA, 921 bp, Enterobacter cloacae
atgagcttagaaaccagtctcgaacttaacaaccaactgctgacgcagcataacgccctacttgaacgccttatcactgccctggcctcaggtgtcgctcttcgtccggacactgttgcgcaggtgcaggaatatcgcgaaacggtaccggaaaccaaagcggaaaataccgctatccgtaaggttacgttggacgatctggagttcagcgacattatcgccctggctgcattctacccggacccgcaggagctcagcgaaacgatggtccagcgcgtttttgattaccgcgacgccgaaggcgataaacgcgttgtgcagatcgacgcactggacagcgccctgcagggtgttaaacgcgcaggtcatcttaacaagccagcattacttgacctgtcgcgtaacatcctgcgcttctgggatgatttaccaaccatcgcggcacgccgtgactttgccgagcgcttactggacgcaccagccgacagccgtcatgaagtgaagccgaaaaccagcggtaaggatgaagaacgcaccgggcccttctactgcaagaatgtcgatggctccgccgccagcgagcttcacaccttacgcaagctgaatgaactgcttaaaaagggccatatcgaaatcaccaaagttgagtacctccagctgcaggaagatttcgcacgtaaaaacgcggcaaaaggcggtaccgaaacgggtgatgatgccggggataatgctggcgaacaggccgattttgcagcgctgcgtaaacaggccgaaggaatgatcctccagctggcgaaaggtggttaccgtgccgaagcggtagcgattctggaaaaacagggtgccaaaaagctcggcgaagttgctgacgagaacctcgcagacgtgatcgctcaggctgaaaaagcgctggagggttaa

SEQ ID NO: 125460 - DNA, 1305 bp, Enterobacter cloacae
atgccagacgttcatgcacgactttccccgtcttcagcgcatcggtggatgcgctgccccggtagtctggcactggaagctactcagccagacaaagaaacgtcttttgcgcttgaaggtaccgcagcgcatgcacttgccgaaaaggtgctgcgcaaccgccagaatcacccggagcactatgcaggttgcaacgtcgcgatgttcctcggctcctatcctcttgctgaacacccggatgatacttccggcccgcaggtagatgaggaaatggtcgaagccgttggccgttacgtcgacaccgtctgggcgctgtcgcagggcaatgaactgctggtcgagcagcgtgtcgacttctcccatatcgtgggcgtagaagagtcctttggtaccgccgacggcgtaatcatcgcgggcaacgagctgcagatccacgacctgaaatacggtaagggtgtgcgcgtcgatgccgagcagaacgagcagctgcagctgtatgccctgggcgcgctcgaacagttcagcatgctgtacgacttcgagacggtgcgcctgttcatccaccagccgcggcttaaccacgtttcagagtgggccctgacggtggaagagctccaggcgttcggcgaacgggcgcaggaagcggcagccagtgtgatcgtgatgttcaacatcgccgattgcgaaggggtcgaaaccctgccgctggaaaacttcacaccgggcgaaaaacaatgccggttctgcaaggcaaaaggtggtctgtgtaccgctgaggcgcaggccagacttaacgatgtgaaagacgattttgtcgacctgacccagccagtgggcgagcaactcgcagaggccgttaaacgcgtgccttttctgactgccgaacagctggctgatatttacagccaggttggcctgattgagtctttttgcaaagcggtctgcgaccgggtgaacagtgagctgaacgccgggcatccggtaccgggctttaagctggttactggcaaacagggtaaccgcgcctggagcgatgaagaagccgcccgtgcgctgctgaaagaccagttccgctataaaactgaggaggtcttcgaccttaagctgattagcccgaccaaagccgagaagctcatcaaaaaggccagccctcgccgctggacgaaagtcgaagcgctgatcacccgcgctgacggtaagcctaccgtcgcccccgaatccgacccgcgcccggcgctcaatatcaaccctgttaacgatttcgacgacgtgtccgacgacgcgctcgccgctgacctcatctga

SEQ ID NO: 125461 - DNA, 549 bp, Enterobacter cloacae
atgaaaattaaactcaacaacgtccgcctggccttccctgctctgttcgaagcaaaaaccgtgaacggcgaaggcgacccgcgcttctctgctgttttcctgatggatccgaaacatccgcagttggacgaagtccgcaaagcgctgaaacaggtagcgaaggaaaagtggggcgagaagtgggaaaccatttacggccagctggagaaaaaactcaacctctgcctgcacgacggtgacgaaaaagccgaatacgaaggcttcccgggcaacttcttcctgaacgctgccaacaaagcacgtccggcagtcattgatcgcgaccgttctccactcatccaggctgatggccgtccttacgccggttgctatgtcaacgcggtgatcgacatctgggcgcaggacaacaacttcggcaaacgtgttaacgcatcgctgggtggcgtccagttcctgcgagacggtgacgcgttcgctggcggcggtgtggccgcgccggacgacttcgacgatatcagcgaaggtgctgacgcgggcgagctgatttag

SEQ ID NO: 125462 - DNA, 531 bp, Enterobacter cloacae
atggaactaacagtttctctgtcaactatcattactgcttgcttcggttttttaggtgtatatgtattaatgccatttgcattaatagtccgagattttttattgataaaatttattaataaatgccttcttgatcattccttttggcaaaacgtaaggattatggagagtgataaagctcactataactacctttactcaaaaaacacttccgttgagtttcctattggccgcggggcatccatttgcaaaattggtgataaagaagttagtaacgaagaatttgctgtttacgaaaagaatagagatttccactctaaaagaatgcatgccatttggcgaaaaatagaattgaaaaataatatcgccgttaagatgtttaaatattttaagttggatgaatataatggttttcttgaaaagcgttcggatgaattttatgagcaggctctgagttttataaagcaaaaagaagtggaggcacagcccatagagcaggaacagccccccgatgttgagtccactcgctaa

SEQ ID NO: 125463 - DNA, 2064 bp, Enterobacter cloacae
atgcataatatactatggggcgacctggaaacctattgcgaaatacctatcacgaatggtacacacgcttatgcggaaagtgtcgaggtgatgctgtttgcctgggccatcggcgacgagccggttagcgtctgggatctgactgctggcgaacctatccccggcaggctgcggaaggccatcactgaccctgacactattctgtttttccacaattcacatttcgaccgcacggtactgcgccatgcaatgccagagctggcccctgatgtaacacgctggcgcgacacaatggtgcaggcgctagcgcacggcctccccggcgcgctgggcgcactctgcgaggtgctcggcgtcccgcaggacaaggcgaaggacaaagaaggtaaagcgcttatccagctgttctgtaagccacgcccgaagaacagcaaactacgccgggccaccagcaaaacccacccggaagaatggcggcgctttgtagcttacgccgggctggatatcgaggctatgcgcgaagtgcataagcgcctgccgaagtggaattataagggtgcagagctggcgctatggcatcgtgaccagcagatcaacgaccgaggcgtttgcatggatgtggagctcgcgcaggcggcgatcgaggcggtagacctcgaacaaaaaagcctggcgaaacgcacgcaggcgatgaccgacggcgaagtgcaggcggccacgcagcgcgatgcattgattaagcacattgttgaatcctacggcgtggagctgccggacatgcagcgcagcacactggagcgccgtatggcggatcctgatttgccgtcggcggtgaaagagctgctggctattcgcctgcaggccagcaccaccagcaccagcaagtacaaatcgctgatgaagggcgtgagcagtgacggtcgtctgcgcggcacgctgcagttctgtggcgcatcgcgtaccgggcgctgggccgggcgtttattccagcctcagaacctgccccgcccttcactcgagcaggaccagatagacgagggtatcgaggcgctgaaagccggatgcgccgatctgcttttcgataacatcatggagctgaccagctcggcgctgcgcggctgcatcatggctccggaaggcaaaaagctggtggttagcgacctgtcgaatatcgaggggcgaaaactggcctggcttgcctgcgagcagtggaagctggacgcattccgggagtacgacgaggggaccggaccggatctgtataaactggcctacgcccgcgccttcaatatctcgccggacgatgttgataaataccagcgccaaatcggcaaggtgatggagctgggcctcggcttcggcgggggtgttgcggcatttcttaccttcgccttggtctacggtctcgacctcgacgagctggcgaacgccgcgctgccgaatatcccccgtgatgtcatccgcgaggcgaaaagctggtacgacgaatcggttaaacgtaaatcgacctttggcctgtccgagcgtgtattcatcgcctgtgactcgctcaaacgtctctggcgccgggcgcatcccgcgacctgcgatttctggtacgagcttgagcgcaccgtccgcaccgccatcgctacaccgaaaaagacgctgtactgcggctatctgaaagtccgccgcgatggcgcatggctgcgcatccagctgccgtccgggcgcgcactctgctacccctccccgtccatcgagaagggaaacatcacctatcagggcgttaactcctactcgcgcaaatggcagcggctcaaaacctacggcggaaagctggtggaaaacgtcactcaggcggccgcccgcgacgttttggccggaaacatgccgctgatcgaggatgccggttacagcattgtgctgacggttcacgatgaggtgatcaccgaagcgccggacacagacgattttaacgatacggcgctttccgcgctgctctccactaaccctgaatgggcgcccgatatcccgctgaacgcgggcggcttcgaggcgtaccattatcgtaaggattag

SEQ ID NO: 125464 - DNA, 762 bp, Enterobacter cloacae
atgatgcaggatctcaatgaaatggctctcaaatacccgcaccctgtcgaaacttttcgtcaatttttagtcgaatccggatttgatgttaccggagaagaaaacaaagccggtcatgattgttatcgtttaagtaatggtgccatcataacgctttaccacaccggaacgattttgattcaaggctcacaagcggcaaaaccagaggttgaagccattattaatgaacacttgggtaacgcgccagttcaacgagttcagccagccatagttcaagagccagccaaaaagattttcatcgttcacggtcacgaccatgcagcaaaagagcagcttgagctcattcttcataagcttgggttacctgatcattttattttgcagaatactggtggtactggacttacgataattgaagatcttgagcgtgaaattggtcaagggcagacagcgactcgtttcggcattgttcttctcactcccgatgatgtgggatactccaaaagagatggtcaagaagcagccctgcccagggctcgtcaaaacgtagttctagaaatggggatgttgttatcatcactcggccgcagtaacgtggtcatcttgcagaagcaacaccttgaacagccttctgatgctgcaggtattctttatctcaactttaatgatcatgttcgggaaactgtacctcgcttaatccagcgtcttaaacaggccggtttcacatttaatgaagctcaaatagcgaacgcttcatcttaa

SEQ ID NO: 125465 - DNA, 222 bp, Enterobacter cloacae
atgtcatttaaatatcgggacagtccactttattaccggactgcgcgggaggctttgcgccttgagcagtccggtgagtacgaccgtgcggcgaaggtctgggccaaagcaaaccgtgaatcacgtaacgaacttaatcaggactggagcgagcgccgggctgatttttgcctgatgcagaacatgcgcgaaaagcgtaaggcggtggatgatggcatatga

SEQ ID NO: 125466 - DNA, 306 bp, Enterobacter cloacae
atgatggcatatgagcgtgaaagccttatcgaaaagcacctcatcgccgaagtgaaaaaggctggcggggtcgcctttaagttcgtgtcacccggtcgccgctcggtaccggatcgcattgtcctgctacccggcggccgtctcgttttcgttgaatgtaaagcacccggcaaaccaccacgcgccgaccagctgcgcgagcacgaacggctgcgtgcgctgggatttaccgtggtggtgctggatagcaaaaatctggaggggatattgtgcgaaaagtccaacgacgcagtaaattccgcctga

SEQ ID NO: 125467 - DNA, 1848 bp, Enterobacter cloacae
atggcaatcattattcccacggttagcagctgtagcgagaaaattacggcaggagaaaaaagactggcaaggcttctggagggtgggctcagcgaacaatgtacctgctggtatgatacccgaatgggagacaaagacgatcatcctgattttgtgattctggcccccaataaagggctgctgtttatagaagtgaaagactggtatatcacaaaaataaaatcggctaataaaacccatattaattatgaaaccaaaaacggcatagagccgttgaagaacccactcgaacaagttcgacaatatacctttcatatcatcaatagcctgaaaaaagatcccctgcttcgccagaaacagggagagcatgagggcggttttattatgccgtatggatacggtgtttatttgagcaacatcactcgggcacagctggaaaagagttttacacctgaggagttgaatgaaatattgcccgccagccaggtgatatgcaaagacgaactcaacgagtttatgactcgagaacaaatctctggccggctcgaatcccttctcaaacatcactttgttcataacacaacaccacagcagctcgaccgcatccggtggcatctttatcccgatgtccgcattaacccatccgttacgcgggttgacctggataattttactttccacacccctgatgtggtatgcatgatggacaggaaccaggaacaactcgccagaagtatgggggcgggacacagggtaattcatggcgtggctggttcgggcaaaacgctcattttgcaccaccgatgtattgagcttgccaacaacattgaaaacaccaaaccgatactggtgatttgctacaacattacgctggctaaaaaactcaaagcgcagctcgaacagcatagcctcagacttcccgtcgaagttatccatttccacgcctggtgttatcagcaattaaacgcgcatcggcgtcttccccccaggagcaaaaactttattgagctgatggagaatgcgctgacggtggcatttgaagagggagcaatcaaaccggagcagtacagcgccgttttgatagatgaaggacacgattttaaaccggaatggctaagaatcctcgccaaaatgccggacaataaagatagctccctgctgtttctgtacgatgacgctcagtcaatttatcagaaaaagaaagctctcgattttaccctgtccagcgtcgatataaaggctcagggccgtacaactattttggataccaattatcgcaacacccggcaaatactccattttgccagcagcgtagcatttaattatctcaataatcacatagaagcttctctcaaataccagcagcctgccgcaggtggcctgtccgggaagtatcccgcgctggccagctttgataatcaggacgaggagattacgcgcgtcctcgattgggtcacagagcagcgacaggaaggtgttgcgtggtcagaaatcgccatactgtgcccctcaacctacagcatttcaggcatgctcgcgccaaggcttgaagcccgcaagatcccataccagatgattgtctccagcgatgataaaaagcactggtccccgcagaatgattacctctgcgtcatgccgctgcccagcagcaaggggcttgagtttaattcggtcgccattatggatgcggcaaaggaaagggacagtgaagatctgagtgacgatatcaagcgcctttacgtcggcattacccgcgcacgacagaatcttctggtgacaatgcacggaaccggaagcctgcgagatcatctggtcgagacctgggaaaagagcgttaagtcgatctaa

SEQ ID NO: 125468 - DNA, 1710 bp, Enterobacter cloacae
atggcaattgcaattggcctcgattttggcagcgactcagttcgcgcgctggcagtggactgtacgactggccaggagatagcaaccagcgttgagtggtatccgcgctggcaagaggggcgctactgcgatgcgccgaacaaccagttccgtcaccacccgcgcgattacattgaatcaatggaagcggcgatcaaaaccgtgctggcggagctgacggacgcccagcgggccgacgtcgtggggattggcgtcgacagtaccggttcaacgccggccccggttgatgcagaaggccgcgtactggcgcttcgcccggagtttgccgataacccgaacgccatgtttgtgctgtggaaagaccataccgccgtggaagaggcggaagccatcacccgcttatgccaccagccgggcaaaaccgactactcgcgctacatcggcgggatctactccagcgaatggttctgggcaaaaatcctgcacgttacccgcgcggacgcgtcggtcgcacaggcagcggcgtcatggattgagctgtgcgactgggttcccgccctgctctccggcaccactcgtccgcaggctattcgccgtggccgttgcagcgccgggcataaatcgctgtggcatgaaagctggggtggtctgcctccggcagcgttcttcgatgaactcgacccgatcatcaacaaaaacctgacctacccgctgtttaccgacaccttcaccgccgatattccggtcggcacgctctgcgaagagtgggcgaaacgcctcggtctgccgcaaaacgtgaccatttccggcggcgcgttcgactgccatatgggcgccgtgggcgcgggtgcgcagcctaacacgctggtgaaagtgattggcacctccacctgcgacattctgacggcggataaaaccagcgttggcgaccgcgcggtgaagggtatctgcggtcaggttgacggcagcgtggtgcccgattttatcggcctcgaagcgggtcagtccgcgtttggcgatatctacgcctggtttggccgggtgctcggctggccgctggatcagctggcggccgcgcatcctgaactgaaaacccagattaccgcgagcaaaaaacagctcctgccgcagctcaccgaagcctgggcaaaaaatccgtctctcgatcacctgccggtggtgctggactggttcaacggccgtcgtacgccgtttgccaaccagcgtctgaaaggggtgattaccgatctcaacctggcgaccgacgcgcccgcgctgtttggcggcctgatcgccgccaccgcgttcggcgcgcgcgccattatggagtgcttcaccgggcagggcattgacgtgaacaacgtgatggctttgggcggtatcgcccgtaaaaacccggtgatcatgcaggcctgctgcgatgtgctcaaccgtccgctgcaaattgtggcttccgatcagtgctgtgcgctgggcgcagcgattttcgctgccgtggccgcaggcgtccatgcggatatcccgaccgcgcaacagcatatggcgagcgccgtcgaaagtacgctccagccgcaggctcagcaggcacaacgctttgaacagctttatcagcgctaccagcaatgggcaaaaagcgccgaacttcactatctccctgtcgccgccccggccaaaactaccgcggacactacggcaaccctgacacattaa

SEQ ID NO: 125469 - DNA, 294 bp, Enterobacter cloacae
atgcacctcgataccccgctcgccgtcatcgcggcgatgagcttcagcacctttatgtggggcaccggcgcgcccaacattttcgccctgctggcgaaggccacccatccccgggtgagcgccacggcgggcggcattttcaacgggctgggaaactttgcaggcgcgctgtcgccggcggtgatgggcgcgcttatcgccttcacccacagcatggattccgggctgatttttctggcggtgatggcggcggtgggctgcgtcctgttactgccgctgctgagacgttactga

SEQ ID NO: 125470 - DNA, 432 bp, Enterobacter cloacae
atgaaaaatatcgtattagcatccttgctgggctttggcttaatttcttcggcctgggccactgaaaccgtgaatatccatgagcgggtcaacaatgcacaggcacctgctcaccagatgcagtctgctgcggctcctgtcgggatccaggggactgcacctcgtatggccggtatggaccagcatgaacaggccattattgctcatgaaaccatgacgaacgggtcggcggatgcgcaccagaaaatggtggaaagtcatcagaggatgatgggaagtcagaccgtttcccctcccgggccgtcgaagtcattagcggcaatgaatgagcatgaaagagctgcagttgcccatgaatttatgaataacggtcagtctggcccacatcaggccatggccgaagcgcatcgtcgcatgctcagtgcaggctga

SEQ ID NO: 125471 - DNA, 597 bp, Enterobacter cloacae
atgatttttaacggcgaaatggtgcgcgccatcctcgacggccggaagacgcagacgcgtcgcatcatgaaaaaccagcctgccggagattaccccgacaccccagccctaatcagaagcgtggacggtggttttcagtggtacggacattacggagaaagcagcattttcaattgcccgttcggtgccgtcggcgaccgcatctgggtgcgggagacgtgggcagatgctggagccagtgcgccggatctgaaactttatcgcgcgaattacccagcgcatgttccatctcattacgagaacgtgccgccggcttccgatattcgctggacaccgtctattcacatgccgcgctgggcaagccgcatcacgttggagattactagggtgcgggtagagcggttaaacgatatcagcgaatgcgatgcaaaagctgaaggggctccgactgaatgctgcgttattggcgataaacacttccttggtttccgtagcctgtggaaatccatttacggtgacgaaagttggcggtctaacccttgggtctgggttattgaatttaaggtggtgcccaatgttcaggataatccagcctaa

SEQ ID NO: 125472 - DNA, 222 bp, Enterobacter cloacae
atggctgacatcatcgataccgcagcagagattgaagagcttcagcgtaacgctgccctttccgctcaccgcatcgaccgcaacgccgtatcagctgagcgttgtgaagaatgcgacgaaccaattcccgagccgcggcgcgctgccgtacccggttgcaagacgtgcgcggagtgccagggtgttatcgaattgaggaataagcaaagggggatccagtga

SEQ ID NO: 125473 - DNA, 318 bp, Enterobacter cloacae
atgacaacagaatttaaagccctgcccgtcgaacgcgaccagtacggttactggactcacccgctttatgatgaattttgcgatggtcgtgaatctatctcgccagctgaatttaacgcttggctggataagaacggccttgagtggaaagtgatttaccgcgatgaagatgaggctgatcccgacttggacggctatgacatttcagcgtggcagccagaaacacccgccggtgatggttggtttgttggatcaattcacgatacggaagatggcgcggtctgcatctggctgcgcaaagttggcggtgcgacatga

SEQ ID NO: 125474 - DNA, 465 bp, Enterobacter cloacae
atgacaatgcagatgcactcaatgccctggcctgattctcaggccatttttttgtccaaaacctacctttacatgaacatggatgagctgtgcgcaaagttacagcgcaccaaatcgtctatccagatgaaggctagcagcatggggctttaccgttgtgggaaattaaccatcgaagatctgagactgattgaagcactgcttgatgccggacttgagcatgcggttatcgccagaaagttcgaactctccgaggctcagctaacgagggttctggaaacaggatcctttcactgcgatgtctgcgccacgttctccgcatctatgcgttctgcttactggaaattcgatggggatccgcaaaggacttatagctgctgtccggcgtgttgtcgggcgatggttgaaagctttaacgcaggacacgacgggccgttgctggcacgcagacgggaggaggcatga

SEQ ID NO: 125475 - DNA, 1062 bp, Enterobacter cloacae
atgagcaaagtaggcgattatttctttgagttcccggcgtcgcgcggcatgcagggtagcacggcgacttacatgatcacggcgcctgctcgcgcgctaacgcgcatacttgcgtccgacaatcacggcagcacgctcgagcgttctcaacgcgaaattaaccaggtgcgcgtgaagaagttttaccagtacctcgtcaatgcctaccaaaacaaagagcccttcatcatcccgccgctggtcggcaactgcgacgcggatattgagtttgaagagttcggcaatacgaatgtgggcgtcgcacgcttccctatggatgcggtgatcaaactattcgacggccagcaccgcgctgccggattagttgagttctgccgaacttacggagagccaatcagcatcccgctgatgctgactcataatctcccactgaaggcacgccagcagttcttctccgatatcaataacaacgtctcgaaaccttctgctgcgatcaacatggcctatgacgggcgtaatgatgttgcccaggggatggtgtcgttcctgtctcagcacgacaccttcgcagaggtgacagacttcgagcacaacgtcgttccggcgaaaagtaagttttgggtgagcttcaaggcgcttagcgacgcgacggccaagtttgccagcgcgggcagtaagcctctggaaatgggcgacatcgaatccatctgggaggcctggctgtccctcacgcagatcgaggcgattcgccacggcaccagacaggcagactacaagcgcgactacattcagttccacgcagtgatgattaacgccttcggctatgccgttcagcggctgatggctgaccactcaatcgtcgatatcgtccagatgattgaggatctggcaagcaatgcgggctcctctgaggtggaagacttcttcctgattgctcggtggggtggcgtctgtgtgaatgccgaaaaagaccgtccaacgattattgcctccgttccggctcagaaatcggctgctgagcggctcgtcaaagttatcctggcgaaaagcctcggggaatag

SEQ ID NO: 125476 - DNA, 153 bp, Enterobacter cloacae
atgactcacgctaacgacgacatcagggttggcaaactctgccttcccttcattggtaacggctggctaatgctatggggtgaagtggtcagcaatccatttaaggcgcagagactcgctgaggaatatcgggaaaggcaggaggcggcatga

SEQ ID NO: 125477 - DNA, 429 bp, Enterobacter cloacae
atgaaacgcacacccttctaccgcaggcccgggcgaaccgggcaattctccggcctccgtgagcgcgttatctggatgattcagacacgcgggcgcccggtaacaggcagcgaaatcgcagagaagtttggcgtaacgctcatcgaatttaaccgggtcgccaacggcattacccgcggctccggacagatagcgcagcttgttgagtcgaaaaaatggctgaacgaagacggcatctgtgaccgcactttcgacctcgtaacgaagccgaaggtcgtaactccgcaaggtaaatcgcgcctgttcacccggcgcgccattgagcaatctcaggaaggtagacggcaggagtgcatagcgcgtgccgcccgccgtcgccgcctcattgcccaaggcctctacatcgacgaaatggagtccatcctatga

SEQ ID NO: 125478 - DNA, 435 bp, Enterobacter cloacae
atggaaatcaaaacgccagccaacccaagcaaaaaggcgacggccagggtaaagaatcctcttcccgcgccaaccagttgccacctgtgctctggttcagtgcggatcggcactcatggagaagtctatgggcgcgacttcagtgactggccgtatgtatatctttgcgaatgctgcggagcatacgtcggacttcatcctttcactgcgatcccgcttgggactctggcagacaagccaacccgtgatgccaggaagaactgcaagtcgccatttgaacgtatctggaagtcgggcgccatgactcgcactgaagcttaccaatggctggctggcaagatgggtatacctgttcatgaatgccacttcggatggttcaccgtagagcagtgccagactgcaatgcatcactgtaacgactggctaaaccgctaa

SEQ ID NO: 125479 - DNA, 174 bp, Enterobacter cloacae
atgtccaaacactgtgaaaattgcggatgcgcaatccgatccggatattgcacaaactgccaggaagaagcgtatatcgcgttcgttcaggctccggagatggaatttagtaaagagttcttacgtgaagcattccgtcaggactccgaatcaaatagccgggagacatcatga

SEQ ID NO: 125480 - DNA, 216 bp, Enterobacter cloacae
atggcgagtaacaaaaagccgaatcactcggcaaaggttaagtattgggcagatggcgttacaggtgagtgcagtggtgggatcgtagggtgtatcgaaatgcttttcttcgcgctgccgaaggataagcgtgaggcttgcctgaagcgatgcgaggaggctcacaagagatgctgtgagcacgaagagaagaagaaagcagaacaagccgcctag

SEQ ID NO: 125481 - DNA, 543 bp, Enterobacter cloacae
atgcggcctgagttaaaccaagagtatctccgcacaatcctaacttacgatcctgaaagtggtcatttcaaatggaactttaacaaaggcgctcgcaataaatctccttatgcggggacgctaaccagttacgggtacatcaagatcctgatcgaccaaaagcaatactttgctcacaggctcgcatggctttatgtgcatgggcactggcctgaaggttttattgaccacatcaacggcgataaagctgacaaccgcctcattaacctaagagaggctaaacgtgaagaaaactgccggaatgtttctcttaaatcaacaaacaccagtggttacgttgggattttcctcgacaagcggaacggtacatggagagcccagataacagttagcagaaagcaaatcgttcttggttacttccattcaaaaattgaggcggtaagggcctttaatgctggcgcatcccttcatcatggtgactacgcagtaagaaaaatacagcacaacgaagagatgctcatgaaagagtttgggcatctttag

SEQ ID NO: 125482 - DNA, 906 bp, Enterobacter cloacae
atggcgaattttgatggtagcggatccctacaccaaatgcagttattccctgtagtcgaggttgtatctgatgatatacccatgggggttcttaatgatggaacgccatacttaaccctttacggcctagctaagctttgtggcattgatgacacgccattgagggttttcacatccaactgggaaacagaaaaaaataaacccagaggacagaaagtagcatcatacttggctgagaagggattccataatttagaccgcctatatacaagggtgatgaacagttcaaacgtggagactcatgcctacccggattatgtctgcatggctgttcttcgctactatgccctcgatgcgacaaacttcgacagatcggtagcaataggtaactttgttcgcctagctgaatacacgcttaagcggatgatctatgagaaatcaaactataatccaaacgcctctatcgatgtctcgttcgaaaactatcgggcaagaattaaattgaatgatcagatacctacaactcactttgctgttttcagagaaatagctgatatcgcaatgaatttgattggtgggggattccctatggatgatacgacttccttggatggaagcgttggaagccactggggtaagtattggtcagccaatcgactctctgagcaatttggggaaagagtgcaacatccacacttgtaccctgataactacaggcaatcagccgctaataagtatataaccgcctggatataccctatcgaggcgttaggtatatttagaaaatggctccacgataattatgcaatggaaaaattgcctaactatcttggtaataagaagcttaataatgcttcagagctattggagtctataaaaaaaccagcactacccaataggcattga

SEQ ID NO: 125483 - DNA, 711 bp, Enterobacter cloacae
atggaaaagaaaaagatcctcacccccgctcaagtggctgattcaaagcgtttaaaagccctttacgaagcgaagaaaaaagaactgggtattactcagcaatccattgcggacgcgctggacatatcccagggtgccgttggccattatctcaatggaaggaacgctttaaatacagcggtagcatcggtctttgcgaggcttcttgggattagtgtctctgatttcagcccgtcacttgcgaaggatatctctgatatgagctcggtggcgtcggaaaatacttctttcgcagggcattattcacctggctcaaaatatccggtgattagcaaagttcaggcgggcgcctggtgtgaagcggttgagccgtacaccctaaaggatatagacctttggcttgaatcagatgctcacattcaaggtgaggcattctggctacaggtagatggtgactcaatgacagcaccggcgggtcttagcatcccagaaggaacctttgtcctcttcgatactgggcgcgaggcaatcaacggcagtctggtaatagcaaagctatccgattcgaacgaggcaacatttaagaagttagtgatcgacggtgcgcagaagtacctgaagggtttaaatccacagtggccattggtagcggtgaatggtaactgtcgaattatcggtgttgctgtagagacgaagatgcggctggtctga

SEQ ID NO: 125484 - DNA, 189 bp, Enterobacter cloacae
atgaagatttctttagctgaatttgttggcgaagtcgggcaagccaaagcagctgacgctatcggtgtacaccagacggcaatcagcaaggcaattagggttgggcgtcagatttttatcaacagactgccagacgggaaaattaaggctgaagagattaagcctttcccgcacagcaaagccccgtaa

SEQ ID NO: 125485 - DNA, 642 bp, Enterobacter cloacae
atgaaacagaaatttatcgagtggtttaccaagaacaacaacggctgctcgccagcgatggaagacgacataagctttgtgtacgagatgacgcagcacatgttcgaagcgtaccaggctggcgtggctgaaggtgaagccaagtgcgcggcgctggcatcgctcgaagcggagcctgtggcgtggctgctgtcaggcggcggagctaaaaaccacgtcagcttagatagtggcaatgcttatgccgacccgctgcgagaagtaacgccgctttacaccgccccgccagcgccggtatctgtgcccgctgcgatggaaatggatgatgactttgacagcgcgtttgaacacggaaaagctgtcggctggaacgcctatcgcgcagccatgcttcagtcgttcggtaattccgaacaactcaactctccggtgattccggatggttgggtggcttgcgttgagcggatgccttccgcaggggaacaagtgttggcgtaccgtccagacgcgccggaaagtaatgatccattaatcaagatggcaacgtacgttggcgggtcagcacacggacacggctttgattgctactgcaagccaacccactggatgccgctgccagcagcaccgcagcaggaggcatga

SEQ ID NO: 125486 - DNA, 450 bp, Enterobacter cloacae
atgaaacagcactactgcatcgttaacgacaccgttaaagagaacctcatcgcgtacattcgcaccctgcaggtaaaccctcgcgcaccgatggtagtcgaggccagggaagagacccgcaccgacaagcaaaaccgccttatgtggccgctactgaaagacctgtctgaccaggtagtctggcacggcgaaaagctgacccgcgaagaatggaaggacctaatcacagttctggtgaatcagactcaggaccaggagcagaagtccgcgccgggcatcaacggcggccgcgtatatttcggcgtccgcacatccaaatccagcaaacgctacatggtcgacgtcattgaggcgatttactggttcggaaccgaccgcggtgtgaagttctccgaagcatccagtaagcgcatcgcctgggcgcaagagtggaggacttcccgtgggtaa

SEQ ID NO: 125487 - DNA, 171 bp, Enterobacter cloacae
gtgggtaatcctctcgcacgcgtcatcaccaacgaaatcttccgcgttccagcgcgccgccagcgtaagcctgcggttaagccgtctgatatcccgaccctgaaagactacaccgcccgcctggtggatcagaaatggctgcgtctcgcggcaaggaggaaatccgcatga

SEQ ID NO: 125488 - DNA, 669 bp, Enterobacter cloacae
atgagcatgtatcaacgcattaatggcgctgactggcgcaatatcttcgtcgtcggggatctgcatgggtgctacacgctgctgatgaatgagctcgaaaaagtttcgttcgacccggcatatgatttgctgatctcggttggcgaccttgttgaccgcggcgcggaaaacgtcgagtgcctggagctgatcactatgccgtggttccgggctgtgcgcggaaaccatgagcagatgatgattgatgggctatcggagtatgggaacgtcaatcactggttggcaaatggtggcggctggttcttcaatctcgactatgacaaagaagtgctggctaaggctctggttcacaaagcagctgatctgccactcgtcatcgagctggttaccgctgagcgtaaaatcgttatctgccacgctgactacccgcataacgaatatgcgttcgataagcccgtcccgaaagatatggtcatctggaatcgtgagagggttagcgacgctcaggacggcattgtctcgccgatatccggtgctgatctgtttatcttcgggcacaccccagcgcgccagcccctgaagtatgccaaccagatgtacatcgataccggtgccgtgttctgcggaaacctcacgctggtacaggttcaaggtggtgcccatgcgtaa

SEQ ID NO: 125489 - DNA, 633 bp, Enterobacter cloacae
atgcgtaaaccatcccgccgtaagtgcaaagtatgcggtgaatacttcgtgccgaaattccacgacatccggatccgctggtgtagcccggaacatggcgcaatcctcgcgatggaagaacgcgagaaggagagggttaaggccgcggcgaaacgcatcaaggaacgcaaagagaaagagcgcgcggaacgccgggatctgaaagcgagaaaggtggcactaaaaactaaaccgcagtggagggctgaagcgcaggcggctttcaaccggtacgtccgcctgagggatgctggtaagccgtgcatcagctgcggcaggctgccggagcagaagtttggcggaaccatggattgcggccactaccgtacccgcggcgcagcggcgcatctcgctttcaaccttcacaataccgcagcccagtgtgtctattgcaaccaggatcgggacggcgcgcaaaaggcatttgaacagggccttattgagcgcatcggtgccgaaaaagttgaggcgataaacaacgataactccgtccgccgattcgacattccatacctgcagcgaatcaaatccattttcacccgtaaagcccgcgcgctggaaaaacgccgcgcccgccgacaggaggcagcatga

SEQ ID NO: 125490 - DNA, 384 bp, Enterobacter cloacae
atgagcacagaaactgaaattgaactgggcaagattgtcgcgttcccgacgaagaataacgacctacaggacgggctggttattcagcgcgaagggcagaaggttatgtgcctgcactccactgtttgggtgaatgaaaaagaccggactttacgctgccggaagtgcgaaacgttgatcgagccttttgacttccttatgacgctctgcgaccaggagtctcgctacatggagaacgtgaaatatctccgccgcgaggaaaagcagcgccgccagaacatcgaaaagctcattcagattgagaagaacgccaagtcccgcatacgccgcgccggggataagtcaccacttcctctctggcagaacgagagggtggacgaatga

SEQ ID NO: 125491 - DNA, 540 bp, Enterobacter cloacae
atgaaaaaaagagtgctggtagcatttattgtatctgtcggagtaagtggcgctgtctatgcaaataataccgtacgttttttaggagaagttaccgatcaaacctgtaccataaaaattaatggcaccgattcttatccggttgtcctgttgcctgccgtcagtaaaagcgagctgacggccgcggggtccagcgcagggcaaacgcctttcactgtgacgttgagcggctgcgatgttactgcgacgtcgtcatcttcggcaggcgtacgttttgtcagtaattatctggacggtaacaacctaaaaaatatcgcggcggcaagcccggcgacgaacgttgctattcagctacttgaaggcacgaccgagctggacttcaccagcggcatagcaaaaacgtctatgcagacggtaggtggaacgagcggtccagactctgtctcctttgatatggctgcacgttactactcttctgctggcggggctacggccggagcagtagaagcgcaagcacagttcgcaattacctatttgtaa

SEQ ID NO: 125492 - DNA, 729 bp, Enterobacter cloacae
atgctgtacactaataaatgctgttttattgctgtaatggcatttttgtcttctatttttatatcgaacatagcatcttccagtgttattcttaaaggtaatagaataatttattctgctgatgcaaaagataaggttgtagaattttctaacaatggtgatacaccgatgctggtgcaggtgtggctggataaaaataacccagactcaacgccagacacagcggatgcaccttttatcgtcacgccacaaatatttcggattaatgcgctgaatggtcatgcgctgcggctaaaatttacagggcagacccaacagctcccacaggatcgcgagtccgtgttctggtttaattatttgcaatatcccgccattaaatcgtccgatcttgcacagaatcgcctggcattgattgtaaaaagccggctcaaagtattttatcgcccgcccggtctgcgcggcgacgccagtcaggctctgacgcaacttcaggtgcagcgtaaaggaaatatgctgacgttacaaaaccctacgccatggcatatttcactgcgcaacgcgctgttaacccgaggtgagaaatctacggcggttggccaatcggtgatgattccaccatttggcgacacacgctgggttttaaccgatccggtggccacatctgtcacggtttacgccatgaatgattatggcacggcggtgagccacaccttcacgctgcctcgctag

SEQ ID NO: 125493 - DNA, 2523 bp, Enterobacter cloacae
atgctccgacatcgcgcgtatccccggtgttgtctgtttgtctcgacgctgacgttaatcagcgcctctttcgtgcaagcgcaagaagcgtatgtctttgacgcgtcgctacttcgcgggtctggcctgaataaggttgatattgaacagttaaaccaggattcaatgatcaagcccggcagttatacactggatctatatgttaacggtacgctggccgcgagggatgacatcgtatttacagccgtggaacatcgcgtaatgccgtgttttagctggggtaccttaaaaaagattgggctgaaatcgttgccggaagagcctggagaaggctgctatcgtccggacaatgcgcttttttccggcatcacggtgagcagcgtgatgtcgcaaatgcgtgttgatttttcggtaccacaaaccctgctggataaactgccgcgaggaggaatacgtgaagagagcctggagtccggagaaagtatgctctttctcaactacatggctaaccagtaccacgtcacgcaaaagcaggatggcggtggcacgacagactccacttacctgaacctgaatggcgggttaaatctgggactgtggcgctatcgtcagcagtctgcgctcaactatgacagcgatctgggcagccattggacaacaacgcggcgctatgtccagcgagcgattgtgccgctgcgcagtgaaatgatgattggcgaaggctacaccgacggcagatttttttccgggatcagctttcgcggcgtgcagctcacctccgatacccgaatgcgtccggaatctcagcgcggctacgcgccagtggtgcgtgggattgcgcgaaccaacgccaaagtgaccattcgccagggcaacaacacgctctatgaaaccacggtcgcgcccggtgcgtttgcgattgacgatctttatcccactaattacgcaggcgatctgaacgtcattgtcacggaagcggatgggaatgaaagtacgtttaacgtacccttttccgcgctggcggaatccatgcgcgcggggttttcggaatacagtgcgacagtggggcgcgtgcgggacgtgggcaacaatgacgaattcagtgaaattgtctggcagcacggggtaacgaatgcgctcactatcaatgcgggcaatcaactggcaaacggctatcaggcgtttatgctcggcggcgtttacagttccacgctgggcgcatgggggatggacagcactttctcgcgcgcacggctgaacagcgacgattaccaaaccggctggatgtccaggctcaactacagtaaacattttccacagacggggacgtcggttgcgttggcgggctaccgctactctacaggcggctatgctgagctgtacgatgtgctcggttcacgcgctgcgcataatgaggagtggcaatcctccacctggcggcagcgctccagggttgagctttcggccagccaggcgctggactggttgggtaatattaatctttccttctcttcacaggactatcgcgaccagaaaagccgcgataagcagcttcaggccagctggagtaaggcatttgcctacggcatatcggtgaaccttacggcggcgcgcacccgacgaatcaccccatcttcacaaaacggcatgggaaacgccgtcgactggagcgacgcctggcaggcaaaaacgcaaacgctgtggtcattatcgttttctattccgcttgggcagagtcgctactcgccaatgctttcgattagcgctaaccatagtgatgatgacggcggagattatcagtcgacgcttagcggggtgatgggtgagcgcgatccgctgagctacagcctcaactacgccacaaacgatcgcggggagcagtccgtctggggagcaaattttcagaagaatttcccttgggccagcggcggcgcgtcgtggtcttcctccagtgattactggcaggcgtcggcatcgttacagggggcactggtattgcatcgtggaggtatcacgccgggaccgtatcttggtgacaccttcgcattgattgaagcacccggtgcggatggcgcacggatatccggcgggcaaggggcacaggtgaacgcgtttggctatgcgcttgcaccatcgttggtgccttatcagttcaatactgtcagcctggacccgcaagacatggccgacgatgtggaactccagacatcggttcagcgtgttgcgccattcgccggggcgatggttcgcctgcgctacaccacgcttcagggacaggccatgttgatcactgcgcagaggctgaaaggtgaggttatcccgatgggggccgccgtttacgatgagtatgacaacagcattggcatgatggggcaggcgagtcagctctattttcgcgccagcgacgagaaaggcatattgcggattaagtggggggaggcccagcaggaaagctgtcggatagcctggcaaaatacgcagccgtcggaaccgttacgggtattaacgttgccttgccgttaa

SEQ ID NO: 125494 - DNA, 1305 bp, Enterobacter cloacae
atgaacagactacgttttgtcgtcgcggcattttgcctgatgagcgtggcggcgtttgcccagtgcgaaaaagggccaaaattcgagcacaccgaagaggacgcaatggggacagggcttgcgctggggcgtatcaatgtcagcagcattgacgttcagccggaaggtacagttttggctagtagcgtggtgcgcttctctgataatccgctctatagcagccccgataatattttgtgggtctgcgatattagcgataaaaataacatcttcgaaatcattgccactaacggagatgaccgttacggcggctactgggatatggggcaggcaagcggtaatccgaatgtttacggcaccttatttaaaaaagtcggggtgcgtttaacgcaccttaactcaggcactgtgtttacccgaaattatcaacggataccgatgacccggtacgcggtctcagacgatggcaaaaaaatttatattcgggtcaaggattttagccccattcgcgccgaggcgattcgtctcagcgcagatgttcccaccaacacgggagctggaacctggtgtggcgctccggtgagtagcggcagctatagctgtaatcagcccaatggctacgtcagtttttgttcgccgggcagtaaaaataacgatgcttactgtgattccggagactcggcaaccagttacaccgggtggggttacgataactggatggcgttaaacatgggaacggcacctgtctcaacgctgaccaccatcgctacgtgcgtggcgaaaaacgtcacgcctgtggtcgtgttcccttctatttcgcgaactgagctggaaagcggcaaagcggcgcaagccaatttcagcgtgacggttcgttgtgaaaatacagccgtcggcggtgtggcgcaaaaccagacggcgctggggttacaggtgccttacgaaagctttctcgccgcgcaaactcttgggctagtcaacagcagcggcggggtgagccatctcctttccgagaattacggacaaaccggtatggcaaggggagtggggatacagattgctaatgccagcgacggtatagttcgccagttcctcggttgggatcgctgtacgaccaccagttgcgcaacgggcaatagcggtggctggtatcccgtcaatgtaggagcaacccgaattgcaggatcagggaatacccaggactacctgattaactttaatgcttcactggtgcgtttacctgacgaggcgatcgctgccggtaaggtagatgccagggcgtatgtttgggtgaaagtgcaatga

SEQ ID NO: 125495 - DNA, 705 bp, Enterobacter cloacae
atgatgcgtatttctctgttattgctatggatgcttgtgtcctggccctgcgcagcgggcattattgcctccgcaacgcgtgtgatttttcatgaaggcgaagcgcaacagagtctgatgctggtgaataccaatccgtggccggtagtcgtgcaaacctgggtggatgatggcgatatcaatcgcgaaccgggaagtgttaaaacgccgtttgttgcggtgccgccgttgtttcgtctggagcctaagggagtacaagggctacgtatcatgcacaacaaagcgcgtatgcccactgaccgggaatcggcattctggctgaacatctatgaaatcccgcctaccggaagtgttgccacacaacaacaaagcatggtgctgacgatgaatacacagatgaaaatattctggcgtccggcgtcgctcaacaatccagaaagcgcgtgggcgcgattaacctttcatcgcgagggttctgtgctggtttgtcataatgattcgccttactttgtctcttttgcgggcattaactttaaggcaggcgaaaagctgtatccggtgacacaactacccgacatgatggttgcccccttcggggagaagcgctacgcctttgccgccaatgcccccttctccgggcaggtgcagggggagttaatcgacgacaacggtaatagcgctgtttataactggccggttaaataa

SEQ ID NO: 125496 - DNA, 288 bp, Enterobacter cloacae
atgcaaaagtttaagggtacgccaggcgaatggaagtacacgattagaaacgtgaacgaaatgatgactactttccatggcgtgacaattggcgacacgtacattgaggcagctacgagaaatgaaatagaggatgcgcgacttatagcagccgcgccggaattactggaggcgttacagttaaccgaaaaggcaatggcagaaggtcgaaacgttacgtacccggaatggtacggcgtgatcaacaaagcccgcgcggccatcaacaaagccctcggcaaggagtaa

SEQ ID NO: 125497 - DNA, 192 bp, Enterobacter cloacae
atgaaccgagcctcgcccgttgatttgaggaaaagcatcgaaattgccaataacctggcgcacatcgggattcgctttgtgccgatcccggtggcgaccgaagaagaattccaggcgctggccgccgagctatctcgacggcttgagcagatggcagtcgaagctgagaagaatgaaggcggtgcagcatga

SEQ ID NO: 125498 - DNA, 219 bp, Enterobacter cloacae
atgacgccagcaaatgaaaacgccatccgcgccgcctgccgccggtgcaccgaagaaatccagcaggccatgcgcaagaagccaaagcctaactggaacgaaacggtgcctcccatcatcaacaagcatcacaagaaaattgaagctctgggagttagcctcctggagttcgtcgtcaaaactggccgcctgaacgggcggtttggagccgaacaatga

SEQ ID NO: 125499 - DNA, 552 bp, Enterobacter cloacae
atgaccgattacaccggaagtaataccccagcggatcagcgcgacctctggcgcactccaccagccctcttcgcctcccttgatgctgagttctgcttccagcttgatgccgccgcagcgccgcataacgcgctatgccggaagttcatcaccgccgagcagaatacgctggagacgccgtgggctgattacctcaatgtgcctggctacgtctggctgaacccaccatacagcgacatcacaccgttcgttaagaaggccgccgccgagagcgctaatcagatcggcacggtcatgctggtaccggcagacacatcggttggctggtttaaggaggctatccagaccgccagcgaggttcgcttcatcaccgctgggcggctggcatttatcaacccggtcaccggtaagccagtatcgggaaataacaaagggtcgatgctcatcatctggcgaccgtacccgcgtacacactgccacttcgcaacggtggaccgggacgagctgatggctttcgggacgaaacttctcgcccgcagggaggcagcatga

SEQ ID NO: 125500 - DNA, 429 bp, Enterobacter cloacae
atgaaacgcacccccttctaccgcaggcccgggcgcaccgggcaattctctggcctccgtgagcgcgttatctggatgattcagacgcgcggccgcccggtaaccggtagcgaaatcgccgagaagtttggcgtaacgctcattgagtttaaccgggtcgccaacggaatcacccgcggctccggacagatagcgcagatcgttgagtcggagaaatggatcaacgaggacggcatctgcgaccggaaatttagcctggccagcaagccaaaggtcgtaacgccgcaaggcaaatcacggctgttcacccggcgcgcaatagagcaatcgcaggaaggtaggcggcaggaatgcattgaacgtgccgcgcgccgtagcagactgattgctcagggcctctacatcgacgaaatggagtcagtgctatga

SEQ ID NO: 125501 - DNA, 681 bp, Enterobacter cloacae
atgacaccagaaattatcctggcccggaccggcatagatgtgtccaccgtagagcaaggtgatgaagcatgggccaaattaaggctcggagttattactgcctctgacgctcacaacgtcatttccaagcctcgatctggcagcaaatggacagacatgaaaatgtcctacttccacacgctgcttgccgaggtatgcaccggcgtcgcgccagaggttaacgccaaggcgctggcctggggaaagcagtacgaggaagacgcccgcaccctcttcgagttcaccactgacgtgaaagtcacggagtctccgatcctgttccgtgacgagagcatgcgcaccgcgtgctcccctgacggcttgtgcagtaacggattcggccttgagcttaaatgccctttcacctcccgcgactttatgaaattccgtcttggcggtttcgaagccatcaagtctgcgtacatggcccaggtgcagtacagcatgtgggttaccggaaaagaggcctggttctttgccaactatgacccgcgcatgaaacgcgaaggcattcaccacgtcgtcgttgagcgggatccgcagtacatgtccgacttcaacgaaatggtgcctgagttcatcgagaagatggacgaggcgctggcggaaataggctttacgttcggggagcagtggaaatga

SEQ ID NO: 125502 - DNA, 918 bp, Enterobacter cloacae
atgagcttaacccttgttgatttcgtcaaacaacaggagccgcttttcatgaaggcggccacagacgagcggatggtgtgggctaaggaaagccagttcgccatccagctatttcagaacaacgactacctcgcgaaagtcgcattccagaaccagaccagcacgcagaacgcaatcatcaacgttgcggctattggtatttcgctaaacccagctcagaagctggcttacctggttccgcgtaaaggggcgatttgcctcgacattagttacatgggcctgatgcatattgcacaacagtctggcgccattaagtggtgtcagtcggcaattgttcgcagaaacgaccagttccgccgcgaggggctagataagccgccgatccatatctacaacgacttcgataccgaagagcagcgcggggacatcgtaggcgcgtatgtaacggtaaaaactgacgatggtgattacctcacccatacgatgcgcatcgatgccatctactccatccgtgacaggtctgaagcatggaagaagtacaaatctgacaacagcaagaagtgtccatgggtcaccgatgaagagcagatgatcctcaagacggtcgtgaagcaggcagcaaaatactggcctcgacgtgagcgcctggatgcagccatcgaccatgttaataccgagggtgaggaaggtatcaactttgcagcagagcgccagcaagagcgcgatgtaaccccagcaggggacgaaattatcaaagagattaacgacgtacttatcgtaatggataagacgtgggaagaaaacctgctcccagtctgttcgcaaattttccgtcgtgatattcgcgattcatccgagcttacccaagccgaggcagttaaggccttaggcttcctcaagaagaaggcggcagcatga

SEQ ID NO: 125503 - DNA, 279 bp, Enterobacter cloacae
atgaacgcatacctcacttacgaccgcatcgaagatcggcgctgggttgatcagcagctcaccgacgagaaagagaagtggatcgacgaccgagcgaaggaactgatcgccatgttccctgcgaaacctctggaaatgagcagcttgttcctgccccaggaagcccagtttgcgcttatcggagaaaaggccgaagaggcataccacgaatacatttcgacctgtgcatatgcacgcgccgaagaggaatggcagcgtcaaacgccctgcccgttctaa

SEQ ID NO: 125504 - DNA, 210 bp, Enterobacter cloacae
atgatcaaccactacggcaccaccccgctcattcgtcagtgcgtcactcctggcatgatggcaatgcatgaagggcgaacctatcgagtctcagcggtcattcaggagcgtaaatgggtgtacctgcacaccgatgcagaaatcatccgcctcagtgactgcgtgattgatgtccttctggacggtcacggcaaccctatccagcactaa

SEQ ID NO: 125505 - DNA, 159 bp, Enterobacter cloacae
atgacagtcacccacaacggcaagcagtacaccgccaaaaagctcaacgataacgagtggcaactgacgtcactatcggcaccgcgggaaaaactggtgctgaaccgctggcagatgcatatcgctggcctcctggaacaggttgaggagaaggtatga

SEQ ID NO: 125506 - DNA, 240 bp, Enterobacter cloacae
atgagcaataaaactggagggcgcgctttcccatgcgattctatcgtggagcgcgacgaagttggtcacttacatggtttcgaaatcagctctggcggcatgacgatccgtgactactttgcagctaaggctatgcagggaatcatcagcagcgaatgcaactatggagcgtttagtgatttagcaagcgatgcatacagcattgccgacgcgatgctccgcgctcgggaggcatcatga

SEQ ID NO: 125507 - DNA, 438 bp, Enterobacter cloacae
atgcttggtgatggtaatactgccatctcaaccgcacaggagacgatgatcctgttctggttggattggaaaagtcttcttggcccgccagcgcgcgggcatttttttggaggttgcatttttgctactgacatctcactgaaatacggcactcatcagcaagagacgattctggaaacaatgccgattgaagaagcctccgaaatcatcaaggagaagcttcgtgatgaagtgcgccaggaactcgagtgcgagtatggcgatcgcctttatgaggctgaagaagaggcatcaaactgggaaagcagagctgatgactatgaaagcgatgcgacttgcctggctaaggccataagagaggcttttgaatctgccagctttgaagatgcaaaggtgatcctccagcgagcgatgcacgaccataaagactatttctga

SEQ ID NO: 125508 - DNA, 189 bp, Enterobacter cloacae
atgcacaagtgtcaattctgtgggtactttctggcatctgaagagatgcagagaatatctgtaaacatggttggcaggccttacaacatctgcattccatgctcagaaaagtacaaaaagagaggcctgtgggattcggcaaaaaacgatatcgactggaaagcacttccatgcgtcgatgagacataa

SEQ ID NO: 125509 - DNA, 411 bp, Enterobacter cloacae
atggatgtaggattaatcatcgcgtcccttaaaaacggacttggtgctctctcgacgatccagagcaacgaggtgctccgagaacgcatcgctttcattggcgagcagattgacgtacttcagaaaacccatgctgccaccgagcagaaacttgccgaagcgatagcaaaaaacgtagaacttacgaagcaaatagaggcttatagggcacaggagcagtttgtccttcatcgcactgcggcctttagaaaagatacctcttgtggctatgcaagggcggtttattgtcccaactgttttaaagcggtcggtgccgacttcagtgattcgacttttcattgcgctacctgcgggtggtgttctgagtttgaaaagagagatctcgatagtgtgatgaaaaccctcccgtaa

SEQ ID NO: 125510 - DNA, 279 bp, Enterobacter cloacae
atgaaaattataaaactgagtcagcaggcaacagtttctcgtccggtcgattcgattatcggttgggaagagaaaacaatctacgagccagtttttgttgtggctgagcatattgagtcgtttttgtttgctggagtaagccacatcaaaatgacctcgggcgaaaagatagttgtacgagaaacacctgaagaaattctcgcgctgcttggcgtcggtgttcaaacggatagcctgaaaacatggggtgaaattgcgcagaaggaggccgcccagtga

SEQ ID NO: 125511 - DNA, 510 bp, Enterobacter cloacae
gtgagcaacatcgacaaacgcgcattacgtgaagcggctgaacgtgcaggacaaaatgactgggagtacgtctacaccagcgacctcagcgccccagggcggggatatatcacagtaggcggagcagaggctatctactgtctgaataaagccgcagggggagtgaaacagtctgaaaacgtattgagatatatcgctgcagctagcccggaaacaatgctggcgctgctgaatgagattgctgaacttgagcaacgacattgcggaacagcattgcttgagcgagaagaaatgcacaccaaaactctgggtaggatgttggatgagctggatgccaaagacaggcggattgctgagctggaggcgagccacggaaaccttcgtgaggcaatggctggcattcacaacacaatcactggaggtggggctcatacgccgctggcggccattctgaatgcatccaaacgcgcatacgaagagtcggccgccgcagccggtaaaggagagtga

SEQ ID NO: 125512 - DNA, 234 bp, Enterobacter cloacae
atgattaaaactgttattcgagctgtaaaaaacatattcaccaccaaaaataacatcatgtcacatgatgcaaatggtgatccatgcgctgtatgccgtaagcctatgcataaaaaacaaggaatcactaaggtggcatctggagaaaagatgcacgcaaaatgctggggaaagttctttgagcaaaaaattatagcaatcaagaaaagaacggcaggtgaattcgatgcctaa

SEQ ID NO: 125513 - DNA, 282 bp, Enterobacter cloacae
atgagtatcgatcaactttgcatgaaacaagagtgttgggcattggagatgcttggtagggttggcgctttaacgcagtgccctcatcatgagggcgcttatgttgatgagggcatagaagagtccgacatctacaaatacgcagccggagcttataaaaaaagcaacggtagtcatctattcgaaagctttaaagagatgactgatgctgttaaaagcgcatatgaagagcacggtgggaatgatgtctgctcgctttgctgtaagtacgcggaagattga

SEQ ID NO: 125514 - DNA, 432 bp, Enterobacter cloacae
atgagcatgaacaaagacggtatccgtctgcacaaatccaacttttccgccatcggtcagcagatacagccaatgctggaatctggcgactgctatcgcctcatcattaagccctggaaggacaagcgcagcctctcccaaaactctcttctctggatgtggaatagcgacgttgcatctgccgtcaaccactactccgaaagcaagttaaccgaggaagaccttcatgagtttctgaaggatatgttctgtcccgcaaagcctgtaaccgttcttggtgaaaccaagatggtgaagtccaccaagctactcgacaccgaagaaatgaccttctacctgcgccgcattgaagtctggtgtgctgaacgcggtatcaaattgcgaatcccggccaactccgaatatcactcaaaaggacacgaccatgtttga

SEQ ID NO: 125515 - DNA, 573 bp, Enterobacter cloacae
atgtttgaagaagagatttggaaaaaaacttatatatcaagcgattatgaagtcagtaattatggtcgattccgatccttaacgcgcaccgttagcgtgatgagtggctacaagaaggttttagaaggtaaggacttgaagccgtttgacgtgcataccactggttaccttcagataaagattcgcggcaaaaagtatgcagctcacaggcttgtcgccattgcattttgcgacggttacgacgacggattagttgttaaccataaaaacggcaacaaaaaagataaccgcgctgaaaaccttgaatggacaactccgtcaaacaatcttcgtcatgcctatagcgatcttggtgttatcccaaatcagctcggtaggttcggtgaggatcacaacgcaagtaaagcggtaatcgccacatgccgtgttacaggaaaagaggttcgctacgctgccgctatggatgcggttcgtgatgggttcgacagtggctgcattagcaggtgctgcgcaggtcactcatcttaccataaaggctataactggcgatttgagggtgagcgcaatgagtag

SEQ ID NO: 125516 - DNA, 171 bp, Enterobacter cloacae
atgagtagcccactttcccgcgtcatcacaaatcacatcttccgcgttccggcgcgccgccagcgcaagcccgcggttaagccgtccgacatcccgacactgaaggtctacaccgcccgcctggtggatcagaaatggctgcgtctcgcggcgaggagagcgcatggctaa

SEQ ID NO: 125517 - DNA, 363 bp, Enterobacter cloacae
atgaatgaataccgcatcagtctcccatggccgccgagcaacaaccgctactaccggcataaccgcgggcgcacgcacatcagcacagaagggcaggcgtaccgcgacagcgtcggcagaatcatcaaagactcaatgctggatattggcctggcaacacccgtgaaaatccgtatcgagtgccacatgccggatcgccgccgccgggacctggataacctgcaaaaggctgccttcgacgccctgacgaaatctgggttctggctcgatgaccagcaggtcgactactacagcgtgaagaggatgccaatcgtcaaaggcggcaggcttgaactgatcatcaccgaactggaggccgaatga

SEQ ID NO: 125518 - DNA, 1656 bp, Enterobacter cloacae
atgccttctggtcgtctgcaacaacaatttatccgcctctggcagtgctgcgaggggcaatcgcaggagaccacgctgaacgagctggctgagctcctcaactgctcccggcgtcatatgcgtaccctccttaacaccatgcagcagcagggctggctaaactgggaggccgaagccggacgcggtaagcgctcgcgcctgactttcctctataccggcctggcgttgcagcaacagcgggcggaggatctgctggagcaggaccgcatcgatcagctggtccagctggtgggcgacaaagccgccgtgcgccagatgctggtctcgcatctgggacgcagctttcgtcagggacgccacattctgcgagtgctttactatcgcccaatgaaaaatctgttgcccggtacggcgttacgtcgctctgaaacccacatggcccggcagatttttagcggtctgacgcggataaatgaggaaaacggggaactggaagcggatattgcccatcactggcaacaggtgtctccgttgcactggcgcttctttttacgtcccggcattcatttccaccatggacgcgagctggagatgcgcgacgttatcgattccttagagcgcgcccgcacgctgccgctctattcgcatatcgcgcggatccactcccccacggcctggaccctggatattgagctatcgcagccggacaaatggcttccgtggcttctgggctacgtaccctcgatgatcctgcctgccgagtggcgatccctgaacaatttttccagccagccgattggtacgggcccctactccgtttcacggaacaacagtaatcagctgaagatccgcgcctttgatgattactttggctatagggcgctgatcgacgaagtcaacgtctgggtactaccggatctcaacgaagagctgagcgcaggcctgacgctggaagggccaacaaccagcgaaaaggcgttcgagagtcgcctggaagagggttgctactatctgctttttgacagccgcagccatcgcggggcgaatcacgacgtccgcaagtggatcagccatattctggctcccgctaacctgatttatcacgctgaagagcaataccagacctggtggttcccggcctatggcctgcttccgcgctggcaccatgcgcagccagtacgcagtgaaaaacctgccggactggagaccatcaccctcagctactatcgcgatcacattgagcaccggtttatcgcaaggatcatgagtaagctgctggcagccgagggcgtgacgctggcgatacaggaagtggactatgatgaatggcaccgtggagatgttatcagcgatatctggctcaacagtgcgaacttcacgctgccgcttgatttttcgctcttctcgcacctgtatgaagtgcccctgattcagcactgtatcaagcgggactggcagcgagacgccgcacggtggcgggcaggagaaatggatctggccgcctggtgtcaggagctgctggccgggcagacgatcgtaccgttgattcaccactggctgctgatccagggtcagcgcagcatgcgcggcctgcgaatgaataccctgggctggtttgattttaaatccgcgtggtttgcgccgccggagccataa

SEQ ID NO: 125519 - DNA, 2211 bp, Enterobacter cloacae
atggcgctttccaatactgctcagccaattaacacgtcgctgcgtaaaatcgcagccgtcgtagccacagcggttgccggcatgtctgcttatgcacaggccgctgaaacccccaagaaagaagaaaccatcaccgtgactgccgcaccggctgcacaggaaagtgcctggggtcctgcaccgacgattgcggcaaaacgcactgcaacggcgacgaaaaccgatacacccattgagaaaaccccgcagtctatttctgttgtgactcgtgaagagatggacatgaaacagccggggacggttaaacaggccctggcctacaccccaagcgttttcgcaacgcgcggcgcctcaacaacttacgatgtggtttcgattcgtggtttcacgacctccagcaccgtgaataccaaccagtatctggatggtatgaagttgcagggagacaactactctgaagcgtccatggacccgtacttccttgagcgcgtagagctgctgcgtggcccgacgtctgtactgtatggcaaaagccatccgggcggcgtagtgagtatggtcagcaagcgtccaaccacggaaccgttgaaagaaattcagttcaaaatggggacggataatctctggcagacggggtttgatttcagcgacgcgattgacgatgacggcgtgtggtcctaccgtctgaccggtctgggacgtagtgagaacgcgcagcaggaaatggtgaaatctactcgttacgcgattgcgccgtctttcagctggcgtcctgatgataaaaccgatttcaccttcctgagcaacttccagagcgatccggatgcgggttactacggctggctgccacgtgaaggtaccgttgtgccttactatgatgctaacggaaaagcgcacaaactgccgaccgacttcaacgaaggtgatgaagacaataagatctcccgtcgtcagaaaatggtgggttacagcttcgcgcatgaattcaacgacaccttcaccgtgcgtcagaacctgcgttataccaaaatcaacacgctgtaccgttcagtttacggtaacggctatatcgccccggcccagatcagccgtgcctacgtgcgctcagatgaagacctcaactcgttcacggttgatacacagctccagtcgaaattcgcgaccggcgccgttgaccataccctgctgacgggtgtggattaccttcgtatgcgaaatgacattgatgctgactacggcaccgccgatccgatcagcatgaacaatcctcagcacggcaatgcgaacgtcaatgtgaacttcccgtatgccatgctcaatcgccaggagcagaccgggctctatgcgcaggatcaggcggaatgggataagtgggtactcaccatgggtggccgctatgactttgcaaaaacgtctgcctttaaccgtaataacggaaccaccgcggaaattaacgatcaggcatttacctggcgcggggggattaactacctgttcgacaacgggattacaccatacttcagctacagtgaatctttcgaaccgctctctggcaccacccagggcggcaaaccgttcgatccggcacgcggcaagcagtatgaagcgggcgtgaagtatgttccaaaagatctgcctgttgtagtgacggcagcggtataccagctgaccaagaacaataacctgaccgccgatccggcgaacccgaccagcggctttagcgtgcagggcggtgaaattcgctcccgaggctttgagctggaagcgaaagcggcggtgtcggctaacgtgaacgtgacggcggcctacagctacactgatgcacaatacacccacgatacctggtatgaaggtcgtcgtccggcagaagtaccgcgcaacatggcatcactgtgggcggattacaccttccacgagacggcgctaagtggcctgaccgttggtgcgggtgctcgctacatcggtaacacggtgacgtactactcctcagcgtcgcctaaagcctatgagtcctttaacgtcgcgggttatgccctggcggatgcgaccgtgaaatacgatctggcgcgcttcggtctgccgggctcttccgtcggcgtcaacgtgaacaacatctttgatcgtgaatacgtctccagctgctacagcgagtatgcatgctactggggagcaggacgccaggttgttgccacggcgaccttccgcttctaa

SEQ ID NO: 125520 - DNA, 240 bp, Enterobacter cloacae
atgcctcgtcaacctgatatacgtgcagcctttttagcggccatacaacagaatccaaagggatatctttgtttgaacactgacaaattcatcactgaattgcgcgttaggaattggcatttcagccaggcagatgccaatgcatggattaagagataccaaccagactttgctgacaagacaactgacggcagtgataacagatactggatcctgcgtaacatggggagggtgcactga

SEQ ID NO: 125521 - DNA, 267 bp, Enterobacter cloacae
atgtttgttgaactggtttatgacaagcgaaatgttgaagcgctcgaaggggccagagaaatcatactggccgagctgaagaagcgggtgcatcagattttccctgatgccgaagtgaaggtgaagccgatgcaggcaaacggcctgaatagcgacgccagcaaaagcgatcgggaaaaactgaaccgcatgctggaggagatgtttgaagattctgacatgtggctgacctctgagtctcctactgttcgccaggttgggctttaa

SEQ ID NO: 125522 - DNA, 1128 bp, Enterobacter cloacae
atgatttataccactggcactattgccatcagcggaaacacccttacaggtaccggcacaaacttcactgcagctggctcacttattcgtaacggctgcactgttatcgcgctgaccagcccagcgcaggttttccagattaccgcgattggaagcgcaacctctctcaccgttacgccagctgctaaccctgctatccctgctggaaccaaatattccattttgctgagcgacagcctgagcgttgacggtctggcgcaggatatcgctgaaaccttcacgatgtaccagcgctacatgagcgggttcgctgatgtgatgaacggtactacagacgtcactatcacgattaacggtgtggccgttaccgtgccgggccagaaatcactggcgaagaaaggggctaacagcgatataaccagcctaagcggcctgactaccgcgctcagtatcagccagggcggcacaggtgcaaagaatgctgctgacgctcgcacaaacctcggtttgggaaatgccgccactaaggatgttggccctaatactggtaatgtcttaggtgttggatactttggtttcggaactccaggtattaacgttttaggaagtaccgaatcagggttttatggtattgacggctctggtacttcctgggcgccgcaagcaggatctggaattgtatgcgggtatgacccaactcgccgacagcaaatcttcacaggaatatccggtaatctttttgtaagaaacctcatcgcatctgcaatgaacacctcatcatccacaataccgtggacgcagatgcaggcggttgggacatctgatatcaactttaagaaagatatcactgaacttgatacggaaatcgcgctggcaaacatcgatgcgatggagttcgtatcgttcaggtataaggatgacgacagtgaagcagtacgccgtggtgtaatcgcgcagcaaattgaaaagattgacccggaatacgttcacagcgccgagggagtgggcaaaatgacccttgaccttaacccattgcttatggatgctctggccgccattaaggcacttaacgcaaaggtagcagaacttagtaaacaggttgatgagctaaaacaggttggagcttga

SEQ ID NO: 125523 - DNA, 672 bp, Enterobacter cloacae
atggcggagtatggcgttttactgacgaccacgagcggggaagtatgggtgaccgcgaacagctcgccaatcgctcttcaggcgcgaaagacagcggcacttcagggaacatcggggttcaataccaaagtgacgcacacattccccgcaggccagcctgttgtcgccttcgttcattgcacggttgaggtcgaaatcactcagacgataagcgggaacaccatcacgattgattttctcagaccgaatgcaaccggcacagcgtacgtttattttttctctattttcccgcagacaaagccagactacgggctggctgtgcgggatgcatcagggacgctgattttaacaaacgaaacgcgcacgctgagcgatgttgtcactctcggtaccgccggggtggatgccagctcaggatacaacatcaatacaactctggctgggaagtgggcctgtatacctgccatgcttgggctaattaccggggttatatcggctggcggtcagccgcagccttactcggccatttacaagagcatggcaaaacttgatggaagcaataccagaatatttgccagaccgcaaaccacaccgagcggaagcctacagaatgttgcttattcaaatttaagaaacgtgattatggccatcaactgtgcaagttatgattga

SEQ ID NO: 125524 - DNA, 315 bp, Enterobacter cloacae
atggcggaatatggtgttcagacatgggacgcctcaggcaatgtaaataactatggcgttaagcctgtcagcgtttgtggctatctccagctggcccagaaccagaaaacaggctcttacaccgtagcgcttccaccgggttgcaggctgacctattttcagagcatgaacggcgatcagtttggtacgagtcggaggaagatcaccatttcagggggaacagcaacagtgtcagcagtaggcgataccgactactcagcagggactgagcctgcggcagcggcttatctcattttccagatcgagagggcataa

SEQ ID NO: 125525 - DNA, 3792 bp, Enterobacter cloacae
atgtcttcaggtggcggtaaagcatcaaccccaaaactactcgacgacaacctcaaatcaaaacaattctatcgggtactggatctgatatctgaggggccaatcgcgggcccggtggatcaggagcacctgtcttcattcaagctgaataagacgcctatcactgactcgaacggtaatgtcaacgtgaacggcattagtgttgcctggcgacctggatcggaaactcaggagccaatcaacggcttctctgcaatcgaagcgacgaccattgttaacactgaggtcacttacgataccccgctggttagaaccgtgacagatcaggacgtgacccgcgttcgttttaacatcggcgtcaccgggctcatggagcaggactccaagggtaaccagaaaaacacctctgtaacgatggttatcgagaccagaactggctcgtcgggctgggtcatggagaagacggtgacgattacagggaaaatctctggcgagtaccttgaggcgcacgtcattgatgcccccgacaccaaaccgtttgatatccgcgttcgccgcattacgcctgacagcagcagcgatttgctgtcaaacgggactgtttggaacagctacagcgagatcaccgacgacaaccttagctatccgttctctgctgttgccggctcagtcatcgaccgtgaccagtacaccgacacgccgagccgcacatatcatcttcgcgggctgatcgttgacgtaccggataactacgagccaattgccagaacttactccgggctgtggacggggggcttcaaaaaggcatggactaacaacccggcgtggctgttccgtgagctggcgaaaaacacccgatttggcctggcgaaacgcgccggatacatcgatgttgacgatggcgcactctacattctgtcgcaatattgcgatcagcttgtagatgatgggtatggcggcaaagagccacgcatgacgctcaacgcctacatcacagagcaggcgagtgcgcgagacattctcgacaagatagcgagcatgttccgtggcattgcgctgtgggacggcctgcgcctgtccgtaatgctggacgctccacaggatccgattgcgacaatcacgaacgccaacgttgtgaatggcgagttcaaacgaagctctgtaaagcgttcagagaaatacaatgcggttgtagtgtcctggactgaccccgacaacggatgggagcaggtgaaagagtacgtttccgacgatgagatgatagccaaagggaactacaacgaaaccactctggaggcgtttggctgcacctctcgcggacaggcatggcgggcaggtaaatggctgctggaaacagcaaagcgtgaaagcagcagactgtctttccagatggcacgcgatgctatccacttcacgccgggtgatatcgttgaggtcatggataatgactacgcaggaactcgcctcggggggagaattgtttctcattccgggagggtgataacggttgacgcggttgattcctcggtagtaacggacggctccactatgtcgattatggggagggacggaaagttctctcgctatgagattgatggcgttaacggaaacaacgtcacactcaaaaacgaacctgaatgggtgagggcgggaactgtatttgccatttcaaccgcaagcgttgcgattcgccttttccggatactgagcgttgccgaaacggaaaacaactccgtatacagcataacggcctcattgcacgaccccaacaaacaggccatcgttgacgagggtgcagtgtttgaagttcccagcgatacgctgaacggctaccgcgtgcctaacgtggaaaacctgcgaatcctgaacacaaacaccgagaccgtccaggttacagcaacgtgggagacggcaaccactactaaaaagctggtgtttgagctgtacatctacagtgctgatgggaagctggtatctcagtacgaaacagaccagttccgttatgatttttacggccttgctgccggtagctacacgcttggcgttcgtgggcgcaatgaaaacgggatgaaaggcgccgaaactcaggtgagtcttattataggcgcgccaaaggctcctaactccgttcagtggatacccggaccattacaggccactctggtgccagttatgtctgtaacggcaacatcagatacctcttttgagttctggtacgctggcgagacgccaatcccattaaccgatgatattgagaacaaaactcaattcctcggaagggggaaccagtggaccattcaaaagctcaagtttgaccacgtctattacgtttatgtccggacacgcaacgcgttcggggtttctgattttgttgaggcttcaggaaagccaacggatgactttagcgatatcaccaatgcaatcctggaggagattaaagagactgatacgttcaaagacctgatcgagagcgcggtggagagcagtgaaaagttcgcagaactggctgatgcaatcaaagagaatgcaaacggtcttgcagcggcggttggatcgaataagcagacagcagaagcaatcatcggcaacgcgcttgctattgctgatgttgtcgtgcggcagacagcccagcagggcgctaactctgcgaccttcgaacagctccgggaggtgatcgccactgagacggaggctcgcgtcacggatgttactcgtcttgaggcaaaaactgagcagaacgaggcgggaattaccgaggtaaggcaggctatgtcagatgaagctcaggcaagggctactgctgttgatcagctcactgcgagcactcaggtcatttctgataaagctgattcggcttcgagtaaagctgacgatgcatcaggtaaggcagatgcagctgaacaagccagctcacaaaacactgctgatatcaccacgttgcgacaggttgtcaccgacacgacttcatcaatggcatcccgcctggaggagctgggagcaagaaccgatactgccagcggcggcatccagaataacgctatcgcgctaataacgagtacgctggcgcaggttgatcagcaggtgagactcagcgcgcagtacggtgacagtaaggccagcatcgatcgtattgataatgttatggcaagcgacagggaggcaacagcgcgttcgctactgagtttgcagactgacgtgaacggcaacaaggcagcaatcaacagcctgaatcagacgttttccaattatcagcaggccacggccacgcagataaacggcattacggcgaccatcaacgggcacacttcagcgatcaccaccaacgcgcaggcgatagcaaacgttagtggtgacctgaaggcgatgtacagcatcaaggttgccgtggacgcgaatggaaagcagtatgccgccggaatggggatcggtgtagaaaacactccatcgggcatgcagtcgcaggtgctgttcctggcggatcgcttcgccgtcatggcgcaggcggggggagcggttacactgccgttcgttatccagaacgggcaggtgtttatccgggaaaccttcattcaggacggcaccatcggcaacgccaagattggcaactacatccagtccaataactatgtcgctggctcagtcggatggaggctggataagggaggtacgtttgagaactacggttcgacagctggtgagggagccatgaagcagactaatcaaacgatcagtgtcaaggatgccaacaatgtgttgagggtgcagatcgggagaatcacgggaacatggtaa

SEQ ID NO: 125526 - DNA, 240 bp, Enterobacter cloacae
atgagcaaatataattttgaaactgttgacaccgacgtacctgtaaaccatgaggaggtatcatatgcccttcttgcagtattaggtgcactcggcaaatcaattgcaggtgatgaccctaagaagcaagaggatttgctgaaaaaattagaccatgcatatatgtataataatggtttaggcacaacggtagatgttgagatagccagaatggcaaaatttatcaaagcggccctgtaa

SEQ ID NO: 125527 - DNA, 249 bp, Enterobacter cloacae
atgactttggaacaacgcgttgaagcgctggaaatggctattgcaaatatgactgttaagcagaaaactaccgatgaaatgagcgaagctatgcggaaaattgcatccgatacaattgcgagcgcttgccgccctggtggagttttaaatgcggcccatgaaagagccgcaagcaagttgcagaagaaaggggttcttactcaatacgatactaataagaaccctagagttattacagggccgctttga

SEQ ID NO: 125528 - DNA, 2178 bp, Enterobacter cloacae
atgacccagaacgtcggtgatattgaatatgtgatcaaagccgatacggcacagttgctgcgtgctgataagcaggttgcgactgtaactgataacatggatgcagggtttaagaaggccgacaactctgcctccaagatgtccatggcaataagtaaggtttccgcagctatttctgttgctctgattgttgaatggggaagggcttttctgtctgccgccgactccatgaatcagctcaacgcgcgtatagagaggctcactggcagcgcagcgacagcatcgcagactatgcaaagtctgatgcgcatcagttcggcaacgggaggttctctacaggatacagcgaagctatgggagactctcagcacggcgttgcgcgataccggcgcgacgaacggccagatcatccaactcaccgaaacacttcagaaaataggtcgcattggcggatcctcgacagaagaaatggcgaatgctcttcgtcagttcggccagtcaatttcctccggcactgtccgggctgaggagttcaactccatccttgagcaaatgccggaactggcgcgccagattgccgccgggatgggtgtaagcatcggagagcttcgtcagctgatgctggacgggaaactgacggcagaagatgctctcaacgccattcagaagcaaaccagttcagtgaatgcagagttcgataaacttccgcgtacgctttctcaggccaataccgcgctgacaaactcatttcttactatggttgatgatatcaaccaggccacagaggccagtaacggcatggttctggttatagattctcttgcggttgccattggcaggcttaccgggcaggccgccacagcaagtcagcaaatagcagacctccgctctgaggctgagatgtacgccaggcgagcgcggacatggagttggcttggttttggtgactggcagaaagagaacgaggataaatcagctcaactgacagctgaagcttgggagaagtcatccagggcggggtgggatgcagcccaaaaagtagcaaaaaatagcaagccaataacaataaaagccaccatagggtcagcagaaaaaacaggcatcaataaggcaaaagcaaagggaagcgccgacgccgcggccgaagcaatatcaaagcaacaggctgcactatcccgcctcaacaccggttatgccgagggttctttggagctggctaaatacgacgccgttgttgcgctaggcaataaagcaacggacgagcagatcgccaaggcaaggtctcaggccaaggcgatatgggaggtgaccaacgctattaagaaccgcgctcaggcagagcaggctaagcgctttaccgatcaagagattgccgccaataaaacaactcccgacgcctttacaggagacgcgcaagacccggcagccaatataaatcttcaggaacagcggaaactagatgcactagaacagtatcagcagatgggtgttttgagcgtccagcaatacgaagatgccaagacggccattcaggagcaggcagcaaacgccaggaggaaaattgctgtagatgaggccaatgcacaaactgaggcgataggctccattctcggctcggcgtcacaggggtttgatagcctggcgtcaattatcgaaaacacgtctggaaagagcagtggtgcatatgttgccatgttcgctgctgcaaaagcattcgcgatagcgcaatcaaccctgagtcttaacacggcgattatgcaagccatggccgatccgactgctcttacgccagcacaaaaaatggcgaactacgcagccattgcctcggccggagcttccctgctttcgaatattgcaagtgtcaccatgagtggcggtcgtcgctatggcggcacggtatctgctggtaacgcctatcgcgttaacgaggatggccgttctgaaatcttccagaccgccgggggtcagcaggcattcatcccgaaccagtcagggaagatcattcctgctgataaggttggaggaggcggtggggtggtgcagcacatcactttcgaaatcaacaccactggcggcatagacgatgcgaccatggctaagatggcgcagatgatgaagcaggttagcctcagcaccatccgtgaccagcaacgtcctaacgggttactacggaggtaa

SEQ ID NO: 125529 - DNA, 498 bp, Enterobacter cloacae
atgaagaaggtgcttttgtgggctttagtcattggaacatcgttttctgcaaatgctggcgtagagaaattcgggtcgtggattaccaagtcagagacaaataagatgactgatcagactgacttcgtggctattaatacatcaccggatatctacaacaaagcgggttcaagtcgtgagacaagtctcgtactgcgttgcagtgacaataagacggaagtctatttatcgttcagcgactatatgggatccgatagcccaagagtaactattcgactcgatggtggaaaaccagttaagaaggcctggggtggtggggagggcggtgatgcggcatttgctccgcagccaatacaatttataaaggaattggctaaacataaaaaagtaatatttggttttgaaccttacggaaccacgatgcaagtagttgaatttgacctgtcagaaacagataaagttatggaaaatttatcacaggcttgtaagtggaaataa

SEQ ID NO: 125530 - DNA, 513 bp, Enterobacter cloacae
atgcactatcctaccgtatctgtaaacggcgtatccgttcgtgtcgacaatgaagggcgctacaacctcaatgatctccatgcagcggctgtggctgaaggtaaagccactgaatcacagcgaccaggtgagtttctcaaaaccaagcaagtaaggcggttcgtgcaagccctgagcgatgcgaagaaaatcgcatcggttatgaccattaagggtggcccacttcagggttcctgggggcttgagcttatcgctatacgctatgcagcctggctcaatccactttttgaaatcaaagtctatgagacatttcaaatgctgatgcgtcgcgggttcgatgccatgtcccgtctcaacaaaatcgaccacgttattaacaccgaaaccaaagcgatcagtcagtgcgccagccagatggcccggtggggagttggcggacgcaaaaagctactccatgcagcgcgtgatcgcgttgctgatgaggtgcagatgtatttgccgggtatttactga

SEQ ID NO: 125531 - DNA, 438 bp, Enterobacter cloacae
atgcccgttaaaggtatcaagcgtgttcagatgaacacccgcaaggtgctggcagaaattgccgggccacgcacagaaagagtgctgactggggtcatgattgtcggatcgtctcacgctgcgctacttactcccattgacacatccacgcttatcaacagccagtacagaaagcttgagccaatgcccggcgggatgcagggaaaggtcggttacacggctgcatacgctgccgccgttcacggtatgtccggtaagctaaaaggtcagccgcgtggacacttcggaagaactcgcgctggaaaagaattcggcggcggcaccgggaaggggaattactgggatcccgatgccgagccggggttcctgaccaaaggctttgagcgtgacggtctcaacgagattaaggccatcatcaagcaagggtacaaagtatga

SEQ ID NO: 125532 - DNA, 180 bp, Enterobacter cloacae
atggcgtggatatcggttaagaagcggctgcctgagccttttgtcaaagtatgggtgatgaccgacagtggtaagcgcgttaccggatacgtcaaaagcaacggtgactggtatctgctgtgccggaaggttgcggcggagaatccggaggtgatccggtgggaggataacggtgtctga

SEQ ID NO: 125533 - DNA, 447 bp, Enterobacter cloacae
atgcgggctgacgaacagctcgcgccgcgccgcgcgccgctcgtcctgagacgcctgcgaggtgccgggtttagcctccagacggatcccgcgcaggccgatgcgtacaaagataagcaccggcacggtaagcatggccatgacaaagaaggtgctctgccagccgaaggtgttcagcagccagagggagagcgggaagccaattgccgcccctaccggtgtgcccagcagccacagcatggtggcgcgcgcctgcagatgctgcgggaagttgtggcgcacgatggcgaaagccagcgggaacagcggcccttccgccacgcccagcaggatgcgcaggacgatcatcagcgtgtagttatgggtaaagcccatcgccaccatcagcacgcaccacacagccatcatcccggtgagcaggcgcagcggcgcgattttgtcgcctaa

SEQ ID NO: 125534 - DNA, 237 bp, Enterobacter cloacae
atgccgaggcgcgtggtgtcgaaatcaatgcccatcgcctgctggaaatgggtatccgaaaagagcgccgcgatgctgattttgtcgaaaaacgccagcagcacgcaggccagcagcgacaacgggatggcccagcgcaccgctttttcgggcgtgcgggtcccctcaccgctcgcctcaaccggcgcggtgttcgtctctagtgtggtcatctctccccctacgggtgcgggttag

SEQ ID NO: 125535 - DNA, 552 bp, Enterobacter cloacae
gtgaatcattttagctccgtgacaatcacattgatgaaaaatataagttacaaaaaacgtaaggcggacatgatgacggcaagatggcaaggcacgattgcgcttttattactcattattatttcgtacgtcgatcgggtaaatatctcggtaatgattttaaacccggaatttgccgaacattttcagttaaatgaaaacagaatgttacaggatctactcatgacctgctttcttctgggttatggtttttccgctctattattaacgccggttattgaaagcaaacttcattatcggcagggattattaagcagcattgcgatttgggccgcggtctgcgcggtttcgcctttgttaggctcgctgacgggaatggtcatcgcccgcgaaataaccggggtttgtccacaccttcacgctggcctggggaatgttgctgctgcgcatgcggcgcgcagcagcaatcagcgcgtaaggcttattcgccttttttcgctgcctggatgtagagcatttccagcgccagggtcgccgcggccagcgcggtga

SEQ ID NO: 125536 - DNA, 276 bp, Enterobacter cloacae
atggatgcagcattacttaacatgatgcgctcagatggaagaaataaagcctgggcggaaactatggtgaatatggaagccaggaaactggtaaatacagccaacactctgtcggcttttcatctcagcgatagtttgactcgaatgaagtttgttcaggaaattcgggacctcatagaacatcagtttacgttagctcgtcgggctaaatcagatgaagaatgcatggaatgcgttaaaattctcagagaagaaaacagtaacctgctggaataa

SEQ ID NO: 125537 - DNA, 729 bp, Enterobacter cloacae; identical to SEQ ID NO: 119513

SEQ ID NO: 125538 - DNA, 1827 bp, Enterobacter cloacae; identical to SEQ ID NO: 11454

SEQ ID NO: 125539 - DNA, 927 bp, Enterobacter cloacae; identical to SEQ ID NO: 11456

SEQ ID NO: 125540 - DNA, 2124 bp, Enterobacter cloacae; identical to SEQ ID NO: 11329

SEQ ID NO: 125541 - DNA, 300 bp, Enterobacter cloacae; identical to SEQ ID NO: 111099

SEQ ID NO: 125542 - DNA, 1095 bp, Enterobacter cloacae
atgctcagctggctacataacaataatgttattttcccttctgttgaagtgatcgaacggacgcttgccgaagtcgtcacgctcgctaacagatcggtattttcgacacttaccgcgcaactggaaaagcagcataaatcagcactcgacagcctgctcatatcagagggtgaacaaccttcccgtctggcatggctgctacagcctccgggtaaaataaacggtaaaaatgtgctgcaacatatcgaccggcttaattccatcgctgcgctggggttgcctgatggtattgcgctttccgttcaccagaacaggttgcttaaactggcgcgtgagggccggaaaatgagcagcagggacctggcaaaattcaccgatgtcagacgttacgctacgctggtttgtataataatagaggccagggccactctgactgacgaagtgattgatctgcacgagcgtatcttgggtagtctgttcagcagggcaaaacgcacgcaggccgaacggctccagcaaacgggaaagcttattcagagcaagctgaagcagtacgttaccgtcgggcaggcgttacttaacgccagagaatccggggaagatccctggactgcaatagaagatgtccttccctggcaggaattcatcaacagcgtggaagaaacgcggtttctttcccgtaagggcaatttcgacgcgcttcatctgatcaccgaaaaatacagtacgctgcgtaaatatgccccgcggatgctgtcagcattgcagttcatggcgacacctgcggcgcaggcgctcagcgatgcgctggacaccataacggaaatgtaccgtaaacaacttcgtaaagtgccgccatcggcgccaacagggtttatccctgaaagctggcgaaaactggtgctcacgccttcaggcatcgaccgcaagtactacgagttttgcgtactgaatgaactcaagggtgcattacgttccggtgatatctgggtaaaaggatcgcgccgctacaaaaattttgatgattatctcatcccgactgctgagtttgagaaatcccgacataatgaccagttaggggtcggttccggctga

SEQ ID NO: 125543 - DNA, 1182 bp, Enterobacter cloacae; identical to SEQ ID NO: 92418

SEQ ID NO: 125544 - DNA, 771 bp, Enterobacter cloacae
atgctcgattatgctgcttttccggatcaacgacaagctcggatccgtcagatcctgaccgatagtggaagagtggtttgcgcagagctggcgatccagatgggggtttcagagcacaccatacgccgtgatttacatgagctgagcaaagagggcatctgtaaaaaggtctacggcggggcggtgcttcagctgccggaggcgggaagctttgtcagccgcgagcggacgaacagtgcaacaaaagacacaatcgcgcagaaagcggcaacgctcgttagcgctggcggctgcatttttatcgataccggcacgacgaatctggcgctggcgaaagcgttgcctgcggagttaagcatcacggtggtgaccaattcgccggtcattgcggcggcgctgctgcaccatccgctgtgcgaggtgattatgatcggcggacagatccagcgggcatccggcggggcgattggcgcgacggcggtgagccagatccaggggattatcttcgatcaggcgtttatcggcggctgcgcgatggatcctgagacggggctgaccggctttgattatgccgactgcgagttcaaaaaaacggtcattgcccagagtagcgagaccattgtcgcgctgaccccggagaagctccccggcgtggcgcgctacgtggtggcaaagagccgcgacgttgacgtgctggtggtggatgagactatggagagggaccttatcgatacctttgccgcactggatgttcgcattgtgcgcgcgtga

SEQ ID NO: 125545 - DNA, 396 bp, Enterobacter cloacae
atgaatattgcacacgtcgcgctttggacgcgcagcctggacgcccaggtcaggttctgggaaacgatttttggcgggcggagcaacgagcgctacctcagtaaaaaccgccagggatttgcctcgcatttcattacgctggacaacgggccgaccattgagctgatgaccgtccccgacatgcccgacgctcccgcttacccagagtttatcggctgggcgcatatcgccattgatgttggcagtaaagcaaaggtagacagcatggcggagcaggctcgctcgggcggtacgttgctcagcgccccgcgtatgacgggagacgggttttatgaagccgtgattgccgatccggacggaaaccggatcgagcttgtgggtgagtctaccggttaa

SEQ ID NO: 125546 - DNA, 1248 bp, Enterobacter cloacae
atgaaggccgattttttaaaaatcattaaccgtaaatttttcattgccattataacctcgtccaccttcgtgacagggtgtacctttagcgttatatggttctatctcgctaacattgaccggctggatattctttatgatgcgctgagcgtgacgagcgccatcggcatcatatttggtttcactctgctttccctgttcggcttcagtatcgttatatttatttcgtctttcttactgtatttaatctacttatcgaatgaacaatcgcttaagcattatgaaggcttaccctcacgtctcgcaaatgtgagtctggtaaacagcatcatgatttgcatcgtgtttatctccagcatgagtctttattattttcgcaactggaatggacttgccgttacagtaacggcgatcggtttgcttctgttgacaacctggagtatgtcgagatggcagattttcacccgtgcgtatgttgaaattgataatacgctggaaaagaagtacctcgaaacatggccgattaagttcgggttacctgctctattgctcattcctgcgtgcgttcaggtcctcccgcttctgttcgtgaccagccagcttgattttaacagtgaaacgagcatgctcgcacagttagccatttttaccgggctgtcggtggtcctggccgtggtcggcattttcccggggatgatcctcgtaagtgaacagaaaaacatcatccagatgataacgacaatagtgattgtcattccggccctggtgttcctgatgacgattttctttagacccacgccgaacttgcttatcaacatgaccctcaatctttctggcatcagtgactggcggactcaccagtattacatcgagacgcagacgcatccccacgccatgtttgacggagcaacgtggaacacccgttactataaagaaatcccgtcacgattttttatcactggggtaaatatctttgcactgggtaatatacagctcatatgccctggccagattaacgccgcgagagcggcaagcctgaaaacaacggcggatgatttcgaagcttacgatctccgcagtaaagcgctgaagcgcacagccatgaaatgtattccattcaaaaaagagcagatccatcaatgggattcaccgatttccgaccctgtattttatcaaaaagtaaaatcgacaggcagtaacggcattctggatctcctcaaggagattaaaccgccgcacgcatcgtaa

SEQ ID NO: 125547 - DNA, 1395 bp, Enterobacter cloacae
atggcaatgacaatgaaaataccgtctcgcgagttatggtcctactttggctatggtttaggtcagtgttttagctttggtttagtgggttcgtttataaactatttttacaccgacgtgctggggatctcggcgctggcggcaagtaccatcttcctgattgcccgcgcgtgggacgcggttcacgatccgctgtttgccagcattatggacaccattaacagccggtttggcaagtttcgccactttttactgattgcgccgctgctgattaccggcgtcaccctgctggcgttctataaaatcgaagcagacatgaccaccaaaatcctctacgccggggtaacgtatatcctgtgggggacgctgtacgccatctccgatatcccgttctggtcgatgtcgtcggtgatgaccaacgactccggccagcgcacccgcgcggtaacggcggcgatgctcggggtaaacgccgggattgcctgcgccaacatcttcttcccgaagctggcggcgttctttgcccagtacagcaacgataaaggctactttatggcggcgctggtgatgatgctggtggggctgccgctgatgctcaacggctttatgcagatcaaagagcgcgtcccgcccagcccggaaaaggtgacgatgcgcgataccttccacaacctgcgccagaacaagccgctgtttatcgtcctgctgtcgttctttttctgcgtgttccataacgtggcgggcggactctatatctacttctttatcaacaacatgggcgacggcagcctgcaaatggcaattggcgtgatggggatagtggcggcggtgctgtgcctggtcgccccgctgctgacgcgccggatgcagaagcggaagctgtttatgatcctctgcgggctggacgtggcggtgcgcgtggtgatgtggttcacgggctatcagcacacggcgctgctgtttatcctgctcggcctgagcacgctgttcgtgatgatgaccaacatcctcacctcgtcgatgattgccgacaccatcgagtacgcggaataccacacccacaagcgctgtgcagcgatcactttctccgggcagacctttaccggcaagatgtcggtggcggtgggcggcgggttaattggcgtgtttctgacgatgatcaactatgtgccgcaggcgcagtcacagagcgacagcgtgctgtcggggctgttcttcggcatttgtttgttgccggcgattgggtcgctgatccgcatgggctttatgtcgcgctttacctttaccgaggagaagcatgcggagatttgtcggctgctggcggagcgcaggttgagtagggaaggggcgcggggtagcgaagagcgtagcgttcgtcctgtgccggtaaattag

SEQ ID NO: 125548 - DNA, 264 bp, Enterobacter cloacae
atgcttcatgcaaagttaaaaaataatatcctgattggtctggcatgcctcattgcttccttctttatcgtcctgtttcctctgggaggcttgctcgattacttgtctcaagccagcaatgattttttaaatcgtaccggtctggggtttgctgatggtgaagcagacccatcattcctgtgggtgttgtgtgggatgatggtcgtcgttaacgcgctactgatgtatatcatccgaaagatatgcagcctgaaacgtgcttga

SEQ ID NO: 125549 - DNA, 531 bp, Enterobacter cloacae
atgcagatttgtaggatggattacaacgatgtctcagccgatggacgaaggctgaaactacacgtttatggcgttgggacgtttcccgttttttcagggatagaccccgtaaccaatatcgcagagtgtgcctttatcaggaatgctgcattacctgtgggtacgtactggatcgttgatgcaccggaaggcagtattgctaatcgggttgagcggtttgtaaaagacttcaagaacgggaccgatcattctgaatggttcggcttgtttaacgcttcgaccatggctgataacgtatttgtgaatggggtcgacagaggctcatttcgacttcatccattgaggccgaatggtgagggagagtcgtggggatgcataacgttctataatatccctgattttcaactggtcagacaatctttgcttgcacgtaagaagattcgtgttcctggtggtaaagggttgatggcatatggacgtattgatgtgacaggaagggctgattatgcttcatgcaaagttaaaaaataa

SEQ ID NO: 125550 - DNA, 1653 bp, Enterobacter cloacae
atggaagctaaagagtgtaaagttcaagatatccttacagagaataaaagatttattataccatcctatcaacgcccatatagctggagcgttgataatgcggagcaactcattgatgatatttataaaagctcccaatcagatgaaagcgaatatttcataggaagtatgatttgtattagtaaaggacaaaataatttcgaggttgttgatggtcaacaacgtttgacaacattaagtatcattgtctctgaattaaaaaagataatcccattacaaggtatcaaggatgatctgcagaaaagggtcttgccaattgacgtttactcagaggaaactgaagagccaagattaatcgtaaggaaaaaagagtacgagctttataaatattacattctgcaagatttaaaagattataaaccagaaaaaccttcagacaccgatttagttttcatcagtaactctgaagtcataagaaattatttaactcagttatctgttaatgatcttaaattgttagcaaaatatatactccaaaatgtatatattgtatttgttcaaactgatgatattgtttcttcatttagattatttaacgttttaaatagtcgtggcttacctttaagcaatgctgacttattaaaaaatgcactttttgaatcagcatcagcacataataaaaaatcagagcaaatcgagtcggcctggtctcaaattgaagatatggtcggtgtaagaaaacttgataaatttcttaccctccataaactttctgagaaaaaagatcgcgacagagttttgcaaaaaggattcgaatctttcattgaaaacttacaggagcaatttgctggcgatgctattgcgatgtctttaatgttagtgaactctgcaaaaaattacacaaaaatattagaaaatgatttcgaacatccttcaataaggagaaagatagcatcacttagtaatcttggcgtagacgagtggattccacctataatggcattcatgaatcgaatggctcgttccgacaactttactatggaggatttctcacaatttataactagtttcgaaaaggtctatatgcatggctggttgaaaaaacaaattaagagccaaagagaaatggtctgctattcgacacttgttgctgtaaataatgacatgtctttcccttcaataatcaatcagattaatcaacatgccgataatgtcggattttccttggcactcgacgatgacttatatgaacccagacctaaccaagtgaatttaataaaagcaattcttcttcgcttggatatggagcaacaagacgaaagcgttattaaaacatacactggacgaattactatcgagcatatattacctcaggctttagttaatgaatattggatacagagattcaatccacaagaacatatttactggttacataaaattggcaatttaaccctaatcagcggaagtaaaaactcagaagcgcaacactatgactttattaagaaaaaaaccatttatgagaaattaaatagtaagagttcatttgatttaacaaaagatgtatgtaaatcggaatgttgggggattgaagagcttaaagaccgacatgaaaaaatgaagctacagctaaaagaactatggttagtataa

SEQ ID NO: 125551 - DNA, 624 bp, Enterobacter cloacae
gtgctcagtgaaatcagtggtgtgattgcctctgacaagattgagttcaagggtagcaaggagttcacaccgcggatgataaaggaagtattcactgacaagaccttgaacttcatgattgatggtggcgaagatcaagagttcggcaagtccatgaacaatgttaccgaaacggcctaccacttggatttgacgacaagggcatggtttgtctttgatgattgctttgggacttctgaagaaaaacttctgattcaatacattgataagaagtacaaggagctgtccaaggtttattcagaagcttatctgattcggaatgaaaagcatttcaagatttatgcctttgaagatggtcgtccatttgaaccggacttcatcctgtatctgataggtaaggaaaaaacaaatactatgcactatcaggtatttgttgaacccaagggtacacatctgctgaaggctgatgagtggaaggaaaagttcttggtgagcatcaaggagcacttcgaaattgagcagttattctcaaacaagaagtatgttgtatgggggctaccgttctacaatagtagagaaagaatgactgaatttgaaaaagaatttgaaacacttatggcataa

SEQ ID NO: 125552 - DNA, 492 bp, Enterobacter cloacae; identical to SEQ ID NO: 121266

SEQ ID NO: 125553 - DNA, 570 bp, Enterobacter cloacae; identical to SEQ ID NO: 121264

SEQ ID NO: 125554 - DNA, 504 bp, Enterobacter cloacae; identical to SEQ ID NO: 121247

SEQ ID NO: 125555 - DNA, 573 bp, Enterobacter cloacae
atggcattactgggatatgcaagggtatcaaccagccatcagaagctgacagtgcaaattacagagctgaaatcaattggcgttagagatgacagaatttttactgacatgatgtcgggagccacggacgaccgcgcagggttgcagcagctgcttgcccgggcggaaaaagacgacattatcatttgtaccaaaatggaccggctagggcgcaataccgcagatatgatccatatcgttgatgcctgctataaaaaggggattgccatccgttttcttgaaaatggcctgagtaccgaagggacaatggggaaaatggtgattcagattttggctgctgtggctgaggctgaacgggagcgtattctggaacgtaccaacgagggacggttgattgctatggcgtccggtgtgaaattcggacgtaagccccacctgaaatcggactcggccatggcgcttattgatcagaaacaaccagccagagtggttatggaaaaaacaggcatttcgcgggccacttactttcggttaaaaaaatacattaaaaatcagcaatcgaataataactaa

SEQ ID NO: 125556 - DNA, 819 bp, Enterobacter cloacae
atgaataataaaatacctaacaatgtcattggcgcggtgtcttcagtacttagtgaacattattttagccatacgtctttaaattcgctgtttatggaatcaggcgcacctggtgaggtgccaatgggaaactgtgaaaccaaatgcagtaattggctgaaaatttgcaatgaagacgactcgatagatgcaatttcagtattaggcagtatcatccagaattacatggatttacctccgaattcatactctagggctggagctggatctactgtcgaatatgggcaaaaaagaataatcgatgctttatctaagaaccaattagtctacagactcaatggatttatcactaaatcaggttcgactccgatttctaaaacgctagaggattatctgaagtctggcgactactcatctattgaaaatgagtttcttcgtgcagtagagaatattcaaaccgatccgcatgcatcagtcaccgcagcatgtgcgataattgaatctgcattaaaatgctacatagaaaaattcgatttacctatgccacaaaaattgaatgtagcacctctttgggctgccgtgcagccgagcttgaaccttaatgccgacgctacgttagcggatgatcagcacaaaattttaaaaggaatttcatcaataattgacggtattggtgcattcagatcacatatagggagtgctcatgggcgtggtcaaaaccctccgcagatcgtagttgccgaagctagactcgcagtcaatgcatctcacaccttagttgtatttattatggatgttatccatgcgaataaaatataa

SEQ ID NO: 125557 - DNA, 1356 bp, Enterobacter cloacae
atgcttgtgaccatgtcagataaagagctaaaccggataaacgttattcaggcagttatcgataaacgtatgcgtcgtcgtgatgcagcccatcaacttaacctcaccgaacgacaggttcagcgcctgatgaatcgttatcgtgagtctggcgtttcaggattagccagccttcgccgtggccagccaggtaatcacaggattcctgaatcgcttaaactgcggattctggcgctgctacgcgaaaaatatagtgattttggaccaactctcgccgcagaaaaactcagtgaacgacacgatatttcagtatccgtcgacacgttgcgtaactggatgactgccgatggattgtggataccatactcacgccgtaaaccacgagtgtaccagccacgttatcgccgagactgccttggtgagctggtacaaatagatggttcacctcacgactggtttgaaggacgcgctcctaaatgctgtcttctagtatttgtcgatgatgccactggtcgcataatgcatcttcgttttggtgaaaccgaatcagcctttgactacatgcttgctacccgtgaatatgttgagaaacatggtaagccgctggcattttacagcgacaaacacggtatttttcgagtaaatcatgccgccggaagcaaatctggaactcaatttggtcgagtcctgcacgatattggtgttgagcttatctgtgcgaacagccctcaggcaaaaggtcgtgttgagcgtgccaacaaaacacttcaggacaggctcatcaaagaaatgcgcctcaataaaataagcagtatcgaagaagccaatgcttggctggaaacgtttatcgtaaacttcaaccagcgcttcgccaaaacgcccaaatatccaaaaaaccttcatcgccctgtggcagaaacgattgtggatctggatgatattttctcatggcaggaaacccgtaaactctcgaaatcattaacattccgttatgataagatgatatatctggttgaacccacagaagaaaacacccgaattgccggggagaatattaaggtctttgattaccctgatggcaccctcgccttcaaatacggccaccacgccctctcctatcaggtattcgataaactggactgtatcgatcaggggcaaattgtcgataataagcgactcggtgcagtgctccgattggctcaggataaaatggatgaattggatcgtaacggcaaacgtgagcgaagcacaaagatgccgaagcggcgtgctcaggctcgtatacaggaacagttacgagcaattaatccagttctggttaatccaaaagaatttcgtgcgagcttgaaaagataa

SEQ ID NO: 125558 - DNA, 483 bp, Enterobacter cloacae
gtgggacgtataaccacgcccgagccgttatccagctctcatcagctggctgagttcgtcagtggagagacagtcctcgatgaatggctaaaacagagaggtttaaaaaatcaagctcttggcgctgcccgaacgttcgttgtttgcaagacgggtacgaagcaagtagctggtttttactctttggccaccggtagcgttaaccatacggaagcgacaggtagtcttcggcgtaacatgccagatcctataccggtgattatactcgctcgcctggcggtagatgtctcattgcacggaaaaggggttggcgccgatttactccacgatgcagtgctacggtgttatcgcgtagctgagaacattggggttcgtgcgataatggttcatgcgcttactgaagaagccaaaggtttctatgctcaccatggatttaaggcatcacaaactcatgagaggactctgtttctaaagcttccatga

SEQ ID NO: 125559 - DNA, 267 bp, Enterobacter cloacae
atgaaatcagatgttcaactcaacctaagagctaaagagtctcagagagcactcatcgatgctgctgcagagatccttcataaatcgcgaaccgactttatcctggagatggcctgcaaggctgcggagaatgtgatccttgatcgccgtgttttcaattttaacgacgaacagtatgcagagttcatcgatatgctcgatgcaccagtcgaggatgagcccgccattaataaactactggcaaggaaacctcagtgggacgtataa

SEQ ID NO: 125560 - DNA, 231 bp, Enterobacter cloacae
atgagttacggctggctcttcgaaaattcggatgatgacatttcgggttataatcatatcaatctggaacacctccctccggagctaaaacaggttgctctccagatagtacaaaatcagtttgatcgtgatactgcagagaaaaaactggcagaattaatccagcaactcgagtttgatataactgcagcagaactgtcagcatatctttttaaaccgggccatgcctga

SEQ ID NO: 125561 - DNA, 204 bp, Enterobacter cloacae
atgacgaaacaggaatggattttacgactacggcgctgtacatcgaaggaaaccctggaaagggtaatagaaaaaaataaatattctctgtcagatgatgagcttgagcatttcaatgccgcggttgatcaccggctggcggagatgacgatgggaaagttgtatgaccgggtaccgccaggtgtctggaaatttgtgaaatag

SEQ ID NO: 125562 - DNA, 1593 bp, Enterobacter cloacae
atggcaatgaaaactgaatatgatgcgccagccccttttgactacgaagtatggcaacctgatcctgactgggattgttctcccgaattacagccgattgaacgagatactttgataaagctggctcagtatgttgttggacgtcataaacaaaactggtcgaactgtgtaagacaaaggctttctcgcctgataattccactcagagcagcattaaagtggatgaatgccgcatccacaacaaccaattctgcaattcatgacatcattctggaaatgcaccggctggaaaaaaactactggtcatggacccaggacgactggctcgaagtgctgtgcagcagtgaagaggtatttcgcaaaaaatatggcagctgtggtaattgtcgacagtatgtcctcgcgattgcttggttactgtgcggatttaatcgacttgaggcggctggctgcttttatcattatcggctttctgtcaaagtttttggccgcccggcgacagaggcggcggtaaacaagcttcaggagaacatgcagcgcctcggctttgtcgctgctgacaataacattcgtaatgcgctactgctgtctatgctttgtcagcggcaggttgatcctgaaaaattggaactggaaacacttaagcgagtaataacttacgggcctgtttatatgcgtcgctctgcggccaccttgtcaaggatatttgctgcgatggggctgttcccagcgggcattgaccatcgtattcttgagcgcagacggcctcacggggaatatcgtgcaaccagtaacgttccggaagaatggttgcgatggtgtgaacgctggcgtaaaaccgctattaaagcaccatcatctgaactcagtacatggtaccgcatcctgcagtgtgggcgctggctgaaagccactcaccctgatatacattctcctgcagactggagccgggacatcgcacttgaatacgtagctgcagtgtgtcaaatgaaaataggccagtggtctgaaccgcgccatatgtatcagaatcgaataggccagttaatgacagcctctgcacgggcggggattttacaggctatcagagttttttttcgagaccttcaggaatgggggcttattatcgtccgatttaatcctgtcagaacgttccgtttaccccgcgctatccgggccagtattggccctgcaccaagagtcgttgctgatgatatatggagtaaacttgtctgggcagggttgaacctgcaggagcaggatctgcattatggtgaacaactttactatcgctacccattttctatggttcgtgcattatgtgttctctggctgtttggtgggttgcgtcgtgatgaaattttgcggatgcgaacaggctgtatacgctggcaaaatgatgaacatcagggcggctctcggatatgtttgctggatgtccccgtgaacaaaaccagcacggccttcaccaaacctgttgatccaatcgtaggggaatacattgattgctggggtaatgactccaacttattgatagtgttttatgttcagataatgcccgatgactttgtcatgcagctccaccgattttga

SEQ ID NO: 125563 - DNA, 504 bp, Enterobacter cloacae
atgccgggcaaccgcccgcattatgggcgttggcctcaacacgattttacgtcacttaaaaaactcaggccgcagtcggtaacctcgcgcatacagccgggcagtgacgtcatcgtctgcgcggaaatggacgaacagtggggctatgtcggggctaaatcgcgccagcgctggctgttttacgcgtatgacaggctccggaagacggttgttgcgcacgtattcggtgaacgcactatggcgacgctggggcgtcttatgagcctgctgtcaccctttgacgtggtgatatggatgacggatggctggccgctgtatgaatcccgcctgaagggaaagctgcacgtaatcagcaagcgatatacgcagcgaattgagcggcataacctgaatctgaggcagcacctggcacggctgggacggaagtcgctgtcgttctcaaaatcggtggagctgcatgacaaagtcatcgggcattatctgaacataaaacactatcaataa

SEQ ID NO: 125564 - DNA, 585 bp, Enterobacter cloacae
gtgcagacagaagttctggatctccgagtccttaataagcggcagctcaccgattttgatgtcggatgcgagaccgtcgcgcctgagcattttcgccaccgctttcgggtcgtcagtcagctggcgccctcccgttatctcgtcctcactctgctgcttaccctgatggcccagaatccaggtggtgacaaagaaggtaataacgcacaccacggccgcgatgatggcagcaagaataaaggccgtccagacctggtcggcgcaccactggatatatttgtcctgcagtatttgctgcgcgttgtacttcagctcatggccgtaataacggatggtatagacaggctgggatttaaaaatatcgcgcatgggggccagcgtctgacaccagtaataaaccatgccgttcacgaacgtctgccaggtcagtttaaccgacagcgtaatcgcgacaatgatgccgaagagaatgacgagacagtacacgatgatattggcaatttgactgaacatacggatacgcatgctcgcgatctgaccgccctgggtcatatccttagcatggtgatgctgccaacttactga

SEQ ID NO: 125565 - DNA, 696 bp, Enterobacter cloacae
atgttcacgtgcagccagcgcggcattcaggcgttcctccgctttcccgtcgatggtgcgcggaatgaattccggtgccacctttggacgctgctgatacttcagcgccattttcacggcaggataaggtccgggaagcgtgacgtagcaggagagatccggcaacgtctggacgtcggagtaactcaccagggtgacgcgctccatgtccttgccgaccgaggtaccgtcgcgtaccgggtccacaccgtaggaatactgctcggacgccttgaggatttctttttcaccgatttcgccagcggcgaactcggcgatattgcgcgacggcgagcggaagaaggcacgggtgttcagcacgtcgaacagcgtttccgccggcttctgcccgtaaatatcttccagctgggcgtaggactgaatgccaatgacgtagcagccgccaaacttacgcgcctccggcaggatctcaaccaggtccggcagcttgtgcagggtaggcagctcgtcggcgaagatccacacgcggcggttacggttttcccccatcgccagcagcccgcgaatggcgatggacaaccacatggagataaccggcttgagggaagcgtgggtgtcagcattggaggagataaacagccagccgtttttaccatcctcacgaacgccgcgcatccagtcgcgtatggtgaatga

SEQ ID NO: 125566 - DNA, 342 bp, Enterobacter cloacae
atgaacaacccatcaataatcgactcgatggttgacagcatgctgagcatagagcgcaaagacatgctgatagatgcatgtcgtaaacttttcattgaaaaggatttttcaaacatgcgaccatccgttcaggaggaattaaaagccatcttcgatgaagataatattcctgtttctgaatctcctcgattagcgttaggaatgagtgctctgcttctggcaaaagaatcaaacaatgacgcactggaactattagcaactcaaattatgaatatatccgataaagcaacgttgcagaaagcattcgaaatggtcagacaacagctattcgatcctcgctaa

SEQ ID NO: 125567 - DNA, 876 bp, Enterobacter cloacae
gtgcgggaaggtgtgactgacgcccagaccctgttctcccattaccgtcaggtcaaaaacccgaacccggcattcacgccgcgtgaaggcaaaaagacactgccgttctgtcgtaagctgatggcgaaagccgaaggcttcacgtcccgttttgacttttccatccatgtggcgttcttacgctcgctgggtaaacgtcaccggatgccgccactgttgcgccgccgggccatcgatgccctgctccaggggctgtgtttccactatgacccgctggccaaccgcgttcagcgctccatcaccaatctggccatcgagtgcggtctcgccaccgagtcgaaaagcggtaatctgtccatcacccgcgccacgcgggcgctgacgtttatggcggagctggggctgattacctatcagaccgagtatgacccgcagattggctgcaatatcccgaccgataccaccttcacgccggcactgttctccgcgctcgacgtctctgacgtggccgttgtggccgcgaggcgcagccgtgtggaatgggagaatcagcagcgtaagaagcagaacctgaagccgctggagatggacgagctgatagcgaaggcctggcggtttgtgcgcgaacggttccgcagctaccagtccgaacgtaaacagcatggcctgaagcgcgcccgcgcccgacgtgacgcggacagagcccgtaaggacattgtgacgctggtgaaacagcagctgacgcgtgactacgccaaagggcgtttcgtcggcgacagggatgctctccagcgtgagctggagcggcgcgtgaaagagcgcatgctgatgtcgcgtggtaacaactacacgcggctggccaccgtccccatataa

SEQ ID NO: 125568 - DNA, 279 bp, Enterobacter cloacae
atgtcgcagatcgaaaatgcagtaacttcctcatcgaaagaaaagcgttcttaccgaaaaggtaagccgatgtcggcgagtgaaagacagcttgccgcgattgcgcgtaaacgtgaaacacataaagaagtgaaggtttttgttaaaaatcctcttaaagattggatgattacgatctgtgaagaggaagggctcactcaagctcagtttattgagaccttactcgaacgtgaactttctgaacgcggcgttctcgatgtaaagacttcacattcttga

SEQ ID NO: 125569 - DNA, 546 bp, Enterobacter cloacae
atgcgtaagttcacctttcgccagctggccgtgtccggtctggtatgtctttcgctgagctgtattcagcccgcagcagcggcatcctccgttcaggtcggcttttcacctgaaggcagcgcgttgcagctggtccttaagacgattgagtcagcacagcaggaaattcggctgatgggctactcatttacgtctccggaggtggttagtgcgcttgtcagggcaaaacgtcgtggtgtggatgtgaagatagtgcttgatgaaaagggcaaccggagcaaagccagccaggcggcgatgaacatcgtggtgaacgcgggaattccgctgcgcaccaacggtcgctacgccatcatgcatgacaaagtcattattgttgataatcatacagttgaggctggtagctttaactacactcgctctgctgcatcgcggaatagcgagaatgtgctggttattaatgaggtgccggaagtggcacaaacctaccttcagcactggcagtcgcgctgggacggaggaacggactggcattcttcatactaa

SEQ ID NO: 125570 - DNA, 792 bp, Enterobacter cloacae
atgaataaaaccctttcagtcatgcttgccgcaggccttctggtctccggcgtggcgggggcagcagagaaacctgccgttgcctttaccccggaacaggaagcccgcattggtgaaatcgcgaaagactacctgctggctcatccggaagtgctggttgaggtcagccagaagctgcaggcccaacagcaggagaagcagcagcaggcgatgacggccgccgtggttcagaatcaggcagcgctgctgaacgataaaggcacaccatcatatggtcctgctgatgcgaaagtgacggtcgttgaattctttgattaccagtgcatctactgtgcccgcctggcgccggaactggagaaggtaataaaagctaacccggacgtgcgctttgtgttcaaggaattcccgatatttggccagcgctggccggcgtcgctcagtgcggcgaaaaccgggcttcagatctggaagcagaagggggccgatgcttaccttaactatcacaacgcgatttacgctaccgcccacaacgagggtaagctgaccgatgctgatatcagcgcggccgcaaaagccgtgaagttcgatgcgaaaacagccccagatgttcaggggaccctggatggcataaacacacttgcgcagcagctgggcttcagcggtaccccggccctggtggttctcccgtcagccggcgccagtgctgataacgtgacggttattccgggatacaccagcgcggaggccctgcagcaggccatcagtcatgctgccggtgataccaaaaaataa

SEQ ID NO: 125571 - DNA, 720 bp, Enterobacter cloacae
atgacagagcaggggcgccccacgctgacgctgcgccgcaaagcggagccagaaggtcagcgtgccgtaagcaacagtgaaccggacggtgcgggtccgggccgggtcacgcgtaaaaagaccgtggtggtgaacacgacgcctgcctggaaggtcaggaagcaggcggtggatgagagcgcgaaaaaggcgcaggcggacgagaaggccgccagaaaagcagagaaagcccggcagtgggctgagcgacaggcccaggagagggaggccatgcgggcggccaggcgcaaacctgccccggaaccggtgtaccggaaggtcatgccgcttgcggacgcgctcgcgctcctgaagcgttgctggccagccctggtgacggacggccagccgcagctcctggcggtcaacatccgggaggcaatggtcaatgacattcgccggcgcgggctggagatttccgtgaagacgctgaaacgctgccttgccgccgtcacccgctcggatgcgtatctgggcgccatgacggtgggcgcgtggcgtaaaaaccttgccggtgaaccggtcgcagcggtgagtgcggaggaggcggcgtatgccgtggagcgcagggctcaggagcacgctaaacgacagcgcagggcggttagaagcgtcgccacccgtgcacggaacgaactgataacaaccgagaagagaaaaacacaggatgaacatgaataa

SEQ ID NO: 125572 - DNA, 738 bp, Enterobacter cloacae
atgcgcgctgaaaaccatccgctcttcccccttgtggtggtggccgactgctggctgcagcgtctgcttgtgtggacgccgggccagaccgaccttatcaaaaccgtggcgctgctgctgatggtggccgaccacatcagcatgctgtgcggactggataatgactggctgcgtcttgccggtcggggagcgtttccgctctttggcctggtctgggccatgaacctcgcccgccatccgcagattcagcagcgcgccctgaaccggctctggatatgggccggggtggcgcagggcggctggatactggccgggctgcgcccggacctgggcaatattctgtttgcctttgcggtcagcggacaggcactggcgatgatgcagcggcacgggccgcgcacgtggccgctctccctgatgctggttctggcctggctgccgttttcggcgggaagctacgggctggcgggggtagtgatgctgatgctggcctgcggcgtatgtatgacgggccggcgcaccacgcgcacggggctggcgctgtgtctggcactggcgatactcgcgctgaatgccgcggacagccccgcctttgccatcgcgggtctggtaatacccggcgttaccctgacggtgctgagccggacctgttgccgcgtgccgaggttctggccgcgcgaatttttcccgctgttctacgcggtgcaccttgccgtcatcggactgatggtgatgtga

SEQ ID NO: 125573 - DNA, 5241 bp, Enterobacter cloacae
atgatgagcatcggatcggtaaaatccgccggcagcgcgggcaattattacaccgacaaggacaactactacgttatcggtagtatgggcgagcgctgggccggaaaaggggctgaagcgctggggctcagcggcggggtggaccagaaggtctttacgaaggttctggagggacgcctgccggacggcagcgacctcagccggactcaggacggggcgaacaaacaccgtccgggctacgacttcaccttctctgcgcccaaaagtgtctccgtgatggccatgctgggaggcgacaagcgtcttattgaggcacacaaccgcgcggtggagaccgccattaagcagatagaggcaatggcctccacgcgggttatgacggagggcaggagcgagacgcagctgaccggcaacctggtgatggcgctgtttaaccacgataccagccgcgaccaggagccgcagctgcacacccacgcggtggtggccaatgccactcagcatggcgatgagtggcgaacgctcagcagcgacaaagtgggtaaaaccgggtttattgagaatatctacgccaaccagattgcctttggccgcctgtatcgtgccgcgctgaaggatgacgtcgcggcgatgggctatgagactgagacggtcggcaaacacggcatgtgggagctgaagggcgtaccgacggagccgtattccagccgcagcaggaccatcagcgaggcggtcggggatgacgcgtccctgaagtcccgcgacgtggcggcgctcgatacccgccagtcgaagcagaaggttgaccccgaacagcgcatggccgagtggatgcataccctgaaagagacggggtttgacattaaagcctaccgtgaggcggcagacctgcgggttgtgcaggggaatattcccgcaacgacgcctgaagccattgatattaacagcagcgtcgggcaggccatcgcgatgctgagcgaccggcgggcgcggttcacgtattccgaactgctggccaccaccctcgggcagctgcccgcgcggtcgggcatggtggagatggcgcgtgacggcatcgatgcggcgataaaaaatgagcagctcatcccgctggataaagagaaggggctgtttacctcgaacatccacgtgctggatgagctgtcggtgtcggcgatgacccgcgatttacagcggacggggcaggccgacatttttccggataaaagcgtgccccgcagccggtcatacagcgatgccgtgagtgtcctggcccaggaccgtccgccggtggcgatcatttcgggtcagggcggggcggccggccagcgtgagcgcgtggcggagctgacgatgatggcgcgcgaacaggggcgtgacgtgcagattatcgccgccgacaggcgttcgcgcagcgcccttatgcaggatgagcgcctcagcggcgagcatatcaccgacaggcgggggctgacggagggcatggcctttacgcccggcagcacgctgattgtggaccagggggagaagctgaccctgaaagaaacgctcacgctgctcgacggtgcgctgcgccataacgtccagctgctgattgccgacagcggccagcgcaccgggaccggcagcgccctcaccgtcatgaaggaagcgggagtgagcacgctcgcgtggcagggcggtgagaagacgcaggtctcggttatcagcgagcctgaccggcggcagcggtatgaccgcctggccgctgactttgcccgaagcgtccgcgcaggtgaacacagcgtggcgcaggtcaccggtccgcgcgagcaggcggtgctcgcaggcgtagtccgcgaggcgcttaaggcggaaaaggtgctgggcgagcgggaggtcagtatcaccacgctggagccggtctggctcgacagccgccatcagcaggtgcgcgaccactaccgggaggggatggtcatggagcgctggaatgccgaagagcgcagccgggaacgctttgtcattgaccgcgtgacgggccgcaacaacagcctgacgctgcgcaacgcccagggtgagacgcgggtgacccgcctgtctgaactcaacagcagctggtcgctgtaccgcaccggcacgctgcaggtggccgaaggcgaccgtctggcagtgctgggtcaggcgcaggggacgcggctcaggggaggcgatacggtgaccgttaaggcgctcggggaggcggggctcgtcgtcagcctgccggggcgtaaggcggacgtggtcctgcccgccggcgacagcccgtttaccgccgcgaaggtggttcaaggctgggtggagtcgccgggccgctcggtgagcgacagcgccacggtttttgcctcgctgtcgcagcgcgagctggataacaccacgctgaacaaactggcgctcagcggccgggcggtgcggctctattccgcgcagacggcgcagaaaacgacggagaagctgtcgcgtcagtctgcctggagcgtcgtgtccgaacagattaaggatgcggcggggcatgacaggctcgatgatgccctggcgcaccagaaggccggtctgcacacgccggagcagcaggctatccatctggccattccggtgctggaggggaacggcctggcgttcacgaagccgcaactgatggccgccgcgaaagaatttgagcaggacagcctcagcctgcaggccatcgaaaaggaagcggaccgtcaggtgcgcagcggcgacctgctgtcggtgccggtatcgccgggaaacggcctgcagctgctggtctcacgccagtcgtacaacgctgaaaaaagcattatccgccacgtccttgagggaaaggaggccgtcaccccgctgatggataaggttccggacgcgcagctggcgggcctgaccgacgggcagcggaacgccacgcgcatgatacttgaatcccccgaccgctttaccctggtgcagggctacgccggggtgggtaaaaccacccagttccgggcagtcatgtcggccatcggcacgctgccggaacgggagcagccgcgcgttatcggcgtggcccccacccaccgggcggtgagcgagatgcgcgatgcgggcgtgcctgaaacgcagacgctggcggcctttattcacgacacgcagcagcagctgcgcggcggcgaacgaacggacttcagcaacgtgctgtttctcgtggatgaaagctcaatggtcggtaacgccgacatggcgaaggcgtacagcctgattgccgggggcggggggcgcgcggtctccagcggggataccgaccagctgcagtccattgccccgggccagcccttccgcctgctgcagaagcgcagcgccattgacgtggcggtgatgcaggagatcgtccgccagacgccggaactaaaacctgccgtctacagcctgattagccgcgatatcggcagcgccctgacgaccattgagagcgtggcgccggcacaggtgccgcgcagggcggatgcctggcagccggacagctccgtcatggagttcagccgcgaacgggaggaggccattgcgaaagccgtggcggccggcgacctgatgcccggcgggcagcccgcgacgctgctggaggccatcgtgaaggactacacggggcgcacgtcagaggcgcaggcgcagaccatcgttatcaccgccctgaacgccgaccgccgccaggtgaacgccatgattcatgacgcccgtcagggtgccggcgaggtgggcgaaaaagaggtcacgctgccggttctcacgcctgccaatatccgcgacggggagctgcggcgcatggcaacgtgggaggcatcccgcgacagcctggttctgctggacagcacctattacagcattgaggcgctggacggggaggcgcacctggtgatgctgaaggatgcgcagggcaacacccgcagcctgtcgcccgcgcaggcggcgacagagggcgtcacgctctaccgtcaggacaccattaccgtgtcggaaggcgaccggatgcgcttttcgaaaagcgacaacgagcggggcttcgtggccaacagcgtctggtcggtcagtgagataaaaggtgacagcgtcacgctgtcggacgggaaacagacccgtacgctcacgccgtcagccgagcaggcagagcagcacatcgacctggcctatgccgtcaccgttgaaggctcacagggtgcgagcgagcccttctccatctccctgcagggtacggacggcggacgtaagcggatggtgagcttcgagtcagcctacgtggcgctgagccgcatgaagcagcacgcgcaggtctataccgacaaccgggataagtgggtggccgcgatggaaaaatcgcaggcgaaaagtacggcgcatgacattctggagccgcgcggcgaccgcgccgtcgcgaatgccgcccgcctgacggcgacggcaaaagcgctgggtgaggtgcctgccggtcgcgccgcgctgcgccaggccgggctgcagcccgagggctcgatggcgaaatatatctcgccggggcgtaaatacccgcagccgcacgtggcgctcccggccttcgaccgcaacggcaggaaggcgggcgtctggctgagcgccctgacgtccggagacgggcagcttaaggggctcgctggtgaaggccgggtgatgggcagcggggacgcggcgtttgcgggtctgcaggccagccgtaacggcgagtcgctgctggcgcgggatatggaagagggcgtgcggctcgcgagggagaatccgcagagcggcgtggtggtgcggctcgaaggcgaggcgcgaccgtggaaccccggcgccattaccggcggtcgggtctgggccgacggcctgcccgatgccactggtacgcagcccgcagaaacggtgccgccggaggtgctggcacagcaggcccgggaggctgaggtgcagcgggagctggataagcgtgccgaagaggcggtccgcgagatggcccgcagcggcgacaggccggccggaggggctgacgtcgccgtccgggatgtggtgcgggatatggatcggataaaagaaacgccggcatctcccctcacgctgccggatgcgccggaagaacgccgccgggatgaggcggtgtctcaggtggtgcgcgagagcgtgcagcgggaccgcctgcagcagatggagcgcgaaacggtgcgagaccttgagcgtgaaaagaccctgggaggcgactga

SEQ ID NO: 125574 - DNA, 213 bp, Enterobacter cloacae
gtggagcctgagctgaagacaaaggcggaagaggcagagcagctgccgcccggcatcagtgaaagcggtgaagtagtggatatggcggcatgggaggcgtggcaggcggagcaggacgaactgtctcctcaggagaggcagcgtcgtgaagaagtgaacatcaacgttcaccgggcgcctgaaaaggatcttgagccgggaggatacatctga

SEQ ID NO: 125575 - DNA, 342 bp, Enterobacter cloacae
atgacggaattaaaggcgataggggtcaagcttgcgcttgatgattttggaaccggtcatgctaatcttaattacctgttgaaatatccttttgataccttaaaaattgataaggaatttgtcaccgctattgagcccgacacccgatcgacaaagattgttgagggtattatttcactggcgcataattttggtatcgaagttcttgccgaaggggtggaaacccagtcccaactggaccggttgatgcagattggttgtgacaaaattcaaggctttttcatttctcccccggtgcaggcacaagagatcccttcactcttagcgcaatataatcgttaa

SEQ ID NO: 125576 - DNA, 7221 bp, Enterobacter cloacae
ttgggaagaaatgacctgcttattcgcaccttccctaacaaaaatgccgaagccacgaccagcgcttcaggctctatcgtagttgatggtgaaggtagtgtcggtaaccgtaactatgccgtctgggctgaaggtggcaaagatggaaaggcagtggtcaacgtctattccaacatcacgctaaacaaagccgggaacatcggcgtacacgtgcgtgataacgccgtcgctaacgtcgacagcctgagtagcccggcattcaacagcaccgatcagattggctattacctgtatggtaaaggcgcaactgcgaatattggtcaggcggtaatgaatgacaacgggcaggatcgcaccaccattttccgtattgccaacggcgcaatgctggccggtaacaccaccactcctgacggtcagcccagctcaaaccttgacctgaccttaagcggcgaacagtccgttggcgtattagcgacgggcacaggcagtagtgtggataccggcgaagccacgttcaccgtgcagggcaccgactccgccgcgctgctgattgaaggcggtgccacaggtaacatcagcgataaaaccaccatcaatttaaccggtgaaagaaccattgccggggtagtggacggtcaggctcaccagttgaatggcaacgcagagggtagcgccactccgaccatcctcacttcaaacgcaaaaatcacttcagaagccagcggcaacaaggttattgcctatgtggcaaggaaccagggcagcctgatcctcgatacccaggcaattatcgatcttgccagcaccgacagcattggtgttaacgtgcaacaaggcgggagtttaaccaataacgcgaccgctgccttacatgtgagtaacggcattggcgtacaagcttctggttcgaacgcacagattaaaaaattgggtcagattcaagttgatgatggaaccgcaggggttctgctgaccaacggtgccagcctgaatattactggtaatactggcgatgccatcaccaccaatggcactgctgacggtattcgcctggacaccggagccggtaagctggctgccaaaggggtgattattagcgccgaaggtactggcgcgggcattcaaaacgatgccaacaataccgatatcacactcaatgatgtcaccatcaatgccaacgacggtccggggatccgtaccagcgtcgcgttaaacatgaaagatggcctgaataacattctgaacgttaacggtaaaggtaccggcttcgcctttgagcagcgcaatggtgacgcagtgacaggcaatctgaccatcggtaaaggctataccgttgaggtgcataacagcgaaggcagcggtatccgcgccaatacggacggtaaggtcaccaccaatgccaatatcaacgtctacgacagcgcaggtggttctgcaatcatcgctaaaaatgttagcgcaatagccaatagcggaaaaattacctctgccagcaccaccgcacccgttattgatgccagcggtgacagcaataaaaaaatcaccaataccggtacccttcaggctatcaacgatacggcagtggcgattcaatctggcaagggcaatgacaccattgatatcagccagggtatcaccagtggcgtgatcaacactggagaaggcaaggacacctttaactggcaaagcggaacctttgcgggcgaggtgaatttcgccggaaccggcggcaacaataaagccaacatcggcaatgtgacgctggataaaacgcgccatatcactaccgaagccggcagtggcaacgccctcaccttcaccaatacacacggtaacagtgcgaaaattggcagtctgagcagcgataacctgaccaccggtaccaacatcggcacgggttgggactcactgaccattagcggttcaagtgcagatatgcgcatcgtcgatcgtctgcaactggcaagtaaaaccattgcggttaccaatggcgcaacgctgcgtaccggcgatcacggcgagtccaccagcactgccgcgaccatcgctgactacaatgtgacgactcagggtacaggcagccgggtcatctttgacacgcagggcgacacgacggctgcgcagatctataacggcgtcatcagcggtgatgggaagtttgaacgcgcggcaggcggcaccactgtctttaccgccaacaacacctataccggctccaccactattgatcaaaccggtacgctgcagttgggtgacggcggaaatacaggcggagtcaacgccgtgtctgacatcatcgacaatggcgtgctggcgattaatcgggccaatgatgtgctgcttggcggcgtaatctccgggatcggtgcgttacagcagattggtaacggtattactcgcctgacgggcaataacacctataccggcgacacgaccgtcaccagcggtacgctactggtgaaagggaatcagagtgccgcgacgggtgtgaccaaagtaagcggtacggcgacgctggggggtaacggggtgatcggcggcgacgtgctgatgaacgatgcctctaccctcagcgccggtgacggcggtgcgggtacgttatccattaacggtaatctgcagcttggcagcaaaacgacctccgctttcgaactgggtcaagcctatacgccaggcggcgcgctaaacgatctgattaacgtcgcaggcgatctgcaactggacgggactctggacgtcaccacttcacagggtggtaacttcggaccgggcgtgtaccgtatctataactacggtggcacgctggataaccagacgctggaattaggcgcgataccgaatagccaggataagagcaatatttttgttcaaacctccatcgacaaacaggtcaacctggtgaatgccaacggcgttaccctgcagttctgggacggcgcaaccgttaatcagagccacggcgcgtcgggcattgaaggcgacagcaaaattgacggtggcgatggcaaatggatggcaatcggcagtcagggtgataacaactggaccaccgcaaccggtgagggtaacgccccttgggcacagaagtccttcgccgtcttcaccaccaaaggcggtaccgttaccgtggataacgccgcgggagaagttaacttctccggagcacagtttgatgccgatggctatgtcgttaaaggcgatgcgcttaacgcgtatgccaccacggaaaacgcgacccacgcaggccagacgccggggactggcgaactgctggtgcgcgttggcgctggtggcgcggggcaaaactataccgcgaccattgagtccgttatccgcgaggccagtactgctgacaagctgacgctggtgaaaaccgaccttggccgtctgatcctcagcggtgacaacgaatatcgcggcggcacgcgcattgatggcggcacgttgcagatctcctccgacagcaatctcggccagagcggaactgacctggccatcaataacggttcaacgctgcaactgggcgcggacctgaccagcaatcgcaccattgagctgggagcgaatgagaatgctgcggtgtttgaccttaattcgcaccacttcacgccaaccggtgagattaccggcgagggtaaactgaaagttaccagcagctctagtgatgcgggcagcaccttgtcgctcgaccgcgcaaacagctacaaaggcgacaccgaaattgccggtaccggaaacgccaacaatgtgacggtcaacgtcagcaaaaccggagcctttggcagtaatgaaagcagcaccgtgaacgtcaataagggtgcgacgctcaatgtcagcgggacagataccagcctgaaatccctgactatgaacatcgccgacagcctgttaacgctggcggataacgtcaccgccgcaagcgcaatgctgaacctgacgggcacggcgaaagcggtgttaaccaacaacgccagcgcgggcaacgcgacggttaacgtgtcaaaagacagtaccctggcgctggaagaaaatgccagcgggggcaatgccaccgtgaataacagcggactgatgacctttgctgactatgcgatggcagagaacaccgtcgttaaaaacctggttggcggtaaggtcgatatcagcgcagtcgacagcgcaacgtctatcggctcgttgtccggcgcgggtaatgtcgaactgggcaataaagaactgtcgctgggtaatctgcatcttgatgacaccatcagcggtattatcagcggcaacgacggcagcctggtgaaaatcggtgacggtacgttgacgctgaccggcgataacacttacaccggcaccacagacgtcaatgaaggcgtgctgctggtcaacggtaatcagtctgcggctaccggccaggtgacggtgaaatccggggcaacgctcggcggtaacggtattatcggcggcgcggttgatgtgctggacgacgcgcatattaccgcaggtgcagctatcaacagtgtgggtaaactgactaccggttctctgacgctcagtgataacgcccaactggattatcagtttggtcaggcttataccccgggcggtgccttcaacgacttgattgacgtaaatggcgatctgacgctcgacggtaagctcaacattgaaacctcaccaggcggaagctttgatgtgggcgtttaccgcgtcatcaactacaccggcacattgaccaacaatgtgatggatattgctaacgcaccggaagcagctgacagcctgtacgtgcagacatcggtgaaaaatcaggtcaacctggtcaaccacgccggactgacgctgcgcttctgggacggcaccggcggtgagaatggcgagctgaaaaataacggcgtcattaacggcggcgacggtatctggcaatccagccagggtaacgacaactggaccaccgatgaatcgacgccagaaggcgcgttgaacgcaccgtttaccgatgccgcattcgccgtcttccagggtgaagcgggcaacgtaaccgtcgataacagcaaaggcgatgtcatcatcagcggcgcgcagttcgccaccgatggttatcgtgtgggcggagaagccattaccaccgacacggcaaacaccctgattcgtgtcggcgatggcacagtagacggcgccagttacaccgccactatcgacagcgttatccgaggtaccggcggcctgaataaaggcgatctcggtacgctgattctcaccggcgacaatacttacagcggtggcaccaccatcacctcagggacgctgcaggtggcgggtgataccaacctgggtgcggcagatacgggaattacctttaatggcggtacgctgaagtatggcgaagcgtttgatactgcccgtcaggtgacgctggaatccggcggcgggacattcgacaccaacgggcatgacgtttctctgctgacggaagtcgaaggtaacggtcaactgaccaaaaccggtaaaggctccctcaccctgacgctggataacacctacaccggtggcaccaccatcgaacaaggtgttttacaactgggtaacggcggtgatattggcagcattcagggggatgtcgttgataacggcgtactcaacgtcaatcgtggcgataccctggcgctgaccggcaatatcagtggtaaaggccagctgcatcagaccggtagcggcattaccgagctgcaaggtgaaaacagctacagcggcgctacgttgatcgccaacggcgtgctgcaagcgggtaataccaacaccctgagtagcgcatcacaccactatgtagtcgcagacaccacgttgaacacgcagggctataaccagacggtagcgggcctgagcaacggtggcgatgtctcgctcatcggtcagcagactggcacaaccttaaccgtcaaaggggattacaccggcgaaaaagggactatcaacatggcagctatccagaatggtagcggagcaggcattgccgaccgtctgattatcgatggcggtaaagccagcggtagcacactgctggatgtcgatggttctggtcttggcgcgccgaccattggggatggtatcgaagtggtgactgcgctcaatggcgcaaccacaaccgcgcaaacgtcgcgggatgccttccatcttgccgccgatcgtatggctgcaggtgcgtttgagtaccaactacatgcgggtaatgctcagggccagggtgaaaactggtatctgagaagtgaataccgtccagaaaccatgctgtattctggcctcgccagcgtagtacgtcagggtgatattagcctgttaggtaacatgcaccaacgtatgggggacgaggttaaaccgggcattgatgaagacaatcgcgcctgggcaagaatgattggctactccggtaaaaccaaactggatgatgctgccggtacgcaaaccagctcccataccatgggtatccaggtcggcgttgatatgtatgctaacgaaagctggaaagccgggatgtataccagcatccttgatatcgacagcaacgtgaaaggcacgaagacaggcagcgatggcaaaggcggtaacatcgacgacaacgcattttacgtcggtggctatgcgacctggttctcgggtgacggtatgtatgttgataacgtcctgcagtacggtaaccataaatcccgcctggcggcgaccggtaacaatggctcgtataccgtcagaggcaacacgctgacggcgtcgacagaggtgggtaaatcgttccgtttaggcgccagcgcatggagtctggagcctcaggctcagttgatctaccagtacagcgactttgataacagcacgctggatggtgtgaccccaacgaaagtgaaaatggataccgcagactcctttaccgcgcgtctgggcgtgcgtctggtcgctgactatgacaccaaccatggcaaattccagccgtacggcagggttaacgtctggcagggtctgggttcaaaagacaaaacgcactttagcaatgcggtagccaccactacgctggaatcttcacagcagtactccagcactgaagttgcagccggcctgtcatggtctatcgacagaaacctgcaggtctacggtgagctgggtacgcaattcagcaacggcggcagtaagtcgcagatcgaagcgccggtcaatgcctctatcggctttaagaaatcgttctaa

SEQ ID NO: 125577 - DNA, 1716 bp, Enterobacter cloacae
ttgattaataaactaccctatttaaaatcacttggtgttacttcaatctggattactcccccaatcgataatgtgaataatactgatgctgctggcaatactggatatcatggttattggggaagagattattttcgtatagatgaacattttggcaatctcgatgatttcaaagaactgactagtttgatgcatagtcctgattataatatgaaactggttcttgattatgcccctaatcattcgaatgctaatgatgaaaatgaatttggtgcactatatcgtgatggtgtgtttattactgattatcctacagatgttgccgccaatacgggctggtatcatcacaatggtggggtaacgaactggaatgatttcttccaagtgaagaatcataatctattcaatctatcagacctcaatcaatccaatactgatgtctaccagtacttgttggatggttctaaattttggatcgatgctggtgtggatgctatcaggattgatgccatcaagcatatggacaagtcttttatacagaaatggaccagcgatatttatgattacagtaagtctatcggccgggaaggattttttttcttcggtgaatggtttggtgccagtgcgaatactacaacaggtgttgatggtaatgctatcgattacgccaacacttccgggtcagcgttgctggattttggattccgcgatactttagaaagagttttggtaggacgtagcggaaatacaatgaaaacgttaaatagttatctgataaaaagacaaacagtctttaccagtgatgactggcaggttgtttttatggataaccatgatatggcacgcattggtaccgctctgcgttcaaacgccactacttttggtcctggaaacaatgaaaccggtggaagtcagagtgaagcttttgctcagaaacgtatagacctcggtctggttgcgacaatgactgtacgtggtattcctgccatttattatggtactgaacattatgccgctaactttacctctaacagttttggtcaagttggcagtgatccttacaaccgagagaaaatgccaggatttgatacggaaagtgaggctttctccattattaaaacactgggtgacctaaggaaaagtagcccggcaattcaaaatggaacttatactgaactatgggttaatgatgatatattagtatttgagcggcgttctgggaacgatattgttattgttgcacttaatcgtggtgaggctaacacaattaatgttaaaaatatagcggttcctaatggggtatatcagagtttgattgggaataatagtgtttcagtagcaaataaacaggcaacactaacacttatgcaaaatgaagctgttgtcattcgctcacaatcagatgatgcggagaaccctacagtacaaagcataaacttcacatgtaataacggttatacgatttcaggtcaaagtgtttatattattggtaatataccccagttaggtggttgggacttaactaaagcggtaaaaatatcaccgacacaatatccacaatggagtgcgagcttagagcttccttctgacttaaatgttgaatggaagtgtgtgaaacgtaatgaaaccaatccgacggctaatgttgagtggcagtctggtgcaaataaccagttcaatagcaatgacacacaaacaacgaatggctcgttttaa

SEQ ID NO: 125578 - DNA, 255 bp, Enterobacter cloacae
atgaaaagaaaccgtttttttaatacctcggctgctattgccatttcgattgcattaaatacttttttttgtagcatgcagacgattgctgctgaaccagaagaaacttatcttgattttcgtaaggagacgatatattttctattccttgatcgtttcagcgatggagatccaagtaataatgcagggtttaattctgcaacctacgatcctaataatttaaaaaatatactggaggagatctccgggggttga

SEQ ID NO: 125579 - DNA, 987 bp, Enterobacter cloacae
atgattgccggtcttgaagatattagcggaggcgaaatttatatcggaaatagaaaggttaatgaccttccgcccaaagaccgtggtattgccatggttttccaaaactatgcactttatccgcataaaaccgttttcgacaacatggcttttggtctcaaaatgcagaaacgacctaaggatgagattaaacgccgggttgaagacgcggccgaaaaacttgaaattaccgaactgctttatcgtaagccgaaagaaatgtcgggcggacagcgccagcgtgtcgctgttggccgggcgattgtacgtaaacctgatgtttttttattcgatgagcctttatcaaaccttgatgccaagctcagggtatcgatgcggatgaaaattgcccaactacatcgttctctgaaagaggaggggcatcctgctacaatgatttatgttactcacgatcagactgaagcgttaactctaggagatcgcatttgtgttcttaaccatgggaatatcatgcaggttgatacacctactgatctttataattatcctaataataagttcgttgccagttttatcggttcaccatcaattaatttgatagatactgctatccgtaagaataatgagaggttgtatgttgaaattgctcctggcgttgaaatattaattccacatagtaagcaagtgttgcttgaaggttatattaataagcctgtgtgttttggtattagaccagagcatatctctcttgctagcgatgatgatgaccttaatacctttgagggagttttaacggtggttgaaaatatggggagcgaaaaatttttatattttatcgttggtgggaaggaacttattgccagagttgatacacaagatattaatccatttcatatagggaaaactttaagatttaatcttaatactgccttttgtcatgtttttgatttctataatgagaacaatctgacaaatgtaagagtgtga

SEQ ID NO: 125580 - DNA, 678 bp, Enterobacter cloacae
atggaccgtgagacagggctgcactacaatctgttccggtattacgacccggactgcggacggtttacgcagcaggacccgatagggctggcgggggggataaatctttaccagtatgcgccgaatgcgctgggatgggtggatccgtgggggttatcgtgcagaaatagctggaatgatttccagagcaaaactcgaggtgcttttgctacaagaggtcatgctgcacgggcctaccgagctactcatggaatttcaaagccagatttccctaatccggcgacatacctcgatgcaggaaaaattagtaggcatttagaactattcaagggaggggttactaagttcgtttggggtattaatcctgaatttagtcatttaggtcctccaggaggccactttgttatgccaaggaccgttgctgatgacttaattagacgttcgggtgggaacattccaaagcttgaaagattgttagggttaaatgcaggtgatctcggagacgctcctttaagagttgatattaataatccgacaggtttaagaatgccaacaggaaatgaacgaggagcaaatgaattttggttgccgggaggatatacttcaggtggtatcccagaggcggccacagatcctactccgctaaatcaattaaagatcacaccgttgaaaaattaa

SEQ ID NO: 125581 - DNA, 198 bp, Enterobacter cloacae
atggataaaataatatttaataattatggagtaatccttatcgaaagagaagggcgtttttttattaggttttattcaggggggatagttatgaaagaagaggaagaagaattgagcattgatgaggccaaaaaagttcaaatgagtgaaaaggatgcttatgaggttttaatagccattgaaaaaaagaaaagctaa

SEQ ID NO: 125582 - DNA, 480 bp, Enterobacter cloacae
atgattgattttgaaattaacatcgcagatggcaaagttaagttagataataaatatcttttcatacaacgggaggatacgtttatagtttctgaactttacaaatatcttgaatcaaaaaataaaatgcaaagattaattccttatcattataccgttaataccgttctttggtttgataagaaatttgagcttataatgcgcccattatgctttagcaattttccatttatggtgcaattaatttataaagagggtgagtattatcaggcaataagtgattggaataaagtttctaacattgatatgttaaacaaagaagttgatttcttatatcgttgggtagcagaggaatatgatcttggcgaaccagatgcaaaagaaaaacatagtgtaacatggcgtttggaatggggtgatattactgtctgctatgacattaaatcatttaattgcggtatctatataacatggaattaa

SEQ ID NO: 125583 - DNA, 318 bp, Enterobacter cloacae
atggctaaacgtatgcaagataaagaaagcattgccggagtgtcatggctgattgtccttgctctgtcatgctggggcggcctggtccgataccttattgacgttaagcagaacaaagctacctggagctggatcaacgcgctggcgcaaattgcagtgtccggctttaccggcctgattggtggactgatcagcgttgaaagcggactgagtctttacatgattctggttacgtctggcattagcggcgcgatgggctccgtagcgctgacgtacttctgggaacgactgacggggatgaagaatgcaaaccagtga

SEQ ID NO: 125584 - DNA, 441 bp, Enterobacter cloacae
atgcaaaccagtgataaaggcattgccctgatcaagcagttcgaaggctgcaaactcaccgcctaccaggacagcgtcggagtctggacgatcggttatggctggactcagcctgtcgacggcaaaccaatccgcgccgggatgactatcaagcaggaaacggcagaacgtctgctgaagaccgggctagtaagctacgaaagcgatgtgtcccgcctggttaaagtgggcctgactcaggggcaattcgacgccctggtgtcgttcacgtataacctcggttcccggtcattatcaacatcgactcttctgagaaaactaaacgccggtgattacgctggcgctgccgatgagttcctgcgctggaataaagctggtgggaaggtgctgaatgggctgacacgtcggcgggaggcagagcgggctctgttcctatcatga

SEQ ID NO: 125585 - DNA, 474 bp, Enterobacter cloacae
atgattggcgcgctggttaagcgttgctggctgcaactgattgtggtgtcggtaatcggcgtgctggcgttcttcgttaaccactaccgcgacaacgccatcacctataaagaccagcgcgacaaagccaccaaaagtctccgcctggctaacgacaccatcaaagacatgcagacccgccagcgtgatgtcgctgcgctggatgccaaatacacgaaggaattgtccgatgcgaaaaaaaccattaacgatttgcgtcgggatgtcgattctggcgctaaacggctgcgcatcgccgcaacctgccctggagtgccaaaagccacctccgccaccggcgtggatgatgcaggttcccccgaacttactccagacgctcgacggaattatttcgatcacagagacggaatcgcaaccgttaacaaaatgatttacggcatgcaggaatatatagacacgcagtgcctgaagtaa

SEQ ID NO: 125586 - DNA, 237 bp, Enterobacter cloacae
atgaataagctcaaacccatagctttggttatgattgtcgtagttttaatgtttttacttaatggcatctacatagcgaataggcatgtaagtggtgatttctcgatgcgagaggtggccagcgactatgagtctatgaatcctatcagcagatacagttatgagtggatgatgaaagacgatatggacgtaattaatagagtcgttaaggacaatattagagaacggaataagtaa

SEQ ID NO: 125587 - DNA, 639 bp, Enterobacter cloacae
atggctaacgatgacgagcgcaggccttatccgccagttaacttcatcgcctccgacaactggcagccatacacccggctcattaccgccaatgaagtgcatgagtgggtaagccgccaaatcctcagcgattccggcagcatccataaccctgaccacgaacatctgcttgaagctgacctctgcttcatgtgggcgtctgactctttcgcgaagaaagggcgctacgtcctcggccaggccgagcaggtgatgctccgggccggtggttggcagaaagccagaatggaacagcagatgtatgaatggttcgggcgaatcccgaagttcatcatcacgctggcagctgactactgctcgcaatgcagcgaccttgagttctgcgcactggtagagcatgagctttaccacattgcccaggccaccgatgatttcggtgcgccaaggttcaacaaagagaccgggcagccagtgcttacactgcgcggccacgacgtcgaagaattcactggtgtcgtgcgtcgatacggtgccagcaaagaagtacaggagctcgttgatgcggccaatgcgccagcagaagtggctcatatcgatatagccaggtcatgcgggacgtgcatgttgaagctggcgtaa

SEQ ID NO: 125588 - DNA, 456 bp, Enterobacter cloacae
gtggcagcattatcgacagaggttaaagccttcatcgttcagtcactcgcctgctacgagaccccagtaaaagtcattgagcttgtaaaggctgaatatggcatcgatgtctcacggcagcaggtgtcgcaatacacgcccggcaacgcaatggcggccaagttgagccagaagtggattgacctgttcaacgccacccgtaaacgattccagaatgagatcggtgacattccgatcgcaaataaagcgtaccggttacgcgttctcgaccgaatggcgaccaatgctgaaaagatgaagaactacggcatgacctcgcagcttatcgagcaggccgccaaagaaatgggcgatgcctacactaatcgccagaaagtcgagcatacaagccctgatggcagcatgactccgcagccgacaatcatccagttactacctgttgagccgaaagcatga

SEQ ID NO: 125589 - DNA, 174 bp, Enterobacter cloacae
atgcagcatcatttcaaaaacgtcattttccagcgtatcgcgaagggttcaacggttggcaatcaggtaaagctaaacgatgttcttgctaatgggaagacagaatcagctctgctagaggcgcttcagaagcaatttaagggcgatacgataaagttgaaaagctaccaataa

SEQ ID NO: 125590 - DNA, 534 bp, Enterobacter cloacae
atgactgacaaattaactctcgccgttggtgataacgggggcttagacatacataaaatccgggagtgtgttgcatacagccctttaagtccaactggcctggtgtggataaaaagctctgggagagttaaagccggagaccatgctggaagctacaacggcgcgcgtggttactactacgtcaccatcaataagaaaaagtatcttgcccatagagtggtatgggtattgatgcatggcgcgcttgggtcatcggttgatgtcgaccacaaagacggcaataccaccaataacaaactcgaaaaccttcgcccagcaacgagagcagaaaacctaaagaataccccacttcggaaagataactcatccggcgttaaggggctttcgtggcactcaaaaaactgcgggtggcaggggcgaatttgggataacggaaaaatccaccgcaagttctctacatctagaggcgtagttgaggcctggctaattgagatgagggagagtcttcatggcgaatttgcgaggcacgaatga

SEQ ID NO: 125591 - DNA, 228 bp, Enterobacter cloacae
atgtattttttagaaagaaaagatgcagaaaaaatgctctttgaatttttaaagagaactttaataaaagaatcagatattgatgagttaatgagcatggcaactaaacatgattccggccctccgatgaaaggtataatgtataagtatgacaaaatggagagaaatgaactcaccgcacaagatttagatgatcttagtacattgatgcatttttatggcccgtga

SEQ ID NO: 125592 - DNA, 444 bp, Enterobacter cloacae
atgaataaatctattaatatacagacggatactgccacattagtaatttatgatttgatgtcattaaagcataggattaatgatgatgcagattggtggagtcttccagaagatgaagttgaagaaataaataaagggaatgtattatttctcaatgttggagatgatggtaactataaagttgatattaaaagtgaaattggtgaatatgccggatcgttatttttaaacgtacctactggaaaggttttcataggggcgggagaggatgtcactggcggagatctggagccagatgattcagatgctatttcaggcgagtttattactttagaaccaggtagttacgaggttaaatataaaaagcatggttcagatgtgctaatttcctttacaaaagcaacgtttactgaaaactcattagaagagggtgtttatctctga

SEQ ID NO: 125593 - DNA, 1593 bp, Enterobacter cloacae
atgaatcacgactatctcgcccgtatcgctgcgctggaagacgcgcttcgccagaaagacagtcagctcagtctcgttgcagagactgagtcgttcctgcgttctgcactggcccgcgcagaagagaaaatagagaacgaagagcgcgagatagagcatctgcgggcacagatagaaaaactgcgtcgaatgttgttcggtacccgctccgaaaaacttcgccgacaggttgaagaagccgaagccctgctgaaacagcaggagcagcaaagcgatcgctacaacggacgggaagacgatccgcaggtacctcgccagttgcgtcagtcccgccatcgtcgcccgttaccagcacatcttccccgcgagatacatcggctggatcctgcggaaaccagctgtccggaatgcggcagcggtatggcgtacctcagcgaagtcagcgtggagcagctggaactggtctccagcgccctgaaagtgatccgcacggtcagggtgaaaaaggcctgcacccgatgtgactgtatcgttgaagcacctgcgccatcacgtcccatcgatcggggtatcgccgggccgggtctgctggcccgcgtgttaacggccaaatactgcgaacacctgccgctgtatcgccagtgcgaaatctttgcccgtcagggcgtggatctgagccgggctctgctctccaactgggtggatgcatgttgccggttaatggccccgctggatgaggccctttaccactacgtgatggactgccacaaactgcatacggatgacactccggttctggtgcttgcaccgggcagaaagaagacgaaaaccgggcgtatctggacgtatgtacgtgacgacagaagcgcaggttcatcagatccgccagcggcatggttcgccttctcgccagaccggcagggaaaacatcctcagcaacaccttcgccactatcatggtgtgctgcaggcggatgccttcgcaggctacgatcggttgttcagtccggaacgtgaaggagggccgctgacagaagccgcatgttgggcccatgcccgccgaaaaatccatgatgtctatataagcactcacacagcgacagcggaagaagccctgaaacgtatcggtgagctgtacgcgatagaagaagaaatacgcggcctcacgacagaagagcgtctggcagccagacaatcgcaaagcaaaccactgctggcatcgctgcatgaatggctggtagaaaaaaatgagacgctgtcgaaaaagtcccgtctgggcgaagcgttcgcttatgtcctgaaccagtgggatgcgctgtgctactactgtgaagatggcctggcagagcctgataacaacgctgccgaacgagcccttcgtgccgtctgtcttgggaaaaagaattttatcttcttcggcagcgaccacggtggtgagcgcggagccctgctgtacggactgatcgggacgtgcaggctgaatggtatcgatccggaagcctaccttcgccatatcctgagcgtactgccggagtggcccagcaacaaagtggccgaactgctgccatggaacgtggttcttaccgataaataa

SEQ ID NO: 125594 - DNA, 351 bp, Enterobacter cloacae
atgatatccctcccgtcaggcacccgcatctggctggtcgccggggccacggatatgcgtaaatccttcaacgggctgggcgaacagatacaccacgttctggatgaggatcccttctccggccatctgtttatcttccggggacgccgtggcgataccgtgaaaatactttgggctgatgctgatggtctgtgcctgtttatcaaacgcctggaagagggacagttcgtctggcctgctgtacgcgacggcaaaatcgcgatcacccgctcacaacttgccatgctccttgataagctggactggcgccagccaaaaatatcccgccttaactcactgacaatgttgtaa

SEQ ID NO: 125595 - DNA, 441 bp, Enterobacter cloacae
atggaaaatgctgccaactggcgaactgaatcgcgtaccgtctattccagtgacttcaaacttcggatggtcgaactggcttcacgaccagatgccaacgtcgcacaactggcgcgggaacatggcgttgataataatctcatttttaagtggatacgcctctggcagagagaggggcgaatctctcgtcgaatgcctgcaactatcgtggggccggtggtacctcaatctcttccggcttctccgactctgttgtccgtcgacgttatcaacgacccgttgcccgcagcagagaatgacactctgtgtacgttctcctccgctcacgccagcgccacttcctgtcatgttgagttccgccacggcaaaatgacgctggagaacccgtcgtcagagttgctgactgtgctgatccgcgaattgaccgggaggacaccatga

SEQ ID NO: 125596 - DNA, 387 bp, Enterobacter cloacae
atggctgatatggcttcaattacagcagggctaaatgcagtaaagctggctttcaatattgcaaaagaccttaaggatgcaaccgcagcgttcaatgaagcagagtttcgattaaaactcagcgagttatacttaagcctgagcgatgccagaatgaatctcgctgaagctcaacaggagataagttctctgcagggggaaatctcatctctcaaagcccaactcagtacagttgatgaattagaattccgggatggtttttattacagaactacatctgttgatggaaagccaaatggtcctttctgtcctaagtgctacgaaggctctcccaaaaaactttcctcagttgacctgcccccacgattagatacaacactcagttag

SEQ ID NO: 125597 - DNA, 450 bp, Enterobacter cloacae
atgccacgttatcgtcgcgttaatatcgacggtcagtctctgtacaagaccgaaacccgcactacggccgcagcgctacttccgggtaccgccgcaaccatcaactcctcagatgaattcgctcaggccactgcgctaaccggacgcctgtacatcatcgatgtcggttaccaccagggcctgacaatcaccgaagaaatccctgccggggattcggcagtaggtaactacgtcgaagaaggtcgtgagctggcgctgcgttgcctgcctggtgcgtataaaaaagacagcccgatcaagctgggcactgccggtcagtttaccctggcaaccgatgacactgattcagtgatcggatacagccaggatgaatacaccatcgcggccagcactaccgacttcatccgcgtgcgcatgcgcgttggcactgccgccgctgctggcgcgtaa

SEQ ID NO: 125598 - DNA, 1266 bp, Enterobacter cloacae
atgccaatgcaggtaaacatcaccacgaaggtgaacagccagtctatccggcgcgaaacatacaacgggcgtgagcacctggtgctgccgagctacacgctgccggcaaacgtcgtcatgaatggcggcttgtacacgcaagagcaaatagacgcccactataagggcctggagggcaccctggcgccgctgggccatcctcaggttaacggtcagttcgtttctgctttctcgccagaggggattaacgcaggacatatcggcgcatggaaccgcaacgttaagaagtccggtaatcgcatctacctagaaaagtgggttgacgttgcccgggccagagagtctgaaggtggcagggaactgcttgaacgtgtcgctgccattgagcgcggtgaagacgttccgccgattcataccagtgttgccgcattcctcgaccagcttgaaccgaacgagcaacaacgcgctaccggtgctgactgggtagccaagatctacagcatggaccacgacgcaatcctgctgcacgaagtcggagccgccacccctgagcagggcgttggcctgatggtcaatgccgatctggcccaaccgctcaaggctaattcgggcgcgctggtgggtgaatcctaccgtgagcgcgagcagcgtctcgatcgcgcagctaaagcgaagtttgcggcgggcacggatgaatatgcctgggttgctgacttcactgactcgcaggtggtcatcgtgcgaaatggcggtgatacacaggtttacggttattccgctgatggcgggaagatcaccatcgacgataccggcactgtagtagcgcgtcaggaatcgtgggtagccgtcgtagccaacaaattcaaagctctattcacaccgcaggaacagcctgcaccaaaccacaaaacggagggcgacatgcctttaaccaaagaagaactggaacaaatcggcagcatgatcggccaggctgttgcgaccaataccgaagcggctattaagactctcgcggaaaaggttgatgcgctgcaagccaatcagaatcagctcgcggaaaccctgactgctaacacccgcgctgaagagaaagccaagcgtgatgcggttgctaaggtccatggcgacatcgtggccaacgcgctttctggcgatgcgctggacgcaatgttcaagtcgctgggcgaagctgctccgctgggcaccaacaatgctcaacagcacaaagaaaccggcgcacctgccgcagacgaacacttcaagtaa

SEQ ID NO: 125599 - DNA, 468 bp, Enterobacter cloacae
atggcgcgcgtgctaactgatggcgtgggccgtggtctcaatccgctggatattgcccgcaacctgacagaccagaccggcatcgagaagcgccgggcaaaccggatagcgcggactgaagtgactaccgcgctgcgccgggctaagtgggatgaagctgagtcatcaatggatgatctcggcttaaacatcaggcttctccacctttccgcattaagccccacaacgcgaataaagcacgccctgagacacgcgcatacatacacagttcaggaggtaagggactggtatgccgttgatgcgaactcaataaactgcaaatgcggccaggttgaagtgcttgttgatgcagatggtaagccgctttatccgaacgtcatcgagttggctaagaaggaattcgacagccattggaagaagatgaaggtcaatcattcagtttgtcattgctgcaaaaaggcagcttga

SEQ ID NO: 125600 - DNA, 450 bp, Enterobacter cloacae
atgccacgttatcgtcgcgttaatatcgacggtcagtctctgtacaagaccgaaacccgcactacggccgccgcgttgcttccaggcaccgccgcaaccatcaactcatccgataaattcgctcaggccacagcgctaaccggccgcctgtacatcatcgatgtcggttatcaccagggcctgaccatcaccgaatcaatcccagccggtgattcggcagtaggaaactacgtcgaagaaggtcgtgagcttgcgctgcgttgcctgcctggtgcgtataaaaaagacagcccgatcaagctgagcactgctggtcagttcacccttgctacttccgatactgattcagtgatcggctatagccaggatgaatacaccattgcggccagcaccaccgattatattcgcgtgcgtatgcgcgttggcaccgtcgccgccgctagcgcttaa

SEQ ID NO: 125601 - DNA, 201 bp, Enterobacter cloacae
atggcgattagcaaagagcttgaagttcaaaggctggttatcttaggtgctgtttcaacgctgggtgaggagatccgaagcgaaatcttcgacctgaaggagcagattataaaactgtgcagcaatgccagcgagaaagagtatgcgatgacagccttatctctcgcagcgatcgaacaacagaaagaaatgccggagtaa

SEQ ID NO: 125602 - DNA, 219 bp, Enterobacter cloacae
atgtccgacatctaccaaatcacgctaaccacccaaacaggcgaaaccttcacgggcaagatgtcacgacgccagccagagctggttaacggctttgtgccgctggcgaccgagacgggcgagtggctttacttcgctccggccgatgtgaagcgcgtgcagtttacgccggtaccggcagagcaaaccgaacagccagcagaacaagcaacggagtaa

SEQ ID NO: 125603 - DNA, 387 bp, Enterobacter cloacae
gtgattggcgcactggttaaacgttactggttgcagttgctggttatagcggtaatcgtcgtgctggcgctcttcgtgaaccactaccgcgacaacgccatcacctacaaagaccagcgcgataaagcaacggtcagggcagacacatcagaggcgatcaccaacaacgtgatcaccacgatgaacatcatccgtgacatctcacaggctacccagaatgcaaagaacgaactggctaaaaaaggcgagacgcgcattgtctacatcaggcaggcgcttgaaggcgatccgtgcgctaaccagcttgttccttctgccgctgctgacagcctgcgggaatacgcagacagtttacgttccggccccggtggttccgataagcgctga

SEQ ID NO: 125604 - DNA, 441 bp, Enterobacter cloacae
atgcaaaccagtgataaaggcattgccctgataaaagagtttgagggctgcaagctcaccgcctacccggacagcgtcggagtctggacgatcggttatggctggactcagcccgtcgacggcaaaccaatccgcgccgggatgacgattaagcaggaaaccgcagagcgcctgctgaagaccgggctggtcagctacgaatgcgacgtgtctcgcctggttaaggtggggctgactcaagggcagttcgatgctctggtgtcgttcacgtataacctcggcgcccggtcactgtcgacatcgactctcctgcgaaaactcaacgccggtgattacgctggtgctgccgatgagttcctgcgctggaataaagctggtggcaaggtcctgaatgggctggcccgtcggcgtgaggcggagcgcgctctgttcctgtcgtga

SEQ ID NO: 125605 - DNA, 318 bp, Enterobacter cloacae
atggctaaacgtatgcaagataaagaaagcattgccggggtgtcatggctgattgtccttgctctgtcatgctggggcggccttgtccgataccttattgacgttaagcagaacaaagccacctggagttggatcaacgcgctggcgcaaattgcagtgtccggctttaccggactcattggtggcctgatcagcgttgaaagcgggcttagcctttacatgattctggttacgtctggtatcagcggggcgatgggctccgtagcactgacgtacttctgggagcgcctgacggggatgaagaatgcaaaccagtga

SEQ ID NO: 125606 - DNA, 519 bp, Enterobacter cloacae
atgaatatcaataaagatgacgaactccttgtgatagttaagtatgaaggaagattttattggttcgttgcgttcaaggaaatgtgggtcttcgacagagttaaatgggtagaggattttgtgaaaagtggggtggaaataaaccttcaggatatccataaggaaagatatgacataccagtagtaaatgaaggaaacgcgcagatattcattgatgatttaattaaagatggttattcatacgaaaaggatgacatagctgaggagttttataataggctttcgcaaaaaacaacttggtgggatatatatgaacttatgccggatttatttatagactttgataataaaaaattatattcggaatatgttgagagtatgcattatcaagaatatgtgcctgatggttggcacggtgaacttgttgatttttgcagtaatggatcgttacctcaagatgaaatgttctggataaaaaatgaaactgatcatagaagcgttttgatcgctaaaggataa

SEQ ID NO: 125607 - DNA, 621 bp, Enterobacter cloacae
atgcaggggcaatacctggaccgtgagacagggctgcactacaatctgttccggtattacgacccggactgcggacggtttacgcagcaggacccgatagggctggcgggggggataaatctttaccagtatgcgccgaatgcgctgggatgggtggatccgtgggggttgagccgtgagtgtagtggtaaaacaaaacctgatttctatgttggtccaagtggccctagttcgactatgccttctacagcatatcgttatatggatagcaaatatgctccacagacaatagaaaataaatcagccccgttaagttattttgggtatacgaaatataaatctgcaaatgaagccagggacgcctatcaaattttttatgagaaaggtaatcctgattcatggagtgatgcacgtttattaggtgagtttgatacattacaactgtataaaaatggagtacctcaagtgcaagtacctcttgccaatggtggtcgagggcctggatatgagcttttcaccagtgcatatcctgagtatggtaaaggtggggcattacagttgctaccaatcgaacgaaattaccctgttatttttgaacgtgttactataattccggagtaa

SEQ ID NO: 125608 - DNA, 981 bp, Enterobacter cloacae; identical to SEQ ID NO: 119795

SEQ ID NO: 125609 - DNA, 294 bp, Enterobacter cloacae
atggctaaatacgaagttgtgcgcgcgtggttcggcgtgaaggtagggcaggtggtggagatgaaagaactgcacccggcgctgaagtctaacgtccgtctcatgaatggtgaggcaggcggagagcttaccccgtcgacacctgatgccggtactggtgagaaatctcgcaaagagattattcaggaccgcctgacccagttgggtattgagttcaaaggcaccctgggcgcggaaaagctcagtgagctgttgccggatggcgaactcgaaaagcttttccctgctgaataa

SEQ ID NO: 125610 - DNA, 288 bp, Enterobacter cloacae
gtggtgaatggcgttgtaagcggcactgtattgcaggcggtgctgccgttcgcaccggtgaaagaaatccgcatgagcttcgcgctgaccggtaacgagtttatcgcgtacgttcgtcgtcgtgacgtgatctccccactggtgggtatggctgtcggcgttgttccactgccgcgtccactgcctaacgttaactacaacttccagattatgtctgctgagggtctgcaaattaccgcagacgatcagggcctgtctggcgttgtctacggcgctaacctggcgtaa

SEQ ID NO: 125611 - DNA, 294 bp, Enterobacter cloacae
gtggcgcacgtattcggtgaacgcacgttggccacgctggagcgtcttctgggcctgctgtcggcctttgaggtcgtggtatggatgacggatggctggccgctgtatgaatcacgcctgaagggagaactgcacgttatcagcaagcgatatacgcagcgcattgagcggcataacctgaatctgaggcagcatctggcaaggctgggcaggaagtcactgtcgttctcaaaatcggtggagctgcatgacaaagtcatcgggcattatctgaacataaaacactatcagtaa

SEQ ID NO: 125612 - DNA, 174 bp, Enterobacter cloacae
atggtaaagccaggcatgactggcctgtggcaggtgagtggacgtaacgatgttgactacaccacgcgtgtttattttgactcctggtatgtcaaaaactggtctttgtggaatgatatcgtcattctcttcaaaaccgtcaatgtggttctgttgagaaaaggcgcttactga

SEQ ID NO: 125613 - DNA, 123 bp, Enterobacter cloacae
atgcaaccgatttttgtttttaagatttcttttcatgtaatcattaatgccgcaataaaagaaatcttcctctcttacaaaacacaaagaattaatatcgaaacagtagttatcgacaattaa

SEQ ID NO: 125614 - DNA, 750 bp, Enterobacter cloacae; identical to SEQ ID NO: 119107

SEQ ID NO: 125615 - DNA, 714 bp, Enterobacter cloacae; identical to SEQ ID NO: 119106

SEQ ID NO: 125616 - DNA, 312 bp, Enterobacter cloacae; identical to SEQ ID NO: 119105

SEQ ID NO: 125617 - DNA, 1404 bp, Enterobacter cloacae; identical to SEQ ID NO: 32307

SEQ ID NO: 125618 - DNA, 318 bp, Enterobacter cloacae
atgcagtcggccaagacgatcgtattcgctgcgggtggtcagcagcccctgggtgcggctggtctcccggtggagttcgtcgcgggtaaagtcggagaccgacagcttatcgagcgcaatgctgagcagatgcccgctgccgtagtagaactgcttcagctcgcggccatcgggcagcgtgacggaggtgcggttgcccagcgcgtcatactcccacgccagctcaccgtgctcgccagcttcgcgcgtgacgcgcccgagcgcgtcatactcaaacacaagctcctgctcggcctcggcactccaggcatcggctga

SEQ ID NO: 125619 - DNA, 519 bp, Enterobacter cloacae
atgcttcaccggcaggccacgttcgttccatttgagcgattccgtccagccttccgggcgatcgagctgcaccggacgccctgcggcgtcgtagcggtagcgagtctcttcaccgtcggcggctgtctcagccaccagccagcccagcggatgataacggtattgtgtcacacggcccgaacagtccgtcgcacgcaccatctgcccggcctcgttgtactcctggtagcggctgttcccggcggcatcgacttcttccacaacctgaccaaactcgtcccgacgcagcagcgtggtctgccccatcgggtccaccacgcgcttcagcccgtgatgttcgtcgtaccagaaccgggtggcgctgccgtcagcttcgataatggccgcgggaagcgcgcggtgctccagccaggtggtggtgcgggtgttgccgtcggcgtcgatctcctgcacccggttgcccatgtcgtcatagacgaaggtaacggcattacccagcggatcgatgcgacgcgttag

SEQ ID NO: 125620 - DNA, 1023 bp, Enterobacter cloacae
gtggtcgttgtaacggtattcacgcgtcaccacgccggaggcatccgtcgcgctcgccagctggccgcgcgcatcgtacccccactgcatcagcggccaggttttgttgccgtcgagatggctggctgcggtaacacgctgcgggaaacgttcatcgtcatagcgcagggtgacgtcgatcgcccgcgactcatcatggataccaaccagcctgccgtgctcgtcccacgccgtcagcagcgcattgccgtactcgtcgctgagggaggccaggcgcaggatggaggggttagcgcgggtcggtttatacagacgccacaccgcgccgtcatcgtcggcaatcgccacgtcgccgctctcattgcggcggatgataatgccttcgctgatgctgtaaaacgcgcggtcgaccggcggcagttcaaagctcagctcgcgcccggtttcatcgaaccaggtggcattgttttcttccagcgtcagatagctgtcaaaggtggtagcccagcccagaccaaacagcccttcgcggatggtcaggctgttgtagctgcgctgccagcgcagcggaaagcgccccggcagcgagaaatcgagttcatcgtcgtcgttcagcaccttcacgccggtagcggcgtgaaccgggtgcgaggagccgaacacggcgttgacggccatatcagccagcatcccgccaccggcagcagccagcgcgcagggcatgtttttcaggatcttgcccggacgcccgcgcagcagggagagcgcaatcatccccaacgccagacccggcgttttaccgcttttgatatcgcggaccgtgagggtgtcgccgccgatgatcacgttcggggagacgtcgtcggaaacggtgccttcgcaggtggtgcgatcttttgcgcgcaccgcaggctgtccgttgatgaagacgcttttggagccttccgccagatactgtggcccggagtgtttatcacacgccaccttgtcttcttccagcggcgaggtccctgcggcggctga

SEQ ID NO: 125621 - DNA, 441 bp, Enterobacter cloacae
atgaaatacaccctccaggaaggttcctttaccctttttcctgccgcctggcaggacaacagcatgaacatcattcgcgatgacgaaagcgggctgtccgtggtagtcagccgcggcgtcatcccggatggtagcgattacgaacaagagttccaccgtcagtgggaagtcctgcgccctcagatgggggagatcgcccagagcgaatttcagcacgtaaaagccgggccagacggaaacattagcggactggaagttgagaccacctttgaccgtaacggccagcgcctgtggcaaaaacagctggccgtgcagacgccgggcaaaccggtactgatgatttttaccctctcggccttaaacgcctttacggaagaggacgaggcgcgctggagcgcactgaagcagagtctgacgctaaacgacaaccggaatgtgtaa

SEQ ID NO: 125622 - DNA, 519 bp, Enterobacter cloacae
atggaaagtaggatgattaaagctacattcctcattgttcttccactattttcaatatttacctatgcagggcataataaaatgaatcaagattcgttgtggcaaatgattaaagaaatgaaatcagtgtggggtaaacaagttgaggatgtcagtaaactgtttaaccaaccgctgattaataatacacaggagaaagaagaccgttatacttcagctccctttacgttaactgatggcacacggatcagtaatgtggatgttcgtttatggggaaatggtgataacagcgtatctttggtttctttcgtagttaatcaaccatgtattactcttgatcaagtcaaatctcattttccggatctgaaattgtctaatatccctcgcggaaacacgccgggacaatcagttggatatcgcacccctaccgatgaacgcgggctggcatgggcatttagctttccagttctgaatcaggaatgcctgggcagggtagttatgtcacgctacgaacaataa

SEQ ID NO: 125623 - DNA, 708 bp, Enterobacter cloacae
atgaaaggattatgtaccgttctcgcagctacgtccgttgtgctggcgaccggatgccaggcgaaagagccgcccacacaggttgtttaccggttcgatgatcaccgttttctcgaattgaaaggctggggctgcgaaggtgaactctggtatacggatacttttcggggtattcataccaggcccgtcagtcaattttatcggattttcaccaaaaaatttgttcatccttctgaacgatatattgccatacccacctgggatgacccaggaacaatgatttctaaagattatggtaaaacatggtctccccagtttttttcggtagggcctaatgagcccgatggtactaaccaaccatcctatgaggatattatttctttcaccgtcgtcaacgaccagggttttttacagaccaaacaccggctgtatatgtcatcaaagccatttgaagacccgcgcattctgcccggcgggccggggattgcctataccgtggatgacggaatgggaaataaagtcagcgggaagctggacccccgttcccctggctgggcgtggggaatggtctacatgactaagcaggggctcgagggcagcacgcagcaacttaaggctaactggcaagatttacccgacagcgtacccgacgtgaaaggctataccggctgggagcacatgcaatgcaacatggatgcgggaaaatag

SEQ ID NO: 125624 - DNA, 981 bp, Enterobacter cloacae
atgtcctctgttactacatccggagcgccgaagtcggctttcagttttggccgcatctgggaccagtacggcatgctggtggtctttgctgccctcttcgtcgcctgcgcgatttttgtgccgaacttcgccacgttcatcaatatgaaggggctggggctggctatctccatgtccggcatggtggcctgcggaatgctgttctgcctggcctccggtgattttgacctgtcggtcgcctcggtgattgcctgtgcaggcgtcaccactgccgtggtgatcaacatgaccgaaagcctgtggatcggcgtgctggccgggctgctgctcggcgtgttgagcggcctggtgaacgggtttgtcattgcgcgcctgaagattaacgccctgattacgacgctggcgaccatgcaaatcgtgcgcggtctggcctatatcatctccgacggcaaagcggtcgggatcgaagacgagcgtttcttcacgctgggctatgccaactggctggggctgcctgcgccaatctggctgacggtaggctgtttgatcctgttcggtttcctgctcaaccgcaccacctttggccgaaataccctggcgattggcggcaatgaagaggcggcgcgtctggcgggtgtcccggtcgtacggaccaagatcattatcttcgtgctttccgggctggtatcggcggcggcggggattattctggcgtcgcgcatgaccagcggccagcctatgacctccattggttatgagctgatcgtcatctcagcctgcgttttggggggcgtttccctcaagggcggcatcggaaaaatctcatatgtggtggcggggatcctgattctggggaccgtagagaacgccatgaacctgctcaatatttctccgttctctcagtacgtcgtacgcggcctgatcctgctggcagcggtgatcttcgaccgttacaagcaaaaagcgaagcgtaccgtctga

SEQ ID NO: 125625 - DNA, 1344 bp, Enterobacter cloacae
atgatcaccattgagtttattgtcattatcctctgcctgctgataggcacccgcttcggcgggatgggcctggggctgataagcggtatcggcctgtttattttaggttttgtctttggtctgcaacccggtaaaccgcccgttgacgtgatgctcacaatcctcgccgtcatcggatgtgcggccacgctacagaccgccggtggccttaatgtaatgatgcagtttgcagagcgcctgctgcgtaaacatccccaacacatcacccttctcgcaccgtttaccacctggatgttgaccttcctgtgcgggaccggtcacgtcgtctacaccatgtttcccattatcgcggatatcgccctgaaaaaaggcattcgcccggaacggccgatggcggtggcctcggtggcctctcagatggcgatcaccgcctcccccgtttccgtggccgtcgtttcgctggtctcgattctgggtgcgcagcacggcatcggtcacgcgtgggggatcctcgaaatcctcgccgtttccgtaccggcctcactgtctggcgtcgccattgcggcactgtggagcctgcgccgggggaaaaacctcgcagacgatactgaatttcaggaaaagctgaaagatccgaaacagcgggagtttatctatggaggaacggagacgttgatggatcagcgtttcccgaaacaggcctactggtccacgtggatcttcttcgccggaattgccgtagtggtcctgctgggtgcgctgcccgagctgcgtccggcgtttgagatcaaagggaaaatgacagcactgtcgatgaaccttgtcattcaaatgatgatgctgatcgccggggccatcatgctgatgacctgcaaggtgaatgcgtcggccatttcaaacggggcggtatttaaggcggggatggtcgcgattttctcggtgtttggcgtggcgtggatgagcgataccttttttcaggcgcatctcgacgagctgaaaatggcgctggagggggtggtgaagagtcatccctggacgtatgccatcgtgctgttcctggtatcaaaactggtcaacagccaggctgcggccttgaccgcggtcgccccgatggggttgatgctgggcatcgagccgaaaatgctggtggccttcttcccggcatcctacggctactttgtgctgccgacctatccgagcgatctggcctgtatcggattcgatcgctccggtaccacccgcatcggtaaattcatcatcaaccacagctttattctgccggggctgattggcgtcagctgtgcctgcgtggtgagctatctgctggtgcagacgttcttctga

SEQ ID NO: 125626 - DNA, 1419 bp, Enterobacter cloacae
atgagtgaaaacgtatccggcaaagagagccgtggattatcgcctgcggcgctgctggtggccggtgctttctttatggagtttctggacgggacggtgattgccaccgcgctgccggacatggcaaaaagcttcggtgtacaggccgtggatctgaatatcggcatcagcgcctacctgatcaccctggccgtgctgatccccgccagcggctggatcgccgaccgcttcggcgcgcgaaaagtgtttgccctcgcgctggcaatcttcacgctggcctcggtattttgcggcctgtccaccacgctcgatcagttcgtcgcgatgcgcgtccttcagggcatgggtggcgcgctgatggtgcccgtgggtcgcctggccgtgctacgcaccacgccaaaacatcagctcatcacggcaatcgccaccctgacgtggcctgcgctggtcgcgccgatcatcggcccgccgctgggtgggttcattaccagctatgccgactggcgctggatcttctttattaacgtgccgctggggataatcgccattttgctggcactgcgcatcattccagacctgcatgaagatacgcgccgaccgtttgatttaccgggttttgttgtcaccacccttgccatggtgagcctggtttatgcgatggagttgatgggcgcagagcctctgcgaacaggattaaccgccacgctgtttatcgtcggtatcgtcgcgttaagcctggcgctgcgtcactttaagcgggcaacctggccgatgatcagactcgatgcgatgcaggtgccgacgtttcgcgtcaccctgtatggcggatcgctgtttcgcgcctccatcagcgcggttccgttcctgttaccgctgatgttccaggtcggctttggcatggacgcgttccattcgggcctgctggtgctggcggttttcgttggcaatctcaccattaaaccggcgacgacgccgcttatccgcagcctggggtttaagcggctgttgctgattaacggtgcgttgaatgtcctggcgttgctggcctgcgcgtttctgacgccgcagacgcccgcgtggctcgtcatgctgatcctctatctgggcggcgttttccgttcgattcagtttacagccatcagtacgctggcttttgcggatgtgccatctgtgcagatgagctatgccaatactctgttttcaaccgcaacgcagcttgccgtggggcttgggatcacgctcggggcgattggtattcgtatcggggaaaaagtcagtgaggcgatggggattgccggcatgccgggaatgagcttccggctggcatttgtggcgatcgcactaatctgcctggtgggaatggttgacacgctgcgtctgaccaaagatgcaggcagcgcggtctcatcgaaaaagtaa

SEQ ID NO: 125627 - DNA, 897 bp, Enterobacter cloacae
atgccaatgaaaattttacttgtaggaaaaaacgggcaggttggatgggaattacaacgttctctttccactcttggagaagtcatcgcagttgattatttcgacaagcatttatgtggtgacttgactgaccttcctggcatcgcacaaaccgtacgattggtgaaacctgacgttatcgttaacgcggcagcgcataccgctgtggacagagccgaacaagaacgtaacctgtctgagttgctcaatcagaaaggggttgcggttctcgctgaggagtcagcgaaattaggtgcgctcctaattcattactctacagattatgtgtttgatggtgagggcgatcattatcggctggaagatgaggcgccagcaccgttaaatgtctacggtgagactaaattagcaggcgagttggaaattacgcgccttaatccccgacatctcatattccgcaccagctgggtttatgccactcgtggtaataattttgcgaaaaccatgctgcgtttagctcgtgagaaagagaggttgtccgttatcaacgaccagcatggcgctccgacaagtgctgaattattggctgattgtactgcactggcaattcgagaagagcagaataataaatctgttgttggtaaataccatttagtcgcaagcggggaaacgacctggtttgattatgcaaattttgttttcgaaacggctaaagctcagggtgagcctcttcttatccaggaagttaacggcatttctaccagtgagtatcctacacctgctactcgtccgttgaattcgcgactctcaaatcagaaattccagcgtgtgtttaatgtgacacttccagactggaaacaaggtgttgaacgtgtggtaatagaagttttggggaaataa

SEQ ID NO: 125628 - DNA, 366 bp, Enterobacter cloacae; identical to SEQ ID NO: 121602

SEQ ID NO: 125629 - DNA, 1098 bp, Enterobacter cloacae
gtggagaaagataacggacagacccgctggcactaccgctacgtcggcgagcatcgcctgacggaggtggtcagccagccgcgggaccgcaacaagccgcagacgcaggtcagcttccgctacgatccgctcggtcgccgcatcagcaaaacgcgccgccagatgctgggcggccagccaaccggtaagccagtcaccacgcggtttgtctgggaagggttccggctgttgcaggaagtgcacggggatgtgccgctgacctacgtctacagcgatcaggacagctacgatccgctggcgcgtatcgacggggttgatgccccggaaatcttctggttccactgtcagccgaacggcacgccggaacggatgacggatagcgaaggacaggtgcgctgggaaggggtgaacagcgcctggggcaagctgctgcgggaaagcgagacgcaggtatcaggatattctcagaacctgcgcatgcaggggcaatacctggatcgcgagacagggctgcactacaatctgttccggtattatgacccggactgcggacgatttacgcagcaggacccgatagggctggcgggagggattaacctttaccagtatgcgccgaatgcgctggggtgggtggatccgtgggggttgagccgcgagtgtagcggtaaaacaaaacctgatttctatgttggtccaaatggccctagttcgactatgccttctacagcatatcgttatatggatagcaaatatgctccacagacaatagaaaataaatcagccccgttaagttattttgggtatacgaaatataaatctgcacatgaagccagggacgcctatcaaattttttatgagaaaggtaatcctgattcatggagtgatgcacgtttattaggtgagtttgatacattacaactgtataaaaatggagtgcctcaggtgcaagtacctcttgccaatggtggtcgagggcctggatatgagcttctcaccagtgcatatcctgagtatggtaaaggtggggcattacagttgctaccaatcgaacgtaattaccctgttatttttgaacgtgttactataattccggagtaa

SEQ ID NO: 125630 - DNA, 171 bp, Enterobacter cloacae
atggacaatatcattgataatgagtcaaacctgaacaacatattaccaagcaatagtggatttactgctacagttatgcatattagtgcattcccgatggtgattttatggaaagtatttttaagtaaaagcactgttaaatatgatagcgcaacaatgctcaataattga

SEQ ID NO: 125631 - DNA, 1002 bp, Enterobacter cloacae
atgggtaatgacatttatctggttttactgaataaacagcatgaattaaatattagtaaggccagtacgctgggcaacgtgcgtattatcgatcgcgcggtaacgcagctgaagccggtcaaacctaaaaagctgctgattgttattctgtcagccatgctcggtttccttttctcatcggggatcatccttgttcgcaacatgctgataaaagggatcaggcagccggcggaacttgagatgcgcgatattccagtgtatgcggttgttcccctcgctccggagttgacgaagcgcagacggtgccgtgcgatcccgacgtatcagtctgatgagctgctggcaaattcagccccaacgtcgcttgcgatagaggcgctgagagggcttcgtaccagtctccatttcgccatgcttaaagccggtaataacatattaatgatctccggcacctctcctggggtagggaagtcatttgtctgctccaacctggctgtcctgatggctcaggcgggaacacgggcattgttgattgactgcgatttacgcagaggatatttgcatcgcattttctcaaagaccgagagcagagccggcctggctgatttcttaacggaaggcggcaatatcgaaagcgttattcagaaaaccgaatattcaggagtggattttatcggccgcgggcgcatggtcactcacccggcggaactcatcatgacggataattttgcagagttgataagggcatgctcaacgttgtacgacgtggtaatcgttgatacccctcccatcctgagcgtaacggacgcagcgattataggaagatatgcatcgacttccctgatggtggtgcggttcgaacaaaactcgataaaagaagtggaggcgggactgcgccgctttgaacaaaatgatgttgccattcagggtacgatatttaacggtgtagaaaaaagggctgctgagtcttacacctatggtgattattcttatcaggattag

SEQ ID NO: 125632 - DNA, 726 bp, Enterobacter cloacae
atgaagacaaaccggaaacgcgttgttattaccgggattgggatcctctcctcgctggcggataacctgcaggatttcagagacgcattattaaataaaaaaaatggcgtgaccgacagcgtgcgtttttcaaaatggtttgaaaacgccagagcggctgaagttttgcatgatattgattattcagaattgcctgatgatgtgattgcatctctggataatgctgcactctgggcctacaaggtcggaaaagatgcgctgaaccaggcgggcttggccgaaaataaggctcacctgaaagacaccggcctgattgtgggcgtttcttccgccggcaccgaggcgttcttaccgctgttcgaacaacgtatggaagatttctccctgcgtaaagccttattctcaggcggtttctcttcctgctgttccagcgtttctacgctgctcgggctgcagggcggggttgagctggtggcgaccgcctgtacggccagcccgaatgcggtcgggatggcgtttgactatatccagaacggcaaaagcaaaacgatgctggccgttgggacagagccaatctacctgccaaccttcgctgggttttacgccctcaacgtgatgcatcccgaagcctgcacgccgttttccggcaactccggcatgtcgattggcgaaggcgcgggtgccgtggtgctggaagaatatgagcacgccgttgcgcgcgggtaa

SEQ ID NO: 125633 - DNA, 2355 bp, Enterobacter cloacae
atggcgcaacggggagatgagttttggatagagattcaggacattcgccactgcgtggaggatgaaggcgatacgctaacgttgctctggatgctggaagggcgggcagagctgaacaccgatgcgggacgtgacaccctggaggccaatacccttgccatcataaaccgtcatcggcgctggcagttcacgagcgaaacggcaaatgtcaccctgcgcgtaaccctttccgggcgctgggtcgtccagctctgcaatgatttttttgcccatgattatgctgtaccggcagaagccggaggcgtctggccccaatgcgatgcgcttcgcgatctgctgcgccagcttcttgtggtcaccctcatcaacgacccgcaccgctaccggctggaggcgtaccgctggctgagcgagatattgctgttgctgaccagccgctttcaacagcccgcccgtatgctgtcccgggaactttcctcagcgcacagcaaacgcatcgcccgggtgatagagcgaatcaatgccagttattcccgccgtattacgcttgcggaaatcgccgcgagtgaatatgtttctgaagcctggctctctcgtctctttcgcaaggaggtggggatcagtttcatgcagtacatcacccgcctgcggctggaaaaggcggccaacgctctccggctgacgaaccgaccgctgcaccagattgcgcttgagcagggtttcgccagcacgcgcatgatgagcgatcggttcaggcgtgttcacaatatgtctccgggtgagtttcgtaaggcccgacgccagcacccggaggcggcacgtgttcgggcggacaggcgtgagcagcgctatccggtcgccgtggacaagctgtttagcctgctcaatgaaccggtggcgcgcggttggggtgcctcgccgctcgtcgttcacccgcagcaggagcagagactggatcttgagcagctcaatcctctttctgcctcgctgcgccgtatgcgggtggtcattaccctgcgtgagctcgacgatttgctccgtgaggacgttcgacaaaatctggaggcgataaatgaggctattcccattgagggaattgatatcgccgaaccttttctcagcagtcgtctgtttgctaccgggtgggatgacccccagatggcaggctacgcctgctggtacaatctgcatcagctcttcacctggctggcaaaaaagcagtggacggtgctactgcacaccggcgtaacgacccgccgcgatcttctcacccgctttttacaacagtcggttaatcattttgcgccagagatcaccgcgggctggcacttcgtcatgcactggtcaacacaggcgagtgaggagacccgggagcaggtctggctggcccagcaaaaggcaatacgaacttatcttccgcaggcaaagtttggtttatggcaccgatttgcccccgtcagcgcgggcgtaagcgacgataccctgttcagttcagccatcctgatgcaggccgattttcttgcctgttctgccgatgccaatgaacttctcgatcccgcgcagctggaggtaacccctctctcctcaacggaaaattatccgatactgaaggtccgccagatcctcgctgcccttcgcctgcgaaaatgttcgcttcccgtctggcttctctcctggaataccctcaccggcaacacgcgggcgacaaacggctggtttttccgtggggcgctgctgatgcagaacctgctcgggctttcggagcaggtctggctggcgggattctggctcaattcgggtcttcagggagaagcccgtgcgaacaacaccatcgatacctcaagccttgcgctacagtataaccatggtctgccgcgtccggtttattgggtactctggctctggcaacgtctgcggggcgaggtgctggtcaatgataagcgtgtcctgcttacgcgccatcgcaatggttatcagctgttgctgcgtaatgtggtggtttttaatccactcctatccagtgaagaagccttcatccagcgttttcgccagcagtatcatttacacctgaagggaatgcgcggtaaatggcgaattaaatgccatctgtttgatcagcacaacggcgcgctctatccgttgcttgaaggggttggtagcgaaagcggccctgatgaagagatgtggcgctggatagcgcataaagcgcgtccaacgctttccgtacgcgatgaacgcctttatgacggctggcaactgagtgaatcactggagagtaatgcgctggtgctctacgagtttacgccgctcgtgcctcatgaggccgaaacggaggagattcactccccgcggtag

SEQ ID NO: 125634 - DNA, 1713 bp, Enterobacter cloacae
atgagcgaaaaacatcctggcccactggtggtcgaaggcaaactgtctgatgccgagcgcatgaaggtagagagcaactacctgcgcggtaccattgccgaagatttaaatgacggcctgaccggcggtttcaaaggcgacaacttcctgctgatccgtttccacggtatgtaccagcaggacgaccgcgatatccgcgccgaacgtgccgagcagaagctggagccgcgtcacgcgatgctgctgcgctgtcgtctgccgggtggcatcatcaccaccaaacagtggcaggcgatcgacaagtttgcccatgacaacacgatttacggcagcattcgtctgaccaaccgtcagaccttccagttccacggcattctgaagaagaacgtcaagccggttcaccagatgctgcactccgtgggtctggacgcgctggcgaccgccaacgacatgaaccgtaacgtgctttgcacctcgaatccgtacgagtccgaactgcacgccgaagcgtacgagtgggcgaaaaaaatctccgaacatctgctgccacgtacccgcgcctatgcggagatctggctcgatcaggagaaagtcgccaccaccgatgaagagccgatcctcggtcagacctacctgccgcgtaagttcaaaaccacggtggtgatcccgccgcagaacgatatcgacctgcacgccaacgacatgaacttcgtggcgattgccgaaaacggcaagctggtcggctttaacctgctggtgggcggcggtttgtccattgagcatgggaacaagaaaacctacgcccgcaccgcgagcgagttcggcttcctgccgctggagcacacgctggcagtggctgaggcggtggttactacccagcgcgactggggtaaccgtaccgatcgtaaaaacgcgaaaaccaaatacactctggagcgcgtaggcgtcgagacgttcaaagaagaagtggagcgtcgcgcgggcatcaagtttgagccgatccgcccttacgaatttaccggtcgcggcgatcgcatcggctgggttaaaggtatcgataataaatggcacctgacgctgtttatcgaaaacggccgtattcttgattatccgggccgtccgctgaaaaccggcctgctggaaatcgcgaagatccacaaaggcgagttccgtatcaccgctaaccagaacctgatcgtcgccagcgtgccggaaagcgaaaaggcgagaattgaagagctggcccgcgagcacgggttgatgaatgcggtgagcgcgcagcgtgaaaactcgatggcctgcgtgtcgttcccgacctgtccgctggcgatggccgaagccgagcgtttcctgccgtccttcactgataaagtggaagcgattctggaaaaacatggtattccggacgagcatattgttatgcgcgtgacgggctgcccgaacggctgcggtcgcgcgatgctggccgaactcggtctggtagggaaagcgccgggtcgctataacctgcacctgggcggtaaccgtatcgggacgcgtattccgcgtatgttccgcgagaacatcaccgagccggaaattctcgattccctcgacgtgcttatcggacgctgggcgaaagagcgcgaagcgggtgaaggcttcggcgactttacggtacgtgcgggcatcattcgcccggtgctcgatcccgcaagggatttctgggagtaa

SEQ ID NO: 125635 - DNA, 3117 bp, Enterobacter cloacae
atgacacaacagacacacaccattgctgaatcaaataactttatcgtccttgataaatacaccaaagttctggataccggtgacagctaccagagcgaatcggaccttgagcgggagctgattcaggaccttcttaatcaggggtatgagtttatctccgttaagtcaccgactgcgatgctggcgaatgtgcgggaccaacttcagcgtcttaatggtgtggtgtttaacgaaagtgaatggcggcgtttcgcagagcagtatctcgacagccccagtgacagcagcctggacaaaacccgtaaaatccatatcgactatatctgtgatttcacgtttgatgacggtcgtctggaaaacatctatctgatagataaaaagaacctgctgcgcaataaggtgcaggtcattcagcaatttgagcagactggctcacacgctaaccgttatgacgtcaccattctggtcaacggccttccactggtgcaaatcgaactcaaaaaacgcggtgtggcgattcatgaagcctttaaccagatacaccgttacagcaaggaaagctttaacagcgataactccctgtttaaatacctgcaactcttcgtgatttccaacgggactgatacccggtactttgccagtaccactaagcgggataaaaacagctttgatttcaccatgaactgggcaaagtcggataacactctgattaaggacctgaaggactttaccgccactttcttccagaagcatactctgctgaatgttctgtttaattacagcgtgtttgacagcagccagacgctgctcgtcatgcgcccctatcagattgctgccactgagcgaatcctctggaaaatcaacagctcttttaaagcgaagaactggtcaaaacccgaaagcggtggatttatctggcataccacagggtcaggaaaaaccctgaccagctttaaggccgcacgtctggctacggaactggactttattgataaagtcttcttcgtggtcgacaggaaagacctcgattaccagaccatgaaggagtatcagcgcttctctccggacagtgtcaatggttccgataatacagcaggcctcagaagaaacctggataaggacgataacaaaatcatcgtcacaaccattcagaaactcaataacctgatgaaagccgaagctgacctgcccgtctatcagcagcaggtggtgtttatctttgatgagtgtcaccgcagccagtttggtgaggcccagaaaaacctcaagaaaaaattcagacgcttttatcagtttggttttaccggtacgcctattttcccggaaaatgcactgggggcagaaaccaccgccagcgtcttcgggcgtgaattacattcttacgtaattactgatgcgattcgtgatgaaaaagtgctgaagtttaaggtggactataacgatgtccgcccacagtttaagtctcttgaaacggaaacagacgagaaaaaactcagcgcggctgaaaaccaacaggcatttttgcaccccctgcgtatccaggaaataacgcaatacattctcaataacttccggcagaaaacgcaccgaaccttcccgggagctaagggctttaacgccatgttagcagttagcagcgtggacgcggcgaaagcttattacacgacgtttaaaatgctacaggaagaagcagagaagaaatctggcagctataaatgccttcgggtggcaaccatcttctcctttgctgcaaatgaagagcaaagcgccattggtgatattactgacgaaagctttgataccagcgcgatgaacagtagtgcgaaggaatttctggatgcagccattgatgactacaacaaccactttaaaaccaatttcagcaccgacagtaacggcttccagaactactaccgcgatttagctcaacgagtgaaaaatcaggatatcgaccttctcatcgtggtgggaatgttcttaaccggctttgatgccccgacgcttaacactcttttcgttgacaaaaacctccgttatcacggcctgatgcaggcattttcccgcacaaaccgtatctatgatgccaccaaaaccttcggcaatatcgtgactttcagggacctggagcgtccgaccattgatgccatcacactttttggcgacaaaaacaccaagaatgtggtactggaaaaaagctacgaagagtacatgcagggctttaccgatgcggcaaccggtgaggctaaacgaggttttatggctgttgtttcggagctggagcagcgcttccctgaccctgctagtatcgacagtgaaaaagagaaaaaagccttcgtcaaactgtttggtgaatatttgcgggcagaaaacatcctgcaaaactatgatgaatttgccacgctgaaagccctgcagaaggttgatattagtgacccggaagcggtagaaacctttaaagcagagcactatgtggatgatgaaaaatttgctgaattacaaaccattcgtctcccggcagaacgtaaagttcaggactatcgctcagcatacaatgatatccgggactggcagcgacgcgaaaaagcagcaaacgacagggataaatcaaccacagactgggatgacgtggtgtttgaaattgacctgctcaagtcgcaggaaattaacctggactacattcttggcctgattttcgaccacaacagagagaaaaaaggtaaagaagccctgactgaagaggtcagacgcttaatccggtcaagtctgggcaaccgtgccaaagaaggtctgattgttgactttattcagcaaactaaccttgatgacatgccggacaaggccagtatcattgatgcattctttacctatgctcagcgtgaacagcagcgggaagcggaagcgttgattaaggaagaaaacctcaatgaagaggctgcaaggcgttacatccgcacatcactcaaacgggagtatgctaccgaaaatggcactgagctaaatgagacgctaccaaagctcagtccgctgaatcctcagtacaaaacgaaaaagcagactgtattccagaaaattggtgcctttatagataaattcaaaggtgttggcggaaatatttag

SEQ ID NO: 125636 - DNA, 1557 bp, Enterobacter cloacae
atgacaagccttcagcagcgtgccgagctacaccgtcaaatctgggccattgccaatgatgtcagaggctccgtagacggatgggattttaaacagtatgtactcggtgcacttttctatcgcttcatcagtgagaatttttccagctacatggaagcaggggatgagagcatacattatgcagcacttgatgacagcatcattaccgatgacatcaaagatgatgccatcaggactaaaggctatttcatctacccgaaccagctgttctgcaacgttgcagctaaagctaacaccaacgacaggctgaatgctgatttaaacagtatcttcgtcgctattgaaagctctgcctacggctatccgtctgaggccgacatcaaaggtctctttgccgatttcgatacgaccagcaatcgactggggaacacagtcaaagacaaaaacacccgtcttgccgccgttctcaaaggcgttgaggggctaaaactggggaattttaacgagcaccagattgacctgtttggtgatgcctacgagttcctgatttctaactatgcggcaaatgccggtaagtctggcggggagttcttcacacctcagcacgtctctaagctgattgctcagcttgcgatgcacggtcagactcacgtcaacaaaatctatgaccctgcagctggctccggttcactgctgcttcaggcgaaaaaacactttgataaccatatcattgaagaaggtttttatggtcaggagataaatcatacaacctttaacctggcgcgtatgaacatgttcctacataacatcaactacgacaaatttgatatcagactggggaataccctgactgagcctcactttgtcgatgaaaaaccgtttgatgcgattgtctctaacccgccgtactcggttaagtggattggcagtgacgacccgaccctgattaacgatgagcgctttgctccggctggcgtactggccccgaaatcaaaagcggactttgcatttgtcctacatgcgctgaactacctgtctgctaaagggcgtgcagcaatagtttgcttccccggtattttctaccgtggcggtgcagagcagaaaatccgccagtacctggtcgacaataactatgttgaaacggtgatttctctggcaccgaatctgttcttcggcaccaccattgccgttaacattctggtgatgtcaaagcacaaaacagatacccgcgttcagtttattgatgccagcgggttgtttaagaaagaaaccaataacaatatcctgactgatggtcatatcgaaaagattatgcaggtctttgccagcaaagcagatattgaccacctcgcgaaaacaatcccttatgaaacagtatccgccaatgactataacctgtcagtcagcagctacgtcgaagccatggatacccgcgaaattgtagatattgcagtgctgaatgccgagctaaaaactaccgtcagcaaaatcgatcagttgcgcaaagacattgatacgattgtggcccaaattgaagacaatgaggcacgggcatga

SEQ ID NO: 125637 - DNA, 1230 bp, Enterobacter cloacae
atggcaaaaatcgctaagaagctcactgacactgaaatcaaaagcaccaaacctgccgagaaaaaggttaacctttttgacggcgatggtttgctcctgcgaatcgctcccctggcgaagggagggaagaaaaattggtattttagatatgcagtgcctgtgaccaaaaagcgaactaaggtgagcttaggaacctatcctcatcttacacttgctaaggcacgagctttacgtgatgaatacttgtcgttgcttgaaaatggtatagacccacaagttcataacacccagaaagccaatgccctaaaagatgcaacggaacatacatttcaagcagtagccaagaaatggcttgatgagaaagtcaaaacgtcaggcatctcccaggatcatgctaacgacatctggcgaagcctagaaagaaatatctttccaacgttgggtgatacccccattaaggagattcgccctaaaatgcttaaacagcatttagaccccatagaaaaacgaggtgtccttgaaacacttcgccgcatcatatcccgcctgaatgaaattttccgctatgcagcaacagaagaacttatagaattcaatccggctgacaatcttgcccagagatttagtaagccgaagaaacagaacatgccagccctgcccccaaccgaactcccccgcttccttacagtgttaaacaacgcctcagtccgtatggagacacgattgctgattgaatggcagttactaacttgggttcgtcctggtgaggctgttcgcaccagatgggccgatatagatactgacaactcaatgtggaacatcccggcggagttcatgaaaatgaagaagcctcataaagttccactaagtaaagaagctttgcgagtcttggattcaatgaaagccatcagcgggcgtagagagtgggttttccccagtatcaaagctccactcaatcacatgcatgaacaaacagccaatgcggccataatccgtatgggcttcggaggtgagcttgtagctcacggtatgcgatccattgctagaacggctgctgaggagtccggcaagtttagaactgatgtcttagaagccgcccttgcccactcgaagaaagatgaaataattgcagcctacaatcgtgcagagtatctcactgaacgggtggttctcatgcaatggtggagtgactatgtttcgtctcaaaaatgcaaagttattgccgcataa

SEQ ID NO: 125638 - DNA, 1068 bp, Enterobacter cloacae
atgcgtaaacaaacccgctttaaattcaatgcctacctgacccgcgtcgcggagctgaacgacatttccaccgatgacgtggcgaagaaatttaccgtcgagccgtcggtcacgcaaaccatgatggacaccgtgcaggaatcgtcctcattccttacgaaaatcaacatcgtgccggtcgacgagctgaaaggcgaaaaggtcggtgtgggcgttaacggcacaatcgcgagcaccgccgatactgacggcgatggcgagcgtgaaaccgctgattttaccgcgctggagtccaacaaatacgagtgcgcgcagattaactttgacttccatatccgctataaacagctcgacctgtgggcgcgattccaggacttccagacccgtatccgtaacgccattatcaagcgtcaggcgctcgatttcatcatggccggtttcaacggcattgagcgtgccgcaaaatctgaccgcaaaaaaaatccgatgcttcaggatgtggcggtgggctggttgcagaagtatcgcaatgaagcgccagcgcgtgtgatgtcaaaaatcaccgacgaggacggcgcggtcatttccgatgtgatccgcgtgggtaaaaacggcgactatgcgaacctcgacgcgctggtcatggatgccaccggcaacctgattgacgagatttatcaggatgacccggagctggttgtcatcaccggtcgcaagctgatggcggataaatacttccctatcgtcaacaaagagcaggaaaacagcgagtcgctggccgctgacatcatcatcagccagaagcgaatcggcaacctgccagccgtgcgcgtgccttacttcccggcgaatgccctgatggtgacgcgtctcgataacctgtctatctacttcatggatgacgcgcatcgccgcagcatcatcgaaaacccgaagaaagaccgcatcgaaaactacgagtcaatgaataccgattacgtggtcgaggcatacgctgccggttgcctgattgaaaatatcaagctaggtgacttcaccgcacctgctgcaccggaaagcggagagtaa

SEQ ID NO: 125639 - DNA, 909 bp, Enterobacter cloacae
atgcccgttgactttctgaccactgagcagactgaaagctatggcagattcaccggtgaaccggatgagcttcagctggcacgatattttcaccttgatgaagcagacaaggaatttatcggaaaaagcagaggtgatcacaaccgtctgggcattgccctgcaaattggatgtgtccgttttctgggcaccttcctcaccgatatgaatcatattccttccggcgtccggcattttaccgccagacagctcgggattcgtgatatcaccgttcttgcagaatacggtcagagggaaaatacccgccgtgagcatgcagcgctgatacgtcagcactatcagtatcgtgaatttgcctggccctggacatttcgccttacccgtcttttatatacccggagctggataagcaacgaacgtcctggcctgcttttcgatctggcgacagggtggcttatgcaacatcgtattattctccccggagccactacgctgacccggttgatttcagaggtaagggaaaaggcgacgttgcgcctgtggaacaaactggcactgataccgtcagccgaacagcgttcacagctggagatgctgctggggccaactgattgcagccgcctgtctttactggaatcactgaaaaagggccctgtgaccatcagtggtccggcgtttaatgaagcaattgaacgctggaaaactctgaacgattttggcctgcatgctgaaaacctgagtacactcccggctgtgcgcctgaaaaatctcgcacgttatgctggtatgacttcggtgttcaatattgccaggatgtcaccgcagaaaaggatggcggttctggttgcctttgtccttgcatgggaaacgctggcgctggatgatgcattggacgttctggggttctaa

SEQ ID NO: 125640 - DNA, 558 bp, Enterobacter cloacae; identical to SEQ ID NO: 25303

SEQ ID NO: 125641 - DNA, 606 bp, Enterobacter cloacae
atgagtattcaacatttccaaacaaagttaggcatcacaaagtacagcatcgtgaccaacagcaacgattccgtcacactgcgcctcatgactgagcatgaccttgcgatgctctatgagtggctaaatcgatctcatatcgtcgagtggtggggcggagaagaagcacgcccgacacttgctgacgtacaggaacagtacttgccaagcgttttagcgcaagagtccgtcactccatacattgcaatgctgaatggagagccgattgggtatgcccagtcgtacgttgctcttggaagcggggacggatggtgggaagaagaaaccgatccaggagtacgcggaatagaccagtcactggcgaatgcatcacaactgggcaaaggcttgggaaccaagctggttcgagctctggttgagttgctgttcaatgatcccgaggtcaccaagatccaaacggacccgtcgccgagcaacttgcgagcgatccgatgctacgagaaagcggggtttgagaggcaaggtaccgtaaccaccccagatggtccagccgtgtacatggttcaaacacgccaggcattcgagcgaacacgcagtgttgcctaa

SEQ ID NO: 125642 - DNA, 777 bp, Enterobacter cloacae; identical to SEQ ID NO: 121845

SEQ ID NO: 125643 - DNA, 204 bp, Enterobacter cloacae
atgaaaaaaattttgctgctgcatatgttggtgttcgtttccgccactctcccaatcagttccgtggcttctgatgaggttgaaacgcttaaatgcaccatcatcgcagacgccattaccggaaataccttatatgagaccggagaatgtgcccgtcgtgtgtctccgtgctcgtcttttaaactggcactgttgcaaagttag

SEQ ID NO: 125644 - DNA, 1194 bp, Enterobacter cloacae
atgagcgactatcatcacggcgtcgaggtcatcgagattaacgatggcacgcgcaccatttccaccgtctcgacggccatcatcggcatggtctgcacggccagcgatgctgacgatttaacattcccgcttaatgagccggtgctgattaccagcgtgcaaaacgctataggtaaagccggtaaacttggcaccctgtcaaaatccctgcaggccatcgccgaccagtgcaagccggtcgttgtggttgtacgcgttgccgaaggtatcgacgacccggatgacccggaagcggcacagaaagaaaccatttccaacatcatcggcacgaccgacgaaaacgggaaatacaccggtcttaaggcgttgctggccgcgcaaaccgtcaccggcgtcaagccgcgcattctcggcgtgccggggctggattctctggaagtggcgaccgcgctcgcggcaacctgtcagagcctgcgcgcgtttggttacattagcgcatggggctgcaagaccatttctgacgccatcaaataccgtgagaatttcagtcagcgcgagctgatggtcattcaccctgattttctcgcatgggacaccacggcgaacgaaaccgacattgcatgggcgaccgcccgcgcgctcggcctgcgcgccaaaatcgaccaggaaaccggctggcacaaaacgctctctaacgtcggcgtgaatggcgtcaccggcgtcagtacctcggtctcatgggatttgcaggagaagggaactgacgcgaacctgctgaatcaggccggggtgacaacgctcatccgtaacgacggctttaaattctggggcaaccgtacctgctcagatgacccgcttttcctgtttgaaaactacacccgcacggcacaggtgctggccgacacgatggctgaggcgcacgcgtgggcgattgataaacccgttaccgcaacgcttatccgcgacattgtcgccggtatcaatgcgaaattccgcgagctgaaaaacaacggctatatcgttgacggtacgtgctggtacgacccggagtcgaacagcgtggaaaccctgaaagccgggaagctgtatatcgattacgactacacccccgtccctccgctggaaaacctgaccctgcgccagcgcatcaccgatacctatctggcagacctgtcagactcggtcaacagctaa

SEQ ID NO: 125645 - DNA, 642 bp, Enterobacter cloacae; identical to SEQ ID NO: 121796

SEQ ID NO: 125646 - DNA, 405 bp, Enterobacter cloacae
atgtcattctcaccggacagcaagctaaccatcaaagcgctggaaatggcgtgggaaacccgaggtaaaccagcgggagtaatgttccccagtgaccagggtagccactacacaagcaggcagttccggcagttattgtggcgttaccggatcaggcaaagtatgagccgacgcggaaactgctgggataacagcccgatggaacgcttcttcagaagtctgaaaaacgagtgggtgccagtgacaggctatataaactttagcgaagcagctcatgcgatcacagactatatcgtcgggtattacagttcggtaaggccgcatgactataacggtgagtcacccccaaacgaatcggaaaaccgatactggaaaaactctaaagccgtggccagttttagttga

SEQ ID NO: 125647 - DNA, 765 bp, Enterobacter cloacae; identical to SEQ ID NO: 6031

SEQ ID NO: 125648 - DNA, 279 bp, Enterobacter cloacae
atgacaatgtgggaaaaggtgttacaaaaagatcagttttctgaatgggttatccgaaacaccctctactggatgactcctgtaacttcatggaaacttgaagaaaatatatcctcctggattatcttctttgagacaagtagtcctgaatgtgagtttgaatttggaaggctgttaaacgattttagcctccgtgagaaacttcatcatcaaaccggtcaattgcgtgatgccattgtcagcaaggttctccgaagcatagatgacaggcttgcataa

SEQ ID NO: 125649 - DNA, 468 bp, Enterobacter cloacae
atggcttacgaacggggcggaaatttcctggaggatgccaggaagaagcttaacagggaagcgagaaggccacggcaaagccgtttttccataggctccgcccccctgacaagcatcacgaaatctgacgctcaaatcagtggtggcgaaacccgacaggactataaagataccaggcgtttccccctggtggctccctcgtgcgctctcctgttcctgcctttcggtttaccggtgtcactccgctgttatggccgcgtttatctcattccacgcctgacactcagttccgggaaggcagttcgctccaagctggactgtatgcacgaaccccccgttcagtccgaccgcagcgtcttatccggtaactatcgacttgagtccaacccggaaagacacaacaaaacgccactggctgcggccattggtaagagggtgtacaagagattactgatgcagagttcttga

SEQ ID NO: 125650 - DNA, 174 bp, Enterobacter cloacae
atgagagcctttatgattttgttgttccctttgctttgtgtagtcattgctggggttcttgctgttcgtggcctagatgggtggggatggttcctgtttgcagctgttttgtgtactggtgttgatacggtgcagaaacatgtctctaacaagaataattctgtaagcgattga

SEQ ID NO: 125651 - DNA, 282 bp, Enterobacter cloacae
atgataaaaaacataaagcataaagggcttcggagttttgctgaaaacggtaacaccgccggaattcagcctcacttagcgaaaaaacttcgcatgatattgactacgctaagcaccgcaacatgtcttcaagatattgtggatgtaagggcgctggggtgtcaccccctaaaaggtgaacgtaaaggtgagttttccgtagaggttaacggaaactggagggtggttttcaaggtggaagaaccaaacgtcttagacgttgatcttgaagattaccattag

SEQ ID NO: 125652 - DNA, 294 bp, Enterobacter cloacae
atgataaatctttacgatcctgtacaccccggtgaattcatcagggaaatgttcatggaaccgttcgaaatacctgccgcagagttagctgataagcttgaagtatcacaatctgcattaagtagattgctcaatggaaaaactgatcttagttatgagatggctcttcgactatctaaagttataggccgctctgcagagtcgtgggttaatatgcaggctcagtacagcctctcgaaaagtcgtaagactttatccgagacgctagaacaccttcatccgatgtttccataa

SEQ ID NO: 125653 - DNA, 165 bp, Enterobacter cloacae
atggagcaacatacccctgaatacttacgacgtaccttagctcataaccgtgccctaatggacgatatcattagcagtggcatgtccaggtactacaacacggagattgtggatgccgcatgtgaggcgatagaagctgaattgcgacgacgaggaattttgtaa

SEQ ID NO: 125654 - DNA, 249 bp, Enterobacter cloacae
atggatccaatggataagatttgcgatgtttgtgccctccctgccagcgcctgtacctgtggcttctgcgatgactgcaacgagaagctggcagactgcgtctgtgagcgctgcagcgattgtggaaatttagatgagcactgtagctgctcacgttgcgacgagtgcggtgaaaaactggatgagtgcatatgtgaggagtgcgaagaatgtctccgcagtccacatgattgtatctgcgaaaactga

SEQ ID NO: 125655 - DNA, 1068 bp, Enterobacter cloacae; identical to SEQ ID NO: 121842

SEQ ID NO: 125656 - DNA, 189 bp, Enterobacter cloacae
atgtgtggacgttttgcacaagcccaaacccgtgaagaatatcttgcttacctggccgatgaagccgatcgtgacattgcctatgacccggaacctattggccggtacaacgtcgcgcctggaaccaaggttctgctgttgagcgaacgcgacgaacaactgcacctcgatccggtgctctggggttaa

SEQ ID NO: 125657 - DNA, 300 bp, Enterobacter cloacae; identical to SEQ ID NO: 119517

SEQ ID NO: 125658 - DNA, 855 bp, Enterobacter cloacae; identical to SEQ ID NO: 119518

SEQ ID NO: 125659 - DNA, 504 bp, Enterobacter cloacae
atgccgggcaactgcccgcattatgggcgttggcctcaacacggttttacgtcacttaaaaaactcaggccgcagtcggtaacctcgcgcatacaaccgggcagtgatgtgattgtctgcgcggaaatggacgaacagtggggctatgtcggggctaaatcgcgccagcgctggctgttttacgcgtatgacaggctccggaagacggttgttgcgcacgtattcggtgaacgcactatggcgacgctggggcgtcttatgagcctgctgtcaccctttgacgtggtgatatggatgacggatggctggccgctgtatgaatcccgcctgaagggaaagctgcacgtaatcagcaagcgatatacgcagcgaattgagcggcataacctgaatctgaggcagcacctggcacggctgggacggaagtcgctgtcgttctcaaaatcggtggagctgcatgataaagtcatcgggcattatctgaacataaaacactatcaataa

SEQ ID NO: 125660 - DNA, 141 bp, Enterobacter cloacae; identical to SEQ ID NO: 36145

SEQ ID NO: 125661 - DNA, 240 bp, Enterobacter cloacae
atgcctcgccaaccggatattcgtgctgcttttgttgcggccatacagcaaaaccctaagggctatctctgcctgcataaagacaaattcatcgctgaactgcaggagaggcactggcatttcagcctggcggatgcaaattcatggatcgagcgataccagccggacttcgccgataagacgacaaacggaagcgagaaccgatactggatcctgcgtaacatggggagggttttctaa

SEQ ID NO: 125662 - DNA, 279 bp, Enterobacter cloacae
atgacgatagatgttatctgcggtgtagacaacaactgccgggttattgaaacttcatgcggctgggccgttattaacgttagtctgaagccagaaagaggggatacgttgctggttagcatggacgggagaaaccagtttgtgaagctaatgggtcaggcgctgatcactcaagatggtgaagcgattgaaggggaagctctgaatgatgtaacggtgcacggcgttcttacacatacacttaaccaggttaaagacgataaatcgcctgtaatgtag

SEQ ID NO: 125663 - DNA, 291 bp, Enterobacter cloacae
atgctgtctggccgcagaccttctcaatggtatacctgggatagtgataataatgcgtgggctatttcgggtcatgcacgggtccagcttgcagaagctgagaaatttcgtcgaatccatgaggcaaacgactttatcaataaccagcaattgtctggcaaagctgccatggggcgactgaaagattcagagaaagaacactacaatttgtggctggattatcttgaagcgctggaggcggtcgatacatcaactgcgccagatatcctctggatagataaacctgaataa

SEQ ID NO: 125664 - DNA, 1029 bp, Enterobacter cloacae
atgactaaacatttttctgctgcagatggtatccgaggagtagcttgcctcattgtagttatacttcataatgttagtaaatatctccccacgattggtcaatatacaaagggctgtgaaaaatacggagtgtggatattttttacacttagcgcattcttactaagcgttaagctcatgaataaagaaccaacatttcctgagtatgctaaatacatcatatcaagattctttcgaatcatccccccatttgtcgtagctgtatttacttattattatatgggctacatgaattaccaaaaaatgattgataccatttcctttaattcttcatattttcatttctggacaatccctgtagaattcaagttttacttcacccttcctttgtttttaatatcactcttagtcgcagataaaattaaaggaattatgggaggggggactttattattcttgcttattttattagttcagaatgcatacccttacaatatcaccattgaaaactccattcaaactctaccatacctttccgttttcctttttggtgttttttctgccgtcctgcattgcagacataatataaaagtaagcaacgcaatgggtgatagcatcatactctttataatctcaatattattcataatatctcctggcgtaatagaaaacgtctttagatttcagccaatcgaccttatgaataaatacgtattccttggcattctattcactattttaattttcattttatgtaacacatctggatactcagctgttttttttagtaacaaagcattcagatttatagggaaatacagtttttctatttatctatatcattggcttttccttactaataatcaaaatatctatggagggccagttgaaactatttttgcaaatactatcatgagcattgcgcttgggatgctaatgttttatctatgcgaaacaccaatgaactatataagaaagtccatagagaattttgcatttaaaagaaaagaaatttcaccccaaacctga

SEQ ID NO: 125665 - DNA, 246 bp, Enterobacter cloacae
atgcacaacgatatccccctgaaatattatgacattgccgatgagtacgcgacggaggccgcagagcaagtcgcggaatcagagcgcgacgcgctggcacactatttccagctgctgctcacccgcttagcgaataatgaggagatcagcgaggaagcccagcaggagatggccacagaagccgggatccgtgcgggtcgcattgatgatgttgcgaacttcctcaatcagtggggaaatgaatag

SEQ ID NO: 125666 - DNA, 1500 bp, Enterobacter cloacae
atgaaaaagcgcattgccgttgcgatcgtttcaacgcttctggtcatcctgtctctttatgcggtcaatgcggttatccttggtcagcaaaaaaccaaacagcttgaaatatcccggacccttttacattattccgaagacctgtcccaaaacgtggcgctgggccttaaaagcataacgacgcagggctgtgataaaaccagccttgatagctacagacaaataaagcttaacaacctctatttcggcgatatcggttttattgaaaaaggaaaaattatctgtactgctttttggggtaaactcgcgacgcccgttccacttcctgcggaactgcataaaacgccgagaggttttctcctcgcgcagttttcaagaaaagactttttcacgggcaatgcggccatttataataatattattatcttcacttcccgctatgcttacgataaattcaccccggttaccgcaagctattctctgagtgccaccacaaaggactttggccggatctttttttcggctgcccccgacctgcgagcgcggagctggctgcactccacgttgttcaccctgaccattacacagtgcagcgccgtgtgggatttatgcgtgattgtaaaacatcacgatgcgggactggcctcgttacccccgtttatcttgacgtttctcgcgatcattctctactttatctgggtcgctataacgttatttgtcttccgtatccatgaagaccgtttttcgctggaacgtacgctgatcaaagccgtgataacgaataccttcagcgttaactatcagcccattattcgcattcgcgatcaaaaaatcgtgggcgtggaagttttgtcgcggtggcgcgatcaaaaacacggagacgtctcgccagagctgtttatcccattaattaagaaaatcgggctgtataaaagatattatggcaatgttatcggtaaatctctctcagaaattgccccgctggcgattaagcatcagctgatcgtttcaatcaacgttgggcggaaagaaattgaagacggacagtttattaacattttgcgtcgcgagtgcttagtcaacaaccttcccctttccctgatgaaggtcgagctttctgagaaagccgtttccgcggcggatatccttgagggattctgccaggaactaaaatcgcttggcgttaaaatttcaatcgatgatttcggcgtgcaaaattcaaatctggcgcggctgtcgcagcttgaatatgatgaaatcaaaattgacaaatcgctggtggatggcatcagcgaagattataagcaaaacatctttgttatcttcagcgatgccctcgcgaagttgaataaaacccttgtgttcgagggcgtggaaaatgaaactcagtatcgctttattgcgaacagatatcccgacgcgctgatccagggatggtatttttcaaaagcactcacccggagcgagctggcgaagcgactcaccggcgtcgccccctaa

SEQ ID NO: 125667 - DNA, 123 bp, Enterobacter cloacae
atggcggcctttttacgtactggcgtttaccaccagccaagctgcgtgccggcaaacgccgcgatggcaacgatcagcataatgacggttgtcttccgcatttatgcccccggcgccgcgtaa

SEQ ID NO: 125668 - DNA, 345 bp, Enterobacter cloacae
atgattcagtgcaaacgggtatacgaacaggcaagccctgacgacggctataggatactggtggacaggctgtggccgcgcgggctgaagaaaacggatctcgcgtatgacgaatggtgtaaagcgctcacgccttcgaatgaactacgaaaggcctttcacagcgacacgattgatttcaccgccttcagtcaggcctatcgggaagagctggcgcagcaggctgacgagggcgtgcgtctggcgacgctggcgcgcaggcagaccgtcaccctgctctttgctgccaaaaacacggagcaaaatcacgctctggtcttagccgactggctgcgccatctgtga

SEQ ID NO: 125669 - DNA, 1914 bp, Enterobacter cloacae
atgcggttgtttattgccgaaaagccgagcctggcccgtgccattgccgatgtgctgcccaagccgcatcgcaaaggcgacggctttatcgaatgcggtaacgggcaggtggtcacctggtgtatcggtcacctgcttgagcaggcgcagccggatgtctatgacagccgctacgcccgctggaatttaaacgatctgcccatcgtgccggaaaaatggcgcctgcagccccgaccttcggtgaccaaacagctcaacgtgatcaagcgcttcctgcatgaagccgatgaaatcgtgcacgcgggtgacccggacagggaaggacagctgctggtggatgaggtgctggactatcttgaactggcgccggaaaagcgccagcaggtgcagcgctgtctgatcaacgacctcaacccgcaggcggtggagcgtgcgatctcgcgcctgcgcgccaacagcgaatttatcccgctgtgcgtctccgcgctcgcccgcgcgcgcgcggactggctgtacggcatcaacatgacccgcgcctacaccatcctcgggcgcaacgcgggctatcagggcgtgctctccgtggggcgcgtgcagacgccggtgctggggctggtcgtgcgtcgtgatgaagagattgagaacttcgtcgccaaagatttctttgaagtgaaagcgcatatcgtcacgcctaaagacgaacgctttaccgccgtctggcagccgagcgatgcctgcgagtcatatcaggatgaagaggggcgtttgctgcaccgtccgctggcggatcatgtggttaaccgcattaccggacagcccgctctcgtcaccagctataacgataaacgggaatcagaacccgcgccgctgccgttctcgctgtcggccctgcagatcgaggccgcaaagcgctttggcctcagcgcgcagaacgtgctggatatctgccagaagctctatgaaacccataagctgatcacctatccgcgttcggatagccgctacctgccggaagagcattttgccggtcgtcattcggtgatgaacgccattagcgtgcacgcgccggatctgctgccgcagccggtagtgaacccagatacccataaccgctgctgggacgacaaaaaggtggacgcccaccacgcgattatcccgacggcgcgcgccagcagcgtcaacctgacggataacgaagcgaaggtctacaacctgatcgctcgtcagtacctgatgcagttctgcccggacgcggtgttccgcaaatgcgtgatcgagctggaaatcgcaaaagggaagtttatcgccaaagcccgtttcctcgcggaagcaggctggcgcacgctgctcggcaacaaagagcgtgacgaagagaacgacggtacgccgctgcccgtggtcgccaaagacgacgagctgctgtgcgagaaaggggaagtggtggaacgccagacccagccgccgcgccattttaccgatgcgacgctgctttccgcgatgaccgggatcgcccggttcgtgcaggataaagatctgaagaagatcctgcgcgccaccgacggtctgggcacggaggcgacccgcgcggggattatcgagctgctctttaagcgcggttttcttgagaaaaaggggcgctatatccattcgaccgagccgggccgcgcgctgattcattccctgccggagctggccgccaggccggacatgaccgcgcactgggaatcggtgctgacgcagatcagcgagaagcagtgccgctatcaggactttatgcagccgctggtggggacgctttaccagctgatcgatcaggcgcgcagcacgcccgtgaaaacgttcagagggatggttgcacccggtggtggcgcgaagaaaccgtttaaaaagaaaaagagcgcggccgcttcttaa

SEQ ID NO: 125670 - DNA, 570 bp, Enterobacter cloacae
gtgaaagagactaccgcctgggttgcccctatcgaatcccttcccgccagccttaaacccattgccgtgatgcagaaaaagcattttggcgccgtgctgaatcccacgcgctggtgggggcgcatgccgcgtctgttctggctggtcgcgctgttcgtcggttttctggagcgtcgtcacgcgcgcctgacgcccgtgctgcgttcgctgctcatgacgcgggtgtcccagctctgccactgcgctttctgtattgatgccaacagcctgcggctggccgagcgctgcggtgcgctggaaaaggtgcaggccgttagcgactggcaggcatccgccttgttcacggagcaggagcgcgcggcgctggcctacgccgaggcggtgaccgccacgccgccccgggcggatgaggctatcagaacggcgctgaagcgccactttacggaagatgccatcaccgagatgacggcgctcattgcctttcagaatctctctgcccgctttaacgccgcgctggatattccggcgcaggggctgtgcgccacctttaacgagacgccccatgcttga

SEQ ID NO: 125671 - DNA, 1530 bp, Enterobacter cloacae
atggctgcgtcgttacggcacccgctgagcgggctcgtctggctggcgatggcggtgatttatctgccgatcctgcccgccggcgccatgctgctggccccggcgttttcgctgacaaactggcagcggctgctgaacgatccgcagctcccgcaggcggccgtcgccacgctggtctcaacgctcatcgccacgctgggggcgttgttcattgctcttctcctcgtcagccttctctggcccggtaaacgctggcgacgtctcacaacccgtctgccgtggctgctggcgatcccccatgtggcgttcgccaccggcgcgctactgctgtttgccgagggcggactgttttatcaggtctgcaccgtctgttcgccgccgtttgaccgctacggcgccgggctggggctgacgcttgcggtcaaagagagcgcgtttgtcctgtgggccatttatgccgtactgccggaaaaacggctcgcgcagcagaagatcgtcctgcatacgctcggctacgggcgttttcagacgctgagctggctgattctgccagctatcgcgcccgtcctcggggcagtcatgctggcggtgctggcatggtcgctgtcggtcgtggacgtggcgatcgttctcgggcccggcaacccgcctaccctggccgtgctggcctggcagtggttaagccagggcgacgcgcagcagcaggcaaaagggacgctgctgtgcctgcttctccttctgctgctggccgcgcttgccgctctgggatacggactctggaaggcatgggttcgcacacttgcggacctcaccggaacgcgtccccggtcgcagcgcgtcctgcctgagcgggcactgagcgggtttctgcccgcctgcggcgtcctgtgcgccgcggtactgctgatgctggcgcaacgggatgacgttggcccggtgggaaccagcctttccttcggtctgctttcagccctgattgccctggtcgtcgggttactctggctggagtggggcccgcagcgcggcacgctgtgggtatggttaccgctcgcccttccggccctcccgctcgtcaccggccagtatgccattgcgttgcacctgggcatcgacgggcactacgccgccgtgctctggagccaccttctgtgggtattgccgtggatgctgctggtactgcaacccgcctggcgacggatcgatccccggcttatcctcaccgccagaaccctcggctggcggcggacaaaaatctttttactgctgaaatgcccgctgctggtgcgccctgcgctactggcctttgccaccggcttttccgtcagcatggcgcaatacatgccgacgctgtggctgggcgcggggcgtttcgccacgctgaccaccgaaaccgtggcgctcagcagcgggggcagcatcccgattctcgctaaccgggcgctgggattactgctggtcacgggctcggtgtttggtgctgctgccctgctatcccggctcgcgggccgctaccgacaagggttacgttaa

SEQ ID NO: 125672 - DNA, 684 bp, Enterobacter cloacae
gtgaacctttcaaaaacactcttcctgtgcgcccttctgggcgcctttattctggcgtttatcatgcttccgccgggaaccctctccctggaagggattaaaacgcaccagcaggcattactctcctatgtcgaccacgcgccgctgcgcagcgcgctgatcttctttgcggtctatgtggcggtctccgccctctcgatccccggcgcggcgatcctgaccctgctgggcgggacgttgtttagcctgtgggaaggcaccgtgctggtctcgtttgcctccacgcttggggccacgctggcgatgctcgccagccgctatcttttgcgcgactgggtgcaacggcggtttgcccggcagatgagtacggtgaataccggcatggcgcgcgacggcgcgaactttctttttgccctgcgcctgatgccgctgttcccgtttttcctggtgaatttgctgatggggctgacccgcatgggagtatttcgctactggtgggtcagcctgctcgccatgctgcccgcgacggtggtctttctcaacgccgggcgcgagctgggaaaagtgacctcgctgcgcgatattttgtcgccgggcatgctattcgcctttacactactggggttattgccgttggtcacccgccggctgttttcccgttatctcccgtctgctaaaaagtga

SEQ ID NO: 125673 - DNA, 822 bp, Enterobacter cloacae
atgaaacggtggcttgtcctgctcagcgccctgcccctgatgtcgtttgctgcgccgcaggagaaaatcgtcacgctcggcggcgacgtcaccgagattgtctacgccctcggcgcgtcgtcttccctggtggcccgcgacagcaccagccagtggccgcaggcggcgaacatgctgccggacgtgggctatctgcgccagctcaacgcggaagggatcttgtccatgcgccccacgctggtgctggccagcgcccaggcgcagccctctctggcgctaaagcaggttgagcaaagccacgtccgggttatcgcggttccagccgctaacgatttgagcgtcatcgacgaaaaagtgcggatcgtggcggaagcgacgcaccgggaggccgagggggaagccctgcgcggcaagctgcgtcaggcgctgtcaaccctgcccacatcgccgctcaacaaacgggtgctgtttattctcaaccacggcgggatgaccgcgatggctgccggacaacagaccggcgcggacgcggccattcgcgcggcggggctgcagaatgcgatgcaggggttcacccgctatcagccgctgtctcaggaaggggtgattgccagccggcccgatctggtggtgatttcgcaggacggcatcaacgctctgggtggcgaagcgaaactctggacgctgcccgggctggcgcaaaccccggcaggacgcaataagcaggtgctggcgatggatgatatggcgctgctgggctttagcgtgcgaacgccggaagccatccggcagctgcgtacaaaagcggagcaactgccctga

SEQ ID NO: 125674 - DNA, 1221 bp, Enterobacter cloacae
atgctcacaaccatcatttaccgcagtcatatctgcgaggacgttccagtgaaagcgctggaagcaatggtcgctgctgcaaatcgtaaaaatcggcaatccaatgtcacggggatcctgctgtttaacggcacacatttttttcaactgcttgaagggccggttgagaacgtgtcggctatctatgagcagatctgcaacgacccgcgccaccataacgtggtcgagttaatgcgcgatcacggccctgtccggcgttttggcaacgtgggtatggagctttttgatttgcgccacttcgaccgggacgaggtgctgcagcagatacttaataaggggacgacacgctaccagctggcctataacgatcgccctctgcagtttttccgcacctttgtcgaggccacggaaaaagcgaactattttgaactgccgcctgcggatacatgggatttcgtacgcgaagagacgcgtttgtccgcacagcctgaggtggtcgcgaaaggggcggattgcagcttcgcgttccagccgatagtcgatccgtttatgcagcaggttgtctcctgggaggcgcttctccgcaccccgtccggcgactcgccgggggcctatttcgccagtcttccgcaggaggaagtgtacacctctgatttgcagagcaagcaggtggctctgtctatggccagcgcgctggggttacaggaccagacgttatccctgaacctgctgcctatgacgctggttaacattcccaacgccgtggattttctgctcaccgcgattgaagcaaacgggtttgtacctgagcaaatcgtggtggagttcaccgagagcgaagccatttcccgttttgatgaattcacggattcggtcaggcagttaaaaagcgcgggtatcagcgtgacgatcgatcactttggtgccggttttgccgggctgcagctgctggcccacttccagcctgacagaattaagattaatcgcgatctggtcgcgaacgtgcataaaagtggcccccgacaggccatcattcaggcgatcatcaaatgctgttcctcgcttgaaatccagttctgcgcggtgggggtagagaaggcagaagagtggatgtggctggaatctgcgggaatttcccagttccaggggcatctttttgccagcccccggcacggcggtattccagccattgcctggccggagaaaaagttcgaattgtga

SEQ ID NO: 125675 - DNA, 1596 bp, Enterobacter cloacae
atgaagaagatcgcgattatcggctccggccccacgggaatttacaccttttatcatctgcttaataacaataccccactctccgtttccgtctttgaacaggccgatgaagctggcgtgggcatgccctataacgatgacgataattcccggctgatgctggcgaacattgcgagcattgaaatcccgcccatttttatgacctacctcgactggcttaaggagcaaagcgacgaccatctggcgcactttaaagttgataaagccagcctgcacgatcggcagttcctgcccaggatcctgttgggagagtattttcgcgacagctttcgttcaatcgtaaaagaggcgaaaaagctgggcttccaggttgaggtccatgaatctgcgaaggtcaccgacatcaacccttcgacaaacggcgtgacgatttcggtcaatgaccgcacattagcggataaattcgacctggcggttattgccaccggccacgtctggccagaggaggatgaagccacgcgcacgttcttcccaagcccgtggtccggcctgatggacgcccgcattcccccttgccgcgtgggcattatgggcacctcgttgagcggtctggacgcggctatggcggtggtgatgcagcacggcgagtttcgtgacggtaaattcatcctcgacagcggcagcgaagggttaaacattacgctgatgtcacggacgggcattctcccggaagccgatttttactgccccatcccttatgaaccgctgtcggtattgaccgaattcgtagtggaaagcgagatagccaaaggaccggatggcctgcttgaccgagtctttgccctgatggcgaaagagcttgaactcgccgacccggcgtggtgcgagaaaatgtctctgcatacgctgaatgcggacaccattcgtgaggcctggtttgaggatcgtaagcgccacgggccctttacctgggcggaagagaatctcaacgaggttgaacgcaataaacgcgaacgccgtaccgtggcgtggcgctacaccgtgcttcggctgcatgaggtcgttcaggagatcgttccccatcttagcgagcaggacagaaaacgctttaagcagggcctggctcgcgtgtttatcgacaattatgctgccatcccgccgcagtctattcgcaggctgcttgcgcttcgcgaggccggcatcattagcgtggcggcgctcggcgatgattacacgcttgatgccggcagcgatcggacagtcatcaccacacaagagaccgtttatcgtttcgacgtctttattgatgcgcgcgggcaaaagccgcttaaaacaaacgatctgcctttcccatcgctgcgcagacagcttgaggagacgggcgatgagatccccgacatcggcgaggattacacgttaaaagcgccagaaacggttcgtgggcgcatcgccttcggcgcaataccgtggctgatgcacgatcgtcccttcgttcaggggctggcagagtgtgcggagattgcagaagcgatggcgaaggcggctgaaaaaccggcctcaggtatacggcgtcggttaccgtacgtggagaactga

SEQ ID NO: 125676 - DNA, 1362 bp, Enterobacter cloacae
atgcttgcgaatagtcgttgtctaaaaggtcgttatatctcgttctgtttcggttgccttgtcgtcatcggaatattacaagctctcttttcaaaagtggttgaatgggttccctccttctcgcctcttttgttccctacgctcaccatttttttactcgtgtttcacctgtttattgcctgctttatggcaatgaaatactggtgtgataagcggcggctctatctgattgcgatcgcctttgcctttgccggttcggcactgttgatggtcggaacgctgtccagctttccagcgtggctgaacctctatcagttcaacgtcgttaactacaacgatgcgatgatctactttatgttccgccactttttaatggcggtgttgttcatcgttgcggcaatactctatcctacgcgcgattaccccttttcacggttggcgcatatctcaattgtgagcggggcgtttctctttaccgcctgcgttgtgggactggcctggatatattctagtcactcgcccttgttatccattgacctggttgataacgaaacccgtcagtttatggtgctctggagccaatgcataaatatttctttaattgtcttctgggtggtttcattagtaacgctgatgtttgtcacgcgcgtgcgcaatttattctgggtaggcggaaatttcctgtgcgtttgctatatcgtcacgctcgccatgctgttagtaggcggacatgctgaagatatatcgtggtatcgcgcccggctatttgaaaccgtcgctacgctgatgattatttttgtactgctctacgacgtcttcatgctgtaccgtgattcccatttaaaatatcagcagtcatatcaaaattcgattcgcgatccgcttacgcgcctttataaccgtagctatttttatgaatcgttaaaccaggcgctggacatggcgaaacccagccgcccagtttcggttatcgtcagcgatctcgaccgcttcaagcgtatcaacgataactatggccaccttcagggagacaaagtcttacagtttgtcgccaatctgctgatggattccgtacgcccgcaggacatcgcggctcgaatcggcggtgaggagtttgtgctgatgctggccaacacctcttcagatgcagcccaccaggtggcggaacgtattcggttgaagctaagcagctttgataaaaccagcagcggagggcagctacctgagccgattaccatcagcatgggagtatttacggcgacgtcatcgtccgtgaccgcagaagcgtgcgtggagagtgccgacaaggcgatgtatgaagcgaaggagacaggccgtaatcgagtggtggtctttaagtaa

SEQ ID NO: 125677 - DNA, 261 bp, Enterobacter cloacae
atgtatagctacggtcaggtagaagcgataaaaaccaatcttgagtggattgttaatcaggcaaccctgaaccacgcctccccctcacgcaccgatcaaaaagcgctctttgacctgctggaactcatccagtcttacgaaatactgctggatctcatcagcgaatacggaacggatgtgattgatacgcacattgcagaaggcctggccgtgacggaaaaattcatcgccaaggtaaaaaacagcgcgaaagccgtctaa

SEQ ID NO: 125678 - DNA, 1263 bp, Enterobacter cloacae
atgttcgcgctggttgatgtgaacagcttctatgcctcctgcgagaaggtattccgccccgatctggaggggaagcccatcgtggtggtgtccaacaacgacggctgcatcatttcactctcgcgggaggcaaagcagttcggcataaaaatgggtgagccctattttaaattcaaagagaagctttttccggcgagggtttacgtcttcagttcgaactatgcgctgtatgccgacctcagcagtcgggtgatgcagacgctgacggatctggctccggccatagaaatttactcgattgacgaggcgttcgtgaacgtttcagggatcggtaactgcatgtcgctggacgcgttcggacaccagatgcgcacgcaggtctttaaaaacacgggtttaaccgttggcgtcggcattgccccgacaaaaacgctggcaaagctggccaactatgcggcgaaacggtgggccagtaccggcggcgtggtcgatctgtcgggccgcgagcggcagcgtaaactgctggcaaaggttccggtagaggaggtatggggcgtagggcggcgcatcacgaaaaaactgaacgcgatggggattaccacggcgctggagctggcggaggcctcctcgtgggtcattcgcaaacattttaacgtggtgctggagcgtacggcgcgcgagcttcgcggcgagccctgtcttgacctggaagagtacacccccacgaagcagcaaatcatctgtagccgttcgtttggtcatcgcattacgcaatatgaagagatgcaccaggcgatttgcgcctacgcggaacgcgccgcagagaaactgcgcggcgagcatcaatactgtcgttttatcagcgtgtttgtgcgcaccagcccgcatgcggacaacgaaatttattacggtaatcaggcttcggtcaccctgatgacgcccaccaatgactcgcgggatatcatccgtgccgccacggaggcgctggggcggatatggctcgacgggtatcgctatatgaaggctggggtcatgctggcggactttttcagcagcggtgtcgctcagcttaacctgtttgacgacaatcgcctgcgcgccaacagcgcggcgctgatggagatgatcgacagcgtcaatcactccggcaaagggaagatatggttcgccgggcaggggattgagaaaccgtgggccatgaagcgggaaatgttgtcaccggcctatacgacgcggtacgcggatttaccggtggcgaggtaa

SEQ ID NO: 125679 - DNA, 897 bp, Enterobacter cloacae
atgaataataagctcaatgccatttctacctttctgcgcgtcgctgaagcgggctcgttttcagcggctgcccgtcagaccggtattaagcagtccgccgtcagtcaacagatcgcggcgcttgaggaagagcttggcgtggtactgctgcaccgtacgacgcgtacgatgaagctgaccgaacaaggggaacgctaccggcgtgatatgcagctcgtgctggacgccatgggggaagcggagaggcgtttacatcctgtcgatcatagcgttcagggacgcgtccatgtccagttgccgagcggcctggggcagatcattttgccgcatctgctggcgctacagcgcctgcatcccgaactgcagctgatgctttccctggatgaccgccttgccgatctggtggcggagggcgtggatgtcgcgatacggctgagcagcgagcctccgcaggcgcacgcggctcgcgtgctggggcgtattgaagctgcactgtttgccgctcccggctttcaggcggtacacgcggtcagcgaactggcgacgctcccacacgtgcggttcagcggcattccgctggatgctcccctgcgcctgatgtctgacgcggagacggtcgaggtcaacgtgaataccgttttccgtgccaacaccagcgacgcgctgctgcaggcgctggaatccggcatgggtatcggcggcatgcagcgaccgctcgtggccagggctctgcaggcgggcacgctggtaccggtgctgcccgactggcggttacccgatcgcttcctctatgccgtttatcctgatgcccgctttattccgcagcgcgtcagaaaggtcgtcagcgtgattgagcaattactgcctgagatcgcgacccacaacgccacaaaataa

SEQ ID NO: 125680 - DNA, 1056 bp, Enterobacter cloacae
atgaataataggcagcaacacaacgtcgctctggtcgcgggcgccagcggcattgtcggcagacagatggtcaacacgctcctgcaccatcagtggcaggtgatcggccttagccgccatgccgggtcgcatcctgacggcattccgatggtcaagatcgatttactggatgaaaaggacagcgcccgggcgctgcgctccctggacggtgccacccatctcttttacagcgcctgggcgaacgcggcgaactgggaagacatggttgagccgaacgtcaccatgctgcgtaatctagtcagcatcctcgaaaaaacggcacctttgcagacggtaagcctgatgcaggggtacaaggtctacggcgcgcatctggggccgtttaaaaccccggcgcgcgaaagcgatcccgtcgtaccgggtgccgaatttaacgccgcgcagcttgcgtggctcagccagtttcagcggggaaagcgctggcactggaatgccatcaggccgggcgtggtagggagtgcggtaccgggcaatgccatgaaccttgcgctgagcattgccctgtacgcctccctgtgcaaggcgctgggtttaccgttgcgttttcccggttcggaacagacctggcacagtatcgttgaccataccgacgccgggctgctggccgaggcaacgctgtgggccgccgcgtcacctgcggcacagaatcaggcgttcaacgtgaataatggcgatatctggcgctggagcgagctctggccgcgcatcgcacgctggtttgacctggactctgcaccgccggtgaggctgtcatttcatcagctgtttacggactatcgcggcgtatggcgcgagcttgccggagagcggctggtggaagcggatattctgcagctgagcgacgggcggtttgccgattttgtctttagctggaattacgacatgtttggtgacgggagcaagctgcgcagggcgggctttacgcaaatgcaggcgacggatgagatgtttttccacctgtttgcgcagttgagagccgcgcggattattccctga

SEQ ID NO: 125681 - DNA, 981 bp, Enterobacter cloacae
atgaaaaataaccgtatctgtcagatcctgggtatcgaaaagcccgttattcagggaccgttatcctggcttactgatgcccgtttagtggccgcggtcagcaatgccggaggactcggcgtgctgggccccaacgccggtttaaccgccgataccgcggtctccacgccggaagagaccgccgaaaaaatgcgggaagaaattcggaaaaccaaacagctgaccgaaaaacccttcggcgtgaacctgatccccaccgccgttaatgacgtctggaccgggccaattcttaaggtggtaaaagaggaaggcgtcagggccgtggtgtatacgggctacggggaaggcagcattattcccgcgctgtttagtgagttaaaagaggcaggtatcgccattatctaccgcgacatcaatcccacgccggaaaacacccttctggctgaagagatgggggcagacatcatcgtcgccaccggttttgacgagggtgggacgctacccgcgacggcgctgggtaccttttccatcgtgccgctgattgccgacgccgtgaagcacgtcccggtgatggcggcgggcggtataaccgacaatcgcaccgccagagcggcgcatgcgctaggggcggaaggcgtgtttgccggctcggtgtttatcagtaccgaagaaagccgcgtgccgcagggggtcaaagagaaaattgttgccgccaacggcctggacctgctgcttttccgcaccgtcccccactactatcgttctctccccggcaagctggcggaaaaactggcggcgatggataaagctggcgcaagcaacgaagcgctgggcaaggcgatgggcggattacggggcctgcgcctgggcatgctggaaaataataccgatgaagggtatatcgcgctcggcacggggatcgggaatatccgcagcgtgaaaagcgtggccgaggttgtcaatgcgttaacggttgagtaa

SEQ ID NO: 125682 - DNA, 885 bp, Enterobacter cloacae
atgcaaataaacctctttgaatctattcggatttttattgaaattgtcgactcggggagccttacccaggcggcagagaatctgcaggtccatcgcccggcagtgaccaaagcgctgcagcttctggaacaacacagcggcacgcggctcctgcagcgcaccacgcgtcggattagcctgacgccggatggggaagccttttatcgccgcagtaaacctctgctggcgcaggcggacgaattactggagtcgtttggcgccgatcgaccgatacacggccagctgcgtgtggatatgcccatctcttttgcggcgctgcgggtgatacccaacctgcctgatttttatcgtcagcatcctgatatcgacatcatcctgagcagctctgaccgccgtcgggatatgctgcgggacggcctggactgcgtgctgcgggtgggcgagctggacgacggcgactatatcgcgcgtaaaatcgggaacattaaaatcacgacctgcgccagcccggcctggctggctgaacacggtacgccagaaacgctggaggatttacgcaagcatcaggcgattaactggattaacaacagcagcaggcacgttcagccgtggacgtttaccacgccagagggcgttgcggagatcgcgctacccggtaagctcgtggtggataactccgaggcctacatcgcggcaggtctggccgggctgggggtaatgcagggaatgaatctctttctccagccttacattgaccgcggcctgctggttgaggtcctgcctgaatatcgctcgccggaccgcaaactgtcactgctctacccacaccgtcatctctcccgcaaagtgcgggtatttaccgaatggctggagagtctggtgtga

SEQ ID NO: 125683 - DNA, 1149 bp, Enterobacter cloacae
atgtcagacgaattttttctctccctccgccactgcctgcatcatttgtacggcgtggcgcgcaccctttcctggctgcattttcttcccctggccctgcttgcgctggcgatttttccgctgaccggctgcggtgataaacacgaaaacaaacctgatccagtgcgtaaggtacgctacgtcgtcgttggctccgcccaatcccttcccgcgctggaaagaaccggtgagatccatgcccacgatgaaacgaccctgagctttcgcaccggaggccggatactgacgcgtagcgttgatattggcgaccgggtcactgccggacagctgctggccacgcttgataatacgaccgggcaaaaccagctcgacagcgcagcggccgactatgaaggcgccaaagcctctgcccaggtcgccgcgcttaacgtcagtcgcatgcaaaagcttatgccaacgggcgcgatagcccgcacgcagctcgacagcgcccgggctgactggcttgtcgcccgcgcgcgcttaaaaagcagcgaggccgcatggcgaaatgcccgcgaaagtctcggctggacgcgcctgatcgccccacaagcgggcgtcatcacggccgtgagcgcctctgcgggacaggttgtcagcgacggccagtccgtgctgacgctggcgaccggggaagcccgcgacgtggcgtttgatattgccgcgcccgatgcgatcccgcctctggataaggcggttttgcaggtttccctgctcagcgacccgtcggtgcaggcgtctgccgcactgcgggatatcaccccgcaggccgatcctcagacccgcacgtggctcgtcagagccaccctgcaaaacccgccggaggccatggcgctgggcgccagcgtcaccgtgacgttgccctccgccgccccgcacgggtacgcgcttcccgcgtcggcgctgacccgagccagcgacaaaccggcggtttttgtgattaccccgcagtcgcggacacagctgcgcgtggtgatacccgtcggctatacggcctcctccgtcatgattgcctccggccttgagccaggcgagcgggtgattacggcaggcgtgagcacattacgacccggcgagccggtgatggccggagaggttcagccatga

SEQ ID NO: 125684 - DNA, 477 bp, Enterobacter cloacae
atgataaaaaaccggcacgcctctctgtggcgctggatttgcgcgcgcatcctggcgctggctatcggcagcgtaatcgtcattgccacctgcatgtggctgcgctatgcggtacagaactactggatcatgggcaggatgccgccggcagtccggcaggagtttcttacgctcagccagaacccgcaggccaatccggcccgcttccacacgattgtggatacctggtggggcctgagctattccacgccgtccatcgcctcagcggactgggtcacggtggccctgctggtgctggtgatgatcccgtttattgtggtgatggggctcaaacacgcccgcccgctggcgctgcagttcagccgccttcgcgatgcggcaaaggatgtgccgaagggcagtttggccgtcaggcagagctcatcaaggatgcaccggcagaaatggtcagctttgcggcggactttaactccatga

SEQ ID NO: 125685 - DNA, 696 bp, Enterobacter cloacae
atgttatccagaagagtgctgattattgaagatgacgccgacgcggctggcgtgctcgaagcctatttacggcgtgaaaattacgacgtgaccattaccggggacggtctttccggcctggatatggcgcagcggtggaagcccgacctcatcctgctggatgtaatgctgccgggacttaacggcaccgaggtgctggcgggcctgcgtcgtaaaagcgatgtgccggtgatcatggtcacggccatgggggatactcccgatcgcattggcgccctgcgttacggtgccgatgattacgttgtgaagccttatcatccgggcgaagtggtagcgcgggtgcaggcggtgctgcggcgcagcagtaaaaaagagacagaggaaaagatccttcgctggcaaacgctggcggtggatgtcgccgccattgtggcgtgcgtggacaacggcgacgacgcgcctgtgatgctcgatcttacgccaacggaattctcgcttctggcaacgctgctgcgctcgcctgcgcacccgttctcccgccagtatttactggaacactgtttgccggaaagcgaggcgctggagcgcgtggtggacacccatatttataacctgcgtaaaaaactcgaggccgtgggtatttccggcgtgctgatcaacgtgcgcggcgtgggttacaggttcagacagccatga

SEQ ID NO: 125686 - DNA, 786 bp, Enterobacter cloacae
atgatagcgataaataaagtcctgtatatgtccgtcccgcttctgatggtcgtggcatccgccgcgcaggcggatgatgacaccgcgtctgattccttaaccgtcgggctgggagggcaatatgccccgcgttactcaggctcagacaagcaggtgtggcaggtggttcctgtgctgcagggacgcaaaggcgctttctttgttgatgcacaaaaaggggtgggatatgacctgcaaaacgacagcggctggtatttcgaacacacgctgggctacgaccccggaagggctgataaaaattctggctggcgcgagggggcaaacaacctgaaagggatgggggatattgatgccaccctgaataccggccttgccgtcggctggcaggctgcgccatggctgagcatggaaggcaaagcgacgctgccgttaaccgacagtcagggggcaagctatcaggcctccgttacgctgatcccggtacaaaataaccaggacacgatagcctttcagtctgcggccctgtttggcgacagccgttacctgaatacctggtatggggtcagcgagcagcagagccgccgcaccggctatcgccgctatgctgcgccgggtggattttacggcgtcgacaccagcctgacctggagccatcagttcgatgctcactggggaactgtcctcagcgcggactatacctggcttggcgaccatgccaatgatagcccgattgtgatgcggcgcaatgaggggtctgcaaccgccgcaatcacctggacattctaa

SEQ ID NO: 125687 - DNA, 948 bp, Enterobacter cloacae
atggaaaacctggccctctggtatcgccggtttggcgagccagaatctgttctgcaacctgaaaacgcgccgctgggcgcgcttgcgcccggacagctccgcgtgcggatgctgttttctccggtcaacgcgtccgatcttatccccatcaccggtgcctatcgccacagaaccccgttacccgccgtcgcggggtatgaaggtgtcggggttgtcaccggggcgcccgcctcgtttaagcatctggtgggtaagcgcgtcctgccgctgcgcggtcagggcacctggcagcgctatgtggactgcccggcagagtatgcgatacccgttccggacgctgtcgactcgcgcctggccgcgcgggcctacatcaacccgctggcggcgcagatgatgctgacccgctacccgccgcgcggaaagcgggtcttgctcacggctgcaggatccgattgcgccatcctgctggggcagtgggcgcgtcaggcgggggcggaagcggtgttcggcattcaccgttccgccgtgcatgctgaacggctggaggcgatggggatcgcgcctgtcgcgcagcatgacgcgcacagaatcggcgccgtcgccgcacgcagcgatatcgtctacgatgccaccggcgggccgcttgcggaagcgatcctcagcgtcatgcccgagccgggcatgtttgtttgctacgggctgctgtccgggcaagccttcacacagcggcggcctgcgccgcgcgtggcgtggttccatatccgaaacggtctggatgcgctcagcgttgaggcgtggcgcgcggagttcgatcgcatctggctgaggttgcccgacagtgagtacagcgacgttacggtgtacccgctggcggagtggcgaagggcgctcagcgcttatcgtgaaggtggaaggacccgcaagcccctcctgtcgatggcagaatga

SEQ ID NO: 125688 - DNA, 306 bp, Enterobacter cloacae
atgttttttagcagcctgggctttctgctctacagccggtttggtcgcttttttgtggtgctttttagcagcctgggctttctgctctgcagctggtttggtcgcttttttgtggtgctttttagcggcctgggctttttgctctgcagccggtttagcggctttatgatgtttcttgtgatggacagtttttgctggcgccgcggtggtcgttgcagcaggtgccgcagcagccggtgcagcagtggtttcagcagcgaacgcagcagaagacagacccatagcagcggcaacaaccagagctaa

SEQ ID NO: 125689 - DNA, 540 bp, Enterobacter cloacae
atgatgaaaggcataatgaaaacggtgttagcgattctgtgtgcgaccagtttaagtactttcgcagccacggataataccccgcaagacgcgttcaacgatattacccgctctcttgcagacctccagcccatcacgtttcaggctcccgctgaaaaatataagctgctggtgtttattgataatcagtgcatttactgcagcaatgtagtgaaaaacgttaagcaatatacggatgccggtttgacgatgtcgtttctgaccgttgcgcccagcgccattcgcgactcggtaattgaagatatggggcgcgtctggtgttcagccgataaggtcaaaagcctgcaacaagcgatggcgggatttttaccgaataacgacaccacgacagcgtgctccgatctgatcgcgcggcaatctgcactggcagaacgtttgggcattagcgtcaccccggtaatggtggttattgagcctgaatcacggtcgattataggcagtcagtctccggcggctattctggccacactgaaaagataa

SEQ ID NO: 125690 - DNA, 591 bp, Enterobacter cloacae
atggttaaatttattttatgctcgatttcagtggctttactagctggctgcgcgatgcaacccgttccttctcagtatagaaatgctacagttacgcttgttgggcacagtaaggcagaagcaatgactgatttagggataccaacacgaacaatgcccgtcaatgggagccagacaatgtatcagtgggacagcaatcaaggtacaacatctgctggtttgtttagcactgataccaatgctgtggtggtcggtagttccacttatcagggatatggtaacggtttctccggaggggcggttggaacatctaacaccactggtaattatgatagtgctacagctactcatatctgtgcattgtcattactaattgataataaaactgataaagtactttcaggtacattcaatggaactgttgatgatgcttgcatgagccatttcagcaatgttattacattagatcctaatgcggttaatgcgaataaagcagcgataatgcataaccaacatgtgaaagaggctaaagcagtagttggtgttttggctattgttggcgcaggtgttgccgcttacaataatcgctga

SEQ ID NO: 125691 - DNA, 456 bp, Enterobacter cloacae
atggctactatcccaaccctgacttatcttccatctgacgaaaacgtcattctgcaacttatctcccgaccgcttccggccgatgccgatctctttgacgtcgccgacaactgcgccgcgctggtgagcgtactggtcgaaaccgatgatgtcgagagccgtactgcgctgtgcgagcgtctccttgaggctctgcgcaggctgcgcgcactctgcgatgccgatcttccgccatacctgattgaacagttgatcatgggtgagaaaaccaactcctgcgtgcccgactgctggcaggacaccttaacgcaggtggactatgttctggcgctgacgcaagccgttatggggggaacgctgcccgctcacgtagtgaaggagctgacaggcctgctgcacgatatggtgtggctgctggctgagtttgtgaaggagccgcgcattactgcgcattaa

SEQ ID NO: 125692 - DNA, 411 bp, Enterobacter cloacae
atgaccccacacccgctacgccagataatcgaatcctgcgatcgcgccatcaccaccaaaaactatgacgcgctgatgaaacactacgccgaagatgcagctctggtggtcaagcccggaatggttgttaaaggcaaagacaacatccgcagcgcgtttgttgccatctcggattatttccaggaccaattgattgtggaacaaggagagatgcaggtgatccaaggcggtgacaatgccctcgttatcatggaaaccgttctgcgttttcctgatggtcagggtggaaaaacggaaatgtcgcgccgcgcgacctatgtttttcggcaggaaagcgacggtcgctggctttgtactatcgacaactcctacggcacgtcgcttctggataccgggaaccgatcgcgttaa

SEQ ID NO: 125693 - DNA, 675 bp, Enterobacter cloacae
atgagagagaaaacaaaggtttttttgctatcgttaggagttgtcgcgactgggctgctgcttctggagttcaagcatgtttttatcgcattttcagttttgttcatctacaacttatataagctatatccagaaagatatatgctgaaaaaaataataaaaagcacagtttctattaagttttataatgttgtgatatggtttatttcatatatattgacgctaaaaatgcttagtgtgatttatggtgtcgatgaggagtatttgaaatattcccctgccgttgttgctatccctatttctgtttgtattctgtacttcttcttggtgcttgtcgccggcatatccagtgcagtaggcatgattactggtaacgttgttggcttcctccccgaacgggcaaaagtttattatgagcaatcaatctttgtcaggtttgttaccatacttcaatctctggtgattgttgtagcaataccgttcttacttgccgctatatcttcaggttatatcgcaaagatagctatcttgtcggatgcgtcatttatatctgattgtggagtaaagcaatggggagtgatgtatctaagaagaaacaacaatgaatgctataggtttactttaaatagaagtgtgtttagtgaacagccagtgattgtgaattcaaaaaaatag

SEQ ID NO: 125694 - DNA, 216 bp, Enterobacter cloacae
gtgcggcaaggaatgaaggaaaagatcatcaggatctgtgatgcaaaaatcgcagctaagggaagcgatgttgggctttcgttttatgctttttttgctaataaaaatgacgatccggaactgcttatggaagtggcgcactggtggattatggagatgaagctggaccattttgaaaaggctgaaaagatcagaaagctcgtttctgcgatgtaa
